United States Patent Application Publication US 2018/0305689 A1 - sequence listing, part 113

SEQ ID NO: 1594262 - RNA, 19 nt, Artificial Sequence
  Description of Artificial Sequence: Synthetic oligonucleotide
  Antisense strand to SEQ ID NO: 1594261
gauagcauccuaauacaga

SEQ ID NO: 1594263 - RNA, 19 nt, Artificial Sequence
  Description of Artificial Sequence: Synthetic oligonucleotide
  Sense strand starting at position 1011 of SEQ ID NO: 1560352
gauggaggucuuggguaua

SEQ ID NO: 1594264 - RNA, 19 nt, Artificial Sequence
  Description of Artificial Sequence: Synthetic oligonucleotide
  Antisense strand to SEQ ID NO: 1594263
uauacccaagaccuccauc

SEQ ID NO: 1594265 - RNA, 19 nt, Artificial Sequence
  Description of Artificial Sequence: Synthetic oligonucleotide
  Sense strand starting at position 1023 of SEQ ID NO: 1560352
ggguauaagccauggaggu

SEQ ID NO: 1594266 - RNA, 19 nt, Artificial Sequence
  Description of Artificial Sequence: Synthetic oligonucleotide
  Antisense strand to SEQ ID NO: 1594265
accuccauggcuuauaccc

SEQ ID NO: 1594267 - RNA, 19 nt, Artificial Sequence
  Description of Artificial Sequence: Synthetic oligonucleotide
  Sense strand starting at position 1789 of SEQ ID NO: 1560352
gccacuuucccagguguca

SEQ ID NO: 1594268 - RNA, 19 nt, Artificial Sequence
  Description of Artificial Sequence: Synthetic oligonucleotide
  Antisense strand to SEQ ID NO: 1594267
ugacaccugggaaaguggc

SEQ ID NO: 1594269 - RNA, 19 nt, Artificial Sequence
  Description of Artificial Sequence: Synthetic oligonucleotide
  Sense strand starting at position 1937 of SEQ ID NO: 1560352
ccaaguuccuguucuauuu

SEQ ID NO: 1594270 - RNA, 19 nt, Artificial Sequence
  Description of Artificial Sequence: Synthetic oligonucleotide
  Antisense strand to SEQ ID NO: 1594269
aaauagaacaggaacuugg

SEQ ID NO: 1594271 - RNA, 19 nt, Artificial Sequence
  Description of Artificial Sequence: Synthetic oligonucleotide
  Sense strand starting at position 1946 of SEQ ID NO: 1560352
uguucuauuuggccucuga

SEQ ID NO: 1594272 - RNA, 19 nt, Artificial Sequence
  Description of Artificial Sequence: Synthetic oligonucleotide
  Antisense strand to SEQ ID NO: 1594271
ucagaggccaaauagaaca

SEQ ID NO: 1594273 - RNA, 19 nt, Artificial Sequence
  Description of Artificial Sequence: Synthetic oligonucleotide
  Sense strand starting at position 2084 of SEQ ID NO: 1560352
ggcucugugccaggaaagu

SEQ ID NO: 1594274 - RNA, 19 nt, Artificial Sequence
  Description of Artificial Sequence: Synthetic oligonucleotide
  Antisense strand to SEQ ID NO: 1594273
acuuuccuggcacagagcc

SEQ ID NO: 1594275 - RNA, 19 nt, Artificial Sequence
  Description of Artificial Sequence: Synthetic oligonucleotide
  Sense strand starting at position 2185 of SEQ ID NO: 1560352
gcuucucuucugggugaaa

SEQ ID NO: 1594276 - RNA, 19 nt, Artificial Sequence
  Description of Artificial Sequence: Synthetic oligonucleotide
  Antisense strand to SEQ ID NO: 1594275
uuucacccagaagagaagc

SEQ ID NO: 1594277 - RNA, 19 nt, Artificial Sequence
  Description of Artificial Sequence: Synthetic oligonucleotide
  Sense strand starting at position 2186 of SEQ ID NO: 1560352
cuucucuucugggugaaag

SEQ ID NO: 1594278 - RNA, 19 nt, Artificial Sequence
  Description of Artificial Sequence: Synthetic oligonucleotide
  Antisense strand to SEQ ID NO: 1594277
cuuucacccagaagagaag

SEQ ID NO: 1594279 - RNA, 19 nt, Artificial Sequence
  Description of Artificial Sequence: Synthetic oligonucleotide
  Sense strand starting at position 2205 of SEQ ID NO: 1560352
gcaguagcuaagggucauu

SEQ ID NO: 1594280 - RNA, 19 nt, Artificial Sequence
  Description of Artificial Sequence: Synthetic oligonucleotide
  Antisense strand to SEQ ID NO: 1594279
aaugacccuuagcuacugc

SEQ ID NO: 1594281 - RNA, 19 nt, Artificial Sequence
  Description of Artificial Sequence: Synthetic oligonucleotide
  Sense strand starting at position 2293 of SEQ ID NO: 1560352
uuggauucucccgaugaug

SEQ ID NO: 1594282 - RNA, 19 nt, Artificial Sequence
  Description of Artificial Sequence: Synthetic oligonucleotide
  Antisense strand to SEQ ID NO: 1594281
caucaucgggagaauccaa

SEQ ID NO: 1594283 - RNA, 19 nt, Artificial Sequence
  Description of Artificial Sequence: Synthetic oligonucleotide
  Sense strand starting at position 2295 of SEQ ID NO: 1560352
ggauucucccgaugaugga

SEQ ID NO: 1594284 - RNA, 19 nt, Artificial Sequence
  Description of Artificial Sequence: Synthetic oligonucleotide
  Antisense strand to SEQ ID NO: 1594283
uccaucaucgggagaaucc

SEQ ID NO: 1594285 - RNA, 19 nt, Artificial Sequence
  Description of Artificial Sequence: Synthetic oligonucleotide
  Sense strand starting at position 2374 of SEQ ID NO: 1560352
gggauuuaaugaugguuag

SEQ ID NO: 1594286 - RNA, 19 nt, Artificial Sequence
  Description of Artificial Sequence: Synthetic oligonucleotide
  Antisense strand to SEQ ID NO: 1594285
cuaaccaucauuaaauccc

SEQ ID NO: 1594287 - RNA, 19 nt, Artificial Sequence
  Description of Artificial Sequence: Synthetic oligonucleotide
  Sense strand starting at position 2531 of SEQ ID NO: 1560352
gagauagcagccugagauc

SEQ ID NO: 1594288 - RNA, 19 nt, Artificial Sequence
  Description of Artificial Sequence: Synthetic oligonucleotide
  Antisense strand to SEQ ID NO: 1594287
gaucucaggcugcuaucuc

SEQ ID NO: 1594289 - RNA, 19 nt, Artificial Sequence
  Description of Artificial Sequence: Synthetic oligonucleotide
  Sense strand starting at position 2604 of SEQ ID NO: 1560352
augagaucuugacaaaugg

SEQ ID NO: 1594290 - RNA, 19 nt, Artificial Sequence
  Description of Artificial Sequence: Synthetic oligonucleotide
  Antisense strand to SEQ ID NO: 1594289
ccauuugucaagaucucau

SEQ ID NO: 1594291 - RNA, 19 nt, Artificial Sequence
  Description of Artificial Sequence: Synthetic oligonucleotide
  Sense strand starting at position 2611 of SEQ ID NO: 1560352
cuugacaaauggcuuaauu

SEQ ID NO: 1594292 - RNA, 19 nt, Artificial Sequence
  Description of Artificial Sequence: Synthetic oligonucleotide
  Antisense strand to SEQ ID NO: 1594291
aauuaagccauuugucaag

SEQ ID NO: 1594293 - RNA, 19 nt, Artificial Sequence
  Description of Artificial Sequence: Synthetic oligonucleotide
  Sense strand starting at position 2620 of SEQ ID NO: 1560352
uggcuuaauuaaccuggaa

SEQ ID NO: 1594294 - RNA, 19 nt, Artificial Sequence
  Description of Artificial Sequence: Synthetic oligonucleotide
  Antisense strand to SEQ ID NO: 1594293
uuccagguuaauuaagcca

SEQ ID NO: 1594295 - RNA, 19 nt, Artificial Sequence
  Description of Artificial Sequence: Synthetic oligonucleotide
  Sense strand starting at position 2690 of SEQ ID NO: 1560352
guuggugaucugugcuaaa

SEQ ID NO: 1594296 - RNA, 19 nt, Artificial Sequence
  Description of Artificial Sequence: Synthetic oligonucleotide
  Antisense strand to SEQ ID NO: 1594295
uuuagcacagaucaccaac

SEQ ID NO: 1594297 - RNA, 19 nt, Artificial Sequence
  Description of Artificial Sequence: Synthetic oligonucleotide
  Sense strand starting at position 2712 of SEQ ID NO: 1560352
aucaccagcguuuauuaua

SEQ ID NO: 1594298 - RNA, 19 nt, Artificial Sequence
  Description of Artificial Sequence: Synthetic oligonucleotide
  Antisense strand to SEQ ID NO: 1594297
uauaauaaacgcuggugau

SEQ ID NO: 1594299 - RNA, 19 nt, Artificial Sequence
  Description of Artificial Sequence: Synthetic oligonucleotide
  Sense strand starting at position 2887 of SEQ ID NO: 1560352
cacagugggucuucggauu

SEQ ID NO: 1594300 - RNA, 19 nt, Artificial Sequence
  Description of Artificial Sequence: Synthetic oligonucleotide
  Antisense strand to SEQ ID NO: 1594299
aauccgaagacccacugug

SEQ ID NO: 1594301 - RNA, 19 nt, Artificial Sequence
  Description of Artificial Sequence: Synthetic oligonucleotide
  Sense strand starting at position 3010 of SEQ ID NO: 1560352
ucuguaaagugcucugacu

SEQ ID NO: 1594302 - RNA, 19 nt, Artificial Sequence
  Description of Artificial Sequence: Synthetic oligonucleotide
  Antisense strand to SEQ ID NO: 1594301
agucagagcacuuuacaga

SEQ ID NO: 1594303 - RNA, 19 nt, Artificial Sequence
  Description of Artificial Sequence: Synthetic oligonucleotide
  Sense strand starting at position 3012 of SEQ ID NO: 1560352
uguaaagugcucugacuuu

SEQ ID NO: 1594304 - RNA, 19 nt, Artificial Sequence
  Description of Artificial Sequence: Synthetic oligonucleotide
  Antisense strand to SEQ ID NO: 1594303
aaagucagagcacuuuaca

SEQ ID NO: 1594305 - RNA, 19 nt, Artificial Sequence
  Description of Artificial Sequence: Synthetic oligonucleotide
  Sense strand starting at position 3633 of SEQ ID NO: 1560352
guccucugacuuuaaagca

SEQ ID NO: 1594306 - RNA, 19 nt, Artificial Sequence
  Description of Artificial Sequence: Synthetic oligonucleotide
  Antisense strand to SEQ ID NO: 1594305
ugcuuuaaagucagaggac

SEQ ID NO: 1594307 - RNA, 19 nt, Artificial Sequence
  Description of Artificial Sequence: Synthetic oligonucleotide
  Sense strand starting at position 3721 of SEQ ID NO: 1560352
gcugcuugacuauagguaa

SEQ ID NO: 1594308 - RNA, 19 nt, Artificial Sequence
  Description of Artificial Sequence: Synthetic oligonucleotide
  Antisense strand to SEQ ID NO: 1594307
uuaccuauagucaagcagc

SEQ ID NO: 1594309 - RNA, 19 nt, Artificial Sequence
  Description of Artificial Sequence: Synthetic oligonucleotide
  Sense strand starting at position 3891 of SEQ ID NO: 1560352
guccgaguccuggcuucuu

SEQ ID NO: 1594310 - RNA, 19 nt, Artificial Sequence
  Description of Artificial Sequence: Synthetic oligonucleotide
  Antisense strand to SEQ ID NO: 1594309
aagaagccaggacucggac

SEQ ID NO: 1594311 - RNA, 19 nt, Artificial Sequence
  Description of Artificial Sequence: Synthetic oligonucleotide
  Sense strand starting at position 23 of SEQ ID NO: 1560353
guuggugaucugugcuaaa

SEQ ID NO: 1594312 - RNA, 19 nt, Artificial Sequence
  Description of Artificial Sequence: Synthetic oligonucleotide
  Antisense strand to SEQ ID NO: 1594311
uuuagcacagaucaccaac

SEQ ID NO: 1594313 - RNA, 19 nt, Artificial Sequence
  Description of Artificial Sequence: Synthetic oligonucleotide
  Sense strand starting at position 45 of SEQ ID NO: 1560353
aucaccagcguuuauuaua

SEQ ID NO: 1594314 - RNA, 19 nt, Artificial Sequence
  Description of Artificial Sequence: Synthetic oligonucleotide
  Antisense strand to SEQ ID NO: 1594313
uauaauaaacgcuggugau

SEQ ID NO: 1594315 - RNA, 19 nt, Artificial Sequence
  Description of Artificial Sequence: Synthetic oligonucleotide
  Sense strand starting at position 59 of SEQ ID NO: 1560353
uuauaauugccuugccugu

SEQ ID NO: 1594316 - RNA, 19 nt, Artificial Sequence
  Description of Artificial Sequence: Synthetic oligonucleotide
  Antisense strand to SEQ ID NO: 1594315
acaggcaaggcaauuauaa

SEQ ID NO: 1594317 - RNA, 19 nt, Artificial Sequence
  Description of Artificial Sequence: Synthetic oligonucleotide
  Sense strand starting at position 220 of SEQ ID NO: 1560353
cacagugggucuucggauu

SEQ ID NO: 1594318 - RNA, 19 nt, Artificial Sequence
  Description of Artificial Sequence: Synthetic oligonucleotide
  Antisense strand to SEQ ID NO: 1594317
aauccgaagacccacugug

SEQ ID NO: 1594319 - RNA, 19 nt, Artificial Sequence
  Description of Artificial Sequence: Synthetic oligonucleotide
  Sense strand starting at position 343 of SEQ ID NO: 1560353
ucuguaaagugcucugacu

SEQ ID NO: 1594320 - RNA, 19 nt, Artificial Sequence
  Description of Artificial Sequence: Synthetic oligonucleotide
  Antisense strand to SEQ ID NO: 1594319
agucagagcacuuuacaga

SEQ ID NO: 1594321 - RNA, 19 nt, Artificial Sequence
  Description of Artificial Sequence: Synthetic oligonucleotide
  Sense strand starting at position 345 of SEQ ID NO: 1560353
uguaaagugcucugacuuu

SEQ ID NO: 1594322 - RNA, 19 nt, Artificial Sequence
  Description of Artificial Sequence: Synthetic oligonucleotide
  Antisense strand to SEQ ID NO: 1594321
aaagucagagcacuuuaca

SEQ ID NO: 1594323 - RNA, 19 nt, Artificial Sequence
  Description of Artificial Sequence: Synthetic oligonucleotide
  Sense strand starting at position 966 of SEQ ID NO: 1560353
guccucugacuuuaaagca

SEQ ID NO: 1594324 - RNA, 19 nt, Artificial Sequence
  Description of Artificial Sequence: Synthetic oligonucleotide
  Antisense strand to SEQ ID NO: 1594323
ugcuuuaaagucagaggac

SEQ ID NO: 1594325 - RNA, 19 nt, Artificial Sequence
  Description of Artificial Sequence: Synthetic oligonucleotide
  Sense strand starting at position 1054 of SEQ ID NO: 1560353
gcugcuugacuauagguaa

SEQ ID NO: 1594326 - RNA, 19 nt, Artificial Sequence
  Description of Artificial Sequence: Synthetic oligonucleotide
  Antisense strand to SEQ ID NO: 1594325
uuaccuauagucaagcagc

SEQ ID NO: 1594327 - RNA, 19 nt, Artificial Sequence
  Description of Artificial Sequence: Synthetic oligonucleotide
  Sense strand starting at position 1224 of SEQ ID NO: 1560353
guccgaguccuggcuucuu

SEQ ID NO: 1594328 - RNA, 19 nt, Artificial Sequence
  Description of Artificial Sequence: Synthetic oligonucleotide
  Antisense strand to SEQ ID NO: 1594327
aagaagccaggacucggac

SEQ ID NO: 1594329 - RNA, 19 nt, Artificial Sequence
  Description of Artificial Sequence: Synthetic oligonucleotide
  Sense strand starting at position 1269 of SEQ ID NO: 1560353
ucuguaaauugggaguauu

SEQ ID NO: 1594330 - RNA, 19 nt, Artificial Sequence
  Description of Artificial Sequence: Synthetic oligonucleotide
  Antisense strand to SEQ ID NO: 1594329
aauacucccaauuuacaga

SEQ ID NO: 1594331 - RNA, 19 nt, Artificial Sequence
  Description of Artificial Sequence: Synthetic oligonucleotide
  Sense strand starting at position 1482 of SEQ ID NO: 1560353
gagacauaaucucauggug

SEQ ID NO: 1594332 - RNA, 19 nt, Artificial Sequence
  Description of Artificial Sequence: Synthetic oligonucleotide
  Antisense strand to SEQ ID NO: 1594331
caccaugagauuaugucuc

SEQ ID NO: 1594333 - RNA, 19 nt, Artificial Sequence
  Description of Artificial Sequence: Synthetic oligonucleotide
  Sense strand starting at position 1682 of SEQ ID NO: 1560353
acucgaaugccucgagauu

SEQ ID NO: 1594334 - RNA, 19 nt, Artificial Sequence
  Description of Artificial Sequence: Synthetic oligonucleotide
  Antisense strand to SEQ ID NO: 1594333
aaucucgaggcauucgagu

SEQ ID NO: 1594335 - RNA, 19 nt, Artificial Sequence
  Description of Artificial Sequence: Synthetic oligonucleotide
  Sense strand starting at position 1683 of SEQ ID NO: 1560353
cucgaaugccucgagauuc

SEQ ID NO: 1594336 - RNA, 19 nt, Artificial Sequence
  Description of Artificial Sequence: Synthetic oligonucleotide
  Antisense strand to SEQ ID NO: 1594335
gaaucucgaggcauucgag

SEQ ID NO: 1594337 - RNA, 19 nt, Artificial Sequence
  Description of Artificial Sequence: Synthetic oligonucleotide
  Sense strand starting at position 1691 of SEQ ID NO: 1560353
ccucgagauucuguccaca

SEQ ID NO: 1594338 - RNA, 19 nt, Artificial Sequence
  Description of Artificial Sequence: Synthetic oligonucleotide
  Antisense strand to SEQ ID NO: 1594337
uguggacagaaucucgagg

SEQ ID NO: 1594339 - RNA, 19 nt, Artificial Sequence
  Description of Artificial Sequence: Synthetic oligonucleotide
  Sense strand starting at position 1693 of SEQ ID NO: 1560353
ucgagauucuguccacacu

SEQ ID NO: 1594340 - RNA, 19 nt, Artificial Sequence
  Description of Artificial Sequence: Synthetic oligonucleotide
  Antisense strand to SEQ ID NO: 1594339
aguguggacagaaucucga

SEQ ID NO: 1594341 - RNA, 19 nt, Artificial Sequence
  Description of Artificial Sequence: Synthetic oligonucleotide
  Sense strand starting at position 1857 of SEQ ID NO: 1560353
ccagauacguacucacuua

SEQ ID NO: 1594342 - RNA, 19 nt, Artificial Sequence
  Description of Artificial Sequence: Synthetic oligonucleotide
  Antisense strand to SEQ ID NO: 1594341
uaagugaguacguaucugg

SEQ ID NO: 1594343 - RNA, 19 nt, Artificial Sequence
  Description of Artificial Sequence: Synthetic oligonucleotide
  Sense strand starting at position 1943 of SEQ ID NO: 1560353
gucagagacagagguuuaa

SEQ ID NO: 1594344 - RNA, 19 nt, Artificial Sequence
  Description of Artificial Sequence: Synthetic oligonucleotide
  Antisense strand to SEQ ID NO: 1594343
uuaaaccucugucucugac

SEQ ID NO: 1594345 - RNA, 19 nt, Artificial Sequence
  Description of Artificial Sequence: Synthetic oligonucleotide
  Sense strand starting at position 1969 of SEQ ID NO: 1560353
gagagacacuuucuucuga

SEQ ID NO: 1594346 - RNA, 19 nt, Artificial Sequence
  Description of Artificial Sequence: Synthetic oligonucleotide
  Antisense strand to SEQ ID NO: 1594345
ucagaagaaagugucucuc

SEQ ID NO: 1594347 - RNA, 19 nt, Artificial Sequence
  Description of Artificial Sequence: Synthetic oligonucleotide
  Sense strand starting at position 2031 of SEQ ID NO: 1560353
gggcuugccacccggauaa

SEQ ID NO: 1594348 - RNA, 19 nt, Artificial Sequence
  Description of Artificial Sequence: Synthetic oligonucleotide
  Antisense strand to SEQ ID NO: 1594347
uuauccggguggcaagccc

SEQ ID NO: 1594349 - RNA, 19 nt, Artificial Sequence
  Description of Artificial Sequence: Synthetic oligonucleotide
  Sense strand starting at position 2086 of SEQ ID NO: 1560353
ccgggugaaguccguguua

SEQ ID NO: 1594350 - RNA, 19 nt, Artificial Sequence
  Description of Artificial Sequence: Synthetic oligonucleotide
  Antisense strand to SEQ ID NO: 1594349
uaacacggacuucacccgg

SEQ ID NO: 1594351 - RNA, 19 nt, Artificial Sequence
  Description of Artificial Sequence: Synthetic oligonucleotide
  Sense strand starting at position 2087 of SEQ ID NO: 1560353
cgggugaaguccguguuau

SEQ ID NO: 1594352 - RNA, 19 nt, Artificial Sequence
  Description of Artificial Sequence: Synthetic oligonucleotide
  Antisense strand to SEQ ID NO: 1594351
auaacacggacuucacccg

SEQ ID NO: 1594353 - RNA, 19 nt, Artificial Sequence
  Description of Artificial Sequence: Synthetic oligonucleotide
  Sense strand starting at position 2088 of SEQ ID NO: 1560353
gggugaaguccguguuauu

SEQ ID NO: 1594354 - RNA, 19 nt, Artificial Sequence
  Description of Artificial Sequence: Synthetic oligonucleotide
  Antisense strand to SEQ ID NO: 1594353
aauaacacggacuucaccc

SEQ ID NO: 1594355 - RNA, 19 nt, Artificial Sequence
  Description of Artificial Sequence: Synthetic oligonucleotide
  Sense strand starting at position 2093 of SEQ ID NO: 1560353
aaguccguguuauuauuau

SEQ ID NO: 1594356 - RNA, 19 nt, Artificial Sequence
  Description of Artificial Sequence: Synthetic oligonucleotide
  Antisense strand to SEQ ID NO: 1594355
auaauaauaacacggacuu

SEQ ID NO: 1594357 - RNA, 19 nt, Artificial Sequence
  Description of Artificial Sequence: Synthetic oligonucleotide
  Sense strand starting at position 2112 of SEQ ID NO: 1560353
cuccauuucucagguaaga

SEQ ID NO: 1594358 - RNA, 19 nt, Artificial Sequence
  Description of Artificial Sequence: Synthetic oligonucleotide
  Antisense strand to SEQ ID NO: 1594357
ucuuaccugagaaauggag

SEQ ID NO: 1594359 - RNA, 19 nt, Artificial Sequence
  Description of Artificial Sequence: Synthetic oligonucleotide
  Sense strand starting at position 2117 of SEQ ID NO: 1560353
uuucucagguaagagaauu

SEQ ID NO: 1594360 - RNA, 19 nt, Artificial Sequence
  Description of Artificial Sequence: Synthetic oligonucleotide
  Antisense strand to SEQ ID NO: 1594359
aauucucuuaccugagaaa

SEQ ID NO: 1594361 - RNA, 19 nt, Artificial Sequence
  Description of Artificial Sequence: Synthetic oligonucleotide
  Sense strand starting at position 2125 of SEQ ID NO: 1560353
guaagagaauugggugaga

SEQ ID NO: 1594362 - RNA, 19 nt, Artificial Sequence
  Description of Artificial Sequence: Synthetic oligonucleotide
  Antisense strand to SEQ ID NO: 1594361
ucucacccaauucucuuac

SEQ ID NO: 1594363 - RNA, 19 nt, Artificial Sequence
  Description of Artificial Sequence: Synthetic oligonucleotide
  Sense strand starting at position 2146 of SEQ ID NO: 1560353
uagagauguuaagcagcaa

SEQ ID NO: 1594364 - RNA, 19 nt, Artificial Sequence
  Description of Artificial Sequence: Synthetic oligonucleotide
  Antisense strand to SEQ ID NO: 1594363
uugcugcuuaacaucucua

SEQ ID NO: 1594365 - RNA, 19 nt, Artificial Sequence
  Description of Artificial Sequence: Synthetic oligonucleotide
  Sense strand starting at position 2189 of SEQ ID NO: 1560353
agugguagcgucaagaugu

SEQ ID NO: 1594366 - RNA, 19 nt, Artificial Sequence
  Description of Artificial Sequence: Synthetic oligonucleotide
  Antisense strand to SEQ ID NO: 1594365
acaucuugacgcuaccacu

SEQ ID NO: 1594367 - RNA, 19 nt, Artificial Sequence
  Description of Artificial Sequence: Synthetic oligonucleotide
  Sense strand starting at position 2294 of SEQ ID NO: 1560353
agggccucuuggguuagaa

SEQ ID NO: 1594368 - RNA, 19 nt, Artificial Sequence
  Description of Artificial Sequence: Synthetic oligonucleotide
  Antisense strand to SEQ ID NO: 1594367
uucuaacccaagaggcccu

SEQ ID NO: 1594369 - RNA, 19 nt, Artificial Sequence
  Description of Artificial Sequence: Synthetic oligonucleotide
  Sense strand starting at position 2366 of SEQ ID NO: 1560353
ccaugagauuaugucucuu

SEQ ID NO: 1594370 - RNA, 19 nt, Artificial Sequence
  Description of Artificial Sequence: Synthetic oligonucleotide
  Antisense strand to SEQ ID NO: 1594369
aagagacauaaucucaugg

SEQ ID NO: 1594371 - RNA, 19 nt, Artificial Sequence
  Description of Artificial Sequence: Synthetic oligonucleotide
  Sense strand starting at position 2368 of SEQ ID NO: 1560353
augagauuaugucucuuga

SEQ ID NO: 1594372 - RNA, 19 nt, Artificial Sequence
  Description of Artificial Sequence: Synthetic oligonucleotide
  Antisense strand to SEQ ID NO: 1594371
ucaagagacauaaucucau

SEQ ID NO: 1594373 - RNA, 19 nt, Artificial Sequence
  Description of Artificial Sequence: Synthetic oligonucleotide
  Sense strand starting at position 2370 of SEQ ID NO: 1560353
gagauuaugucucuugaug

SEQ ID NO: 1594374 - RNA, 19 nt, Artificial Sequence
  Description of Artificial Sequence: Synthetic oligonucleotide
  Antisense strand to SEQ ID NO: 1594373
caucaagagacauaaucuc

SEQ ID NO: 1594375 - RNA, 19 nt, Artificial Sequence
  Description of Artificial Sequence: Synthetic oligonucleotide
  Sense strand starting at position 2378 of SEQ ID NO: 1560353
gucucuugaugauugagca

SEQ ID NO: 1594376 - RNA, 19 nt, Artificial Sequence
  Description of Artificial Sequence: Synthetic oligonucleotide
  Antisense strand to SEQ ID NO: 1594375
ugcucaaucaucaagagac

SEQ ID NO: 1594377 - RNA, 19 nt, Artificial Sequence
  Description of Artificial Sequence: Synthetic oligonucleotide
  Sense strand starting at position 2379 of SEQ ID NO: 1560353
ucucuugaugauugagcaa

SEQ ID NO: 1594378 - RNA, 19 nt, Artificial Sequence
  Description of Artificial Sequence: Synthetic oligonucleotide
  Antisense strand to SEQ ID NO: 1594377
uugcucaaucaucaagaga

SEQ ID NO: 1594379 - RNA, 19 nt, Artificial Sequence
  Description of Artificial Sequence: Synthetic oligonucleotide
  Sense strand starting at position 2382 of SEQ ID NO: 1560353
cuugaugauugagcaaaua

SEQ ID NO: 1594380 - RNA, 19 nt, Artificial Sequence
  Description of Artificial Sequence: Synthetic oligonucleotide
  Antisense strand to SEQ ID NO: 1594379
uauuugcucaaucaucaag

SEQ ID NO: 1594381 - RNA, 19 nt, Artificial Sequence
  Description of Artificial Sequence: Synthetic oligonucleotide
  Sense strand starting at position 2411 of SEQ ID NO: 1560353
ucaaaugucccagguuuga

SEQ ID NO: 1594382 - RNA, 19 nt, Artificial Sequence
  Description of Artificial Sequence: Synthetic oligonucleotide
  Antisense strand to SEQ ID NO: 1594381
ucaaaccugggacauuuga

SEQ ID NO: 1594383 - RNA, 19 nt, Artificial Sequence
  Description of Artificial Sequence: Synthetic oligonucleotide
  Sense strand starting at position 2545 of SEQ ID NO: 1560353
aaagauacgugagauaaua

SEQ ID NO: 1594384 - RNA, 19 nt, Artificial Sequence
  Description of Artificial Sequence: Synthetic oligonucleotide
  Antisense strand to SEQ ID NO: 1594383
uauuaucucacguaucuuu

SEQ ID NO: 1594385 - RNA, 19 nt, Artificial Sequence
  Description of Artificial Sequence: Synthetic oligonucleotide
  Sense strand starting at position 2816 of SEQ ID NO: 1560353
gcaacacagugagaugaaa

SEQ ID NO: 1594386 - RNA, 19 nt, Artificial Sequence
  Description of Artificial Sequence: Synthetic oligonucleotide
  Antisense strand to SEQ ID NO: 1594385
uuucaucucacuguguugc

SEQ ID NO: 1594387 - RNA, 19 nt, Artificial Sequence
  Description of Artificial Sequence: Synthetic oligonucleotide
  Sense strand starting at position 3278 of SEQ ID NO: 1560353
uggacuuauucccaagcuu

SEQ ID NO: 1594388 - RNA, 19 nt, Artificial Sequence
  Description of Artificial Sequence: Synthetic oligonucleotide
  Antisense strand to SEQ ID NO: 1594387
aagcuugggaauaagucca

SEQ ID NO: 1594389 - RNA, 19 nt, Artificial Sequence
  Description of Artificial Sequence: Synthetic oligonucleotide
  Sense strand starting at position 3533 of SEQ ID NO: 1560353
uugccuugucccugggacu

SEQ ID NO: 1594390 - RNA, 19 nt, Artificial Sequence
  Description of Artificial Sequence: Synthetic oligonucleotide
  Antisense strand to SEQ ID NO: 1594389
agucccagggacaaggcaa

SEQ ID NO: 1594391 - RNA, 19 nt, Artificial Sequence
  Description of Artificial Sequence: Synthetic oligonucleotide
  Sense strand starting at position 513 of SEQ ID NO: 1560354
gaauguggcuaucugaauu

SEQ ID NO: 1594392 - RNA, 19 nt, Artificial Sequence
  Description of Artificial Sequence: Synthetic oligonucleotide
  Antisense strand to SEQ ID NO: 1594391
aauucagauagccacauuc

SEQ ID NO: 1594393 - RNA, 19 nt, Artificial Sequence
  Description of Artificial Sequence: Synthetic oligonucleotide
  Sense strand starting at position 599 of SEQ ID NO: 1560354
gccaguguaugauuuccau

SEQ ID NO: 1594394 - RNA, 19 nt, Artificial Sequence
  Description of Artificial Sequence: Synthetic oligonucleotide
  Antisense strand to SEQ ID NO: 1594393
auggaaaucauacacuggc

SEQ ID NO: 1594395 - RNA, 19 nt, Artificial Sequence
  Description of Artificial Sequence: Synthetic oligonucleotide
  Sense strand starting at position 603 of SEQ ID NO: 1560354
guguaugauuuccaucuuu

SEQ ID NO: 1594396 - RNA, 19 nt, Artificial Sequence
  Description of Artificial Sequence: Synthetic oligonucleotide
  Antisense strand to SEQ ID NO: 1594395
aaagauggaaaucauacac

SEQ ID NO: 1594397 - RNA, 19 nt, Artificial Sequence
  Description of Artificial Sequence: Synthetic oligonucleotide
  Sense strand starting at position 980 of SEQ ID NO: 1560354
ucgggaguucaugagcaga

SEQ ID NO: 1594398 - RNA, 19 nt, Artificial Sequence
  Description of Artificial Sequence: Synthetic oligonucleotide
  Antisense strand to SEQ ID NO: 1594397
ucugcucaugaacucccga

SEQ ID NO: 1594399 - RNA, 19 nt, Artificial Sequence
  Description of Artificial Sequence: Synthetic oligonucleotide
  Sense strand starting at position 982 of SEQ ID NO: 1560354
gggaguucaugagcagacu

SEQ ID NO: 1594400 - RNA, 19 nt, Artificial Sequence
  Description of Artificial Sequence: Synthetic oligonucleotide
  Antisense strand to SEQ ID NO: 1594399
agucugcucaugaacuccc

SEQ ID NO: 1594401 - RNA, 19 nt, Artificial Sequence
  Description of Artificial Sequence: Synthetic oligonucleotide
  Sense strand starting at position 1289 of SEQ ID NO: 1560354
gugaaugaauugucuccua

SEQ ID NO: 1594402 - RNA, 19 nt, Artificial Sequence
  Description of Artificial Sequence: Synthetic oligonucleotide
  Antisense strand to SEQ ID NO: 1594401
uaggagacaauucauucac

SEQ ID NO: 1594403 - RNA, 19 nt, Artificial Sequence
  Description of Artificial Sequence: Synthetic oligonucleotide
  Sense strand starting at position 1294 of SEQ ID NO: 1560354
ugaauugucuccuagaaau

SEQ ID NO: 1594404 - RNA, 19 nt, Artificial Sequence
  Description of Artificial Sequence: Synthetic oligonucleotide
  Antisense strand to SEQ ID NO: 1594403
auuucuaggagacaauuca

SEQ ID NO: 1594405 - RNA, 19 nt, Artificial Sequence
  Description of Artificial Sequence: Synthetic oligonucleotide
  Sense strand starting at position 1304 of SEQ ID NO: 1560354
ccuagaaauagauggcagu

SEQ ID NO: 1594406 - RNA, 19 nt, Artificial Sequence
  Description of Artificial Sequence: Synthetic oligonucleotide
  Antisense strand to SEQ ID NO: 1594405
acugccaucuauuucuagg

SEQ ID NO: 1594407 - RNA, 19 nt, Artificial Sequence
  Description of Artificial Sequence: Synthetic oligonucleotide
  Sense strand starting at position 1522 of SEQ ID NO: 1560354
acgagaggguccucauauc

SEQ ID NO: 1594408 - RNA, 19 nt, Artificial Sequence
  Description of Artificial Sequence: Synthetic oligonucleotide
  Antisense strand to SEQ ID NO: 1594407
gauaugaggacccucucgu

SEQ ID NO: 1594409 - RNA, 19 nt, Artificial Sequence
  Description of Artificial Sequence: Synthetic oligonucleotide
  Sense strand starting at position 1551 of SEQ ID NO: 1560354
cccaguacuuuggcuuuau

SEQ ID NO: 1594410 - RNA, 19 nt, Artificial Sequence
  Description of Artificial Sequence: Synthetic oligonucleotide
  Antisense strand to SEQ ID NO: 1594409
auaaagccaaaguacuggg

SEQ ID NO: 1594411 - RNA, 19 nt, Artificial Sequence
  Description of Artificial Sequence: Synthetic oligonucleotide
  Sense strand starting at position 1555 of SEQ ID NO: 1560354
guacuuuggcuuuauccaa

SEQ ID NO: 1594412 - RNA, 19 nt, Artificial Sequence
  Description of Artificial Sequence: Synthetic oligonucleotide
  Antisense strand to SEQ ID NO: 1594411
uuggauaaagccaaaguac

SEQ ID NO: 1594413 - RNA, 19 nt, Artificial Sequence
  Description of Artificial Sequence: Synthetic oligonucleotide
  Sense strand starting at position 1588 of SEQ ID NO: 1560354
acacaucccugggagaagu

SEQ ID NO: 1594414 - RNA, 19 nt, Artificial Sequence
  Description of Artificial Sequence: Synthetic oligonucleotide
  Antisense strand to SEQ ID NO: 1594413
acuucucccagggaugugu

SEQ ID NO: 1594415 - RNA, 19 nt, Artificial Sequence
  Description of Artificial Sequence: Synthetic oligonucleotide
  Sense strand starting at position 1623 of SEQ ID NO: 1560354
aagaaugacuuucgugaaa

SEQ ID NO: 1594416 - RNA, 19 nt, Artificial Sequence
  Description of Artificial Sequence: Synthetic oligonucleotide
  Antisense strand to SEQ ID NO: 1594415
uuucacgaaagucauucuu

SEQ ID NO: 1594417 - RNA, 19 nt, Artificial Sequence
  Description of Artificial Sequence: Synthetic oligonucleotide
  Sense strand starting at position 1660 of SEQ ID NO: 1560354
gaaugaggcucagagucaa

SEQ ID NO: 1594418 - RNA, 19 nt, Artificial Sequence
  Description of Artificial Sequence: Synthetic oligonucleotide
  Antisense strand to SEQ ID NO: 1594417
uugacucugagccucauuc

SEQ ID NO: 1594419 - RNA, 19 nt, Artificial Sequence
  Description of Artificial Sequence: Synthetic oligonucleotide
  Sense strand starting at position 1702 of SEQ ID NO: 1560354
ccaagaaaguucuugcaca

SEQ ID NO: 1594420 - RNA, 19 nt, Artificial Sequence
  Description of Artificial Sequence: Synthetic oligonucleotide
  Antisense strand to SEQ ID NO: 1594419
ugugcaagaacuuucuugg

SEQ ID NO: 1594421 - RNA, 19 nt, Artificial Sequence
  Description of Artificial Sequence: Synthetic oligonucleotide
  Sense strand starting at position 1768 of SEQ ID NO: 1560354
gggugagaauuggugaauu

SEQ ID NO: 1594422 - RNA, 19 nt, Artificial Sequence
  Description of Artificial Sequence: Synthetic oligonucleotide
  Antisense strand to SEQ ID NO: 1594421
aauucaccaauucucaccc

SEQ ID NO: 1594423 - RNA, 19 nt, Artificial Sequence
  Description of Artificial Sequence: Synthetic oligonucleotide
  Sense strand starting at position 1770 of SEQ ID NO: 1560354
gugagaauuggugaauucu

SEQ ID NO: 1594424 - RNA, 19 nt, Artificial Sequence
  Description of Artificial Sequence: Synthetic oligonucleotide
  Antisense strand to SEQ ID NO: 1594423
agaauucaccaauucucac

SEQ ID NO: 1594425 - RNA, 19 nt, Artificial Sequence
  Description of Artificial Sequence: Synthetic oligonucleotide
  Sense strand starting at position 1776 of SEQ ID NO: 1560354
auuggugaauucuaccaca

SEQ ID NO: 1594426 - RNA, 19 nt, Artificial Sequence
  Description of Artificial Sequence: Synthetic oligonucleotide
  Antisense strand to SEQ ID NO: 1594425
ugugguagaauucaccaau

SEQ ID NO: 1594427 - RNA, 19 nt, Artificial Sequence
  Description of Artificial Sequence: Synthetic oligonucleotide
  Sense strand starting at position 1918 of SEQ ID NO: 1560354
agggucuuggucugacuua

SEQ ID NO: 1594428 - RNA, 19 nt, Artificial Sequence
  Description of Artificial Sequence: Synthetic oligonucleotide
  Antisense strand to SEQ ID NO: 1594427
uaagucagaccaagacccu

SEQ ID NO: 1594429 - RNA, 19 nt, Artificial Sequence
  Description of Artificial Sequence: Synthetic oligonucleotide
  Sense strand starting at position 2241 of SEQ ID NO: 1560354
uggagaguuggcugucuug

SEQ ID NO: 1594430 - RNA, 19 nt, Artificial Sequence
  Description of Artificial Sequence: Synthetic oligonucleotide
  Antisense strand to SEQ ID NO: 1594429
caagacagccaacucucca

SEQ ID NO: 1594431 - RNA, 19 nt, Artificial Sequence
  Description of Artificial Sequence: Synthetic oligonucleotide
  Sense strand starting at position 2391 of SEQ ID NO: 1560354
gggcuauauaguggaguuu

SEQ ID NO: 1594432 - RNA, 19 nt, Artificial Sequence
  Description of Artificial Sequence: Synthetic oligonucleotide
  Antisense strand to SEQ ID NO: 1594431
aaacuccacuauauagccc

SEQ ID NO: 1594433 - RNA, 19 nt, Artificial Sequence
  Description of Artificial Sequence: Synthetic oligonucleotide
  Sense strand starting at position 2582 of SEQ ID NO: 1560354
ggaagccuucuggagaguu

SEQ ID NO: 1594434 - RNA, 19 nt, Artificial Sequence
  Description of Artificial Sequence: Synthetic oligonucleotide
  Antisense strand to SEQ ID NO: 1594433
aacucuccagaaggcuucc

SEQ ID NO: 1594435 - RNA, 19 nt, Artificial Sequence
  Description of Artificial Sequence: Synthetic oligonucleotide
  Sense strand starting at position 2592 of SEQ ID NO: 1560354
uggagaguuugguccugga

SEQ ID NO: 1594436 - RNA, 19 nt, Artificial Sequence
  Description of Artificial Sequence: Synthetic oligonucleotide
  Antisense strand to SEQ ID NO: 1594435
uccaggaccaaacucucca

SEQ ID NO: 1594437 - RNA, 19 nt, Artificial Sequence
  Description of Artificial Sequence: Synthetic oligonucleotide
  Sense strand starting at position 2714 of SEQ ID NO: 1560354
gguggcauguggucauauu

SEQ ID NO: 1594438 - RNA, 19 nt, Artificial Sequence
  Description of Artificial Sequence: Synthetic oligonucleotide
  Antisense strand to SEQ ID NO: 1594437
aauaugaccacaugccacc

SEQ ID NO: 1594439 - RNA, 19 nt, Artificial Sequence
  Description of Artificial Sequence: Synthetic oligonucleotide
  Sense strand starting at position 2725 of SEQ ID NO: 1560354
gucauauuugcuggcuuag

SEQ ID NO: 1594440 - RNA, 19 nt, Artificial Sequence
  Description of Artificial Sequence: Synthetic oligonucleotide
  Antisense strand to SEQ ID NO: 1594439
cuaagccagcaaauaugac

SEQ ID NO: 1594441 - RNA, 19 nt, Artificial Sequence
  Description of Artificial Sequence: Synthetic oligonucleotide
  Sense strand starting at position 2955 of SEQ ID NO: 1560354
ugcgguuucucaucugcaa

SEQ ID NO: 1594442 - RNA, 19 nt, Artificial Sequence
  Description of Artificial Sequence: Synthetic oligonucleotide
  Antisense strand to SEQ ID NO: 1594441
uugcagaugagaaaccgca

SEQ ID NO: 1594443 - RNA, 19 nt, Artificial Sequence
  Description of Artificial Sequence: Synthetic oligonucleotide
  Sense strand starting at position 3007 of SEQ ID NO: 1560354
cuuuacgucccagagaugu

SEQ ID NO: 1594444 - RNA, 19 nt, Artificial Sequence
  Description of Artificial Sequence: Synthetic oligonucleotide
  Antisense strand to SEQ ID NO: 1594443
acaucucugggacguaaag

SEQ ID NO: 1594445 - RNA, 19 nt, Artificial Sequence
  Description of Artificial Sequence: Synthetic oligonucleotide
  Sense strand starting at position 3009 of SEQ ID NO: 1560354
uuacgucccagagauguaa

SEQ ID NO: 1594446 - RNA, 19 nt, Artificial Sequence
  Description of Artificial Sequence: Synthetic oligonucleotide
  Antisense strand to SEQ ID NO: 1594445
uuacaucucugggacguaa

SEQ ID NO: 1594447 - RNA, 19 nt, Artificial Sequence
  Description of Artificial Sequence: Synthetic oligonucleotide
  Sense strand starting at position 3140 of SEQ ID NO: 1560354
ucuguuuccugguuccaca

SEQ ID NO: 1594448 - RNA, 19 nt, Artificial Sequence
  Description of Artificial Sequence: Synthetic oligonucleotide
  Antisense strand to SEQ ID NO: 1594447
uguggaaccaggaaacaga

SEQ ID NO: 1594449 - RNA, 19 nt, Artificial Sequence
  Description of Artificial Sequence: Synthetic oligonucleotide
  Sense strand starting at position 3199 of SEQ ID NO: 1560354
cucaguggugcuggaaaca

SEQ ID NO: 1594450 - RNA, 19 nt, Artificial Sequence
  Description of Artificial Sequence: Synthetic oligonucleotide
  Antisense strand to SEQ ID NO: 1594449
uguuuccagcaccacugag

SEQ ID NO: 1594451 - RNA, 19 nt, Artificial Sequence
  Description of Artificial Sequence: Synthetic oligonucleotide
  Sense strand starting at position 3244 of SEQ ID NO: 1560354
gccugugaggacugaggaa

SEQ ID NO: 1594452 - RNA, 19 nt, Artificial Sequence
  Description of Artificial Sequence: Synthetic oligonucleotide
  Antisense strand to SEQ ID NO: 1594451
uuccucaguccucacaggc

SEQ ID NO: 1594453 - RNA, 19 nt, Artificial Sequence
  Description of Artificial Sequence: Synthetic oligonucleotide
  Sense strand starting at position 3300 of SEQ ID NO: 1560354
uagggaggguuugcucuua

SEQ ID NO: 1594454 - RNA, 19 nt, Artificial Sequence
  Description of Artificial Sequence: Synthetic oligonucleotide
  Antisense strand to SEQ ID NO: 1594453
uaagagcaaacccucccua

SEQ ID NO: 1594455 - RNA, 19 nt, Artificial Sequence
  Description of Artificial Sequence: Synthetic oligonucleotide
  Sense strand starting at position 3371 of SEQ ID NO: 1560354
gaauuugccugagauggga

SEQ ID NO: 1594456 - RNA, 19 nt, Artificial Sequence
  Description of Artificial Sequence: Synthetic oligonucleotide
  Antisense strand to SEQ ID NO: 1594455
ucccaucucaggcaaauuc

SEQ ID NO: 1594457 - RNA, 19 nt, Artificial Sequence
  Description of Artificial Sequence: Synthetic oligonucleotide
  Sense strand starting at position 3417 of SEQ ID NO: 1560354
gcagaagaaugagcugaaa

SEQ ID NO: 1594458 - RNA, 19 nt, Artificial Sequence
  Description of Artificial Sequence: Synthetic oligonucleotide
  Antisense strand to SEQ ID NO: 1594457
uuucagcucauucuucugc

SEQ ID NO: 1594459 - RNA, 19 nt, Artificial Sequence
  Description of Artificial Sequence: Synthetic oligonucleotide
  Sense strand starting at position 3441 of SEQ ID NO: 1560354
gcuuucucagcuggaguca

SEQ ID NO: 1594460 - RNA, 19 nt, Artificial Sequence
  Description of Artificial Sequence: Synthetic oligonucleotide
  Antisense strand to SEQ ID NO: 1594459
ugacuccagcugagaaagc

SEQ ID NO: 1594461 - RNA, 19 nt, Artificial Sequence
  Description of Artificial Sequence: Synthetic oligonucleotide
  Sense strand starting at position 3508 of SEQ ID NO: 1560354
gacucaggaucucauuguu

SEQ ID NO: 1594462 - RNA, 19 nt, Artificial Sequence
  Description of Artificial Sequence: Synthetic oligonucleotide
  Antisense strand to SEQ ID NO: 1594461
aacaaugagauccugaguc

SEQ ID NO: 1594463 - RNA, 19 nt, Artificial Sequence
  Description of Artificial Sequence: Synthetic oligonucleotide
  Sense strand starting at position 3568 of SEQ ID NO: 1560354
gggugcucucuuggaccaa

SEQ ID NO: 1594464 - RNA, 19 nt, Artificial Sequence
  Description of Artificial Sequence: Synthetic oligonucleotide
  Antisense strand to SEQ ID NO: 1594463
uugguccaagagagcaccc

SEQ ID NO: 1594465 - RNA, 19 nt, Artificial Sequence
  Description of Artificial Sequence: Synthetic oligonucleotide
  Sense strand starting at position 3745 of SEQ ID NO: 1560354
agaguugacugggacauaa

SEQ ID NO: 1594466 - RNA, 19 nt, Artificial Sequence
  Description of Artificial Sequence: Synthetic oligonucleotide
  Antisense strand to SEQ ID NO: 1594465
uuaugucccagucaacucu

SEQ ID NO: 1594467 - RNA, 19 nt, Artificial Sequence
  Description of Artificial Sequence: Synthetic oligonucleotide
  Sense strand starting at position 3958 of SEQ ID NO: 1560354
ucgggauuccuaggaggaa

SEQ ID NO: 1594468 - RNA, 19 nt, Artificial Sequence
  Description of Artificial Sequence: Synthetic oligonucleotide
  Antisense strand to SEQ ID NO: 1594467
uuccuccuaggaaucccga

SEQ ID NO: 1594469 - RNA, 19 nt, Artificial Sequence
  Description of Artificial Sequence: Synthetic oligonucleotide
  Sense strand starting at position 3959 of SEQ ID NO: 1560354
cgggauuccuaggaggaaa

SEQ ID NO: 1594470 - RNA, 19 nt, Artificial Sequence
  Description of Artificial Sequence: Synthetic oligonucleotide
  Antisense strand to SEQ ID NO: 1594469
uuuccuccuaggaaucccg

SEQ ID NO: 1594471 - RNA, 19 nt, Artificial Sequence
  Description of Artificial Sequence: Synthetic oligonucleotide
  Sense strand starting at position 387 of SEQ ID NO: 1560355
agagguggcuuucugcaga

SEQ ID NO: 1594472 - RNA, 19 nt, Artificial Sequence
  Description of Artificial Sequence: Synthetic oligonucleotide
  Antisense strand to SEQ ID NO: 1594471
ucugcagaaagccaccucu

SEQ ID NO: 1594473 - RNA, 19 nt, Artificial Sequence
  Description of Artificial Sequence: Synthetic oligonucleotide
  Sense strand starting at position 392 of SEQ ID NO: 1560355
uggcuuucugcagacagaa

SEQ ID NO: 1594474 - RNA, 19 nt, Artificial Sequence
  Description of Artificial Sequence: Synthetic oligonucleotide
  Antisense strand to SEQ ID NO: 1594473
uucugucugcagaaagcca

SEQ ID NO: 1594475 - RNA, 19 nt, Artificial Sequence
  Description of Artificial Sequence: Synthetic oligonucleotide
  Sense strand starting at position 475 of SEQ ID NO: 1560355
agaagaaucuauuauggag

SEQ ID NO: 1594476 - RNA, 19 nt, Artificial Sequence
  Description of Artificial Sequence: Synthetic oligonucleotide
  Antisense strand to SEQ ID NO: 1594475
cuccauaauagauucuucu

SEQ ID NO: 1594477 - RNA, 19 nt, Artificial Sequence
  Description of Artificial Sequence: Synthetic oligonucleotide
  Sense strand starting at position 478 of SEQ ID NO: 1560355
agaaucuauuauggaggga

SEQ ID NO: 1594478 - RNA, 19 nt, Artificial Sequence
  Description of Artificial Sequence: Synthetic oligonucleotide
  Antisense strand to SEQ ID NO: 1594477
ucccuccauaauagauucu

SEQ ID NO: 1594479 - RNA, 19 nt, Artificial Sequence
  Description of Artificial Sequence: Synthetic oligonucleotide
  Sense strand starting at position 660 of SEQ ID NO: 1560355
aggagacguugagaaaguu

SEQ ID NO: 1594480 - RNA, 19 nt, Artificial Sequence
  Description of Artificial Sequence: Synthetic oligonucleotide
  Antisense strand to SEQ ID NO: 1594479
aacuuucucaacgucuccu

SEQ ID NO: 1594481 - RNA, 19 nt, Artificial Sequence
  Description of Artificial Sequence: Synthetic oligonucleotide
  Sense strand starting at position 666 of SEQ ID NO: 1560355
cguugagaaaguuaauuga

SEQ ID NO: 1594482 - RNA, 19 nt, Artificial Sequence
  Description of Artificial Sequence: Synthetic oligonucleotide
  Antisense strand to SEQ ID NO: 1594481
ucaauuaacuuucucaacg

SEQ ID NO: 1594483 - RNA, 19 nt, Artificial Sequence
  Description of Artificial Sequence: Synthetic oligonucleotide
  Sense strand starting at position 673 of SEQ ID NO: 1560355
aaaguuaauugagcggaga

SEQ ID NO: 1594484 - RNA, 19 nt, Artificial Sequence
  Description of Artificial Sequence: Synthetic oligonucleotide
  Antisense strand to SEQ ID NO: 1594483
ucuccgcucaauuaacuuu

SEQ ID NO: 1594485 - RNA, 19 nt, Artificial Sequence
  Description of Artificial Sequence: Synthetic oligonucleotide
  Sense strand starting at position 674 of SEQ ID NO: 1560355
aaguuaauugagcggagaa

SEQ ID NO: 1594486 - RNA, 19 nt, Artificial Sequence
  Description of Artificial Sequence: Synthetic oligonucleotide
  Antisense strand to SEQ ID NO: 1594485
uucuccgcucaauuaacuu

SEQ ID NO: 1594487 - RNA, 19 nt, Artificial Sequence
  Description of Artificial Sequence: Synthetic oligonucleotide
  Sense strand starting at position 675 of SEQ ID NO: 1560355
aguuaauugagcggagaag

SEQ ID NO: 1594488 - RNA, 19 nt, Artificial Sequence
  Description of Artificial Sequence: Synthetic oligonucleotide
  Antisense strand to SEQ ID NO: 1594487
cuucuccgcucaauuaacu

SEQ ID NO: 1594489 - RNA, 19 nt, Artificial Sequence
  Description of Artificial Sequence: Synthetic oligonucleotide
  Sense strand starting at position 1087 of SEQ ID NO: 1560355
gacacuugauaggcugaga

SEQ ID NO: 1594490 - RNA, 19 nt, Artificial Sequence
  Description of Artificial Sequence: Synthetic oligonucleotide
  Antisense strand to SEQ ID NO: 1594489
ucucagccuaucaaguguc

SEQ ID NO: 1594491 - RNA, 19 nt, Artificial Sequence
  Description of Artificial Sequence: Synthetic oligonucleotide
  Sense strand starting at position 2484 of SEQ ID NO: 1560355
gugcaacugucaccucuau

SEQ ID NO: 1594492 - RNA, 19 nt, Artificial Sequence
  Description of Artificial Sequence: Synthetic oligonucleotide
  Antisense strand to SEQ ID NO: 1594491
auagaggugacaguugcac

SEQ ID NO: 1594493 - RNA, 19 nt, Artificial Sequence
  Description of Artificial Sequence: Synthetic oligonucleotide
  Sense strand starting at position 2501 of SEQ ID NO: 1560355
auccgaguuccagagcuuu

SEQ ID NO: 1594494 - RNA, 19 nt, Artificial Sequence
  Description of Artificial Sequence: Synthetic oligonucleotide
  Antisense strand to SEQ ID NO: 1594493
aaagcucuggaacucggau

SEQ ID NO: 1594495 - RNA, 19 nt, Artificial Sequence
  Description of Artificial Sequence: Synthetic oligonucleotide
  Sense strand starting at position 2592 of SEQ ID NO: 1560355
ugcuuucugucuugauaga

SEQ ID NO: 1594496 - RNA, 19 nt, Artificial Sequence
  Description of Artificial Sequence: Synthetic oligonucleotide
  Antisense strand to SEQ ID NO: 1594495
ucuaucaagacagaaagca

SEQ ID NO: 1594497 - RNA, 19 nt, Artificial Sequence
  Description of Artificial Sequence: Synthetic oligonucleotide
  Sense strand starting at position 2593 of SEQ ID NO: 1560355
gcuuucugucuugauagau

SEQ ID NO: 1594498 - RNA, 19 nt, Artificial Sequence
  Description of Artificial Sequence: Synthetic oligonucleotide
  Antisense strand to SEQ ID NO: 1594497
aucuaucaagacagaaagc

SEQ ID NO: 1594499 - RNA, 19 nt, Artificial Sequence
  Description of Artificial Sequence: Synthetic oligonucleotide
  Sense strand starting at position 2948 of SEQ ID NO: 1560355
cagagauagugucuugcua

SEQ ID NO: 1594500 - RNA, 19 nt, Artificial Sequence
  Description of Artificial Sequence: Synthetic oligonucleotide
  Antisense strand to SEQ ID NO: 1594499
uagcaagacacuaucucug

SEQ ID NO: 1594501 - RNA, 19 nt, Artificial Sequence
  Description of Artificial Sequence: Synthetic oligonucleotide
  Sense strand starting at position 3074 of SEQ ID NO: 1560355
agcucuauugagcauacau

SEQ ID NO: 1594502 - RNA, 19 nt, Artificial Sequence
  Description of Artificial Sequence: Synthetic oligonucleotide
  Antisense strand to SEQ ID NO: 1594501
auguaugcucaauagagcu

SEQ ID NO: 1594503 - RNA, 19 nt, Artificial Sequence
  Description of Artificial Sequence: Synthetic oligonucleotide
  Sense strand starting at position 3082 of SEQ ID NO: 1560355
ugagcauacaucugggagu

SEQ ID NO: 1594504 - RNA, 19 nt, Artificial Sequence
  Description of Artificial Sequence: Synthetic oligonucleotide
  Antisense strand to SEQ ID NO: 1594503
acucccagauguaugcuca

SEQ ID NO: 1594505 - RNA, 19 nt, Artificial Sequence
  Description of Artificial Sequence: Synthetic oligonucleotide
  Sense strand starting at position 3085 of SEQ ID NO: 1560355
gcauacaucugggagugga

SEQ ID NO: 1594506 - RNA, 19 nt, Artificial Sequence
  Description of Artificial Sequence: Synthetic oligonucleotide
  Antisense strand to SEQ ID NO: 1594505
uccacucccagauguaugc

SEQ ID NO: 1594507 - RNA, 19 nt, Artificial Sequence
  Description of Artificial Sequence: Synthetic oligonucleotide
  Sense strand starting at position 3141 of SEQ ID NO: 1560355
gaauccacagaauguguau

SEQ ID NO: 1594508 - RNA, 19 nt, Artificial Sequence
  Description of Artificial Sequence: Synthetic oligonucleotide
  Antisense strand to SEQ ID NO: 1594507
auacacauucuguggauuc

SEQ ID NO: 1594509 - RNA, 19 nt, Artificial Sequence
  Description of Artificial Sequence: Synthetic oligonucleotide
  Sense strand starting at position 3147 of SEQ ID NO: 1560355
acagaauguguauaugcau

SEQ ID NO: 1594510 - RNA, 19 nt, Artificial Sequence
  Description of Artificial Sequence: Synthetic oligonucleotide
  Antisense strand to SEQ ID NO: 1594509
augcauauacacauucugu

SEQ ID NO: 1594511 - RNA, 19 nt, Artificial Sequence
  Description of Artificial Sequence: Synthetic oligonucleotide
  Sense strand starting at position 3150 of SEQ ID NO: 1560355
gaauguguauaugcauaca

SEQ ID NO: 1594512 - RNA, 19 nt, Artificial Sequence
  Description of Artificial Sequence: Synthetic oligonucleotide
  Antisense strand to SEQ ID NO: 1594511
uguaugcauauacacauuc

SEQ ID NO: 1594513 - RNA, 19 nt, Artificial Sequence
  Description of Artificial Sequence: Synthetic oligonucleotide
  Sense strand starting at position 3188 of SEQ ID NO: 1560355
ggaauuggcuuccaggauu

SEQ ID NO: 1594514 - RNA, 19 nt, Artificial Sequence
  Description of Artificial Sequence: Synthetic oligonucleotide
  Antisense strand to SEQ ID NO: 1594513
aauccuggaagccaauucc

SEQ ID NO: 1594515 - RNA, 19 nt, Artificial Sequence
  Description of Artificial Sequence: Synthetic oligonucleotide
  Sense strand starting at position 3191 of SEQ ID NO: 1560355
auuggcuuccaggauuagu

SEQ ID NO: 1594516 - RNA, 19 nt, Artificial Sequence
  Description of Artificial Sequence: Synthetic oligonucleotide
  Antisense strand to SEQ ID NO: 1594515
acuaauccuggaagccaau

SEQ ID NO: 1594517 - RNA, 19 nt, Artificial Sequence
  Description of Artificial Sequence: Synthetic oligonucleotide
  Sense strand starting at position 3442 of SEQ ID NO: 1560355
ucacgaggucauggugaaa

SEQ ID NO: 1594518 - RNA, 19 nt, Artificial Sequence
  Description of Artificial Sequence: Synthetic oligonucleotide
  Antisense strand to SEQ ID NO: 1594517
uuucaccaugaccucguga

SEQ ID NO: 1594519 - RNA, 19 nt, Artificial Sequence
  Description of Artificial Sequence: Synthetic oligonucleotide
  Sense strand starting at position 1287 of SEQ ID NO: 1560356
agagguggcuuucugcaga

SEQ ID NO: 1594520 - RNA, 19 nt, Artificial Sequence
  Description of Artificial Sequence: Synthetic oligonucleotide
  Antisense strand to SEQ ID NO: 1594519
ucugcagaaagccaccucu

SEQ ID NO: 1594521 - RNA, 19 nt, Artificial Sequence
  Description of Artificial Sequence: Synthetic oligonucleotide
  Sense strand starting at position 1292 of SEQ ID NO: 1560356
uggcuuucugcagacagaa

SEQ ID NO: 1594522 - RNA, 19 nt, Artificial Sequence
  Description of Artificial Sequence: Synthetic oligonucleotide
  Antisense strand to SEQ ID NO: 1594521
uucugucugcagaaagcca

SEQ ID NO: 1594523 - RNA, 19 nt, Artificial Sequence
  Description of Artificial Sequence: Synthetic oligonucleotide
  Sense strand starting at position 1375 of SEQ ID NO: 1560356
agaagaaucuauuauggag

SEQ ID NO: 1594524 - RNA, 19 nt, Artificial Sequence
  Description of Artificial Sequence: Synthetic oligonucleotide
  Antisense strand to SEQ ID NO: 1594523
cuccauaauagauucuucu

SEQ ID NO: 1594525 - RNA, 19 nt, Artificial Sequence
  Description of Artificial Sequence: Synthetic oligonucleotide
  Sense strand starting at position 1378 of SEQ ID NO: 1560356
agaaucuauuauggaggga

SEQ ID NO: 1594526 - RNA, 19 nt, Artificial Sequence
  Description of Artificial Sequence: Synthetic oligonucleotide
  Antisense strand to SEQ ID NO: 1594525
ucccuccauaauagauucu

SEQ ID NO: 1594527 - RNA, 19 nt, Artificial Sequence
  Description of Artificial Sequence: Synthetic oligonucleotide
  Sense strand starting at position 1560 of SEQ ID NO: 1560356
aggagacguugagaaaguu

SEQ ID NO: 1594528 - RNA, 19 nt, Artificial Sequence
  Description of Artificial Sequence: Synthetic oligonucleotide
  Antisense strand to SEQ ID NO: 1594527
aacuuucucaacgucuccu

SEQ ID NO: 1594529 - RNA, 19 nt, Artificial Sequence
  Description of Artificial Sequence: Synthetic oligonucleotide
  Sense strand starting at position 1566 of SEQ ID NO: 1560356
cguugagaaaguuaauuga

SEQ ID NO: 1594530 - RNA, 19 nt, Artificial Sequence
  Description of Artificial Sequence: Synthetic oligonucleotide
  Antisense strand to SEQ ID NO: 1594529
ucaauuaacuuucucaacg

SEQ ID NO: 1594531 - RNA, 19 nt, Artificial Sequence
  Description of Artificial Sequence: Synthetic oligonucleotide
  Sense strand starting at position 1573 of SEQ ID NO: 1560356
aaaguuaauugagcggaga

SEQ ID NO: 1594532 - RNA, 19 nt, Artificial Sequence
  Description of Artificial Sequence: Synthetic oligonucleotide
  Antisense strand to SEQ ID NO: 1594531
ucuccgcucaauuaacuuu

SEQ ID NO: 1594533 - RNA, 19 nt, Artificial Sequence
  Description of Artificial Sequence: Synthetic oligonucleotide
  Sense strand starting at position 1574 of SEQ ID NO: 1560356
aaguuaauugagcggagaa

SEQ ID NO: 1594534 - RNA, 19 nt, Artificial Sequence
  Description of Artificial Sequence: Synthetic oligonucleotide
  Antisense strand to SEQ ID NO: 1594533
uucuccgcucaauuaacuu

SEQ ID NO: 1594535 - RNA, 19 nt, Artificial Sequence
  Description of Artificial Sequence: Synthetic oligonucleotide
  Sense strand starting at position 1575 of SEQ ID NO: 1560356
aguuaauugagcggagaag

SEQ ID NO: 1594536 - RNA, 19 nt, Artificial Sequence
  Description of Artificial Sequence: Synthetic oligonucleotide
  Antisense strand to SEQ ID NO: 1594535
cuucuccgcucaauuaacu

SEQ ID NO: 1594537 - RNA, 19 nt, Artificial Sequence
  Description of Artificial Sequence: Synthetic oligonucleotide
  Sense strand starting at position 1987 of SEQ ID NO: 1560356
gacacuugauaggcugaga

SEQ ID NO: 1594538 - RNA, 19 nt, Artificial Sequence
  Description of Artificial Sequence: Synthetic oligonucleotide
  Antisense strand to SEQ ID NO: 1594537
ucucagccuaucaaguguc

SEQ ID NO: 1594539 - RNA, 19 nt, Artificial Sequence
  Description of Artificial Sequence: Synthetic oligonucleotide
  Sense strand starting at position 3384 of SEQ ID NO: 1560356
gugcaacugucaccucuau

SEQ ID NO: 1594540 - RNA, 19 nt, Artificial Sequence
  Description of Artificial Sequence: Synthetic oligonucleotide
  Antisense strand to SEQ ID NO: 1594539
auagaggugacaguugcac

SEQ ID NO: 1594541 - RNA, 19 nt, Artificial Sequence
  Description of Artificial Sequence: Synthetic oligonucleotide
  Sense strand starting at position 3401 of SEQ ID NO: 1560356
auccgaguuccagagcuuu

SEQ ID NO: 1594542 - RNA, 19 nt, Artificial Sequence
  Description of Artificial Sequence: Synthetic oligonucleotide
  Antisense strand to SEQ ID NO: 1594541
aaagcucuggaacucggau

SEQ ID NO: 1594543 - RNA, 19 nt, Artificial Sequence
  Description of Artificial Sequence: Synthetic oligonucleotide
  Sense strand starting at position 3492 of SEQ ID NO: 1560356
ugcuuucugucuugauaga

SEQ ID NO: 1594544 - RNA, 19 nt, Artificial Sequence
  Description of Artificial Sequence: Synthetic oligonucleotide
  Antisense strand to SEQ ID NO: 1594543
ucuaucaagacagaaagca

SEQ ID NO: 1594545 - RNA, 19 nt, Artificial Sequence
  Description of Artificial Sequence: Synthetic oligonucleotide
  Sense strand starting at position 3493 of SEQ ID NO: 1560356
gcuuucugucuugauagau

SEQ ID NO: 1594546 - RNA, 19 nt, Artificial Sequence
  Description of Artificial Sequence: Synthetic oligonucleotide
  Antisense strand to SEQ ID NO: 1594545
aucuaucaagacagaaagc

SEQ ID NO: 1594547 - RNA, 19 nt, Artificial Sequence
  Description of Artificial Sequence: Synthetic oligonucleotide
  Sense strand starting at position 3848 of SEQ ID NO: 1560356
cagagauagugucuugcua

SEQ ID NO: 1594548 - RNA, 19 nt, Artificial Sequence
  Description of Artificial Sequence: Synthetic oligonucleotide
  Antisense strand to SEQ ID NO: 1594547
uagcaagacacuaucucug

SEQ ID NO: 1594549 - RNA, 19 nt, Artificial Sequence
  Description of Artificial Sequence: Synthetic oligonucleotide
  Sense strand starting at position 3974 of SEQ ID NO: 1560356
agcucuauugagcauacau

SEQ ID NO: 1594550 - RNA, 19 nt, Artificial Sequence
  Description of Artificial Sequence: Synthetic oligonucleotide
  Antisense strand to SEQ ID NO: 1594549
auguaugcucaauagagcu

SEQ ID NO: 1594551 - RNA, 19 nt, Artificial Sequence
  Description of Artificial Sequence: Synthetic oligonucleotide
  Sense strand starting at position 3982 of SEQ ID NO: 1560356
ugagcauacaucugggagu

SEQ ID NO: 1594552 - RNA, 19 nt, Artificial Sequence
  Description of Artificial Sequence: Synthetic oligonucleotide
  Antisense strand to SEQ ID NO: 1594551
acucccagauguaugcuca

SEQ ID NO: 1594553 - RNA, 19 nt, Artificial Sequence
  Description of Artificial Sequence: Synthetic oligonucleotide
  Sense strand starting at position 5 of SEQ ID NO: 1560357
ggcaguaucuuaucucaac

SEQ ID NO: 1594554 - RNA, 19 nt, Artificial Sequence
  Description of Artificial Sequence: Synthetic oligonucleotide
  Antisense strand to SEQ ID NO: 1594553
guugagauaagauacugcc

SEQ ID NO: 1594555 - RNA, 19 nt, Artificial Sequence
  Description of Artificial Sequence: Synthetic oligonucleotide
  Sense strand starting at position 208 of SEQ ID NO: 1560357
gcuggagucuccucaggca

SEQ ID NO: 1594556 - RNA, 19 nt, Artificial Sequence
  Description of Artificial Sequence: Synthetic oligonucleotide
  Antisense strand to SEQ ID NO: 1594555
ugccugaggagacuccagc

SEQ ID NO: 1594557 - RNA, 19 nt, Artificial Sequence
  Description of Artificial Sequence: Synthetic oligonucleotide
  Sense strand starting at position 222 of SEQ ID NO: 1560357
aggcaaugccuuugauaga

SEQ ID NO: 1594558 - RNA, 19 nt, Artificial Sequence
  Description of Artificial Sequence: Synthetic oligonucleotide
  Antisense strand to SEQ ID NO: 1594557
ucuaucaaaggcauugccu

SEQ ID NO: 1594559 - RNA, 19 nt, Artificial Sequence
  Description of Artificial Sequence: Synthetic oligonucleotide
  Sense strand starting at position 223 of SEQ ID NO: 1560357
ggcaaugccuuugauagac

SEQ ID NO: 1594560 - RNA, 19 nt, Artificial Sequence
  Description of Artificial Sequence: Synthetic oligonucleotide
  Antisense strand to SEQ ID NO: 1594559
gucuaucaaaggcauugcc

SEQ ID NO: 1594561 - RNA, 19 nt, Artificial Sequence
  Description of Artificial Sequence: Synthetic oligonucleotide
  Sense strand starting at position 267 of SEQ ID NO: 1560357
ucagcugugacccgauuua

SEQ ID NO: 1594562 - RNA, 19 nt, Artificial Sequence
  Description of Artificial Sequence: Synthetic oligonucleotide
  Antisense strand to SEQ ID NO: 1594561
uaaaucgggucacagcuga

SEQ ID NO: 1594563 - RNA, 19 nt, Artificial Sequence
  Description of Artificial Sequence: Synthetic oligonucleotide
  Sense strand starting at position 669 of SEQ ID NO: 1560357
gcagcuugguccuauguuu

SEQ ID NO: 1594564 - RNA, 19 nt, Artificial Sequence
  Description of Artificial Sequence: Synthetic oligonucleotide
  Antisense strand to SEQ ID NO: 1594563
aaacauaggaccaagcugc

SEQ ID NO: 1594565 - RNA, 19 nt, Artificial Sequence
  Description of Artificial Sequence: Synthetic oligonucleotide
  Sense strand starting at position 714 of SEQ ID NO: 1560357
ccaauaucagagugucauc

SEQ ID NO: 1594566 - RNA, 19 nt, Artificial Sequence
  Description of Artificial Sequence: Synthetic oligonucleotide
  Antisense strand to SEQ ID NO: 1594565
gaugacacucugauauugg

SEQ ID NO: 1594567 - RNA, 19 nt, Artificial Sequence
  Description of Artificial Sequence: Synthetic oligonucleotide
  Sense strand starting at position 717 of SEQ ID NO: 1560357
auaucagagugucaucauc

SEQ ID NO: 1594568 - RNA, 19 nt, Artificial Sequence
  Description of Artificial Sequence: Synthetic oligonucleotide
  Antisense strand to SEQ ID NO: 1594567
gaugaugacacucugauau

SEQ ID NO: 1594569 - RNA, 19 nt, Artificial Sequence
  Description of Artificial Sequence: Synthetic oligonucleotide
  Sense strand starting at position 719 of SEQ ID NO: 1560357
aucagagugucaucaucaa

SEQ ID NO: 1594570 - RNA, 19 nt, Artificial Sequence
  Description of Artificial Sequence: Synthetic oligonucleotide
  Antisense strand to SEQ ID NO: 1594569
uugaugaugacacucugau

SEQ ID NO: 1594571 - RNA, 19 nt, Artificial Sequence
  Description of Artificial Sequence: Synthetic oligonucleotide
  Sense strand starting at position 849 of SEQ ID NO: 1560357
gugaaucaccauuggacaa

SEQ ID NO: 1594572 - RNA, 19 nt, Artificial Sequence
  Description of Artificial Sequence: Synthetic oligonucleotide
  Antisense strand to SEQ ID NO: 1594571
uuguccaauggugauucac

SEQ ID NO: 1594573 - RNA, 19 nt, Artificial Sequence
  Description of Artificial Sequence: Synthetic oligonucleotide
  Sense strand starting at position 1116 of SEQ ID NO: 1560357
cuggcaagauccuaauuua

SEQ ID NO: 1594574 - RNA, 19 nt, Artificial Sequence
  Description of Artificial Sequence: Synthetic oligonucleotide
  Antisense strand to SEQ ID NO: 1594573
uaaauuaggaucuugccag

SEQ ID NO: 1594575 - RNA, 19 nt, Artificial Sequence
  Description of Artificial Sequence: Synthetic oligonucleotide
  Sense strand starting at position 1159 of SEQ ID NO: 1560357
aacagaugcuagcuguaca

SEQ ID NO: 1594576 - RNA, 19 nt, Artificial Sequence
  Description of Artificial Sequence: Synthetic oligonucleotide
  Antisense strand to SEQ ID NO: 1594575
uguacagcuagcaucuguu

SEQ ID NO: 1594577 - RNA, 19 nt, Artificial Sequence
  Description of Artificial Sequence: Synthetic oligonucleotide
  Sense strand starting at position 2139 of SEQ ID NO: 1560357
cgcugauugguccagccga

SEQ ID NO: 1594578 - RNA, 19 nt, Artificial Sequence
  Description of Artificial Sequence: Synthetic oligonucleotide
  Antisense strand to SEQ ID NO: 1594577
ucggcuggaccaaucagcg

SEQ ID NO: 1594579 - RNA, 19 nt, Artificial Sequence
  Description of Artificial Sequence: Synthetic oligonucleotide
  Sense strand starting at position 2195 of SEQ ID NO: 1560357
cccgcagucuauuugcaua

SEQ ID NO: 1594580 - RNA, 19 nt, Artificial Sequence
  Description of Artificial Sequence: Synthetic oligonucleotide
  Antisense strand to SEQ ID NO: 1594579
uaugcaaauagacugcggg

SEQ ID NO: 1594581 - RNA, 19 nt, Artificial Sequence
  Description of Artificial Sequence: Synthetic oligonucleotide
  Sense strand starting at position 2197 of SEQ ID NO: 1560357
cgcagucuauuugcauaau

SEQ ID NO: 1594582 - RNA, 19 nt, Artificial Sequence
  Description of Artificial Sequence: Synthetic oligonucleotide
  Antisense strand to SEQ ID NO: 1594581
auuaugcaaauagacugcg

SEQ ID NO: 1594583 - RNA, 19 nt, Artificial Sequence
  Description of Artificial Sequence: Synthetic oligonucleotide
  Sense strand starting at position 2198 of SEQ ID NO: 1560357
gcagucuauuugcauaauu

SEQ ID NO: 1594584 - RNA, 19 nt, Artificial Sequence
  Description of Artificial Sequence: Synthetic oligonucleotide
  Antisense strand to SEQ ID NO: 1594583
aauuaugcaaauagacugc

SEQ ID NO: 1594585 - RNA, 19 nt, Artificial Sequence
  Description of Artificial Sequence: Synthetic oligonucleotide
  Sense strand starting at position 2233 of SEQ ID NO: 1560357
acucuuucgcccugagacu

SEQ ID NO: 1594586 - RNA, 19 nt, Artificial Sequence
  Description of Artificial Sequence: Synthetic oligonucleotide
  Antisense strand to SEQ ID NO: 1594585
agucucagggcgaaagagu

SEQ ID NO: 1594587 - RNA, 19 nt, Artificial Sequence
  Description of Artificial Sequence: Synthetic oligonucleotide
  Sense strand starting at position 2242 of SEQ ID NO: 1560357
cccugagacucagugguaa

SEQ ID NO: 1594588 - RNA, 19 nt, Artificial Sequence
  Description of Artificial Sequence: Synthetic oligonucleotide
  Antisense strand to SEQ ID NO: 1594587
uuaccacugagucucaggg

SEQ ID NO: 1594589 - RNA, 19 nt, Artificial Sequence
  Description of Artificial Sequence: Synthetic oligonucleotide
  Sense strand starting at position 2277 of SEQ ID NO: 1560357
aacguuuauugagcgaaca

SEQ ID NO: 1594590 - RNA, 19 nt, Artificial Sequence
  Description of Artificial Sequence: Synthetic oligonucleotide
  Antisense strand to SEQ ID NO: 1594589
uguucgcucaauaaacguu

SEQ ID NO: 1594591 - RNA, 19 nt, Artificial Sequence
  Description of Artificial Sequence: Synthetic oligonucleotide
  Sense strand starting at position 2278 of SEQ ID NO: 1560357
acguuuauugagcgaacag

SEQ ID NO: 1594592 - RNA, 19 nt, Artificial Sequence
  Description of Artificial Sequence: Synthetic oligonucleotide
  Antisense strand to SEQ ID NO: 1594591
cuguucgcucaauaaacgu

SEQ ID NO: 1594593 - RNA, 19 nt, Artificial Sequence
  Description of Artificial Sequence: Synthetic oligonucleotide
  Sense strand starting at position 2325 of SEQ ID NO: 1560357
gccuguaaccuggacauua

SEQ ID NO: 1594594 - RNA, 19 nt, Artificial Sequence
  Description of Artificial Sequence: Synthetic oligonucleotide
  Antisense strand to SEQ ID NO: 1594593
uaauguccagguuacaggc

SEQ ID NO: 1594595 - RNA, 19 nt, Artificial Sequence
  Description of Artificial Sequence: Synthetic oligonucleotide
  Sense strand starting at position 2327 of SEQ ID NO: 1560357
cuguaaccuggacauuauu

SEQ ID NO: 1594596 - RNA, 19 nt, Artificial Sequence
  Description of Artificial Sequence: Synthetic oligonucleotide
  Antisense strand to SEQ ID NO: 1594595
aauaauguccagguuacag

SEQ ID NO: 1594597 - RNA, 19 nt, Artificial Sequence
  Description of Artificial Sequence: Synthetic oligonucleotide
  Sense strand starting at position 2335 of SEQ ID NO: 1560357
uggacauuauuggucuuua

SEQ ID NO: 1594598 - RNA, 19 nt, Artificial Sequence
  Description of Artificial Sequence: Synthetic oligonucleotide
  Antisense strand to SEQ ID NO: 1594597
uaaagaccaauaaugucca

SEQ ID NO: 1594599 - RNA, 19 nt, Artificial Sequence
  Description of Artificial Sequence: Synthetic oligonucleotide
  Sense strand starting at position 2336 of SEQ ID NO: 1560357
ggacauuauuggucuuuau

SEQ ID NO: 1594600 - RNA, 19 nt, Artificial Sequence
  Description of Artificial Sequence: Synthetic oligonucleotide
  Antisense strand to SEQ ID NO: 1594599
auaaagaccaauaaugucc

SEQ ID NO: 1594601 - RNA, 19 nt, Artificial Sequence
  Description of Artificial Sequence: Synthetic oligonucleotide
  Sense strand starting at position 2387 of SEQ ID NO: 1560357
gcaagaucuugcuuggagg

SEQ ID NO: 1594602 - RNA, 19 nt, Artificial Sequence
  Description of Artificial Sequence: Synthetic oligonucleotide
  Antisense strand to SEQ ID NO: 1594601
ccuccaagcaagaucuugc

SEQ ID NO: 1594603 - RNA, 19 nt, Artificial Sequence
  Description of Artificial Sequence: Synthetic oligonucleotide
  Sense strand starting at position 2512 of SEQ ID NO: 1560357
acucgaucgcuugagguua

SEQ ID NO: 1594604 - RNA, 19 nt, Artificial Sequence
  Description of Artificial Sequence: Synthetic oligonucleotide
  Antisense strand to SEQ ID NO: 1594603
uaaccucaagcgaucgagu

SEQ ID NO: 1594605 - RNA, 19 nt, Artificial Sequence
  Description of Artificial Sequence: Synthetic oligonucleotide
  Sense strand starting at position 3066 of SEQ ID NO: 1560357
cucgguuucuuauuugugu

SEQ ID NO: 1594606 - RNA, 19 nt, Artificial Sequence
  Description of Artificial Sequence: Synthetic oligonucleotide
  Antisense strand to SEQ ID NO: 1594605
acacaaauaagaaaccgag

SEQ ID NO: 1594607 - RNA, 19 nt, Artificial Sequence
  Description of Artificial Sequence: Synthetic oligonucleotide
  Sense strand starting at position 3068 of SEQ ID NO: 1560357
cgguuucuuauuuguguuu

SEQ ID NO: 1594608 - RNA, 19 nt, Artificial Sequence
  Description of Artificial Sequence: Synthetic oligonucleotide
  Antisense strand to SEQ ID NO: 1594607
aaacacaaauaagaaaccg

SEQ ID NO: 1594609 - RNA, 19 nt, Artificial Sequence
  Description of Artificial Sequence: Synthetic oligonucleotide
  Sense strand starting at position 3070 of SEQ ID NO: 1560357
guuucuuauuuguguuucu

SEQ ID NO: 1594610 - RNA, 19 nt, Artificial Sequence
  Description of Artificial Sequence: Synthetic oligonucleotide
  Antisense strand to SEQ ID NO: 1594609
agaaacacaaauaagaaac

SEQ ID NO: 1594611 - RNA, 19 nt, Artificial Sequence
  Description of Artificial Sequence: Synthetic oligonucleotide
  Sense strand starting at position 3160 of SEQ ID NO: 1560357
uuucuuuguuuagagacga

SEQ ID NO: 1594612 - RNA, 19 nt, Artificial Sequence
  Description of Artificial Sequence: Synthetic oligonucleotide
  Antisense strand to SEQ ID NO: 1594611
ucgucucuaaacaaagaaa

SEQ ID NO: 1594613 - RNA, 19 nt, Artificial Sequence
  Description of Artificial Sequence: Synthetic oligonucleotide
  Sense strand starting at position 3362 of SEQ ID NO: 1560357
uuagaauuauugugaagag

SEQ ID NO: 1594614 - RNA, 19 nt, Artificial Sequence
  Description of Artificial Sequence: Synthetic oligonucleotide
  Antisense strand to SEQ ID NO: 1594613
cucuucacaauaauucuaa

SEQ ID NO: 1594615 - RNA, 19 nt, Artificial Sequence
  Description of Artificial Sequence: Synthetic oligonucleotide
  Sense strand starting at position 3363 of SEQ ID NO: 1560357
uagaauuauugugaagaga

SEQ ID NO: 1594616 - RNA, 19 nt, Artificial Sequence
  Description of Artificial Sequence: Synthetic oligonucleotide
  Antisense strand to SEQ ID NO: 1594615
ucucuucacaauaauucua

SEQ ID NO: 1594617 - RNA, 19 nt, Artificial Sequence
  Description of Artificial Sequence: Synthetic oligonucleotide
  Sense strand starting at position 3388 of SEQ ID NO: 1560357
agaguuccuguauacccaa

SEQ ID NO: 1594618 - RNA, 19 nt, Artificial Sequence
  Description of Artificial Sequence: Synthetic oligonucleotide
  Antisense strand to SEQ ID NO: 1594617
uuggguauacaggaacucu

SEQ ID NO: 1594619 - RNA, 19 nt, Artificial Sequence
  Description of Artificial Sequence: Synthetic oligonucleotide
  Sense strand starting at position 3541 of SEQ ID NO: 1560357
gauuaacagucaugagcca

SEQ ID NO: 1594620 - RNA, 19 nt, Artificial Sequence
  Description of Artificial Sequence: Synthetic oligonucleotide
  Antisense strand to SEQ ID NO: 1594619
uggcucaugacuguuaauc

SEQ ID NO: 1594621 - RNA, 19 nt, Artificial Sequence
  Description of Artificial Sequence: Synthetic oligonucleotide
  Sense strand starting at position 3897 of SEQ ID NO: 1560357
uuauuuauuuggugagacg

SEQ ID NO: 1594622 - RNA, 19 nt, Artificial Sequence
  Description of Artificial Sequence: Synthetic oligonucleotide
  Antisense strand to SEQ ID NO: 1594621
cgucucaccaaauaaauaa

SEQ ID NO: 1594623 - RNA, 19 nt, Artificial Sequence
  Description of Artificial Sequence: Synthetic oligonucleotide
  Sense strand starting at position 90 of SEQ ID NO: 1560358
auaggaguucacugggcaa

SEQ ID NO: 1594624 - RNA, 19 nt, Artificial Sequence
  Description of Artificial Sequence: Synthetic oligonucleotide
  Antisense strand to SEQ ID NO: 1594623
uugcccagugaacuccuau

SEQ ID NO: 1594625 - RNA, 19 nt, Artificial Sequence
  Description of Artificial Sequence: Synthetic oligonucleotide
  Sense strand starting at position 93 of SEQ ID NO: 1560358
ggaguucacugggcaagga

SEQ ID NO: 1594626 - RNA, 19 nt, Artificial Sequence
  Description of Artificial Sequence: Synthetic oligonucleotide
  Antisense strand to SEQ ID NO: 1594625
uccuugcccagugaacucc

SEQ ID NO: 1594627 - RNA, 19 nt, Artificial Sequence
  Description of Artificial Sequence: Synthetic oligonucleotide
  Sense strand starting at position 519 of SEQ ID NO: 1560358
caggcucacgccugaauaa

SEQ ID NO: 1594628 - RNA, 19 nt, Artificial Sequence
  Description of Artificial Sequence: Synthetic oligonucleotide
  Antisense strand to SEQ ID NO: 1594627
uuauucaggcgugagccug

SEQ ID NO: 1594629 - RNA, 19 nt, Artificial Sequence
  Description of Artificial Sequence: Synthetic oligonucleotide
  Sense strand starting at position 520 of SEQ ID NO: 1560358
aggcucacgccugaauaau

SEQ ID NO: 1594630 - RNA, 19 nt, Artificial Sequence
  Description of Artificial Sequence: Synthetic oligonucleotide
  Antisense strand to SEQ ID NO: 1594629
auuauucaggcgugagccu

SEQ ID NO: 1594631 - RNA, 19 nt, Artificial Sequence
  Description of Artificial Sequence: Synthetic oligonucleotide
  Sense strand starting at position 694 of SEQ ID NO: 1560358
gggacuacaugucuaacua

SEQ ID NO: 1594632 - RNA, 19 nt, Artificial Sequence
  Description of Artificial Sequence: Synthetic oligonucleotide
  Antisense strand to SEQ ID NO: 1594631
uaguuagacauguaguccc

SEQ ID NO: 1594633 - RNA, 19 nt, Artificial Sequence
  Description of Artificial Sequence: Synthetic oligonucleotide
  Sense strand starting at position 1322 of SEQ ID NO: 1560358
ugcuguauuggauggccaa

SEQ ID NO: 1594634 - RNA, 19 nt, Artificial Sequence
  Description of Artificial Sequence: Synthetic oligonucleotide
  Antisense strand to SEQ ID NO: 1594633
uuggccauccaauacagca

SEQ ID NO: 1594635 - RNA, 19 nt, Artificial Sequence
  Description of Artificial Sequence: Synthetic oligonucleotide
  Sense strand starting at position 1472 of SEQ ID NO: 1560358
guaugugugcgacccugua

SEQ ID NO: 1594636 - RNA, 19 nt, Artificial Sequence
  Description of Artificial Sequence: Synthetic oligonucleotide
  Antisense strand to SEQ ID NO: 1594635
uacagggucgcacacauac

SEQ ID NO: 1594637 - RNA, 19 nt, Artificial Sequence
  Description of Artificial Sequence: Synthetic oligonucleotide
  Sense strand starting at position 1586 of SEQ ID NO: 1560358
aaucauuggucccggcuga

SEQ ID NO: 1594638 - RNA, 19 nt, Artificial Sequence
  Description of Artificial Sequence: Synthetic oligonucleotide
  Antisense strand to SEQ ID NO: 1594637
ucagccgggaccaaugauu

SEQ ID NO: 1594639 - RNA, 19 nt, Artificial Sequence
  Description of Artificial Sequence: Synthetic oligonucleotide
  Sense strand starting at position 1782 of SEQ ID NO: 1560358
ggaagugacaccugcuacu

SEQ ID NO: 1594640 - RNA, 19 nt, Artificial Sequence
  Description of Artificial Sequence: Synthetic oligonucleotide
  Antisense strand to SEQ ID NO: 1594639
aguagcaggugucacuucc

SEQ ID NO: 1594641 - RNA, 19 nt, Artificial Sequence
  Description of Artificial Sequence: Synthetic oligonucleotide
  Sense strand starting at position 1861 of SEQ ID NO: 1560358
gcgagaugauggguaucua

SEQ ID NO: 1594642 - RNA, 19 nt, Artificial Sequence
  Description of Artificial Sequence: Synthetic oligonucleotide
  Antisense strand to SEQ ID NO: 1594641
uagauacccaucaucucgc

SEQ ID NO: 1594643 - RNA, 19 nt, Artificial Sequence
  Description of Artificial Sequence: Synthetic oligonucleotide
  Sense strand starting at position 1862 of SEQ ID NO: 1560358
cgagaugauggguaucuac

SEQ ID NO: 1594644 - RNA, 19 nt, Artificial Sequence
  Description of Artificial Sequence: Synthetic oligonucleotide
  Antisense strand to SEQ ID NO: 1594643
guagauacccaucaucucg

SEQ ID NO: 1594645 - RNA, 19 nt, Artificial Sequence
  Description of Artificial Sequence: Synthetic oligonucleotide
  Sense strand starting at position 1987 of SEQ ID NO: 1560358
guuggaggcuugugugcau

SEQ ID NO: 1594646 - RNA, 19 nt, Artificial Sequence
  Description of Artificial Sequence: Synthetic oligonucleotide
  Antisense strand to SEQ ID NO: 1594645
augcacacaagccuccaac

SEQ ID NO: 1594647 - RNA, 19 nt, Artificial Sequence
  Description of Artificial Sequence: Synthetic oligonucleotide
  Sense strand starting at position 2112 of SEQ ID NO: 1560358
ggccaugggugaguaaaca

SEQ ID NO: 1594648 - RNA, 19 nt, Artificial Sequence
  Description of Artificial Sequence: Synthetic oligonucleotide
  Antisense strand to SEQ ID NO: 1594647
uguuuacucacccauggcc

SEQ ID NO: 1594649 - RNA, 19 nt, Artificial Sequence
  Description of Artificial Sequence: Synthetic oligonucleotide
  Sense strand starting at position 2167 of SEQ ID NO: 1560358
uggagcuguucuuaccgaa

SEQ ID NO: 1594650 - RNA, 19 nt, Artificial Sequence
  Description of Artificial Sequence: Synthetic oligonucleotide
  Antisense strand to SEQ ID NO: 1594649
uucgguaagaacagcucca

SEQ ID NO: 1594651 - RNA, 19 nt, Artificial Sequence
  Description of Artificial Sequence: Synthetic oligonucleotide
  Sense strand starting at position 2170 of SEQ ID NO: 1560358
agcuguucuuaccgaacaa

SEQ ID NO: 1594652 - RNA, 19 nt, Artificial Sequence
  Description of Artificial Sequence: Synthetic oligonucleotide
  Antisense strand to SEQ ID NO: 1594651
uuguucgguaagaacagcu

SEQ ID NO: 1594653 - RNA, 19 nt, Artificial Sequence
  Description of Artificial Sequence: Synthetic oligonucleotide
  Sense strand starting at position 2174 of SEQ ID NO: 1560358
guucuuaccgaacaaauau

SEQ ID NO: 1594654 - RNA, 19 nt, Artificial Sequence
  Description of Artificial Sequence: Synthetic oligonucleotide
  Antisense strand to SEQ ID NO: 1594653
auauuuguucgguaagaac

SEQ ID NO: 1594655 - RNA, 19 nt, Artificial Sequence
  Description of Artificial Sequence: Synthetic oligonucleotide
  Sense strand starting at position 2310 of SEQ ID NO: 1560358
gggaaaugcgcucagaaag

SEQ ID NO: 1594656 - RNA, 19 nt, Artificial Sequence
  Description of Artificial Sequence: Synthetic oligonucleotide
  Antisense strand to SEQ ID NO: 1594655
cuuucugagcgcauuuccc

SEQ ID NO: 1594657 - RNA, 19 nt, Artificial Sequence
  Description of Artificial Sequence: Synthetic oligonucleotide
  Sense strand starting at position 2404 of SEQ ID NO: 1560358
aggucaagagguugacacu

SEQ ID NO: 1594658 - RNA, 19 nt, Artificial Sequence
  Description of Artificial Sequence: Synthetic oligonucleotide
  Antisense strand to SEQ ID NO: 1594657
agugucaaccucuugaccu

SEQ ID NO: 1594659 - RNA, 19 nt, Artificial Sequence
  Description of Artificial Sequence: Synthetic oligonucleotide
  Sense strand starting at position 3169 of SEQ ID NO: 1560358
gccugagacacugggcauu

SEQ ID NO: 1594660 - RNA, 19 nt, Artificial Sequence
  Description of Artificial Sequence: Synthetic oligonucleotide
  Antisense strand to SEQ ID NO: 1594659
aaugcccagugucucaggc

SEQ ID NO: 1594661 - RNA, 19 nt, Artificial Sequence
  Description of Artificial Sequence: Synthetic oligonucleotide
  Sense strand starting at position 3201 of SEQ ID NO: 1560358
agaagucagcccugcuaga

SEQ ID NO: 1594662 - RNA, 19 nt, Artificial Sequence
  Description of Artificial Sequence: Synthetic oligonucleotide
  Antisense strand to SEQ ID NO: 1594661
ucuagcagggcugacuucu

SEQ ID NO: 1594663 - RNA, 19 nt, Artificial Sequence
  Description of Artificial Sequence: Synthetic oligonucleotide
  Sense strand starting at position 3259 of SEQ ID NO: 1560358
cagagauggccggagacuu

SEQ ID NO: 1594664 - RNA, 19 nt, Artificial Sequence
  Description of Artificial Sequence: Synthetic oligonucleotide
  Antisense strand to SEQ ID NO: 1594663
aagucuccggccaucucug

SEQ ID NO: 1594665 - RNA, 19 nt, Artificial Sequence
  Description of Artificial Sequence: Synthetic oligonucleotide
  Sense strand starting at position 3431 of SEQ ID NO: 1560358
gagcucccauccugggaau

SEQ ID NO: 1594666 - RNA, 19 nt, Artificial Sequence
  Description of Artificial Sequence: Synthetic oligonucleotide
  Antisense strand to SEQ ID NO: 1594665
auucccaggaugggagcuc

SEQ ID NO: 1594667 - RNA, 19 nt, Artificial Sequence
  Description of Artificial Sequence: Synthetic oligonucleotide
  Sense strand starting at position 3482 of SEQ ID NO: 1560358
ugacgucuugccugaugac

SEQ ID NO: 1594668 - RNA, 19 nt, Artificial Sequence
  Description of Artificial Sequence: Synthetic oligonucleotide
  Antisense strand to SEQ ID NO: 1594667
gucaucaggcaagacguca

SEQ ID NO: 1594669 - RNA, 19 nt, Artificial Sequence
  Description of Artificial Sequence: Synthetic oligonucleotide
  Sense strand starting at position 3738 of SEQ ID NO: 1560358
gcuugauucucgucaccac

SEQ ID NO: 1594670 - RNA, 19 nt, Artificial Sequence
  Description of Artificial Sequence: Synthetic oligonucleotide
  Antisense strand to SEQ ID NO: 1594669
guggugacgagaaucaagc

SEQ ID NO: 1594671 - RNA, 19 nt, Artificial Sequence
  Description of Artificial Sequence: Synthetic oligonucleotide
  Sense strand starting at position 3739 of SEQ ID NO: 1560358
cuugauucucgucaccaca

SEQ ID NO: 1594672 - RNA, 19 nt, Artificial Sequence
  Description of Artificial Sequence: Synthetic oligonucleotide
  Antisense strand to SEQ ID NO: 1594671
uguggugacgagaaucaag

SEQ ID NO: 1594673 - RNA, 19 nt, Artificial Sequence
  Description of Artificial Sequence: Synthetic oligonucleotide
  Sense strand starting at position 3757 of SEQ ID NO: 1560358
accucaaggcaguaucuua

SEQ ID NO: 1594674 - RNA, 19 nt, Artificial Sequence
  Description of Artificial Sequence: Synthetic oligonucleotide
  Antisense strand to SEQ ID NO: 1594673
uaagauacugccuugaggu

SEQ ID NO: 1594675 - RNA, 19 nt, Artificial Sequence
  Description of Artificial Sequence: Synthetic oligonucleotide
  Sense strand starting at position 3764 of SEQ ID NO: 1560358
ggcaguaucuuaucucaac

SEQ ID NO: 1594676 - RNA, 19 nt, Artificial Sequence
  Description of Artificial Sequence: Synthetic oligonucleotide
  Antisense strand to SEQ ID NO: 1594675
guugagauaagauacugcc

SEQ ID NO: 1594677 - RNA, 19 nt, Artificial Sequence
  Description of Artificial Sequence: Synthetic oligonucleotide
  Sense strand starting at position 3967 of SEQ ID NO: 1560358
gcuggagucuccucaggca

SEQ ID NO: 1594678 - RNA, 19 nt, Artificial Sequence
  Description of Artificial Sequence: Synthetic oligonucleotide
  Antisense strand to SEQ ID NO: 1594677
ugccugaggagacuccagc

SEQ ID NO: 1594679 - RNA, 19 nt, Artificial Sequence
  Description of Artificial Sequence: Synthetic oligonucleotide
  Sense strand starting at position 3981 of SEQ ID NO: 1560358
aggcaaugccuuugauaga

SEQ ID NO: 1594680 - RNA, 19 nt, Artificial Sequence
  Description of Artificial Sequence: Synthetic oligonucleotide
  Antisense strand to SEQ ID NO: 1594679
ucuaucaaaggcauugccu

SEQ ID NO: 1594681 - RNA, 19 nt, Artificial Sequence
  Description of Artificial Sequence: Synthetic oligonucleotide
  Sense strand starting at position 3982 of SEQ ID NO: 1560358
ggcaaugccuuugauagac

SEQ ID NO: 1594682 - RNA, 19 nt, Artificial Sequence
  Description of Artificial Sequence: Synthetic oligonucleotide
  Antisense strand to SEQ ID NO: 1594681
gucuaucaaaggcauugcc

SEQ ID NO: 1594683 - RNA, 19 nt, Artificial Sequence
  Description of Artificial Sequence: Synthetic oligonucleotide
  Sense strand starting at position 500 of SEQ ID NO: 1560359
guaugauugcaucauggca

SEQ ID NO: 1594684 - RNA, 19 nt, Artificial Sequence
  Description of Artificial Sequence: Synthetic oligonucleotide
  Antisense strand to SEQ ID NO: 1594683
ugccaugaugcaaucauac

SEQ ID NO: 1594685 - RNA, 19 nt, Artificial Sequence
  Description of Artificial Sequence: Synthetic oligonucleotide
  Sense strand starting at position 540 of SEQ ID NO: 1560359
aaggcuccgucucuugaaa

SEQ ID NO: 1594686 - RNA, 19 nt, Artificial Sequence
  Description of Artificial Sequence: Synthetic oligonucleotide
  Antisense strand to SEQ ID NO: 1594685
uuucaagagacggagccuu

SEQ ID NO: 1594687 - RNA, 19 nt, Artificial Sequence
  Description of Artificial Sequence: Synthetic oligonucleotide
  Sense strand starting at position 568 of SEQ ID NO: 1560359
ugagaagugcuauauauca

SEQ ID NO: 1594688 - RNA, 19 nt, Artificial Sequence
  Description of Artificial Sequence: Synthetic oligonucleotide
  Antisense strand to SEQ ID NO: 1594687
ugauauauagcacuucuca

SEQ ID NO: 1594689 - RNA, 19 nt, Artificial Sequence
  Description of Artificial Sequence: Synthetic oligonucleotide
  Sense strand starting at position 651 of SEQ ID NO: 1560359
uuguuagggacaugacauu

SEQ ID NO: 1594690 - RNA, 19 nt, Artificial Sequence
  Description of Artificial Sequence: Synthetic oligonucleotide
  Antisense strand to SEQ ID NO: 1594689
aaugucaugucccuaacaa

SEQ ID NO: 1594691 - RNA, 19 nt, Artificial Sequence
  Description of Artificial Sequence: Synthetic oligonucleotide
  Sense strand starting at position 698 of SEQ ID NO: 1560359
gccagaauguuugcuggga

SEQ ID NO: 1594692 - RNA, 19 nt, Artificial Sequence
  Description of Artificial Sequence: Synthetic oligonucleotide
  Antisense strand to SEQ ID NO: 1594691
ucccagcaaacauucuggc

SEQ ID NO: 1594693 - RNA, 19 nt, Artificial Sequence
  Description of Artificial Sequence: Synthetic oligonucleotide
  Sense strand starting at position 699 of SEQ ID NO: 1560359
ccagaauguuugcugggaa

SEQ ID NO: 1594694 - RNA, 19 nt, Artificial Sequence
  Description of Artificial Sequence: Synthetic oligonucleotide
  Antisense strand to SEQ ID NO: 1594693
uucccagcaaacauucugg

SEQ ID NO: 1594695 - RNA, 19 nt, Artificial Sequence
  Description of Artificial Sequence: Synthetic oligonucleotide
  Sense strand starting at position 702 of SEQ ID NO: 1560359
gaauguuugcugggaaagc

SEQ ID NO: 1594696 - RNA, 19 nt, Artificial Sequence
  Description of Artificial Sequence: Synthetic oligonucleotide
  Antisense strand to SEQ ID NO: 1594695
gcuuucccagcaaacauuc

SEQ ID NO: 1594697 - RNA, 19 nt, Artificial Sequence
  Description of Artificial Sequence: Synthetic oligonucleotide
  Sense strand starting at position 762 of SEQ ID NO: 1560359
aggaaugagcuugguuguu

SEQ ID NO: 1594698 - RNA, 19 nt, Artificial Sequence
  Description of Artificial Sequence: Synthetic oligonucleotide
  Antisense strand to SEQ ID NO: 1594697
aacaaccaagcucauuccu

SEQ ID NO: 1594699 - RNA, 19 nt, Artificial Sequence
  Description of Artificial Sequence: Synthetic oligonucleotide
  Sense strand starting at position 768 of SEQ ID NO: 1560359
gagcuugguuguuugagga

SEQ ID NO: 1594700 - RNA, 19 nt, Artificial Sequence
  Description of Artificial Sequence: Synthetic oligonucleotide
  Antisense strand to SEQ ID NO: 1594699
uccucaaacaaccaagcuc

SEQ ID NO: 1594701 - RNA, 19 nt, Artificial Sequence
  Description of Artificial Sequence: Synthetic oligonucleotide
  Sense strand starting at position 1112 of SEQ ID NO: 1560359
aagccaauguggcuagaau

SEQ ID NO: 1594702 - RNA, 19 nt, Artificial Sequence
  Description of Artificial Sequence: Synthetic oligonucleotide
  Antisense strand to SEQ ID NO: 1594701
auucuagccacauuggcuu

SEQ ID NO: 1594703 - RNA, 19 nt, Artificial Sequence
  Description of Artificial Sequence: Synthetic oligonucleotide
  Sense strand starting at position 1113 of SEQ ID NO: 1560359
agccaauguggcuagaaua

SEQ ID NO: 1594704 - RNA, 19 nt, Artificial Sequence
  Description of Artificial Sequence: Synthetic oligonucleotide
  Antisense strand to SEQ ID NO: 1594703
uauucuagccacauuggcu

SEQ ID NO: 1594705 - RNA, 19 nt, Artificial Sequence
  Description of Artificial Sequence: Synthetic oligonucleotide
  Sense strand starting at position 1174 of SEQ ID NO: 1560359
gaguccuagugaucucuaa

SEQ ID NO: 1594706 - RNA, 19 nt, Artificial Sequence
  Description of Artificial Sequence: Synthetic oligonucleotide
  Antisense strand to SEQ ID NO: 1594705
uuagagaucacuaggacuc

SEQ ID NO: 1594707 - RNA, 19 nt, Artificial Sequence
  Description of Artificial Sequence: Synthetic oligonucleotide
  Sense strand starting at position 1255 of SEQ ID NO: 1560359
guccauauuuggugggaaa

SEQ ID NO: 1594708 - RNA, 19 nt, Artificial Sequence
  Description of Artificial Sequence: Synthetic oligonucleotide
  Antisense strand to SEQ ID NO: 1594707
uuucccaccaaauauggac

SEQ ID NO: 1594709 - RNA, 19 nt, Artificial Sequence
  Description of Artificial Sequence: Synthetic oligonucleotide
  Sense strand starting at position 1483 of SEQ ID NO: 1560359
gacagauggaagugcgaau

SEQ ID NO: 1594710 - RNA, 19 nt, Artificial Sequence
  Description of Artificial Sequence: Synthetic oligonucleotide
  Antisense strand to SEQ ID NO: 1594709
auucgcacuuccaucuguc

SEQ ID NO: 1594711 - RNA, 19 nt, Artificial Sequence
  Description of Artificial Sequence: Synthetic oligonucleotide
  Sense strand starting at position 1529 of SEQ ID NO: 1560359
cggguagaaucuaggguua

SEQ ID NO: 1594712 - RNA, 19 nt, Artificial Sequence
  Description of Artificial Sequence: Synthetic oligonucleotide
  Antisense strand to SEQ ID NO: 1594711
uaacccuagauucuacccg

SEQ ID NO: 1594713 - RNA, 19 nt, Artificial Sequence
  Description of Artificial Sequence: Synthetic oligonucleotide
  Sense strand starting at position 1555 of SEQ ID NO: 1560359
ggaauugaggcuugacgca

SEQ ID NO: 1594714 - RNA, 19 nt, Artificial Sequence
  Description of Artificial Sequence: Synthetic oligonucleotide
  Antisense strand to SEQ ID NO: 1594713
ugcgucaagccucaauucc

SEQ ID NO: 1594715 - RNA, 19 nt, Artificial Sequence
  Description of Artificial Sequence: Synthetic oligonucleotide
  Sense strand starting at position 1640 of SEQ ID NO: 1560359
agaggaauuccgugggaug

SEQ ID NO: 1594716 - RNA, 19 nt, Artificial Sequence
  Description of Artificial Sequence: Synthetic oligonucleotide
  Antisense strand to SEQ ID NO: 1594715
caucccacggaauuccucu

SEQ ID NO: 1594717 - RNA, 19 nt, Artificial Sequence
  Description of Artificial Sequence: Synthetic oligonucleotide
  Sense strand starting at position 1641 of SEQ ID NO: 1560359
gaggaauuccgugggauga

SEQ ID NO: 1594718 - RNA, 19 nt, Artificial Sequence
  Description of Artificial Sequence: Synthetic oligonucleotide
  Antisense strand to SEQ ID NO: 1594717
ucaucccacggaauuccuc

SEQ ID NO: 1594719 - RNA, 19 nt, Artificial Sequence
  Description of Artificial Sequence: Synthetic oligonucleotide
  Sense strand starting at position 1642 of SEQ ID NO: 1560359
aggaauuccgugggaugag

SEQ ID NO: 1594720 - RNA, 19 nt, Artificial Sequence
  Description of Artificial Sequence: Synthetic oligonucleotide
  Antisense strand to SEQ ID NO: 1594719
cucaucccacggaauuccu

SEQ ID NO: 1594721 - RNA, 19 nt, Artificial Sequence
  Description of Artificial Sequence: Synthetic oligonucleotide
  Sense strand starting at position 1790 of SEQ ID NO: 1560359
ccggcaucugacggauuaa

SEQ ID NO: 1594722 - RNA, 19 nt, Artificial Sequence
  Description of Artificial Sequence: Synthetic oligonucleotide
  Antisense strand to SEQ ID NO: 1594721
uuaauccgucagaugccgg

SEQ ID NO: 1594723 - RNA, 19 nt, Artificial Sequence
  Description of Artificial Sequence: Synthetic oligonucleotide
  Sense strand starting at position 1791 of SEQ ID NO: 1560359
cggcaucugacggauuaac

SEQ ID NO: 1594724 - RNA, 19 nt, Artificial Sequence
  Description of Artificial Sequence: Synthetic oligonucleotide
  Antisense strand to SEQ ID NO: 1594723
guuaauccgucagaugccg

SEQ ID NO: 1594725 - RNA, 19 nt, Artificial Sequence
  Description of Artificial Sequence: Synthetic oligonucleotide
  Sense strand starting at position 1831 of SEQ ID NO: 1560359
agguaccugucgcuugaaa

SEQ ID NO: 1594726 - RNA, 19 nt, Artificial Sequence
  Description of Artificial Sequence: Synthetic oligonucleotide
  Antisense strand to SEQ ID NO: 1594725
uuucaagcgacagguaccu

SEQ ID NO: 1594727 - RNA, 19 nt, Artificial Sequence
  Description of Artificial Sequence: Synthetic oligonucleotide
  Sense strand starting at position 1833 of SEQ ID NO: 1560359
guaccugucgcuugaaacu

SEQ ID NO: 1594728 - RNA, 19 nt, Artificial Sequence
  Description of Artificial Sequence: Synthetic oligonucleotide
  Antisense strand to SEQ ID NO: 1594727
aguuucaagcgacagguac

SEQ ID NO: 1594729 - RNA, 19 nt, Artificial Sequence
  Description of Artificial Sequence: Synthetic oligonucleotide
  Sense strand starting at position 1842 of SEQ ID NO: 1560359
gcuugaaacuuucugguug

SEQ ID NO: 1594730 - RNA, 19 nt, Artificial Sequence
  Description of Artificial Sequence: Synthetic oligonucleotide
  Antisense strand to SEQ ID NO: 1594729
caaccagaaaguuucaagc

SEQ ID NO: 1594731 - RNA, 19 nt, Artificial Sequence
  Description of Artificial Sequence: Synthetic oligonucleotide
  Sense strand starting at position 2040 of SEQ ID NO: 1560359
gcccauaaucaauggaaca

SEQ ID NO: 1594732 - RNA, 19 nt, Artificial Sequence
  Description of Artificial Sequence: Synthetic oligonucleotide
  Antisense strand to SEQ ID NO: 1594731
uguuccauugauuaugggc

SEQ ID NO: 1594733 - RNA, 19 nt, Artificial Sequence
  Description of Artificial Sequence: Synthetic oligonucleotide
  Sense strand starting at position 2055 of SEQ ID NO: 1560359
aacauaagcgcagauguuu

SEQ ID NO: 1594734 - RNA, 19 nt, Artificial Sequence
  Description of Artificial Sequence: Synthetic oligonucleotide
  Antisense strand to SEQ ID NO: 1594733
aaacaucugcgcuuauguu

SEQ ID NO: 1594735 - RNA, 19 nt, Artificial Sequence
  Description of Artificial Sequence: Synthetic oligonucleotide
  Sense strand starting at position 2163 of SEQ ID NO: 1560359
cccacuguuugucccaaga

SEQ ID NO: 1594736 - RNA, 19 nt, Artificial Sequence
  Description of Artificial Sequence: Synthetic oligonucleotide
  Antisense strand to SEQ ID NO: 1594735
ucuugggacaaacaguggg

SEQ ID NO: 1594737 - RNA, 19 nt, Artificial Sequence
  Description of Artificial Sequence: Synthetic oligonucleotide
  Sense strand starting at position 2706 of SEQ ID NO: 1560359
cagagcuguuugguccaua

SEQ ID NO: 1594738 - RNA, 19 nt, Artificial Sequence
  Description of Artificial Sequence: Synthetic oligonucleotide
  Antisense strand to SEQ ID NO: 1594737
uauggaccaaacagcucug

SEQ ID NO: 1594739 - RNA, 19 nt, Artificial Sequence
  Description of Artificial Sequence: Synthetic oligonucleotide
  Sense strand starting at position 2711 of SEQ ID NO: 1560359
cuguuugguccauagucaa

SEQ ID NO: 1594740 - RNA, 19 nt, Artificial Sequence
  Description of Artificial Sequence: Synthetic oligonucleotide
  Antisense strand to SEQ ID NO: 1594739
uugacuauggaccaaacag

SEQ ID NO: 1594741 - RNA, 19 nt, Artificial Sequence
  Description of Artificial Sequence: Synthetic oligonucleotide
  Sense strand starting at position 3018 of SEQ ID NO: 1560359
agaagucaguugucaaagu

SEQ ID NO: 1594742 - RNA, 19 nt, Artificial Sequence
  Description of Artificial Sequence: Synthetic oligonucleotide
  Antisense strand to SEQ ID NO: 1594741
acuuugacaacugacuucu

SEQ ID NO: 1594743 - RNA, 19 nt, Artificial Sequence
  Description of Artificial Sequence: Synthetic oligonucleotide
  Sense strand starting at position 3047 of SEQ ID NO: 1560359
ggagacagucucuguaucu

SEQ ID NO: 1594744 - RNA, 19 nt, Artificial Sequence
  Description of Artificial Sequence: Synthetic oligonucleotide
  Antisense strand to SEQ ID NO: 1594743
agauacagagacugucucc

SEQ ID NO: 1594745 - RNA, 19 nt, Artificial Sequence
  Description of Artificial Sequence: Synthetic oligonucleotide
  Sense strand starting at position 3048 of SEQ ID NO: 1560359
gagacagucucuguaucuu

SEQ ID NO: 1594746 - RNA, 19 nt, Artificial Sequence
  Description of Artificial Sequence: Synthetic oligonucleotide
  Antisense strand to SEQ ID NO: 1594745
aagauacagagacugucuc

SEQ ID NO: 1594747 - RNA, 19 nt, Artificial Sequence
  Description of Artificial Sequence: Synthetic oligonucleotide
  Sense strand starting at position 3060 of SEQ ID NO: 1560359
guaucuucacgggagguca

SEQ ID NO: 1594748 - RNA, 19 nt, Artificial Sequence
  Description of Artificial Sequence: Synthetic oligonucleotide
  Antisense strand to SEQ ID NO: 1594747
ugaccucccgugaagauac

SEQ ID NO: 1594749 - RNA, 19 nt, Artificial Sequence
  Description of Artificial Sequence: Synthetic oligonucleotide
  Sense strand starting at position 3295 of SEQ ID NO: 1560359
ccggcugauuggucaguaa

SEQ ID NO: 1594750 - RNA, 19 nt, Artificial Sequence
  Description of Artificial Sequence: Synthetic oligonucleotide
  Antisense strand to SEQ ID NO: 1594749
uuacugaccaaucagccgg

SEQ ID NO: 1594751 - RNA, 19 nt, Artificial Sequence
  Description of Artificial Sequence: Synthetic oligonucleotide
  Sense strand starting at position 3298 of SEQ ID NO: 1560359
gcugauuggucaguaaagu

SEQ ID NO: 1594752 - RNA, 19 nt, Artificial Sequence
  Description of Artificial Sequence: Synthetic oligonucleotide
  Antisense strand to SEQ ID NO: 1594751
acuuuacugaccaaucagc

SEQ ID NO: 1594753 - RNA, 19 nt, Artificial Sequence
  Description of Artificial Sequence: Synthetic oligonucleotide
  Sense strand starting at position 3299 of SEQ ID NO: 1560359
cugauuggucaguaaaguc

SEQ ID NO: 1594754 - RNA, 19 nt, Artificial Sequence
  Description of Artificial Sequence: Synthetic oligonucleotide
  Antisense strand to SEQ ID NO: 1594753
gacuuuacugaccaaucag

SEQ ID NO: 1594755 - RNA, 19 nt, Artificial Sequence
  Description of Artificial Sequence: Synthetic oligonucleotide
  Sense strand starting at position 3403 of SEQ ID NO: 1560359
ggugcaggcccuugaguua

SEQ ID NO: 1594756 - RNA, 19 nt, Artificial Sequence
  Description of Artificial Sequence: Synthetic oligonucleotide
  Antisense strand to SEQ ID NO: 1594755
uaacucaagggccugcacc

SEQ ID NO: 1594757 - RNA, 19 nt, Artificial Sequence
  Description of Artificial Sequence: Synthetic oligonucleotide
  Sense strand starting at position 3749 of SEQ ID NO: 1560359
agccgauugccugggagaa

SEQ ID NO: 1594758 - RNA, 19 nt, Artificial Sequence
  Description of Artificial Sequence: Synthetic oligonucleotide
  Antisense strand to SEQ ID NO: 1594757
uucucccaggcaaucggcu

SEQ ID NO: 1594759 - RNA, 19 nt, Artificial Sequence
  Description of Artificial Sequence: Synthetic oligonucleotide
  Sense strand starting at position 3750 of SEQ ID NO: 1560359
gccgauugccugggagaaa

SEQ ID NO: 1594760 - RNA, 19 nt, Artificial Sequence
  Description of Artificial Sequence: Synthetic oligonucleotide
  Antisense strand to SEQ ID NO: 1594759
uuucucccaggcaaucggc

SEQ ID NO: 1594761 - RNA, 19 nt, Artificial Sequence
  Description of Artificial Sequence: Synthetic oligonucleotide
  Sense strand starting at position 3886 of SEQ ID NO: 1560359
gcuacuuucuagcuauaag

SEQ ID NO: 1594762 - RNA, 19 nt, Artificial Sequence
  Description of Artificial Sequence: Synthetic oligonucleotide
  Antisense strand to SEQ ID NO: 1594761
cuuauagcuagaaaguagc

SEQ ID NO: 1594763 - RNA, 19 nt, Artificial Sequence
  Description of Artificial Sequence: Synthetic oligonucleotide
  Sense strand starting at position 2253 of SEQ ID NO: 1560360
cggcgaaauuuggugacgu

SEQ ID NO: 1594764 - RNA, 19 nt, Artificial Sequence
  Description of Artificial Sequence: Synthetic oligonucleotide
  Antisense strand to SEQ ID NO: 1594763
acgucaccaaauuucgccg

SEQ ID NO: 1594765 - RNA, 19 nt, Artificial Sequence
  Description of Artificial Sequence: Synthetic oligonucleotide
  Sense strand starting at position 2254 of SEQ ID NO: 1560360
ggcgaaauuuggugacgua

SEQ ID NO: 1594766 - RNA, 19 nt, Artificial Sequence
  Description of Artificial Sequence: Synthetic oligonucleotide
  Antisense strand to SEQ ID NO: 1594765
uacgucaccaaauuucgcc

SEQ ID NO: 1594767 - RNA, 19 nt, Artificial Sequence
  Description of Artificial Sequence: Synthetic oligonucleotide
  Sense strand starting at position 2255 of SEQ ID NO: 1560360
gcgaaauuuggugacguac

SEQ ID NO: 1594768 - RNA, 19 nt, Artificial Sequence
  Description of Artificial Sequence: Synthetic oligonucleotide
  Antisense strand to SEQ ID NO: 1594767
guacgucaccaaauuucgc

SEQ ID NO: 1594769 - RNA, 19 nt, Artificial Sequence
  Description of Artificial Sequence: Synthetic oligonucleotide
  Sense strand starting at position 2257 of SEQ ID NO: 1560360
gaaauuuggugacguacuu

SEQ ID NO: 1594770 - RNA, 19 nt, Artificial Sequence
  Description of Artificial Sequence: Synthetic oligonucleotide
  Antisense strand to SEQ ID NO: 1594769
aaguacgucaccaaauuuc

SEQ ID NO: 1594771 - RNA, 19 nt, Artificial Sequence
  Description of Artificial Sequence: Synthetic oligonucleotide
  Sense strand starting at position 2280 of SEQ ID NO: 1560360
uggcuaucucugcgucaga

SEQ ID NO: 1594772 - RNA, 19 nt, Artificial Sequence
  Description of Artificial Sequence: Synthetic oligonucleotide
  Antisense strand to SEQ ID NO: 1594771
ucugacgcagagauagcca

SEQ ID NO: 1594773 - RNA, 19 nt, Artificial Sequence
  Description of Artificial Sequence: Synthetic oligonucleotide
  Sense strand starting at position 2281 of SEQ ID NO: 1560360
ggcuaucucugcgucagag

SEQ ID NO: 1594774 - RNA, 19 nt, Artificial Sequence
  Description of Artificial Sequence: Synthetic oligonucleotide
  Antisense strand to SEQ ID NO: 1594773
cucugacgcagagauagcc

SEQ ID NO: 1594775 - RNA, 19 nt, Artificial Sequence
  Description of Artificial Sequence: Synthetic oligonucleotide
  Sense strand starting at position 2290 of SEQ ID NO: 1560360
ugcgucagagcguauagaa

SEQ ID NO: 1594776 - RNA, 19 nt, Artificial Sequence
  Description of Artificial Sequence: Synthetic oligonucleotide
  Antisense strand to SEQ ID NO: 1594775
uucuauacgcucugacgca

SEQ ID NO: 1594777 - RNA, 19 nt, Artificial Sequence
  Description of Artificial Sequence: Synthetic oligonucleotide
  Sense strand starting at position 2316 of SEQ ID NO: 1560360
gcgcgauacccuuaaggac

SEQ ID NO: 1594778 - RNA, 19 nt, Artificial Sequence
  Description of Artificial Sequence: Synthetic oligonucleotide
  Antisense strand to SEQ ID NO: 1594777
guccuuaaggguaucgcgc

SEQ ID NO: 1594779 - RNA, 19 nt, Artificial Sequence
  Description of Artificial Sequence: Synthetic oligonucleotide
  Sense strand starting at position 2588 of SEQ ID NO: 1560360
uguauauucuaguaugugu

SEQ ID NO: 1594780 - RNA, 19 nt, Artificial Sequence
  Description of Artificial Sequence: Synthetic oligonucleotide
  Antisense strand to SEQ ID NO: 1594779
acacauacuagaauauaca

SEQ ID NO: 1594781 - RNA, 19 nt, Artificial Sequence
  Description of Artificial Sequence: Synthetic oligonucleotide
  Sense strand starting at position 2590 of SEQ ID NO: 1560360
uauauucuaguauguguca

SEQ ID NO: 1594782 - RNA, 19 nt, Artificial Sequence
  Description of Artificial Sequence: Synthetic oligonucleotide
  Antisense strand to SEQ ID NO: 1594781
ugacacauacuagaauaua

SEQ ID NO: 1594783 - RNA, 19 nt, Artificial Sequence
  Description of Artificial Sequence: Synthetic oligonucleotide
  Sense strand starting at position 2593 of SEQ ID NO: 1560360
auucuaguaugugucagaa

SEQ ID NO: 1594784 - RNA, 19 nt, Artificial Sequence
  Description of Artificial Sequence: Synthetic oligonucleotide
  Antisense strand to SEQ ID NO: 1594783
uucugacacauacuagaau

SEQ ID NO: 1594785 - RNA, 19 nt, Artificial Sequence
  Description of Artificial Sequence: Synthetic oligonucleotide
  Sense strand starting at position 2595 of SEQ ID NO: 1560360
ucuaguaugugucagaauu

SEQ ID NO: 1594786 - RNA, 19 nt, Artificial Sequence
  Description of Artificial Sequence: Synthetic oligonucleotide
  Antisense strand to SEQ ID NO: 1594785
aauucugacacauacuaga

SEQ ID NO: 1594787 - RNA, 19 nt, Artificial Sequence
  Description of Artificial Sequence: Synthetic oligonucleotide
  Sense strand starting at position 2990 of SEQ ID NO: 1560360
ucaauuccuuuggauaaag

SEQ ID NO: 1594788 - RNA, 19 nt, Artificial Sequence
  Description of Artificial Sequence: Synthetic oligonucleotide
  Antisense strand to SEQ ID NO: 1594787
cuuuauccaaaggaauuga

SEQ ID NO: 1594789 - RNA, 19 nt, Artificial Sequence
  Description of Artificial Sequence: Synthetic oligonucleotide
  Sense strand starting at position 3017 of SEQ ID NO: 1560360
gugggauuccuggaucacc

SEQ ID NO: 1594790 - RNA, 19 nt, Artificial Sequence
  Description of Artificial Sequence: Synthetic oligonucleotide
  Antisense strand to SEQ ID NO: 1594789
ggugauccaggaaucccac

SEQ ID NO: 1594791 - RNA, 19 nt, Artificial Sequence
  Description of Artificial Sequence: Synthetic oligonucleotide
  Sense strand starting at position 3025 of SEQ ID NO: 1560360
ccuggaucaccugguaguu

SEQ ID NO: 1594792 - RNA, 19 nt, Artificial Sequence
  Description of Artificial Sequence: Synthetic oligonucleotide
  Antisense strand to SEQ ID NO: 1594791
aacuaccaggugauccagg

SEQ ID NO: 1594793 - RNA, 19 nt, Artificial Sequence
  Description of Artificial Sequence: Synthetic oligonucleotide
  Sense strand starting at position 3152 of SEQ ID NO: 1560360
guuuguuaccuuucgucuu

SEQ ID NO: 1594794 - RNA, 19 nt, Artificial Sequence
  Description of Artificial Sequence: Synthetic oligonucleotide
  Antisense strand to SEQ ID NO: 1594793
aagacgaaagguaacaaac

SEQ ID NO: 1594795 - RNA, 19 nt, Artificial Sequence
  Description of Artificial Sequence: Synthetic oligonucleotide
  Sense strand starting at position 3174 of SEQ ID NO: 1560360
gaugauagcuauucuagca

SEQ ID NO: 1594796 - RNA, 19 nt, Artificial Sequence
  Description of Artificial Sequence: Synthetic oligonucleotide
  Antisense strand to SEQ ID NO: 1594795
ugcuagaauagcuaucauc

SEQ ID NO: 1594797 - RNA, 19 nt, Artificial Sequence
  Description of Artificial Sequence: Synthetic oligonucleotide
  Sense strand starting at position 3190 of SEQ ID NO: 1560360
gcaguuguaaggugaucca

SEQ ID NO: 1594798 - RNA, 19 nt, Artificial Sequence
  Description of Artificial Sequence: Synthetic oligonucleotide
  Antisense strand to SEQ ID NO: 1594797
uggaucaccuuacaacugc

SEQ ID NO: 1594799 - RNA, 19 nt, Artificial Sequence
  Description of Artificial Sequence: Synthetic oligonucleotide
  Sense strand starting at position 3193 of SEQ ID NO: 1560360
guuguaaggugauccauuc

SEQ ID NO: 1594800 - RNA, 19 nt, Artificial Sequence
  Description of Artificial Sequence: Synthetic oligonucleotide
  Antisense strand to SEQ ID NO: 1594799
gaauggaucaccuuacaac

SEQ ID NO: 1594801 - RNA, 19 nt, Artificial Sequence
  Description of Artificial Sequence: Synthetic oligonucleotide
  Sense strand starting at position 3202 of SEQ ID NO: 1560360
ugauccauucccuggcauu

SEQ ID NO: 1594802 - RNA, 19 nt, Artificial Sequence
  Description of Artificial Sequence: Synthetic oligonucleotide
  Antisense strand to SEQ ID NO: 1594801
aaugccagggaauggauca

SEQ ID NO: 1594803 - RNA, 19 nt, Artificial Sequence
  Description of Artificial Sequence: Synthetic oligonucleotide
  Sense strand starting at position 3254 of SEQ ID NO: 1560360
aaucuuuggugacccgaau

SEQ ID NO: 1594804 - RNA, 19 nt, Artificial Sequence
  Description of Artificial Sequence: Synthetic oligonucleotide
  Antisense strand to SEQ ID NO: 1594803
auucgggucaccaaagauu

SEQ ID NO: 1594805 - RNA, 19 nt, Artificial Sequence
  Description of Artificial Sequence: Synthetic oligonucleotide
  Sense strand starting at position 3281 of SEQ ID NO: 1560360
uuuaaaguuuauucgaggu

SEQ ID NO: 1594806 - RNA, 19 nt, Artificial Sequence
  Description of Artificial Sequence: Synthetic oligonucleotide
  Antisense strand to SEQ ID NO: 1594805
accucgaauaaacuuuaaa

SEQ ID NO: 1594807 - RNA, 19 nt, Artificial Sequence
  Description of Artificial Sequence: Synthetic oligonucleotide
  Sense strand starting at position 3283 of SEQ ID NO: 1560360
uaaaguuuauucgaggugu

SEQ ID NO: 1594808 - RNA, 19 nt, Artificial Sequence
  Description of Artificial Sequence: Synthetic oligonucleotide
  Antisense strand to SEQ ID NO: 1594807
acaccucgaauaaacuuua

SEQ ID NO: 1594809 - RNA, 19 nt, Artificial Sequence
  Description of Artificial Sequence: Synthetic oligonucleotide
  Sense strand starting at position 3285 of SEQ ID NO: 1560360
aaguuuauucgagguguaa

SEQ ID NO: 1594810 - RNA, 19 nt, Artificial Sequence
  Description of Artificial Sequence: Synthetic oligonucleotide
  Antisense strand to SEQ ID NO: 1594809
uuacaccucgaauaaacuu

SEQ ID NO: 1594811 - RNA, 19 nt, Artificial Sequence
  Description of Artificial Sequence: Synthetic oligonucleotide
  Sense strand starting at position 3287 of SEQ ID NO: 1560360
guuuauucgagguguaaua

SEQ ID NO: 1594812 - RNA, 19 nt, Artificial Sequence
  Description of Artificial Sequence: Synthetic oligonucleotide
  Antisense strand to SEQ ID NO: 1594811
uauuacaccucgaauaaac

SEQ ID NO: 1594813 - RNA, 19 nt, Artificial Sequence
  Description of Artificial Sequence: Synthetic oligonucleotide
  Sense strand starting at position 3289 of SEQ ID NO: 1560360
uuauucgagguguaauaua

SEQ ID NO: 1594814 - RNA, 19 nt, Artificial Sequence
  Description of Artificial Sequence: Synthetic oligonucleotide
  Antisense strand to SEQ ID NO: 1594813
uauauuacaccucgaauaa

SEQ ID NO: 1594815 - RNA, 19 nt, Artificial Sequence
  Description of Artificial Sequence: Synthetic oligonucleotide
  Sense strand starting at position 3670 of SEQ ID NO: 1560360
gcagcuauguagccaguau

SEQ ID NO: 1594816 - RNA, 19 nt, Artificial Sequence
  Description of Artificial Sequence: Synthetic oligonucleotide
  Antisense strand to SEQ ID NO: 1594815
auacuggcuacauagcugc

SEQ ID NO: 1594817 - RNA, 19 nt, Artificial Sequence
  Description of Artificial Sequence: Synthetic oligonucleotide
  Sense strand starting at position 3674 of SEQ ID NO: 1560360
cuauguagccaguaucaca

SEQ ID NO: 1594818 - RNA, 19 nt, Artificial Sequence
  Description of Artificial Sequence: Synthetic oligonucleotide
  Antisense strand to SEQ ID NO: 1594817
ugugauacuggcuacauag

SEQ ID NO: 1594819 - RNA, 19 nt, Artificial Sequence
  Description of Artificial Sequence: Synthetic oligonucleotide
  Sense strand starting at position 3719 of SEQ ID NO: 1560360
ucagaauuguuaucucaug

SEQ ID NO: 1594820 - RNA, 19 nt, Artificial Sequence
  Description of Artificial Sequence: Synthetic oligonucleotide
  Antisense strand to SEQ ID NO: 1594819
caugagauaacaauucuga

SEQ ID NO: 1594821 - RNA, 19 nt, Artificial Sequence
  Description of Artificial Sequence: Synthetic oligonucleotide
  Sense strand starting at position 100 of SEQ ID NO: 1560361
gugcgaucauggcauugca

SEQ ID NO: 1594822 - RNA, 19 nt, Artificial Sequence
  Description of Artificial Sequence: Synthetic oligonucleotide
  Antisense strand to SEQ ID NO: 1594821
ugcaaugccaugaucgcac

SEQ ID NO: 1594823 - RNA, 19 nt, Artificial Sequence
  Description of Artificial Sequence: Synthetic oligonucleotide
  Sense strand starting at position 119 of SEQ ID NO: 1560361
gccucaauccugggcucaa

SEQ ID NO: 1594824 - RNA, 19 nt, Artificial Sequence
  Description of Artificial Sequence: Synthetic oligonucleotide
  Antisense strand to SEQ ID NO: 1594823
uugagcccaggauugaggc

SEQ ID NO: 1594825 - RNA, 19 nt, Artificial Sequence
  Description of Artificial Sequence: Synthetic oligonucleotide
  Sense strand starting at position 364 of SEQ ID NO: 1560361
uuguuuauauacuggguaa

SEQ ID NO: 1594826 - RNA, 19 nt, Artificial Sequence
  Description of Artificial Sequence: Synthetic oligonucleotide
  Antisense strand to SEQ ID NO: 1594825
uuacccaguauauaaacaa

SEQ ID NO: 1594827 - RNA, 19 nt, Artificial Sequence
  Description of Artificial Sequence: Synthetic oligonucleotide
  Sense strand starting at position 366 of SEQ ID NO: 1560361
guuuauauacuggguaaag

SEQ ID NO: 1594828 - RNA, 19 nt, Artificial Sequence
  Description of Artificial Sequence: Synthetic oligonucleotide
  Antisense strand to SEQ ID NO: 1594827
cuuuacccaguauauaaac

SEQ ID NO: 1594829 - RNA, 19 nt, Artificial Sequence
  Description of Artificial Sequence: Synthetic oligonucleotide
  Sense strand starting at position 368 of SEQ ID NO: 1560361
uuauauacuggguaaagcu

SEQ ID NO: 1594830 - RNA, 19 nt, Artificial Sequence
  Description of Artificial Sequence: Synthetic oligonucleotide
  Antisense strand to SEQ ID NO: 1594829
agcuuuacccaguauauaa

SEQ ID NO: 1594831 - RNA, 19 nt, Artificial Sequence
  Description of Artificial Sequence: Synthetic oligonucleotide
  Sense strand starting at position 401 of SEQ ID NO: 1560361
ggcuauuaguaguugaacu

SEQ ID NO: 1594832 - RNA, 19 nt, Artificial Sequence
  Description of Artificial Sequence: Synthetic oligonucleotide
  Antisense strand to SEQ ID NO: 1594831
aguucaacuacuaauagcc

SEQ ID NO: 1594833 - RNA, 19 nt, Artificial Sequence
  Description of Artificial Sequence: Synthetic oligonucleotide
  Sense strand starting at position 403 of SEQ ID NO: 1560361
cuauuaguaguugaacuuu

SEQ ID NO: 1594834 - RNA, 19 nt, Artificial Sequence
  Description of Artificial Sequence: Synthetic oligonucleotide
  Antisense strand to SEQ ID NO: 1594833
aaaguucaacuacuaauag

SEQ ID NO: 1594835 - RNA, 19 nt, Artificial Sequence
  Description of Artificial Sequence: Synthetic oligonucleotide
  Sense strand starting at position 491 of SEQ ID NO: 1560361
gagucaacuccguagccuu

SEQ ID NO: 1594836 - RNA, 19 nt, Artificial Sequence
  Description of Artificial Sequence: Synthetic oligonucleotide
  Antisense strand to SEQ ID NO: 1594835
aaggcuacggaguugacuc

SEQ ID NO: 1594837 - RNA, 19 nt, Artificial Sequence
  Description of Artificial Sequence: Synthetic oligonucleotide
  Sense strand starting at position 599 of SEQ ID NO: 1560361
uugcgaguuucacauggua

SEQ ID NO: 1594838 - RNA, 19 nt, Artificial Sequence
  Description of Artificial Sequence: Synthetic oligonucleotide
  Antisense strand to SEQ ID NO: 1594837
uaccaugugaaacucgcaa

SEQ ID NO: 1594839 - RNA, 19 nt, Artificial Sequence
  Description of Artificial Sequence: Synthetic oligonucleotide
  Sense strand starting at position 612 of SEQ ID NO: 1560361
augguauaacagcgucauu

SEQ ID NO: 1594840 - RNA, 19 nt, Artificial Sequence
  Description of Artificial Sequence: Synthetic oligonucleotide
  Antisense strand to SEQ ID NO: 1594839
aaugacgcuguuauaccau

SEQ ID NO: 1594841 - RNA, 19 nt, Artificial Sequence
  Description of Artificial Sequence: Synthetic oligonucleotide
  Sense strand starting at position 615 of SEQ ID NO: 1560361
guauaacagcgucauuauc

SEQ ID NO: 1594842 - RNA, 19 nt, Artificial Sequence
  Description of Artificial Sequence: Synthetic oligonucleotide
  Antisense strand to SEQ ID NO: 1594841
gauaaugacgcuguuauac

SEQ ID NO: 1594843 - RNA, 19 nt, Artificial Sequence
  Description of Artificial Sequence: Synthetic oligonucleotide
  Sense strand starting at position 648 of SEQ ID NO: 1560361
cucuccuacucggaaauca

SEQ ID NO: 1594844 - RNA, 19 nt, Artificial Sequence
  Description of Artificial Sequence: Synthetic oligonucleotide
  Antisense strand to SEQ ID NO: 1594843
ugauuuccgaguaggagag

SEQ ID NO: 1594845 - RNA, 19 nt, Artificial Sequence
  Description of Artificial Sequence: Synthetic oligonucleotide
  Sense strand starting at position 667 of SEQ ID NO: 1560361
aauguucucuccugggaac

SEQ ID NO: 1594846 - RNA, 19 nt, Artificial Sequence
  Description of Artificial Sequence: Synthetic oligonucleotide
  Antisense strand to SEQ ID NO: 1594845
guucccaggagagaacauu

SEQ ID NO: 1594847 - RNA, 19 nt, Artificial Sequence
  Description of Artificial Sequence: Synthetic oligonucleotide
  Sense strand starting at position 668 of SEQ ID NO: 1560361
auguucucuccugggaacu

SEQ ID NO: 1594848 - RNA, 19 nt, Artificial Sequence
  Description of Artificial Sequence: Synthetic oligonucleotide
  Antisense strand to SEQ ID NO: 1594847
aguucccaggagagaacau

SEQ ID NO: 1594849 - RNA, 19 nt, Artificial Sequence
  Description of Artificial Sequence: Synthetic oligonucleotide
  Sense strand starting at position 670 of SEQ ID NO: 1560361
guucucuccugggaacuga

SEQ ID NO: 1594850 - RNA, 19 nt, Artificial Sequence
  Description of Artificial Sequence: Synthetic oligonucleotide
  Antisense strand to SEQ ID NO: 1594849
ucaguucccaggagagaac

SEQ ID NO: 1594851 - RNA, 19 nt, Artificial Sequence
  Description of Artificial Sequence: Synthetic oligonucleotide
  Sense strand starting at position 680 of SEQ ID NO: 1560361
gggaacugauuucagagua

SEQ ID NO: 1594852 - RNA, 19 nt, Artificial Sequence
  Description of Artificial Sequence: Synthetic oligonucleotide
  Antisense strand to SEQ ID NO: 1594851
uacucugaaaucaguuccc

SEQ ID NO: 1594853 - RNA, 19 nt, Artificial Sequence
  Description of Artificial Sequence: Synthetic oligonucleotide
  Sense strand starting at position 692 of SEQ ID NO: 1560361
cagaguagcuguccucaag

SEQ ID NO: 1594854 - RNA, 19 nt, Artificial Sequence
  Description of Artificial Sequence: Synthetic oligonucleotide
  Antisense strand to SEQ ID NO: 1594853
cuugaggacagcuacucug

SEQ ID NO: 1594855 - RNA, 19 nt, Artificial Sequence
  Description of Artificial Sequence: Synthetic oligonucleotide
  Sense strand starting at position 849 of SEQ ID NO: 1560361
gggacaaacuuccucgaca

SEQ ID NO: 1594856 - RNA, 19 nt, Artificial Sequence
  Description of Artificial Sequence: Synthetic oligonucleotide
  Antisense strand to SEQ ID NO: 1594855
ugucgaggaaguuuguccc

SEQ ID NO: 1594857 - RNA, 19 nt, Artificial Sequence
  Description of Artificial Sequence: Synthetic oligonucleotide
  Sense strand starting at position 2097 of SEQ ID NO: 1560361
cagcccuguguggagaauu

SEQ ID NO: 1594858 - RNA, 19 nt, Artificial Sequence
  Description of Artificial Sequence: Synthetic oligonucleotide
  Antisense strand to SEQ ID NO: 1594857
aauucuccacacagggcug

SEQ ID NO: 1594859 - RNA, 19 nt, Artificial Sequence
  Description of Artificial Sequence: Synthetic oligonucleotide
  Sense strand starting at position 2223 of SEQ ID NO: 1560361
ugugcuuucucuccaccau

SEQ ID NO: 1594860 - RNA, 19 nt, Artificial Sequence
  Description of Artificial Sequence: Synthetic oligonucleotide
  Antisense strand to SEQ ID NO: 1594859
augguggagagaaagcaca

SEQ ID NO: 1594861 - RNA, 19 nt, Artificial Sequence
  Description of Artificial Sequence: Synthetic oligonucleotide
  Sense strand starting at position 2320 of SEQ ID NO: 1560361
cuucucgauuucugagacu

SEQ ID NO: 1594862 - RNA, 19 nt, Artificial Sequence
  Description of Artificial Sequence: Synthetic oligonucleotide
  Antisense strand to SEQ ID NO: 1594861
agucucagaaaucgagaag

SEQ ID NO: 1594863 - RNA, 19 nt, Artificial Sequence
  Description of Artificial Sequence: Synthetic oligonucleotide
  Sense strand starting at position 2389 of SEQ ID NO: 1560361
cugagccuucccugggaau

SEQ ID NO: 1594864 - RNA, 19 nt, Artificial Sequence
  Description of Artificial Sequence: Synthetic oligonucleotide
  Antisense strand to SEQ ID NO: 1594863
auucccagggaaggcucag

SEQ ID NO: 1594865 - RNA, 19 nt, Artificial Sequence
  Description of Artificial Sequence: Synthetic oligonucleotide
  Sense strand starting at position 2716 of SEQ ID NO: 1560361
gccagaugucucugaggcu

SEQ ID NO: 1594866 - RNA, 19 nt, Artificial Sequence
  Description of Artificial Sequence: Synthetic oligonucleotide
  Antisense strand to SEQ ID NO: 1594865
agccucagagacaucuggc

SEQ ID NO: 1594867 - RNA, 19 nt, Artificial Sequence
  Description of Artificial Sequence: Synthetic oligonucleotide
  Sense strand starting at position 2811 of SEQ ID NO: 1560361
gggccauuagccugagguu

SEQ ID NO: 1594868 - RNA, 19 nt, Artificial Sequence
  Description of Artificial Sequence: Synthetic oligonucleotide
  Antisense strand to SEQ ID NO: 1594867
aaccucaggcuaauggccc

SEQ ID NO: 1594869 - RNA, 19 nt, Artificial Sequence
  Description of Artificial Sequence: Synthetic oligonucleotide
  Sense strand starting at position 2814 of SEQ ID NO: 1560361
ccauuagccugagguucua

SEQ ID NO: 1594870 - RNA, 19 nt, Artificial Sequence
  Description of Artificial Sequence: Synthetic oligonucleotide
  Antisense strand to SEQ ID NO: 1594869
uagaaccucaggcuaaugg

SEQ ID NO: 1594871 - RNA, 19 nt, Artificial Sequence
  Description of Artificial Sequence: Synthetic oligonucleotide
  Sense strand starting at position 3670 of SEQ ID NO: 1560361
gccagcucugcucugugau

SEQ ID NO: 1594872 - RNA, 19 nt, Artificial Sequence
  Description of Artificial Sequence: Synthetic oligonucleotide
  Antisense strand to SEQ ID NO: 1594871
aucacagagcagagcuggc

SEQ ID NO: 1594873 - RNA, 19 nt, Artificial Sequence
  Description of Artificial Sequence: Synthetic oligonucleotide
  Sense strand starting at position 3671 of SEQ ID NO: 1560361
ccagcucugcucugugauu

SEQ ID NO: 1594874 - RNA, 19 nt, Artificial Sequence
  Description of Artificial Sequence: Synthetic oligonucleotide
  Antisense strand to SEQ ID NO: 1594873
aaucacagagcagagcugg

SEQ ID NO: 1594875 - RNA, 19 nt, Artificial Sequence
  Description of Artificial Sequence: Synthetic oligonucleotide
  Sense strand starting at position 3730 of SEQ ID NO: 1560361
cugucagucugucucuauu

SEQ ID NO: 1594876 - RNA, 19 nt, Artificial Sequence
  Description of Artificial Sequence: Synthetic oligonucleotide
  Antisense strand to SEQ ID NO: 1594875
aauagagacagacugacag

SEQ ID NO: 1594877 - RNA, 19 nt, Artificial Sequence
  Description of Artificial Sequence: Synthetic oligonucleotide
  Sense strand starting at position 3740 of SEQ ID NO: 1560361
gucucuauuuccugccuca

SEQ ID NO: 1594878 - RNA, 19 nt, Artificial Sequence
  Description of Artificial Sequence: Synthetic oligonucleotide
  Antisense strand to SEQ ID NO: 1594877
ugaggcaggaaauagagac

SEQ ID NO: 1594879 - RNA, 19 nt, Artificial Sequence
  Description of Artificial Sequence: Synthetic oligonucleotide
  Sense strand starting at position 3795 of SEQ ID NO: 1560361
gcguguaugggucaccuga

SEQ ID NO: 1594880 - RNA, 19 nt, Artificial Sequence
  Description of Artificial Sequence: Synthetic oligonucleotide
  Antisense strand to SEQ ID NO: 1594879
ucaggugacccauacacgc

SEQ ID NO: 1594881 - RNA, 19 nt, Artificial Sequence
  Description of Artificial Sequence: Synthetic oligonucleotide
  Sense strand starting at position 2155 of SEQ ID NO: 1560362
ucgaacuacccagagcaau

SEQ ID NO: 1594882 - RNA, 19 nt, Artificial Sequence
  Description of Artificial Sequence: Synthetic oligonucleotide
  Antisense strand to SEQ ID NO: 1594881
auugcucuggguaguucga

SEQ ID NO: 1594883 - RNA, 19 nt, Artificial Sequence
  Description of Artificial Sequence: Synthetic oligonucleotide
  Sense strand starting at position 2192 of SEQ ID NO: 1560362
cgggauauuaagcaguagu

SEQ ID NO: 1594884 - RNA, 19 nt, Artificial Sequence
  Description of Artificial Sequence: Synthetic oligonucleotide
  Antisense strand to SEQ ID NO: 1594883
acuacugcuuaauaucccg

SEQ ID NO: 1594885 - RNA, 19 nt, Artificial Sequence
  Description of Artificial Sequence: Synthetic oligonucleotide
  Sense strand starting at position 2195 of SEQ ID NO: 1560362
gauauuaagcaguagugau

SEQ ID NO: 1594886 - RNA, 19 nt, Artificial Sequence
  Description of Artificial Sequence: Synthetic oligonucleotide
  Antisense strand to SEQ ID NO: 1594885
aucacuacugcuuaauauc

SEQ ID NO: 1594887 - RNA, 19 nt, Artificial Sequence
  Description of Artificial Sequence: Synthetic oligonucleotide
  Sense strand starting at position 2202 of SEQ ID NO: 1560362
agcaguagugauuauguuu

SEQ ID NO: 1594888 - RNA, 19 nt, Artificial Sequence
  Description of Artificial Sequence: Synthetic oligonucleotide
  Antisense strand to SEQ ID NO: 1594887
aaacauaaucacuacugcu

SEQ ID NO: 1594889 - RNA, 19 nt, Artificial Sequence
  Description of Artificial Sequence: Synthetic oligonucleotide
  Sense strand starting at position 2207 of SEQ ID NO: 1560362
uagugauuauguuugccau

SEQ ID NO: 1594890 - RNA, 19 nt, Artificial Sequence
  Description of Artificial Sequence: Synthetic oligonucleotide
  Antisense strand to SEQ ID NO: 1594889
auggcaaacauaaucacua

SEQ ID NO: 1594891 - RNA, 19 nt, Artificial Sequence
  Description of Artificial Sequence: Synthetic oligonucleotide
  Sense strand starting at position 2208 of SEQ ID NO: 1560362
agugauuauguuugccauc

SEQ ID NO: 1594892 - RNA, 19 nt, Artificial Sequence
  Description of Artificial Sequence: Synthetic oligonucleotide
  Antisense strand to SEQ ID NO: 1594891
gauggcaaacauaaucacu

SEQ ID NO: 1594893 - RNA, 19 nt, Artificial Sequence
  Description of Artificial Sequence: Synthetic oligonucleotide
  Sense strand starting at position 2209 of SEQ ID NO: 1560362
gugauuauguuugccauca

SEQ ID NO: 1594894 - RNA, 19 nt, Artificial Sequence
  Description of Artificial Sequence: Synthetic oligonucleotide
  Antisense strand to SEQ ID NO: 1594893
ugauggcaaacauaaucac

SEQ ID NO: 1594895 - RNA, 19 nt, Artificial Sequence
  Description of Artificial Sequence: Synthetic oligonucleotide
  Sense strand starting at position 2214 of SEQ ID NO: 1560362
uauguuugccaucaugugu

SEQ ID NO: 1594896 - RNA, 19 nt, Artificial Sequence
  Description of Artificial Sequence: Synthetic oligonucleotide
  Antisense strand to SEQ ID NO: 1594895
acacaugauggcaaacaua

SEQ ID NO: 1594897 - RNA, 19 nt, Artificial Sequence
  Description of Artificial Sequence: Synthetic oligonucleotide
  Sense strand starting at position 2252 of SEQ ID NO: 1560362
guggcuucccaagggaauu

SEQ ID NO: 1594898 - RNA, 19 nt, Artificial Sequence
  Description of Artificial Sequence: Synthetic oligonucleotide
  Antisense strand to SEQ ID NO: 1594897
aauucccuugggaagccac

SEQ ID NO: 1594899 - RNA, 19 nt, Artificial Sequence
  Description of Artificial Sequence: Synthetic oligonucleotide
  Sense strand starting at position 2318 of SEQ ID NO: 1560362
ggaaguuacuguugccagu

SEQ ID NO: 1594900 - RNA, 19 nt, Artificial Sequence
  Description of Artificial Sequence: Synthetic oligonucleotide
  Antisense strand to SEQ ID NO: 1594899
acuggcaacaguaacuucc

SEQ ID NO: 1594901 - RNA, 19 nt, Artificial Sequence
  Description of Artificial Sequence: Synthetic oligonucleotide
  Sense strand starting at position 2328 of SEQ ID NO: 1560362
guugccaguuucuaacuuu

SEQ ID NO: 1594902 - RNA, 19 nt, Artificial Sequence
  Description of Artificial Sequence: Synthetic oligonucleotide
  Antisense strand to SEQ ID NO: 1594901
aaaguuagaaacuggcaac

SEQ ID NO: 1594903 - RNA, 19 nt, Artificial Sequence
  Description of Artificial Sequence: Synthetic oligonucleotide
  Sense strand starting at position 2389 of SEQ ID NO: 1560362
gcaucagugccgggagaga

SEQ ID NO: 1594904 - RNA, 19 nt, Artificial Sequence
  Description of Artificial Sequence: Synthetic oligonucleotide
  Antisense strand to SEQ ID NO: 1594903
ucucucccggcacugaugc

SEQ ID NO: 1594905 - RNA, 19 nt, Artificial Sequence
  Description of Artificial Sequence: Synthetic oligonucleotide
  Sense strand starting at position 2398 of SEQ ID NO: 1560362
ccgggagagagcuguaaga

SEQ ID NO: 1594906 - RNA, 19 nt, Artificial Sequence
  Description of Artificial Sequence: Synthetic oligonucleotide
  Antisense strand to SEQ ID NO: 1594905
ucuuacagcucucucccgg

SEQ ID NO: 1594907 - RNA, 19 nt, Artificial Sequence
  Description of Artificial Sequence: Synthetic oligonucleotide
  Sense strand starting at position 2405 of SEQ ID NO: 1560362
agagcuguaagaugcuuau

SEQ ID NO: 1594908 - RNA, 19 nt, Artificial Sequence
  Description of Artificial Sequence: Synthetic oligonucleotide
  Antisense strand to SEQ ID NO: 1594907
auaagcaucuuacagcucu

SEQ ID NO: 1594909 - RNA, 19 nt, Artificial Sequence
  Description of Artificial Sequence: Synthetic oligonucleotide
  Sense strand starting at position 2408 of SEQ ID NO: 1560362
gcuguaagaugcuuaucag

SEQ ID NO: 1594910 - RNA, 19 nt, Artificial Sequence
  Description of Artificial Sequence: Synthetic oligonucleotide
  Antisense strand to SEQ ID NO: 1594909
cugauaagcaucuuacagc

SEQ ID NO: 1594911 - RNA, 19 nt, Artificial Sequence
  Description of Artificial Sequence: Synthetic oligonucleotide
  Sense strand starting at position 2409 of SEQ ID NO: 1560362
cuguaagaugcuuaucagu

SEQ ID NO: 1594912 - RNA, 19 nt, Artificial Sequence
  Description of Artificial Sequence: Synthetic oligonucleotide
  Antisense strand to SEQ ID NO: 1594911
acugauaagcaucuuacag

SEQ ID NO: 1594913 - RNA, 19 nt, Artificial Sequence
  Description of Artificial Sequence: Synthetic oligonucleotide
  Sense strand starting at position 2411 of SEQ ID NO: 1560362
guaagaugcuuaucaguau

SEQ ID NO: 1594914 - RNA, 19 nt, Artificial Sequence
  Description of Artificial Sequence: Synthetic oligonucleotide
  Antisense strand to SEQ ID NO: 1594913
auacugauaagcaucuuac

SEQ ID NO: 1594915 - RNA, 19 nt, Artificial Sequence
  Description of Artificial Sequence: Synthetic oligonucleotide
  Sense strand starting at position 2414 of SEQ ID NO: 1560362
agaugcuuaucaguauaaa

SEQ ID NO: 1594916 - RNA, 19 nt, Artificial Sequence
  Description of Artificial Sequence: Synthetic oligonucleotide
  Antisense strand to SEQ ID NO: 1594915
uuuauacugauaagcaucu

SEQ ID NO: 1594917 - RNA, 19 nt, Artificial Sequence
  Description of Artificial Sequence: Synthetic oligonucleotide
  Sense strand starting at position 2415 of SEQ ID NO: 1560362
gaugcuuaucaguauaaag

SEQ ID NO: 1594918 - RNA, 19 nt, Artificial Sequence
  Description of Artificial Sequence: Synthetic oligonucleotide
  Antisense strand to SEQ ID NO: 1594917
cuuuauacugauaagcauc

SEQ ID NO: 1594919 - RNA, 19 nt, Artificial Sequence
  Description of Artificial Sequence: Synthetic oligonucleotide
  Sense strand starting at position 2417 of SEQ ID NO: 1560362
ugcuuaucaguauaaagag

SEQ ID NO: 1594920 - RNA, 19 nt, Artificial Sequence
  Description of Artificial Sequence: Synthetic oligonucleotide
  Antisense strand to SEQ ID NO: 1594919
cucuuuauacugauaagca

SEQ ID NO: 1594921 - RNA, 19 nt, Artificial Sequence
  Description of Artificial Sequence: Synthetic oligonucleotide
  Sense strand starting at position 2680 of SEQ ID NO: 1560362
aagucaggaguucgaaaca

SEQ ID NO: 1594922 - RNA, 19 nt, Artificial Sequence
  Description of Artificial Sequence: Synthetic oligonucleotide
  Antisense strand to SEQ ID NO: 1594921
uguuucgaacuccugacuu

SEQ ID NO: 1594923 - RNA, 19 nt, Artificial Sequence
  Description of Artificial Sequence: Synthetic oligonucleotide
  Sense strand starting at position 2971 of SEQ ID NO: 1560362
gcacuagccuuaggaggaa

SEQ ID NO: 1594924 - RNA, 19 nt, Artificial Sequence
  Description of Artificial Sequence: Synthetic oligonucleotide
  Antisense strand to SEQ ID NO: 1594923
uuccuccuaaggcuagugc

SEQ ID NO: 1594925 - RNA, 19 nt, Artificial Sequence
  Description of Artificial Sequence: Synthetic oligonucleotide
  Sense strand starting at position 2987 of SEQ ID NO: 1560362
gaaggcuugucccuagaag

SEQ ID NO: 1594926 - RNA, 19 nt, Artificial Sequence
  Description of Artificial Sequence: Synthetic oligonucleotide
  Antisense strand to SEQ ID NO: 1594925
cuucuagggacaagccuuc

SEQ ID NO: 1594927 - RNA, 19 nt, Artificial Sequence
  Description of Artificial Sequence: Synthetic oligonucleotide
  Sense strand starting at position 2988 of SEQ ID NO: 1560362
aaggcuugucccuagaaga

SEQ ID NO: 1594928 - RNA, 19 nt, Artificial Sequence
  Description of Artificial Sequence: Synthetic oligonucleotide
  Antisense strand to SEQ ID NO: 1594927
ucuucuagggacaagccuu

SEQ ID NO: 1594929 - RNA, 19 nt, Artificial Sequence
  Description of Artificial Sequence: Synthetic oligonucleotide
  Sense strand starting at position 3057 of SEQ ID NO: 1560362
guggcauucugaccauaaa

SEQ ID NO: 1594930 - RNA, 19 nt, Artificial Sequence
  Description of Artificial Sequence: Synthetic oligonucleotide
  Antisense strand to SEQ ID NO: 1594929
uuuauggucagaaugccac

SEQ ID NO: 1594931 - RNA, 19 nt, Artificial Sequence
  Description of Artificial Sequence: Synthetic oligonucleotide
  Sense strand starting at position 3058 of SEQ ID NO: 1560362
uggcauucugaccauaaau

SEQ ID NO: 1594932 - RNA, 19 nt, Artificial Sequence
  Description of Artificial Sequence: Synthetic oligonucleotide
  Antisense strand to SEQ ID NO: 1594931
auuuauggucagaaugcca

SEQ ID NO: 1594933 - RNA, 19 nt, Artificial Sequence
  Description of Artificial Sequence: Synthetic oligonucleotide
  Sense strand starting at position 3233 of SEQ ID NO: 1560362
uccauuugguucugacauc

SEQ ID NO: 1594934 - RNA, 19 nt, Artificial Sequence
  Description of Artificial Sequence: Synthetic oligonucleotide
  Antisense strand to SEQ ID NO: 1594933
gaugucagaaccaaaugga

SEQ ID NO: 1594935 - RNA, 19 nt, Artificial Sequence
  Description of Artificial Sequence: Synthetic oligonucleotide
  Sense strand starting at position 3339 of SEQ ID NO: 1560362
uguguuguuccggauaggu

SEQ ID NO: 1594936 - RNA, 19 nt, Artificial Sequence
  Description of Artificial Sequence: Synthetic oligonucleotide
  Antisense strand to SEQ ID NO: 1594935
accuauccggaacaacaca

SEQ ID NO: 1594937 - RNA, 19 nt, Artificial Sequence
  Description of Artificial Sequence: Synthetic oligonucleotide
  Sense strand starting at position 3352 of SEQ ID NO: 1560362
auagguggcuucuugggau

SEQ ID NO: 1594938 - RNA, 19 nt, Artificial Sequence
  Description of Artificial Sequence: Synthetic oligonucleotide
  Antisense strand to SEQ ID NO: 1594937
aucccaagaagccaccuau

SEQ ID NO: 1594939 - RNA, 19 nt, Artificial Sequence
  Description of Artificial Sequence: Synthetic oligonucleotide
  Sense strand starting at position 3366 of SEQ ID NO: 1560362
gggauugguucugaaggga

SEQ ID NO: 1594940 - RNA, 19 nt, Artificial Sequence
  Description of Artificial Sequence: Synthetic oligonucleotide
  Antisense strand to SEQ ID NO: 1594939
ucccuucagaaccaauccc

SEQ ID NO: 1594941 - RNA, 19 nt, Artificial Sequence
  Description of Artificial Sequence: Synthetic oligonucleotide
  Sense strand starting at position 3379 of SEQ ID NO: 1560362
aagggaggucugcaagcuu

SEQ ID NO: 1594942 - RNA, 19 nt, Artificial Sequence
  Description of Artificial Sequence: Synthetic oligonucleotide
  Antisense strand to SEQ ID NO: 1594941
aagcuugcagaccucccuu

SEQ ID NO: 1594943 - RNA, 19 nt, Artificial Sequence
  Description of Artificial Sequence: Synthetic oligonucleotide
  Sense strand starting at position 3514 of SEQ ID NO: 1560362
aaaggaaggucagucuuua

SEQ ID NO: 1594944 - RNA, 19 nt, Artificial Sequence
  Description of Artificial Sequence: Synthetic oligonucleotide
  Antisense strand to SEQ ID NO: 1594943
uaaagacugaccuuccuuu

SEQ ID NO: 1594945 - RNA, 19 nt, Artificial Sequence
  Description of Artificial Sequence: Synthetic oligonucleotide
  Sense strand starting at position 3518 of SEQ ID NO: 1560362
gaaggucagucuuuaagca

SEQ ID NO: 1594946 - RNA, 19 nt, Artificial Sequence
  Description of Artificial Sequence: Synthetic oligonucleotide
  Antisense strand to SEQ ID NO: 1594945
ugcuuaaagacugaccuuc

SEQ ID NO: 1594947 - RNA, 19 nt, Artificial Sequence
  Description of Artificial Sequence: Synthetic oligonucleotide
  Sense strand starting at position 3522 of SEQ ID NO: 1560362
gucagucuuuaagcacuau

SEQ ID NO: 1594948 - RNA, 19 nt, Artificial Sequence
  Description of Artificial Sequence: Synthetic oligonucleotide
  Antisense strand to SEQ ID NO: 1594947
auagugcuuaaagacugac

SEQ ID NO: 1594949 - RNA, 19 nt, Artificial Sequence
  Description of Artificial Sequence: Synthetic oligonucleotide
  Sense strand starting at position 3714 of SEQ ID NO: 1560362
uaggcaguuucuucuguca

SEQ ID NO: 1594950 - RNA, 19 nt, Artificial Sequence
  Description of Artificial Sequence: Synthetic oligonucleotide
  Antisense strand to SEQ ID NO: 1594949
ugacagaagaaacugccua

SEQ ID NO: 1594951 - RNA, 19 nt, Artificial Sequence
  Description of Artificial Sequence: Synthetic oligonucleotide
  Sense strand starting at position 3716 of SEQ ID NO: 1560362
ggcaguuucuucugucauu

SEQ ID NO: 1594952 - RNA, 19 nt, Artificial Sequence
  Description of Artificial Sequence: Synthetic oligonucleotide
  Antisense strand to SEQ ID NO: 1594951
aaugacagaagaaacugcc

SEQ ID NO: 1594953 - RNA, 19 nt, Artificial Sequence
  Description of Artificial Sequence: Synthetic oligonucleotide
  Sense strand starting at position 3717 of SEQ ID NO: 1560362
gcaguuucuucugucauuc

SEQ ID NO: 1594954 - RNA, 19 nt, Artificial Sequence
  Description of Artificial Sequence: Synthetic oligonucleotide
  Antisense strand to SEQ ID NO: 1594953
gaaugacagaagaaacugc

SEQ ID NO: 1594955 - RNA, 19 nt, Artificial Sequence
  Description of Artificial Sequence: Synthetic oligonucleotide
  Sense strand starting at position 3725 of SEQ ID NO: 1560362
uucugucauucugcucauu

SEQ ID NO: 1594956 - RNA, 19 nt, Artificial Sequence
  Description of Artificial Sequence: Synthetic oligonucleotide
  Antisense strand to SEQ ID NO: 1594955
aaugagcagaaugacagaa

SEQ ID NO: 1594957 - RNA, 19 nt, Artificial Sequence
  Description of Artificial Sequence: Synthetic oligonucleotide
  Sense strand starting at position 3727 of SEQ ID NO: 1560362
cugucauucugcucauucu

SEQ ID NO: 1594958 - RNA, 19 nt, Artificial Sequence
  Description of Artificial Sequence: Synthetic oligonucleotide
  Antisense strand to SEQ ID NO: 1594957
agaaugagcagaaugacag

SEQ ID NO: 1594959 - RNA, 19 nt, Artificial Sequence
  Description of Artificial Sequence: Synthetic oligonucleotide
  Sense strand starting at position 3736 of SEQ ID NO: 1560362
ugcucauucucagaaauga

SEQ ID NO: 1594960 - RNA, 19 nt, Artificial Sequence
  Description of Artificial Sequence: Synthetic oligonucleotide
  Antisense strand to SEQ ID NO: 1594959
ucauuucugagaaugagca

SEQ ID NO: 1594961 - RNA, 19 nt, Artificial Sequence
  Description of Artificial Sequence: Synthetic oligonucleotide
  Sense strand starting at position 2065 of SEQ ID NO: 1560363
ugagcaguggcacauagau

SEQ ID NO: 1594962 - RNA, 19 nt, Artificial Sequence
  Description of Artificial Sequence: Synthetic oligonucleotide
  Antisense strand to SEQ ID NO: 1594961
aucuaugugccacugcuca

SEQ ID NO: 1594963 - RNA, 19 nt, Artificial Sequence
  Description of Artificial Sequence: Synthetic oligonucleotide
  Sense strand starting at position 2230 of SEQ ID NO: 1560363
uuugucugcuucucuagaa

SEQ ID NO: 1594964 - RNA, 19 nt, Artificial Sequence
  Description of Artificial Sequence: Synthetic oligonucleotide
  Antisense strand to SEQ ID NO: 1594963
uucuagagaagcagacaaa

SEQ ID NO: 1594965 - RNA, 19 nt, Artificial Sequence
  Description of Artificial Sequence: Synthetic oligonucleotide
  Sense strand starting at position 2231 of SEQ ID NO: 1560363
uugucugcuucucuagaau

SEQ ID NO: 1594966 - RNA, 19 nt, Artificial Sequence
  Description of Artificial Sequence: Synthetic oligonucleotide
  Antisense strand to SEQ ID NO: 1594965
auucuagagaagcagacaa

SEQ ID NO: 1594967 - RNA, 19 nt, Artificial Sequence
  Description of Artificial Sequence: Synthetic oligonucleotide
  Sense strand starting at position 2237 of SEQ ID NO: 1560363
gcuucucuagaauggcauu

SEQ ID NO: 1594968 - RNA, 19 nt, Artificial Sequence
  Description of Artificial Sequence: Synthetic oligonucleotide
  Antisense strand to SEQ ID NO: 1594967
aaugccauucuagagaagc

SEQ ID NO: 1594969 - RNA, 19 nt, Artificial Sequence
  Description of Artificial Sequence: Synthetic oligonucleotide
  Sense strand starting at position 2240 of SEQ ID NO: 1560363
ucucuagaauggcauuuau

SEQ ID NO: 1594970 - RNA, 19 nt, Artificial Sequence
  Description of Artificial Sequence: Synthetic oligonucleotide
  Antisense strand to SEQ ID NO: 1594969
auaaaugccauucuagaga

SEQ ID NO: 1594971 - RNA, 19 nt, Artificial Sequence
  Description of Artificial Sequence: Synthetic oligonucleotide
  Sense strand starting at position 2280 of SEQ ID NO: 1560363
ggaagugugaugcaaugac

SEQ ID NO: 1594972 - RNA, 19 nt, Artificial Sequence
  Description of Artificial Sequence: Synthetic oligonucleotide
  Antisense strand to SEQ ID NO: 1594971
gucauugcaucacacuucc

SEQ ID NO: 1594973 - RNA, 19 nt, Artificial Sequence
  Description of Artificial Sequence: Synthetic oligonucleotide
  Sense strand starting at position 2325 of SEQ ID NO: 1560363
ucuuccugacuuugugauu

SEQ ID NO: 1594974 - RNA, 19 nt, Artificial Sequence
  Description of Artificial Sequence: Synthetic oligonucleotide
  Antisense strand to SEQ ID NO: 1594973
aaucacaaagucaggaaga

SEQ ID NO: 1594975 - RNA, 19 nt, Artificial Sequence
  Description of Artificial Sequence: Synthetic oligonucleotide
  Sense strand starting at position 2416 of SEQ ID NO: 1560363
cucauagaucaacgcauua

SEQ ID NO: 1594976 - RNA, 19 nt, Artificial Sequence
  Description of Artificial Sequence: Synthetic oligonucleotide
  Antisense strand to SEQ ID NO: 1594975
uaaugcguugaucuaugag

SEQ ID NO: 1594977 - RNA, 19 nt, Artificial Sequence
  Description of Artificial Sequence: Synthetic oligonucleotide
  Sense strand starting at position 2450 of SEQ ID NO: 1560363
aacaauauguaggucgauu

SEQ ID NO: 1594978 - RNA, 19 nt, Artificial Sequence
  Description of Artificial Sequence: Synthetic oligonucleotide
  Antisense strand to SEQ ID NO: 1594977
aaucgaccuacauauuguu

SEQ ID NO: 1594979 - RNA, 19 nt, Artificial Sequence
  Description of Artificial Sequence: Synthetic oligonucleotide
  Sense strand starting at position 2452 of SEQ ID NO: 1560363
caauauguaggucgauuaa

SEQ ID NO: 1594980 - RNA, 19 nt, Artificial Sequence
  Description of Artificial Sequence: Synthetic oligonucleotide
  Antisense strand to SEQ ID NO: 1594979
uuaaucgaccuacauauug

SEQ ID NO: 1594981 - RNA, 19 nt, Artificial Sequence
  Description of Artificial Sequence: Synthetic oligonucleotide
  Sense strand starting at position 2486 of SEQ ID NO: 1560363
uguugagugguuugacgga

SEQ ID NO: 1594982 - RNA, 19 nt, Artificial Sequence
  Description of Artificial Sequence: Synthetic oligonucleotide
  Antisense strand to SEQ ID NO: 1594981
uccgucaaaccacucaaca

SEQ ID NO: 1594983 - RNA, 19 nt, Artificial Sequence
  Description of Artificial Sequence: Synthetic oligonucleotide
  Sense strand starting at position 2557 of SEQ ID NO: 1560363
gucacuggugcaggauuau

SEQ ID NO: 1594984 - RNA, 19 nt, Artificial Sequence
  Description of Artificial Sequence: Synthetic oligonucleotide
  Antisense strand to SEQ ID NO: 1594983
auaauccugcaccagugac

SEQ ID NO: 1594985 - RNA, 19 nt, Artificial Sequence
  Description of Artificial Sequence: Synthetic oligonucleotide
  Sense strand starting at position 2651 of SEQ ID NO: 1560363
gcacauaauccauagcaga

SEQ ID NO: 1594986 - RNA, 19 nt, Artificial Sequence
  Description of Artificial Sequence: Synthetic oligonucleotide
  Antisense strand to SEQ ID NO: 1594985
ucugcuauggauuaugugc

SEQ ID NO: 1594987 - RNA, 19 nt, Artificial Sequence
  Description of Artificial Sequence: Synthetic oligonucleotide
  Sense strand starting at position 2709 of SEQ ID NO: 1560363
uguccuucaccguagggaa

SEQ ID NO: 1594988 - RNA, 19 nt, Artificial Sequence
  Description of Artificial Sequence: Synthetic oligonucleotide
  Antisense strand to SEQ ID NO: 1594987
uucccuacggugaaggaca

SEQ ID NO: 1594989 - RNA, 19 nt, Artificial Sequence
  Description of Artificial Sequence: Synthetic oligonucleotide
  Sense strand starting at position 2741 of SEQ ID NO: 1560363
ggugauacagcuugugaaa

SEQ ID NO: 1594990 - RNA, 19 nt, Artificial Sequence
  Description of Artificial Sequence: Synthetic oligonucleotide
  Antisense strand to SEQ ID NO: 1594989
uuucacaagcuguaucacc

SEQ ID NO: 1594991 - RNA, 19 nt, Artificial Sequence
  Description of Artificial Sequence: Synthetic oligonucleotide
  Sense strand starting at position 2753 of SEQ ID NO: 1560363
ugugaaaugucaccacuag

SEQ ID NO: 1594992 - RNA, 19 nt, Artificial Sequence
  Description of Artificial Sequence: Synthetic oligonucleotide
  Antisense strand to SEQ ID NO: 1594991
cuaguggugacauuucaca

SEQ ID NO: 1594993 - RNA, 19 nt, Artificial Sequence
  Description of Artificial Sequence: Synthetic oligonucleotide
  Sense strand starting at position 2757 of SEQ ID NO: 1560363
aaaugucaccacuaggguu

SEQ ID NO: 1594994 - RNA, 19 nt, Artificial Sequence
  Description of Artificial Sequence: Synthetic oligonucleotide
  Antisense strand to SEQ ID NO: 1594993
aacccuaguggugacauuu

SEQ ID NO: 1594995 - RNA, 19 nt, Artificial Sequence
  Description of Artificial Sequence: Synthetic oligonucleotide
  Sense strand starting at position 2894 of SEQ ID NO: 1560363
ugccuauggucggcgagaa

SEQ ID NO: 1594996 - RNA, 19 nt, Artificial Sequence
  Description of Artificial Sequence: Synthetic oligonucleotide
  Antisense strand to SEQ ID NO: 1594995
uucucgccgaccauaggca

SEQ ID NO: 1594997 - RNA, 19 nt, Artificial Sequence
  Description of Artificial Sequence: Synthetic oligonucleotide
  Sense strand starting at position 2895 of SEQ ID NO: 1560363
gccuauggucggcgagaau

SEQ ID NO: 1594998 - RNA, 19 nt, Artificial Sequence
  Description of Artificial Sequence: Synthetic oligonucleotide
  Antisense strand to SEQ ID NO: 1594997
auucucgccgaccauaggc

SEQ ID NO: 1594999 - RNA, 19 nt, Artificial Sequence
  Description of Artificial Sequence: Synthetic oligonucleotide
  Sense strand starting at position 2898 of SEQ ID NO: 1560363
uauggucggcgagaaugua

SEQ ID NO: 1595000 - RNA, 19 nt, Artificial Sequence
  Description of Artificial Sequence: Synthetic oligonucleotide
  Antisense strand to SEQ ID NO: 1594999
uacauucucgccgaccaua

SEQ ID NO: 1595001 - RNA, 19 nt, Artificial Sequence
  Description of Artificial Sequence: Synthetic oligonucleotide
  Sense strand starting at position 2906 of SEQ ID NO: 1560363
gcgagaauguagagagaua

SEQ ID NO: 1595002 - RNA, 19 nt, Artificial Sequence
  Description of Artificial Sequence: Synthetic oligonucleotide
  Antisense strand to SEQ ID NO: 1595001
uaucucucuacauucucgc

SEQ ID NO: 1595003 - RNA, 19 nt, Artificial Sequence
  Description of Artificial Sequence: Synthetic oligonucleotide
  Sense strand starting at position 2961 of SEQ ID NO: 1560363
uggugucccugcuuuggaa

SEQ ID NO: 1595004 - RNA, 19 nt, Artificial Sequence
  Description of Artificial Sequence: Synthetic oligonucleotide
  Antisense strand to SEQ ID NO: 1595003
uuccaaagcagggacacca

SEQ ID NO: 1595005 - RNA, 19 nt, Artificial Sequence
  Description of Artificial Sequence: Synthetic oligonucleotide
  Sense strand starting at position 3031 of SEQ ID NO: 1560363
acaauuccaccguagguau

SEQ ID NO: 1595006 - RNA, 19 nt, Artificial Sequence
  Description of Artificial Sequence: Synthetic oligonucleotide
  Antisense strand to SEQ ID NO: 1595005
auaccuacgguggaauugu

SEQ ID NO: 1595007 - RNA, 19 nt, Artificial Sequence
  Description of Artificial Sequence: Synthetic oligonucleotide
  Sense strand starting at position 3038 of SEQ ID NO: 1560363
caccguagguauuuacuua

SEQ ID NO: 1595008 - RNA, 19 nt, Artificial Sequence
  Description of Artificial Sequence: Synthetic oligonucleotide
  Antisense strand to SEQ ID NO: 1595007
uaaguaaauaccuacggug

SEQ ID NO: 1595009 - RNA, 19 nt, Artificial Sequence
  Description of Artificial Sequence: Synthetic oligonucleotide
  Sense strand starting at position 3046 of SEQ ID NO: 1560363
guauuuacuuaagagaagu

SEQ ID NO: 1595010 - RNA, 19 nt, Artificial Sequence
  Description of Artificial Sequence: Synthetic oligonucleotide
  Antisense strand to SEQ ID NO: 1595009
acuucucuuaaguaaauac

SEQ ID NO: 1595011 - RNA, 19 nt, Artificial Sequence
  Description of Artificial Sequence: Synthetic oligonucleotide
  Sense strand starting at position 3104 of SEQ ID NO: 1560363
cacagcaguguuggucaua

SEQ ID NO: 1595012 - RNA, 19 nt, Artificial Sequence
  Description of Artificial Sequence: Synthetic oligonucleotide
  Antisense strand to SEQ ID NO: 1595011
uaugaccaacacugcugug

SEQ ID NO: 1595013 - RNA, 19 nt, Artificial Sequence
  Description of Artificial Sequence: Synthetic oligonucleotide
  Sense strand starting at position 3116 of SEQ ID NO: 1560363
ggucauagucaccaacagu

SEQ ID NO: 1595014 - RNA, 19 nt, Artificial Sequence
  Description of Artificial Sequence: Synthetic oligonucleotide
  Antisense strand to SEQ ID NO: 1595013
acuguuggugacuaugacc

SEQ ID NO: 1595015 - RNA, 19 nt, Artificial Sequence
  Description of Artificial Sequence: Synthetic oligonucleotide
  Sense strand starting at position 3198 of SEQ ID NO: 1560363
ggaauucuauuuggcaaag

SEQ ID NO: 1595016 - RNA, 19 nt, Artificial Sequence
  Description of Artificial Sequence: Synthetic oligonucleotide
  Antisense strand to SEQ ID NO: 1595015
cuuugccaaauagaauucc

SEQ ID NO: 1595017 - RNA, 19 nt, Artificial Sequence
  Description of Artificial Sequence: Synthetic oligonucleotide
  Sense strand starting at position 3245 of SEQ ID NO: 1560363
cagccuuauguugagugaa

SEQ ID NO: 1595018 - RNA, 19 nt, Artificial Sequence
  Description of Artificial Sequence: Synthetic oligonucleotide
  Antisense strand to SEQ ID NO: 1595017
uucacucaacauaaggcug

SEQ ID NO: 1595019 - RNA, 19 nt, Artificial Sequence
  Description of Artificial Sequence: Synthetic oligonucleotide
  Sense strand starting at position 3247 of SEQ ID NO: 1560363
gccuuauguugagugaaac

SEQ ID NO: 1595020 - RNA, 19 nt, Artificial Sequence
  Description of Artificial Sequence: Synthetic oligonucleotide
  Antisense strand to SEQ ID NO: 1595019
guuucacucaacauaaggc

SEQ ID NO: 1595021 - RNA, 19 nt, Artificial Sequence
  Description of Artificial Sequence: Synthetic oligonucleotide
  Sense strand starting at position 3248 of SEQ ID NO: 1560363
ccuuauguugagugaaaca

SEQ ID NO: 1595022 - RNA, 19 nt, Artificial Sequence
  Description of Artificial Sequence: Synthetic oligonucleotide
  Antisense strand to SEQ ID NO: 1595021
uguuucacucaacauaagg

SEQ ID NO: 1595023 - RNA, 19 nt, Artificial Sequence
  Description of Artificial Sequence: Synthetic oligonucleotide
  Sense strand starting at position 3287 of SEQ ID NO: 1560363
guacauauauugucagauu

SEQ ID NO: 1595024 - RNA, 19 nt, Artificial Sequence
  Description of Artificial Sequence: Synthetic oligonucleotide
  Antisense strand to SEQ ID NO: 1595023
aaucugacaauauauguac

SEQ ID NO: 1595025 - RNA, 19 nt, Artificial Sequence
  Description of Artificial Sequence: Synthetic oligonucleotide
  Sense strand starting at position 3341 of SEQ ID NO: 1560363
guuauagagucagaaagua

SEQ ID NO: 1595026 - RNA, 19 nt, Artificial Sequence
  Description of Artificial Sequence: Synthetic oligonucleotide
  Antisense strand to SEQ ID NO: 1595025
uacuuucugacucuauaac

SEQ ID NO: 1595027 - RNA, 19 nt, Artificial Sequence
  Description of Artificial Sequence: Synthetic oligonucleotide
  Sense strand starting at position 3709 of SEQ ID NO: 1560363
gcccaagauuaaguuuaaa

SEQ ID NO: 1595028 - RNA, 19 nt, Artificial Sequence
  Description of Artificial Sequence: Synthetic oligonucleotide
  Antisense strand to SEQ ID NO: 1595027
uuuaaacuuaaucuugggc

SEQ ID NO: 1595029 - RNA, 19 nt, Artificial Sequence
  Description of Artificial Sequence: Synthetic oligonucleotide
  Sense strand starting at position 3842 of SEQ ID NO: 1560363
auuggugaauuugaugaua

SEQ ID NO: 1595030 - RNA, 19 nt, Artificial Sequence
  Description of Artificial Sequence: Synthetic oligonucleotide
  Antisense strand to SEQ ID NO: 1595029
uaucaucaaauucaccaau

SEQ ID NO: 1595031 - RNA, 19 nt, Artificial Sequence
  Description of Artificial Sequence: Synthetic oligonucleotide
  Sense strand starting at position 3844 of SEQ ID NO: 1560363
uggugaauuugaugauaug

SEQ ID NO: 1595032 - RNA, 19 nt, Artificial Sequence
  Description of Artificial Sequence: Synthetic oligonucleotide
  Antisense strand to SEQ ID NO: 1595031
cauaucaucaaauucacca

SEQ ID NO: 1595033 - RNA, 19 nt, Artificial Sequence
  Description of Artificial Sequence: Synthetic oligonucleotide
  Sense strand starting at position 3847 of SEQ ID NO: 1560363
ugaauuugaugauauguac

SEQ ID NO: 1595034 - RNA, 19 nt, Artificial Sequence
  Description of Artificial Sequence: Synthetic oligonucleotide
  Antisense strand to SEQ ID NO: 1595033
guacauaucaucaaauuca

SEQ ID NO: 1595035 - RNA, 19 nt, Artificial Sequence
  Description of Artificial Sequence: Synthetic oligonucleotide
  Sense strand starting at position 3914 of SEQ ID NO: 1560363
guggcucagguccguaauu

SEQ ID NO: 1595036 - RNA, 19 nt, Artificial Sequence
  Description of Artificial Sequence: Synthetic oligonucleotide
  Antisense strand to SEQ ID NO: 1595035
aauuacggaccugagccac

SEQ ID NO: 1595037 - RNA, 19 nt, Artificial Sequence
  Description of Artificial Sequence: Synthetic oligonucleotide
  Sense strand starting at position 3915 of SEQ ID NO: 1560363
uggcucagguccguaauuu

SEQ ID NO: 1595038 - RNA, 19 nt, Artificial Sequence
  Description of Artificial Sequence: Synthetic oligonucleotide
  Antisense strand to SEQ ID NO: 1595037
aaauuacggaccugagcca

SEQ ID NO: 1595039 - RNA, 19 nt, Artificial Sequence
  Description of Artificial Sequence: Synthetic oligonucleotide
  Sense strand starting at position 3969 of SEQ ID NO: 1560363
gagcacagguuguuugaga

SEQ ID NO: 1595040 - RNA, 19 nt, Artificial Sequence
  Description of Artificial Sequence: Synthetic oligonucleotide
  Antisense strand to SEQ ID NO: 1595039
ucucaaacaaccugugcuc

SEQ ID NO: 1595041 - RNA, 19 nt, Artificial Sequence
  Description of Artificial Sequence: Synthetic oligonucleotide
  Sense strand starting at position 778 of SEQ ID NO: 1560364
guuacugaaucacgagacu

SEQ ID NO: 1595042 - RNA, 19 nt, Artificial Sequence
  Description of Artificial Sequence: Synthetic oligonucleotide
  Antisense strand to SEQ ID NO: 1595041
agucucgugauucaguaac

SEQ ID NO: 1595043 - RNA, 19 nt, Artificial Sequence
  Description of Artificial Sequence: Synthetic oligonucleotide
  Sense strand starting at position 787 of SEQ ID NO: 1560364
ucacgagacucccaauaac

SEQ ID NO: 1595044 - RNA, 19 nt, Artificial Sequence
  Description of Artificial Sequence: Synthetic oligonucleotide
  Antisense strand to SEQ ID NO: 1595043
guuauugggagucucguga

SEQ ID NO: 1595045 - RNA, 19 nt, Artificial Sequence
  Description of Artificial Sequence: Synthetic oligonucleotide
  Sense strand starting at position 837 of SEQ ID NO: 1560364
ucacaugauugaggucacu

SEQ ID NO: 1595046 - RNA, 19 nt, Artificial Sequence
  Description of Artificial Sequence: Synthetic oligonucleotide
  Antisense strand to SEQ ID NO: 1595045
agugaccucaaucauguga

SEQ ID NO: 1595047 - RNA, 19 nt, Artificial Sequence
  Description of Artificial Sequence: Synthetic oligonucleotide
  Sense strand starting at position 997 of SEQ ID NO: 1560364
ggcugugagggcgacauau

SEQ ID NO: 1595048 - RNA, 19 nt, Artificial Sequence
  Description of Artificial Sequence: Synthetic oligonucleotide
  Antisense strand to SEQ ID NO: 1595047
auaugucgcccucacagcc

SEQ ID NO: 1595049 - RNA, 19 nt, Artificial Sequence
  Description of Artificial Sequence: Synthetic oligonucleotide
  Sense strand starting at position 2078 of SEQ ID NO: 1560364
gcgccugaaccaugauauu

SEQ ID NO: 1595050 - RNA, 19 nt, Artificial Sequence
  Description of Artificial Sequence: Synthetic oligonucleotide
  Antisense strand to SEQ ID NO: 1595049
aauaucaugguucaggcgc

SEQ ID NO: 1595051 - RNA, 19 nt, Artificial Sequence
  Description of Artificial Sequence: Synthetic oligonucleotide
  Sense strand starting at position 2081 of SEQ ID NO: 1560364
ccugaaccaugauauuuga

SEQ ID NO: 1595052 - RNA, 19 nt, Artificial Sequence
  Description of Artificial Sequence: Synthetic oligonucleotide
  Antisense strand to SEQ ID NO: 1595051
ucaaauaucaugguucagg

SEQ ID NO: 1595053 - RNA, 19 nt, Artificial Sequence
  Description of Artificial Sequence: Synthetic oligonucleotide
  Sense strand starting at position 2117 of SEQ ID NO: 1560364
acagaauuccaucguggca

SEQ ID NO: 1595054 - RNA, 19 nt, Artificial Sequence
  Description of Artificial Sequence: Synthetic oligonucleotide
  Antisense strand to SEQ ID NO: 1595053
ugccacgauggaauucugu

SEQ ID NO: 1595055 - RNA, 19 nt, Artificial Sequence
  Description of Artificial Sequence: Synthetic oligonucleotide
  Sense strand starting at position 2119 of SEQ ID NO: 1560364
agaauuccaucguggcaag

SEQ ID NO: 1595056 - RNA, 19 nt, Artificial Sequence
  Description of Artificial Sequence: Synthetic oligonucleotide
  Antisense strand to SEQ ID NO: 1595055
cuugccacgauggaauucu

SEQ ID NO: 1595057 - RNA, 19 nt, Artificial Sequence
  Description of Artificial Sequence: Synthetic oligonucleotide
  Sense strand starting at position 2429 of SEQ ID NO: 1560364
gugaucugacacugagguu

SEQ ID NO: 1595058 - RNA, 19 nt, Artificial Sequence
  Description of Artificial Sequence: Synthetic oligonucleotide
  Antisense strand to SEQ ID NO: 1595057
aaccucagugucagaucac

SEQ ID NO: 1595059 - RNA, 19 nt, Artificial Sequence
  Description of Artificial Sequence: Synthetic oligonucleotide
  Sense strand starting at position 2445 of SEQ ID NO: 1560364
guuccuugauccucagcaa

SEQ ID NO: 1595060 - RNA, 19 nt, Artificial Sequence
  Description of Artificial Sequence: Synthetic oligonucleotide
  Antisense strand to SEQ ID NO: 1595059
uugcugaggaucaaggaac

SEQ ID NO: 1595061 - RNA, 19 nt, Artificial Sequence
  Description of Artificial Sequence: Synthetic oligonucleotide
  Sense strand starting at position 2464 of SEQ ID NO: 1560364
ggcggcaauugcuguauga

SEQ ID NO: 1595062 - RNA, 19 nt, Artificial Sequence
  Description of Artificial Sequence: Synthetic oligonucleotide
  Antisense strand to SEQ ID NO: 1595061
ucauacagcaauugccgcc

SEQ ID NO: 1595063 - RNA, 19 nt, Artificial Sequence
  Description of Artificial Sequence: Synthetic oligonucleotide
  Sense strand starting at position 2466 of SEQ ID NO: 1560364
cggcaauugcuguaugaaa

SEQ ID NO: 1595064 - RNA, 19 nt, Artificial Sequence
  Description of Artificial Sequence: Synthetic oligonucleotide
  Antisense strand to SEQ ID NO: 1595063
uuucauacagcaauugccg

SEQ ID NO: 1595065 - RNA, 19 nt, Artificial Sequence
  Description of Artificial Sequence: Synthetic oligonucleotide
  Sense strand starting at position 2468 of SEQ ID NO: 1560364
gcaauugcuguaugaaaga

SEQ ID NO: 1595066 - RNA, 19 nt, Artificial Sequence
  Description of Artificial Sequence: Synthetic oligonucleotide
  Antisense strand to SEQ ID NO: 1595065
ucuuucauacagcaauugc

SEQ ID NO: 1595067 - RNA, 19 nt, Artificial Sequence
  Description of Artificial Sequence: Synthetic oligonucleotide
  Sense strand starting at position 2506 of SEQ ID NO: 1560364
caaguauccugccuuggaa

SEQ ID NO: 1595068 - RNA, 19 nt, Artificial Sequence
  Description of Artificial Sequence: Synthetic oligonucleotide
  Antisense strand to SEQ ID NO: 1595067
uuccaaggcaggauacuug

SEQ ID NO: 1595069 - RNA, 19 nt, Artificial Sequence
  Description of Artificial Sequence: Synthetic oligonucleotide
  Sense strand starting at position 2611 of SEQ ID NO: 1560364
ugaugcaauccugguguuu

SEQ ID NO: 1595070 - RNA, 19 nt, Artificial Sequence
  Description of Artificial Sequence: Synthetic oligonucleotide
  Antisense strand to SEQ ID NO: 1595069
aaacaccaggauugcauca

SEQ ID NO: 1595071 - RNA, 19 nt, Artificial Sequence
  Description of Artificial Sequence: Synthetic oligonucleotide
  Sense strand starting at position 2613 of SEQ ID NO: 1560364
augcaauccugguguuucu

SEQ ID NO: 1595072 - RNA, 19 nt, Artificial Sequence
  Description of Artificial Sequence: Synthetic oligonucleotide
  Antisense strand to SEQ ID NO: 1595071
agaaacaccaggauugcau

SEQ ID NO: 1595073 - RNA, 19 nt, Artificial Sequence
  Description of Artificial Sequence: Synthetic oligonucleotide
  Sense strand starting at position 2660 of SEQ ID NO: 1560364
gcaggugcuccugaaauaa

SEQ ID NO: 1595074 - RNA, 19 nt, Artificial Sequence
  Description of Artificial Sequence: Synthetic oligonucleotide
  Antisense strand to SEQ ID NO: 1595073
uuauuucaggagcaccugc

SEQ ID NO: 1595075 - RNA, 19 nt, Artificial Sequence
  Description of Artificial Sequence: Synthetic oligonucleotide
  Sense strand starting at position 2754 of SEQ ID NO: 1560364
ggaagacagguuggcuaau

SEQ ID NO: 1595076 - RNA, 19 nt, Artificial Sequence
  Description of Artificial Sequence: Synthetic oligonucleotide
  Antisense strand to SEQ ID NO: 1595075
auuagccaaccugucuucc

SEQ ID NO: 1595077 - RNA, 19 nt, Artificial Sequence
  Description of Artificial Sequence: Synthetic oligonucleotide
  Sense strand starting at position 2755 of SEQ ID NO: 1560364
gaagacagguuggcuaauu

SEQ ID NO: 1595078 - RNA, 19 nt, Artificial Sequence
  Description of Artificial Sequence: Synthetic oligonucleotide
  Antisense strand to SEQ ID NO: 1595077
aauuagccaaccugucuuc

SEQ ID NO: 1595079 - RNA, 19 nt, Artificial Sequence
  Description of Artificial Sequence: Synthetic oligonucleotide
  Sense strand starting at position 2803 of SEQ ID NO: 1560364
gccuucugugucugaggga

SEQ ID NO: 1595080 - RNA, 19 nt, Artificial Sequence
  Description of Artificial Sequence: Synthetic oligonucleotide
  Antisense strand to SEQ ID NO: 1595079
ucccucagacacagaaggc

SEQ ID NO: 1595081 - RNA, 19 nt, Artificial Sequence
  Description of Artificial Sequence: Synthetic oligonucleotide
  Sense strand starting at position 2907 of SEQ ID NO: 1560364
ccuguacuccuggaucuga

SEQ ID NO: 1595082 - RNA, 19 nt, Artificial Sequence
  Description of Artificial Sequence: Synthetic oligonucleotide
  Antisense strand to SEQ ID NO: 1595081
ucagauccaggaguacagg

SEQ ID NO: 1595083 - RNA, 19 nt, Artificial Sequence
  Description of Artificial Sequence: Synthetic oligonucleotide
  Sense strand starting at position 3230 of SEQ ID NO: 1560364
ugguuaaacuucugggaau

SEQ ID NO: 1595084 - RNA, 19 nt, Artificial Sequence
  Description of Artificial Sequence: Synthetic oligonucleotide
  Antisense strand to SEQ ID NO: 1595083
auucccagaaguuuaacca

SEQ ID NO: 1595085 - RNA, 19 nt, Artificial Sequence
  Description of Artificial Sequence: Synthetic oligonucleotide
  Sense strand starting at position 3231 of SEQ ID NO: 1560364
gguuaaacuucugggaauc

SEQ ID NO: 1595086 - RNA, 19 nt, Artificial Sequence
  Description of Artificial Sequence: Synthetic oligonucleotide
  Antisense strand to SEQ ID NO: 1595085
gauucccagaaguuuaacc

SEQ ID NO: 1595087 - RNA, 19 nt, Artificial Sequence
  Description of Artificial Sequence: Synthetic oligonucleotide
  Sense strand starting at position 3232 of SEQ ID NO: 1560364
guuaaacuucugggaauca

SEQ ID NO: 1595088 - RNA, 19 nt, Artificial Sequence
  Description of Artificial Sequence: Synthetic oligonucleotide
  Antisense strand to SEQ ID NO: 1595087
ugauucccagaaguuuaac

SEQ ID NO: 1595089 - RNA, 19 nt, Artificial Sequence
  Description of Artificial Sequence: Synthetic oligonucleotide
  Sense strand starting at position 3233 of SEQ ID NO: 1560364
uuaaacuucugggaaucaa

SEQ ID NO: 1595090 - RNA, 19 nt, Artificial Sequence
  Description of Artificial Sequence: Synthetic oligonucleotide
  Antisense strand to SEQ ID NO: 1595089
uugauucccagaaguuuaa

SEQ ID NO: 1595091 - RNA, 19 nt, Artificial Sequence
  Description of Artificial Sequence: Synthetic oligonucleotide
  Sense strand starting at position 3251 of SEQ ID NO: 1560364
agucaaacuccugagucuu

SEQ ID NO: 1595092 - RNA, 19 nt, Artificial Sequence
  Description of Artificial Sequence: Synthetic oligonucleotide
  Antisense strand to SEQ ID NO: 1595091
aagacucaggaguuugacu

SEQ ID NO: 1595093 - RNA, 19 nt, Artificial Sequence
  Description of Artificial Sequence: Synthetic oligonucleotide
  Sense strand starting at position 3257 of SEQ ID NO: 1560364
acuccugagucuuugacau

SEQ ID NO: 1595094 - RNA, 19 nt, Artificial Sequence
  Description of Artificial Sequence: Synthetic oligonucleotide
  Antisense strand to SEQ ID NO: 1595093
augucaaagacucaggagu

SEQ ID NO: 1595095 - RNA, 19 nt, Artificial Sequence
  Description of Artificial Sequence: Synthetic oligonucleotide
  Sense strand starting at position 3259 of SEQ ID NO: 1560364
uccugagucuuugacauug

SEQ ID NO: 1595096 - RNA, 19 nt, Artificial Sequence
  Description of Artificial Sequence: Synthetic oligonucleotide
  Antisense strand to SEQ ID NO: 1595095
caaugucaaagacucagga

SEQ ID NO: 1595097 - RNA, 19 nt, Artificial Sequence
  Description of Artificial Sequence: Synthetic oligonucleotide
  Sense strand starting at position 3261 of SEQ ID NO: 1560364
cugagucuuugacauugau

SEQ ID NO: 1595098 - RNA, 19 nt, Artificial Sequence
  Description of Artificial Sequence: Synthetic oligonucleotide
  Antisense strand to SEQ ID NO: 1595097
aucaaugucaaagacucag

SEQ ID NO: 1595099 - RNA, 19 nt, Artificial Sequence
  Description of Artificial Sequence: Synthetic oligonucleotide
  Sense strand starting at position 3264 of SEQ ID NO: 1560364
agucuuugacauugaugua

SEQ ID NO: 1595100 - RNA, 19 nt, Artificial Sequence
  Description of Artificial Sequence: Synthetic oligonucleotide
  Antisense strand to SEQ ID NO: 1595099
uacaucaaugucaaagacu

SEQ ID NO: 1595101 - RNA, 19 nt, Artificial Sequence
  Description of Artificial Sequence: Synthetic oligonucleotide
  Sense strand starting at position 3267 of SEQ ID NO: 1560364
cuuugacauugauguaucu

SEQ ID NO: 1595102 - RNA, 19 nt, Artificial Sequence
  Description of Artificial Sequence: Synthetic oligonucleotide
  Antisense strand to SEQ ID NO: 1595101
agauacaucaaugucaaag

SEQ ID NO: 1595103 - RNA, 19 nt, Artificial Sequence
  Description of Artificial Sequence: Synthetic oligonucleotide
  Sense strand starting at position 3413 of SEQ ID NO: 1560364
uagagaugaucauggacag

SEQ ID NO: 1595104 - RNA, 19 nt, Artificial Sequence
  Description of Artificial Sequence: Synthetic oligonucleotide
  Antisense strand to SEQ ID NO: 1595103
cuguccaugaucaucucua

SEQ ID NO: 1595105 - RNA, 19 nt, Artificial Sequence
  Description of Artificial Sequence: Synthetic oligonucleotide
  Sense strand starting at position 3430 of SEQ ID NO: 1560364
aguaucaaucauuagugua

SEQ ID NO: 1595106 - RNA, 19 nt, Artificial Sequence
  Description of Artificial Sequence: Synthetic oligonucleotide
  Antisense strand to SEQ ID NO: 1595105
uacacuaaugauugauacu

SEQ ID NO: 1595107 - RNA, 19 nt, Artificial Sequence
  Description of Artificial Sequence: Synthetic oligonucleotide
  Sense strand starting at position 3433 of SEQ ID NO: 1560364
aucaaucauuaguguaaac

SEQ ID NO: 1595108 - RNA, 19 nt, Artificial Sequence
  Description of Artificial Sequence: Synthetic oligonucleotide
  Antisense strand to SEQ ID NO: 1595107
guuuacacuaaugauugau

SEQ ID NO: 1595109 - RNA, 19 nt, Artificial Sequence
  Description of Artificial Sequence: Synthetic oligonucleotide
  Sense strand starting at position 3507 of SEQ ID NO: 1560364
gaaacaaccgguggguaua

SEQ ID NO: 1595110 - RNA, 19 nt, Artificial Sequence
  Description of Artificial Sequence: Synthetic oligonucleotide
  Antisense strand to SEQ ID NO: 1595109
uauacccaccgguuguuuc

SEQ ID NO: 1595111 - RNA, 19 nt, Artificial Sequence
  Description of Artificial Sequence: Synthetic oligonucleotide
  Sense strand starting at position 75 of SEQ ID NO: 1560365
cggccagcucccugucaaa

SEQ ID NO: 1595112 - RNA, 19 nt, Artificial Sequence
  Description of Artificial Sequence: Synthetic oligonucleotide
  Antisense strand to SEQ ID NO: 1595111
uuugacagggagcuggccg

SEQ ID NO: 1595113 - RNA, 19 nt, Artificial Sequence
  Description of Artificial Sequence: Synthetic oligonucleotide
  Sense strand starting at position 144 of SEQ ID NO: 1560365
gaacgucuuugaggugguu

SEQ ID NO: 1595114 - RNA, 19 nt, Artificial Sequence
  Description of Artificial Sequence: Synthetic oligonucleotide
  Antisense strand to SEQ ID NO: 1595113
aaccaccucaaagacguuc

SEQ ID NO: 1595115 - RNA, 19 nt, Artificial Sequence
  Description of Artificial Sequence: Synthetic oligonucleotide
  Sense strand starting at position 632 of SEQ ID NO: 1560365
gcccuuguucacgugucua

SEQ ID NO: 1595116 - RNA, 19 nt, Artificial Sequence
  Description of Artificial Sequence: Synthetic oligonucleotide
  Antisense strand to SEQ ID NO: 1595115
uagacacgugaacaagggc

SEQ ID NO: 1595117 - RNA, 19 nt, Artificial Sequence
  Description of Artificial Sequence: Synthetic oligonucleotide
  Sense strand starting at position 744 of SEQ ID NO: 1560365
ccgauuagugaccagcgaa

SEQ ID NO: 1595118 - RNA, 19 nt, Artificial Sequence
  Description of Artificial Sequence: Synthetic oligonucleotide
  Antisense strand to SEQ ID NO: 1595117
uucgcuggucacuaaucgg

SEQ ID NO: 1595119 - RNA, 19 nt, Artificial Sequence
  Description of Artificial Sequence: Synthetic oligonucleotide
  Sense strand starting at position 1018 of SEQ ID NO: 1560365
gugauuaccugcccugaug

SEQ ID NO: 1595120 - RNA, 19 nt, Artificial Sequence
  Description of Artificial Sequence: Synthetic oligonucleotide
  Antisense strand to SEQ ID NO: 1595119
caucagggcagguaaucac

SEQ ID NO: 1595121 - RNA, 19 nt, Artificial Sequence
  Description of Artificial Sequence: Synthetic oligonucleotide
  Sense strand starting at position 1029 of SEQ ID NO: 1560365
cccugaugguggugauuca

SEQ ID NO: 1595122 - RNA, 19 nt, Artificial Sequence
  Description of Artificial Sequence: Synthetic oligonucleotide
  Antisense strand to SEQ ID NO: 1595121
ugaaucaccaccaucaggg

SEQ ID NO: 1595123 - RNA, 19 nt, Artificial Sequence
  Description of Artificial Sequence: Synthetic oligonucleotide
  Sense strand starting at position 1559 of SEQ ID NO: 1560365
gcugcagccuucgcuuuaa

SEQ ID NO: 1595124 - RNA, 19 nt, Artificial Sequence
  Description of Artificial Sequence: Synthetic oligonucleotide
  Antisense strand to SEQ ID NO: 1595123
uuaaagcgaaggcugcagc

SEQ ID NO: 1595125 - RNA, 19 nt, Artificial Sequence
  Description of Artificial Sequence: Synthetic oligonucleotide
  Sense strand starting at position 1561 of SEQ ID NO: 1560365
ugcagccuucgcuuuaaca

SEQ ID NO: 1595126 - RNA, 19 nt, Artificial Sequence
  Description of Artificial Sequence: Synthetic oligonucleotide
  Antisense strand to SEQ ID NO: 1595125
uguuaaagcgaaggcugca

SEQ ID NO: 1595127 - RNA, 19 nt, Artificial Sequence
  Description of Artificial Sequence: Synthetic oligonucleotide
  Sense strand starting at position 1563 of SEQ ID NO: 1560365
cagccuucgcuuuaacagu

SEQ ID NO: 1595128 - RNA, 19 nt, Artificial Sequence
  Description of Artificial Sequence: Synthetic oligonucleotide
  Antisense strand to SEQ ID NO: 1595127
acuguuaaagcgaaggcug

SEQ ID NO: 1595129 - RNA, 19 nt, Artificial Sequence
  Description of Artificial Sequence: Synthetic oligonucleotide
  Sense strand starting at position 2562 of SEQ ID NO: 1560365
aauuguaguuucccgaaag

SEQ ID NO: 1595130 - RNA, 19 nt, Artificial Sequence
  Description of Artificial Sequence: Synthetic oligonucleotide
  Antisense strand to SEQ ID NO: 1595129
cuuucgggaaacuacaauu

SEQ ID NO: 1595131 - RNA, 19 nt, Artificial Sequence
  Description of Artificial Sequence: Synthetic oligonucleotide
  Sense strand starting at position 2563 of SEQ ID NO: 1560365
auuguaguuucccgaaagc

SEQ ID NO: 1595132 - RNA, 19 nt, Artificial Sequence
  Description of Artificial Sequence: Synthetic oligonucleotide
  Antisense strand to SEQ ID NO: 1595131
gcuuucgggaaacuacaau

SEQ ID NO: 1595133 - RNA, 19 nt, Artificial Sequence
  Description of Artificial Sequence: Synthetic oligonucleotide
  Sense strand starting at position 2636 of SEQ ID NO: 1560365
acguguguuugggcaggua

SEQ ID NO: 1595134 - RNA, 19 nt, Artificial Sequence
  Description of Artificial Sequence: Synthetic oligonucleotide
  Antisense strand to SEQ ID NO: 1595133
uaccugcccaaacacacgu

SEQ ID NO: 1595135 - RNA, 19 nt, Artificial Sequence
  Description of Artificial Sequence: Synthetic oligonucleotide
  Sense strand starting at position 3064 of SEQ ID NO: 1560365
gagcccucuggagggauaa

SEQ ID NO: 1595136 - RNA, 19 nt, Artificial Sequence
  Description of Artificial Sequence: Synthetic oligonucleotide
  Antisense strand to SEQ ID NO: 1595135
uuaucccuccagagggcuc

SEQ ID NO: 1595137 - RNA, 19 nt, Artificial Sequence
  Description of Artificial Sequence: Synthetic oligonucleotide
  Sense strand starting at position 3270 of SEQ ID NO: 1560365
uucgguuccgccucuguaa

SEQ ID NO: 1595138 - RNA, 19 nt, Artificial Sequence
  Description of Artificial Sequence: Synthetic oligonucleotide
  Antisense strand to SEQ ID NO: 1595137
uuacagaggcggaaccgaa

SEQ ID NO: 1595139 - RNA, 19 nt, Artificial Sequence
  Description of Artificial Sequence: Synthetic oligonucleotide
  Sense strand starting at position 3271 of SEQ ID NO: 1560365
ucgguuccgccucuguaaa

SEQ ID NO: 1595140 - RNA, 19 nt, Artificial Sequence
  Description of Artificial Sequence: Synthetic oligonucleotide
  Antisense strand to SEQ ID NO: 1595139
uuuacagaggcggaaccga

SEQ ID NO: 1595141 - RNA, 19 nt, Artificial Sequence
  Description of Artificial Sequence: Synthetic oligonucleotide
  Sense strand starting at position 3302 of SEQ ID NO: 1560365
agagacgucuggaggaaga

SEQ ID NO: 1595142 - RNA, 19 nt, Artificial Sequence
  Description of Artificial Sequence: Synthetic oligonucleotide
  Antisense strand to SEQ ID NO: 1595141
ucuuccuccagacgucucu

SEQ ID NO: 1595143 - RNA, 19 nt, Artificial Sequence
  Description of Artificial Sequence: Synthetic oligonucleotide
  Sense strand starting at position 3411 of SEQ ID NO: 1560365
ggucuucccuucuuagagu

SEQ ID NO: 1595144 - RNA, 19 nt, Artificial Sequence
  Description of Artificial Sequence: Synthetic oligonucleotide
  Antisense strand to SEQ ID NO: 1595143
acucuaagaagggaagacc

SEQ ID NO: 1595145 - RNA, 19 nt, Artificial Sequence
  Description of Artificial Sequence: Synthetic oligonucleotide
  Sense strand starting at position 3455 of SEQ ID NO: 1560365
aucugagggccuugugaga

SEQ ID NO: 1595146 - RNA, 19 nt, Artificial Sequence
  Description of Artificial Sequence: Synthetic oligonucleotide
  Antisense strand to SEQ ID NO: 1595145
ucucacaaggcccucagau

SEQ ID NO: 1595147 - RNA, 19 nt, Artificial Sequence
  Description of Artificial Sequence: Synthetic oligonucleotide
  Sense strand starting at position 3460 of SEQ ID NO: 1560365
agggccuugugagaaauga

SEQ ID NO: 1595148 - RNA, 19 nt, Artificial Sequence
  Description of Artificial Sequence: Synthetic oligonucleotide
  Antisense strand to SEQ ID NO: 1595147
ucauuucucacaaggcccu

SEQ ID NO: 1595149 - RNA, 19 nt, Artificial Sequence
  Description of Artificial Sequence: Synthetic oligonucleotide
  Sense strand starting at position 3520 of SEQ ID NO: 1560365
gcgucugaguuucuuuaau

SEQ ID NO: 1595150 - RNA, 19 nt, Artificial Sequence
  Description of Artificial Sequence: Synthetic oligonucleotide
  Antisense strand to SEQ ID NO: 1595149
auuaaagaaacucagacgc

SEQ ID NO: 1595151 - RNA, 19 nt, Artificial Sequence
  Description of Artificial Sequence: Synthetic oligonucleotide
  Sense strand starting at position 3522 of SEQ ID NO: 1560365
gucugaguuucuuuaauga

SEQ ID NO: 1595152 - RNA, 19 nt, Artificial Sequence
  Description of Artificial Sequence: Synthetic oligonucleotide
  Antisense strand to SEQ ID NO: 1595151
ucauuaaagaaacucagac

SEQ ID NO: 1595153 - RNA, 19 nt, Artificial Sequence
  Description of Artificial Sequence: Synthetic oligonucleotide
  Sense strand starting at position 3545 of SEQ ID NO: 1560365
ucggaaacaucacucauau

SEQ ID NO: 1595154 - RNA, 19 nt, Artificial Sequence
  Description of Artificial Sequence: Synthetic oligonucleotide
  Antisense strand to SEQ ID NO: 1595153
auaugagugauguuuccga

SEQ ID NO: 1595155 - RNA, 19 nt, Artificial Sequence
  Description of Artificial Sequence: Synthetic oligonucleotide
  Sense strand starting at position 3917 of SEQ ID NO: 1560365
uuuaguaccucguagaguu

SEQ ID NO: 1595156 - RNA, 19 nt, Artificial Sequence
  Description of Artificial Sequence: Synthetic oligonucleotide
  Antisense strand to SEQ ID NO: 1595155
aacucuacgagguacuaaa

SEQ ID NO: 1595157 - RNA, 19 nt, Artificial Sequence
  Description of Artificial Sequence: Synthetic oligonucleotide
  Sense strand starting at position 3947 of SEQ ID NO: 1560365
acgacugucuaguuccaga

SEQ ID NO: 1595158 - RNA, 19 nt, Artificial Sequence
  Description of Artificial Sequence: Synthetic oligonucleotide
  Antisense strand to SEQ ID NO: 1595157
ucuggaacuagacagucgu

SEQ ID NO: 1595159 - RNA, 19 nt, Artificial Sequence
  Description of Artificial Sequence: Synthetic oligonucleotide
  Sense strand starting at position 3950 of SEQ ID NO: 1560365
acugucuaguuccagaaga

SEQ ID NO: 1595160 - RNA, 19 nt, Artificial Sequence
  Description of Artificial Sequence: Synthetic oligonucleotide
  Antisense strand to SEQ ID NO: 1595159
ucuucuggaacuagacagu

SEQ ID NO: 1595161 - RNA, 19 nt, Artificial Sequence
  Description of Artificial Sequence: Synthetic oligonucleotide
  Sense strand starting at position 3952 of SEQ ID NO: 1560365
ugucuaguuccagaagauu

SEQ ID NO: 1595162 - RNA, 19 nt, Artificial Sequence
  Description of Artificial Sequence: Synthetic oligonucleotide
  Antisense strand to SEQ ID NO: 1595161
aaucuucuggaacuagaca

SEQ ID NO: 1595163 - RNA, 19 nt, Artificial Sequence
  Description of Artificial Sequence: Synthetic oligonucleotide
  Sense strand starting at position 3963 of SEQ ID NO: 1560365
agaagauuccaucaccgca

SEQ ID NO: 1595164 - RNA, 19 nt, Artificial Sequence
  Description of Artificial Sequence: Synthetic oligonucleotide
  Antisense strand to SEQ ID NO: 1595163
ugcggugauggaaucuucu

SEQ ID NO: 1595165 - RNA, 19 nt, Artificial Sequence
  Description of Artificial Sequence: Synthetic oligonucleotide
  Sense strand starting at position 106 of SEQ ID NO: 1560366
cggccagcucccugucaaa

SEQ ID NO: 1595166 - RNA, 19 nt, Artificial Sequence
  Description of Artificial Sequence: Synthetic oligonucleotide
  Antisense strand to SEQ ID NO: 1595165
uuugacagggagcuggccg

SEQ ID NO: 1595167 - RNA, 19 nt, Artificial Sequence
  Description of Artificial Sequence: Synthetic oligonucleotide
  Sense strand starting at position 175 of SEQ ID NO: 1560366
gaacgucuuugaggugguu

SEQ ID NO: 1595168 - RNA, 19 nt, Artificial Sequence
  Description of Artificial Sequence: Synthetic oligonucleotide
  Antisense strand to SEQ ID NO: 1595167
aaccaccucaaagacguuc

SEQ ID NO: 1595169 - RNA, 19 nt, Artificial Sequence
  Description of Artificial Sequence: Synthetic oligonucleotide
  Sense strand starting at position 663 of SEQ ID NO: 1560366
gcccuuguucacgugucua

SEQ ID NO: 1595170 - RNA, 19 nt, Artificial Sequence
  Description of Artificial Sequence: Synthetic oligonucleotide
  Antisense strand to SEQ ID NO: 1595169
uagacacgugaacaagggc

SEQ ID NO: 1595171 - RNA, 19 nt, Artificial Sequence
  Description of Artificial Sequence: Synthetic oligonucleotide
  Sense strand starting at position 775 of SEQ ID NO: 1560366
ccgauuagugaccagcgaa

SEQ ID NO: 1595172 - RNA, 19 nt, Artificial Sequence
  Description of Artificial Sequence: Synthetic oligonucleotide
  Antisense strand to SEQ ID NO: 1595171
uucgcuggucacuaaucgg

SEQ ID NO: 1595173 - RNA, 19 nt, Artificial Sequence
  Description of Artificial Sequence: Synthetic oligonucleotide
  Sense strand starting at position 1049 of SEQ ID NO: 1560366
gugauuaccugcccugaug

SEQ ID NO: 1595174 - RNA, 19 nt, Artificial Sequence
  Description of Artificial Sequence: Synthetic oligonucleotide
  Antisense strand to SEQ ID NO: 1595173
caucagggcagguaaucac

SEQ ID NO: 1595175 - RNA, 19 nt, Artificial Sequence
  Description of Artificial Sequence: Synthetic oligonucleotide
  Sense strand starting at position 1060 of SEQ ID NO: 1560366
cccugaugguggugauuca

SEQ ID NO: 1595176 - RNA, 19 nt, Artificial Sequence
  Description of Artificial Sequence: Synthetic oligonucleotide
  Antisense strand to SEQ ID NO: 1595175
ugaaucaccaccaucaggg

SEQ ID NO: 1595177 - RNA, 19 nt, Artificial Sequence
  Description of Artificial Sequence: Synthetic oligonucleotide
  Sense strand starting at position 1590 of SEQ ID NO: 1560366
gcugcagccuucgcuuuaa

SEQ ID NO: 1595178 - RNA, 19 nt, Artificial Sequence
  Description of Artificial Sequence: Synthetic oligonucleotide
  Antisense strand to SEQ ID NO: 1595177
uuaaagcgaaggcugcagc

SEQ ID NO: 1595179 - RNA, 19 nt, Artificial Sequence
  Description of Artificial Sequence: Synthetic oligonucleotide
  Sense strand starting at position 1592 of SEQ ID NO: 1560366
ugcagccuucgcuuuaaca

SEQ ID NO: 1595180 - RNA, 19 nt, Artificial Sequence
  Description of Artificial Sequence: Synthetic oligonucleotide
  Antisense strand to SEQ ID NO: 1595179
uguuaaagcgaaggcugca

SEQ ID NO: 1595181 - RNA, 19 nt, Artificial Sequence
  Description of Artificial Sequence: Synthetic oligonucleotide
  Sense strand starting at position 1594 of SEQ ID NO: 1560366
cagccuucgcuuuaacagu

SEQ ID NO: 1595182 - RNA, 19 nt, Artificial Sequence
  Description of Artificial Sequence: Synthetic oligonucleotide
  Antisense strand to SEQ ID NO: 1595181
acuguuaaagcgaaggcug

SEQ ID NO: 1595183 - RNA, 19 nt, Artificial Sequence
  Description of Artificial Sequence: Synthetic oligonucleotide
  Sense strand starting at position 2593 of SEQ ID NO: 1560366
aauuguaguuucccgaaag

SEQ ID NO: 1595184 - RNA, 19 nt, Artificial Sequence
  Description of Artificial Sequence: Synthetic oligonucleotide
  Antisense strand to SEQ ID NO: 1595183
cuuucgggaaacuacaauu

SEQ ID NO: 1595185 - RNA, 19 nt, Artificial Sequence
  Description of Artificial Sequence: Synthetic oligonucleotide
  Sense strand starting at position 2594 of SEQ ID NO: 1560366
auuguaguuucccgaaagc

SEQ ID NO: 1595186 - RNA, 19 nt, Artificial Sequence
  Description of Artificial Sequence: Synthetic oligonucleotide
  Antisense strand to SEQ ID NO: 1595185
gcuuucgggaaacuacaau

SEQ ID NO: 1595187 - RNA, 19 nt, Artificial Sequence
  Description of Artificial Sequence: Synthetic oligonucleotide
  Sense strand starting at position 2667 of SEQ ID NO: 1560366
acguguguuugggcaggua

SEQ ID NO: 1595188 - RNA, 19 nt, Artificial Sequence
  Description of Artificial Sequence: Synthetic oligonucleotide
  Antisense strand to SEQ ID NO: 1595187
uaccugcccaaacacacgu

SEQ ID NO: 1595189 - RNA, 19 nt, Artificial Sequence
  Description of Artificial Sequence: Synthetic oligonucleotide
  Sense strand starting at position 3095 of SEQ ID NO: 1560366
gagcccucuggagggauaa

SEQ ID NO: 1595190 - RNA, 19 nt, Artificial Sequence
  Description of Artificial Sequence: Synthetic oligonucleotide
  Antisense strand to SEQ ID NO: 1595189
uuaucccuccagagggcuc

SEQ ID NO: 1595191 - RNA, 19 nt, Artificial Sequence
  Description of Artificial Sequence: Synthetic oligonucleotide
  Sense strand starting at position 3301 of SEQ ID NO: 1560366
uucgguuccgccucuguaa

SEQ ID NO: 1595192 - RNA, 19 nt, Artificial Sequence
  Description of Artificial Sequence: Synthetic oligonucleotide
  Antisense strand to SEQ ID NO: 1595191
uuacagaggcggaaccgaa

SEQ ID NO: 1595193 - RNA, 19 nt, Artificial Sequence
  Description of Artificial Sequence: Synthetic oligonucleotide
  Sense strand starting at position 3302 of SEQ ID NO: 1560366
ucgguuccgccucuguaaa

SEQ ID NO: 1595194 - RNA, 19 nt, Artificial Sequence
  Description of Artificial Sequence: Synthetic oligonucleotide
  Antisense strand to SEQ ID NO: 1595193
uuuacagaggcggaaccga

SEQ ID NO: 1595195 - RNA, 19 nt, Artificial Sequence
  Description of Artificial Sequence: Synthetic oligonucleotide
  Sense strand starting at position 3333 of SEQ ID NO: 1560366
agagacgucuggaggaaga

SEQ ID NO: 1595196 - RNA, 19 nt, Artificial Sequence
  Description of Artificial Sequence: Synthetic oligonucleotide
  Antisense strand to SEQ ID NO: 1595195
ucuuccuccagacgucucu

SEQ ID NO: 1595197 - RNA, 19 nt, Artificial Sequence
  Description of Artificial Sequence: Synthetic oligonucleotide
  Sense strand starting at position 3442 of SEQ ID NO: 1560366
ggucuucccuucuuagagu

SEQ ID NO: 1595198 - RNA, 19 nt, Artificial Sequence
  Description of Artificial Sequence: Synthetic oligonucleotide
  Antisense strand to SEQ ID NO: 1595197
acucuaagaagggaagacc

SEQ ID NO: 1595199 - RNA, 19 nt, Artificial Sequence
  Description of Artificial Sequence: Synthetic oligonucleotide
  Sense strand starting at position 3486 of SEQ ID NO: 1560366
aucugagggccuugugaga

SEQ ID NO: 1595200 - RNA, 19 nt, Artificial Sequence
  Description of Artificial Sequence: Synthetic oligonucleotide
  Antisense strand to SEQ ID NO: 1595199
ucucacaaggcccucagau

SEQ ID NO: 1595201 - RNA, 19 nt, Artificial Sequence
  Description of Artificial Sequence: Synthetic oligonucleotide
  Sense strand starting at position 3491 of SEQ ID NO: 1560366
agggccuugugagaaauga

SEQ ID NO: 1595202 - RNA, 19 nt, Artificial Sequence
  Description of Artificial Sequence: Synthetic oligonucleotide
  Antisense strand to SEQ ID NO: 1595201
ucauuucucacaaggcccu

SEQ ID NO: 1595203 - RNA, 19 nt, Artificial Sequence
  Description of Artificial Sequence: Synthetic oligonucleotide
  Sense strand starting at position 3551 of SEQ ID NO: 1560366
gcgucugaguuucuuuaau

SEQ ID NO: 1595204 - RNA, 19 nt, Artificial Sequence
  Description of Artificial Sequence: Synthetic oligonucleotide
  Antisense strand to SEQ ID NO: 1595203
auuaaagaaacucagacgc

SEQ ID NO: 1595205 - RNA, 19 nt, Artificial Sequence
  Description of Artificial Sequence: Synthetic oligonucleotide
  Sense strand starting at position 3553 of SEQ ID NO: 1560366
gucugaguuucuuuaauga

SEQ ID NO: 1595206 - RNA, 19 nt, Artificial Sequence
  Description of Artificial Sequence: Synthetic oligonucleotide
  Antisense strand to SEQ ID NO: 1595205
ucauuaaagaaacucagac

SEQ ID NO: 1595207 - RNA, 19 nt, Artificial Sequence
  Description of Artificial Sequence: Synthetic oligonucleotide
  Sense strand starting at position 3576 of SEQ ID NO: 1560366
ucggaaacaucacucauau

SEQ ID NO: 1595208 - RNA, 19 nt, Artificial Sequence
  Description of Artificial Sequence: Synthetic oligonucleotide
  Antisense strand to SEQ ID NO: 1595207
auaugagugauguuuccga

SEQ ID NO: 1595209 - RNA, 19 nt, Artificial Sequence
  Description of Artificial Sequence: Synthetic oligonucleotide
  Sense strand starting at position 3948 of SEQ ID NO: 1560366
uuuaguaccucguagaguu

SEQ ID NO: 1595210 - RNA, 19 nt, Artificial Sequence
  Description of Artificial Sequence: Synthetic oligonucleotide
  Antisense strand to SEQ ID NO: 1595209
aacucuacgagguacuaaa

SEQ ID NO: 1595211 - RNA, 19 nt, Artificial Sequence
  Description of Artificial Sequence: Synthetic oligonucleotide
  Sense strand starting at position 3978 of SEQ ID NO: 1560366
acgacugucuaguuccaga

SEQ ID NO: 1595212 - RNA, 19 nt, Artificial Sequence
  Description of Artificial Sequence: Synthetic oligonucleotide
  Antisense strand to SEQ ID NO: 1595211
ucuggaacuagacagucgu

SEQ ID NO: 1595213 - RNA, 19 nt, Artificial Sequence
  Description of Artificial Sequence: Synthetic oligonucleotide
  Sense strand starting at position 3981 of SEQ ID NO: 1560366
acugucuaguuccagaaga

SEQ ID NO: 1595214 - RNA, 19 nt, Artificial Sequence
  Description of Artificial Sequence: Synthetic oligonucleotide
  Antisense strand to SEQ ID NO: 1595213
ucuucuggaacuagacagu

SEQ ID NO: 1595215 - RNA, 19 nt, Artificial Sequence
  Description of Artificial Sequence: Synthetic oligonucleotide
  Sense strand starting at position 3983 of SEQ ID NO: 1560366
ugucuaguuccagaagauu

SEQ ID NO: 1595216 - RNA, 19 nt, Artificial Sequence
  Description of Artificial Sequence: Synthetic oligonucleotide
  Antisense strand to SEQ ID NO: 1595215
aaucuucuggaacuagaca

SEQ ID NO: 1595217 - RNA, 19 nt, Artificial Sequence
  Description of Artificial Sequence: Synthetic oligonucleotide
  Sense strand starting at position 731 of SEQ ID NO: 1560367
ccacaauguucccuaagga

SEQ ID NO: 1595218 - RNA, 19 nt, Artificial Sequence
  Description of Artificial Sequence: Synthetic oligonucleotide
  Antisense strand to SEQ ID NO: 1595217
uccuuagggaacauugugg

SEQ ID NO: 1595219 - RNA, 19 nt, Artificial Sequence
  Description of Artificial Sequence: Synthetic oligonucleotide
  Sense strand starting at position 972 of SEQ ID NO: 1560367
uggagugguggcgagaauu

SEQ ID NO: 1595220 - RNA, 19 nt, Artificial Sequence
  Description of Artificial Sequence: Synthetic oligonucleotide
  Antisense strand to SEQ ID NO: 1595219
aauucucgccaccacucca

SEQ ID NO: 1595221 - RNA, 19 nt, Artificial Sequence
  Description of Artificial Sequence: Synthetic oligonucleotide
  Sense strand starting at position 978 of SEQ ID NO: 1560367
gguggcgagaauuaaguaa

SEQ ID NO: 1595222 - RNA, 19 nt, Artificial Sequence
  Description of Artificial Sequence: Synthetic oligonucleotide
  Antisense strand to SEQ ID NO: 1595221
uuacuuaauucucgccacc

SEQ ID NO: 1595223 - RNA, 19 nt, Artificial Sequence
  Description of Artificial Sequence: Synthetic oligonucleotide
  Sense strand starting at position 1053 of SEQ ID NO: 1560367
caaguaagcuguuuggaug

SEQ ID NO: 1595224 - RNA, 19 nt, Artificial Sequence
  Description of Artificial Sequence: Synthetic oligonucleotide
  Antisense strand to SEQ ID NO: 1595223
cauccaaacagcuuacuug

SEQ ID NO: 1595225 - RNA, 19 nt, Artificial Sequence
  Description of Artificial Sequence: Synthetic oligonucleotide
  Sense strand starting at position 1054 of SEQ ID NO: 1560367
aaguaagcuguuuggauga

SEQ ID NO: 1595226 - RNA, 19 nt, Artificial Sequence
  Description of Artificial Sequence: Synthetic oligonucleotide
  Antisense strand to SEQ ID NO: 1595225
ucauccaaacagcuuacuu

SEQ ID NO: 1595227 - RNA, 19 nt, Artificial Sequence
  Description of Artificial Sequence: Synthetic oligonucleotide
  Sense strand starting at position 1059 of SEQ ID NO: 1560367
agcuguuuggaugacuauu

SEQ ID NO: 1595228 - RNA, 19 nt, Artificial Sequence
  Description of Artificial Sequence: Synthetic oligonucleotide
  Antisense strand to SEQ ID NO: 1595227
aauagucauccaaacagcu

SEQ ID NO: 1595229 - RNA, 19 nt, Artificial Sequence
  Description of Artificial Sequence: Synthetic oligonucleotide
  Sense strand starting at position 1061 of SEQ ID NO: 1560367
cuguuuggaugacuauuau

SEQ ID NO: 1595230 - RNA, 19 nt, Artificial Sequence
  Description of Artificial Sequence: Synthetic oligonucleotide
  Antisense strand to SEQ ID NO: 1595229
auaauagucauccaaacag

SEQ ID NO: 1595231 - RNA, 19 nt, Artificial Sequence
  Description of Artificial Sequence: Synthetic oligonucleotide
  Sense strand starting at position 1067 of SEQ ID NO: 1560367
ggaugacuauuaucccgua

SEQ ID NO: 1595232 - RNA, 19 nt, Artificial Sequence
  Description of Artificial Sequence: Synthetic oligonucleotide
  Antisense strand to SEQ ID NO: 1595231
uacgggauaauagucaucc

SEQ ID NO: 1595233 - RNA, 19 nt, Artificial Sequence
  Description of Artificial Sequence: Synthetic oligonucleotide
  Sense strand starting at position 1068 of SEQ ID NO: 1560367
gaugacuauuaucccguaa

SEQ ID NO: 1595234 - RNA, 19 nt, Artificial Sequence
  Description of Artificial Sequence: Synthetic oligonucleotide
  Antisense strand to SEQ ID NO: 1595233
uuacgggauaauagucauc

SEQ ID NO: 1595235 - RNA, 19 nt, Artificial Sequence
  Description of Artificial Sequence: Synthetic oligonucleotide
  Sense strand starting at position 1072 of SEQ ID NO: 1560367
acuauuaucccguaaguuc

SEQ ID NO: 1595236 - RNA, 19 nt, Artificial Sequence
  Description of Artificial Sequence: Synthetic oligonucleotide
  Antisense strand to SEQ ID NO: 1595235
gaacuuacgggauaauagu

SEQ ID NO: 1595237 - RNA, 19 nt, Artificial Sequence
  Description of Artificial Sequence: Synthetic oligonucleotide
  Sense strand starting at position 1094 of SEQ ID NO: 1560367
cuggauuccuccuuaaguc

SEQ ID NO: 1595238 - RNA, 19 nt, Artificial Sequence
  Description of Artificial Sequence: Synthetic oligonucleotide
  Antisense strand to SEQ ID NO: 1595237
gacuuaaggaggaauccag

SEQ ID NO: 1595239 - RNA, 19 nt, Artificial Sequence
  Description of Artificial Sequence: Synthetic oligonucleotide
  Sense strand starting at position 1110 of SEQ ID NO: 1560367
guccuaccaugauugcuaa

SEQ ID NO: 1595240 - RNA, 19 nt, Artificial Sequence
  Description of Artificial Sequence: Synthetic oligonucleotide
  Antisense strand to SEQ ID NO: 1595239
uuagcaaucaugguaggac

SEQ ID NO: 1595241 - RNA, 19 nt, Artificial Sequence
  Description of Artificial Sequence: Synthetic oligonucleotide
  Sense strand starting at position 1113 of SEQ ID NO: 1560367
cuaccaugauugcuaaguu

SEQ ID NO: 1595242 - RNA, 19 nt, Artificial Sequence
  Description of Artificial Sequence: Synthetic oligonucleotide
  Antisense strand to SEQ ID NO: 1595241
aacuuagcaaucaugguag

SEQ ID NO: 1595243 - RNA, 19 nt, Artificial Sequence
  Description of Artificial Sequence: Synthetic oligonucleotide
  Sense strand starting at position 2488 of SEQ ID NO: 1560367
cucaucauucgguaucugu

SEQ ID NO: 1595244 - RNA, 19 nt, Artificial Sequence
  Description of Artificial Sequence: Synthetic oligonucleotide
  Antisense strand to SEQ ID NO: 1595243
acagauaccgaaugaugag

SEQ ID NO: 1595245 - RNA, 19 nt, Artificial Sequence
  Description of Artificial Sequence: Synthetic oligonucleotide
  Sense strand starting at position 2520 of SEQ ID NO: 1560367
gacugugggcuuugugaga

SEQ ID NO: 1595246 - RNA, 19 nt, Artificial Sequence
  Description of Artificial Sequence: Synthetic oligonucleotide
  Antisense strand to SEQ ID NO: 1595245
ucucacaaagcccacaguc

SEQ ID NO: 1595247 - RNA, 19 nt, Artificial Sequence
  Description of Artificial Sequence: Synthetic oligonucleotide
  Sense strand starting at position 2866 of SEQ ID NO: 1560367
gcgacaugcaaaugaggua

SEQ ID NO: 1595248 - RNA, 19 nt, Artificial Sequence
  Description of Artificial Sequence: Synthetic oligonucleotide
  Antisense strand to SEQ ID NO: 1595247
uaccucauuugcaugucgc

SEQ ID NO: 1595249 - RNA, 19 nt, Artificial Sequence
  Description of Artificial Sequence: Synthetic oligonucleotide
  Sense strand starting at position 3382 of SEQ ID NO: 1560367
ccaugcucccaguaucuga

SEQ ID NO: 1595250 - RNA, 19 nt, Artificial Sequence
  Description of Artificial Sequence: Synthetic oligonucleotide
  Antisense strand to SEQ ID NO: 1595249
ucagauacugggagcaugg

SEQ ID NO: 1595251 - RNA, 19 nt, Artificial Sequence
  Description of Artificial Sequence: Synthetic oligonucleotide
  Sense strand starting at position 3433 of SEQ ID NO: 1560367
gaaguuuauugagugcuua

SEQ ID NO: 1595252 - RNA, 19 nt, Artificial Sequence
  Description of Artificial Sequence: Synthetic oligonucleotide
  Antisense strand to SEQ ID NO: 1595251
uaagcacucaauaaacuuc

SEQ ID NO: 1595253 - RNA, 19 nt, Artificial Sequence
  Description of Artificial Sequence: Synthetic oligonucleotide
  Sense strand starting at position 3497 of SEQ ID NO: 1560367
uuauucgauucuccugaca

SEQ ID NO: 1595254 - RNA, 19 nt, Artificial Sequence
  Description of Artificial Sequence: Synthetic oligonucleotide
  Antisense strand to SEQ ID NO: 1595253
ugucaggagaaucgaauaa

SEQ ID NO: 1595255 - RNA, 19 nt, Artificial Sequence
  Description of Artificial Sequence: Synthetic oligonucleotide
  Sense strand starting at position 3508 of SEQ ID NO: 1560367
uccugacaacccugguuua

SEQ ID NO: 1595256 - RNA, 19 nt, Artificial Sequence
  Description of Artificial Sequence: Synthetic oligonucleotide
  Antisense strand to SEQ ID NO: 1595255
uaaaccaggguugucagga

SEQ ID NO: 1595257 - RNA, 19 nt, Artificial Sequence
  Description of Artificial Sequence: Synthetic oligonucleotide
  Sense strand starting at position 3509 of SEQ ID NO: 1560367
ccugacaacccugguuuau

SEQ ID NO: 1595258 - RNA, 19 nt, Artificial Sequence
  Description of Artificial Sequence: Synthetic oligonucleotide
  Antisense strand to SEQ ID NO: 1595257
auaaaccaggguugucagg

SEQ ID NO: 1595259 - RNA, 19 nt, Artificial Sequence
  Description of Artificial Sequence: Synthetic oligonucleotide
  Sense strand starting at position 3556 of SEQ ID NO: 1560367
gucaauugcuaguuauagg

SEQ ID NO: 1595260 - RNA, 19 nt, Artificial Sequence
  Description of Artificial Sequence: Synthetic oligonucleotide
  Antisense strand to SEQ ID NO: 1595259
ccuauaacuagcaauugac

SEQ ID NO: 1595261 - RNA, 19 nt, Artificial Sequence
  Description of Artificial Sequence: Synthetic oligonucleotide
  Sense strand starting at position 3563 of SEQ ID NO: 1560367
gcuaguuauaggcagagcu

SEQ ID NO: 1595262 - RNA, 19 nt, Artificial Sequence
  Description of Artificial Sequence: Synthetic oligonucleotide
  Antisense strand to SEQ ID NO: 1595261
agcucugccuauaacuagc

SEQ ID NO: 1595263 - RNA, 19 nt, Artificial Sequence
  Description of Artificial Sequence: Synthetic oligonucleotide
  Sense strand starting at position 3565 of SEQ ID NO: 1560367
uaguuauaggcagagcuga

SEQ ID NO: 1595264 - RNA, 19 nt, Artificial Sequence
  Description of Artificial Sequence: Synthetic oligonucleotide
  Antisense strand to SEQ ID NO: 1595263
ucagcucugccuauaacua

SEQ ID NO: 1595265 - RNA, 19 nt, Artificial Sequence
  Description of Artificial Sequence: Synthetic oligonucleotide
  Sense strand starting at position 3628 of SEQ ID NO: 1560367
uggguuuauuuguucucca

SEQ ID NO: 1595266 - RNA, 19 nt, Artificial Sequence
  Description of Artificial Sequence: Synthetic oligonucleotide
  Antisense strand to SEQ ID NO: 1595265
uggagaacaaauaaaccca

SEQ ID NO: 1595267 - RNA, 19 nt, Artificial Sequence
  Description of Artificial Sequence: Synthetic oligonucleotide
  Sense strand starting at position 3629 of SEQ ID NO: 1560367
ggguuuauuuguucuccau

SEQ ID NO: 1595268 - RNA, 19 nt, Artificial Sequence
  Description of Artificial Sequence: Synthetic oligonucleotide
  Antisense strand to SEQ ID NO: 1595267
auggagaacaaauaaaccc

SEQ ID NO: 1595269 - RNA, 19 nt, Artificial Sequence
  Description of Artificial Sequence: Synthetic oligonucleotide
  Sense strand starting at position 3631 of SEQ ID NO: 1560367
guuuauuuguucuccauuc

SEQ ID NO: 1595270 - RNA, 19 nt, Artificial Sequence
  Description of Artificial Sequence: Synthetic oligonucleotide
  Antisense strand to SEQ ID NO: 1595269
gaauggagaacaaauaaac

SEQ ID NO: 1595271 - RNA, 19 nt, Artificial Sequence
  Description of Artificial Sequence: Synthetic oligonucleotide
  Sense strand starting at position 3642 of SEQ ID NO: 1560367
cuccauucucugggacauu

SEQ ID NO: 1595272 - RNA, 19 nt, Artificial Sequence
  Description of Artificial Sequence: Synthetic oligonucleotide
  Antisense strand to SEQ ID NO: 1595271
aaugucccagagaauggag

SEQ ID NO: 1595273 - RNA, 19 nt, Artificial Sequence
  Description of Artificial Sequence: Synthetic oligonucleotide
  Sense strand starting at position 3694 of SEQ ID NO: 1560367
gccauuuacuggcagagga

SEQ ID NO: 1595274 - RNA, 19 nt, Artificial Sequence
  Description of Artificial Sequence: Synthetic oligonucleotide
  Antisense strand to SEQ ID NO: 1595273
uccucugccaguaaauggc

SEQ ID NO: 1595275 - RNA, 19 nt, Artificial Sequence
  Description of Artificial Sequence: Synthetic oligonucleotide
  Sense strand starting at position 3804 of SEQ ID NO: 1560367
uuagcugcuccugauaaca

SEQ ID NO: 1595276 - RNA, 19 nt, Artificial Sequence
  Description of Artificial Sequence: Synthetic oligonucleotide
  Antisense strand to SEQ ID NO: 1595275
uguuaucaggagcagcuaa

SEQ ID NO: 1595277 - RNA, 19 nt, Artificial Sequence
  Description of Artificial Sequence: Synthetic oligonucleotide
  Sense strand starting at position 3812 of SEQ ID NO: 1560367
uccugauaacaauggcuaa

SEQ ID NO: 1595278 - RNA, 19 nt, Artificial Sequence
  Description of Artificial Sequence: Synthetic oligonucleotide
  Antisense strand to SEQ ID NO: 1595277
uuagccauuguuaucagga

SEQ ID NO: 1595279 - RNA, 19 nt, Artificial Sequence
  Description of Artificial Sequence: Synthetic oligonucleotide
  Sense strand starting at position 3824 of SEQ ID NO: 1560367
uggcuaauguguccugaaa

SEQ ID NO: 1595280 - RNA, 19 nt, Artificial Sequence
  Description of Artificial Sequence: Synthetic oligonucleotide
  Antisense strand to SEQ ID NO: 1595279
uuucaggacacauuagcca

SEQ ID NO: 1595281 - RNA, 19 nt, Artificial Sequence
  Description of Artificial Sequence: Synthetic oligonucleotide
  Sense strand starting at position 3839 of SEQ ID NO: 1560367
gaaagcuucuguguaugaa

SEQ ID NO: 1595282 - RNA, 19 nt, Artificial Sequence
  Description of Artificial Sequence: Synthetic oligonucleotide
  Antisense strand to SEQ ID NO: 1595281
uucauacacagaagcuuuc

SEQ ID NO: 1595283 - RNA, 19 nt, Artificial Sequence
  Description of Artificial Sequence: Synthetic oligonucleotide
  Sense strand starting at position 3840 of SEQ ID NO: 1560367
aaagcuucuguguaugaac

SEQ ID NO: 1595284 - RNA, 19 nt, Artificial Sequence
  Description of Artificial Sequence: Synthetic oligonucleotide
  Antisense strand to SEQ ID NO: 1595283
guucauacacagaagcuuu

SEQ ID NO: 1595285 - RNA, 19 nt, Artificial Sequence
  Description of Artificial Sequence: Synthetic oligonucleotide
  Sense strand starting at position 3851 of SEQ ID NO: 1560367
guaugaacacuuugugggu

SEQ ID NO: 1595286 - RNA, 19 nt, Artificial Sequence
  Description of Artificial Sequence: Synthetic oligonucleotide
  Antisense strand to SEQ ID NO: 1595285
acccacaaaguguucauac

SEQ ID NO: 1595287 - RNA, 19 nt, Artificial Sequence
  Description of Artificial Sequence: Synthetic oligonucleotide
  Sense strand starting at position 3855 of SEQ ID NO: 1560367
gaacacuuuguggguauua

SEQ ID NO: 1595288 - RNA, 19 nt, Artificial Sequence
  Description of Artificial Sequence: Synthetic oligonucleotide
  Antisense strand to SEQ ID NO: 1595287
uaauacccacaaaguguuc

SEQ ID NO: 1595289 - RNA, 19 nt, Artificial Sequence
  Description of Artificial Sequence: Synthetic oligonucleotide
  Sense strand starting at position 3856 of SEQ ID NO: 1560367
aacacuuuguggguauuau

SEQ ID NO: 1595290 - RNA, 19 nt, Artificial Sequence
  Description of Artificial Sequence: Synthetic oligonucleotide
  Antisense strand to SEQ ID NO: 1595289
auaauacccacaaaguguu

SEQ ID NO: 1595291 - RNA, 19 nt, Artificial Sequence
  Description of Artificial Sequence: Synthetic oligonucleotide
  Sense strand starting at position 3866 of SEQ ID NO: 1560367
ggguauuaugcucauggca

SEQ ID NO: 1595292 - RNA, 19 nt, Artificial Sequence
  Description of Artificial Sequence: Synthetic oligonucleotide
  Antisense strand to SEQ ID NO: 1595291
ugccaugagcauaauaccc

SEQ ID NO: 1595293 - RNA, 19 nt, Artificial Sequence
  Description of Artificial Sequence: Synthetic oligonucleotide
  Sense strand starting at position 3900 of SEQ ID NO: 1560367
guagaacuaugugucccau

SEQ ID NO: 1595294 - RNA, 19 nt, Artificial Sequence
  Description of Artificial Sequence: Synthetic oligonucleotide
  Antisense strand to SEQ ID NO: 1595293
augggacacauaguucuac

SEQ ID NO: 1595295 - RNA, 19 nt, Artificial Sequence
  Description of Artificial Sequence: Synthetic oligonucleotide
  Sense strand starting at position 3978 of SEQ ID NO: 1560367
gaguaaagauuugaacgaa

SEQ ID NO: 1595296 - RNA, 19 nt, Artificial Sequence
  Description of Artificial Sequence: Synthetic oligonucleotide
  Antisense strand to SEQ ID NO: 1595295
uucguucaaaucuuuacuc

SEQ ID NO: 1595297 - RNA, 19 nt, Artificial Sequence
  Description of Artificial Sequence: Synthetic oligonucleotide
  Sense strand starting at position 412 of SEQ ID NO: 1560368
aggaauuggcccuggaagu

SEQ ID NO: 1595298 - RNA, 19 nt, Artificial Sequence
  Description of Artificial Sequence: Synthetic oligonucleotide
  Antisense strand to SEQ ID NO: 1595297
acuuccagggccaauuccu

SEQ ID NO: 1595299 - RNA, 19 nt, Artificial Sequence
  Description of Artificial Sequence: Synthetic oligonucleotide
  Sense strand starting at position 435 of SEQ ID NO: 1560368
ggcagagaugugggucaga

SEQ ID NO: 1595300 - RNA, 19 nt, Artificial Sequence
  Description of Artificial Sequence: Synthetic oligonucleotide
  Antisense strand to SEQ ID NO: 1595299
ucugacccacaucucugcc

SEQ ID NO: 1595301 - RNA, 19 nt, Artificial Sequence
  Description of Artificial Sequence: Synthetic oligonucleotide
  Sense strand starting at position 446 of SEQ ID NO: 1560368
gggucagaauccuacacag

SEQ ID NO: 1595302 - RNA, 19 nt, Artificial Sequence
  Description of Artificial Sequence: Synthetic oligonucleotide
  Antisense strand to SEQ ID NO: 1595301
cuguguaggauucugaccc

SEQ ID NO: 1595303 - RNA, 19 nt, Artificial Sequence
  Description of Artificial Sequence: Synthetic oligonucleotide
  Sense strand starting at position 467 of SEQ ID NO: 1560368
ccucaaagucuccacugua

SEQ ID NO: 1595304 - RNA, 19 nt, Artificial Sequence
  Description of Artificial Sequence: Synthetic oligonucleotide
  Antisense strand to SEQ ID NO: 1595303
uacaguggagacuuugagg

SEQ ID NO: 1595305 - RNA, 19 nt, Artificial Sequence
  Description of Artificial Sequence: Synthetic oligonucleotide
  Sense strand starting at position 501 of SEQ ID NO: 1560368
gccgaucacuuucugugua

SEQ ID NO: 1595306 - RNA, 19 nt, Artificial Sequence
  Description of Artificial Sequence: Synthetic oligonucleotide
  Antisense strand to SEQ ID NO: 1595305
uacacagaaagugaucggc

SEQ ID NO: 1595307 - RNA, 19 nt, Artificial Sequence
  Description of Artificial Sequence: Synthetic oligonucleotide
  Sense strand starting at position 502 of SEQ ID NO: 1560368
ccgaucacuuucuguguaa

SEQ ID NO: 1595308 - RNA, 19 nt, Artificial Sequence
  Description of Artificial Sequence: Synthetic oligonucleotide
  Antisense strand to SEQ ID NO: 1595307
uuacacagaaagugaucgg

SEQ ID NO: 1595309 - RNA, 19 nt, Artificial Sequence
  Description of Artificial Sequence: Synthetic oligonucleotide
  Sense strand starting at position 503 of SEQ ID NO: 1560368
cgaucacuuucuguguaac

SEQ ID NO: 1595310 - RNA, 19 nt, Artificial Sequence
  Description of Artificial Sequence: Synthetic oligonucleotide
  Antisense strand to SEQ ID NO: 1595309
guuacacagaaagugaucg

SEQ ID NO: 1595311 - RNA, 19 nt, Artificial Sequence
  Description of Artificial Sequence: Synthetic oligonucleotide
  Sense strand starting at position 506 of SEQ ID NO: 1560368
ucacuuucuguguaacuca

SEQ ID NO: 1595312 - RNA, 19 nt, Artificial Sequence
  Description of Artificial Sequence: Synthetic oligonucleotide
  Antisense strand to SEQ ID NO: 1595311
ugaguuacacagaaaguga

SEQ ID NO: 1595313 - RNA, 19 nt, Artificial Sequence
  Description of Artificial Sequence: Synthetic oligonucleotide
  Sense strand starting at position 575 of SEQ ID NO: 1560368
cccagcuuguugggagaaa

SEQ ID NO: 1595314 - RNA, 19 nt, Artificial Sequence
  Description of Artificial Sequence: Synthetic oligonucleotide
  Antisense strand to SEQ ID NO: 1595313
uuucucccaacaagcuggg

SEQ ID NO: 1595315 - RNA, 19 nt, Artificial Sequence
  Description of Artificial Sequence: Synthetic oligonucleotide
  Sense strand starting at position 576 of SEQ ID NO: 1560368
ccagcuuguugggagaaau

SEQ ID NO: 1595316 - RNA, 19 nt, Artificial Sequence
  Description of Artificial Sequence: Synthetic oligonucleotide
  Antisense strand to SEQ ID NO: 1595315
auuucucccaacaagcugg

SEQ ID NO: 1595317 - RNA, 19 nt, Artificial Sequence
  Description of Artificial Sequence: Synthetic oligonucleotide
  Sense strand starting at position 625 of SEQ ID NO: 1560368
cucaaauaguguuagccau

SEQ ID NO: 1595318 - RNA, 19 nt, Artificial Sequence
  Description of Artificial Sequence: Synthetic oligonucleotide
  Antisense strand to SEQ ID NO: 1595317
auggcuaacacuauuugag

SEQ ID NO: 1595319 - RNA, 19 nt, Artificial Sequence
  Description of Artificial Sequence: Synthetic oligonucleotide
  Sense strand starting at position 632 of SEQ ID NO: 1560368
aguguuagccauuauuaga

SEQ ID NO: 1595320 - RNA, 19 nt, Artificial Sequence
  Description of Artificial Sequence: Synthetic oligonucleotide
  Antisense strand to SEQ ID NO: 1595319
ucuaauaauggcuaacacu

SEQ ID NO: 1595321 - RNA, 19 nt, Artificial Sequence
  Description of Artificial Sequence: Synthetic oligonucleotide
  Sense strand starting at position 812 of SEQ ID NO: 1560368
uguggcuuugccugauuau

SEQ ID NO: 1595322 - RNA, 19 nt, Artificial Sequence
  Description of Artificial Sequence: Synthetic oligonucleotide
  Antisense strand to SEQ ID NO: 1595321
auaaucaggcaaagccaca

SEQ ID NO: 1595323 - RNA, 19 nt, Artificial Sequence
  Description of Artificial Sequence: Synthetic oligonucleotide
  Sense strand starting at position 813 of SEQ ID NO: 1560368
guggcuuugccugauuaua

SEQ ID NO: 1595324 - RNA, 19 nt, Artificial Sequence
  Description of Artificial Sequence: Synthetic oligonucleotide
  Antisense strand to SEQ ID NO: 1595323
uauaaucaggcaaagccac

SEQ ID NO: 1595325 - RNA, 19 nt, Artificial Sequence
  Description of Artificial Sequence: Synthetic oligonucleotide
  Sense strand starting at position 815 of SEQ ID NO: 1560368
ggcuuugccugauuauaag

SEQ ID NO: 1595326 - RNA, 19 nt, Artificial Sequence
  Description of Artificial Sequence: Synthetic oligonucleotide
  Antisense strand to SEQ ID NO: 1595325
cuuauaaucaggcaaagcc

SEQ ID NO: 1595327 - RNA, 19 nt, Artificial Sequence
  Description of Artificial Sequence: Synthetic oligonucleotide
  Sense strand starting at position 823 of SEQ ID NO: 1560368
cugauuauaagcugagcga

SEQ ID NO: 1595328 - RNA, 19 nt, Artificial Sequence
  Description of Artificial Sequence: Synthetic oligonucleotide
  Antisense strand to SEQ ID NO: 1595327
ucgcucagcuuauaaucag

SEQ ID NO: 1595329 - RNA, 19 nt, Artificial Sequence
  Description of Artificial Sequence: Synthetic oligonucleotide
  Sense strand starting at position 824 of SEQ ID NO: 1560368
ugauuauaagcugagcgaa

SEQ ID NO: 1595330 - RNA, 19 nt, Artificial Sequence
  Description of Artificial Sequence: Synthetic oligonucleotide
  Antisense strand to SEQ ID NO: 1595329
uucgcucagcuuauaauca

SEQ ID NO: 1595331 - RNA, 19 nt, Artificial Sequence
  Description of Artificial Sequence: Synthetic oligonucleotide
  Sense strand starting at position 2285 of SEQ ID NO: 1560368
uccugaccaucugcgaaau

SEQ ID NO: 1595332 - RNA, 19 nt, Artificial Sequence
  Description of Artificial Sequence: Synthetic oligonucleotide
  Antisense strand to SEQ ID NO: 1595331
auuucgcagauggucagga

SEQ ID NO: 1595333 - RNA, 19 nt, Artificial Sequence
  Description of Artificial Sequence: Synthetic oligonucleotide
  Sense strand starting at position 2439 of SEQ ID NO: 1560368
aagccuuaguuacagaagu

SEQ ID NO: 1595334 - RNA, 19 nt, Artificial Sequence
  Description of Artificial Sequence: Synthetic oligonucleotide
  Antisense strand to SEQ ID NO: 1595333
acuucuguaacuaaggcuu

SEQ ID NO: 1595335 - RNA, 19 nt, Artificial Sequence
  Description of Artificial Sequence: Synthetic oligonucleotide
  Sense strand starting at position 2441 of SEQ ID NO: 1560368
gccuuaguuacagaaguga

SEQ ID NO: 1595336 - RNA, 19 nt, Artificial Sequence
  Description of Artificial Sequence: Synthetic oligonucleotide
  Antisense strand to SEQ ID NO: 1595335
ucacuucuguaacuaaggc

SEQ ID NO: 1595337 - RNA, 19 nt, Artificial Sequence
  Description of Artificial Sequence: Synthetic oligonucleotide
  Sense strand starting at position 2474 of SEQ ID NO: 1560368
ggaggagugacgugcccaa

SEQ ID NO: 1595338 - RNA, 19 nt, Artificial Sequence
  Description of Artificial Sequence: Synthetic oligonucleotide
  Antisense strand to SEQ ID NO: 1595337
uugggcacgucacuccucc

SEQ ID NO: 1595339 - RNA, 19 nt, Artificial Sequence
  Description of Artificial Sequence: Synthetic oligonucleotide
  Sense strand starting at position 2525 of SEQ ID NO: 1560368
acaguuuaaugucuagaag

SEQ ID NO: 1595340 - RNA, 19 nt, Artificial Sequence
  Description of Artificial Sequence: Synthetic oligonucleotide
  Antisense strand to SEQ ID NO: 1595339
cuucuagacauuaaacugu

SEQ ID NO: 1595341 - RNA, 19 nt, Artificial Sequence
  Description of Artificial Sequence: Synthetic oligonucleotide
  Sense strand starting at position 2528 of SEQ ID NO: 1560368
guuuaaugucuagaagguu

SEQ ID NO: 1595342 - RNA, 19 nt, Artificial Sequence
  Description of Artificial Sequence: Synthetic oligonucleotide
  Antisense strand to SEQ ID NO: 1595341
aaccuucuagacauuaaac

SEQ ID NO: 1595343 - RNA, 19 nt, Artificial Sequence
  Description of Artificial Sequence: Synthetic oligonucleotide
  Sense strand starting at position 2678 of SEQ ID NO: 1560368
uggcauccuugauuagcua

SEQ ID NO: 1595344 - RNA, 19 nt, Artificial Sequence
  Description of Artificial Sequence: Synthetic oligonucleotide
  Antisense strand to SEQ ID NO: 1595343
uagcuaaucaaggaugcca

SEQ ID NO: 1595345 - RNA, 19 nt, Artificial Sequence
  Description of Artificial Sequence: Synthetic oligonucleotide
  Sense strand starting at position 2679 of SEQ ID NO: 1560368
ggcauccuugauuagcuaa

SEQ ID NO: 1595346 - RNA, 19 nt, Artificial Sequence
  Description of Artificial Sequence: Synthetic oligonucleotide
  Antisense strand to SEQ ID NO: 1595345
uuagcuaaucaaggaugcc

SEQ ID NO: 1595347 - RNA, 19 nt, Artificial Sequence
  Description of Artificial Sequence: Synthetic oligonucleotide
  Sense strand starting at position 2682 of SEQ ID NO: 1560368
auccuugauuagcuaaguu

SEQ ID NO: 1595348 - RNA, 19 nt, Artificial Sequence
  Description of Artificial Sequence: Synthetic oligonucleotide
  Antisense strand to SEQ ID NO: 1595347
aacuuagcuaaucaaggau

SEQ ID NO: 1595349 - RNA, 19 nt, Artificial Sequence
  Description of Artificial Sequence: Synthetic oligonucleotide
  Sense strand starting at position 2765 of SEQ ID NO: 1560368
agcaguuacuccuuccaga

SEQ ID NO: 1595350 - RNA, 19 nt, Artificial Sequence
  Description of Artificial Sequence: Synthetic oligonucleotide
  Antisense strand to SEQ ID NO: 1595349
ucuggaaggaguaacugcu

SEQ ID NO: 1595351 - RNA, 19 nt, Artificial Sequence
  Description of Artificial Sequence: Synthetic oligonucleotide
  Sense strand starting at position 2991 of SEQ ID NO: 1560368
agcuaucauggagguggua

SEQ ID NO: 1595352 - RNA, 19 nt, Artificial Sequence
  Description of Artificial Sequence: Synthetic oligonucleotide
  Antisense strand to SEQ ID NO: 1595351
uaccaccuccaugauagcu

SEQ ID NO: 1595353 - RNA, 19 nt, Artificial Sequence
  Description of Artificial Sequence: Synthetic oligonucleotide
  Sense strand starting at position 3021 of SEQ ID NO: 1560368
ggagaucacuucuaagguu

SEQ ID NO: 1595354 - RNA, 19 nt, Artificial Sequence
  Description of Artificial Sequence: Synthetic oligonucleotide
  Antisense strand to SEQ ID NO: 1595353
aaccuuagaagugaucucc

SEQ ID NO: 1595355 - RNA, 19 nt, Artificial Sequence
  Description of Artificial Sequence: Synthetic oligonucleotide
  Sense strand starting at position 3048 of SEQ ID NO: 1560368
cagguuaccuccuacagga

SEQ ID NO: 1595356 - RNA, 19 nt, Artificial Sequence
  Description of Artificial Sequence: Synthetic oligonucleotide
  Antisense strand to SEQ ID NO: 1595355
uccuguaggagguaaccug

SEQ ID NO: 1595357 - RNA, 19 nt, Artificial Sequence
  Description of Artificial Sequence: Synthetic oligonucleotide
  Sense strand starting at position 3106 of SEQ ID NO: 1560368
uuuagcugucuuggcacaa

SEQ ID NO: 1595358 - RNA, 19 nt, Artificial Sequence
  Description of Artificial Sequence: Synthetic oligonucleotide
  Antisense strand to SEQ ID NO: 1595357
uugugccaagacagcuaaa

SEQ ID NO: 1595359 - RNA, 19 nt, Artificial Sequence
  Description of Artificial Sequence: Synthetic oligonucleotide
  Sense strand starting at position 3107 of SEQ ID NO: 1560368
uuagcugucuuggcacaau

SEQ ID NO: 1595360 - RNA, 19 nt, Artificial Sequence
  Description of Artificial Sequence: Synthetic oligonucleotide
  Antisense strand to SEQ ID NO: 1595359
auugugccaagacagcuaa

SEQ ID NO: 1595361 - RNA, 19 nt, Artificial Sequence
  Description of Artificial Sequence: Synthetic oligonucleotide
  Sense strand starting at position 3110 of SEQ ID NO: 1560368
gcugucuuggcacaaugaa

SEQ ID NO: 1595362 - RNA, 19 nt, Artificial Sequence
  Description of Artificial Sequence: Synthetic oligonucleotide
  Antisense strand to SEQ ID NO: 1595361
uucauugugccaagacagc

SEQ ID NO: 1595363 - RNA, 19 nt, Artificial Sequence
  Description of Artificial Sequence: Synthetic oligonucleotide
  Sense strand starting at position 3119 of SEQ ID NO: 1560368
gcacaaugaaguugaugaa

SEQ ID NO: 1595364 - RNA, 19 nt, Artificial Sequence
  Description of Artificial Sequence: Synthetic oligonucleotide
  Antisense strand to SEQ ID NO: 1595363
uucaucaacuucauugugc

SEQ ID NO: 1595365 - RNA, 19 nt, Artificial Sequence
  Description of Artificial Sequence: Synthetic oligonucleotide
  Sense strand starting at position 51 of SEQ ID NO: 1560369
ucagccauuuccguacaau

SEQ ID NO: 1595366 - RNA, 19 nt, Artificial Sequence
  Description of Artificial Sequence: Synthetic oligonucleotide
  Antisense strand to SEQ ID NO: 1595365
auuguacggaaauggcuga

SEQ ID NO: 1595367 - RNA, 19 nt, Artificial Sequence
  Description of Artificial Sequence: Synthetic oligonucleotide
  Sense strand starting at position 62 of SEQ ID NO: 1560369
cguacaauagagcacaauu

SEQ ID NO: 1595368 - RNA, 19 nt, Artificial Sequence
  Description of Artificial Sequence: Synthetic oligonucleotide
  Antisense strand to SEQ ID NO: 1595367
aauugugcucuauuguacg

SEQ ID NO: 1595369 - RNA, 19 nt, Artificial Sequence
  Description of Artificial Sequence: Synthetic oligonucleotide
  Sense strand starting at position 115 of SEQ ID NO: 1560369
agggaauccuuucucuuga

SEQ ID NO: 1595370 - RNA, 19 nt, Artificial Sequence
  Description of Artificial Sequence: Synthetic oligonucleotide
  Antisense strand to SEQ ID NO: 1595369
ucaagagaaaggauucccu

SEQ ID NO: 1595371 - RNA, 19 nt, Artificial Sequence
  Description of Artificial Sequence: Synthetic oligonucleotide
  Sense strand starting at position 116 of SEQ ID NO: 1560369
gggaauccuuucucuugaa

SEQ ID NO: 1595372 - RNA, 19 nt, Artificial Sequence
  Description of Artificial Sequence: Synthetic oligonucleotide
  Antisense strand to SEQ ID NO: 1595371
uucaagagaaaggauuccc

SEQ ID NO: 1595373 - RNA, 19 nt, Artificial Sequence
  Description of Artificial Sequence: Synthetic oligonucleotide
  Sense strand starting at position 194 of SEQ ID NO: 1560369
ggaugucaguuauuauagc

SEQ ID NO: 1595374 - RNA, 19 nt, Artificial Sequence
  Description of Artificial Sequence: Synthetic oligonucleotide
  Antisense strand to SEQ ID NO: 1595373
gcuauaauaacugacaucc

SEQ ID NO: 1595375 - RNA, 19 nt, Artificial Sequence
  Description of Artificial Sequence: Synthetic oligonucleotide
  Sense strand starting at position 231 of SEQ ID NO: 1560369
uagcaugaauguguccaga

SEQ ID NO: 1595376 - RNA, 19 nt, Artificial Sequence
  Description of Artificial Sequence: Synthetic oligonucleotide
  Antisense strand to SEQ ID NO: 1595375
ucuggacacauucaugcua

SEQ ID NO: 1595377 - RNA, 19 nt, Artificial Sequence
  Description of Artificial Sequence: Synthetic oligonucleotide
  Sense strand starting at position 233 of SEQ ID NO: 1560369
gcaugaauguguccagaaa

SEQ ID NO: 1595378 - RNA, 19 nt, Artificial Sequence
  Description of Artificial Sequence: Synthetic oligonucleotide
  Antisense strand to SEQ ID NO: 1595377
uuucuggacacauucaugc

SEQ ID NO: 1595379 - RNA, 19 nt, Artificial Sequence
  Description of Artificial Sequence: Synthetic oligonucleotide
  Sense strand starting at position 306 of SEQ ID NO: 1560369
acacucuaccucugagaga

SEQ ID NO: 1595380 - RNA, 19 nt, Artificial Sequence
  Description of Artificial Sequence: Synthetic oligonucleotide
  Antisense strand to SEQ ID NO: 1595379
ucucucagagguagagugu

SEQ ID NO: 1595381 - RNA, 19 nt, Artificial Sequence
  Description of Artificial Sequence: Synthetic oligonucleotide
  Sense strand starting at position 799 of SEQ ID NO: 1560369
agcagagcaucuccucuaa

SEQ ID NO: 1595382 - RNA, 19 nt, Artificial Sequence
  Description of Artificial Sequence: Synthetic oligonucleotide
  Antisense strand to SEQ ID NO: 1595381
uuagaggagaugcucugcu

SEQ ID NO: 1595383 - RNA, 19 nt, Artificial Sequence
  Description of Artificial Sequence: Synthetic oligonucleotide
  Sense strand starting at position 871 of SEQ ID NO: 1560369
gacgguuaccaugguaaug

SEQ ID NO: 1595384 - RNA, 19 nt, Artificial Sequence
  Description of Artificial Sequence: Synthetic oligonucleotide
  Antisense strand to SEQ ID NO: 1595383
cauuaccaugguaaccguc

SEQ ID NO: 1595385 - RNA, 19 nt, Artificial Sequence
  Description of Artificial Sequence: Synthetic oligonucleotide
  Sense strand starting at position 923 of SEQ ID NO: 1560369
agaggugcuucucuuagag

SEQ ID NO: 1595386 - RNA, 19 nt, Artificial Sequence
  Description of Artificial Sequence: Synthetic oligonucleotide
  Antisense strand to SEQ ID NO: 1595385
cucuaagagaagcaccucu

SEQ ID NO: 1595387 - RNA, 19 nt, Artificial Sequence
  Description of Artificial Sequence: Synthetic oligonucleotide
  Sense strand starting at position 935 of SEQ ID NO: 1560369
cuuagagaucaguguccuu

SEQ ID NO: 1595388 - RNA, 19 nt, Artificial Sequence
  Description of Artificial Sequence: Synthetic oligonucleotide
  Antisense strand to SEQ ID NO: 1595387
aaggacacugaucucuaag

SEQ ID NO: 1595389 - RNA, 19 nt, Artificial Sequence
  Description of Artificial Sequence: Synthetic oligonucleotide
  Sense strand starting at position 962 of SEQ ID NO: 1560369
gguccuuucuaccugaaug

SEQ ID NO: 1595390 - RNA, 19 nt, Artificial Sequence
  Description of Artificial Sequence: Synthetic oligonucleotide
  Antisense strand to SEQ ID NO: 1595389
cauucagguagaaaggacc

SEQ ID NO: 1595391 - RNA, 19 nt, Artificial Sequence
  Description of Artificial Sequence: Synthetic oligonucleotide
  Sense strand starting at position 997 of SEQ ID NO: 1560369
uugccauaguaaucaauga

SEQ ID NO: 1595392 - RNA, 19 nt, Artificial Sequence
  Description of Artificial Sequence: Synthetic oligonucleotide
  Antisense strand to SEQ ID NO: 1595391
ucauugauuacuauggcaa

SEQ ID NO: 1595393 - RNA, 19 nt, Artificial Sequence
  Description of Artificial Sequence: Synthetic oligonucleotide
  Sense strand starting at position 1245 of SEQ ID NO: 1560369
aguaauuguccaggagagu

SEQ ID NO: 1595394 - RNA, 19 nt, Artificial Sequence
  Description of Artificial Sequence: Synthetic oligonucleotide
  Antisense strand to SEQ ID NO: 1595393
acucuccuggacaauuacu

SEQ ID NO: 1595395 - RNA, 19 nt, Artificial Sequence
  Description of Artificial Sequence: Synthetic oligonucleotide
  Sense strand starting at position 1246 of SEQ ID NO: 1560369
guaauuguccaggagagug

SEQ ID NO: 1595396 - RNA, 19 nt, Artificial Sequence
  Description of Artificial Sequence: Synthetic oligonucleotide
  Antisense strand to SEQ ID NO: 1595395
cacucuccuggacaauuac

SEQ ID NO: 1595397 - RNA, 19 nt, Artificial Sequence
  Description of Artificial Sequence: Synthetic oligonucleotide
  Sense strand starting at position 1824 of SEQ ID NO: 1560369
cacuuuauccagcacgagu

SEQ ID NO: 1595398 - RNA, 19 nt, Artificial Sequence
  Description of Artificial Sequence: Synthetic oligonucleotide
  Antisense strand to SEQ ID NO: 1595397
acucgugcuggauaaagug

SEQ ID NO: 1595399 - RNA, 19 nt, Artificial Sequence
  Description of Artificial Sequence: Synthetic oligonucleotide
  Sense strand starting at position 2328 of SEQ ID NO: 1560369
uggucuccugugggaguaa

SEQ ID NO: 1595400 - RNA, 19 nt, Artificial Sequence
  Description of Artificial Sequence: Synthetic oligonucleotide
  Antisense strand to SEQ ID NO: 1595399
uuacucccacaggagacca

SEQ ID NO: 1595401 - RNA, 19 nt, Artificial Sequence
  Description of Artificial Sequence: Synthetic oligonucleotide
  Sense strand starting at position 2681 of SEQ ID NO: 1560369
gggaaggguucuuuggagu

SEQ ID NO: 1595402 - RNA, 19 nt, Artificial Sequence
  Description of Artificial Sequence: Synthetic oligonucleotide
  Antisense strand to SEQ ID NO: 1595401
acuccaaagaacccuuccc

SEQ ID NO: 1595403 - RNA, 19 nt, Artificial Sequence
  Description of Artificial Sequence: Synthetic oligonucleotide
  Sense strand starting at position 2685 of SEQ ID NO: 1560369
aggguucuuuggaguggaa

SEQ ID NO: 1595404 - RNA, 19 nt, Artificial Sequence
  Description of Artificial Sequence: Synthetic oligonucleotide
  Antisense strand to SEQ ID NO: 1595403
uuccacuccaaagaacccu

SEQ ID NO: 1595405 - RNA, 19 nt, Artificial Sequence
  Description of Artificial Sequence: Synthetic oligonucleotide
  Sense strand starting at position 2687 of SEQ ID NO: 1560369
gguucuuuggaguggaagu

SEQ ID NO: 1595406 - RNA, 19 nt, Artificial Sequence
  Description of Artificial Sequence: Synthetic oligonucleotide
  Antisense strand to SEQ ID NO: 1595405
acuuccacuccaaagaacc

SEQ ID NO: 1595407 - RNA, 19 nt, Artificial Sequence
  Description of Artificial Sequence: Synthetic oligonucleotide
  Sense strand starting at position 2746 of SEQ ID NO: 1560369
agagcuuaagaguggaagu

SEQ ID NO: 1595408 - RNA, 19 nt, Artificial Sequence
  Description of Artificial Sequence: Synthetic oligonucleotide
  Antisense strand to SEQ ID NO: 1595407
acuuccacucuuaagcucu

SEQ ID NO: 1595409 - RNA, 19 nt, Artificial Sequence
  Description of Artificial Sequence: Synthetic oligonucleotide
  Sense strand starting at position 2747 of SEQ ID NO: 1560369
gagcuuaagaguggaaguu

SEQ ID NO: 1595410 - RNA, 19 nt, Artificial Sequence
  Description of Artificial Sequence: Synthetic oligonucleotide
  Antisense strand to SEQ ID NO: 1595409
aacuuccacucuuaagcuc

SEQ ID NO: 1595411 - RNA, 19 nt, Artificial Sequence
  Description of Artificial Sequence: Synthetic oligonucleotide
  Sense strand starting at position 2809 of SEQ ID NO: 1560369
ggcacguguguuguaggau

SEQ ID NO: 1595412 - RNA, 19 nt, Artificial Sequence
  Description of Artificial Sequence: Synthetic oligonucleotide
  Antisense strand to SEQ ID NO: 1595411
auccuacaacacacgugcc

SEQ ID NO: 1595413 - RNA, 19 nt, Artificial Sequence
  Description of Artificial Sequence: Synthetic oligonucleotide
  Sense strand starting at position 2901 of SEQ ID NO: 1560369
ugccaaugaggacgaguua

SEQ ID NO: 1595414 - RNA, 19 nt, Artificial Sequence
  Description of Artificial Sequence: Synthetic oligonucleotide
  Antisense strand to SEQ ID NO: 1595413
uaacucguccucauuggca

SEQ ID NO: 1595415 - RNA, 19 nt, Artificial Sequence
  Description of Artificial Sequence: Synthetic oligonucleotide
  Sense strand starting at position 3215 of SEQ ID NO: 1560369
gucugaagauucuuggacu

SEQ ID NO: 1595416 - RNA, 19 nt, Artificial Sequence
  Description of Artificial Sequence: Synthetic oligonucleotide
  Antisense strand to SEQ ID NO: 1595415
aguccaagaaucuucagac

SEQ ID NO: 1595417 - RNA, 19 nt, Artificial Sequence
  Description of Artificial Sequence: Synthetic oligonucleotide
  Sense strand starting at position 3221 of SEQ ID NO: 1560369
agauucuuggacuggguua

SEQ ID NO: 1595418 - RNA, 19 nt, Artificial Sequence
  Description of Artificial Sequence: Synthetic oligonucleotide
  Antisense strand to SEQ ID NO: 1595417
uaacccaguccaagaaucu

SEQ ID NO: 1595419 - RNA, 19 nt, Artificial Sequence
  Description of Artificial Sequence: Synthetic oligonucleotide
  Sense strand starting at position 3223 of SEQ ID NO: 1560369
auucuuggacuggguuauu

SEQ ID NO: 1595420 - RNA, 19 nt, Artificial Sequence
  Description of Artificial Sequence: Synthetic oligonucleotide
  Antisense strand to SEQ ID NO: 1595419
aauaacccaguccaagaau

SEQ ID NO: 1595421 - RNA, 19 nt, Artificial Sequence
  Description of Artificial Sequence: Synthetic oligonucleotide
  Sense strand starting at position 3226 of SEQ ID NO: 1560369
cuuggacuggguuauuauu

SEQ ID NO: 1595422 - RNA, 19 nt, Artificial Sequence
  Description of Artificial Sequence: Synthetic oligonucleotide
  Antisense strand to SEQ ID NO: 1595421
aauaauaacccaguccaag

SEQ ID NO: 1595423 - RNA, 19 nt, Artificial Sequence
  Description of Artificial Sequence: Synthetic oligonucleotide
  Sense strand starting at position 3234 of SEQ ID NO: 1560369
ggguuauuauuagcagaaa

SEQ ID NO: 1595424 - RNA, 19 nt, Artificial Sequence
  Description of Artificial Sequence: Synthetic oligonucleotide
  Antisense strand to SEQ ID NO: 1595423
uuucugcuaauaauaaccc

SEQ ID NO: 1595425 - RNA, 19 nt, Artificial Sequence
  Description of Artificial Sequence: Synthetic oligonucleotide
  Sense strand starting at position 3297 of SEQ ID NO: 1560369
ugccguuugcuaucuagua

SEQ ID NO: 1595426 - RNA, 19 nt, Artificial Sequence
  Description of Artificial Sequence: Synthetic oligonucleotide
  Antisense strand to SEQ ID NO: 1595425
uacuagauagcaaacggca

SEQ ID NO: 1595427 - RNA, 19 nt, Artificial Sequence
  Description of Artificial Sequence: Synthetic oligonucleotide
  Sense strand starting at position 3316 of SEQ ID NO: 1560369
ggaagcugguacccaaaua

SEQ ID NO: 1595428 - RNA, 19 nt, Artificial Sequence
  Description of Artificial Sequence: Synthetic oligonucleotide
  Antisense strand to SEQ ID NO: 1595427
uauuuggguaccagcuucc

SEQ ID NO: 1595429 - RNA, 19 nt, Artificial Sequence
  Description of Artificial Sequence: Synthetic oligonucleotide
  Sense strand starting at position 3346 of SEQ ID NO: 1560369
agaauugugucgguaggga

SEQ ID NO: 1595430 - RNA, 19 nt, Artificial Sequence
  Description of Artificial Sequence: Synthetic oligonucleotide
  Antisense strand to SEQ ID NO: 1595429
ucccuaccgacacaauucu

SEQ ID NO: 1595431 - RNA, 19 nt, Artificial Sequence
  Description of Artificial Sequence: Synthetic oligonucleotide
  Sense strand starting at position 3740 of SEQ ID NO: 1560369
ggagcagaauccuuaugua

SEQ ID NO: 1595432 - RNA, 19 nt, Artificial Sequence
  Description of Artificial Sequence: Synthetic oligonucleotide
  Antisense strand to SEQ ID NO: 1595431
uacauaaggauucugcucc

SEQ ID NO: 1595433 - RNA, 19 nt, Artificial Sequence
  Description of Artificial Sequence: Synthetic oligonucleotide
  Sense strand starting at position 3827 of SEQ ID NO: 1560369
cacaaugcccugugaugua

SEQ ID NO: 1595434 - RNA, 19 nt, Artificial Sequence
  Description of Artificial Sequence: Synthetic oligonucleotide
  Antisense strand to SEQ ID NO: 1595433
uacaucacagggcauugug

SEQ ID NO: 1595435 - RNA, 19 nt, Artificial Sequence
  Description of Artificial Sequence: Synthetic oligonucleotide
  Sense strand starting at position 3858 of SEQ ID NO: 1560369
gucauuaccucacucagca

SEQ ID NO: 1595436 - RNA, 19 nt, Artificial Sequence
  Description of Artificial Sequence: Synthetic oligonucleotide
  Antisense strand to SEQ ID NO: 1595435
ugcugagugagguaaugac

SEQ ID NO: 1595437 - RNA, 19 nt, Artificial Sequence
  Description of Artificial Sequence: Synthetic oligonucleotide
  Sense strand starting at position 3923 of SEQ ID NO: 1560369
cgcuguaucaaguacugua

SEQ ID NO: 1595438 - RNA, 19 nt, Artificial Sequence
  Description of Artificial Sequence: Synthetic oligonucleotide
  Antisense strand to SEQ ID NO: 1595437
uacaguacuugauacagcg

SEQ ID NO: 1595439 - RNA, 19 nt, Artificial Sequence
  Description of Artificial Sequence: Synthetic oligonucleotide
  Sense strand starting at position 3930 of SEQ ID NO: 1560369
ucaaguacuguagauacga

SEQ ID NO: 1595440 - RNA, 19 nt, Artificial Sequence
  Description of Artificial Sequence: Synthetic oligonucleotide
  Antisense strand to SEQ ID NO: 1595439
ucguaucuacaguacuuga

SEQ ID NO: 1595441 - RNA, 19 nt, Artificial Sequence
  Description of Artificial Sequence: Synthetic oligonucleotide
  Sense strand starting at position 3939 of SEQ ID NO: 1560369
guagauacgagcugucauu

SEQ ID NO: 1595442 - RNA, 19 nt, Artificial Sequence
  Description of Artificial Sequence: Synthetic oligonucleotide
  Antisense strand to SEQ ID NO: 1595441
aaugacagcucguaucuac

SEQ ID NO: 1595443 - RNA, 19 nt, Artificial Sequence
  Description of Artificial Sequence: Synthetic oligonucleotide
  Sense strand starting at position 3965 of SEQ ID NO: 1560369
ugcagcauucugggaggau

SEQ ID NO: 1595444 - RNA, 19 nt, Artificial Sequence
  Description of Artificial Sequence: Synthetic oligonucleotide
  Antisense strand to SEQ ID NO: 1595443
auccucccagaaugcugca

SEQ ID NO: 1595445 - RNA, 19 nt, Artificial Sequence
  Description of Artificial Sequence: Synthetic oligonucleotide
  Sense strand starting at position 643 of SEQ ID NO: 1560370
uccacacuuucuggagaca

SEQ ID NO: 1595446 - RNA, 19 nt, Artificial Sequence
  Description of Artificial Sequence: Synthetic oligonucleotide
  Antisense strand to SEQ ID NO: 1595445
ugucuccagaaagugugga

SEQ ID NO: 1595447 - RNA, 19 nt, Artificial Sequence
  Description of Artificial Sequence: Synthetic oligonucleotide
  Sense strand starting at position 706 of SEQ ID NO: 1560370
guccaaugcuguccaguuu

SEQ ID NO: 1595448 - RNA, 19 nt, Artificial Sequence
  Description of Artificial Sequence: Synthetic oligonucleotide
  Antisense strand to SEQ ID NO: 1595447
aaacuggacagcauuggac

SEQ ID NO: 1595449 - RNA, 19 nt, Artificial Sequence
  Description of Artificial Sequence: Synthetic oligonucleotide
  Sense strand starting at position 1422 of SEQ ID NO: 1560370
ccuccuauuuccucgucau

SEQ ID NO: 1595450 - RNA, 19 nt, Artificial Sequence
  Description of Artificial Sequence: Synthetic oligonucleotide
  Antisense strand to SEQ ID NO: 1595449
augacgaggaaauaggagg

SEQ ID NO: 1595451 - RNA, 19 nt, Artificial Sequence
  Description of Artificial Sequence: Synthetic oligonucleotide
  Sense strand starting at position 1423 of SEQ ID NO: 1560370
cuccuauuuccucgucauc

SEQ ID NO: 1595452 - RNA, 19 nt, Artificial Sequence
  Description of Artificial Sequence: Synthetic oligonucleotide
  Antisense strand to SEQ ID NO: 1595451
gaugacgaggaaauaggag

SEQ ID NO: 1595453 - RNA, 19 nt, Artificial Sequence
  Description of Artificial Sequence: Synthetic oligonucleotide
  Sense strand starting at position 1425 of SEQ ID NO: 1560370
ccuauuuccucgucaucug

SEQ ID NO: 1595454 - RNA, 19 nt, Artificial Sequence
  Description of Artificial Sequence: Synthetic oligonucleotide
  Antisense strand to SEQ ID NO: 1595453
cagaugacgaggaaauagg

SEQ ID NO: 1595455 - RNA, 19 nt, Artificial Sequence
  Description of Artificial Sequence: Synthetic oligonucleotide
  Sense strand starting at position 1693 of SEQ ID NO: 1560370
gucccauugauguggcuga

SEQ ID NO: 1595456 - RNA, 19 nt, Artificial Sequence
  Description of Artificial Sequence: Synthetic oligonucleotide
  Antisense strand to SEQ ID NO: 1595455
ucagccacaucaaugggac

SEQ ID NO: 1595457 - RNA, 19 nt, Artificial Sequence
  Description of Artificial Sequence: Synthetic oligonucleotide
  Sense strand starting at position 1697 of SEQ ID NO: 1560370
cauugauguggcugaguuu

SEQ ID NO: 1595458 - RNA, 19 nt, Artificial Sequence
  Description of Artificial Sequence: Synthetic oligonucleotide
  Antisense strand to SEQ ID NO: 1595457
aaacucagccacaucaaug

SEQ ID NO: 1595459 - RNA, 19 nt, Artificial Sequence
  Description of Artificial Sequence: Synthetic oligonucleotide
  Sense strand starting at position 2179 of SEQ ID NO: 1560370
ccggaucugucucugggaa

SEQ ID NO: 1595460 - RNA, 19 nt, Artificial Sequence
  Description of Artificial Sequence: Synthetic oligonucleotide
  Antisense strand to SEQ ID NO: 1595459
uucccagagacagauccgg

SEQ ID NO: 1595461 - RNA, 19 nt, Artificial Sequence
  Description of Artificial Sequence: Synthetic oligonucleotide
  Sense strand starting at position 2181 of SEQ ID NO: 1560370
ggaucugucucugggaacu

SEQ ID NO: 1595462 - RNA, 19 nt, Artificial Sequence
  Description of Artificial Sequence: Synthetic oligonucleotide
  Antisense strand to SEQ ID NO: 1595461
aguucccagagacagaucc

SEQ ID NO: 1595463 - RNA, 19 nt, Artificial Sequence
  Description of Artificial Sequence: Synthetic oligonucleotide
  Sense strand starting at position 2268 of SEQ ID NO: 1560370
caggaugcaucuugucaca

SEQ ID NO: 1595464 - RNA, 19 nt, Artificial Sequence
  Description of Artificial Sequence: Synthetic oligonucleotide
  Antisense strand to SEQ ID NO: 1595463
ugugacaagaugcauccug

SEQ ID NO: 1595465 - RNA, 19 nt, Artificial Sequence
  Description of Artificial Sequence: Synthetic oligonucleotide
  Sense strand starting at position 2270 of SEQ ID NO: 1560370
ggaugcaucuugucacauu

SEQ ID NO: 1595466 - RNA, 19 nt, Artificial Sequence
  Description of Artificial Sequence: Synthetic oligonucleotide
  Antisense strand to SEQ ID NO: 1595465
aaugugacaagaugcaucc

SEQ ID NO: 1595467 - RNA, 19 nt, Artificial Sequence
  Description of Artificial Sequence: Synthetic oligonucleotide
  Sense strand starting at position 2311 of SEQ ID NO: 1560370
gcacuagcuuuaucacugu

SEQ ID NO: 1595468 - RNA, 19 nt, Artificial Sequence
  Description of Artificial Sequence: Synthetic oligonucleotide
  Antisense strand to SEQ ID NO: 1595467
acagugauaaagcuagugc

SEQ ID NO: 1595469 - RNA, 19 nt, Artificial Sequence
  Description of Artificial Sequence: Synthetic oligonucleotide
  Sense strand starting at position 2315 of SEQ ID NO: 1560370
uagcuuuaucacuguggga

SEQ ID NO: 1595470 - RNA, 19 nt, Artificial Sequence
  Description of Artificial Sequence: Synthetic oligonucleotide
  Antisense strand to SEQ ID NO: 1595469
ucccacagugauaaagcua

SEQ ID NO: 1595471 - RNA, 19 nt, Artificial Sequence
  Description of Artificial Sequence: Synthetic oligonucleotide
  Sense strand starting at position 2317 of SEQ ID NO: 1560370
gcuuuaucacugugggagc

SEQ ID NO: 1595472 - RNA, 19 nt, Artificial Sequence
  Description of Artificial Sequence: Synthetic oligonucleotide
  Antisense strand to SEQ ID NO: 1595471
gcucccacagugauaaagc

SEQ ID NO: 1595473 - RNA, 19 nt, Artificial Sequence
  Description of Artificial Sequence: Synthetic oligonucleotide
  Sense strand starting at position 2392 of SEQ ID NO: 1560370
ugaggugguacaugagaca

SEQ ID NO: 1595474 - RNA, 19 nt, Artificial Sequence
  Description of Artificial Sequence: Synthetic oligonucleotide
  Antisense strand to SEQ ID NO: 1595473
ugucucauguaccaccuca

SEQ ID NO: 1595475 - RNA, 19 nt, Artificial Sequence
  Description of Artificial Sequence: Synthetic oligonucleotide
  Sense strand starting at position 2441 of SEQ ID NO: 1560370
cucugaaucucugaagcau

SEQ ID NO: 1595476 - RNA, 19 nt, Artificial Sequence
  Description of Artificial Sequence: Synthetic oligonucleotide
  Antisense strand to SEQ ID NO: 1595475
augcuucagagauucagag

SEQ ID NO: 1595477 - RNA, 19 nt, Artificial Sequence
  Description of Artificial Sequence: Synthetic oligonucleotide
  Sense strand starting at position 2768 of SEQ ID NO: 1560370
ccaucugauccguggcaga

SEQ ID NO: 1595478 - RNA, 19 nt, Artificial Sequence
  Description of Artificial Sequence: Synthetic oligonucleotide
  Antisense strand to SEQ ID NO: 1595477
ucugccacggaucagaugg

SEQ ID NO: 1595479 - RNA, 19 nt, Artificial Sequence
  Description of Artificial Sequence: Synthetic oligonucleotide
  Sense strand starting at position 2779 of SEQ ID NO: 1560370
guggcagacuguccugaaa

SEQ ID NO: 1595480 - RNA, 19 nt, Artificial Sequence
  Description of Artificial Sequence: Synthetic oligonucleotide
  Antisense strand to SEQ ID NO: 1595479
uuucaggacagucugccac

SEQ ID NO: 1595481 - RNA, 19 nt, Artificial Sequence
  Description of Artificial Sequence: Synthetic oligonucleotide
  Sense strand starting at position 2894 of SEQ ID NO: 1560370
ggaggugacaggugucacu

SEQ ID NO: 1595482 - RNA, 19 nt, Artificial Sequence
  Description of Artificial Sequence: Synthetic oligonucleotide
  Antisense strand to SEQ ID NO: 1595481
agugacaccugucaccucc

SEQ ID NO: 1595483 - RNA, 19 nt, Artificial Sequence
  Description of Artificial Sequence: Synthetic oligonucleotide
  Sense strand starting at position 2907 of SEQ ID NO: 1560370
gucacuucugaauggaagu

SEQ ID NO: 1595484 - RNA, 19 nt, Artificial Sequence
  Description of Artificial Sequence: Synthetic oligonucleotide
  Antisense strand to SEQ ID NO: 1595483
acuuccauucagaagugac

SEQ ID NO: 1595485 - RNA, 19 nt, Artificial Sequence
  Description of Artificial Sequence: Synthetic oligonucleotide
  Sense strand starting at position 2981 of SEQ ID NO: 1560370
ccaaguuuccugugccacu

SEQ ID NO: 1595486 - RNA, 19 nt, Artificial Sequence
  Description of Artificial Sequence: Synthetic oligonucleotide
  Antisense strand to SEQ ID NO: 1595485
aguggcacaggaaacuugg

SEQ ID NO: 1595487 - RNA, 19 nt, Artificial Sequence
  Description of Artificial Sequence: Synthetic oligonucleotide
  Sense strand starting at position 3042 of SEQ ID NO: 1560370
gaguguaagcaacaaacua

SEQ ID NO: 1595488 - RNA, 19 nt, Artificial Sequence
  Description of Artificial Sequence: Synthetic oligonucleotide
  Antisense strand to SEQ ID NO: 1595487
uaguuuguugcuuacacuc

SEQ ID NO: 1595489 - RNA, 19 nt, Artificial Sequence
  Description of Artificial Sequence: Synthetic oligonucleotide
  Sense strand starting at position 3222 of SEQ ID NO: 1560370
ccuuccaucuggcuagaaa

SEQ ID NO: 1595490 - RNA, 19 nt, Artificial Sequence
  Description of Artificial Sequence: Synthetic oligonucleotide
  Antisense strand to SEQ ID NO: 1595489
uuucuagccagauggaagg

SEQ ID NO: 1595491 - RNA, 19 nt, Artificial Sequence
  Description of Artificial Sequence: Synthetic oligonucleotide
  Sense strand starting at position 3223 of SEQ ID NO: 1560370
cuuccaucuggcuagaaag

SEQ ID NO: 1595492 - RNA, 19 nt, Artificial Sequence
  Description of Artificial Sequence: Synthetic oligonucleotide
  Antisense strand to SEQ ID NO: 1595491
cuuucuagccagauggaag

SEQ ID NO: 1595493 - RNA, 19 nt, Artificial Sequence
  Description of Artificial Sequence: Synthetic oligonucleotide
  Sense strand starting at position 3297 of SEQ ID NO: 1560370
ggacaaaggaccugcucua

SEQ ID NO: 1595494 - RNA, 19 nt, Artificial Sequence
  Description of Artificial Sequence: Synthetic oligonucleotide
  Antisense strand to SEQ ID NO: 1595493
uagagcagguccuuugucc

SEQ ID NO: 1595495 - RNA, 19 nt, Artificial Sequence
  Description of Artificial Sequence: Synthetic oligonucleotide
  Sense strand starting at position 3346 of SEQ ID NO: 1560370
caauguguguccugcccua

SEQ ID NO: 1595496 - RNA, 19 nt, Artificial Sequence
  Description of Artificial Sequence: Synthetic oligonucleotide
  Antisense strand to SEQ ID NO: 1595495
uagggcaggacacacauug

SEQ ID NO: 1595497 - RNA, 19 nt, Artificial Sequence
  Description of Artificial Sequence: Synthetic oligonucleotide
  Sense strand starting at position 3368 of SEQ ID NO: 1560370
cccuauugccucuagggaa

SEQ ID NO: 1595498 - RNA, 19 nt, Artificial Sequence
  Description of Artificial Sequence: Synthetic oligonucleotide
  Antisense strand to SEQ ID NO: 1595497
uucccuagaggcaauaggg

SEQ ID NO: 1595499 - RNA, 19 nt, Artificial Sequence
  Description of Artificial Sequence: Synthetic oligonucleotide
  Sense strand starting at position 3380 of SEQ ID NO: 1560370
uagggaaucucuguagccu

SEQ ID NO: 1595500 - RNA, 19 nt, Artificial Sequence
  Description of Artificial Sequence: Synthetic oligonucleotide
  Antisense strand to SEQ ID NO: 1595499
aggcuacagagauucccua

SEQ ID NO: 1595501 - RNA, 19 nt, Artificial Sequence
  Description of Artificial Sequence: Synthetic oligonucleotide
  Sense strand starting at position 3381 of SEQ ID NO: 1560370
agggaaucucuguagccuu

SEQ ID NO: 1595502 - RNA, 19 nt, Artificial Sequence
  Description of Artificial Sequence: Synthetic oligonucleotide
  Antisense strand to SEQ ID NO: 1595501
aaggcuacagagauucccu

SEQ ID NO: 1595503 - RNA, 19 nt, Artificial Sequence
  Description of Artificial Sequence: Synthetic oligonucleotide
  Sense strand starting at position 3389 of SEQ ID NO: 1560370
ucuguagccuuccagaaga

SEQ ID NO: 1595504 - RNA, 19 nt, Artificial Sequence
  Description of Artificial Sequence: Synthetic oligonucleotide
  Antisense strand to SEQ ID NO: 1595503
ucuucuggaaggcuacaga

SEQ ID NO: 1595505 - RNA, 19 nt, Artificial Sequence
  Description of Artificial Sequence: Synthetic oligonucleotide
  Sense strand starting at position 3391 of SEQ ID NO: 1560370
uguagccuuccagaagacu

SEQ ID NO: 1595506 - RNA, 19 nt, Artificial Sequence
  Description of Artificial Sequence: Synthetic oligonucleotide
  Antisense strand to SEQ ID NO: 1595505
agucuucuggaaggcuaca

SEQ ID NO: 1595507 - RNA, 19 nt, Artificial Sequence
  Description of Artificial Sequence: Synthetic oligonucleotide
  Sense strand starting at position 3630 of SEQ ID NO: 1560370
gucucaaacuucugacaag

SEQ ID NO: 1595508 - RNA, 19 nt, Artificial Sequence
  Description of Artificial Sequence: Synthetic oligonucleotide
  Antisense strand to SEQ ID NO: 1595507
cuugucagaaguuugagac

SEQ ID NO: 1595509 - RNA, 19 nt, Artificial Sequence
  Description of Artificial Sequence: Synthetic oligonucleotide
  Sense strand starting at position 3633 of SEQ ID NO: 1560370
ucaaacuucugacaaguga

SEQ ID NO: 1595510 - RNA, 19 nt, Artificial Sequence
  Description of Artificial Sequence: Synthetic oligonucleotide
  Antisense strand to SEQ ID NO: 1595509
ucacuugucagaaguuuga

SEQ ID NO: 1595511 - RNA, 19 nt, Artificial Sequence
  Description of Artificial Sequence: Synthetic oligonucleotide
  Sense strand starting at position 250 of SEQ ID NO: 1560371
gacucugauuccuggguuu

SEQ ID NO: 1595512 - RNA, 19 nt, Artificial Sequence
  Description of Artificial Sequence: Synthetic oligonucleotide
  Antisense strand to SEQ ID NO: 1595511
aaacccaggaaucagaguc

SEQ ID NO: 1595513 - RNA, 19 nt, Artificial Sequence
  Description of Artificial Sequence: Synthetic oligonucleotide
  Sense strand starting at position 995 of SEQ ID NO: 1560371
uccacacuuucuggagaca

SEQ ID NO: 1595514 - RNA, 19 nt, Artificial Sequence
  Description of Artificial Sequence: Synthetic oligonucleotide
  Antisense strand to SEQ ID NO: 1595513
ugucuccagaaagugugga

SEQ ID NO: 1595515 - RNA, 19 nt, Artificial Sequence
  Description of Artificial Sequence: Synthetic oligonucleotide
  Sense strand starting at position 1058 of SEQ ID NO: 1560371
guccaaugcuguccaguuu

SEQ ID NO: 1595516 - RNA, 19 nt, Artificial Sequence
  Description of Artificial Sequence: Synthetic oligonucleotide
  Antisense strand to SEQ ID NO: 1595515
aaacuggacagcauuggac

SEQ ID NO: 1595517 - RNA, 19 nt, Artificial Sequence
  Description of Artificial Sequence: Synthetic oligonucleotide
  Sense strand starting at position 1774 of SEQ ID NO: 1560371
ccuccuauuuccucgucau

SEQ ID NO: 1595518 - RNA, 19 nt, Artificial Sequence
  Description of Artificial Sequence: Synthetic oligonucleotide
  Antisense strand to SEQ ID NO: 1595517
augacgaggaaauaggagg

SEQ ID NO: 1595519 - RNA, 19 nt, Artificial Sequence
  Description of Artificial Sequence: Synthetic oligonucleotide
  Sense strand starting at position 1775 of SEQ ID NO: 1560371
cuccuauuuccucgucauc

SEQ ID NO: 1595520 - RNA, 19 nt, Artificial Sequence
  Description of Artificial Sequence: Synthetic oligonucleotide
  Antisense strand to SEQ ID NO: 1595519
gaugacgaggaaauaggag

SEQ ID NO: 1595521 - RNA, 19 nt, Artificial Sequence
  Description of Artificial Sequence: Synthetic oligonucleotide
  Sense strand starting at position 1777 of SEQ ID NO: 1560371
ccuauuuccucgucaucug

SEQ ID NO: 1595522 - RNA, 19 nt, Artificial Sequence
  Description of Artificial Sequence: Synthetic oligonucleotide
  Antisense strand to SEQ ID NO: 1595521
cagaugacgaggaaauagg

SEQ ID NO: 1595523 - RNA, 19 nt, Artificial Sequence
  Description of Artificial Sequence: Synthetic oligonucleotide
  Sense strand starting at position 2045 of SEQ ID NO: 1560371
gucccauugauguggcuga

SEQ ID NO: 1595524 - RNA, 19 nt, Artificial Sequence
  Description of Artificial Sequence: Synthetic oligonucleotide
  Antisense strand to SEQ ID NO: 1595523
ucagccacaucaaugggac

SEQ ID NO: 1595525 - RNA, 19 nt, Artificial Sequence
  Description of Artificial Sequence: Synthetic oligonucleotide
  Sense strand starting at position 2049 of SEQ ID NO: 1560371
cauugauguggcugaguuu

SEQ ID NO: 1595526 - RNA, 19 nt, Artificial Sequence
  Description of Artificial Sequence: Synthetic oligonucleotide
  Antisense strand to SEQ ID NO: 1595525
aaacucagccacaucaaug

SEQ ID NO: 1595527 - RNA, 19 nt, Artificial Sequence
  Description of Artificial Sequence: Synthetic oligonucleotide
  Sense strand starting at position 2531 of SEQ ID NO: 1560371
ccggaucugucucugggaa

SEQ ID NO: 1595528 - RNA, 19 nt, Artificial Sequence
  Description of Artificial Sequence: Synthetic oligonucleotide
  Antisense strand to SEQ ID NO: 1595527
uucccagagacagauccgg

SEQ ID NO: 1595529 - RNA, 19 nt, Artificial Sequence
  Description of Artificial Sequence: Synthetic oligonucleotide
  Sense strand starting at position 2533 of SEQ ID NO: 1560371
ggaucugucucugggaacu

SEQ ID NO: 1595530 - RNA, 19 nt, Artificial Sequence
  Description of Artificial Sequence: Synthetic oligonucleotide
  Antisense strand to SEQ ID NO: 1595529
aguucccagagacagaucc

SEQ ID NO: 1595531 - RNA, 19 nt, Artificial Sequence
  Description of Artificial Sequence: Synthetic oligonucleotide
  Sense strand starting at position 2620 of SEQ ID NO: 1560371
caggaugcaucuugucaca

SEQ ID NO: 1595532 - RNA, 19 nt, Artificial Sequence
  Description of Artificial Sequence: Synthetic oligonucleotide
  Antisense strand to SEQ ID NO: 1595531
ugugacaagaugcauccug

SEQ ID NO: 1595533 - RNA, 19 nt, Artificial Sequence
  Description of Artificial Sequence: Synthetic oligonucleotide
  Sense strand starting at position 2622 of SEQ ID NO: 1560371
ggaugcaucuugucacauu

SEQ ID NO: 1595534 - RNA, 19 nt, Artificial Sequence
  Description of Artificial Sequence: Synthetic oligonucleotide
  Antisense strand to SEQ ID NO: 1595533
aaugugacaagaugcaucc

SEQ ID NO: 1595535 - RNA, 19 nt, Artificial Sequence
  Description of Artificial Sequence: Synthetic oligonucleotide
  Sense strand starting at position 2663 of SEQ ID NO: 1560371
gcacuagcuuuaucacugu

SEQ ID NO: 1595536 - RNA, 19 nt, Artificial Sequence
  Description of Artificial Sequence: Synthetic oligonucleotide
  Antisense strand to SEQ ID NO: 1595535
acagugauaaagcuagugc

SEQ ID NO: 1595537 - RNA, 19 nt, Artificial Sequence
  Description of Artificial Sequence: Synthetic oligonucleotide
  Sense strand starting at position 2667 of SEQ ID NO: 1560371
uagcuuuaucacuguggga

SEQ ID NO: 1595538 - RNA, 19 nt, Artificial Sequence
  Description of Artificial Sequence: Synthetic oligonucleotide
  Antisense strand to SEQ ID NO: 1595537
ucccacagugauaaagcua

SEQ ID NO: 1595539 - RNA, 19 nt, Artificial Sequence
  Description of Artificial Sequence: Synthetic oligonucleotide
  Sense strand starting at position 2669 of SEQ ID NO: 1560371
gcuuuaucacugugggagc

SEQ ID NO: 1595540 - RNA, 19 nt, Artificial Sequence
  Description of Artificial Sequence: Synthetic oligonucleotide
  Antisense strand to SEQ ID NO: 1595539
gcucccacagugauaaagc

SEQ ID NO: 1595541 - RNA, 19 nt, Artificial Sequence
  Description of Artificial Sequence: Synthetic oligonucleotide
  Sense strand starting at position 2744 of SEQ ID NO: 1560371
ugaggugguacaugagaca

SEQ ID NO: 1595542 - RNA, 19 nt, Artificial Sequence
  Description of Artificial Sequence: Synthetic oligonucleotide
  Antisense strand to SEQ ID NO: 1595541
ugucucauguaccaccuca

SEQ ID NO: 1595543 - RNA, 19 nt, Artificial Sequence
  Description of Artificial Sequence: Synthetic oligonucleotide
  Sense strand starting at position 2793 of SEQ ID NO: 1560371
cucugaaucucugaagcau

SEQ ID NO: 1595544 - RNA, 19 nt, Artificial Sequence
  Description of Artificial Sequence: Synthetic oligonucleotide
  Antisense strand to SEQ ID NO: 1595543
augcuucagagauucagag

SEQ ID NO: 1595545 - RNA, 19 nt, Artificial Sequence
  Description of Artificial Sequence: Synthetic oligonucleotide
  Sense strand starting at position 3120 of SEQ ID NO: 1560371
ccaucugauccguggcaga

SEQ ID NO: 1595546 - RNA, 19 nt, Artificial Sequence
  Description of Artificial Sequence: Synthetic oligonucleotide
  Antisense strand to SEQ ID NO: 1595545
ucugccacggaucagaugg

SEQ ID NO: 1595547 - RNA, 19 nt, Artificial Sequence
  Description of Artificial Sequence: Synthetic oligonucleotide
  Sense strand starting at position 3131 of SEQ ID NO: 1560371
guggcagacuguccugaaa

SEQ ID NO: 1595548 - RNA, 19 nt, Artificial Sequence
  Description of Artificial Sequence: Synthetic oligonucleotide
  Antisense strand to SEQ ID NO: 1595547
uuucaggacagucugccac

SEQ ID NO: 1595549 - RNA, 19 nt, Artificial Sequence
  Description of Artificial Sequence: Synthetic oligonucleotide
  Sense strand starting at position 3246 of SEQ ID NO: 1560371
ggaggugacaggugucacu

SEQ ID NO: 1595550 - RNA, 19 nt, Artificial Sequence
  Description of Artificial Sequence: Synthetic oligonucleotide
  Antisense strand to SEQ ID NO: 1595549
agugacaccugucaccucc

SEQ ID NO: 1595551 - RNA, 19 nt, Artificial Sequence
  Description of Artificial Sequence: Synthetic oligonucleotide
  Sense strand starting at position 3259 of SEQ ID NO: 1560371
gucacuucugaauggaagu

SEQ ID NO: 1595552 - RNA, 19 nt, Artificial Sequence
  Description of Artificial Sequence: Synthetic oligonucleotide
  Antisense strand to SEQ ID NO: 1595551
acuuccauucagaagugac

SEQ ID NO: 1595553 - RNA, 19 nt, Artificial Sequence
  Description of Artificial Sequence: Synthetic oligonucleotide
  Sense strand starting at position 3333 of SEQ ID NO: 1560371
ccaaguuuccugugccacu

SEQ ID NO: 1595554 - RNA, 19 nt, Artificial Sequence
  Description of Artificial Sequence: Synthetic oligonucleotide
  Antisense strand to SEQ ID NO: 1595553
aguggcacaggaaacuugg

SEQ ID NO: 1595555 - RNA, 19 nt, Artificial Sequence
  Description of Artificial Sequence: Synthetic oligonucleotide
  Sense strand starting at position 3394 of SEQ ID NO: 1560371
gaguguaagcaacaaacua

SEQ ID NO: 1595556 - RNA, 19 nt, Artificial Sequence
  Description of Artificial Sequence: Synthetic oligonucleotide
  Antisense strand to SEQ ID NO: 1595555
uaguuuguugcuuacacuc

SEQ ID NO: 1595557 - RNA, 19 nt, Artificial Sequence
  Description of Artificial Sequence: Synthetic oligonucleotide
  Sense strand starting at position 3574 of SEQ ID NO: 1560371
ccuuccaucuggcuagaaa

SEQ ID NO: 1595558 - RNA, 19 nt, Artificial Sequence
  Description of Artificial Sequence: Synthetic oligonucleotide
  Antisense strand to SEQ ID NO: 1595557
uuucuagccagauggaagg

SEQ ID NO: 1595559 - RNA, 19 nt, Artificial Sequence
  Description of Artificial Sequence: Synthetic oligonucleotide
  Sense strand starting at position 3575 of SEQ ID NO: 1560371
cuuccaucuggcuagaaag

SEQ ID NO: 1595560 - RNA, 19 nt, Artificial Sequence
  Description of Artificial Sequence: Synthetic oligonucleotide
  Antisense strand to SEQ ID NO: 1595559
cuuucuagccagauggaag

SEQ ID NO: 1595561 - RNA, 19 nt, Artificial Sequence
  Description of Artificial Sequence: Synthetic oligonucleotide
  Sense strand starting at position 3649 of SEQ ID NO: 1560371
ggacaaaggaccugcucua

SEQ ID NO: 1595562 - RNA, 19 nt, Artificial Sequence
  Description of Artificial Sequence: Synthetic oligonucleotide
  Antisense strand to SEQ ID NO: 1595561
uagagcagguccuuugucc

SEQ ID NO: 1595563 - RNA, 19 nt, Artificial Sequence
  Description of Artificial Sequence: Synthetic oligonucleotide
  Sense strand starting at position 3698 of SEQ ID NO: 1560371
caauguguguccugcccua

SEQ ID NO: 1595564 - RNA, 19 nt, Artificial Sequence
  Description of Artificial Sequence: Synthetic oligonucleotide
  Antisense strand to SEQ ID NO: 1595563
uagggcaggacacacauug

SEQ ID NO: 1595565 - RNA, 19 nt, Artificial Sequence
  Description of Artificial Sequence: Synthetic oligonucleotide
  Sense strand starting at position 3720 of SEQ ID NO: 1560371
cccuauugccucuagggaa

SEQ ID NO: 1595566 - RNA, 19 nt, Artificial Sequence
  Description of Artificial Sequence: Synthetic oligonucleotide
  Antisense strand to SEQ ID NO: 1595565
uucccuagaggcaauaggg

SEQ ID NO: 1595567 - RNA, 19 nt, Artificial Sequence
  Description of Artificial Sequence: Synthetic oligonucleotide
  Sense strand starting at position 3732 of SEQ ID NO: 1560371
uagggaaucucuguagccu

SEQ ID NO: 1595568 - RNA, 19 nt, Artificial Sequence
  Description of Artificial Sequence: Synthetic oligonucleotide
  Antisense strand to SEQ ID NO: 1595567
aggcuacagagauucccua

SEQ ID NO: 1595569 - RNA, 19 nt, Artificial Sequence
  Description of Artificial Sequence: Synthetic oligonucleotide
  Sense strand starting at position 3733 of SEQ ID NO: 1560371
agggaaucucuguagccuu

SEQ ID NO: 1595570 - RNA, 19 nt, Artificial Sequence
  Description of Artificial Sequence: Synthetic oligonucleotide
  Antisense strand to SEQ ID NO: 1595569
aaggcuacagagauucccu

SEQ ID NO: 1595571 - RNA, 19 nt, Artificial Sequence
  Description of Artificial Sequence: Synthetic oligonucleotide
  Sense strand starting at position 3741 of SEQ ID NO: 1560371
ucuguagccuuccagaaga

SEQ ID NO: 1595572 - RNA, 19 nt, Artificial Sequence
  Description of Artificial Sequence: Synthetic oligonucleotide
  Antisense strand to SEQ ID NO: 1595571
ucuucuggaaggcuacaga

SEQ ID NO: 1595573 - RNA, 19 nt, Artificial Sequence
  Description of Artificial Sequence: Synthetic oligonucleotide
  Sense strand starting at position 3743 of SEQ ID NO: 1560371
uguagccuuccagaagacu

SEQ ID NO: 1595574 - RNA, 19 nt, Artificial Sequence
  Description of Artificial Sequence: Synthetic oligonucleotide
  Antisense strand to SEQ ID NO: 1595573
agucuucuggaaggcuaca

SEQ ID NO: 1595575 - RNA, 19 nt, Artificial Sequence
  Description of Artificial Sequence: Synthetic oligonucleotide
  Sense strand starting at position 3982 of SEQ ID NO: 1560371
gucucaaacuucugacaag

SEQ ID NO: 1595576 - RNA, 19 nt, Artificial Sequence
  Description of Artificial Sequence: Synthetic oligonucleotide
  Antisense strand to SEQ ID NO: 1595575
cuugucagaaguuugagac

SEQ ID NO: 1595577 - RNA, 19 nt, Artificial Sequence
  Description of Artificial Sequence: Synthetic oligonucleotide
  Sense strand starting at position 157 of SEQ ID NO: 1560372
caaucagaguccugggaac

SEQ ID NO: 1595578 - RNA, 19 nt, Artificial Sequence
  Description of Artificial Sequence: Synthetic oligonucleotide
  Antisense strand to SEQ ID NO: 1595577
guucccaggacucugauug

SEQ ID NO: 1595579 - RNA, 19 nt, Artificial Sequence
  Description of Artificial Sequence: Synthetic oligonucleotide
  Sense strand starting at position 233 of SEQ ID NO: 1560372
cuaguccugucuugggaca

SEQ ID NO: 1595580 - RNA, 19 nt, Artificial Sequence
  Description of Artificial Sequence: Synthetic oligonucleotide
  Antisense strand to SEQ ID NO: 1595579
ugucccaagacaggacuag

SEQ ID NO: 1595581 - RNA, 19 nt, Artificial Sequence
  Description of Artificial Sequence: Synthetic oligonucleotide
  Sense strand starting at position 235 of SEQ ID NO: 1560372
aguccugucuugggacaca

SEQ ID NO: 1595582 - RNA, 19 nt, Artificial Sequence
  Description of Artificial Sequence: Synthetic oligonucleotide
  Antisense strand to SEQ ID NO: 1595581
ugugucccaagacaggacu

SEQ ID NO: 1595583 - RNA, 19 nt, Artificial Sequence
  Description of Artificial Sequence: Synthetic oligonucleotide
  Sense strand starting at position 286 of SEQ ID NO: 1560372
ugggaaugugucugugugu

SEQ ID NO: 1595584 - RNA, 19 nt, Artificial Sequence
  Description of Artificial Sequence: Synthetic oligonucleotide
  Antisense strand to SEQ ID NO: 1595583
acacacagacacauuccca

SEQ ID NO: 1595585 - RNA, 19 nt, Artificial Sequence
  Description of Artificial Sequence: Synthetic oligonucleotide
  Sense strand starting at position 328 of SEQ ID NO: 1560372
accguaucucuccaagaaa

SEQ ID NO: 1595586 - RNA, 19 nt, Artificial Sequence
  Description of Artificial Sequence: Synthetic oligonucleotide
  Antisense strand to SEQ ID NO: 1595585
uuucuuggagagauacggu

SEQ ID NO: 1595587 - RNA, 19 nt, Artificial Sequence
  Description of Artificial Sequence: Synthetic oligonucleotide
  Sense strand starting at position 721 of SEQ ID NO: 1560372
ccgcgucagacggaggauu

SEQ ID NO: 1595588 - RNA, 19 nt, Artificial Sequence
  Description of Artificial Sequence: Synthetic oligonucleotide
  Antisense strand to SEQ ID NO: 1595587
aauccuccgucugacgcgg

SEQ ID NO: 1595589 - RNA, 19 nt, Artificial Sequence
  Description of Artificial Sequence: Synthetic oligonucleotide
  Sense strand starting at position 732 of SEQ ID NO: 1560372
ggaggauuccagcgcguca

SEQ ID NO: 1595590 - RNA, 19 nt, Artificial Sequence
  Description of Artificial Sequence: Synthetic oligonucleotide
  Antisense strand to SEQ ID NO: 1595589
ugacgcgcuggaauccucc

SEQ ID NO: 1595591 - RNA, 19 nt, Artificial Sequence
  Description of Artificial Sequence: Synthetic oligonucleotide
  Sense strand starting at position 1117 of SEQ ID NO: 1560372
gcaaacaucucccgacucu

SEQ ID NO: 1595592 - RNA, 19 nt, Artificial Sequence
  Description of Artificial Sequence: Synthetic oligonucleotide
  Antisense strand to SEQ ID NO: 1595591
agagucgggagauguuugc

SEQ ID NO: 1595593 - RNA, 19 nt, Artificial Sequence
  Description of Artificial Sequence: Synthetic oligonucleotide
  Sense strand starting at position 1126 of SEQ ID NO: 1560372
ucccgacucuuugcaguuu

SEQ ID NO: 1595594 - RNA, 19 nt, Artificial Sequence
  Description of Artificial Sequence: Synthetic oligonucleotide
  Antisense strand to SEQ ID NO: 1595593
aaacugcaaagagucggga

SEQ ID NO: 1595595 - RNA, 19 nt, Artificial Sequence
  Description of Artificial Sequence: Synthetic oligonucleotide
  Sense strand starting at position 1988 of SEQ ID NO: 1560372
gagucuuaugaaugaagca

SEQ ID NO: 1595596 - RNA, 19 nt, Artificial Sequence
  Description of Artificial Sequence: Synthetic oligonucleotide
  Antisense strand to SEQ ID NO: 1595595
ugcuucauucauaagacuc

SEQ ID NO: 1595597 - RNA, 19 nt, Artificial Sequence
  Description of Artificial Sequence: Synthetic oligonucleotide
  Sense strand starting at position 2011 of SEQ ID NO: 1560372
cccgccagccuguauuuau

SEQ ID NO: 1595598 - RNA, 19 nt, Artificial Sequence
  Description of Artificial Sequence: Synthetic oligonucleotide
  Antisense strand to SEQ ID NO: 1595597
auaaauacaggcuggcggg

SEQ ID NO: 1595599 - RNA, 19 nt, Artificial Sequence
  Description of Artificial Sequence: Synthetic oligonucleotide
  Sense strand starting at position 2125 of SEQ ID NO: 1560372
cagcaagaggucuguucua

SEQ ID NO: 1595600 - RNA, 19 nt, Artificial Sequence
  Description of Artificial Sequence: Synthetic oligonucleotide
  Antisense strand to SEQ ID NO: 1595599
uagaacagaccucuugcug

SEQ ID NO: 1595601 - RNA, 19 nt, Artificial Sequence
  Description of Artificial Sequence: Synthetic oligonucleotide
  Sense strand starting at position 2242 of SEQ ID NO: 1560372
cggaguuccugugacgcaa

SEQ ID NO: 1595602 - RNA, 19 nt, Artificial Sequence
  Description of Artificial Sequence: Synthetic oligonucleotide
  Antisense strand to SEQ ID NO: 1595601
uugcgucacaggaacuccg

SEQ ID NO: 1595603 - RNA, 19 nt, Artificial Sequence
  Description of Artificial Sequence: Synthetic oligonucleotide
  Sense strand starting at position 2244 of SEQ ID NO: 1560372
gaguuccugugacgcaauu

SEQ ID NO: 1595604 - RNA, 19 nt, Artificial Sequence
  Description of Artificial Sequence: Synthetic oligonucleotide
  Antisense strand to SEQ ID NO: 1595603
aauugcgucacaggaacuc

SEQ ID NO: 1595605 - RNA, 19 nt, Artificial Sequence
  Description of Artificial Sequence: Synthetic oligonucleotide
  Sense strand starting at position 2253 of SEQ ID NO: 1560372
ugacgcaauuagccauaua

SEQ ID NO: 1595606 - RNA, 19 nt, Artificial Sequence
  Description of Artificial Sequence: Synthetic oligonucleotide
  Antisense strand to SEQ ID NO: 1595605
uauauggcuaauugcguca

SEQ ID NO: 1595607 - RNA, 19 nt, Artificial Sequence
  Description of Artificial Sequence: Synthetic oligonucleotide
  Sense strand starting at position 2256 of SEQ ID NO: 1560372
cgcaauuagccauauaagg

SEQ ID NO: 1595608 - RNA, 19 nt, Artificial Sequence
  Description of Artificial Sequence: Synthetic oligonucleotide
  Antisense strand to SEQ ID NO: 1595607
ccuuauauggcuaauugcg

SEQ ID NO: 1595609 - RNA, 19 nt, Artificial Sequence
  Description of Artificial Sequence: Synthetic oligonucleotide
  Sense strand starting at position 2290 of SEQ ID NO: 1560372
gcggaguguuuguuuggua

SEQ ID NO: 1595610 - RNA, 19 nt, Artificial Sequence
  Description of Artificial Sequence: Synthetic oligonucleotide
  Antisense strand to SEQ ID NO: 1595609
uaccaaacaaacacuccgc

SEQ ID NO: 1595611 - RNA, 19 nt, Artificial Sequence
  Description of Artificial Sequence: Synthetic oligonucleotide
  Sense strand starting at position 2291 of SEQ ID NO: 1560372
cggaguguuuguuugguau

SEQ ID NO: 1595612 - RNA, 19 nt, Artificial Sequence
  Description of Artificial Sequence: Synthetic oligonucleotide
  Antisense strand to SEQ ID NO: 1595611
auaccaaacaaacacuccg

SEQ ID NO: 1595613 - RNA, 19 nt, Artificial Sequence
  Description of Artificial Sequence: Synthetic oligonucleotide
  Sense strand starting at position 2295 of SEQ ID NO: 1560372
guguuuguuugguauccua

SEQ ID NO: 1595614 - RNA, 19 nt, Artificial Sequence
  Description of Artificial Sequence: Synthetic oligonucleotide
  Antisense strand to SEQ ID NO: 1595613
uaggauaccaaacaaacac

SEQ ID NO: 1595615 - RNA, 19 nt, Artificial Sequence
  Description of Artificial Sequence: Synthetic oligonucleotide
  Sense strand starting at position 2303 of SEQ ID NO: 1560372
uugguauccuagcaaugac

SEQ ID NO: 1595616 - RNA, 19 nt, Artificial Sequence
  Description of Artificial Sequence: Synthetic oligonucleotide
  Antisense strand to SEQ ID NO: 1595615
gucauugcuaggauaccaa

SEQ ID NO: 1595617 - RNA, 19 nt, Artificial Sequence
  Description of Artificial Sequence: Synthetic oligonucleotide
  Sense strand starting at position 2407 of SEQ ID NO: 1560372
auaauaggcgcuuagacua

SEQ ID NO: 1595618 - RNA, 19 nt, Artificial Sequence
  Description of Artificial Sequence: Synthetic oligonucleotide
  Antisense strand to SEQ ID NO: 1595617
uagucuaagcgccuauuau

SEQ ID NO: 1595619 - RNA, 19 nt, Artificial Sequence
  Description of Artificial Sequence: Synthetic oligonucleotide
  Sense strand starting at position 2560 of SEQ ID NO: 1560372
aggagacccugauuagugu

SEQ ID NO: 1595620 - RNA, 19 nt, Artificial Sequence
  Description of Artificial Sequence: Synthetic oligonucleotide
  Antisense strand to SEQ ID NO: 1595619
acacuaaucagggucuccu

SEQ ID NO: 1595621 - RNA, 19 nt, Artificial Sequence
  Description of Artificial Sequence: Synthetic oligonucleotide
  Sense strand starting at position 2574 of SEQ ID NO: 1560372
agugugguguggucacgua

SEQ ID NO: 1595622 - RNA, 19 nt, Artificial Sequence
  Description of Artificial Sequence: Synthetic oligonucleotide
  Antisense strand to SEQ ID NO: 1595621
uacgugaccacaccacacu

SEQ ID NO: 1595623 - RNA, 19 nt, Artificial Sequence
  Description of Artificial Sequence: Synthetic oligonucleotide
  Sense strand starting at position 2617 of SEQ ID NO: 1560372
ggcugugaugcucagguga

SEQ ID NO: 1595624 - RNA, 19 nt, Artificial Sequence
  Description of Artificial Sequence: Synthetic oligonucleotide
  Antisense strand to SEQ ID NO: 1595623
ucaccugagcaucacagcc

SEQ ID NO: 1595625 - RNA, 19 nt, Artificial Sequence
  Description of Artificial Sequence: Synthetic oligonucleotide
  Sense strand starting at position 2619 of SEQ ID NO: 1560372
cugugaugcucaggugaaa

SEQ ID NO: 1595626 - RNA, 19 nt, Artificial Sequence
  Description of Artificial Sequence: Synthetic oligonucleotide
  Antisense strand to SEQ ID NO: 1595625
uuucaccugagcaucacag

SEQ ID NO: 1595627 - RNA, 19 nt, Artificial Sequence
  Description of Artificial Sequence: Synthetic oligonucleotide
  Sense strand starting at position 2630 of SEQ ID NO: 1560372
aggugaaaguggagguaau

SEQ ID NO: 1595628 - RNA, 19 nt, Artificial Sequence
  Description of Artificial Sequence: Synthetic oligonucleotide
  Antisense strand to SEQ ID NO: 1595627
auuaccuccacuuucaccu

SEQ ID NO: 1595629 - RNA, 19 nt, Artificial Sequence
  Description of Artificial Sequence: Synthetic oligonucleotide
  Sense strand starting at position 2650 of SEQ ID NO: 1560372
gagggauuccgaggcucgu

SEQ ID NO: 1595630 - RNA, 19 nt, Artificial Sequence
  Description of Artificial Sequence: Synthetic oligonucleotide
  Antisense strand to SEQ ID NO: 1595629
acgagccucggaaucccuc

SEQ ID NO: 1595631 - RNA, 19 nt, Artificial Sequence
  Description of Artificial Sequence: Synthetic oligonucleotide
  Sense strand starting at position 2669 of SEQ ID NO: 1560372
ccugguuucuguccugauu

SEQ ID NO: 1595632 - RNA, 19 nt, Artificial Sequence
  Description of Artificial Sequence: Synthetic oligonucleotide
  Antisense strand to SEQ ID NO: 1595631
aaucaggacagaaaccagg

SEQ ID NO: 1595633 - RNA, 19 nt, Artificial Sequence
  Description of Artificial Sequence: Synthetic oligonucleotide
  Sense strand starting at position 2688 of SEQ ID NO: 1560372
cgcugugcgagcuuaggaa

SEQ ID NO: 1595634 - RNA, 19 nt, Artificial Sequence
  Description of Artificial Sequence: Synthetic oligonucleotide
  Antisense strand to SEQ ID NO: 1595633
uuccuaagcucgcacagcg

SEQ ID NO: 1595635 - RNA, 19 nt, Artificial Sequence
  Description of Artificial Sequence: Synthetic oligonucleotide
  Sense strand starting at position 2692 of SEQ ID NO: 1560372
gugcgagcuuaggaaaugu

SEQ ID NO: 1595636 - RNA, 19 nt, Artificial Sequence
  Description of Artificial Sequence: Synthetic oligonucleotide
  Antisense strand to SEQ ID NO: 1595635
acauuuccuaagcucgcac

SEQ ID NO: 1595637 - RNA, 19 nt, Artificial Sequence
  Description of Artificial Sequence: Synthetic oligonucleotide
  Sense strand starting at position 2718 of SEQ ID NO: 1560372
cucugagcuuuagcuuuaa

SEQ ID NO: 1595638 - RNA, 19 nt, Artificial Sequence
  Description of Artificial Sequence: Synthetic oligonucleotide
  Antisense strand to SEQ ID NO: 1595637
uuaaagcuaaagcucagag

SEQ ID NO: 1595639 - RNA, 19 nt, Artificial Sequence
  Description of Artificial Sequence: Synthetic oligonucleotide
  Sense strand starting at position 2841 of SEQ ID NO: 1560372
agagaagccucucuucuga

SEQ ID NO: 1595640 - RNA, 19 nt, Artificial Sequence
  Description of Artificial Sequence: Synthetic oligonucleotide
  Antisense strand to SEQ ID NO: 1595639
ucagaagagaggcuucucu

SEQ ID NO: 1595641 - RNA, 19 nt, Artificial Sequence
  Description of Artificial Sequence: Synthetic oligonucleotide
  Sense strand starting at position 3010 of SEQ ID NO: 1560372
guagaagauuuguaauccu

SEQ ID NO: 1595642 - RNA, 19 nt, Artificial Sequence
  Description of Artificial Sequence: Synthetic oligonucleotide
  Antisense strand to SEQ ID NO: 1595641
aggauuacaaaucuucuac

SEQ ID NO: 1595643 - RNA, 19 nt, Artificial Sequence
  Description of Artificial Sequence: Synthetic oligonucleotide
  Sense strand starting at position 3082 of SEQ ID NO: 1560372
aaaugauacucagggaggu

SEQ ID NO: 1595644 - RNA, 19 nt, Artificial Sequence
  Description of Artificial Sequence: Synthetic oligonucleotide
  Antisense strand to SEQ ID NO: 1595643
accucccugaguaucauuu

SEQ ID NO: 1595645 - RNA, 19 nt, Artificial Sequence
  Description of Artificial Sequence: Synthetic oligonucleotide
  Sense strand starting at position 3199 of SEQ ID NO: 1560372
ccugccugguuggaugaaa

SEQ ID NO: 1595646 - RNA, 19 nt, Artificial Sequence
  Description of Artificial Sequence: Synthetic oligonucleotide
  Antisense strand to SEQ ID NO: 1595645
uuucauccaaccaggcagg

SEQ ID NO: 1595647 - RNA, 19 nt, Artificial Sequence
  Description of Artificial Sequence: Synthetic oligonucleotide
  Sense strand starting at position 3259 of SEQ ID NO: 1560372
uggcaauauuaguagcuuu

SEQ ID NO: 1595648 - RNA, 19 nt, Artificial Sequence
  Description of Artificial Sequence: Synthetic oligonucleotide
  Antisense strand to SEQ ID NO: 1595647
aaagcuacuaauauugcca

SEQ ID NO: 1595649 - RNA, 19 nt, Artificial Sequence
  Description of Artificial Sequence: Synthetic oligonucleotide
  Sense strand starting at position 3531 of SEQ ID NO: 1560372
ucccgaagugucgagauua

SEQ ID NO: 1595650 - RNA, 19 nt, Artificial Sequence
  Description of Artificial Sequence: Synthetic oligonucleotide
  Antisense strand to SEQ ID NO: 1595649
uaaucucgacacuucggga

SEQ ID NO: 1595651 - RNA, 19 nt, Artificial Sequence
  Description of Artificial Sequence: Synthetic oligonucleotide
  Sense strand starting at position 3573 of SEQ ID NO: 1560372
ccugucaggucuuucuaag

SEQ ID NO: 1595652 - RNA, 19 nt, Artificial Sequence
  Description of Artificial Sequence: Synthetic oligonucleotide
  Antisense strand to SEQ ID NO: 1595651
cuuagaaagaccugacagg

SEQ ID NO: 1595653 - RNA, 19 nt, Artificial Sequence
  Description of Artificial Sequence: Synthetic oligonucleotide
  Sense strand starting at position 3657 of SEQ ID NO: 1560372
gugacuaccugagcaaauc

SEQ ID NO: 1595654 - RNA, 19 nt, Artificial Sequence
  Description of Artificial Sequence: Synthetic oligonucleotide
  Antisense strand to SEQ ID NO: 1595653
gauuugcucagguagucac

SEQ ID NO: 1595655 - RNA, 19 nt, Artificial Sequence
  Description of Artificial Sequence: Synthetic oligonucleotide
  Sense strand starting at position 262 of SEQ ID NO: 1560373
uguaguugguuuguacaau

SEQ ID NO: 1595656 - RNA, 19 nt, Artificial Sequence
  Description of Artificial Sequence: Synthetic oligonucleotide
  Antisense strand to SEQ ID NO: 1595655
auuguacaaaccaacuaca

SEQ ID NO: 1595657 - RNA, 19 nt, Artificial Sequence
  Description of Artificial Sequence: Synthetic oligonucleotide
  Sense strand starting at position 274 of SEQ ID NO: 1560373
guacaauuggucuguaggu

SEQ ID NO: 1595658 - RNA, 19 nt, Artificial Sequence
  Description of Artificial Sequence: Synthetic oligonucleotide
  Antisense strand to SEQ ID NO: 1595657
accuacagaccaauuguac

SEQ ID NO: 1595659 - RNA, 19 nt, Artificial Sequence
  Description of Artificial Sequence: Synthetic oligonucleotide
  Sense strand starting at position 287 of SEQ ID NO: 1560373
guaggugguucccuuaaau

SEQ ID NO: 1595660 - RNA, 19 nt, Artificial Sequence
  Description of Artificial Sequence: Synthetic oligonucleotide
  Antisense strand to SEQ ID NO: 1595659
auuuaagggaaccaccuac

SEQ ID NO: 1595661 - RNA, 19 nt, Artificial Sequence
  Description of Artificial Sequence: Synthetic oligonucleotide
  Sense strand starting at position 316 of SEQ ID NO: 1560373
gacugaguucugcagaggu

SEQ ID NO: 1595662 - RNA, 19 nt, Artificial Sequence
  Description of Artificial Sequence: Synthetic oligonucleotide
  Antisense strand to SEQ ID NO: 1595661
accucugcagaacucaguc

SEQ ID NO: 1595663 - RNA, 19 nt, Artificial Sequence
  Description of Artificial Sequence: Synthetic oligonucleotide
  Sense strand starting at position 629 of SEQ ID NO: 1560373
gaucuugacuccuuggaga

SEQ ID NO: 1595664 - RNA, 19 nt, Artificial Sequence
  Description of Artificial Sequence: Synthetic oligonucleotide
  Antisense strand to SEQ ID NO: 1595663
ucuccaaggagucaagauc

SEQ ID NO: 1595665 - RNA, 19 nt, Artificial Sequence
  Description of Artificial Sequence: Synthetic oligonucleotide
  Sense strand starting at position 631 of SEQ ID NO: 1560373
ucuugacuccuuggagaac

SEQ ID NO: 1595666 - RNA, 19 nt, Artificial Sequence
  Description of Artificial Sequence: Synthetic oligonucleotide
  Antisense strand to SEQ ID NO: 1595665
guucuccaaggagucaaga

SEQ ID NO: 1595667 - RNA, 19 nt, Artificial Sequence
  Description of Artificial Sequence: Synthetic oligonucleotide
  Sense strand starting at position 698 of SEQ ID NO: 1560373
agguuagaaguccaagugu

SEQ ID NO: 1595668 - RNA, 19 nt, Artificial Sequence
  Description of Artificial Sequence: Synthetic oligonucleotide
  Antisense strand to SEQ ID NO: 1595667
acacuuggacuucuaaccu

SEQ ID NO: 1595669 - RNA, 19 nt, Artificial Sequence
  Description of Artificial Sequence: Synthetic oligonucleotide
  Sense strand starting at position 769 of SEQ ID NO: 1560373
ucacaacguugauuacaga

SEQ ID NO: 1595670 - RNA, 19 nt, Artificial Sequence
  Description of Artificial Sequence: Synthetic oligonucleotide
  Antisense strand to SEQ ID NO: 1595669
ucuguaaucaacguuguga

SEQ ID NO: 1595671 - RNA, 19 nt, Artificial Sequence
  Description of Artificial Sequence: Synthetic oligonucleotide
  Sense strand starting at position 777 of SEQ ID NO: 1560373
uugauuacagagugaggua

SEQ ID NO: 1595672 - RNA, 19 nt, Artificial Sequence
  Description of Artificial Sequence: Synthetic oligonucleotide
  Antisense strand to SEQ ID NO: 1595671
uaccucacucuguaaucaa

SEQ ID NO: 1595673 - RNA, 19 nt, Artificial Sequence
  Description of Artificial Sequence: Synthetic oligonucleotide
  Sense strand starting at position 911 of SEQ ID NO: 1560373
ccuugucugaggugagacu

SEQ ID NO: 1595674 - RNA, 19 nt, Artificial Sequence
  Description of Artificial Sequence: Synthetic oligonucleotide
  Antisense strand to SEQ ID NO: 1595673
agucucaccucagacaagg

SEQ ID NO: 1595675 - RNA, 19 nt, Artificial Sequence
  Description of Artificial Sequence: Synthetic oligonucleotide
  Sense strand starting at position 941 of SEQ ID NO: 1560373
uuagcaauagcuggagguu

SEQ ID NO: 1595676 - RNA, 19 nt, Artificial Sequence
  Description of Artificial Sequence: Synthetic oligonucleotide
  Antisense strand to SEQ ID NO: 1595675
aaccuccagcuauugcuaa

SEQ ID NO: 1595677 - RNA, 19 nt, Artificial Sequence
  Description of Artificial Sequence: Synthetic oligonucleotide
  Sense strand starting at position 1207 of SEQ ID NO: 1560373
gucugacccuaccuuagau

SEQ ID NO: 1595678 - RNA, 19 nt, Artificial Sequence
  Description of Artificial Sequence: Synthetic oligonucleotide
  Antisense strand to SEQ ID NO: 1595677
aucuaagguagggucagac

SEQ ID NO: 1595679 - RNA, 19 nt, Artificial Sequence
  Description of Artificial Sequence: Synthetic oligonucleotide
  Sense strand starting at position 1393 of SEQ ID NO: 1560373
cuggaacucugauuccuau

SEQ ID NO: 1595680 - RNA, 19 nt, Artificial Sequence
  Description of Artificial Sequence: Synthetic oligonucleotide
  Antisense strand to SEQ ID NO: 1595679
auaggaaucagaguuccag

SEQ ID NO: 1595681 - RNA, 19 nt, Artificial Sequence
  Description of Artificial Sequence: Synthetic oligonucleotide
  Sense strand starting at position 1405 of SEQ ID NO: 1560373
uuccuaucuuugguuugua

SEQ ID NO: 1595682 - RNA, 19 nt, Artificial Sequence
  Description of Artificial Sequence: Synthetic oligonucleotide
  Antisense strand to SEQ ID NO: 1595681
uacaaaccaaagauaggaa

SEQ ID NO: 1595683 - RNA, 19 nt, Artificial Sequence
  Description of Artificial Sequence: Synthetic oligonucleotide
  Sense strand starting at position 1408 of SEQ ID NO: 1560373
cuaucuuugguuuguacau

SEQ ID NO: 1595684 - RNA, 19 nt, Artificial Sequence
  Description of Artificial Sequence: Synthetic oligonucleotide
  Antisense strand to SEQ ID NO: 1595683
auguacaaaccaaagauag

SEQ ID NO: 1595685 - RNA, 19 nt, Artificial Sequence
  Description of Artificial Sequence: Synthetic oligonucleotide
  Sense strand starting at position 1633 of SEQ ID NO: 1560373
cgccuuugccuccauuuga

SEQ ID NO: 1595686 - RNA, 19 nt, Artificial Sequence
  Description of Artificial Sequence: Synthetic oligonucleotide
  Antisense strand to SEQ ID NO: 1595685
ucaaauggaggcaaaggcg

SEQ ID NO: 1595687 - RNA, 19 nt, Artificial Sequence
  Description of Artificial Sequence: Synthetic oligonucleotide
  Sense strand starting at position 2048 of SEQ ID NO: 1560373
gcgggaucgccaggagaca

SEQ ID NO: 1595688 - RNA, 19 nt, Artificial Sequence
  Description of Artificial Sequence: Synthetic oligonucleotide
  Antisense strand to SEQ ID NO: 1595687
ugucuccuggcgaucccgc

SEQ ID NO: 1595689 - RNA, 19 nt, Artificial Sequence
  Description of Artificial Sequence: Synthetic oligonucleotide
  Sense strand starting at position 2113 of SEQ ID NO: 1560373
gugauucaggagugaggga

SEQ ID NO: 1595690 - RNA, 19 nt, Artificial Sequence
  Description of Artificial Sequence: Synthetic oligonucleotide
  Antisense strand to SEQ ID NO: 1595689
ucccucacuccugaaucac

SEQ ID NO: 1595691 - RNA, 19 nt, Artificial Sequence
  Description of Artificial Sequence: Synthetic oligonucleotide
  Sense strand starting at position 2171 of SEQ ID NO: 1560373
gucagaacucuggagccuu

SEQ ID NO: 1595692 - RNA, 19 nt, Artificial Sequence
  Description of Artificial Sequence: Synthetic oligonucleotide
  Antisense strand to SEQ ID NO: 1595691
aaggcuccagaguucugac

SEQ ID NO: 1595693 - RNA, 19 nt, Artificial Sequence
  Description of Artificial Sequence: Synthetic oligonucleotide
  Sense strand starting at position 2206 of SEQ ID NO: 1560373
ucaucaucucggcaggaga

SEQ ID NO: 1595694 - RNA, 19 nt, Artificial Sequence
  Description of Artificial Sequence: Synthetic oligonucleotide
  Antisense strand to SEQ ID NO: 1595693
ucuccugccgagaugauga

SEQ ID NO: 1595695 - RNA, 19 nt, Artificial Sequence
  Description of Artificial Sequence: Synthetic oligonucleotide
  Sense strand starting at position 2359 of SEQ ID NO: 1560373
gcuuccgacggcuagaaau

SEQ ID NO: 1595696 - RNA, 19 nt, Artificial Sequence
  Description of Artificial Sequence: Synthetic oligonucleotide
  Antisense strand to SEQ ID NO: 1595695
auuucuagccgucggaagc

SEQ ID NO: 1595697 - RNA, 19 nt, Artificial Sequence
  Description of Artificial Sequence: Synthetic oligonucleotide
  Sense strand starting at position 2369 of SEQ ID NO: 1560373
gcuagaaaugcuuaacuug

SEQ ID NO: 1595698 - RNA, 19 nt, Artificial Sequence
  Description of Artificial Sequence: Synthetic oligonucleotide
  Antisense strand to SEQ ID NO: 1595697
caaguuaagcauuucuagc

SEQ ID NO: 1595699 - RNA, 19 nt, Artificial Sequence
  Description of Artificial Sequence: Synthetic oligonucleotide
  Sense strand starting at position 3240 of SEQ ID NO: 1560373
ggaggaggcuccuaaagaa

SEQ ID NO: 1595700 - RNA, 19 nt, Artificial Sequence
  Description of Artificial Sequence: Synthetic oligonucleotide
  Antisense strand to SEQ ID NO: 1595699
uucuuuaggagccuccucc

SEQ ID NO: 1595701 - RNA, 19 nt, Artificial Sequence
  Description of Artificial Sequence: Synthetic oligonucleotide
  Sense strand starting at position 3474 of SEQ ID NO: 1560373
ccuuucgguuccuuaaacu

SEQ ID NO: 1595702 - RNA, 19 nt, Artificial Sequence
  Description of Artificial Sequence: Synthetic oligonucleotide
  Antisense strand to SEQ ID NO: 1595701
aguuuaaggaaccgaaagg

SEQ ID NO: 1595703 - RNA, 19 nt, Artificial Sequence
  Description of Artificial Sequence: Synthetic oligonucleotide
  Sense strand starting at position 3532 of SEQ ID NO: 1560373
gucccuucugccugcaaca

SEQ ID NO: 1595704 - RNA, 19 nt, Artificial Sequence
  Description of Artificial Sequence: Synthetic oligonucleotide
  Antisense strand to SEQ ID NO: 1595703
uguugcaggcagaagggac

SEQ ID NO: 1595705 - RNA, 19 nt, Artificial Sequence
  Description of Artificial Sequence: Synthetic oligonucleotide
  Sense strand starting at position 3558 of SEQ ID NO: 1560373
acccauucggcuuggcuaa

SEQ ID NO: 1595706 - RNA, 19 nt, Artificial Sequence
  Description of Artificial Sequence: Synthetic oligonucleotide
  Antisense strand to SEQ ID NO: 1595705
uuagccaagccgaaugggu

SEQ ID NO: 1595707 - RNA, 19 nt, Artificial Sequence
  Description of Artificial Sequence: Synthetic oligonucleotide
  Sense strand starting at position 3650 of SEQ ID NO: 1560373
cagaaauccgccuguuaaa

SEQ ID NO: 1595708 - RNA, 19 nt, Artificial Sequence
  Description of Artificial Sequence: Synthetic oligonucleotide
  Antisense strand to SEQ ID NO: 1595707
uuuaacaggcggauuucug

SEQ ID NO: 1595709 - RNA, 19 nt, Artificial Sequence
  Description of Artificial Sequence: Synthetic oligonucleotide
  Sense strand starting at position 3697 of SEQ ID NO: 1560373
ucacguguggucuaauuug

SEQ ID NO: 1595710 - RNA, 19 nt, Artificial Sequence
  Description of Artificial Sequence: Synthetic oligonucleotide
  Antisense strand to SEQ ID NO: 1595709
caaauuagaccacacguga

SEQ ID NO: 1595711 - RNA, 19 nt, Artificial Sequence
  Description of Artificial Sequence: Synthetic oligonucleotide
  Sense strand starting at position 3705 of SEQ ID NO: 1560373
ggucuaauuuguuauccga

SEQ ID NO: 1595712 - RNA, 19 nt, Artificial Sequence
  Description of Artificial Sequence: Synthetic oligonucleotide
  Antisense strand to SEQ ID NO: 1595711
ucggauaacaaauuagacc

SEQ ID NO: 1595713 - RNA, 19 nt, Artificial Sequence
  Description of Artificial Sequence: Synthetic oligonucleotide
  Sense strand starting at position 3743 of SEQ ID NO: 1560373
uuaugaugucuaugaccgu

SEQ ID NO: 1595714 - RNA, 19 nt, Artificial Sequence
  Description of Artificial Sequence: Synthetic oligonucleotide
  Antisense strand to SEQ ID NO: 1595713
acggucauagacaucauaa

SEQ ID NO: 1595715 - RNA, 19 nt, Artificial Sequence
  Description of Artificial Sequence: Synthetic oligonucleotide
  Sense strand starting at position 3752 of SEQ ID NO: 1560373
cuaugaccguguguuccau

SEQ ID NO: 1595716 - RNA, 19 nt, Artificial Sequence
  Description of Artificial Sequence: Synthetic oligonucleotide
  Antisense strand to SEQ ID NO: 1595715
auggaacacacggucauag

SEQ ID NO: 1595717 - RNA, 19 nt, Artificial Sequence
  Description of Artificial Sequence: Synthetic oligonucleotide
  Sense strand starting at position 3758 of SEQ ID NO: 1560373
ccguguguuccaugaaggu

SEQ ID NO: 1595718 - RNA, 19 nt, Artificial Sequence
  Description of Artificial Sequence: Synthetic oligonucleotide
  Antisense strand to SEQ ID NO: 1595717
accuucauggaacacacgg

SEQ ID NO: 1595719 - RNA, 19 nt, Artificial Sequence
  Description of Artificial Sequence: Synthetic oligonucleotide
  Sense strand starting at position 3841 of SEQ ID NO: 1560373
ccagcuaauguucguugaa

SEQ ID NO: 1595720 - RNA, 19 nt, Artificial Sequence
  Description of Artificial Sequence: Synthetic oligonucleotide
  Antisense strand to SEQ ID NO: 1595719
uucaacgaacauuagcugg

SEQ ID NO: 1595721 - RNA, 19 nt, Artificial Sequence
  Description of Artificial Sequence: Synthetic oligonucleotide
  Sense strand starting at position 3842 of SEQ ID NO: 1560373
cagcuaauguucguugaag

SEQ ID NO: 1595722 - RNA, 19 nt, Artificial Sequence
  Description of Artificial Sequence: Synthetic oligonucleotide
  Antisense strand to SEQ ID NO: 1595721
cuucaacgaacauuagcug

SEQ ID NO: 1595723 - RNA, 19 nt, Artificial Sequence
  Description of Artificial Sequence: Synthetic oligonucleotide
  Sense strand starting at position 3844 of SEQ ID NO: 1560373
gcuaauguucguugaagga

SEQ ID NO: 1595724 - RNA, 19 nt, Artificial Sequence
  Description of Artificial Sequence: Synthetic oligonucleotide
  Antisense strand to SEQ ID NO: 1595723
uccuucaacgaacauuagc

SEQ ID NO: 1595725 - RNA, 19 nt, Artificial Sequence
  Description of Artificial Sequence: Synthetic oligonucleotide
  Sense strand starting at position 3848 of SEQ ID NO: 1560373
auguucguugaaggaauaa

SEQ ID NO: 1595726 - RNA, 19 nt, Artificial Sequence
  Description of Artificial Sequence: Synthetic oligonucleotide
  Antisense strand to SEQ ID NO: 1595725
uuauuccuucaacgaacau

SEQ ID NO: 1595727 - RNA, 19 nt, Artificial Sequence
  Description of Artificial Sequence: Synthetic oligonucleotide
  Sense strand starting at position 3896 of SEQ ID NO: 1560373
caggguagucaucagauuc

SEQ ID NO: 1595728 - RNA, 19 nt, Artificial Sequence
  Description of Artificial Sequence: Synthetic oligonucleotide
  Antisense strand to SEQ ID NO: 1595727
gaaucugaugacuacccug

SEQ ID NO: 1595729 - RNA, 19 nt, Artificial Sequence
  Description of Artificial Sequence: Synthetic oligonucleotide
  Sense strand starting at position 3903 of SEQ ID NO: 1560373
gucaucagauuccuaggua

SEQ ID NO: 1595730 - RNA, 19 nt, Artificial Sequence
  Description of Artificial Sequence: Synthetic oligonucleotide
  Antisense strand to SEQ ID NO: 1595729
uaccuaggaaucugaugac

SEQ ID NO: 1595731 - RNA, 19 nt, Artificial Sequence
  Description of Artificial Sequence: Synthetic oligonucleotide
  Sense strand starting at position 3906 of SEQ ID NO: 1560373
aucagauuccuagguagca

SEQ ID NO: 1595732 - RNA, 19 nt, Artificial Sequence
  Description of Artificial Sequence: Synthetic oligonucleotide
  Antisense strand to SEQ ID NO: 1595731
ugcuaccuaggaaucugau

SEQ ID NO: 1595733 - RNA, 19 nt, Artificial Sequence
  Description of Artificial Sequence: Synthetic oligonucleotide
  Sense strand starting at position 3969 of SEQ ID NO: 1560373
gggaaacagugauacuguu

SEQ ID NO: 1595734 - RNA, 19 nt, Artificial Sequence
  Description of Artificial Sequence: Synthetic oligonucleotide
  Antisense strand to SEQ ID NO: 1595733
aacaguaucacuguuuccc

SEQ ID NO: 1595735 - RNA, 19 nt, Artificial Sequence
  Description of Artificial Sequence: Synthetic oligonucleotide
  Sense strand starting at position 73 of SEQ ID NO: 1560374
cuggucuucucuucuaaug

SEQ ID NO: 1595736 - RNA, 19 nt, Artificial Sequence
  Description of Artificial Sequence: Synthetic oligonucleotide
  Antisense strand to SEQ ID NO: 1595735
cauuagaagagaagaccag

SEQ ID NO: 1595737 - RNA, 19 nt, Artificial Sequence
  Description of Artificial Sequence: Synthetic oligonucleotide
  Sense strand starting at position 127 of SEQ ID NO: 1560374
ggucacugucuuuauggua

SEQ ID NO: 1595738 - RNA, 19 nt, Artificial Sequence
  Description of Artificial Sequence: Synthetic oligonucleotide
  Antisense strand to SEQ ID NO: 1595737
uaccauaaagacagugacc

SEQ ID NO: 1595739 - RNA, 19 nt, Artificial Sequence
  Description of Artificial Sequence: Synthetic oligonucleotide
  Sense strand starting at position 163 of SEQ ID NO: 1560374
gaaagugcgacuuagagca

SEQ ID NO: 1595740 - RNA, 19 nt, Artificial Sequence
  Description of Artificial Sequence: Synthetic oligonucleotide
  Antisense strand to SEQ ID NO: 1595739
ugcucuaagucgcacuuuc

SEQ ID NO: 1595741 - RNA, 19 nt, Artificial Sequence
  Description of Artificial Sequence: Synthetic oligonucleotide
  Sense strand starting at position 184 of SEQ ID NO: 1560374
ucaguuaauuccuuaaagu

SEQ ID NO: 1595742 - RNA, 19 nt, Artificial Sequence
  Description of Artificial Sequence: Synthetic oligonucleotide
  Antisense strand to SEQ ID NO: 1595741
acuuuaaggaauuaacuga

SEQ ID NO: 1595743 - RNA, 19 nt, Artificial Sequence
  Description of Artificial Sequence: Synthetic oligonucleotide
  Sense strand starting at position 275 of SEQ ID NO: 1560374
agaagagcugucuaaugca

SEQ ID NO: 1595744 - RNA, 19 nt, Artificial Sequence
  Description of Artificial Sequence: Synthetic oligonucleotide
  Antisense strand to SEQ ID NO: 1595743
ugcauuagacagcucuucu

SEQ ID NO: 1595745 - RNA, 19 nt, Artificial Sequence
  Description of Artificial Sequence: Synthetic oligonucleotide
  Sense strand starting at position 411 of SEQ ID NO: 1560374
gugaccaucucauuaauag

SEQ ID NO: 1595746 - RNA, 19 nt, Artificial Sequence
  Description of Artificial Sequence: Synthetic oligonucleotide
  Antisense strand to SEQ ID NO: 1595745
cuauuaaugagauggucac

SEQ ID NO: 1595747 - RNA, 19 nt, Artificial Sequence
  Description of Artificial Sequence: Synthetic oligonucleotide
  Sense strand starting at position 557 of SEQ ID NO: 1560374
uuacauaugugucucacau

SEQ ID NO: 1595748 - RNA, 19 nt, Artificial Sequence
  Description of Artificial Sequence: Synthetic oligonucleotide
  Antisense strand to SEQ ID NO: 1595747
augugagacacauauguaa

SEQ ID NO: 1595749 - RNA, 19 nt, Artificial Sequence
  Description of Artificial Sequence: Synthetic oligonucleotide
  Sense strand starting at position 663 of SEQ ID NO: 1560374
ugaggacucuuuguccuca

SEQ ID NO: 1595750 - RNA, 19 nt, Artificial Sequence
  Description of Artificial Sequence: Synthetic oligonucleotide
  Antisense strand to SEQ ID NO: 1595749
ugaggacaaagaguccuca

SEQ ID NO: 1595751 - RNA, 19 nt, Artificial Sequence
  Description of Artificial Sequence: Synthetic oligonucleotide
  Sense strand starting at position 664 of SEQ ID NO: 1560374
gaggacucuuuguccucaa

SEQ ID NO: 1595752 - RNA, 19 nt, Artificial Sequence
  Description of Artificial Sequence: Synthetic oligonucleotide
  Antisense strand to SEQ ID NO: 1595751
uugaggacaaagaguccuc

SEQ ID NO: 1595753 - RNA, 19 nt, Artificial Sequence
  Description of Artificial Sequence: Synthetic oligonucleotide
  Sense strand starting at position 735 of SEQ ID NO: 1560374
cugcaauaaugagcuggaa

SEQ ID NO: 1595754 - RNA, 19 nt, Artificial Sequence
  Description of Artificial Sequence: Synthetic oligonucleotide
  Antisense strand to SEQ ID NO: 1595753
uuccagcucauuauugcag

SEQ ID NO: 1595755 - RNA, 19 nt, Artificial Sequence
  Description of Artificial Sequence: Synthetic oligonucleotide
  Sense strand starting at position 854 of SEQ ID NO: 1560374
gaaggacuuuaugcuugau

SEQ ID NO: 1595756 - RNA, 19 nt, Artificial Sequence
  Description of Artificial Sequence: Synthetic oligonucleotide
  Antisense strand to SEQ ID NO: 1595755
aucaagcauaaaguccuuc

SEQ ID NO: 1595757 - RNA, 19 nt, Artificial Sequence
  Description of Artificial Sequence: Synthetic oligonucleotide
  Sense strand starting at position 856 of SEQ ID NO: 1560374
aggacuuuaugcuugauaa

SEQ ID NO: 1595758 - RNA, 19 nt, Artificial Sequence
  Description of Artificial Sequence: Synthetic oligonucleotide
  Antisense strand to SEQ ID NO: 1595757
uuaucaagcauaaaguccu

SEQ ID NO: 1595759 - RNA, 19 nt, Artificial Sequence
  Description of Artificial Sequence: Synthetic oligonucleotide
  Sense strand starting at position 857 of SEQ ID NO: 1560374
ggacuuuaugcuugauaau

SEQ ID NO: 1595760 - RNA, 19 nt, Artificial Sequence
  Description of Artificial Sequence: Synthetic oligonucleotide
  Antisense strand to SEQ ID NO: 1595759
auuaucaagcauaaagucc

SEQ ID NO: 1595761 - RNA, 19 nt, Artificial Sequence
  Description of Artificial Sequence: Synthetic oligonucleotide
  Sense strand starting at position 866 of SEQ ID NO: 1560374
gcuugauaaucauuguacc

SEQ ID NO: 1595762 - RNA, 19 nt, Artificial Sequence
  Description of Artificial Sequence: Synthetic oligonucleotide
  Antisense strand to SEQ ID NO: 1595761
gguacaaugauuaucaagc

SEQ ID NO: 1595763 - RNA, 19 nt, Artificial Sequence
  Description of Artificial Sequence: Synthetic oligonucleotide
  Sense strand starting at position 1072 of SEQ ID NO: 1560374
cguggagacucaucacuga

SEQ ID NO: 1595764 - RNA, 19 nt, Artificial Sequence
  Description of Artificial Sequence: Synthetic oligonucleotide
  Antisense strand to SEQ ID NO: 1595763
ucagugaugagucuccacg

SEQ ID NO: 1595765 - RNA, 19 nt, Artificial Sequence
  Description of Artificial Sequence: Synthetic oligonucleotide
  Sense strand starting at position 1079 of SEQ ID NO: 1560374
acucaucacugauccgaaa

SEQ ID NO: 1595766 - RNA, 19 nt, Artificial Sequence
  Description of Artificial Sequence: Synthetic oligonucleotide
  Antisense strand to SEQ ID NO: 1595765
uuucggaucagugaugagu

SEQ ID NO: 1595767 - RNA, 19 nt, Artificial Sequence
  Description of Artificial Sequence: Synthetic oligonucleotide
  Sense strand starting at position 1095 of SEQ ID NO: 1560374
aaaggugacugcuucugua

SEQ ID NO: 1595768 - RNA, 19 nt, Artificial Sequence
  Description of Artificial Sequence: Synthetic oligonucleotide
  Antisense strand to SEQ ID NO: 1595767
uacagaagcagucaccuuu

SEQ ID NO: 1595769 - RNA, 19 nt, Artificial Sequence
  Description of Artificial Sequence: Synthetic oligonucleotide
  Sense strand starting at position 1160 of SEQ ID NO: 1560374
uugcuuucuccugaaagcu

SEQ ID NO: 1595770 - RNA, 19 nt, Artificial Sequence
  Description of Artificial Sequence: Synthetic oligonucleotide
  Antisense strand to SEQ ID NO: 1595769
agcuuucaggagaaagcaa

SEQ ID NO: 1595771 - RNA, 19 nt, Artificial Sequence
  Description of Artificial Sequence: Synthetic oligonucleotide
  Sense strand starting at position 1325 of SEQ ID NO: 1560374
agaauuacccucuacuggu

SEQ ID NO: 1595772 - RNA, 19 nt, Artificial Sequence
  Description of Artificial Sequence: Synthetic oligonucleotide
  Antisense strand to SEQ ID NO: 1595771
accaguagaggguaauucu

SEQ ID NO: 1595773 - RNA, 19 nt, Artificial Sequence
  Description of Artificial Sequence: Synthetic oligonucleotide
  Sense strand starting at position 1462 of SEQ ID NO: 1560374
ucuagagccuauuuguuua

SEQ ID NO: 1595774 - RNA, 19 nt, Artificial Sequence
  Description of Artificial Sequence: Synthetic oligonucleotide
  Antisense strand to SEQ ID NO: 1595773
uaaacaaauaggcucuaga

SEQ ID NO: 1595775 - RNA, 19 nt, Artificial Sequence
  Description of Artificial Sequence: Synthetic oligonucleotide
  Sense strand starting at position 1901 of SEQ ID NO: 1560374
agaauauguuucuuaccug

SEQ ID NO: 1595776 - RNA, 19 nt, Artificial Sequence
  Description of Artificial Sequence: Synthetic oligonucleotide
  Antisense strand to SEQ ID NO: 1595775
cagguaagaaacauauucu

SEQ ID NO: 1595777 - RNA, 19 nt, Artificial Sequence
  Description of Artificial Sequence: Synthetic oligonucleotide
  Sense strand starting at position 1908 of SEQ ID NO: 1560374
guuucuuaccuggacuguu

SEQ ID NO: 1595778 - RNA, 19 nt, Artificial Sequence
  Description of Artificial Sequence: Synthetic oligonucleotide
  Antisense strand to SEQ ID NO: 1595777
aacaguccagguaagaaac

SEQ ID NO: 1595779 - RNA, 19 nt, Artificial Sequence
  Description of Artificial Sequence: Synthetic oligonucleotide
  Sense strand starting at position 1981 of SEQ ID NO: 1560374
ugacucaggcucuaaugau

SEQ ID NO: 1595780 - RNA, 19 nt, Artificial Sequence
  Description of Artificial Sequence: Synthetic oligonucleotide
  Antisense strand to SEQ ID NO: 1595779
aucauuagagccugaguca

SEQ ID NO: 1595781 - RNA, 19 nt, Artificial Sequence
  Description of Artificial Sequence: Synthetic oligonucleotide
  Sense strand starting at position 2069 of SEQ ID NO: 1560374
uaggaagucugagcuucuu

SEQ ID NO: 1595782 - RNA, 19 nt, Artificial Sequence
  Description of Artificial Sequence: Synthetic oligonucleotide
  Antisense strand to SEQ ID NO: 1595781
aagaagcucagacuuccua

SEQ ID NO: 1595783 - RNA, 19 nt, Artificial Sequence
  Description of Artificial Sequence: Synthetic oligonucleotide
  Sense strand starting at position 2172 of SEQ ID NO: 1560374
ucauguaccugacuguauu

SEQ ID NO: 1595784 - RNA, 19 nt, Artificial Sequence
  Description of Artificial Sequence: Synthetic oligonucleotide
  Antisense strand to SEQ ID NO: 1595783
aauacagucagguacauga

SEQ ID NO: 1595785 - RNA, 19 nt, Artificial Sequence
  Description of Artificial Sequence: Synthetic oligonucleotide
  Sense strand starting at position 2489 of SEQ ID NO: 1560374
gcucauuuguagucuucua

SEQ ID NO: 1595786 - RNA, 19 nt, Artificial Sequence
  Description of Artificial Sequence: Synthetic oligonucleotide
  Antisense strand to SEQ ID NO: 1595785
uagaagacuacaaaugagc

SEQ ID NO: 1595787 - RNA, 19 nt, Artificial Sequence
  Description of Artificial Sequence: Synthetic oligonucleotide
  Sense strand starting at position 2499 of SEQ ID NO: 1560374
agucuucuagcccaaagaa

SEQ ID NO: 1595788 - RNA, 19 nt, Artificial Sequence
  Description of Artificial Sequence: Synthetic oligonucleotide
  Antisense strand to SEQ ID NO: 1595787
uucuuugggcuagaagacu

SEQ ID NO: 1595789 - RNA, 19 nt, Artificial Sequence
  Description of Artificial Sequence: Synthetic oligonucleotide
  Sense strand starting at position 2536 of SEQ ID NO: 1560374
uguuaagcauccuuccaag

SEQ ID NO: 1595790 - RNA, 19 nt, Artificial Sequence
  Description of Artificial Sequence: Synthetic oligonucleotide
  Antisense strand to SEQ ID NO: 1595789
cuuggaaggaugcuuaaca

SEQ ID NO: 1595791 - RNA, 19 nt, Artificial Sequence
  Description of Artificial Sequence: Synthetic oligonucleotide
  Sense strand starting at position 2553 of SEQ ID NO: 1560374
aggguaucagagugauaug

SEQ ID NO: 1595792 - RNA, 19 nt, Artificial Sequence
  Description of Artificial Sequence: Synthetic oligonucleotide
  Antisense strand to SEQ ID NO: 1595791
cauaucacucugauacccu

SEQ ID NO: 1595793 - RNA, 19 nt, Artificial Sequence
  Description of Artificial Sequence: Synthetic oligonucleotide
  Sense strand starting at position 3047 of SEQ ID NO: 1560374
ggacaagcuuagcuuagaa

SEQ ID NO: 1595794 - RNA, 19 nt, Artificial Sequence
  Description of Artificial Sequence: Synthetic oligonucleotide
  Antisense strand to SEQ ID NO: 1595793
uucuaagcuaagcuugucc

SEQ ID NO: 1595795 - RNA, 19 nt, Artificial Sequence
  Description of Artificial Sequence: Synthetic oligonucleotide
  Sense strand starting at position 3100 of SEQ ID NO: 1560374
uuugcaagaggguaauacu

SEQ ID NO: 1595796 - RNA, 19 nt, Artificial Sequence
  Description of Artificial Sequence: Synthetic oligonucleotide
  Antisense strand to SEQ ID NO: 1595795
aguauuacccucuugcaaa

SEQ ID NO: 1595797 - RNA, 19 nt, Artificial Sequence
  Description of Artificial Sequence: Synthetic oligonucleotide
  Sense strand starting at position 3109 of SEQ ID NO: 1560374
ggguaauacuagguuaggu

SEQ ID NO: 1595798 - RNA, 19 nt, Artificial Sequence
  Description of Artificial Sequence: Synthetic oligonucleotide
  Antisense strand to SEQ ID NO: 1595797
accuaaccuaguauuaccc

SEQ ID NO: 1595799 - RNA, 19 nt, Artificial Sequence
  Description of Artificial Sequence: Synthetic oligonucleotide
  Sense strand starting at position 3111 of SEQ ID NO: 1560374
guaauacuagguuagguua

SEQ ID NO: 1595800 - RNA, 19 nt, Artificial Sequence
  Description of Artificial Sequence: Synthetic oligonucleotide
  Antisense strand to SEQ ID NO: 1595799
uaaccuaaccuaguauuac

SEQ ID NO: 1595801 - RNA, 19 nt, Artificial Sequence
  Description of Artificial Sequence: Synthetic oligonucleotide
  Sense strand starting at position 3114 of SEQ ID NO: 1560374
auacuagguuagguuauau

SEQ ID NO: 1595802 - RNA, 19 nt, Artificial Sequence
  Description of Artificial Sequence: Synthetic oligonucleotide
  Antisense strand to SEQ ID NO: 1595801
auauaaccuaaccuaguau

SEQ ID NO: 1595803 - RNA, 19 nt, Artificial Sequence
  Description of Artificial Sequence: Synthetic oligonucleotide
  Sense strand starting at position 3461 of SEQ ID NO: 1560374
uucucauaacagugugaac

SEQ ID NO: 1595804 - RNA, 19 nt, Artificial Sequence
  Description of Artificial Sequence: Synthetic oligonucleotide
  Antisense strand to SEQ ID NO: 1595803
guucacacuguuaugagaa

SEQ ID NO: 1595805 - RNA, 19 nt, Artificial Sequence
  Description of Artificial Sequence: Synthetic oligonucleotide
  Sense strand starting at position 3620 of SEQ ID NO: 1560374
auucuacaucauugugagu

SEQ ID NO: 1595806 - RNA, 19 nt, Artificial Sequence
  Description of Artificial Sequence: Synthetic oligonucleotide
  Antisense strand to SEQ ID NO: 1595805
acucacaaugauguagaau

SEQ ID NO: 1595807 - RNA, 19 nt, Artificial Sequence
  Description of Artificial Sequence: Synthetic oligonucleotide
  Sense strand starting at position 3625 of SEQ ID NO: 1560374
acaucauugugaguuguau

SEQ ID NO: 1595808 - RNA, 19 nt, Artificial Sequence
  Description of Artificial Sequence: Synthetic oligonucleotide
  Antisense strand to SEQ ID NO: 1595807
auacaacucacaaugaugu

SEQ ID NO: 1595809 - RNA, 19 nt, Artificial Sequence
  Description of Artificial Sequence: Synthetic oligonucleotide
  Sense strand starting at position 3627 of SEQ ID NO: 1560374
aucauugugaguuguauaa

SEQ ID NO: 1595810 - RNA, 19 nt, Artificial Sequence
  Description of Artificial Sequence: Synthetic oligonucleotide
  Antisense strand to SEQ ID NO: 1595809
uuauacaacucacaaugau

SEQ ID NO: 1595811 - RNA, 19 nt, Artificial Sequence
  Description of Artificial Sequence: Synthetic oligonucleotide
  Sense strand starting at position 3862 of SEQ ID NO: 1560374
cuuuaaucagaagggugau

SEQ ID NO: 1595812 - RNA, 19 nt, Artificial Sequence
  Description of Artificial Sequence: Synthetic oligonucleotide
  Antisense strand to SEQ ID NO: 1595811
aucacccuucugauuaaag

SEQ ID NO: 1595813 - RNA, 19 nt, Artificial Sequence
  Description of Artificial Sequence: Synthetic oligonucleotide
  Sense strand starting at position 3957 of SEQ ID NO: 1560374
uuuagaagauucccaaggu

SEQ ID NO: 1595814 - RNA, 19 nt, Artificial Sequence
  Description of Artificial Sequence: Synthetic oligonucleotide
  Antisense strand to SEQ ID NO: 1595813
accuugggaaucuucuaaa

SEQ ID NO: 1595815 - RNA, 19 nt, Artificial Sequence
  Description of Artificial Sequence: Synthetic oligonucleotide
  Sense strand starting at position 9 of SEQ ID NO: 1560375
auagucuuucuauagguga

SEQ ID NO: 1595816 - RNA, 19 nt, Artificial Sequence
  Description of Artificial Sequence: Synthetic oligonucleotide
  Antisense strand to SEQ ID NO: 1595815
ucaccuauagaaagacuau

SEQ ID NO: 1595817 - RNA, 19 nt, Artificial Sequence
  Description of Artificial Sequence: Synthetic oligonucleotide
  Sense strand starting at position 12 of SEQ ID NO: 1560375
gucuuucuauaggugauau

SEQ ID NO: 1595818 - RNA, 19 nt, Artificial Sequence
  Description of Artificial Sequence: Synthetic oligonucleotide
  Antisense strand to SEQ ID NO: 1595817
auaucaccuauagaaagac

SEQ ID NO: 1595819 - RNA, 19 nt, Artificial Sequence
  Description of Artificial Sequence: Synthetic oligonucleotide
  Sense strand starting at position 14 of SEQ ID NO: 1560375
cuuucuauaggugauauua

SEQ ID NO: 1595820 - RNA, 19 nt, Artificial Sequence
  Description of Artificial Sequence: Synthetic oligonucleotide
  Antisense strand to SEQ ID NO: 1595819
uaauaucaccuauagaaag

SEQ ID NO: 1595821 - RNA, 19 nt, Artificial Sequence
  Description of Artificial Sequence: Synthetic oligonucleotide
  Sense strand starting at position 22 of SEQ ID NO: 1560375
aggugauauuauccagucu

SEQ ID NO: 1595822 - RNA, 19 nt, Artificial Sequence
  Description of Artificial Sequence: Synthetic oligonucleotide
  Antisense strand to SEQ ID NO: 1595821
agacuggauaauaucaccu

SEQ ID NO: 1595823 - RNA, 19 nt, Artificial Sequence
  Description of Artificial Sequence: Synthetic oligonucleotide
  Sense strand starting at position 99 of SEQ ID NO: 1560375
ggugcuccagucugauaua

SEQ ID NO: 1595824 - RNA, 19 nt, Artificial Sequence
  Description of Artificial Sequence: Synthetic oligonucleotide
  Antisense strand to SEQ ID NO: 1595823
uauaucagacuggagcacc

SEQ ID NO: 1595825 - RNA, 19 nt, Artificial Sequence
  Description of Artificial Sequence: Synthetic oligonucleotide
  Sense strand starting at position 128 of SEQ ID NO: 1560375
acgggagucccguagacau

SEQ ID NO: 1595826 - RNA, 19 nt, Artificial Sequence
  Description of Artificial Sequence: Synthetic oligonucleotide
  Antisense strand to SEQ ID NO: 1595825
augucuacgggacucccgu

SEQ ID NO: 1595827 - RNA, 19 nt, Artificial Sequence
  Description of Artificial Sequence: Synthetic oligonucleotide
  Sense strand starting at position 326 of SEQ ID NO: 1560375
ucuacagaaucugcugaau

SEQ ID NO: 1595828 - RNA, 19 nt, Artificial Sequence
  Description of Artificial Sequence: Synthetic oligonucleotide
  Antisense strand to SEQ ID NO: 1595827
auucagcagauucuguaga

SEQ ID NO: 1595829 - RNA, 19 nt, Artificial Sequence
  Description of Artificial Sequence: Synthetic oligonucleotide
  Sense strand starting at position 329 of SEQ ID NO: 1560375
acagaaucugcugaaugca

SEQ ID NO: 1595830 - RNA, 19 nt, Artificial Sequence
  Description of Artificial Sequence: Synthetic oligonucleotide
  Antisense strand to SEQ ID NO: 1595829
ugcauucagcagauucugu

SEQ ID NO: 1595831 - RNA, 19 nt, Artificial Sequence
  Description of Artificial Sequence: Synthetic oligonucleotide
  Sense strand starting at position 386 of SEQ ID NO: 1560375
gguccugucaggcaggaau

SEQ ID NO: 1595832 - RNA, 19 nt, Artificial Sequence
  Description of Artificial Sequence: Synthetic oligonucleotide
  Antisense strand to SEQ ID NO: 1595831
auuccugccugacaggacc

SEQ ID NO: 1595833 - RNA, 19 nt, Artificial Sequence
  Description of Artificial Sequence: Synthetic oligonucleotide
  Sense strand starting at position 401 of SEQ ID NO: 1560375
gaauguuugcgccaacuuu

SEQ ID NO: 1595834 - RNA, 19 nt, Artificial Sequence
  Description of Artificial Sequence: Synthetic oligonucleotide
  Antisense strand to SEQ ID NO: 1595833
aaaguuggcgcaaacauuc

SEQ ID NO: 1595835 - RNA, 19 nt, Artificial Sequence
  Description of Artificial Sequence: Synthetic oligonucleotide
  Sense strand starting at position 1183 of SEQ ID NO: 1560375
aucuuaaguucccucaagu

SEQ ID NO: 1595836 - RNA, 19 nt, Artificial Sequence
  Description of Artificial Sequence: Synthetic oligonucleotide
  Antisense strand to SEQ ID NO: 1595835
acuugagggaacuuaagau

SEQ ID NO: 1595837 - RNA, 19 nt, Artificial Sequence
  Description of Artificial Sequence: Synthetic oligonucleotide
  Sense strand starting at position 1280 of SEQ ID NO: 1560375
ggcucugauuccuugaaca

SEQ ID NO: 1595838 - RNA, 19 nt, Artificial Sequence
  Description of Artificial Sequence: Synthetic oligonucleotide
  Antisense strand to SEQ ID NO: 1595837
uguucaaggaaucagagcc

SEQ ID NO: 1595839 - RNA, 19 nt, Artificial Sequence
  Description of Artificial Sequence: Synthetic oligonucleotide
  Sense strand starting at position 1868 of SEQ ID NO: 1560375
gcaaguggaugcuccauua

SEQ ID NO: 1595840 - RNA, 19 nt, Artificial Sequence
  Description of Artificial Sequence: Synthetic oligonucleotide
  Antisense strand to SEQ ID NO: 1595839
uaauggagcauccacuugc

SEQ ID NO: 1595841 - RNA, 19 nt, Artificial Sequence
  Description of Artificial Sequence: Synthetic oligonucleotide
  Sense strand starting at position 1886 of SEQ ID NO: 1560375
acagcacugcucuagaauu

SEQ ID NO: 1595842 - RNA, 19 nt, Artificial Sequence
  Description of Artificial Sequence: Synthetic oligonucleotide
  Antisense strand to SEQ ID NO: 1595841
aauucuagagcagugcugu

SEQ ID NO: 1595843 - RNA, 19 nt, Artificial Sequence
  Description of Artificial Sequence: Synthetic oligonucleotide
  Sense strand starting at position 1896 of SEQ ID NO: 1560375
ucuagaauuuaggaggugu

SEQ ID NO: 1595844 - RNA, 19 nt, Artificial Sequence
  Description of Artificial Sequence: Synthetic oligonucleotide
  Antisense strand to SEQ ID NO: 1595843
acaccuccuaaauucuaga

SEQ ID NO: 1595845 - RNA, 19 nt, Artificial Sequence
  Description of Artificial Sequence: Synthetic oligonucleotide
  Sense strand starting at position 1904 of SEQ ID NO: 1560375
uuaggagguguuugucaga

SEQ ID NO: 1595846 - RNA, 19 nt, Artificial Sequence
  Description of Artificial Sequence: Synthetic oligonucleotide
  Antisense strand to SEQ ID NO: 1595845
ucugacaaacaccuccuaa

SEQ ID NO: 1595847 - RNA, 19 nt, Artificial Sequence
  Description of Artificial Sequence: Synthetic oligonucleotide
  Sense strand starting at position 2032 of SEQ ID NO: 1560375
agggcuuucgcggagacua

SEQ ID NO: 1595848 - RNA, 19 nt, Artificial Sequence
  Description of Artificial Sequence: Synthetic oligonucleotide
  Antisense strand to SEQ ID NO: 1595847
uagucuccgcgaaagcccu

SEQ ID NO: 1595849 - RNA, 19 nt, Artificial Sequence
  Description of Artificial Sequence: Synthetic oligonucleotide
  Sense strand starting at position 2148 of SEQ ID NO: 1560375
agcggacucuucuuagaaa

SEQ ID NO: 1595850 - RNA, 19 nt, Artificial Sequence
  Description of Artificial Sequence: Synthetic oligonucleotide
  Antisense strand to SEQ ID NO: 1595849
uuucuaagaagaguccgcu

SEQ ID NO: 1595851 - RNA, 19 nt, Artificial Sequence
  Description of Artificial Sequence: Synthetic oligonucleotide
  Sense strand starting at position 2159 of SEQ ID NO: 1560375
cuuagaaaccaaugugucu

SEQ ID NO: 1595852 - RNA, 19 nt, Artificial Sequence
  Description of Artificial Sequence: Synthetic oligonucleotide
  Antisense strand to SEQ ID NO: 1595851
agacacauugguuucuaag

SEQ ID NO: 1595853 - RNA, 19 nt, Artificial Sequence
  Description of Artificial Sequence: Synthetic oligonucleotide
  Sense strand starting at position 2164 of SEQ ID NO: 1560375
aaaccaaugugucugaaug

SEQ ID NO: 1595854 - RNA, 19 nt, Artificial Sequence
  Description of Artificial Sequence: Synthetic oligonucleotide
  Antisense strand to SEQ ID NO: 1595853
cauucagacacauugguuu

SEQ ID NO: 1595855 - RNA, 19 nt, Artificial Sequence
  Description of Artificial Sequence: Synthetic oligonucleotide
  Sense strand starting at position 2165 of SEQ ID NO: 1560375
aaccaaugugucugaaugu

SEQ ID NO: 1595856 - RNA, 19 nt, Artificial Sequence
  Description of Artificial Sequence: Synthetic oligonucleotide
  Antisense strand to SEQ ID NO: 1595855
acauucagacacauugguu

SEQ ID NO: 1595857 - RNA, 19 nt, Artificial Sequence
  Description of Artificial Sequence: Synthetic oligonucleotide
  Sense strand starting at position 2193 of SEQ ID NO: 1560375
ucuagccuucugugagaga

SEQ ID NO: 1595858 - RNA, 19 nt, Artificial Sequence
  Description of Artificial Sequence: Synthetic oligonucleotide
  Antisense strand to SEQ ID NO: 1595857
ucucucacagaaggcuaga

SEQ ID NO: 1595859 - RNA, 19 nt, Artificial Sequence
  Description of Artificial Sequence: Synthetic oligonucleotide
  Sense strand starting at position 2239 of SEQ ID NO: 1560375
ggucaaggaaucugaaugu

SEQ ID NO: 1595860 - RNA, 19 nt, Artificial Sequence
  Description of Artificial Sequence: Synthetic oligonucleotide
  Antisense strand to SEQ ID NO: 1595859
acauucagauuccuugacc

SEQ ID NO: 1595861 - RNA, 19 nt, Artificial Sequence
  Description of Artificial Sequence: Synthetic oligonucleotide
  Sense strand starting at position 2329 of SEQ ID NO: 1560375
cgcaaucaagcccaaauau

SEQ ID NO: 1595862 - RNA, 19 nt, Artificial Sequence
  Description of Artificial Sequence: Synthetic oligonucleotide
  Antisense strand to SEQ ID NO: 1595861
auauuugggcuugauugcg

SEQ ID NO: 1595863 - RNA, 19 nt, Artificial Sequence
  Description of Artificial Sequence: Synthetic oligonucleotide
  Sense strand starting at position 2372 of SEQ ID NO: 1560375
cgacuuaugcaguacuucu

SEQ ID NO: 1595864 - RNA, 19 nt, Artificial Sequence
  Description of Artificial Sequence: Synthetic oligonucleotide
  Antisense strand to SEQ ID NO: 1595863
agaaguacugcauaagucg

SEQ ID NO: 1595865 - RNA, 19 nt, Artificial Sequence
  Description of Artificial Sequence: Synthetic oligonucleotide
  Sense strand starting at position 2635 of SEQ ID NO: 1560375
cccuuccucuguucugaua

SEQ ID NO: 1595866 - RNA, 19 nt, Artificial Sequence
  Description of Artificial Sequence: Synthetic oligonucleotide
  Antisense strand to SEQ ID NO: 1595865
uaucagaacagaggaaggg

SEQ ID NO: 1595867 - RNA, 19 nt, Artificial Sequence
  Description of Artificial Sequence: Synthetic oligonucleotide
  Sense strand starting at position 2648 of SEQ ID NO: 1560375
cugauaauuuguuagaaug

SEQ ID NO: 1595868 - RNA, 19 nt, Artificial Sequence
  Description of Artificial Sequence: Synthetic oligonucleotide
  Antisense strand to SEQ ID NO: 1595867
cauucuaacaaauuaucag

SEQ ID NO: 1595869 - RNA, 19 nt, Artificial Sequence
  Description of Artificial Sequence: Synthetic oligonucleotide
  Sense strand starting at position 3034 of SEQ ID NO: 1560375
guuuguucucaauggaguu

SEQ ID NO: 1595870 - RNA, 19 nt, Artificial Sequence
  Description of Artificial Sequence: Synthetic oligonucleotide
  Antisense strand to SEQ ID NO: 1595869
aacuccauugagaacaaac

SEQ ID NO: 1595871 - RNA, 19 nt, Artificial Sequence
  Description of Artificial Sequence: Synthetic oligonucleotide
  Sense strand starting at position 3069 of SEQ ID NO: 1560375
aaaggugguagguauugua

SEQ ID NO: 1595872 - RNA, 19 nt, Artificial Sequence
  Description of Artificial Sequence: Synthetic oligonucleotide
  Antisense strand to SEQ ID NO: 1595871
uacaauaccuaccaccuuu

SEQ ID NO: 1595873 - RNA, 19 nt, Artificial Sequence
  Description of Artificial Sequence: Synthetic oligonucleotide
  Sense strand starting at position 3089 of SEQ ID NO: 1560375
aggugcaggucucuaaaga

SEQ ID NO: 1595874 - RNA, 19 nt, Artificial Sequence
  Description of Artificial Sequence: Synthetic oligonucleotide
  Antisense strand to SEQ ID NO: 1595873
ucuuuagagaccugcaccu

SEQ ID NO: 1595875 - RNA, 19 nt, Artificial Sequence
  Description of Artificial Sequence: Synthetic oligonucleotide
  Sense strand starting at position 3090 of SEQ ID NO: 1560375
ggugcaggucucuaaagag

SEQ ID NO: 1595876 - RNA, 19 nt, Artificial Sequence
  Description of Artificial Sequence: Synthetic oligonucleotide
  Antisense strand to SEQ ID NO: 1595875
cucuuuagagaccugcacc

SEQ ID NO: 1595877 - RNA, 19 nt, Artificial Sequence
  Description of Artificial Sequence: Synthetic oligonucleotide
  Sense strand starting at position 3182 of SEQ ID NO: 1560375
gugagaaugcagugcuuag

SEQ ID NO: 1595878 - RNA, 19 nt, Artificial Sequence
  Description of Artificial Sequence: Synthetic oligonucleotide
  Antisense strand to SEQ ID NO: 1595877
cuaagcacugcauucucac

SEQ ID NO: 1595879 - RNA, 19 nt, Artificial Sequence
  Description of Artificial Sequence: Synthetic oligonucleotide
  Sense strand starting at position 3218 of SEQ ID NO: 1560375
cacguagugauagacagau

SEQ ID NO: 1595880 - RNA, 19 nt, Artificial Sequence
  Description of Artificial Sequence: Synthetic oligonucleotide
  Antisense strand to SEQ ID NO: 1595879
aucugucuaucacuacgug

SEQ ID NO: 1595881 - RNA, 19 nt, Artificial Sequence
  Description of Artificial Sequence: Synthetic oligonucleotide
  Sense strand starting at position 3286 of SEQ ID NO: 1560375
cggaucuagagucaauauc

SEQ ID NO: 1595882 - RNA, 19 nt, Artificial Sequence
  Description of Artificial Sequence: Synthetic oligonucleotide
  Antisense strand to SEQ ID NO: 1595881
gauauugacucuagauccg

SEQ ID NO: 1595883 - RNA, 19 nt, Artificial Sequence
  Description of Artificial Sequence: Synthetic oligonucleotide
  Sense strand starting at position 3317 of SEQ ID NO: 1560375
cauguaggcugagucuuaa

SEQ ID NO: 1595884 - RNA, 19 nt, Artificial Sequence
  Description of Artificial Sequence: Synthetic oligonucleotide
  Antisense strand to SEQ ID NO: 1595883
uuaagacucagccuacaug

SEQ ID NO: 1595885 - RNA, 19 nt, Artificial Sequence
  Description of Artificial Sequence: Synthetic oligonucleotide
  Sense strand starting at position 3360 of SEQ ID NO: 1560375
aaugcauucuugucagagg

SEQ ID NO: 1595886 - RNA, 19 nt, Artificial Sequence
  Description of Artificial Sequence: Synthetic oligonucleotide
  Antisense strand to SEQ ID NO: 1595885
ccucugacaagaaugcauu

SEQ ID NO: 1595887 - RNA, 19 nt, Artificial Sequence
  Description of Artificial Sequence: Synthetic oligonucleotide
  Sense strand starting at position 3426 of SEQ ID NO: 1560375
uguuuaccagagcauagau

SEQ ID NO: 1595888 - RNA, 19 nt, Artificial Sequence
  Description of Artificial Sequence: Synthetic oligonucleotide
  Antisense strand to SEQ ID NO: 1595887
aucuaugcucugguaaaca

SEQ ID NO: 1595889 - RNA, 19 nt, Artificial Sequence
  Description of Artificial Sequence: Synthetic oligonucleotide
  Sense strand starting at position 3457 of SEQ ID NO: 1560375
agcaauaagcauuaaguau

SEQ ID NO: 1595890 - RNA, 19 nt, Artificial Sequence
  Description of Artificial Sequence: Synthetic oligonucleotide
  Antisense strand to SEQ ID NO: 1595889
auacuuaaugcuuauugcu

SEQ ID NO: 1595891 - RNA, 19 nt, Artificial Sequence
  Description of Artificial Sequence: Synthetic oligonucleotide
  Sense strand starting at position 3492 of SEQ ID NO: 1560375
gcaauuucuugguuggucu

SEQ ID NO: 1595892 - RNA, 19 nt, Artificial Sequence
  Description of Artificial Sequence: Synthetic oligonucleotide
  Antisense strand to SEQ ID NO: 1595891
agaccaaccaagaaauugc

SEQ ID NO: 1595893 - RNA, 19 nt, Artificial Sequence
  Description of Artificial Sequence: Synthetic oligonucleotide
  Sense strand starting at position 3496 of SEQ ID NO: 1560375
uuucuugguuggucuugaa

SEQ ID NO: 1595894 - RNA, 19 nt, Artificial Sequence
  Description of Artificial Sequence: Synthetic oligonucleotide
  Antisense strand to SEQ ID NO: 1595893
uucaagaccaaccaagaaa

SEQ ID NO: 1595895 - RNA, 19 nt, Artificial Sequence
  Description of Artificial Sequence: Synthetic oligonucleotide
  Sense strand starting at position 39 of SEQ ID NO: 1560376
uuagaugggcugcguuaau

SEQ ID NO: 1595896 - RNA, 19 nt, Artificial Sequence
  Description of Artificial Sequence: Synthetic oligonucleotide
  Antisense strand to SEQ ID NO: 1595895
auuaacgcagcccaucuaa

SEQ ID NO: 1595897 - RNA, 19 nt, Artificial Sequence
  Description of Artificial Sequence: Synthetic oligonucleotide
  Sense strand starting at position 106 of SEQ ID NO: 1560376
ccagauugauuacaacaga

SEQ ID NO: 1595898 - RNA, 19 nt, Artificial Sequence
  Description of Artificial Sequence: Synthetic oligonucleotide
  Antisense strand to SEQ ID NO: 1595897
ucuguuguaaucaaucugg

SEQ ID NO: 1595899 - RNA, 19 nt, Artificial Sequence
  Description of Artificial Sequence: Synthetic oligonucleotide
  Sense strand starting at position 575 of SEQ ID NO: 1560376
aaggaugauugugcaauga

SEQ ID NO: 1595900 - RNA, 19 nt, Artificial Sequence
  Description of Artificial Sequence: Synthetic oligonucleotide
  Antisense strand to SEQ ID NO: 1595899
ucauugcacaaucauccuu

SEQ ID NO: 1595901 - RNA, 19 nt, Artificial Sequence
  Description of Artificial Sequence: Synthetic oligonucleotide
  Sense strand starting at position 636 of SEQ ID NO: 1560376
gguccacccuaguuguaau

SEQ ID NO: 1595902 - RNA, 19 nt, Artificial Sequence
  Description of Artificial Sequence: Synthetic oligonucleotide
  Antisense strand to SEQ ID NO: 1595901
auuacaacuaggguggacc

SEQ ID NO: 1595903 - RNA, 19 nt, Artificial Sequence
  Description of Artificial Sequence: Synthetic oligonucleotide
  Sense strand starting at position 668 of SEQ ID NO: 1560376
cugcgaaccacagaugaua

SEQ ID NO: 1595904 - RNA, 19 nt, Artificial Sequence
  Description of Artificial Sequence: Synthetic oligonucleotide
  Antisense strand to SEQ ID NO: 1595903
uaucaucugugguucgcag

SEQ ID NO: 1595905 - RNA, 19 nt, Artificial Sequence
  Description of Artificial Sequence: Synthetic oligonucleotide
  Sense strand starting at position 695 of SEQ ID NO: 1560376
gauuaugaggucugcuauu

SEQ ID NO: 1595906 - RNA, 19 nt, Artificial Sequence
  Description of Artificial Sequence: Synthetic oligonucleotide
  Antisense strand to SEQ ID NO: 1595905
aauagcagaccucauaauc

SEQ ID NO: 1595907 - RNA, 19 nt, Artificial Sequence
  Description of Artificial Sequence: Synthetic oligonucleotide
  Sense strand starting at position 701 of SEQ ID NO: 1560376
gaggucugcuauuugguga

SEQ ID NO: 1595908 - RNA, 19 nt, Artificial Sequence
  Description of Artificial Sequence: Synthetic oligonucleotide
  Antisense strand to SEQ ID NO: 1595907
ucaccaaauagcagaccuc

SEQ ID NO: 1595909 - RNA, 19 nt, Artificial Sequence
  Description of Artificial Sequence: Synthetic oligonucleotide
  Sense strand starting at position 708 of SEQ ID NO: 1560376
gcuauuuggugaguccuua

SEQ ID NO: 1595910 - RNA, 19 nt, Artificial Sequence
  Description of Artificial Sequence: Synthetic oligonucleotide
  Antisense strand to SEQ ID NO: 1595909
uaaggacucaccaaauagc

SEQ ID NO: 1595911 - RNA, 19 nt, Artificial Sequence
  Description of Artificial Sequence: Synthetic oligonucleotide
  Sense strand starting at position 712 of SEQ ID NO: 1560376
uuuggugaguccuuaauau

SEQ ID NO: 1595912 - RNA, 19 nt, Artificial Sequence
  Description of Artificial Sequence: Synthetic oligonucleotide
  Antisense strand to SEQ ID NO: 1595911
auauuaaggacucaccaaa

SEQ ID NO: 1595913 - RNA, 19 nt, Artificial Sequence
  Description of Artificial Sequence: Synthetic oligonucleotide
  Sense strand starting at position 729 of SEQ ID NO: 1560376
augugccagucacuauaua

SEQ ID NO: 1595914 - RNA, 19 nt, Artificial Sequence
  Description of Artificial Sequence: Synthetic oligonucleotide
  Antisense strand to SEQ ID NO: 1595913
uauauagugacuggcacau

SEQ ID NO: 1595915 - RNA, 19 nt, Artificial Sequence
  Description of Artificial Sequence: Synthetic oligonucleotide
  Sense strand starting at position 730 of SEQ ID NO: 1560376
ugugccagucacuauauau

SEQ ID NO: 1595916 - RNA, 19 nt, Artificial Sequence
  Description of Artificial Sequence: Synthetic oligonucleotide
  Antisense strand to SEQ ID NO: 1595915
auauauagugacuggcaca

SEQ ID NO: 1595917 - RNA, 19 nt, Artificial Sequence
  Description of Artificial Sequence: Synthetic oligonucleotide
  Sense strand starting at position 787 of SEQ ID NO: 1560376
agugcuguccuuguguaac

SEQ ID NO: 1595918 - RNA, 19 nt, Artificial Sequence
  Description of Artificial Sequence: Synthetic oligonucleotide
  Antisense strand to SEQ ID NO: 1595917
guuacacaaggacagcacu

SEQ ID NO: 1595919 - RNA, 19 nt, Artificial Sequence
  Description of Artificial Sequence: Synthetic oligonucleotide
  Sense strand starting at position 797 of SEQ ID NO: 1560376
uuguguaacagguaggaaa

SEQ ID NO: 1595920 - RNA, 19 nt, Artificial Sequence
  Description of Artificial Sequence: Synthetic oligonucleotide
  Antisense strand to SEQ ID NO: 1595919
uuuccuaccuguuacacaa

SEQ ID NO: 1595921 - RNA, 19 nt, Artificial Sequence
  Description of Artificial Sequence: Synthetic oligonucleotide
  Sense strand starting at position 845 of SEQ ID NO: 1560376
acaauuaucgaggguugca

SEQ ID NO: 1595922 - RNA, 19 nt, Artificial Sequence
  Description of Artificial Sequence: Synthetic oligonucleotide
  Antisense strand to SEQ ID NO: 1595921
ugcaacccucgauaauugu

SEQ ID NO: 1595923 - RNA, 19 nt, Artificial Sequence
  Description of Artificial Sequence: Synthetic oligonucleotide
  Sense strand starting at position 848 of SEQ ID NO: 1560376
auuaucgaggguugcaauu

SEQ ID NO: 1595924 - RNA, 19 nt, Artificial Sequence
  Description of Artificial Sequence: Synthetic oligonucleotide
  Antisense strand to SEQ ID NO: 1595923
aauugcaacccucgauaau

SEQ ID NO: 1595925 - RNA, 19 nt, Artificial Sequence
  Description of Artificial Sequence: Synthetic oligonucleotide
  Sense strand starting at position 900 of SEQ ID NO: 1560376
agcaguuccucauuagguu

SEQ ID NO: 1595926 - RNA, 19 nt, Artificial Sequence
  Description of Artificial Sequence: Synthetic oligonucleotide
  Antisense strand to SEQ ID NO: 1595925
aaccuaaugaggaacugcu

SEQ ID NO: 1595927 - RNA, 19 nt, Artificial Sequence
  Description of Artificial Sequence: Synthetic oligonucleotide
  Sense strand starting at position 901 of SEQ ID NO: 1560376
gcaguuccucauuagguua

SEQ ID NO: 1595928 - RNA, 19 nt, Artificial Sequence
  Description of Artificial Sequence: Synthetic oligonucleotide
  Antisense strand to SEQ ID NO: 1595927
uaaccuaaugaggaacugc

SEQ ID NO: 1595929 - RNA, 19 nt, Artificial Sequence
  Description of Artificial Sequence: Synthetic oligonucleotide
  Sense strand starting at position 1016 of SEQ ID NO: 1560376
agcagaugcccuugacuga

SEQ ID NO: 1595930 - RNA, 19 nt, Artificial Sequence
  Description of Artificial Sequence: Synthetic oligonucleotide
  Antisense strand to SEQ ID NO: 1595929
ucagucaagggcaucugcu

SEQ ID NO: 1595931 - RNA, 19 nt, Artificial Sequence
  Description of Artificial Sequence: Synthetic oligonucleotide
  Sense strand starting at position 1031 of SEQ ID NO: 1560376
cugacauuauaaugagaaa

SEQ ID NO: 1595932 - RNA, 19 nt, Artificial Sequence
  Description of Artificial Sequence: Synthetic oligonucleotide
  Antisense strand to SEQ ID NO: 1595931
uuucucauuauaaugucag

SEQ ID NO: 1595933 - RNA, 19 nt, Artificial Sequence
  Description of Artificial Sequence: Synthetic oligonucleotide
  Sense strand starting at position 1107 of SEQ ID NO: 1560376
ugccucugucacugugaau

SEQ ID NO: 1595934 - RNA, 19 nt, Artificial Sequence
  Description of Artificial Sequence: Synthetic oligonucleotide
  Antisense strand to SEQ ID NO: 1595933
auucacagugacagaggca

SEQ ID NO: 1595935 - RNA, 19 nt, Artificial Sequence
  Description of Artificial Sequence: Synthetic oligonucleotide
  Sense strand starting at position 1206 of SEQ ID NO: 1560376
cugcauuuguccuuccauu

SEQ ID NO: 1595936 - RNA, 19 nt, Artificial Sequence
  Description of Artificial Sequence: Synthetic oligonucleotide
  Antisense strand to SEQ ID NO: 1595935
aauggaaggacaaaugcag

SEQ ID NO: 1595937 - RNA, 19 nt, Artificial Sequence
  Description of Artificial Sequence: Synthetic oligonucleotide
  Sense strand starting at position 1594 of SEQ ID NO: 1560376
aacagugacuccgucucaa

SEQ ID NO: 1595938 - RNA, 19 nt, Artificial Sequence
  Description of Artificial Sequence: Synthetic oligonucleotide
  Antisense strand to SEQ ID NO: 1595937
uugagacggagucacuguu

SEQ ID NO: 1595939 - RNA, 19 nt, Artificial Sequence
  Description of Artificial Sequence: Synthetic oligonucleotide
  Sense strand starting at position 1727 of SEQ ID NO: 1560376
cccuauuucuccugagaga

SEQ ID NO: 1595940 - RNA, 19 nt, Artificial Sequence
  Description of Artificial Sequence: Synthetic oligonucleotide
  Antisense strand to SEQ ID NO: 1595939
ucucucaggagaaauaggg

SEQ ID NO: 1595941 - RNA, 19 nt, Artificial Sequence
  Description of Artificial Sequence: Synthetic oligonucleotide
  Sense strand starting at position 1834 of SEQ ID NO: 1560376
ugaauccagucuguauuga

SEQ ID NO: 1595942 - RNA, 19 nt, Artificial Sequence
  Description of Artificial Sequence: Synthetic oligonucleotide
  Antisense strand to SEQ ID NO: 1595941
ucaauacagacuggauuca

SEQ ID NO: 1595943 - RNA, 19 nt, Artificial Sequence
  Description of Artificial Sequence: Synthetic oligonucleotide
  Sense strand starting at position 2025 of SEQ ID NO: 1560376
uuuccugugccaugagaug

SEQ ID NO: 1595944 - RNA, 19 nt, Artificial Sequence
  Description of Artificial Sequence: Synthetic oligonucleotide
  Antisense strand to SEQ ID NO: 1595943
caucucauggcacaggaaa

SEQ ID NO: 1595945 - RNA, 19 nt, Artificial Sequence
  Description of Artificial Sequence: Synthetic oligonucleotide
  Sense strand starting at position 2030 of SEQ ID NO: 1560376
ugugccaugagaugauaaa

SEQ ID NO: 1595946 - RNA, 19 nt, Artificial Sequence
  Description of Artificial Sequence: Synthetic oligonucleotide
  Antisense strand to SEQ ID NO: 1595945
uuuaucaucucauggcaca

SEQ ID NO: 1595947 - RNA, 19 nt, Artificial Sequence
  Description of Artificial Sequence: Synthetic oligonucleotide
  Sense strand starting at position 2139 of SEQ ID NO: 1560376
acucuaaauuuaggagugu

SEQ ID NO: 1595948 - RNA, 19 nt, Artificial Sequence
  Description of Artificial Sequence: Synthetic oligonucleotide
  Antisense strand to SEQ ID NO: 1595947
acacuccuaaauuuagagu

SEQ ID NO: 1595949 - RNA, 19 nt, Artificial Sequence
  Description of Artificial Sequence: Synthetic oligonucleotide
  Sense strand starting at position 2198 of SEQ ID NO: 1560376
auagucuuucuauagguga

SEQ ID NO: 1595950 - RNA, 19 nt, Artificial Sequence
  Description of Artificial Sequence: Synthetic oligonucleotide
  Antisense strand to SEQ ID NO: 1595949
ucaccuauagaaagacuau

SEQ ID NO: 1595951 - RNA, 19 nt, Artificial Sequence
  Description of Artificial Sequence: Synthetic oligonucleotide
  Sense strand starting at position 2201 of SEQ ID NO: 1560376
gucuuucuauaggugauau

SEQ ID NO: 1595952 - RNA, 19 nt, Artificial Sequence
  Description of Artificial Sequence: Synthetic oligonucleotide
  Antisense strand to SEQ ID NO: 1595951
auaucaccuauagaaagac

SEQ ID NO: 1595953 - RNA, 19 nt, Artificial Sequence
  Description of Artificial Sequence: Synthetic oligonucleotide
  Sense strand starting at position 2203 of SEQ ID NO: 1560376
cuuucuauaggugauauua

SEQ ID NO: 1595954 - RNA, 19 nt, Artificial Sequence
  Description of Artificial Sequence: Synthetic oligonucleotide
  Antisense strand to SEQ ID NO: 1595953
uaauaucaccuauagaaag

SEQ ID NO: 1595955 - RNA, 19 nt, Artificial Sequence
  Description of Artificial Sequence: Synthetic oligonucleotide
  Sense strand starting at position 2211 of SEQ ID NO: 1560376
aggugauauuauccagucu

SEQ ID NO: 1595956 - RNA, 19 nt, Artificial Sequence
  Description of Artificial Sequence: Synthetic oligonucleotide
  Antisense strand to SEQ ID NO: 1595955
agacuggauaauaucaccu

SEQ ID NO: 1595957 - RNA, 19 nt, Artificial Sequence
  Description of Artificial Sequence: Synthetic oligonucleotide
  Sense strand starting at position 2288 of SEQ ID NO: 1560376
ggugcuccagucugauaua

SEQ ID NO: 1595958 - RNA, 19 nt, Artificial Sequence
  Description of Artificial Sequence: Synthetic oligonucleotide
  Antisense strand to SEQ ID NO: 1595957
uauaucagacuggagcacc

SEQ ID NO: 1595959 - RNA, 19 nt, Artificial Sequence
  Description of Artificial Sequence: Synthetic oligonucleotide
  Sense strand starting at position 2317 of SEQ ID NO: 1560376
acgggagucccguagacau

SEQ ID NO: 1595960 - RNA, 19 nt, Artificial Sequence
  Description of Artificial Sequence: Synthetic oligonucleotide
  Antisense strand to SEQ ID NO: 1595959
augucuacgggacucccgu

SEQ ID NO: 1595961 - RNA, 19 nt, Artificial Sequence
  Description of Artificial Sequence: Synthetic oligonucleotide
  Sense strand starting at position 2515 of SEQ ID NO: 1560376
ucuacagaaucugcugaau

SEQ ID NO: 1595962 - RNA, 19 nt, Artificial Sequence
  Description of Artificial Sequence: Synthetic oligonucleotide
  Antisense strand to SEQ ID NO: 1595961
auucagcagauucuguaga

SEQ ID NO: 1595963 - RNA, 19 nt, Artificial Sequence
  Description of Artificial Sequence: Synthetic oligonucleotide
  Sense strand starting at position 2518 of SEQ ID NO: 1560376
acagaaucugcugaaugca

SEQ ID NO: 1595964 - RNA, 19 nt, Artificial Sequence
  Description of Artificial Sequence: Synthetic oligonucleotide
  Antisense strand to SEQ ID NO: 1595963
ugcauucagcagauucugu

SEQ ID NO: 1595965 - RNA, 19 nt, Artificial Sequence
  Description of Artificial Sequence: Synthetic oligonucleotide
  Sense strand starting at position 2575 of SEQ ID NO: 1560376
gguccugucaggcaggaau

SEQ ID NO: 1595966 - RNA, 19 nt, Artificial Sequence
  Description of Artificial Sequence: Synthetic oligonucleotide
  Antisense strand to SEQ ID NO: 1595965
auuccugccugacaggacc

SEQ ID NO: 1595967 - RNA, 19 nt, Artificial Sequence
  Description of Artificial Sequence: Synthetic oligonucleotide
  Sense strand starting at position 2588 of SEQ ID NO: 1560376
aggaauguuugcgccaacu

SEQ ID NO: 1595968 - RNA, 19 nt, Artificial Sequence
  Description of Artificial Sequence: Synthetic oligonucleotide
  Antisense strand to SEQ ID NO: 1595967
aguuggcgcaaacauuccu

SEQ ID NO: 1595969 - RNA, 19 nt, Artificial Sequence
  Description of Artificial Sequence: Synthetic oligonucleotide
  Sense strand starting at position 2590 of SEQ ID NO: 1560376
gaauguuugcgccaacuuu

SEQ ID NO: 1595970 - RNA, 19 nt, Artificial Sequence
  Description of Artificial Sequence: Synthetic oligonucleotide
  Antisense strand to SEQ ID NO: 1595969
aaaguuggcgcaaacauuc

SEQ ID NO: 1595971 - RNA, 19 nt, Artificial Sequence
  Description of Artificial Sequence: Synthetic oligonucleotide
  Sense strand starting at position 3372 of SEQ ID NO: 1560376
aucuuaaguucccucaagu

SEQ ID NO: 1595972 - RNA, 19 nt, Artificial Sequence
  Description of Artificial Sequence: Synthetic oligonucleotide
  Antisense strand to SEQ ID NO: 1595971
acuugagggaacuuaagau

SEQ ID NO: 1595973 - RNA, 19 nt, Artificial Sequence
  Description of Artificial Sequence: Synthetic oligonucleotide
  Sense strand starting at position 3469 of SEQ ID NO: 1560376
ggcucugauuccuugaaca

SEQ ID NO: 1595974 - RNA, 19 nt, Artificial Sequence
  Description of Artificial Sequence: Synthetic oligonucleotide
  Antisense strand to SEQ ID NO: 1595973
uguucaaggaaucagagcc

SEQ ID NO: 1595975 - RNA, 19 nt, Artificial Sequence
  Description of Artificial Sequence: Synthetic oligonucleotide
  Sense strand starting at position 70 of SEQ ID NO: 1560377
uuuccuaugccaugagaua

SEQ ID NO: 1595976 - RNA, 19 nt, Artificial Sequence
  Description of Artificial Sequence: Synthetic oligonucleotide
  Antisense strand to SEQ ID NO: 1595975
uaucucauggcauaggaaa

SEQ ID NO: 1595977 - RNA, 19 nt, Artificial Sequence
  Description of Artificial Sequence: Synthetic oligonucleotide
  Sense strand starting at position 71 of SEQ ID NO: 1560377
uuccuaugccaugagauau

SEQ ID NO: 1595978 - RNA, 19 nt, Artificial Sequence
  Description of Artificial Sequence: Synthetic oligonucleotide
  Antisense strand to SEQ ID NO: 1595977
auaucucauggcauaggaa

SEQ ID NO: 1595979 - RNA, 19 nt, Artificial Sequence
  Description of Artificial Sequence: Synthetic oligonucleotide
  Sense strand starting at position 230 of SEQ ID NO: 1560377
ucauccagucucugggauu

SEQ ID NO: 1595980 - RNA, 19 nt, Artificial Sequence
  Description of Artificial Sequence: Synthetic oligonucleotide
  Antisense strand to SEQ ID NO: 1595979
aaucccagagacuggauga

SEQ ID NO: 1595981 - RNA, 19 nt, Artificial Sequence
  Description of Artificial Sequence: Synthetic oligonucleotide
  Sense strand starting at position 299 of SEQ ID NO: 1560377
ggcacucaagucugauaaa

SEQ ID NO: 1595982 - RNA, 19 nt, Artificial Sequence
  Description of Artificial Sequence: Synthetic oligonucleotide
  Antisense strand to SEQ ID NO: 1595981
uuuaucagacuugagugcc

SEQ ID NO: 1595983 - RNA, 19 nt, Artificial Sequence
  Description of Artificial Sequence: Synthetic oligonucleotide
  Sense strand starting at position 328 of SEQ ID NO: 1560377
gugggagucccauagacuc

SEQ ID NO: 1595984 - RNA, 19 nt, Artificial Sequence
  Description of Artificial Sequence: Synthetic oligonucleotide
  Antisense strand to SEQ ID NO: 1595983
gagucuaugggacucccac

SEQ ID NO: 1595985 - RNA, 19 nt, Artificial Sequence
  Description of Artificial Sequence: Synthetic oligonucleotide
  Sense strand starting at position 445 of SEQ ID NO: 1560377
uuguuaaagcuccagaucu

SEQ ID NO: 1595986 - RNA, 19 nt, Artificial Sequence
  Description of Artificial Sequence: Synthetic oligonucleotide
  Antisense strand to SEQ ID NO: 1595985
agaucuggagcuuuaacaa

SEQ ID NO: 1595987 - RNA, 19 nt, Artificial Sequence
  Description of Artificial Sequence: Synthetic oligonucleotide
  Sense strand starting at position 447 of SEQ ID NO: 1560377
guuaaagcuccagaucuag

SEQ ID NO: 1595988 - RNA, 19 nt, Artificial Sequence
  Description of Artificial Sequence: Synthetic oligonucleotide
  Antisense strand to SEQ ID NO: 1595987
cuagaucuggagcuuuaac

SEQ ID NO: 1595989 - RNA, 19 nt, Artificial Sequence
  Description of Artificial Sequence: Synthetic oligonucleotide
  Sense strand starting at position 453 of SEQ ID NO: 1560377
gcuccagaucuagaacuca

SEQ ID NO: 1595990 - RNA, 19 nt, Artificial Sequence
  Description of Artificial Sequence: Synthetic oligonucleotide
  Antisense strand to SEQ ID NO: 1595989
ugaguucuagaucuggagc

SEQ ID NO: 1595991 - RNA, 19 nt, Artificial Sequence
  Description of Artificial Sequence: Synthetic oligonucleotide
  Sense strand starting at position 700 of SEQ ID NO: 1560377
gguccaauaagauggugau

SEQ ID NO: 1595992 - RNA, 19 nt, Artificial Sequence
  Description of Artificial Sequence: Synthetic oligonucleotide
  Antisense strand to SEQ ID NO: 1595991
aucaccaucuuauuggacc

SEQ ID NO: 1595993 - RNA, 19 nt, Artificial Sequence
  Description of Artificial Sequence: Synthetic oligonucleotide
  Sense strand starting at position 976 of SEQ ID NO: 1560377
cuggcucauccugaauauu

SEQ ID NO: 1595994 - RNA, 19 nt, Artificial Sequence
  Description of Artificial Sequence: Synthetic oligonucleotide
  Antisense strand to SEQ ID NO: 1595993
aauauucaggaugagccag

SEQ ID NO: 1595995 - RNA, 19 nt, Artificial Sequence
  Description of Artificial Sequence: Synthetic oligonucleotide
  Sense strand starting at position 1047 of SEQ ID NO: 1560377
aaagcagaaugcucaggua

SEQ ID NO: 1595996 - RNA, 19 nt, Artificial Sequence
  Description of Artificial Sequence: Synthetic oligonucleotide
  Antisense strand to SEQ ID NO: 1595995
uaccugagcauucugcuuu

SEQ ID NO: 1595997 - RNA, 19 nt, Artificial Sequence
  Description of Artificial Sequence: Synthetic oligonucleotide
  Sense strand starting at position 1196 of SEQ ID NO: 1560377
cuacauguccaguagaaau

SEQ ID NO: 1595998 - RNA, 19 nt, Artificial Sequence
  Description of Artificial Sequence: Synthetic oligonucleotide
  Antisense strand to SEQ ID NO: 1595997
auuucuacuggacauguag

SEQ ID NO: 1595999 - RNA, 19 nt, Artificial Sequence
  Description of Artificial Sequence: Synthetic oligonucleotide
  Sense strand starting at position 1761 of SEQ ID NO: 1560377
uuagaagggcucugucaua

SEQ ID NO: 1596000 - RNA, 19 nt, Artificial Sequence
  Description of Artificial Sequence: Synthetic oligonucleotide
  Antisense strand to SEQ ID NO: 1595999
uaugacagagcccuucuaa

SEQ ID NO: 1596001 - RNA, 19 nt, Artificial Sequence
  Description of Artificial Sequence: Synthetic oligonucleotide
  Sense strand starting at position 1773 of SEQ ID NO: 1560377
ugucauauagcaggcauuu

SEQ ID NO: 1596002 - RNA, 19 nt, Artificial Sequence
  Description of Artificial Sequence: Synthetic oligonucleotide
  Antisense strand to SEQ ID NO: 1596001
aaaugccugcuauaugaca

SEQ ID NO: 1596003 - RNA, 19 nt, Artificial Sequence
  Description of Artificial Sequence: Synthetic oligonucleotide
  Sense strand starting at position 2074 of SEQ ID NO: 1560377
ccugauuggucaucuggau

SEQ ID NO: 1596004 - RNA, 19 nt, Artificial Sequence
  Description of Artificial Sequence: Synthetic oligonucleotide
  Antisense strand to SEQ ID NO: 1596003
auccagaugaccaaucagg

SEQ ID NO: 1596005 - RNA, 19 nt, Artificial Sequence
  Description of Artificial Sequence: Synthetic oligonucleotide
  Sense strand starting at position 2139 of SEQ ID NO: 1560377
acaacugauugauugaagu

SEQ ID NO: 1596006 - RNA, 19 nt, Artificial Sequence
  Description of Artificial Sequence: Synthetic oligonucleotide
  Antisense strand to SEQ ID NO: 1596005
acuucaaucaaucaguugu

SEQ ID NO: 1596007 - RNA, 19 nt, Artificial Sequence
  Description of Artificial Sequence: Synthetic oligonucleotide
  Sense strand starting at position 2418 of SEQ ID NO: 1560377
ucagcagagacuuaguuga

SEQ ID NO: 1596008 - RNA, 19 nt, Artificial Sequence
  Description of Artificial Sequence: Synthetic oligonucleotide
  Antisense strand to SEQ ID NO: 1596007
ucaacuaagucucugcuga

SEQ ID NO: 1596009 - RNA, 19 nt, Artificial Sequence
  Description of Artificial Sequence: Synthetic oligonucleotide
  Sense strand starting at position 2420 of SEQ ID NO: 1560377
agcagagacuuaguugaag

SEQ ID NO: 1596010 - RNA, 19 nt, Artificial Sequence
  Description of Artificial Sequence: Synthetic oligonucleotide
  Antisense strand to SEQ ID NO: 1596009
cuucaacuaagucucugcu

SEQ ID NO: 1596011 - RNA, 19 nt, Artificial Sequence
  Description of Artificial Sequence: Synthetic oligonucleotide
  Sense strand starting at position 2540 of SEQ ID NO: 1560377
uggaaacuuaugugucuga

SEQ ID NO: 1596012 - RNA, 19 nt, Artificial Sequence
  Description of Artificial Sequence: Synthetic oligonucleotide
  Antisense strand to SEQ ID NO: 1596011
ucagacacauaaguuucca

SEQ ID NO: 1596013 - RNA, 19 nt, Artificial Sequence
  Description of Artificial Sequence: Synthetic oligonucleotide
  Sense strand starting at position 2541 of SEQ ID NO: 1560377
ggaaacuuaugugucugaa

SEQ ID NO: 1596014 - RNA, 19 nt, Artificial Sequence
  Description of Artificial Sequence: Synthetic oligonucleotide
  Antisense strand to SEQ ID NO: 1596013
uucagacacauaaguuucc

SEQ ID NO: 1596015 - RNA, 19 nt, Artificial Sequence
  Description of Artificial Sequence: Synthetic oligonucleotide
  Sense strand starting at position 2543 of SEQ ID NO: 1560377
aaacuuaugugucugaaug

SEQ ID NO: 1596016 - RNA, 19 nt, Artificial Sequence
  Description of Artificial Sequence: Synthetic oligonucleotide
  Antisense strand to SEQ ID NO: 1596015
cauucagacacauaaguuu

SEQ ID NO: 1596017 - RNA, 19 nt, Artificial Sequence
  Description of Artificial Sequence: Synthetic oligonucleotide
  Sense strand starting at position 2618 of SEQ ID NO: 1560377
ggccaagaaaucugagagu

SEQ ID NO: 1596018 - RNA, 19 nt, Artificial Sequence
  Description of Artificial Sequence: Synthetic oligonucleotide
  Antisense strand to SEQ ID NO: 1596017
acucucagauuucuuggcc

SEQ ID NO: 1596019 - RNA, 19 nt, Artificial Sequence
  Description of Artificial Sequence: Synthetic oligonucleotide
  Sense strand starting at position 2690 of SEQ ID NO: 1560377
ugagaagaaugagaggaaa

SEQ ID NO: 1596020 - RNA, 19 nt, Artificial Sequence
  Description of Artificial Sequence: Synthetic oligonucleotide
  Antisense strand to SEQ ID NO: 1596019
uuuccucucauucuucuca

SEQ ID NO: 1596021 - RNA, 19 nt, Artificial Sequence
  Description of Artificial Sequence: Synthetic oligonucleotide
  Sense strand starting at position 2723 of SEQ ID NO: 1560377
aaagaugcacggugaaaca

SEQ ID NO: 1596022 - RNA, 19 nt, Artificial Sequence
  Description of Artificial Sequence: Synthetic oligonucleotide
  Antisense strand to SEQ ID NO: 1596021
uguuucaccgugcaucuuu

SEQ ID NO: 1596023 - RNA, 19 nt, Artificial Sequence
  Description of Artificial Sequence: Synthetic oligonucleotide
  Sense strand starting at position 2989 of SEQ ID NO: 1560377
cuauaaauuggguguucca

SEQ ID NO: 1596024 - RNA, 19 nt, Artificial Sequence
  Description of Artificial Sequence: Synthetic oligonucleotide
  Antisense strand to SEQ ID NO: 1596023
uggaacacccaauuuauag

SEQ ID NO: 1596025 - RNA, 19 nt, Artificial Sequence
  Description of Artificial Sequence: Synthetic oligonucleotide
  Sense strand starting at position 2992 of SEQ ID NO: 1560377
uaaauuggguguuccaaug

SEQ ID NO: 1596026 - RNA, 19 nt, Artificial Sequence
  Description of Artificial Sequence: Synthetic oligonucleotide
  Antisense strand to SEQ ID NO: 1596025
cauuggaacacccaauuua

SEQ ID NO: 1596027 - RNA, 19 nt, Artificial Sequence
  Description of Artificial Sequence: Synthetic oligonucleotide
  Sense strand starting at position 2998 of SEQ ID NO: 1560377
ggguguuccaaugacacca

SEQ ID NO: 1596028 - RNA, 19 nt, Artificial Sequence
  Description of Artificial Sequence: Synthetic oligonucleotide
  Antisense strand to SEQ ID NO: 1596027
uggugucauuggaacaccc

SEQ ID NO: 1596029 - RNA, 19 nt, Artificial Sequence
  Description of Artificial Sequence: Synthetic oligonucleotide
  Sense strand starting at position 3218 of SEQ ID NO: 1560377
uguggaagcucaucaaauc

SEQ ID NO: 1596030 - RNA, 19 nt, Artificial Sequence
  Description of Artificial Sequence: Synthetic oligonucleotide
  Antisense strand to SEQ ID NO: 1596029
gauuugaugagcuuccaca

SEQ ID NO: 1596031 - RNA, 19 nt, Artificial Sequence
  Description of Artificial Sequence: Synthetic oligonucleotide
  Sense strand starting at position 3219 of SEQ ID NO: 1560377
guggaagcucaucaaaucu

SEQ ID NO: 1596032 - RNA, 19 nt, Artificial Sequence
  Description of Artificial Sequence: Synthetic oligonucleotide
  Antisense strand to SEQ ID NO: 1596031
agauuugaugagcuuccac

SEQ ID NO: 1596033 - RNA, 19 nt, Artificial Sequence
  Description of Artificial Sequence: Synthetic oligonucleotide
  Sense strand starting at position 3381 of SEQ ID NO: 1560377
agcauaaacucagcuauga

SEQ ID NO: 1596034 - RNA, 19 nt, Artificial Sequence
  Description of Artificial Sequence: Synthetic oligonucleotide
  Antisense strand to SEQ ID NO: 1596033
ucauagcugaguuuaugcu

SEQ ID NO: 1596035 - RNA, 19 nt, Artificial Sequence
  Description of Artificial Sequence: Synthetic oligonucleotide
  Sense strand starting at position 3409 of SEQ ID NO: 1560377
gcuguuuaugaauaacaaa

SEQ ID NO: 1596036 - RNA, 19 nt, Artificial Sequence
  Description of Artificial Sequence: Synthetic oligonucleotide
  Antisense strand to SEQ ID NO: 1596035
uuuguuauucauaaacagc

SEQ ID NO: 1596037 - RNA, 19 nt, Artificial Sequence
  Description of Artificial Sequence: Synthetic oligonucleotide
  Sense strand starting at position 3475 of SEQ ID NO: 1560377
gccagaaaucugugacaaa

SEQ ID NO: 1596038 - RNA, 19 nt, Artificial Sequence
  Description of Artificial Sequence: Synthetic oligonucleotide
  Antisense strand to SEQ ID NO: 1596037
uuugucacagauuucuggc

SEQ ID NO: 1596039 - RNA, 19 nt, Artificial Sequence
  Description of Artificial Sequence: Synthetic oligonucleotide
  Sense strand starting at position 3495 of SEQ ID NO: 1560377
ucaaauaugcuuugaggua

SEQ ID NO: 1596040 - RNA, 19 nt, Artificial Sequence
  Description of Artificial Sequence: Synthetic oligonucleotide
  Antisense strand to SEQ ID NO: 1596039
uaccucaaagcauauuuga

SEQ ID NO: 1596041 - RNA, 19 nt, Artificial Sequence
  Description of Artificial Sequence: Synthetic oligonucleotide
  Sense strand starting at position 3599 of SEQ ID NO: 1560377
cacaccauugccgagauua

SEQ ID NO: 1596042 - RNA, 19 nt, Artificial Sequence
  Description of Artificial Sequence: Synthetic oligonucleotide
  Antisense strand to SEQ ID NO: 1596041
uaaucucggcaauggugug

SEQ ID NO: 1596043 - RNA, 19 nt, Artificial Sequence
  Description of Artificial Sequence: Synthetic oligonucleotide
  Sense strand starting at position 3641 of SEQ ID NO: 1560377
ggagaugcucuauggacua

SEQ ID NO: 1596044 - RNA, 19 nt, Artificial Sequence
  Description of Artificial Sequence: Synthetic oligonucleotide
  Antisense strand to SEQ ID NO: 1596043
uaguccauagagcaucucc

SEQ ID NO: 1596045 - RNA, 19 nt, Artificial Sequence
  Description of Artificial Sequence: Synthetic oligonucleotide
  Sense strand starting at position 3646 of SEQ ID NO: 1560377
ugcucuauggacuacugau

SEQ ID NO: 1596046 - RNA, 19 nt, Artificial Sequence
  Description of Artificial Sequence: Synthetic oligonucleotide
  Antisense strand to SEQ ID NO: 1596045
aucaguaguccauagagca

SEQ ID NO: 1596047 - RNA, 19 nt, Artificial Sequence
  Description of Artificial Sequence: Synthetic oligonucleotide
  Sense strand starting at position 3701 of SEQ ID NO: 1560377
aucagaauguuguucucaa

SEQ ID NO: 1596048 - RNA, 19 nt, Artificial Sequence
  Description of Artificial Sequence: Synthetic oligonucleotide
  Antisense strand to SEQ ID NO: 1596047
uugagaacaacauucugau

SEQ ID NO: 1596049 - RNA, 19 nt, Artificial Sequence
  Description of Artificial Sequence: Synthetic oligonucleotide
  Sense strand starting at position 3822 of SEQ ID NO: 1560377
agaguaaaccaaugaagca

SEQ ID NO: 1596050 - RNA, 19 nt, Artificial Sequence
  Description of Artificial Sequence: Synthetic oligonucleotide
  Antisense strand to SEQ ID NO: 1596049
ugcuucauugguuuacucu

SEQ ID NO: 1596051 - RNA, 19 nt, Artificial Sequence
  Description of Artificial Sequence: Synthetic oligonucleotide
  Sense strand starting at position 3838 of SEQ ID NO: 1560377
gcacauaagccauggagaa

SEQ ID NO: 1596052 - RNA, 19 nt, Artificial Sequence
  Description of Artificial Sequence: Synthetic oligonucleotide
  Antisense strand to SEQ ID NO: 1596051
uucuccauggcuuaugugc

SEQ ID NO: 1596053 - RNA, 19 nt, Artificial Sequence
  Description of Artificial Sequence: Synthetic oligonucleotide
  Sense strand starting at position 3959 of SEQ ID NO: 1560377
uagggcuuucuugaaagug

SEQ ID NO: 1596054 - RNA, 19 nt, Artificial Sequence
  Description of Artificial Sequence: Synthetic oligonucleotide
  Antisense strand to SEQ ID NO: 1596053
cacuuucaagaaagcccua

SEQ ID NO: 1596055 - RNA, 19 nt, Artificial Sequence
  Description of Artificial Sequence: Synthetic oligonucleotide
  Sense strand starting at position 207 of SEQ ID NO: 1560378
cagcuacguucuguugagu

SEQ ID NO: 1596056 - RNA, 19 nt, Artificial Sequence
  Description of Artificial Sequence: Synthetic oligonucleotide
  Antisense strand to SEQ ID NO: 1596055
acucaacagaacguagcug

SEQ ID NO: 1596057 - RNA, 19 nt, Artificial Sequence
  Description of Artificial Sequence: Synthetic oligonucleotide
  Sense strand starting at position 927 of SEQ ID NO: 1560378
gguaaagcuccgggcugau

SEQ ID NO: 1596058 - RNA, 19 nt, Artificial Sequence
  Description of Artificial Sequence: Synthetic oligonucleotide
  Antisense strand to SEQ ID NO: 1596057
aucagcccggagcuuuacc

SEQ ID NO: 1596059 - RNA, 19 nt, Artificial Sequence
  Description of Artificial Sequence: Synthetic oligonucleotide
  Sense strand starting at position 1054 of SEQ ID NO: 1560378
aggcgugcuugagcacaaa

SEQ ID NO: 1596060 - RNA, 19 nt, Artificial Sequence
  Description of Artificial Sequence: Synthetic oligonucleotide
  Antisense strand to SEQ ID NO: 1596059
uuugugcucaagcacgccu

SEQ ID NO: 1596061 - RNA, 19 nt, Artificial Sequence
  Description of Artificial Sequence: Synthetic oligonucleotide
  Sense strand starting at position 2086 of SEQ ID NO: 1560378
ggcgguguugguggugaua

SEQ ID NO: 1596062 - RNA, 19 nt, Artificial Sequence
  Description of Artificial Sequence: Synthetic oligonucleotide
  Antisense strand to SEQ ID NO: 1596061
uaucaccaccaacaccgcc

SEQ ID NO: 1596063 - RNA, 19 nt, Artificial Sequence
  Description of Artificial Sequence: Synthetic oligonucleotide
  Sense strand starting at position 2088 of SEQ ID NO: 1560378
cgguguugguggugauaug

SEQ ID NO: 1596064 - RNA, 19 nt, Artificial Sequence
  Description of Artificial Sequence: Synthetic oligonucleotide
  Antisense strand to SEQ ID NO: 1596063
cauaucaccaccaacaccg

SEQ ID NO: 1596065 - RNA, 19 nt, Artificial Sequence
  Description of Artificial Sequence: Synthetic oligonucleotide
  Sense strand starting at position 2089 of SEQ ID NO: 1560378
gguguugguggugauaugu

SEQ ID NO: 1596066 - RNA, 19 nt, Artificial Sequence
  Description of Artificial Sequence: Synthetic oligonucleotide
  Antisense strand to SEQ ID NO: 1596065
acauaucaccaccaacacc

SEQ ID NO: 1596067 - RNA, 19 nt, Artificial Sequence
  Description of Artificial Sequence: Synthetic oligonucleotide
  Sense strand starting at position 2100 of SEQ ID NO: 1560378
ugauaugugagcuggagag

SEQ ID NO: 1596068 - RNA, 19 nt, Artificial Sequence
  Description of Artificial Sequence: Synthetic oligonucleotide
  Antisense strand to SEQ ID NO: 1596067
cucuccagcucacauauca

SEQ ID NO: 1596069 - RNA, 19 nt, Artificial Sequence
  Description of Artificial Sequence: Synthetic oligonucleotide
  Sense strand starting at position 2112 of SEQ ID NO: 1560378
uggagagagccuuggauga

SEQ ID NO: 1596070 - RNA, 19 nt, Artificial Sequence
  Description of Artificial Sequence: Synthetic oligonucleotide
  Antisense strand to SEQ ID NO: 1596069
ucauccaaggcucucucca

SEQ ID NO: 1596071 - RNA, 19 nt, Artificial Sequence
  Description of Artificial Sequence: Synthetic oligonucleotide
  Sense strand starting at position 2114 of SEQ ID NO: 1560378
gagagagccuuggaugaga

SEQ ID NO: 1596072 - RNA, 19 nt, Artificial Sequence
  Description of Artificial Sequence: Synthetic oligonucleotide
  Antisense strand to SEQ ID NO: 1596071
ucucauccaaggcucucuc

SEQ ID NO: 1596073 - RNA, 19 nt, Artificial Sequence
  Description of Artificial Sequence: Synthetic oligonucleotide
  Sense strand starting at position 2224 of SEQ ID NO: 1560378
cagguuauccguugcuacu

SEQ ID NO: 1596074 - RNA, 19 nt, Artificial Sequence
  Description of Artificial Sequence: Synthetic oligonucleotide
  Antisense strand to SEQ ID NO: 1596073
aguagcaacggauaaccug

SEQ ID NO: 1596075 - RNA, 19 nt, Artificial Sequence
  Description of Artificial Sequence: Synthetic oligonucleotide
  Sense strand starting at position 2226 of SEQ ID NO: 1560378
gguuauccguugcuacuca

SEQ ID NO: 1596076 - RNA, 19 nt, Artificial Sequence
  Description of Artificial Sequence: Synthetic oligonucleotide
  Antisense strand to SEQ ID NO: 1596075
ugaguagcaacggauaacc

SEQ ID NO: 1596077 - RNA, 19 nt, Artificial Sequence
  Description of Artificial Sequence: Synthetic oligonucleotide
  Sense strand starting at position 2230 of SEQ ID NO: 1560378
auccguugcuacucaaauu

SEQ ID NO: 1596078 - RNA, 19 nt, Artificial Sequence
  Description of Artificial Sequence: Synthetic oligonucleotide
  Antisense strand to SEQ ID NO: 1596077
aauuugaguagcaacggau

SEQ ID NO: 1596079 - RNA, 19 nt, Artificial Sequence
  Description of Artificial Sequence: Synthetic oligonucleotide
  Sense strand starting at position 2330 of SEQ ID NO: 1560378
gucccuaugucacaacuga

SEQ ID NO: 1596080 - RNA, 19 nt, Artificial Sequence
  Description of Artificial Sequence: Synthetic oligonucleotide
  Antisense strand to SEQ ID NO: 1596079
ucaguugugacauagggac

SEQ ID NO: 1596081 - RNA, 19 nt, Artificial Sequence
  Description of Artificial Sequence: Synthetic oligonucleotide
  Sense strand starting at position 2390 of SEQ ID NO: 1560378
uccagaagucuccgugcca

SEQ ID NO: 1596082 - RNA, 19 nt, Artificial Sequence
  Description of Artificial Sequence: Synthetic oligonucleotide
  Antisense strand to SEQ ID NO: 1596081
uggcacggagacuucugga

SEQ ID NO: 1596083 - RNA, 19 nt, Artificial Sequence
  Description of Artificial Sequence: Synthetic oligonucleotide
  Sense strand starting at position 2424 of SEQ ID NO: 1560378
cuaagaaugucugggucca

SEQ ID NO: 1596084 - RNA, 19 nt, Artificial Sequence
  Description of Artificial Sequence: Synthetic oligonucleotide
  Antisense strand to SEQ ID NO: 1596083
uggacccagacauucuuag

SEQ ID NO: 1596085 - RNA, 19 nt, Artificial Sequence
  Description of Artificial Sequence: Synthetic oligonucleotide
  Sense strand starting at position 2460 of SEQ ID NO: 1560378
gggcuaaucuauccagggu

SEQ ID NO: 1596086 - RNA, 19 nt, Artificial Sequence
  Description of Artificial Sequence: Synthetic oligonucleotide
  Antisense strand to SEQ ID NO: 1596085
acccuggauagauuagccc

SEQ ID NO: 1596087 - RNA, 19 nt, Artificial Sequence
  Description of Artificial Sequence: Synthetic oligonucleotide
  Sense strand starting at position 2503 of SEQ ID NO: 1560378
gguggagcuucagaauguu

SEQ ID NO: 1596088 - RNA, 19 nt, Artificial Sequence
  Description of Artificial Sequence: Synthetic oligonucleotide
  Antisense strand to SEQ ID NO: 1596087
aacauucugaagcuccacc

SEQ ID NO: 1596089 - RNA, 19 nt, Artificial Sequence
  Description of Artificial Sequence: Synthetic oligonucleotide
  Sense strand starting at position 2642 of SEQ ID NO: 1560378
gccuucuagguccgaguga

SEQ ID NO: 1596090 - RNA, 19 nt, Artificial Sequence
  Description of Artificial Sequence: Synthetic oligonucleotide
  Antisense strand to SEQ ID NO: 1596089
ucacucggaccuagaaggc

SEQ ID NO: 1596091 - RNA, 19 nt, Artificial Sequence
  Description of Artificial Sequence: Synthetic oligonucleotide
  Sense strand starting at position 2676 of SEQ ID NO: 1560378
ugcaguugggucugagaca

SEQ ID NO: 1596092 - RNA, 19 nt, Artificial Sequence
  Description of Artificial Sequence: Synthetic oligonucleotide
  Antisense strand to SEQ ID NO: 1596091
ugucucagacccaacugca

SEQ ID NO: 1596093 - RNA, 19 nt, Artificial Sequence
  Description of Artificial Sequence: Synthetic oligonucleotide
  Sense strand starting at position 2677 of SEQ ID NO: 1560378
gcaguugggucugagacau

SEQ ID NO: 1596094 - RNA, 19 nt, Artificial Sequence
  Description of Artificial Sequence: Synthetic oligonucleotide
  Antisense strand to SEQ ID NO: 1596093
augucucagacccaacugc

SEQ ID NO: 1596095 - RNA, 19 nt, Artificial Sequence
  Description of Artificial Sequence: Synthetic oligonucleotide
  Sense strand starting at position 2805 of SEQ ID NO: 1560378
ccaagcaggucauguaaua

SEQ ID NO: 1596096 - RNA, 19 nt, Artificial Sequence
  Description of Artificial Sequence: Synthetic oligonucleotide
  Antisense strand to SEQ ID NO: 1596095
uauuacaugaccugcuugg

SEQ ID NO: 1596097 - RNA, 19 nt, Artificial Sequence
  Description of Artificial Sequence: Synthetic oligonucleotide
  Sense strand starting at position 3395 of SEQ ID NO: 1560378
auuggaucucgcuguguua

SEQ ID NO: 1596098 - RNA, 19 nt, Artificial Sequence
  Description of Artificial Sequence: Synthetic oligonucleotide
  Antisense strand to SEQ ID NO: 1596097
uaacacagcgagauccaau

SEQ ID NO: 1596099 - RNA, 19 nt, Artificial Sequence
  Description of Artificial Sequence: Synthetic oligonucleotide
  Sense strand starting at position 3540 of SEQ ID NO: 1560378
cagggacccugucauuuaa

SEQ ID NO: 1596100 - RNA, 19 nt, Artificial Sequence
  Description of Artificial Sequence: Synthetic oligonucleotide
  Antisense strand to SEQ ID NO: 1596099
uuaaaugacagggucccug

SEQ ID NO: 1596101 - RNA, 19 nt, Artificial Sequence
  Description of Artificial Sequence: Synthetic oligonucleotide
  Sense strand starting at position 3612 of SEQ ID NO: 1560378
cgcacugugucuuccugua

SEQ ID NO: 1596102 - RNA, 19 nt, Artificial Sequence
  Description of Artificial Sequence: Synthetic oligonucleotide
  Antisense strand to SEQ ID NO: 1596101
uacaggaagacacagugcg

SEQ ID NO: 1596103 - RNA, 19 nt, Artificial Sequence
  Description of Artificial Sequence: Synthetic oligonucleotide
  Sense strand starting at position 3625 of SEQ ID NO: 1560378
ccuguaccuagauguguuu

SEQ ID NO: 1596104 - RNA, 19 nt, Artificial Sequence
  Description of Artificial Sequence: Synthetic oligonucleotide
  Antisense strand to SEQ ID NO: 1596103
aaacacaucuagguacagg

SEQ ID NO: 1596105 - RNA, 19 nt, Artificial Sequence
  Description of Artificial Sequence: Synthetic oligonucleotide
  Sense strand starting at position 3627 of SEQ ID NO: 1560378
uguaccuagauguguuuau

SEQ ID NO: 1596106 - RNA, 19 nt, Artificial Sequence
  Description of Artificial Sequence: Synthetic oligonucleotide
  Antisense strand to SEQ ID NO: 1596105
auaaacacaucuagguaca

SEQ ID NO: 1596107 - RNA, 19 nt, Artificial Sequence
  Description of Artificial Sequence: Synthetic oligonucleotide
  Sense strand starting at position 213 of SEQ ID NO: 1560379
ugaguccugagcugcaaga

SEQ ID NO: 1596108 - RNA, 19 nt, Artificial Sequence
  Description of Artificial Sequence: Synthetic oligonucleotide
  Antisense strand to SEQ ID NO: 1596107
ucuugcagcucaggacuca

SEQ ID NO: 1596109 - RNA, 19 nt, Artificial Sequence
  Description of Artificial Sequence: Synthetic oligonucleotide
  Sense strand starting at position 683 of SEQ ID NO: 1560379
ugaguaguuacgcacggaa

SEQ ID NO: 1596110 - RNA, 19 nt, Artificial Sequence
  Description of Artificial Sequence: Synthetic oligonucleotide
  Antisense strand to SEQ ID NO: 1596109
uuccgugcguaacuacuca

SEQ ID NO: 1596111 - RNA, 19 nt, Artificial Sequence
  Description of Artificial Sequence: Synthetic oligonucleotide
  Sense strand starting at position 686 of SEQ ID NO: 1560379
guaguuacgcacggaauga

SEQ ID NO: 1596112 - RNA, 19 nt, Artificial Sequence
  Description of Artificial Sequence: Synthetic oligonucleotide
  Antisense strand to SEQ ID NO: 1596111
ucauuccgugcguaacuac

SEQ ID NO: 1596113 - RNA, 19 nt, Artificial Sequence
  Description of Artificial Sequence: Synthetic oligonucleotide
  Sense strand starting at position 687 of SEQ ID NO: 1560379
uaguuacgcacggaaugau

SEQ ID NO: 1596114 - RNA, 19 nt, Artificial Sequence
  Description of Artificial Sequence: Synthetic oligonucleotide
  Antisense strand to SEQ ID NO: 1596113
aucauuccgugcguaacua

SEQ ID NO: 1596115 - RNA, 19 nt, Artificial Sequence
  Description of Artificial Sequence: Synthetic oligonucleotide
  Sense strand starting at position 759 of SEQ ID NO: 1560379
gcuccagaacccuggaaau

SEQ ID NO: 1596116 - RNA, 19 nt, Artificial Sequence
  Description of Artificial Sequence: Synthetic oligonucleotide
  Antisense strand to SEQ ID NO: 1596115
auuuccaggguucuggagc

SEQ ID NO: 1596117 - RNA, 19 nt, Artificial Sequence
  Description of Artificial Sequence: Synthetic oligonucleotide
  Sense strand starting at position 1064 of SEQ ID NO: 1560379
acuccaacuugggaacauu

SEQ ID NO: 1596118 - RNA, 19 nt, Artificial Sequence
  Description of Artificial Sequence: Synthetic oligonucleotide
  Antisense strand to SEQ ID NO: 1596117
aauguucccaaguuggagu

SEQ ID NO: 1596119 - RNA, 19 nt, Artificial Sequence
  Description of Artificial Sequence: Synthetic oligonucleotide
  Sense strand starting at position 1263 of SEQ ID NO: 1560379
gcgcuugcugguucacaga

SEQ ID NO: 1596120 - RNA, 19 nt, Artificial Sequence
  Description of Artificial Sequence: Synthetic oligonucleotide
  Antisense strand to SEQ ID NO: 1596119
ucugugaaccagcaagcgc

SEQ ID NO: 1596121 - RNA, 19 nt, Artificial Sequence
  Description of Artificial Sequence: Synthetic oligonucleotide
  Sense strand starting at position 1383 of SEQ ID NO: 1560379
gcaagucccaggugugaga

SEQ ID NO: 1596122 - RNA, 19 nt, Artificial Sequence
  Description of Artificial Sequence: Synthetic oligonucleotide
  Antisense strand to SEQ ID NO: 1596121
ucucacaccugggacuugc

SEQ ID NO: 1596123 - RNA, 19 nt, Artificial Sequence
  Description of Artificial Sequence: Synthetic oligonucleotide
  Sense strand starting at position 1601 of SEQ ID NO: 1560379
gcacuaucgggauggcaca

SEQ ID NO: 1596124 - RNA, 19 nt, Artificial Sequence
  Description of Artificial Sequence: Synthetic oligonucleotide
  Antisense strand to SEQ ID NO: 1596123
ugugccaucccgauagugc

SEQ ID NO: 1596125 - RNA, 19 nt, Artificial Sequence
  Description of Artificial Sequence: Synthetic oligonucleotide
  Sense strand starting at position 1642 of SEQ ID NO: 1560379
acacuaagcgcucaauaaa

SEQ ID NO: 1596126 - RNA, 19 nt, Artificial Sequence
  Description of Artificial Sequence: Synthetic oligonucleotide
  Antisense strand to SEQ ID NO: 1596125
uuuauugagcgcuuagugu

SEQ ID NO: 1596127 - RNA, 19 nt, Artificial Sequence
  Description of Artificial Sequence: Synthetic oligonucleotide
  Sense strand starting at position 1654 of SEQ ID NO: 1560379
caauaaaugucagcgguca

SEQ ID NO: 1596128 - RNA, 19 nt, Artificial Sequence
  Description of Artificial Sequence: Synthetic oligonucleotide
  Antisense strand to SEQ ID NO: 1596127
ugaccgcugacauuuauug

SEQ ID NO: 1596129 - RNA, 19 nt, Artificial Sequence
  Description of Artificial Sequence: Synthetic oligonucleotide
  Sense strand starting at position 1662 of SEQ ID NO: 1560379
gucagcggucauugugauu

SEQ ID NO: 1596130 - RNA, 19 nt, Artificial Sequence
  Description of Artificial Sequence: Synthetic oligonucleotide
  Antisense strand to SEQ ID NO: 1596129
aaucacaaugaccgcugac

SEQ ID NO: 1596131 - RNA, 19 nt, Artificial Sequence
  Description of Artificial Sequence: Synthetic oligonucleotide
  Sense strand starting at position 1665 of SEQ ID NO: 1560379
agcggucauugugauuaga

SEQ ID NO: 1596132 - RNA, 19 nt, Artificial Sequence
  Description of Artificial Sequence: Synthetic oligonucleotide
  Antisense strand to SEQ ID NO: 1596131
ucuaaucacaaugaccgcu

SEQ ID NO: 1596133 - RNA, 19 nt, Artificial Sequence
  Description of Artificial Sequence: Synthetic oligonucleotide
  Sense strand starting at position 1667 of SEQ ID NO: 1560379
cggucauugugauuagaaa

SEQ ID NO: 1596134 - RNA, 19 nt, Artificial Sequence
  Description of Artificial Sequence: Synthetic oligonucleotide
  Antisense strand to SEQ ID NO: 1596133
uuucuaaucacaaugaccg

SEQ ID NO: 1596135 - RNA, 19 nt, Artificial Sequence
  Description of Artificial Sequence: Synthetic oligonucleotide
  Sense strand starting at position 2277 of SEQ ID NO: 1560379
ggccgucuccaggaauuaa

SEQ ID NO: 1596136 - RNA, 19 nt, Artificial Sequence
  Description of Artificial Sequence: Synthetic oligonucleotide
  Antisense strand to SEQ ID NO: 1596135
uuaauuccuggagacggcc

SEQ ID NO: 1596137 - RNA, 19 nt, Artificial Sequence
  Description of Artificial Sequence: Synthetic oligonucleotide
  Sense strand starting at position 2374 of SEQ ID NO: 1560379
gcaucccguuucugugauu

SEQ ID NO: 1596138 - RNA, 19 nt, Artificial Sequence
  Description of Artificial Sequence: Synthetic oligonucleotide
  Antisense strand to SEQ ID NO: 1596137
aaucacagaaacgggaugc

SEQ ID NO: 1596139 - RNA, 19 nt, Artificial Sequence
  Description of Artificial Sequence: Synthetic oligonucleotide
  Sense strand starting at position 2375 of SEQ ID NO: 1560379
caucccguuucugugauuu

SEQ ID NO: 1596140 - RNA, 19 nt, Artificial Sequence
  Description of Artificial Sequence: Synthetic oligonucleotide
  Antisense strand to SEQ ID NO: 1596139
aaaucacagaaacgggaug

SEQ ID NO: 1596141 - RNA, 19 nt, Artificial Sequence
  Description of Artificial Sequence: Synthetic oligonucleotide
  Sense strand starting at position 2379 of SEQ ID NO: 1560379
ccguuucugugauuugcau

SEQ ID NO: 1596142 - RNA, 19 nt, Artificial Sequence
  Description of Artificial Sequence: Synthetic oligonucleotide
  Antisense strand to SEQ ID NO: 1596141
augcaaaucacagaaacgg

SEQ ID NO: 1596143 - RNA, 19 nt, Artificial Sequence
  Description of Artificial Sequence: Synthetic oligonucleotide
  Sense strand starting at position 2381 of SEQ ID NO: 1560379
guuucugugauuugcaugu

SEQ ID NO: 1596144 - RNA, 19 nt, Artificial Sequence
  Description of Artificial Sequence: Synthetic oligonucleotide
  Antisense strand to SEQ ID NO: 1596143
acaugcaaaucacagaaac

SEQ ID NO: 1596145 - RNA, 19 nt, Artificial Sequence
  Description of Artificial Sequence: Synthetic oligonucleotide
  Sense strand starting at position 2487 of SEQ ID NO: 1560379
ggauaugguucccugcuca

SEQ ID NO: 1596146 - RNA, 19 nt, Artificial Sequence
  Description of Artificial Sequence: Synthetic oligonucleotide
  Antisense strand to SEQ ID NO: 1596145
ugagcagggaaccauaucc

SEQ ID NO: 1596147 - RNA, 19 nt, Artificial Sequence
  Description of Artificial Sequence: Synthetic oligonucleotide
  Sense strand starting at position 2802 of SEQ ID NO: 1560379
caagaauguuuacuagguu

SEQ ID NO: 1596148 - RNA, 19 nt, Artificial Sequence
  Description of Artificial Sequence: Synthetic oligonucleotide
  Antisense strand to SEQ ID NO: 1596147
aaccuaguaaacauucuug

SEQ ID NO: 1596149 - RNA, 19 nt, Artificial Sequence
  Description of Artificial Sequence: Synthetic oligonucleotide
  Sense strand starting at position 2803 of SEQ ID NO: 1560379
aagaauguuuacuagguuu

SEQ ID NO: 1596150 - RNA, 19 nt, Artificial Sequence
  Description of Artificial Sequence: Synthetic oligonucleotide
  Antisense strand to SEQ ID NO: 1596149
aaaccuaguaaacauucuu

SEQ ID NO: 1596151 - RNA, 19 nt, Artificial Sequence
  Description of Artificial Sequence: Synthetic oligonucleotide
  Sense strand starting at position 2864 of SEQ ID NO: 1560379
aggcguuuccaacaaugua

SEQ ID NO: 1596152 - RNA, 19 nt, Artificial Sequence
  Description of Artificial Sequence: Synthetic oligonucleotide
  Antisense strand to SEQ ID NO: 1596151
uacauuguuggaaacgccu

SEQ ID NO: 1596153 - RNA, 19 nt, Artificial Sequence
  Description of Artificial Sequence: Synthetic oligonucleotide
  Sense strand starting at position 2867 of SEQ ID NO: 1560379
cguuuccaacaauguauga

SEQ ID NO: 1596154 - RNA, 19 nt, Artificial Sequence
  Description of Artificial Sequence: Synthetic oligonucleotide
  Antisense strand to SEQ ID NO: 1596153
ucauacauuguuggaaacg

SEQ ID NO: 1596155 - RNA, 19 nt, Artificial Sequence
  Description of Artificial Sequence: Synthetic oligonucleotide
  Sense strand starting at position 2877 of SEQ ID NO: 1560379
aauguaugacagcgacauc

SEQ ID NO: 1596156 - RNA, 19 nt, Artificial Sequence
  Description of Artificial Sequence: Synthetic oligonucleotide
  Antisense strand to SEQ ID NO: 1596155
gaugucgcugucauacauu

SEQ ID NO: 1596157 - RNA, 19 nt, Artificial Sequence
  Description of Artificial Sequence: Synthetic oligonucleotide
  Sense strand starting at position 2926 of SEQ ID NO: 1560379
gggcuuucgugcagccaga

SEQ ID NO: 1596158 - RNA, 19 nt, Artificial Sequence
  Description of Artificial Sequence: Synthetic oligonucleotide
  Antisense strand to SEQ ID NO: 1596157
ucuggcugcacgaaagccc

SEQ ID NO: 1596159 - RNA, 19 nt, Artificial Sequence
  Description of Artificial Sequence: Synthetic oligonucleotide
  Sense strand starting at position 3036 of SEQ ID NO: 1560379
cuucuagggcaucagugaa

SEQ ID NO: 1596160 - RNA, 19 nt, Artificial Sequence
  Description of Artificial Sequence: Synthetic oligonucleotide
  Antisense strand to SEQ ID NO: 1596159
uucacugaugcccuagaag

SEQ ID NO: 1596161 - RNA, 19 nt, Artificial Sequence
  Description of Artificial Sequence: Synthetic oligonucleotide
  Sense strand starting at position 3354 of SEQ ID NO: 1560379
gagugagaucugugcccac

SEQ ID NO: 1596162 - RNA, 19 nt, Artificial Sequence
  Description of Artificial Sequence: Synthetic oligonucleotide
  Antisense strand to SEQ ID NO: 1596161
gugggcacagaucucacuc

SEQ ID NO: 1596163 - RNA, 19 nt, Artificial Sequence
  Description of Artificial Sequence: Synthetic oligonucleotide
  Sense strand starting at position 3357 of SEQ ID NO: 1560379
ugagaucugugcccacaga

SEQ ID NO: 1596164 - RNA, 19 nt, Artificial Sequence
  Description of Artificial Sequence: Synthetic oligonucleotide
  Antisense strand to SEQ ID NO: 1596163
ucugugggcacagaucuca

SEQ ID NO: 1596165 - RNA, 19 nt, Artificial Sequence
  Description of Artificial Sequence: Synthetic oligonucleotide
  Sense strand starting at position 3358 of SEQ ID NO: 1560379
gagaucugugcccacagaa

SEQ ID NO: 1596166 - RNA, 19 nt, Artificial Sequence
  Description of Artificial Sequence: Synthetic oligonucleotide
  Antisense strand to SEQ ID NO: 1596165
uucugugggcacagaucuc

SEQ ID NO: 1596167 - RNA, 19 nt, Artificial Sequence
  Description of Artificial Sequence: Synthetic oligonucleotide
  Sense strand starting at position 3666 of SEQ ID NO: 1560379
gacccuguguucucacuga

SEQ ID NO: 1596168 - RNA, 19 nt, Artificial Sequence
  Description of Artificial Sequence: Synthetic oligonucleotide
  Antisense strand to SEQ ID NO: 1596167
ucagugagaacacaggguc

SEQ ID NO: 1596169 - RNA, 19 nt, Artificial Sequence
  Description of Artificial Sequence: Synthetic oligonucleotide
  Sense strand starting at position 3840 of SEQ ID NO: 1560379
ccgggacucucccgggauu

SEQ ID NO: 1596170 - RNA, 19 nt, Artificial Sequence
  Description of Artificial Sequence: Synthetic oligonucleotide
  Antisense strand to SEQ ID NO: 1596169
aaucccgggagagucccgg

SEQ ID NO: 1596171 - RNA, 19 nt, Artificial Sequence
  Description of Artificial Sequence: Synthetic oligonucleotide
  Sense strand starting at position 3883 of SEQ ID NO: 1560379
cuguguucucacugaggau

SEQ ID NO: 1596172 - RNA, 19 nt, Artificial Sequence
  Description of Artificial Sequence: Synthetic oligonucleotide
  Antisense strand to SEQ ID NO: 1596171
auccucagugagaacacag

SEQ ID NO: 1596173 - RNA, 19 nt, Artificial Sequence
  Description of Artificial Sequence: Synthetic oligonucleotide
  Sense strand starting at position 3974 of SEQ ID NO: 1560379
gugcgaaucaaagggucau

SEQ ID NO: 1596174 - RNA, 19 nt, Artificial Sequence
  Description of Artificial Sequence: Synthetic oligonucleotide
  Antisense strand to SEQ ID NO: 1596173
augacccuuugauucgcac

SEQ ID NO: 1596175 - RNA, 19 nt, Artificial Sequence
  Description of Artificial Sequence: Synthetic oligonucleotide
  Sense strand starting at position 3975 of SEQ ID NO: 1560379
ugcgaaucaaagggucauu

SEQ ID NO: 1596176 - RNA, 19 nt, Artificial Sequence
  Description of Artificial Sequence: Synthetic oligonucleotide
  Antisense strand to SEQ ID NO: 1596175
aaugacccuuugauucgca

SEQ ID NO: 1596177 - RNA, 19 nt, Artificial Sequence
  Description of Artificial Sequence: Synthetic oligonucleotide
  Sense strand starting at position 143 of SEQ ID NO: 1560380
guuaaauagggcuguuucu

SEQ ID NO: 1596178 - RNA, 19 nt, Artificial Sequence
  Description of Artificial Sequence: Synthetic oligonucleotide
  Antisense strand to SEQ ID NO: 1596177
agaaacagcccuauuuaac

SEQ ID NO: 1596179 - RNA, 19 nt, Artificial Sequence
  Description of Artificial Sequence: Synthetic oligonucleotide
  Sense strand starting at position 152 of SEQ ID NO: 1560380
ggcuguuucuggcugagac

SEQ ID NO: 1596180 - RNA, 19 nt, Artificial Sequence
  Description of Artificial Sequence: Synthetic oligonucleotide
  Antisense strand to SEQ ID NO: 1596179
gucucagccagaaacagcc

SEQ ID NO: 1596181 - RNA, 19 nt, Artificial Sequence
  Description of Artificial Sequence: Synthetic oligonucleotide
  Sense strand starting at position 156 of SEQ ID NO: 1560380
guuucuggcugagaccuaa

SEQ ID NO: 1596182 - RNA, 19 nt, Artificial Sequence
  Description of Artificial Sequence: Synthetic oligonucleotide
  Antisense strand to SEQ ID NO: 1596181
uuaggucucagccagaaac

SEQ ID NO: 1596183 - RNA, 19 nt, Artificial Sequence
  Description of Artificial Sequence: Synthetic oligonucleotide
  Sense strand starting at position 302 of SEQ ID NO: 1560380
cuugucuuaggacaguuaa

SEQ ID NO: 1596184 - RNA, 19 nt, Artificial Sequence
  Description of Artificial Sequence: Synthetic oligonucleotide
  Antisense strand to SEQ ID NO: 1596183
uuaacuguccuaagacaag

SEQ ID NO: 1596185 - RNA, 19 nt, Artificial Sequence
  Description of Artificial Sequence: Synthetic oligonucleotide
  Sense strand starting at position 370 of SEQ ID NO: 1560380
ccagaagcuuuaugagaac

SEQ ID NO: 1596186 - RNA, 19 nt, Artificial Sequence
  Description of Artificial Sequence: Synthetic oligonucleotide
  Antisense strand to SEQ ID NO: 1596185
guucucauaaagcuucugg

SEQ ID NO: 1596187 - RNA, 19 nt, Artificial Sequence
  Description of Artificial Sequence: Synthetic oligonucleotide
  Sense strand starting at position 785 of SEQ ID NO: 1560380
cagccaguugcagauuaaa

SEQ ID NO: 1596188 - RNA, 19 nt, Artificial Sequence
  Description of Artificial Sequence: Synthetic oligonucleotide
  Antisense strand to SEQ ID NO: 1596187
uuuaaucugcaacuggcug

SEQ ID NO: 1596189 - RNA, 19 nt, Artificial Sequence
  Description of Artificial Sequence: Synthetic oligonucleotide
  Sense strand starting at position 802 of SEQ ID NO: 1560380
aaaugugacaggugugaaa

SEQ ID NO: 1596190 - RNA, 19 nt, Artificial Sequence
  Description of Artificial Sequence: Synthetic oligonucleotide
  Antisense strand to SEQ ID NO: 1596189
uuucacaccugucacauuu

SEQ ID NO: 1596191 - RNA, 19 nt, Artificial Sequence
  Description of Artificial Sequence: Synthetic oligonucleotide
  Sense strand starting at position 804 of SEQ ID NO: 1560380
augugacaggugugaaaug

SEQ ID NO: 1596192 - RNA, 19 nt, Artificial Sequence
  Description of Artificial Sequence: Synthetic oligonucleotide
  Antisense strand to SEQ ID NO: 1596191
cauuucacaccugucacau

SEQ ID NO: 1596193 - RNA, 19 nt, Artificial Sequence
  Description of Artificial Sequence: Synthetic oligonucleotide
  Sense strand starting at position 818 of SEQ ID NO: 1560380
aaaugaggcucugaaggaa

SEQ ID NO: 1596194 - RNA, 19 nt, Artificial Sequence
  Description of Artificial Sequence: Synthetic oligonucleotide
  Antisense strand to SEQ ID NO: 1596193
uuccuucagagccucauuu

SEQ ID NO: 1596195 - RNA, 19 nt, Artificial Sequence
  Description of Artificial Sequence: Synthetic oligonucleotide
  Sense strand starting at position 1043 of SEQ ID NO: 1560380
agaaauggcucagaauaca

SEQ ID NO: 1596196 - RNA, 19 nt, Artificial Sequence
  Description of Artificial Sequence: Synthetic oligonucleotide
  Antisense strand to SEQ ID NO: 1596195
uguauucugagccauuucu

SEQ ID NO: 1596197 - RNA, 19 nt, Artificial Sequence
  Description of Artificial Sequence: Synthetic oligonucleotide
  Sense strand starting at position 1136 of SEQ ID NO: 1560380
ugugacagcuuguauuuau

SEQ ID NO: 1596198 - RNA, 19 nt, Artificial Sequence
  Description of Artificial Sequence: Synthetic oligonucleotide
  Antisense strand to SEQ ID NO: 1596197
auaaauacaagcugucaca

SEQ ID NO: 1596199 - RNA, 19 nt, Artificial Sequence
  Description of Artificial Sequence: Synthetic oligonucleotide
  Sense strand starting at position 1184 of SEQ ID NO: 1560380
agcuauacgucccuaagac

SEQ ID NO: 1596200 - RNA, 19 nt, Artificial Sequence
  Description of Artificial Sequence: Synthetic oligonucleotide
  Antisense strand to SEQ ID NO: 1596199
gucuuagggacguauagcu

SEQ ID NO: 1596201 - RNA, 19 nt, Artificial Sequence
  Description of Artificial Sequence: Synthetic oligonucleotide
  Sense strand starting at position 1253 of SEQ ID NO: 1560380
cucuauuuccagcgguuaa

SEQ ID NO: 1596202 - RNA, 19 nt, Artificial Sequence
  Description of Artificial Sequence: Synthetic oligonucleotide
  Antisense strand to SEQ ID NO: 1596201
uuaaccgcuggaaauagag

SEQ ID NO: 1596203 - RNA, 19 nt, Artificial Sequence
  Description of Artificial Sequence: Synthetic oligonucleotide
  Sense strand starting at position 1254 of SEQ ID NO: 1560380
ucuauuuccagcgguuaag

SEQ ID NO: 1596204 - RNA, 19 nt, Artificial Sequence
  Description of Artificial Sequence: Synthetic oligonucleotide
  Antisense strand to SEQ ID NO: 1596203
cuuaaccgcuggaaauaga

SEQ ID NO: 1596205 - RNA, 19 nt, Artificial Sequence
  Description of Artificial Sequence: Synthetic oligonucleotide
  Sense strand starting at position 1287 of SEQ ID NO: 1560380
cgaacucaaucucccagaa

SEQ ID NO: 1596206 - RNA, 19 nt, Artificial Sequence
  Description of Artificial Sequence: Synthetic oligonucleotide
  Antisense strand to SEQ ID NO: 1596205
uucugggagauugaguucg

SEQ ID NO: 1596207 - RNA, 19 nt, Artificial Sequence
  Description of Artificial Sequence: Synthetic oligonucleotide
  Sense strand starting at position 2449 of SEQ ID NO: 1560380
ccuguaguugccugagguu

SEQ ID NO: 1596208 - RNA, 19 nt, Artificial Sequence
  Description of Artificial Sequence: Synthetic oligonucleotide
  Antisense strand to SEQ ID NO: 1596207
aaccucaggcaacuacagg

SEQ ID NO: 1596209 - RNA, 19 nt, Artificial Sequence
  Description of Artificial Sequence: Synthetic oligonucleotide
  Sense strand starting at position 2461 of SEQ ID NO: 1560380
ugagguuugcgcugcgaga

SEQ ID NO: 1596210 - RNA, 19 nt, Artificial Sequence
  Description of Artificial Sequence: Synthetic oligonucleotide
  Antisense strand to SEQ ID NO: 1596209
ucucgcagcgcaaaccuca

SEQ ID NO: 1596211 - RNA, 19 nt, Artificial Sequence
  Description of Artificial Sequence: Synthetic oligonucleotide
  Sense strand starting at position 2462 of SEQ ID NO: 1560380
gagguuugcgcugcgagau

SEQ ID NO: 1596212 - RNA, 19 nt, Artificial Sequence
  Description of Artificial Sequence: Synthetic oligonucleotide
  Antisense strand to SEQ ID NO: 1596211
aucucgcagcgcaaaccuc

SEQ ID NO: 1596213 - RNA, 19 nt, Artificial Sequence
  Description of Artificial Sequence: Synthetic oligonucleotide
  Sense strand starting at position 2463 of SEQ ID NO: 1560380
agguuugcgcugcgagaua

SEQ ID NO: 1596214 - RNA, 19 nt, Artificial Sequence
  Description of Artificial Sequence: Synthetic oligonucleotide
  Antisense strand to SEQ ID NO: 1596213
uaucucgcagcgcaaaccu

SEQ ID NO: 1596215 - RNA, 19 nt, Artificial Sequence
  Description of Artificial Sequence: Synthetic oligonucleotide
  Sense strand starting at position 2511 of SEQ ID NO: 1560380
aaggcugugagguguuauu

SEQ ID NO: 1596216 - RNA, 19 nt, Artificial Sequence
  Description of Artificial Sequence: Synthetic oligonucleotide
  Antisense strand to SEQ ID NO: 1596215
aauaacaccucacagccuu

SEQ ID NO: 1596217 - RNA, 19 nt, Artificial Sequence
  Description of Artificial Sequence: Synthetic oligonucleotide
  Sense strand starting at position 2642 of SEQ ID NO: 1560380
gggaaaucuuuagguucuu

SEQ ID NO: 1596218 - RNA, 19 nt, Artificial Sequence
  Description of Artificial Sequence: Synthetic oligonucleotide
  Antisense strand to SEQ ID NO: 1596217
aagaaccuaaagauuuccc

SEQ ID NO: 1596219 - RNA, 19 nt, Artificial Sequence
  Description of Artificial Sequence: Synthetic oligonucleotide
  Sense strand starting at position 2685 of SEQ ID NO: 1560380
gcaguuauucuggagccgu

SEQ ID NO: 1596220 - RNA, 19 nt, Artificial Sequence
  Description of Artificial Sequence: Synthetic oligonucleotide
  Antisense strand to SEQ ID NO: 1596219
acggcuccagaauaacugc

SEQ ID NO: 1596221 - RNA, 19 nt, Artificial Sequence
  Description of Artificial Sequence: Synthetic oligonucleotide
  Sense strand starting at position 2732 of SEQ ID NO: 1560380
aggagcauuguaugaggua

SEQ ID NO: 1596222 - RNA, 19 nt, Artificial Sequence
  Description of Artificial Sequence: Synthetic oligonucleotide
  Antisense strand to SEQ ID NO: 1596221
uaccucauacaaugcuccu

SEQ ID NO: 1596223 - RNA, 19 nt, Artificial Sequence
  Description of Artificial Sequence: Synthetic oligonucleotide
  Sense strand starting at position 2751 of SEQ ID NO: 1560380
gggugacuucuggaacccu

SEQ ID NO: 1596224 - RNA, 19 nt, Artificial Sequence
  Description of Artificial Sequence: Synthetic oligonucleotide
  Antisense strand to SEQ ID NO: 1596223
aggguuccagaagucaccc

SEQ ID NO: 1596225 - RNA, 19 nt, Artificial Sequence
  Description of Artificial Sequence: Synthetic oligonucleotide
  Sense strand starting at position 2933 of SEQ ID NO: 1560380
ggagacaacucacagacuu

SEQ ID NO: 1596226 - RNA, 19 nt, Artificial Sequence
  Description of Artificial Sequence: Synthetic oligonucleotide
  Antisense strand to SEQ ID NO: 1596225
aagucugugaguugucucc

SEQ ID NO: 1596227 - RNA, 19 nt, Artificial Sequence
  Description of Artificial Sequence: Synthetic oligonucleotide
  Sense strand starting at position 2940 of SEQ ID NO: 1560380
acucacagacuucgagaau

SEQ ID NO: 1596228 - RNA, 19 nt, Artificial Sequence
  Description of Artificial Sequence: Synthetic oligonucleotide
  Antisense strand to SEQ ID NO: 1596227
auucucgaagucugugagu

SEQ ID NO: 1596229 - RNA, 19 nt, Artificial Sequence
  Description of Artificial Sequence: Synthetic oligonucleotide
  Sense strand starting at position 2941 of SEQ ID NO: 1560380
cucacagacuucgagaauu

SEQ ID NO: 1596230 - RNA, 19 nt, Artificial Sequence
  Description of Artificial Sequence: Synthetic oligonucleotide
  Antisense strand to SEQ ID NO: 1596229
aauucucgaagucugugag

SEQ ID NO: 1596231 - RNA, 19 nt, Artificial Sequence
  Description of Artificial Sequence: Synthetic oligonucleotide
  Sense strand starting at position 2953 of SEQ ID NO: 1560380
gagaauucuccguggcccu

SEQ ID NO: 1596232 - RNA, 19 nt, Artificial Sequence
  Description of Artificial Sequence: Synthetic oligonucleotide
  Antisense strand to SEQ ID NO: 1596231
agggccacggagaauucuc

SEQ ID NO: 1596233 - RNA, 19 nt, Artificial Sequence
  Description of Artificial Sequence: Synthetic oligonucleotide
  Sense strand starting at position 2969 of SEQ ID NO: 1560380
ccugaacagugucucugaa

SEQ ID NO: 1596234 - RNA, 19 nt, Artificial Sequence
  Description of Artificial Sequence: Synthetic oligonucleotide
  Antisense strand to SEQ ID NO: 1596233
uucagagacacuguucagg

SEQ ID NO: 1596235 - RNA, 19 nt, Artificial Sequence
  Description of Artificial Sequence: Synthetic oligonucleotide
  Sense strand starting at position 2971 of SEQ ID NO: 1560380
ugaacagugucucugaagu

SEQ ID NO: 1596236 - RNA, 19 nt, Artificial Sequence
  Description of Artificial Sequence: Synthetic oligonucleotide
  Antisense strand to SEQ ID NO: 1596235
acuucagagacacuguuca

SEQ ID NO: 1596237 - RNA, 19 nt, Artificial Sequence
  Description of Artificial Sequence: Synthetic oligonucleotide
  Sense strand starting at position 3074 of SEQ ID NO: 1560380
ggacgagacgucugucuuc

SEQ ID NO: 1596238 - RNA, 19 nt, Artificial Sequence
  Description of Artificial Sequence: Synthetic oligonucleotide
  Antisense strand to SEQ ID NO: 1596237
gaagacagacgucucgucc

SEQ ID NO: 1596239 - RNA, 19 nt, Artificial Sequence
  Description of Artificial Sequence: Synthetic oligonucleotide
  Sense strand starting at position 3079 of SEQ ID NO: 1560380
agacgucugucuucgacua

SEQ ID NO: 1596240 - RNA, 19 nt, Artificial Sequence
  Description of Artificial Sequence: Synthetic oligonucleotide
  Antisense strand to SEQ ID NO: 1596239
uagucgaagacagacgucu

SEQ ID NO: 1596241 - RNA, 19 nt, Artificial Sequence
  Description of Artificial Sequence: Synthetic oligonucleotide
  Sense strand starting at position 3080 of SEQ ID NO: 1560380
gacgucugucuucgacuaa

SEQ ID NO: 1596242 - RNA, 19 nt, Artificial Sequence
  Description of Artificial Sequence: Synthetic oligonucleotide
  Antisense strand to SEQ ID NO: 1596241
uuagucgaagacagacguc

SEQ ID NO: 1596243 - RNA, 19 nt, Artificial Sequence
  Description of Artificial Sequence: Synthetic oligonucleotide
  Sense strand starting at position 3084 of SEQ ID NO: 1560380
ucugucuucgacuaaugca

SEQ ID NO: 1596244 - RNA, 19 nt, Artificial Sequence
  Description of Artificial Sequence: Synthetic oligonucleotide
  Antisense strand to SEQ ID NO: 1596243
ugcauuagucgaagacaga

SEQ ID NO: 1596245 - RNA, 19 nt, Artificial Sequence
  Description of Artificial Sequence: Synthetic oligonucleotide
  Sense strand starting at position 3125 of SEQ ID NO: 1560380
cacguugauuucugggaga

SEQ ID NO: 1596246 - RNA, 19 nt, Artificial Sequence
  Description of Artificial Sequence: Synthetic oligonucleotide
  Antisense strand to SEQ ID NO: 1596245
ucucccagaaaucaacgug

SEQ ID NO: 1596247 - RNA, 19 nt, Artificial Sequence
  Description of Artificial Sequence: Synthetic oligonucleotide
  Sense strand starting at position 3151 of SEQ ID NO: 1560380
ggcgcaaaccuugacucua

SEQ ID NO: 1596248 - RNA, 19 nt, Artificial Sequence
  Description of Artificial Sequence: Synthetic oligonucleotide
  Antisense strand to SEQ ID NO: 1596247
uagagucaagguuugcgcc

SEQ ID NO: 1596249 - RNA, 19 nt, Artificial Sequence
  Description of Artificial Sequence: Synthetic oligonucleotide
  Sense strand starting at position 3169 of SEQ ID NO: 1560380
acuuaagugcccugaugga

SEQ ID NO: 1596250 - RNA, 19 nt, Artificial Sequence
  Description of Artificial Sequence: Synthetic oligonucleotide
  Antisense strand to SEQ ID NO: 1596249
uccaucagggcacuuaagu

SEQ ID NO: 1596251 - RNA, 19 nt, Artificial Sequence
  Description of Artificial Sequence: Synthetic oligonucleotide
  Sense strand starting at position 3361 of SEQ ID NO: 1560380
cugagucaugcugagcuca

SEQ ID NO: 1596252 - RNA, 19 nt, Artificial Sequence
  Description of Artificial Sequence: Synthetic oligonucleotide
  Antisense strand to SEQ ID NO: 1596251
ugagcucagcaugacucag

SEQ ID NO: 1596253 - RNA, 19 nt, Artificial Sequence
  Description of Artificial Sequence: Synthetic oligonucleotide
  Sense strand starting at position 3770 of SEQ ID NO: 1560380
ugucauaccucagcccaga

SEQ ID NO: 1596254 - RNA, 19 nt, Artificial Sequence
  Description of Artificial Sequence: Synthetic oligonucleotide
  Antisense strand to SEQ ID NO: 1596253
ucugggcugagguaugaca

SEQ ID NO: 1596255 - RNA, 19 nt, Artificial Sequence
  Description of Artificial Sequence: Synthetic oligonucleotide
  Sense strand starting at position 3789 of SEQ ID NO: 1560380
gaccuuuagucggccgaga

SEQ ID NO: 1596256 - RNA, 19 nt, Artificial Sequence
  Description of Artificial Sequence: Synthetic oligonucleotide
  Antisense strand to SEQ ID NO: 1596255
ucucggccgacuaaagguc

SEQ ID NO: 1596257 - RNA, 19 nt, Artificial Sequence
  Description of Artificial Sequence: Synthetic oligonucleotide
  Sense strand starting at position 344 of SEQ ID NO: 1560381
gagggugagucguccaaau

SEQ ID NO: 1596258 - RNA, 19 nt, Artificial Sequence
  Description of Artificial Sequence: Synthetic oligonucleotide
  Antisense strand to SEQ ID NO: 1596257
auuuggacgacucacccuc

SEQ ID NO: 1596259 - RNA, 19 nt, Artificial Sequence
  Description of Artificial Sequence: Synthetic oligonucleotide
  Sense strand starting at position 346 of SEQ ID NO: 1560381
gggugagucguccaaauga

SEQ ID NO: 1596260 - RNA, 19 nt, Artificial Sequence
  Description of Artificial Sequence: Synthetic oligonucleotide
  Antisense strand to SEQ ID NO: 1596259
ucauuuggacgacucaccc

SEQ ID NO: 1596261 - RNA, 19 nt, Artificial Sequence
  Description of Artificial Sequence: Synthetic oligonucleotide
  Sense strand starting at position 354 of SEQ ID NO: 1560381
cguccaaaugacugauaag

SEQ ID NO: 1596262 - RNA, 19 nt, Artificial Sequence
  Description of Artificial Sequence: Synthetic oligonucleotide
  Antisense strand to SEQ ID NO: 1596261
cuuaucagucauuuggacg

SEQ ID NO: 1596263 - RNA, 19 nt, Artificial Sequence
  Description of Artificial Sequence: Synthetic oligonucleotide
  Sense strand starting at position 357 of SEQ ID NO: 1560381
ccaaaugacugauaagguc

SEQ ID NO: 1596264 - RNA, 19 nt, Artificial Sequence
  Description of Artificial Sequence: Synthetic oligonucleotide
  Antisense strand to SEQ ID NO: 1596263
gaccuuaucagucauuugg

SEQ ID NO: 1596265 - RNA, 19 nt, Artificial Sequence
  Description of Artificial Sequence: Synthetic oligonucleotide
  Sense strand starting at position 1008 of SEQ ID NO: 1560381
aaaggagauucccuuucgu

SEQ ID NO: 1596266 - RNA, 19 nt, Artificial Sequence
  Description of Artificial Sequence: Synthetic oligonucleotide
  Antisense strand to SEQ ID NO: 1596265
acgaaagggaaucuccuuu

SEQ ID NO: 1596267 - RNA, 19 nt, Artificial Sequence
  Description of Artificial Sequence: Synthetic oligonucleotide
  Sense strand starting at position 1184 of SEQ ID NO: 1560381
guuguuuccugguuauauu

SEQ ID NO: 1596268 - RNA, 19 nt, Artificial Sequence
  Description of Artificial Sequence: Synthetic oligonucleotide
  Antisense strand to SEQ ID NO: 1596267
aauauaaccaggaaacaac

SEQ ID NO: 1596269 - RNA, 19 nt, Artificial Sequence
  Description of Artificial Sequence: Synthetic oligonucleotide
  Sense strand starting at position 1185 of SEQ ID NO: 1560381
uuguuuccugguuauauua

SEQ ID NO: 1596270 - RNA, 19 nt, Artificial Sequence
  Description of Artificial Sequence: Synthetic oligonucleotide
  Antisense strand to SEQ ID NO: 1596269
uaauauaaccaggaaacaa

SEQ ID NO: 1596271 - RNA, 19 nt, Artificial Sequence
  Description of Artificial Sequence: Synthetic oligonucleotide
  Sense strand starting at position 1259 of SEQ ID NO: 1560381
gauugauacuguccaugau

SEQ ID NO: 1596272 - RNA, 19 nt, Artificial Sequence
  Description of Artificial Sequence: Synthetic oligonucleotide
  Antisense strand to SEQ ID NO: 1596271
aucauggacaguaucaauc

SEQ ID NO: 1596273 - RNA, 19 nt, Artificial Sequence
  Description of Artificial Sequence: Synthetic oligonucleotide
  Sense strand starting at position 1260 of SEQ ID NO: 1560381
auugauacuguccaugauc

SEQ ID NO: 1596274 - RNA, 19 nt, Artificial Sequence
  Description of Artificial Sequence: Synthetic oligonucleotide
  Antisense strand to SEQ ID NO: 1596273
gaucauggacaguaucaau

SEQ ID NO: 1596275 - RNA, 19 nt, Artificial Sequence
  Description of Artificial Sequence: Synthetic oligonucleotide
  Sense strand starting at position 1262 of SEQ ID NO: 1560381
ugauacuguccaugaucau

SEQ ID NO: 1596276 - RNA, 19 nt, Artificial Sequence
  Description of Artificial Sequence: Synthetic oligonucleotide
  Antisense strand to SEQ ID NO: 1596275
augaucauggacaguauca

SEQ ID NO: 1596277 - RNA, 19 nt, Artificial Sequence
  Description of Artificial Sequence: Synthetic oligonucleotide
  Sense strand starting at position 1445 of SEQ ID NO: 1560381
acuugauucccagaaguuu

SEQ ID NO: 1596278 - RNA, 19 nt, Artificial Sequence
  Description of Artificial Sequence: Synthetic oligonucleotide
  Antisense strand to SEQ ID NO: 1596277
aaacuucugggaaucaagu

SEQ ID NO: 1596279 - RNA, 19 nt, Artificial Sequence
  Description of Artificial Sequence: Synthetic oligonucleotide
  Sense strand starting at position 2052 of SEQ ID NO: 1560381
ggcuucucuggugaaagaa

SEQ ID NO: 1596280 - RNA, 19 nt, Artificial Sequence
  Description of Artificial Sequence: Synthetic oligonucleotide
  Antisense strand to SEQ ID NO: 1596279
uucuuucaccagagaagcc

SEQ ID NO: 1596281 - RNA, 19 nt, Artificial Sequence
  Description of Artificial Sequence: Synthetic oligonucleotide
  Sense strand starting at position 2133 of SEQ ID NO: 1560381
gacagaugagguugagguu

SEQ ID NO: 1596282 - RNA, 19 nt, Artificial Sequence
  Description of Artificial Sequence: Synthetic oligonucleotide
  Antisense strand to SEQ ID NO: 1596281
aaccucaaccucaucuguc

SEQ ID NO: 1596283 - RNA, 19 nt, Artificial Sequence
  Description of Artificial Sequence: Synthetic oligonucleotide
  Sense strand starting at position 2184 of SEQ ID NO: 1560381
ggauacuugugucucagau

SEQ ID NO: 1596284 - RNA, 19 nt, Artificial Sequence
  Description of Artificial Sequence: Synthetic oligonucleotide
  Antisense strand to SEQ ID NO: 1596283
aucugagacacaaguaucc

SEQ ID NO: 1596285 - RNA, 19 nt, Artificial Sequence
  Description of Artificial Sequence: Synthetic oligonucleotide
  Sense strand starting at position 2247 of SEQ ID NO: 1560381
aaggaaccucagugucaga

SEQ ID NO: 1596286 - RNA, 19 nt, Artificial Sequence
  Description of Artificial Sequence: Synthetic oligonucleotide
  Antisense strand to SEQ ID NO: 1596285
ucugacacugagguuccuu

SEQ ID NO: 1596287 - RNA, 19 nt, Artificial Sequence
  Description of Artificial Sequence: Synthetic oligonucleotide
  Sense strand starting at position 2303 of SEQ ID NO: 1560381
cgcagaaauuucucuuguu

SEQ ID NO: 1596288 - RNA, 19 nt, Artificial Sequence
  Description of Artificial Sequence: Synthetic oligonucleotide
  Antisense strand to SEQ ID NO: 1596287
aacaagagaaauuucugcg

SEQ ID NO: 1596289 - RNA, 19 nt, Artificial Sequence
  Description of Artificial Sequence: Synthetic oligonucleotide
  Sense strand starting at position 2304 of SEQ ID NO: 1560381
gcagaaauuucucuuguuc

SEQ ID NO: 1596290 - RNA, 19 nt, Artificial Sequence
  Description of Artificial Sequence: Synthetic oligonucleotide
  Antisense strand to SEQ ID NO: 1596289
gaacaagagaaauuucugc

SEQ ID NO: 1596291 - RNA, 19 nt, Artificial Sequence
  Description of Artificial Sequence: Synthetic oligonucleotide
  Sense strand starting at position 2306 of SEQ ID NO: 1560381
agaaauuucucuuguucug

SEQ ID NO: 1596292 - RNA, 19 nt, Artificial Sequence
  Description of Artificial Sequence: Synthetic oligonucleotide
  Antisense strand to SEQ ID NO: 1596291
cagaacaagagaaauuucu

SEQ ID NO: 1596293 - RNA, 19 nt, Artificial Sequence
  Description of Artificial Sequence: Synthetic oligonucleotide
  Sense strand starting at position 2322 of SEQ ID NO: 1560381
cugcgugaucugcauagau

SEQ ID NO: 1596294 - RNA, 19 nt, Artificial Sequence
  Description of Artificial Sequence: Synthetic oligonucleotide
  Antisense strand to SEQ ID NO: 1596293
aucuaugcagaucacgcag

SEQ ID NO: 1596295 - RNA, 19 nt, Artificial Sequence
  Description of Artificial Sequence: Synthetic oligonucleotide
  Sense strand starting at position 2324 of SEQ ID NO: 1560381
gcgugaucugcauagaugg

SEQ ID NO: 1596296 - RNA, 19 nt, Artificial Sequence
  Description of Artificial Sequence: Synthetic oligonucleotide
  Antisense strand to SEQ ID NO: 1596295
ccaucuaugcagaucacgc

SEQ ID NO: 1596297 - RNA, 19 nt, Artificial Sequence
  Description of Artificial Sequence: Synthetic oligonucleotide
  Sense strand starting at position 2331 of SEQ ID NO: 1560381
cugcauagaugguccaaga

SEQ ID NO: 1596298 - RNA, 19 nt, Artificial Sequence
  Description of Artificial Sequence: Synthetic oligonucleotide
  Antisense strand to SEQ ID NO: 1596297
ucuuggaccaucuaugcag

SEQ ID NO: 1596299 - RNA, 19 nt, Artificial Sequence
  Description of Artificial Sequence: Synthetic oligonucleotide
  Sense strand starting at position 2588 of SEQ ID NO: 1560381
ugccaaaugggucaaauau

SEQ ID NO: 1596300 - RNA, 19 nt, Artificial Sequence
  Description of Artificial Sequence: Synthetic oligonucleotide
  Antisense strand to SEQ ID NO: 1596299
auauuugacccauuuggca

SEQ ID NO: 1596301 - RNA, 19 nt, Artificial Sequence
  Description of Artificial Sequence: Synthetic oligonucleotide
  Sense strand starting at position 2637 of SEQ ID NO: 1560381
cgggccugucuggguauaa

SEQ ID NO: 1596302 - RNA, 19 nt, Artificial Sequence
  Description of Artificial Sequence: Synthetic oligonucleotide
  Antisense strand to SEQ ID NO: 1596301
uuauacccagacaggcccg

SEQ ID NO: 1596303 - RNA, 19 nt, Artificial Sequence
  Description of Artificial Sequence: Synthetic oligonucleotide
  Sense strand starting at position 2638 of SEQ ID NO: 1560381
gggccugucuggguauaaa

SEQ ID NO: 1596304 - RNA, 19 nt, Artificial Sequence
  Description of Artificial Sequence: Synthetic oligonucleotide
  Antisense strand to SEQ ID NO: 1596303
uuuauacccagacaggccc

SEQ ID NO: 1596305 - RNA, 19 nt, Artificial Sequence
  Description of Artificial Sequence: Synthetic oligonucleotide
  Sense strand starting at position 2650 of SEQ ID NO: 1560381
guauaaauucuggagcuuc

SEQ ID NO: 1596306 - RNA, 19 nt, Artificial Sequence
  Description of Artificial Sequence: Synthetic oligonucleotide
  Antisense strand to SEQ ID NO: 1596305
gaagcuccagaauuuauac

SEQ ID NO: 1596307 - RNA, 19 nt, Artificial Sequence
  Description of Artificial Sequence: Synthetic oligonucleotide
  Sense strand starting at position 2693 of SEQ ID NO: 1560381
uguucugucagcugaggau

SEQ ID NO: 1596308 - RNA, 19 nt, Artificial Sequence
  Description of Artificial Sequence: Synthetic oligonucleotide
  Antisense strand to SEQ ID NO: 1596307
auccucagcugacagaaca

SEQ ID NO: 1596309 - RNA, 19 nt, Artificial Sequence
  Description of Artificial Sequence: Synthetic oligonucleotide
  Sense strand starting at position 3312 of SEQ ID NO: 1560381
cuggacucuuggguuugaa

SEQ ID NO: 1596310 - RNA, 19 nt, Artificial Sequence
  Description of Artificial Sequence: Synthetic oligonucleotide
  Antisense strand to SEQ ID NO: 1596309
uucaaacccaagaguccag

SEQ ID NO: 1596311 - RNA, 19 nt, Artificial Sequence
  Description of Artificial Sequence: Synthetic oligonucleotide
  Sense strand starting at position 3315 of SEQ ID NO: 1560381
gacucuuggguuugaagga

SEQ ID NO: 1596312 - RNA, 19 nt, Artificial Sequence
  Description of Artificial Sequence: Synthetic oligonucleotide
  Antisense strand to SEQ ID NO: 1596311
uccuucaaacccaagaguc

SEQ ID NO: 1596313 - RNA, 19 nt, Artificial Sequence
  Description of Artificial Sequence: Synthetic oligonucleotide
  Sense strand starting at position 3352 of SEQ ID NO: 1560381
gacucuugggucugaguug

SEQ ID NO: 1596314 - RNA, 19 nt, Artificial Sequence
  Description of Artificial Sequence: Synthetic oligonucleotide
  Antisense strand to SEQ ID NO: 1596313
caacucagacccaagaguc

SEQ ID NO: 1596315 - RNA, 19 nt, Artificial Sequence
  Description of Artificial Sequence: Synthetic oligonucleotide
  Sense strand starting at position 3495 of SEQ ID NO: 1560381
gggagagguccucgaacca

SEQ ID NO: 1596316 - RNA, 19 nt, Artificial Sequence
  Description of Artificial Sequence: Synthetic oligonucleotide
  Antisense strand to SEQ ID NO: 1596315
ugguucgaggaccucuccc

SEQ ID NO: 1596317 - RNA, 19 nt, Artificial Sequence
  Description of Artificial Sequence: Synthetic oligonucleotide
  Sense strand starting at position 3627 of SEQ ID NO: 1560381
ccuguauggaucggugagu

SEQ ID NO: 1596318 - RNA, 19 nt, Artificial Sequence
  Description of Artificial Sequence: Synthetic oligonucleotide
  Antisense strand to SEQ ID NO: 1596317
acucaccgauccauacagg

SEQ ID NO: 1596319 - RNA, 19 nt, Artificial Sequence
  Description of Artificial Sequence: Synthetic oligonucleotide
  Sense strand starting at position 3628 of SEQ ID NO: 1560381
cuguauggaucggugaguu

SEQ ID NO: 1596320 - RNA, 19 nt, Artificial Sequence
  Description of Artificial Sequence: Synthetic oligonucleotide
  Antisense strand to SEQ ID NO: 1596319
aacucaccgauccauacag

SEQ ID NO: 1596321 - RNA, 19 nt, Artificial Sequence
  Description of Artificial Sequence: Synthetic oligonucleotide
  Sense strand starting at position 3781 of SEQ ID NO: 1560381
ggagguugaaguugucauc

SEQ ID NO: 1596322 - RNA, 19 nt, Artificial Sequence
  Description of Artificial Sequence: Synthetic oligonucleotide
  Antisense strand to SEQ ID NO: 1596321
gaugacaacuucaaccucc

SEQ ID NO: 1596323 - RNA, 19 nt, Artificial Sequence
  Description of Artificial Sequence: Synthetic oligonucleotide
  Sense strand starting at position 3787 of SEQ ID NO: 1560381
ugaaguugucaucaguguu

SEQ ID NO: 1596324 - RNA, 19 nt, Artificial Sequence
  Description of Artificial Sequence: Synthetic oligonucleotide
  Antisense strand to SEQ ID NO: 1596323
aacacugaugacaacuuca

SEQ ID NO: 1596325 - RNA, 19 nt, Artificial Sequence
  Description of Artificial Sequence: Synthetic oligonucleotide
  Sense strand starting at position 3791 of SEQ ID NO: 1560381
guugucaucaguguuugca

SEQ ID NO: 1596326 - RNA, 19 nt, Artificial Sequence
  Description of Artificial Sequence: Synthetic oligonucleotide
  Antisense strand to SEQ ID NO: 1596325
ugcaaacacugaugacaac

SEQ ID NO: 1596327 - RNA, 19 nt, Artificial Sequence
  Description of Artificial Sequence: Synthetic oligonucleotide
  Sense strand starting at position 3793 of SEQ ID NO: 1560381
ugucaucaguguuugcaag

SEQ ID NO: 1596328 - RNA, 19 nt, Artificial Sequence
  Description of Artificial Sequence: Synthetic oligonucleotide
  Antisense strand to SEQ ID NO: 1596327
cuugcaaacacugaugaca

SEQ ID NO: 1596329 - RNA, 19 nt, Artificial Sequence
  Description of Artificial Sequence: Synthetic oligonucleotide
  Sense strand starting at position 3794 of SEQ ID NO: 1560381
gucaucaguguuugcaaga

SEQ ID NO: 1596330 - RNA, 19 nt, Artificial Sequence
  Description of Artificial Sequence: Synthetic oligonucleotide
  Antisense strand to SEQ ID NO: 1596329
ucuugcaaacacugaugac

SEQ ID NO: 1596331 - RNA, 19 nt, Artificial Sequence
  Description of Artificial Sequence: Synthetic oligonucleotide
  Sense strand starting at position 3801 of SEQ ID NO: 1560381
guguuugcaagaugaggaa

SEQ ID NO: 1596332 - RNA, 19 nt, Artificial Sequence
  Description of Artificial Sequence: Synthetic oligonucleotide
  Antisense strand to SEQ ID NO: 1596331
uuccucaucuugcaaacac

SEQ ID NO: 1596333 - RNA, 19 nt, Artificial Sequence
  Description of Artificial Sequence: Synthetic oligonucleotide
  Sense strand starting at position 3852 of SEQ ID NO: 1560381
aaucaugugauguguggau

SEQ ID NO: 1596334 - RNA, 19 nt, Artificial Sequence
  Description of Artificial Sequence: Synthetic oligonucleotide
  Antisense strand to SEQ ID NO: 1596333
auccacacaucacaugauu

SEQ ID NO: 1596335 - RNA, 19 nt, Artificial Sequence
  Description of Artificial Sequence: Synthetic oligonucleotide
  Sense strand starting at position 3900 of SEQ ID NO: 1560381
ggagucucgugauucagua

SEQ ID NO: 1596336 - RNA, 19 nt, Artificial Sequence
  Description of Artificial Sequence: Synthetic oligonucleotide
  Antisense strand to SEQ ID NO: 1596335
uacugaaucacgagacucc

SEQ ID NO: 1596337 - RNA, 19 nt, Artificial Sequence
  Description of Artificial Sequence: Synthetic oligonucleotide
  Sense strand starting at position 335 of SEQ ID NO: 1560382
augggcugucccugguauu

SEQ ID NO: 1596338 - RNA, 19 nt, Artificial Sequence
  Description of Artificial Sequence: Synthetic oligonucleotide
  Antisense strand to SEQ ID NO: 1596337
aauaccagggacagcccau

SEQ ID NO: 1596339 - RNA, 19 nt, Artificial Sequence
  Description of Artificial Sequence: Synthetic oligonucleotide
  Sense strand starting at position 380 of SEQ ID NO: 1560382
acacuuaugucaggcuuga

SEQ ID NO: 1596340 - RNA, 19 nt, Artificial Sequence
  Description of Artificial Sequence: Synthetic oligonucleotide
  Antisense strand to SEQ ID NO: 1596339
ucaagccugacauaagugu

SEQ ID NO: 1596341 - RNA, 19 nt, Artificial Sequence
  Description of Artificial Sequence: Synthetic oligonucleotide
  Sense strand starting at position 384 of SEQ ID NO: 1560382
uuaugucaggcuugaacca

SEQ ID NO: 1596342 - RNA, 19 nt, Artificial Sequence
  Description of Artificial Sequence: Synthetic oligonucleotide
  Antisense strand to SEQ ID NO: 1596341
ugguucaagccugacauaa

SEQ ID NO: 1596343 - RNA, 19 nt, Artificial Sequence
  Description of Artificial Sequence: Synthetic oligonucleotide
  Sense strand starting at position 488 of SEQ ID NO: 1560382
ggcccacacugaucucaaa

SEQ ID NO: 1596344 - RNA, 19 nt, Artificial Sequence
  Description of Artificial Sequence: Synthetic oligonucleotide
  Antisense strand to SEQ ID NO: 1596343
uuugagaucagugugggcc

SEQ ID NO: 1596345 - RNA, 19 nt, Artificial Sequence
  Description of Artificial Sequence: Synthetic oligonucleotide
  Sense strand starting at position 586 of SEQ ID NO: 1560382
uggucuaucuuacugagau

SEQ ID NO: 1596346 - RNA, 19 nt, Artificial Sequence
  Description of Artificial Sequence: Synthetic oligonucleotide
  Antisense strand to SEQ ID NO: 1596345
aucucaguaagauagacca

SEQ ID NO: 1596347 - RNA, 19 nt, Artificial Sequence
  Description of Artificial Sequence: Synthetic oligonucleotide
  Sense strand starting at position 587 of SEQ ID NO: 1560382
ggucuaucuuacugagauu

SEQ ID NO: 1596348 - RNA, 19 nt, Artificial Sequence
  Description of Artificial Sequence: Synthetic oligonucleotide
  Antisense strand to SEQ ID NO: 1596347
aaucucaguaagauagacc

SEQ ID NO: 1596349 - RNA, 19 nt, Artificial Sequence
  Description of Artificial Sequence: Synthetic oligonucleotide
  Sense strand starting at position 1076 of SEQ ID NO: 1560382
accagcuguucccgugaaa

SEQ ID NO: 1596350 - RNA, 19 nt, Artificial Sequence
  Description of Artificial Sequence: Synthetic oligonucleotide
  Antisense strand to SEQ ID NO: 1596349
uuucacgggaacagcuggu

SEQ ID NO: 1596351 - RNA, 19 nt, Artificial Sequence
  Description of Artificial Sequence: Synthetic oligonucleotide
  Sense strand starting at position 1079 of SEQ ID NO: 1560382
agcuguucccgugaaauaa

SEQ ID NO: 1596352 - RNA, 19 nt, Artificial Sequence
  Description of Artificial Sequence: Synthetic oligonucleotide
  Antisense strand to SEQ ID NO: 1596351
uuauuucacgggaacagcu

SEQ ID NO: 1596353 - RNA, 19 nt, Artificial Sequence
  Description of Artificial Sequence: Synthetic oligonucleotide
  Sense strand starting at position 1254 of SEQ ID NO: 1560382
ccggauucccggcauuauc

SEQ ID NO: 1596354 - RNA, 19 nt, Artificial Sequence
  Description of Artificial Sequence: Synthetic oligonucleotide
  Antisense strand to SEQ ID NO: 1596353
gauaaugccgggaauccgg

SEQ ID NO: 1596355 - RNA, 19 nt, Artificial Sequence
  Description of Artificial Sequence: Synthetic oligonucleotide
  Sense strand starting at position 1367 of SEQ ID NO: 1560382
ggugauucagagcgggauu

SEQ ID NO: 1596356 - RNA, 19 nt, Artificial Sequence
  Description of Artificial Sequence: Synthetic oligonucleotide
  Antisense strand to SEQ ID NO: 1596355
aaucccgcucugaaucacc

SEQ ID NO: 1596357 - RNA, 19 nt, Artificial Sequence
  Description of Artificial Sequence: Synthetic oligonucleotide
  Sense strand starting at position 2374 of SEQ ID NO: 1560382
cccucagagucuuauauuu

SEQ ID NO: 1596358 - RNA, 19 nt, Artificial Sequence
  Description of Artificial Sequence: Synthetic oligonucleotide
  Antisense strand to SEQ ID NO: 1596357
aaauauaagacucugaggg

SEQ ID NO: 1596359 - RNA, 19 nt, Artificial Sequence
  Description of Artificial Sequence: Synthetic oligonucleotide
  Sense strand starting at position 2376 of SEQ ID NO: 1560382
cucagagucuuauauuuau

SEQ ID NO: 1596360 - RNA, 19 nt, Artificial Sequence
  Description of Artificial Sequence: Synthetic oligonucleotide
  Antisense strand to SEQ ID NO: 1596359
auaaauauaagacucugag

SEQ ID NO: 1596361 - RNA, 19 nt, Artificial Sequence
  Description of Artificial Sequence: Synthetic oligonucleotide
  Sense strand starting at position 2711 of SEQ ID NO: 1560382
ccguccuuauaagaauaca

SEQ ID NO: 1596362 - RNA, 19 nt, Artificial Sequence
  Description of Artificial Sequence: Synthetic oligonucleotide
  Antisense strand to SEQ ID NO: 1596361
uguauucuuauaaggacgg

SEQ ID NO: 1596363 - RNA, 19 nt, Artificial Sequence
  Description of Artificial Sequence: Synthetic oligonucleotide
  Sense strand starting at position 2729 of SEQ ID NO: 1560382
agaaauuagccauggccca

SEQ ID NO: 1596364 - RNA, 19 nt, Artificial Sequence
  Description of Artificial Sequence: Synthetic oligonucleotide
  Antisense strand to SEQ ID NO: 1596363
ugggccauggcuaauuucu

SEQ ID NO: 1596365 - RNA, 19 nt, Artificial Sequence
  Description of Artificial Sequence: Synthetic oligonucleotide
  Sense strand starting at position 3034 of SEQ ID NO: 1560382
aaagauggaugaggaauuu

SEQ ID NO: 1596366 - RNA, 19 nt, Artificial Sequence
  Description of Artificial Sequence: Synthetic oligonucleotide
  Antisense strand to SEQ ID NO: 1596365
aaauuccucauccaucuuu

SEQ ID NO: 1596367 - RNA, 19 nt, Artificial Sequence
  Description of Artificial Sequence: Synthetic oligonucleotide
  Sense strand starting at position 3246 of SEQ ID NO: 1560382
ggacaaaguucccagugaa

SEQ ID NO: 1596368 - RNA, 19 nt, Artificial Sequence
  Description of Artificial Sequence: Synthetic oligonucleotide
  Antisense strand to SEQ ID NO: 1596367
uucacugggaacuuugucc

SEQ ID NO: 1596369 - RNA, 19 nt, Artificial Sequence
  Description of Artificial Sequence: Synthetic oligonucleotide
  Sense strand starting at position 3249 of SEQ ID NO: 1560382
caaaguucccagugaaacg

SEQ ID NO: 1596370 - RNA, 19 nt, Artificial Sequence
  Description of Artificial Sequence: Synthetic oligonucleotide
  Antisense strand to SEQ ID NO: 1596369
cguuucacugggaacuuug

SEQ ID NO: 1596371 - RNA, 19 nt, Artificial Sequence
  Description of Artificial Sequence: Synthetic oligonucleotide
  Sense strand starting at position 3324 of SEQ ID NO: 1560382
cgaccuguuucccugugau

SEQ ID NO: 1596372 - RNA, 19 nt, Artificial Sequence
  Description of Artificial Sequence: Synthetic oligonucleotide
  Antisense strand to SEQ ID NO: 1596371
aucacagggaaacaggucg

SEQ ID NO: 1596373 - RNA, 19 nt, Artificial Sequence
  Description of Artificial Sequence: Synthetic oligonucleotide
  Sense strand starting at position 3338 of SEQ ID NO: 1560382
gugauucagcgacaaggaa

SEQ ID NO: 1596374 - RNA, 19 nt, Artificial Sequence
  Description of Artificial Sequence: Synthetic oligonucleotide
  Antisense strand to SEQ ID NO: 1596373
uuccuugucgcugaaucac

SEQ ID NO: 1596375 - RNA, 19 nt, Artificial Sequence
  Description of Artificial Sequence: Synthetic oligonucleotide
  Sense strand starting at position 3744 of SEQ ID NO: 1560382
ggcucagaggcuuagacuu

SEQ ID NO: 1596376 - RNA, 19 nt, Artificial Sequence
  Description of Artificial Sequence: Synthetic oligonucleotide
  Antisense strand to SEQ ID NO: 1596375
aagucuaagccucugagcc

SEQ ID NO: 1596377 - RNA, 19 nt, Artificial Sequence
  Description of Artificial Sequence: Synthetic oligonucleotide
  Sense strand starting at position 3752 of SEQ ID NO: 1560382
ggcuuagacuuuccaacuc

SEQ ID NO: 1596378 - RNA, 19 nt, Artificial Sequence
  Description of Artificial Sequence: Synthetic oligonucleotide
  Antisense strand to SEQ ID NO: 1596377
gaguuggaaagucuaagcc

SEQ ID NO: 1596379 - RNA, 19 nt, Artificial Sequence
  Description of Artificial Sequence: Synthetic oligonucleotide
  Sense strand starting at position 3770 of SEQ ID NO: 1560382
ccaugaaugucccacagau

SEQ ID NO: 1596380 - RNA, 19 nt, Artificial Sequence
  Description of Artificial Sequence: Synthetic oligonucleotide
  Antisense strand to SEQ ID NO: 1596379
aucugugggacauucaugg

SEQ ID NO: 1596381 - RNA, 19 nt, Artificial Sequence
  Description of Artificial Sequence: Synthetic oligonucleotide
  Sense strand starting at position 3772 of SEQ ID NO: 1560382
augaaugucccacagaugu

SEQ ID NO: 1596382 - RNA, 19 nt, Artificial Sequence
  Description of Artificial Sequence: Synthetic oligonucleotide
  Antisense strand to SEQ ID NO: 1596381
acaucugugggacauucau

SEQ ID NO: 1596383 - RNA, 19 nt, Artificial Sequence
  Description of Artificial Sequence: Synthetic oligonucleotide
  Sense strand starting at position 3789 of SEQ ID NO: 1560382
guuccaaagucaugggaau

SEQ ID NO: 1596384 - RNA, 19 nt, Artificial Sequence
  Description of Artificial Sequence: Synthetic oligonucleotide
  Antisense strand to SEQ ID NO: 1596383
auucccaugacuuuggaac

SEQ ID NO: 1596385 - RNA, 19 nt, Artificial Sequence
  Description of Artificial Sequence: Synthetic oligonucleotide
  Sense strand starting at position 3790 of SEQ ID NO: 1560382
uuccaaagucaugggaaug

SEQ ID NO: 1596386 - RNA, 19 nt, Artificial Sequence
  Description of Artificial Sequence: Synthetic oligonucleotide
  Antisense strand to SEQ ID NO: 1596385
cauucccaugacuuuggaa

SEQ ID NO: 1596387 - RNA, 19 nt, Artificial Sequence
  Description of Artificial Sequence: Synthetic oligonucleotide
  Sense strand starting at position 528 of SEQ ID NO: 1560383
gaauguacuuuaugagauu

SEQ ID NO: 1596388 - RNA, 19 nt, Artificial Sequence
  Description of Artificial Sequence: Synthetic oligonucleotide
  Antisense strand to SEQ ID NO: 1596387
aaucucauaaaguacauuc

SEQ ID NO: 1596389 - RNA, 19 nt, Artificial Sequence
  Description of Artificial Sequence: Synthetic oligonucleotide
  Sense strand starting at position 802 of SEQ ID NO: 1560383
augcuacucugcugagaca

SEQ ID NO: 1596390 - RNA, 19 nt, Artificial Sequence
  Description of Artificial Sequence: Synthetic oligonucleotide
  Antisense strand to SEQ ID NO: 1596389
ugucucagcagaguagcau

SEQ ID NO: 1596391 - RNA, 19 nt, Artificial Sequence
  Description of Artificial Sequence: Synthetic oligonucleotide
  Sense strand starting at position 803 of SEQ ID NO: 1560383
ugcuacucugcugagacau

SEQ ID NO: 1596392 - RNA, 19 nt, Artificial Sequence
  Description of Artificial Sequence: Synthetic oligonucleotide
  Antisense strand to SEQ ID NO: 1596391
augucucagcagaguagca

SEQ ID NO: 1596393 - RNA, 19 nt, Artificial Sequence
  Description of Artificial Sequence: Synthetic oligonucleotide
  Sense strand starting at position 883 of SEQ ID NO: 1560383
cccaguaguuucggagagu

SEQ ID NO: 1596394 - RNA, 19 nt, Artificial Sequence
  Description of Artificial Sequence: Synthetic oligonucleotide
  Antisense strand to SEQ ID NO: 1596393
acucuccgaaacuacuggg

SEQ ID NO: 1596395 - RNA, 19 nt, Artificial Sequence
  Description of Artificial Sequence: Synthetic oligonucleotide
  Sense strand starting at position 884 of SEQ ID NO: 1560383
ccaguaguuucggagagug

SEQ ID NO: 1596396 - RNA, 19 nt, Artificial Sequence
  Description of Artificial Sequence: Synthetic oligonucleotide
  Antisense strand to SEQ ID NO: 1596395
cacucuccgaaacuacugg

SEQ ID NO: 1596397 - RNA, 19 nt, Artificial Sequence
  Description of Artificial Sequence: Synthetic oligonucleotide
  Sense strand starting at position 886 of SEQ ID NO: 1560383
aguaguuucggagagugag

SEQ ID NO: 1596398 - RNA, 19 nt, Artificial Sequence
  Description of Artificial Sequence: Synthetic oligonucleotide
  Antisense strand to SEQ ID NO: 1596397
cucacucuccgaaacuacu

SEQ ID NO: 1596399 - RNA, 19 nt, Artificial Sequence
  Description of Artificial Sequence: Synthetic oligonucleotide
  Sense strand starting at position 942 of SEQ ID NO: 1560383
ccugauuggccgggugcaa

SEQ ID NO: 1596400 - RNA, 19 nt, Artificial Sequence
  Description of Artificial Sequence: Synthetic oligonucleotide
  Antisense strand to SEQ ID NO: 1596399
uugcacccggccaaucagg

SEQ ID NO: 1596401 - RNA, 19 nt, Artificial Sequence
  Description of Artificial Sequence: Synthetic oligonucleotide
  Sense strand starting at position 1135 of SEQ ID NO: 1560383
acaagaauugcuugaacga

SEQ ID NO: 1596402 - RNA, 19 nt, Artificial Sequence
  Description of Artificial Sequence: Synthetic oligonucleotide
  Antisense strand to SEQ ID NO: 1596401
ucguucaagcaauucuugu

SEQ ID NO: 1596403 - RNA, 19 nt, Artificial Sequence
  Description of Artificial Sequence: Synthetic oligonucleotide
  Sense strand starting at position 1449 of SEQ ID NO: 1560383
ccaagauucugucucaaag

SEQ ID NO: 1596404 - RNA, 19 nt, Artificial Sequence
  Description of Artificial Sequence: Synthetic oligonucleotide
  Antisense strand to SEQ ID NO: 1596403
cuuugagacagaaucuugg

SEQ ID NO: 1596405 - RNA, 19 nt, Artificial Sequence
  Description of Artificial Sequence: Synthetic oligonucleotide
  Sense strand starting at position 1758 of SEQ ID NO: 1560383
gugacucuccaccgggauu

SEQ ID NO: 1596406 - RNA, 19 nt, Artificial Sequence
  Description of Artificial Sequence: Synthetic oligonucleotide
  Antisense strand to SEQ ID NO: 1596405
aaucccgguggagagucac

SEQ ID NO: 1596407 - RNA, 19 nt, Artificial Sequence
  Description of Artificial Sequence: Synthetic oligonucleotide
  Sense strand starting at position 2009 of SEQ ID NO: 1560383
ggaacaaguacguguacau

SEQ ID NO: 1596408 - RNA, 19 nt, Artificial Sequence
  Description of Artificial Sequence: Synthetic oligonucleotide
  Antisense strand to SEQ ID NO: 1596407
auguacacguacuuguucc

SEQ ID NO: 1596409 - RNA, 19 nt, Artificial Sequence
  Description of Artificial Sequence: Synthetic oligonucleotide
  Sense strand starting at position 2077 of SEQ ID NO: 1560383
agggauauugucuggaagc

SEQ ID NO: 1596410 - RNA, 19 nt, Artificial Sequence
  Description of Artificial Sequence: Synthetic oligonucleotide
  Antisense strand to SEQ ID NO: 1596409
gcuuccagacaauaucccu

SEQ ID NO: 1596411 - RNA, 19 nt, Artificial Sequence
  Description of Artificial Sequence: Synthetic oligonucleotide
  Sense strand starting at position 2079 of SEQ ID NO: 1560383
ggauauugucuggaagcca

SEQ ID NO: 1596412 - RNA, 19 nt, Artificial Sequence
  Description of Artificial Sequence: Synthetic oligonucleotide
  Antisense strand to SEQ ID NO: 1596411
uggcuuccagacaauaucc

SEQ ID NO: 1596413 - RNA, 19 nt, Artificial Sequence
  Description of Artificial Sequence: Synthetic oligonucleotide
  Sense strand starting at position 2109 of SEQ ID NO: 1560383
guccuaaucucgccuguga

SEQ ID NO: 1596414 - RNA, 19 nt, Artificial Sequence
  Description of Artificial Sequence: Synthetic oligonucleotide
  Antisense strand to SEQ ID NO: 1596413
ucacaggcgagauuaggac

SEQ ID NO: 1596415 - RNA, 19 nt, Artificial Sequence
  Description of Artificial Sequence: Synthetic oligonucleotide
  Sense strand starting at position 2111 of SEQ ID NO: 1560383
ccuaaucucgccugugaga

SEQ ID NO: 1596416 - RNA, 19 nt, Artificial Sequence
  Description of Artificial Sequence: Synthetic oligonucleotide
  Antisense strand to SEQ ID NO: 1596415
ucucacaggcgagauuagg

SEQ ID NO: 1596417 - RNA, 19 nt, Artificial Sequence
  Description of Artificial Sequence: Synthetic oligonucleotide
  Sense strand starting at position 2244 of SEQ ID NO: 1560383
ggucuaaagcuuugauucu

SEQ ID NO: 1596418 - RNA, 19 nt, Artificial Sequence
  Description of Artificial Sequence: Synthetic oligonucleotide
  Antisense strand to SEQ ID NO: 1596417
agaaucaaagcuuuagacc

SEQ ID NO: 1596419 - RNA, 19 nt, Artificial Sequence
  Description of Artificial Sequence: Synthetic oligonucleotide
  Sense strand starting at position 2251 of SEQ ID NO: 1560383
agcuuugauucucaaagug

SEQ ID NO: 1596420 - RNA, 19 nt, Artificial Sequence
  Description of Artificial Sequence: Synthetic oligonucleotide
  Antisense strand to SEQ ID NO: 1596419
cacuuugagaaucaaagcu

SEQ ID NO: 1596421 - RNA, 19 nt, Artificial Sequence
  Description of Artificial Sequence: Synthetic oligonucleotide
  Sense strand starting at position 2287 of SEQ ID NO: 1560383
auggguuucucgggagaug

SEQ ID NO: 1596422 - RNA, 19 nt, Artificial Sequence
  Description of Artificial Sequence: Synthetic oligonucleotide
  Antisense strand to SEQ ID NO: 1596421
caucucccgagaaacccau

SEQ ID NO: 1596423 - RNA, 19 nt, Artificial Sequence
  Description of Artificial Sequence: Synthetic oligonucleotide
  Sense strand starting at position 2290 of SEQ ID NO: 1560383
gguuucucgggagauggua

SEQ ID NO: 1596424 - RNA, 19 nt, Artificial Sequence
  Description of Artificial Sequence: Synthetic oligonucleotide
  Antisense strand to SEQ ID NO: 1596423
uaccaucucccgagaaacc

SEQ ID NO: 1596425 - RNA, 19 nt, Artificial Sequence
  Description of Artificial Sequence: Synthetic oligonucleotide
  Sense strand starting at position 2379 of SEQ ID NO: 1560383
gcaccuauugcauaccaga

SEQ ID NO: 1596426 - RNA, 19 nt, Artificial Sequence
  Description of Artificial Sequence: Synthetic oligonucleotide
  Antisense strand to SEQ ID NO: 1596425
ucugguaugcaauaggugc

SEQ ID NO: 1596427 - RNA, 19 nt, Artificial Sequence
  Description of Artificial Sequence: Synthetic oligonucleotide
  Sense strand starting at position 2421 of SEQ ID NO: 1560383
gugggugaaucagacaaua

SEQ ID NO: 1596428 - RNA, 19 nt, Artificial Sequence
  Description of Artificial Sequence: Synthetic oligonucleotide
  Antisense strand to SEQ ID NO: 1596427
uauugucugauucacccac

SEQ ID NO: 1596429 - RNA, 19 nt, Artificial Sequence
  Description of Artificial Sequence: Synthetic oligonucleotide
  Sense strand starting at position 2701 of SEQ ID NO: 1560383
gugaacauacuuuguacaa

SEQ ID NO: 1596430 - RNA, 19 nt, Artificial Sequence
  Description of Artificial Sequence: Synthetic oligonucleotide
  Antisense strand to SEQ ID NO: 1596429
uuguacaaaguauguucac

SEQ ID NO: 1596431 - RNA, 19 nt, Artificial Sequence
  Description of Artificial Sequence: Synthetic oligonucleotide
  Sense strand starting at position 2725 of SEQ ID NO: 1560383
ccucgucacccuugagaag

SEQ ID NO: 1596432 - RNA, 19 nt, Artificial Sequence
  Description of Artificial Sequence: Synthetic oligonucleotide
  Antisense strand to SEQ ID NO: 1596431
cuucucaagggugacgagg

SEQ ID NO: 1596433 - RNA, 19 nt, Artificial Sequence
  Description of Artificial Sequence: Synthetic oligonucleotide
  Sense strand starting at position 3536 of SEQ ID NO: 1560383
ccgugucucuaccuuucua

SEQ ID NO: 1596434 - RNA, 19 nt, Artificial Sequence
  Description of Artificial Sequence: Synthetic oligonucleotide
  Antisense strand to SEQ ID NO: 1596433
uagaaagguagagacacgg

SEQ ID NO: 1596435 - RNA, 19 nt, Artificial Sequence
  Description of Artificial Sequence: Synthetic oligonucleotide
  Sense strand starting at position 3758 of SEQ ID NO: 1560383
uuuguugaaacaugggcaa

SEQ ID NO: 1596436 - RNA, 19 nt, Artificial Sequence
  Description of Artificial Sequence: Synthetic oligonucleotide
  Antisense strand to SEQ ID NO: 1596435
uugcccauguuucaacaaa

SEQ ID NO: 1596437 - RNA, 19 nt, Artificial Sequence
  Description of Artificial Sequence: Synthetic oligonucleotide
  Sense strand starting at position 3760 of SEQ ID NO: 1560383
uguugaaacaugggcaaau

SEQ ID NO: 1596438 - RNA, 19 nt, Artificial Sequence
  Description of Artificial Sequence: Synthetic oligonucleotide
  Antisense strand to SEQ ID NO: 1596437
auuugcccauguuucaaca

SEQ ID NO: 1596439 - RNA, 19 nt, Artificial Sequence
  Description of Artificial Sequence: Synthetic oligonucleotide
  Sense strand starting at position 210 of SEQ ID NO: 1560384
acuugaaaugagcggagau

SEQ ID NO: 1596440 - RNA, 19 nt, Artificial Sequence
  Description of Artificial Sequence: Synthetic oligonucleotide
  Antisense strand to SEQ ID NO: 1596439
aucuccgcucauuucaagu

SEQ ID NO: 1596441 - RNA, 19 nt, Artificial Sequence
  Description of Artificial Sequence: Synthetic oligonucleotide
  Sense strand starting at position 1104 of SEQ ID NO: 1560384
aggugcuuauggugucaaa

SEQ ID NO: 1596442 - RNA, 19 nt, Artificial Sequence
  Description of Artificial Sequence: Synthetic oligonucleotide
  Antisense strand to SEQ ID NO: 1596441
uuugacaccauaagcaccu

SEQ ID NO: 1596443 - RNA, 19 nt, Artificial Sequence
  Description of Artificial Sequence: Synthetic oligonucleotide
  Sense strand starting at position 1107 of SEQ ID NO: 1560384
ugcuuauggugucaaauuu

SEQ ID NO: 1596444 - RNA, 19 nt, Artificial Sequence
  Description of Artificial Sequence: Synthetic oligonucleotide
  Antisense strand to SEQ ID NO: 1596443
aaauuugacaccauaagca

SEQ ID NO: 1596445 - RNA, 19 nt, Artificial Sequence
  Description of Artificial Sequence: Synthetic oligonucleotide
  Sense strand starting at position 1115 of SEQ ID NO: 1560384
gugucaaauuuccauacga

SEQ ID NO: 1596446 - RNA, 19 nt, Artificial Sequence
  Description of Artificial Sequence: Synthetic oligonucleotide
  Antisense strand to SEQ ID NO: 1596445
ucguauggaaauuugacac

SEQ ID NO: 1596447 - RNA, 19 nt, Artificial Sequence
  Description of Artificial Sequence: Synthetic oligonucleotide
  Sense strand starting at position 1123 of SEQ ID NO: 1560384
uuuccauacgauuguuauu

SEQ ID NO: 1596448 - RNA, 19 nt, Artificial Sequence
  Description of Artificial Sequence: Synthetic oligonucleotide
  Antisense strand to SEQ ID NO: 1596447
aauaacaaucguauggaaa

SEQ ID NO: 1596449 - RNA, 19 nt, Artificial Sequence
  Description of Artificial Sequence: Synthetic oligonucleotide
  Sense strand starting at position 1162 of SEQ ID NO: 1560384
ugugaaguagcucauuaau

SEQ ID NO: 1596450 - RNA, 19 nt, Artificial Sequence
  Description of Artificial Sequence: Synthetic oligonucleotide
  Antisense strand to SEQ ID NO: 1596449
auuaaugagcuacuucaca

SEQ ID NO: 1596451 - RNA, 19 nt, Artificial Sequence
  Description of Artificial Sequence: Synthetic oligonucleotide
  Sense strand starting at position 1164 of SEQ ID NO: 1560384
ugaaguagcucauuaauga

SEQ ID NO: 1596452 - RNA, 19 nt, Artificial Sequence
  Description of Artificial Sequence: Synthetic oligonucleotide
  Antisense strand to SEQ ID NO: 1596451
ucauuaaugagcuacuuca

SEQ ID NO: 1596453 - RNA, 19 nt, Artificial Sequence
  Description of Artificial Sequence: Synthetic oligonucleotide
  Sense strand starting at position 1165 of SEQ ID NO: 1560384
gaaguagcucauuaaugau

SEQ ID NO: 1596454 - RNA, 19 nt, Artificial Sequence
  Description of Artificial Sequence: Synthetic oligonucleotide
  Antisense strand to SEQ ID NO: 1596453
aucauuaaugagcuacuuc

SEQ ID NO: 1596455 - RNA, 19 nt, Artificial Sequence
  Description of Artificial Sequence: Synthetic oligonucleotide
  Sense strand starting at position 1205 of SEQ ID NO: 1560384
gaaauaacgcuuuggaugu

SEQ ID NO: 1596456 - RNA, 19 nt, Artificial Sequence
  Description of Artificial Sequence: Synthetic oligonucleotide
  Antisense strand to SEQ ID NO: 1596455
acauccaaagcguuauuuc

SEQ ID NO: 1596457 - RNA, 19 nt, Artificial Sequence
  Description of Artificial Sequence: Synthetic oligonucleotide
  Sense strand starting at position 1206 of SEQ ID NO: 1560384
aaauaacgcuuuggaugua

SEQ ID NO: 1596458 - RNA, 19 nt, Artificial Sequence
  Description of Artificial Sequence: Synthetic oligonucleotide
  Antisense strand to SEQ ID NO: 1596457
uacauccaaagcguuauuu

SEQ ID NO: 1596459 - RNA, 19 nt, Artificial Sequence
  Description of Artificial Sequence: Synthetic oligonucleotide
  Sense strand starting at position 1290 of SEQ ID NO: 1560384
ccagcaauauuggguggau

SEQ ID NO: 1596460 - RNA, 19 nt, Artificial Sequence
  Description of Artificial Sequence: Synthetic oligonucleotide
  Antisense strand to SEQ ID NO: 1596459
auccacccaauauugcugg

SEQ ID NO: 1596461 - RNA, 19 nt, Artificial Sequence
  Description of Artificial Sequence: Synthetic oligonucleotide
  Sense strand starting at position 1292 of SEQ ID NO: 1560384
agcaauauuggguggauca

SEQ ID NO: 1596462 - RNA, 19 nt, Artificial Sequence
  Description of Artificial Sequence: Synthetic oligonucleotide
  Antisense strand to SEQ ID NO: 1596461
ugauccacccaauauugcu

SEQ ID NO: 1596463 - RNA, 19 nt, Artificial Sequence
  Description of Artificial Sequence: Synthetic oligonucleotide
  Sense strand starting at position 1588 of SEQ ID NO: 1560384
ugugguugcugggaaguuu

SEQ ID NO: 1596464 - RNA, 19 nt, Artificial Sequence
  Description of Artificial Sequence: Synthetic oligonucleotide
  Antisense strand to SEQ ID NO: 1596463
aaacuucccagcaaccaca

SEQ ID NO: 1596465 - RNA, 19 nt, Artificial Sequence
  Description of Artificial Sequence: Synthetic oligonucleotide
  Sense strand starting at position 1673 of SEQ ID NO: 1560384
cuggccuauugcugggaaa

SEQ ID NO: 1596466 - RNA, 19 nt, Artificial Sequence
  Description of Artificial Sequence: Synthetic oligonucleotide
  Antisense strand to SEQ ID NO: 1596465
uuucccagcaauaggccag

SEQ ID NO: 1596467 - RNA, 19 nt, Artificial Sequence
  Description of Artificial Sequence: Synthetic oligonucleotide
  Sense strand starting at position 1674 of SEQ ID NO: 1560384
uggccuauugcugggaaau

SEQ ID NO: 1596468 - RNA, 19 nt, Artificial Sequence
  Description of Artificial Sequence: Synthetic oligonucleotide
  Antisense strand to SEQ ID NO: 1596467
auuucccagcaauaggcca

SEQ ID NO: 1596469 - RNA, 19 nt, Artificial Sequence
  Description of Artificial Sequence: Synthetic oligonucleotide
  Sense strand starting at position 1675 of SEQ ID NO: 1560384
ggccuauugcugggaaauu

SEQ ID NO: 1596470 - RNA, 19 nt, Artificial Sequence
  Description of Artificial Sequence: Synthetic oligonucleotide
  Antisense strand to SEQ ID NO: 1596469
aauuucccagcaauaggcc

SEQ ID NO: 1596471 - RNA, 19 nt, Artificial Sequence
  Description of Artificial Sequence: Synthetic oligonucleotide
  Sense strand starting at position 1676 of SEQ ID NO: 1560384
gccuauugcugggaaauug

SEQ ID NO: 1596472 - RNA, 19 nt, Artificial Sequence
  Description of Artificial Sequence: Synthetic oligonucleotide
  Antisense strand to SEQ ID NO: 1596471
caauuucccagcaauaggc

SEQ ID NO: 1596473 - RNA, 19 nt, Artificial Sequence
  Description of Artificial Sequence: Synthetic oligonucleotide
  Sense strand starting at position 1816 of SEQ ID NO: 1560384
gcaaacagauacuuguaca

SEQ ID NO: 1596474 - RNA, 19 nt, Artificial Sequence
  Description of Artificial Sequence: Synthetic oligonucleotide
  Antisense strand to SEQ ID NO: 1596473
uguacaaguaucuguuugc

SEQ ID NO: 1596475 - RNA, 19 nt, Artificial Sequence
  Description of Artificial Sequence: Synthetic oligonucleotide
  Sense strand starting at position 2375 of SEQ ID NO: 1560384
cagagcuuauagugaacca

SEQ ID NO: 1596476 - RNA, 19 nt, Artificial Sequence
  Description of Artificial Sequence: Synthetic oligonucleotide
  Antisense strand to SEQ ID NO: 1596475
ugguucacuauaagcucug

SEQ ID NO: 1596477 - RNA, 19 nt, Artificial Sequence
  Description of Artificial Sequence: Synthetic oligonucleotide
  Sense strand starting at position 2553 of SEQ ID NO: 1560384
ucccauuucugggaaaugu

SEQ ID NO: 1596478 - RNA, 19 nt, Artificial Sequence
  Description of Artificial Sequence: Synthetic oligonucleotide
  Antisense strand to SEQ ID NO: 1596477
acauuucccagaaauggga

SEQ ID NO: 1596479 - RNA, 19 nt, Artificial Sequence
  Description of Artificial Sequence: Synthetic oligonucleotide
  Sense strand starting at position 2562 of SEQ ID NO: 1560384
ugggaaauguccaggacga

SEQ ID NO: 1596480 - RNA, 19 nt, Artificial Sequence
  Description of Artificial Sequence: Synthetic oligonucleotide
  Antisense strand to SEQ ID NO: 1596479
ucguccuggacauuuccca

SEQ ID NO: 1596481 - RNA, 19 nt, Artificial Sequence
  Description of Artificial Sequence: Synthetic oligonucleotide
  Sense strand starting at position 2563 of SEQ ID NO: 1560384
gggaaauguccaggacgag

SEQ ID NO: 1596482 - RNA, 19 nt, Artificial Sequence
  Description of Artificial Sequence: Synthetic oligonucleotide
  Antisense strand to SEQ ID NO: 1596481
cucguccuggacauuuccc

SEQ ID NO: 1596483 - RNA, 19 nt, Artificial Sequence
  Description of Artificial Sequence: Synthetic oligonucleotide
  Sense strand starting at position 2632 of SEQ ID NO: 1560384
gggagaauguuuguuuaac

SEQ ID NO: 1596484 - RNA, 19 nt, Artificial Sequence
  Description of Artificial Sequence: Synthetic oligonucleotide
  Antisense strand to SEQ ID NO: 1596483
guuaaacaaacauucuccc

SEQ ID NO: 1596485 - RNA, 19 nt, Artificial Sequence
  Description of Artificial Sequence: Synthetic oligonucleotide
  Sense strand starting at position 2633 of SEQ ID NO: 1560384
ggagaauguuuguuuaacg

SEQ ID NO: 1596486 - RNA, 19 nt, Artificial Sequence
  Description of Artificial Sequence: Synthetic oligonucleotide
  Antisense strand to SEQ ID NO: 1596485
cguuaaacaaacauucucc

SEQ ID NO: 1596487 - RNA, 19 nt, Artificial Sequence
  Description of Artificial Sequence: Synthetic oligonucleotide
  Sense strand starting at position 2644 of SEQ ID NO: 1560384
guuuaacggguccagaguu

SEQ ID NO: 1596488 - RNA, 19 nt, Artificial Sequence
  Description of Artificial Sequence: Synthetic oligonucleotide
  Antisense strand to SEQ ID NO: 1596487
aacucuggacccguuaaac

SEQ ID NO: 1596489 - RNA, 19 nt, Artificial Sequence
  Description of Artificial Sequence: Synthetic oligonucleotide
  Sense strand starting at position 2722 of SEQ ID NO: 1560384
acgcgaugccacugaauug

SEQ ID NO: 1596490 - RNA, 19 nt, Artificial Sequence
  Description of Artificial Sequence: Synthetic oligonucleotide
  Antisense strand to SEQ ID NO: 1596489
caauucaguggcaucgcgu

SEQ ID NO: 1596491 - RNA, 19 nt, Artificial Sequence
  Description of Artificial Sequence: Synthetic oligonucleotide
  Sense strand starting at position 3030 of SEQ ID NO: 1560384
aagccuaaauggugaaguu

SEQ ID NO: 1596492 - RNA, 19 nt, Artificial Sequence
  Description of Artificial Sequence: Synthetic oligonucleotide
  Antisense strand to SEQ ID NO: 1596491
aacuucaccauuuaggcuu

SEQ ID NO: 1596493 - RNA, 19 nt, Artificial Sequence
  Description of Artificial Sequence: Synthetic oligonucleotide
  Sense strand starting at position 3031 of SEQ ID NO: 1560384
agccuaaauggugaaguuu

SEQ ID NO: 1596494 - RNA, 19 nt, Artificial Sequence
  Description of Artificial Sequence: Synthetic oligonucleotide
  Antisense strand to SEQ ID NO: 1596493
aaacuucaccauuuaggcu

SEQ ID NO: 1596495 - RNA, 19 nt, Artificial Sequence
  Description of Artificial Sequence: Synthetic oligonucleotide
  Sense strand starting at position 3037 of SEQ ID NO: 1560384
aauggugaaguuuauguua

SEQ ID NO: 1596496 - RNA, 19 nt, Artificial Sequence
  Description of Artificial Sequence: Synthetic oligonucleotide
  Antisense strand to SEQ ID NO: 1596495
uaacauaaacuucaccauu

SEQ ID NO: 1596497 - RNA, 19 nt, Artificial Sequence
  Description of Artificial Sequence: Synthetic oligonucleotide
  Sense strand starting at position 3039 of SEQ ID NO: 1560384
uggugaaguuuauguuaua

SEQ ID NO: 1596498 - RNA, 19 nt, Artificial Sequence
  Description of Artificial Sequence: Synthetic oligonucleotide
  Antisense strand to SEQ ID NO: 1596497
uauaacauaaacuucacca

SEQ ID NO: 1596499 - RNA, 19 nt, Artificial Sequence
  Description of Artificial Sequence: Synthetic oligonucleotide
  Sense strand starting at position 3040 of SEQ ID NO: 1560384
ggugaaguuuauguuauac

SEQ ID NO: 1596500 - RNA, 19 nt, Artificial Sequence
  Description of Artificial Sequence: Synthetic oligonucleotide
  Antisense strand to SEQ ID NO: 1596499
guauaacauaaacuucacc

SEQ ID NO: 1596501 - RNA, 19 nt, Artificial Sequence
  Description of Artificial Sequence: Synthetic oligonucleotide
  Sense strand starting at position 3443 of SEQ ID NO: 1560384
guuggcucacuguauggua

SEQ ID NO: 1596502 - RNA, 19 nt, Artificial Sequence
  Description of Artificial Sequence: Synthetic oligonucleotide
  Antisense strand to SEQ ID NO: 1596501
uaccauacagugagccaac

SEQ ID NO: 1596503 - RNA, 19 nt, Artificial Sequence
  Description of Artificial Sequence: Synthetic oligonucleotide
  Sense strand starting at position 3464 of SEQ ID NO: 1560384
ugaauuacauccugaugaa

SEQ ID NO: 1596504 - RNA, 19 nt, Artificial Sequence
  Description of Artificial Sequence: Synthetic oligonucleotide
  Antisense strand to SEQ ID NO: 1596503
uucaucaggauguaauuca

SEQ ID NO: 1596505 - RNA, 19 nt, Artificial Sequence
  Description of Artificial Sequence: Synthetic oligonucleotide
  Sense strand starting at position 3827 of SEQ ID NO: 1560384
gggccaaguuggucuuaac

SEQ ID NO: 1596506 - RNA, 19 nt, Artificial Sequence
  Description of Artificial Sequence: Synthetic oligonucleotide
  Antisense strand to SEQ ID NO: 1596505
guuaagaccaacuuggccc

SEQ ID NO: 1596507 - RNA, 19 nt, Artificial Sequence
  Description of Artificial Sequence: Synthetic oligonucleotide
  Sense strand starting at position 3830 of SEQ ID NO: 1560384
ccaaguuggucuuaaccuu

SEQ ID NO: 1596508 - RNA, 19 nt, Artificial Sequence
  Description of Artificial Sequence: Synthetic oligonucleotide
  Antisense strand to SEQ ID NO: 1596507
aagguuaagaccaacuugg

SEQ ID NO: 1596509 - RNA, 19 nt, Artificial Sequence
  Description of Artificial Sequence: Synthetic oligonucleotide
  Sense strand starting at position 3856 of SEQ ID NO: 1560384
gugaccugggugugaugaa

SEQ ID NO: 1596510 - RNA, 19 nt, Artificial Sequence
  Description of Artificial Sequence: Synthetic oligonucleotide
  Antisense strand to SEQ ID NO: 1596509
uucaucacacccaggucac

SEQ ID NO: 1596511 - RNA, 19 nt, Artificial Sequence
  Description of Artificial Sequence: Synthetic oligonucleotide
  Sense strand starting at position 3903 of SEQ ID NO: 1560384
ugccaagguucuggaaaga

SEQ ID NO: 1596512 - RNA, 19 nt, Artificial Sequence
  Description of Artificial Sequence: Synthetic oligonucleotide
  Antisense strand to SEQ ID NO: 1596511
ucuuuccagaaccuuggca

SEQ ID NO: 1596513 - RNA, 19 nt, Artificial Sequence
  Description of Artificial Sequence: Synthetic oligonucleotide
  Sense strand starting at position 3971 of SEQ ID NO: 1560384
gagguugaacuuugaccaa

SEQ ID NO: 1596514 - RNA, 19 nt, Artificial Sequence
  Description of Artificial Sequence: Synthetic oligonucleotide
  Antisense strand to SEQ ID NO: 1596513
uuggucaaaguucaaccuc

SEQ ID NO: 1596515 - RNA, 19 nt, Artificial Sequence
  Description of Artificial Sequence: Synthetic oligonucleotide
  Sense strand starting at position 65 of SEQ ID NO: 1560385
auaaacugaguuggucuaa

SEQ ID NO: 1596516 - RNA, 19 nt, Artificial Sequence
  Description of Artificial Sequence: Synthetic oligonucleotide
  Antisense strand to SEQ ID NO: 1596515
uuagaccaacucaguuuau

SEQ ID NO: 1596517 - RNA, 19 nt, Artificial Sequence
  Description of Artificial Sequence: Synthetic oligonucleotide
  Sense strand starting at position 66 of SEQ ID NO: 1560385
uaaacugaguuggucuaaa

SEQ ID NO: 1596518 - RNA, 19 nt, Artificial Sequence
  Description of Artificial Sequence: Synthetic oligonucleotide
  Antisense strand to SEQ ID NO: 1596517
uuuagaccaacucaguuua

SEQ ID NO: 1596519 - RNA, 19 nt, Artificial Sequence
  Description of Artificial Sequence: Synthetic oligonucleotide
  Sense strand starting at position 117 of SEQ ID NO: 1560385
ugaccuaggugugaugaga

SEQ ID NO: 1596520 - RNA, 19 nt, Artificial Sequence
  Description of Artificial Sequence: Synthetic oligonucleotide
  Antisense strand to SEQ ID NO: 1596519
ucucaucacaccuagguca

SEQ ID NO: 1596521 - RNA, 19 nt, Artificial Sequence
  Description of Artificial Sequence: Synthetic oligonucleotide
  Sense strand starting at position 241 of SEQ ID NO: 1560385
caaguauuccuuugugcug

SEQ ID NO: 1596522 - RNA, 19 nt, Artificial Sequence
  Description of Artificial Sequence: Synthetic oligonucleotide
  Antisense strand to SEQ ID NO: 1596521
cagcacaaaggaauacuug

SEQ ID NO: 1596523 - RNA, 19 nt, Artificial Sequence
  Description of Artificial Sequence: Synthetic oligonucleotide
  Sense strand starting at position 273 of SEQ ID NO: 1560385
cugccagugaaagguuaau

SEQ ID NO: 1596524 - RNA, 19 nt, Artificial Sequence
  Description of Artificial Sequence: Synthetic oligonucleotide
  Antisense strand to SEQ ID NO: 1596523
auuaaccuuucacuggcag

SEQ ID NO: 1596525 - RNA, 19 nt, Artificial Sequence
  Description of Artificial Sequence: Synthetic oligonucleotide
  Sense strand starting at position 282 of SEQ ID NO: 1560385
aaagguuaauguuuagaga

SEQ ID NO: 1596526 - RNA, 19 nt, Artificial Sequence
  Description of Artificial Sequence: Synthetic oligonucleotide
  Antisense strand to SEQ ID NO: 1596525
ucucuaaacauuaaccuuu

SEQ ID NO: 1596527 - RNA, 19 nt, Artificial Sequence
  Description of Artificial Sequence: Synthetic oligonucleotide
  Sense strand starting at position 285 of SEQ ID NO: 1560385
gguuaauguuuagagauac

SEQ ID NO: 1596528 - RNA, 19 nt, Artificial Sequence
  Description of Artificial Sequence: Synthetic oligonucleotide
  Antisense strand to SEQ ID NO: 1596527
guaucucuaaacauuaacc

SEQ ID NO: 1596529 - RNA, 19 nt, Artificial Sequence
  Description of Artificial Sequence: Synthetic oligonucleotide
  Sense strand starting at position 347 of SEQ ID NO: 1560385
gaccucuuccuaggagaca

SEQ ID NO: 1596530 - RNA, 19 nt, Artificial Sequence
  Description of Artificial Sequence: Synthetic oligonucleotide
  Antisense strand to SEQ ID NO: 1596529
ugucuccuaggaagagguc

SEQ ID NO: 1596531 - RNA, 19 nt, Artificial Sequence
  Description of Artificial Sequence: Synthetic oligonucleotide
  Sense strand starting at position 364 of SEQ ID NO: 1560385
cagugaagucuuugccggu

SEQ ID NO: 1596532 - RNA, 19 nt, Artificial Sequence
  Description of Artificial Sequence: Synthetic oligonucleotide
  Antisense strand to SEQ ID NO: 1596531
accggcaaagacuucacug

SEQ ID NO: 1596533 - RNA, 19 nt, Artificial Sequence
  Description of Artificial Sequence: Synthetic oligonucleotide
  Sense strand starting at position 370 of SEQ ID NO: 1560385
agucuuugccggugaccuu

SEQ ID NO: 1596534 - RNA, 19 nt, Artificial Sequence
  Description of Artificial Sequence: Synthetic oligonucleotide
  Antisense strand to SEQ ID NO: 1596533
aaggucaccggcaaagacu

SEQ ID NO: 1596535 - RNA, 19 nt, Artificial Sequence
  Description of Artificial Sequence: Synthetic oligonucleotide
  Sense strand starting at position 624 of SEQ ID NO: 1560385
gggauucuaccgcagagcu

SEQ ID NO: 1596536 - RNA, 19 nt, Artificial Sequence
  Description of Artificial Sequence: Synthetic oligonucleotide
  Antisense strand to SEQ ID NO: 1596535
agcucugcgguagaauccc

SEQ ID NO: 1596537 - RNA, 19 nt, Artificial Sequence
  Description of Artificial Sequence: Synthetic oligonucleotide
  Sense strand starting at position 632 of SEQ ID NO: 1560385
accgcagagcucugcaaga

SEQ ID NO: 1596538 - RNA, 19 nt, Artificial Sequence
  Description of Artificial Sequence: Synthetic oligonucleotide
  Antisense strand to SEQ ID NO: 1596537
ucuugcagagcucugcggu

SEQ ID NO: 1596539 - RNA, 19 nt, Artificial Sequence
  Description of Artificial Sequence: Synthetic oligonucleotide
  Sense strand starting at position 634 of SEQ ID NO: 1560385
cgcagagcucugcaagaga

SEQ ID NO: 1596540 - RNA, 19 nt, Artificial Sequence
  Description of Artificial Sequence: Synthetic oligonucleotide
  Antisense strand to SEQ ID NO: 1596539
ucucuugcagagcucugcg

SEQ ID NO: 1596541 - RNA, 19 nt, Artificial Sequence
  Description of Artificial Sequence: Synthetic oligonucleotide
  Sense strand starting at position 994 of SEQ ID NO: 1560385
ggaguaacagcuggauucu

SEQ ID NO: 1596542 - RNA, 19 nt, Artificial Sequence
  Description of Artificial Sequence: Synthetic oligonucleotide
  Antisense strand to SEQ ID NO: 1596541
agaauccagcuguuacucc

SEQ ID NO: 1596543 - RNA, 19 nt, Artificial Sequence
  Description of Artificial Sequence: Synthetic oligonucleotide
  Sense strand starting at position 1777 of SEQ ID NO: 1560385
gguuaccaugucgauacau

SEQ ID NO: 1596544 - RNA, 19 nt, Artificial Sequence
  Description of Artificial Sequence: Synthetic oligonucleotide
  Antisense strand to SEQ ID NO: 1596543
auguaucgacaugguaacc

SEQ ID NO: 1596545 - RNA, 19 nt, Artificial Sequence
  Description of Artificial Sequence: Synthetic oligonucleotide
  Sense strand starting at position 1779 of SEQ ID NO: 1560385
uuaccaugucgauacaugu

SEQ ID NO: 1596546 - RNA, 19 nt, Artificial Sequence
  Description of Artificial Sequence: Synthetic oligonucleotide
  Antisense strand to SEQ ID NO: 1596545
acauguaucgacaugguaa

SEQ ID NO: 1596547 - RNA, 19 nt, Artificial Sequence
  Description of Artificial Sequence: Synthetic oligonucleotide
  Sense strand starting at position 1833 of SEQ ID NO: 1560385
ucccauauugguggcagaa

SEQ ID NO: 1596548 - RNA, 19 nt, Artificial Sequence
  Description of Artificial Sequence: Synthetic oligonucleotide
  Antisense strand to SEQ ID NO: 1596547
uucugccaccaauauggga

SEQ ID NO: 1596549 - RNA, 19 nt, Artificial Sequence
  Description of Artificial Sequence: Synthetic oligonucleotide
  Sense strand starting at position 1936 of SEQ ID NO: 1560385
gcagaaguccagggagcua

SEQ ID NO: 1596550 - RNA, 19 nt, Artificial Sequence
  Description of Artificial Sequence: Synthetic oligonucleotide
  Antisense strand to SEQ ID NO: 1596549
uagcucccuggacuucugc

SEQ ID NO: 1596551 - RNA, 19 nt, Artificial Sequence
  Description of Artificial Sequence: Synthetic oligonucleotide
  Sense strand starting at position 1954 of SEQ ID NO: 1560385
augcaaacuuccuggaaug

SEQ ID NO: 1596552 - RNA, 19 nt, Artificial Sequence
  Description of Artificial Sequence: Synthetic oligonucleotide
  Antisense strand to SEQ ID NO: 1596551
cauuccaggaaguuugcau

SEQ ID NO: 1596553 - RNA, 19 nt, Artificial Sequence
  Description of Artificial Sequence: Synthetic oligonucleotide
  Sense strand starting at position 1975 of SEQ ID NO: 1560385
gagaaaugaucuggaauac

SEQ ID NO: 1596554 - RNA, 19 nt, Artificial Sequence
  Description of Artificial Sequence: Synthetic oligonucleotide
  Antisense strand to SEQ ID NO: 1596553
guauuccagaucauuucuc

SEQ ID NO: 1596555 - RNA, 19 nt, Artificial Sequence
  Description of Artificial Sequence: Synthetic oligonucleotide
  Sense strand starting at position 2079 of SEQ ID NO: 1560385
ucacgacugcccuguucua

SEQ ID NO: 1596556 - RNA, 19 nt, Artificial Sequence
  Description of Artificial Sequence: Synthetic oligonucleotide
  Antisense strand to SEQ ID NO: 1596555
uagaacagggcagucguga

SEQ ID NO: 1596557 - RNA, 19 nt, Artificial Sequence
  Description of Artificial Sequence: Synthetic oligonucleotide
  Sense strand starting at position 2086 of SEQ ID NO: 1560385
ugcccuguucuagaaauca

SEQ ID NO: 1596558 - RNA, 19 nt, Artificial Sequence
  Description of Artificial Sequence: Synthetic oligonucleotide
  Antisense strand to SEQ ID NO: 1596557
ugauuucuagaacagggca

SEQ ID NO: 1596559 - RNA, 19 nt, Artificial Sequence
  Description of Artificial Sequence: Synthetic oligonucleotide
  Sense strand starting at position 2118 of SEQ ID NO: 1560385
gcaucaugcugccugaguu

SEQ ID NO: 1596560 - RNA, 19 nt, Artificial Sequence
  Description of Artificial Sequence: Synthetic oligonucleotide
  Antisense strand to SEQ ID NO: 1596559
aacucaggcagcaugaugc

SEQ ID NO: 1596561 - RNA, 19 nt, Artificial Sequence
  Description of Artificial Sequence: Synthetic oligonucleotide
  Sense strand starting at position 2250 of SEQ ID NO: 1560385
gucucauuccuugacuggu

SEQ ID NO: 1596562 - RNA, 19 nt, Artificial Sequence
  Description of Artificial Sequence: Synthetic oligonucleotide
  Antisense strand to SEQ ID NO: 1596561
accagucaaggaaugagac

SEQ ID NO: 1596563 - RNA, 19 nt, Artificial Sequence
  Description of Artificial Sequence: Synthetic oligonucleotide
  Sense strand starting at position 2268 of SEQ ID NO: 1560385
ugagguugacuguaacuua

SEQ ID NO: 1596564 - RNA, 19 nt, Artificial Sequence
  Description of Artificial Sequence: Synthetic oligonucleotide
  Antisense strand to SEQ ID NO: 1596563
uaaguuacagucaaccuca

SEQ ID NO: 1596565 - RNA, 19 nt, Artificial Sequence
  Description of Artificial Sequence: Synthetic oligonucleotide
  Sense strand starting at position 2271 of SEQ ID NO: 1560385
gguugacuguaacuuauua

SEQ ID NO: 1596566 - RNA, 19 nt, Artificial Sequence
  Description of Artificial Sequence: Synthetic oligonucleotide
  Antisense strand to SEQ ID NO: 1596565
uaauaaguuacagucaacc

SEQ ID NO: 1596567 - RNA, 19 nt, Artificial Sequence
  Description of Artificial Sequence: Synthetic oligonucleotide
  Sense strand starting at position 2803 of SEQ ID NO: 1560385
cucaguuuacuguaaccua

SEQ ID NO: 1596568 - RNA, 19 nt, Artificial Sequence
  Description of Artificial Sequence: Synthetic oligonucleotide
  Antisense strand to SEQ ID NO: 1596567
uagguuacaguaaacugag

SEQ ID NO: 1596569 - RNA, 19 nt, Artificial Sequence
  Description of Artificial Sequence: Synthetic oligonucleotide
  Sense strand starting at position 2895 of SEQ ID NO: 1560385
cuggguaacuuucguauuu

SEQ ID NO: 1596570 - RNA, 19 nt, Artificial Sequence
  Description of Artificial Sequence: Synthetic oligonucleotide
  Antisense strand to SEQ ID NO: 1596569
aaauacgaaaguuacccag

SEQ ID NO: 1596571 - RNA, 19 nt, Artificial Sequence
  Description of Artificial Sequence: Synthetic oligonucleotide
  Sense strand starting at position 3344 of SEQ ID NO: 1560385
cuggguuguuucuuaagga

SEQ ID NO: 1596572 - RNA, 19 nt, Artificial Sequence
  Description of Artificial Sequence: Synthetic oligonucleotide
  Antisense strand to SEQ ID NO: 1596571
uccuuaagaaacaacccag

SEQ ID NO: 1596573 - RNA, 19 nt, Artificial Sequence
  Description of Artificial Sequence: Synthetic oligonucleotide
  Sense strand starting at position 3345 of SEQ ID NO: 1560385
uggguuguuucuuaaggau

SEQ ID NO: 1596574 - RNA, 19 nt, Artificial Sequence
  Description of Artificial Sequence: Synthetic oligonucleotide
  Antisense strand to SEQ ID NO: 1596573
auccuuaagaaacaaccca

SEQ ID NO: 1596575 - RNA, 19 nt, Artificial Sequence
  Description of Artificial Sequence: Synthetic oligonucleotide
  Sense strand starting at position 3373 of SEQ ID NO: 1560385
aaagguaggucucuaguga

SEQ ID NO: 1596576 - RNA, 19 nt, Artificial Sequence
  Description of Artificial Sequence: Synthetic oligonucleotide
  Antisense strand to SEQ ID NO: 1596575
ucacuagagaccuaccuuu

SEQ ID NO: 1596577 - RNA, 19 nt, Artificial Sequence
  Description of Artificial Sequence: Synthetic oligonucleotide
  Sense strand starting at position 3395 of SEQ ID NO: 1560385
acaguagggcucuagucau

SEQ ID NO: 1596578 - RNA, 19 nt, Artificial Sequence
  Description of Artificial Sequence: Synthetic oligonucleotide
  Antisense strand to SEQ ID NO: 1596577
augacuagagcccuacugu

SEQ ID NO: 1596579 - RNA, 19 nt, Artificial Sequence
  Description of Artificial Sequence: Synthetic oligonucleotide
  Sense strand starting at position 3407 of SEQ ID NO: 1560385
uagucauuccaucgaugug

SEQ ID NO: 1596580 - RNA, 19 nt, Artificial Sequence
  Description of Artificial Sequence: Synthetic oligonucleotide
  Antisense strand to SEQ ID NO: 1596579
cacaucgauggaaugacua

SEQ ID NO: 1596581 - RNA, 19 nt, Artificial Sequence
  Description of Artificial Sequence: Synthetic oligonucleotide
  Sense strand starting at position 3408 of SEQ ID NO: 1560385
agucauuccaucgauguga

SEQ ID NO: 1596582 - RNA, 19 nt, Artificial Sequence
  Description of Artificial Sequence: Synthetic oligonucleotide
  Antisense strand to SEQ ID NO: 1596581
ucacaucgauggaaugacu

SEQ ID NO: 1596583 - RNA, 19 nt, Artificial Sequence
  Description of Artificial Sequence: Synthetic oligonucleotide
  Sense strand starting at position 3410 of SEQ ID NO: 1560385
ucauuccaucgaugugauc

SEQ ID NO: 1596584 - RNA, 19 nt, Artificial Sequence
  Description of Artificial Sequence: Synthetic oligonucleotide
  Antisense strand to SEQ ID NO: 1596583
gaucacaucgauggaauga

SEQ ID NO: 1596585 - RNA, 19 nt, Artificial Sequence
  Description of Artificial Sequence: Synthetic oligonucleotide
  Sense strand starting at position 3419 of SEQ ID NO: 1560385
cgaugugaucgcugggcaa

SEQ ID NO: 1596586 - RNA, 19 nt, Artificial Sequence
  Description of Artificial Sequence: Synthetic oligonucleotide
  Antisense strand to SEQ ID NO: 1596585
uugcccagcgaucacaucg

SEQ ID NO: 1596587 - RNA, 19 nt, Artificial Sequence
  Description of Artificial Sequence: Synthetic oligonucleotide
  Sense strand starting at position 3421 of SEQ ID NO: 1560385
augugaucgcugggcaaag

SEQ ID NO: 1596588 - RNA, 19 nt, Artificial Sequence
  Description of Artificial Sequence: Synthetic oligonucleotide
  Antisense strand to SEQ ID NO: 1596587
cuuugcccagcgaucacau

SEQ ID NO: 1596589 - RNA, 19 nt, Artificial Sequence
  Description of Artificial Sequence: Synthetic oligonucleotide
  Sense strand starting at position 3481 of SEQ ID NO: 1560385
gagagaacgugugcucauc

SEQ ID NO: 1596590 - RNA, 19 nt, Artificial Sequence
  Description of Artificial Sequence: Synthetic oligonucleotide
  Antisense strand to SEQ ID NO: 1596589
gaugagcacacguucucuc

SEQ ID NO: 1596591 - RNA, 19 nt, Artificial Sequence
  Description of Artificial Sequence: Synthetic oligonucleotide
  Sense strand starting at position 3500 of SEQ ID NO: 1560385
cugaaacugcugugugacu

SEQ ID NO: 1596592 - RNA, 19 nt, Artificial Sequence
  Description of Artificial Sequence: Synthetic oligonucleotide
  Antisense strand to SEQ ID NO: 1596591
agucacacagcaguuucag

SEQ ID NO: 1596593 - RNA, 19 nt, Artificial Sequence
  Description of Artificial Sequence: Synthetic oligonucleotide
  Sense strand starting at position 3505 of SEQ ID NO: 1560385
acugcugugugacuugaga

SEQ ID NO: 1596594 - RNA, 19 nt, Artificial Sequence
  Description of Artificial Sequence: Synthetic oligonucleotide
  Antisense strand to SEQ ID NO: 1596593
ucucaagucacacagcagu

SEQ ID NO: 1596595 - RNA, 19 nt, Artificial Sequence
  Description of Artificial Sequence: Synthetic oligonucleotide
  Sense strand starting at position 14 of SEQ ID NO: 1560386
gcagaacagguguaagagu

SEQ ID NO: 1596596 - RNA, 19 nt, Artificial Sequence
  Description of Artificial Sequence: Synthetic oligonucleotide
  Antisense strand to SEQ ID NO: 1596595
acucuuacaccuguucugc

SEQ ID NO: 1596597 - RNA, 19 nt, Artificial Sequence
  Description of Artificial Sequence: Synthetic oligonucleotide
  Sense strand starting at position 72 of SEQ ID NO: 1560386
ggaggaaucacgcagucca

SEQ ID NO: 1596598 - RNA, 19 nt, Artificial Sequence
  Description of Artificial Sequence: Synthetic oligonucleotide
  Antisense strand to SEQ ID NO: 1596597
uggacugcgugauuccucc

SEQ ID NO: 1596599 - RNA, 19 nt, Artificial Sequence
  Description of Artificial Sequence: Synthetic oligonucleotide
  Sense strand starting at position 130 of SEQ ID NO: 1560386
ggaagcugucgaugaggca

SEQ ID NO: 1596600 - RNA, 19 nt, Artificial Sequence
  Description of Artificial Sequence: Synthetic oligonucleotide
  Antisense strand to SEQ ID NO: 1596599
ugccucaucgacagcuucc

SEQ ID NO: 1596601 - RNA, 19 nt, Artificial Sequence
  Description of Artificial Sequence: Synthetic oligonucleotide
  Sense strand starting at position 131 of SEQ ID NO: 1560386
gaagcugucgaugaggcaa

SEQ ID NO: 1596602 - RNA, 19 nt, Artificial Sequence
  Description of Artificial Sequence: Synthetic oligonucleotide
  Antisense strand to SEQ ID NO: 1596601
uugccucaucgacagcuuc

SEQ ID NO: 1596603 - RNA, 19 nt, Artificial Sequence
  Description of Artificial Sequence: Synthetic oligonucleotide
  Sense strand starting at position 145 of SEQ ID NO: 1560386
ggcaauaacuggccuagga

SEQ ID NO: 1596604 - RNA, 19 nt, Artificial Sequence
  Description of Artificial Sequence: Synthetic oligonucleotide
  Antisense strand to SEQ ID NO: 1596603
uccuaggccaguuauugcc

SEQ ID NO: 1596605 - RNA, 19 nt, Artificial Sequence
  Description of Artificial Sequence: Synthetic oligonucleotide
  Sense strand starting at position 351 of SEQ ID NO: 1560386
gcggauauuggucaguucu

SEQ ID NO: 1596606 - RNA, 19 nt, Artificial Sequence
  Description of Artificial Sequence: Synthetic oligonucleotide
  Antisense strand to SEQ ID NO: 1596605
agaacugaccaauauccgc

SEQ ID NO: 1596607 - RNA, 19 nt, Artificial Sequence
  Description of Artificial Sequence: Synthetic oligonucleotide
  Sense strand starting at position 353 of SEQ ID NO: 1560386
ggauauuggucaguucuuc

SEQ ID NO: 1596608 - RNA, 19 nt, Artificial Sequence
  Description of Artificial Sequence: Synthetic oligonucleotide
  Antisense strand to SEQ ID NO: 1596607
gaagaacugaccaauaucc

SEQ ID NO: 1596609 - RNA, 19 nt, Artificial Sequence
  Description of Artificial Sequence: Synthetic oligonucleotide
  Sense strand starting at position 390 of SEQ ID NO: 1560386
cuagaagaaucauauagga

SEQ ID NO: 1596610 - RNA, 19 nt, Artificial Sequence
  Description of Artificial Sequence: Synthetic oligonucleotide
  Antisense strand to SEQ ID NO: 1596609
uccuauaugauucuucuag

SEQ ID NO: 1596611 - RNA, 19 nt, Artificial Sequence
  Description of Artificial Sequence: Synthetic oligonucleotide
  Sense strand starting at position 495 of SEQ ID NO: 1560386
gagucaagauuccuggguu

SEQ ID NO: 1596612 - RNA, 19 nt, Artificial Sequence
  Description of Artificial Sequence: Synthetic oligonucleotide
  Antisense strand to SEQ ID NO: 1596611
aacccaggaaucuugacuc

SEQ ID NO: 1596613 - RNA, 19 nt, Artificial Sequence
  Description of Artificial Sequence: Synthetic oligonucleotide
  Sense strand starting at position 498 of SEQ ID NO: 1560386
ucaagauuccuggguucug

SEQ ID NO: 1596614 - RNA, 19 nt, Artificial Sequence
  Description of Artificial Sequence: Synthetic oligonucleotide
  Antisense strand to SEQ ID NO: 1596613
cagaacccaggaaucuuga

SEQ ID NO: 1596615 - RNA, 19 nt, Artificial Sequence
  Description of Artificial Sequence: Synthetic oligonucleotide
  Sense strand starting at position 821 of SEQ ID NO: 1560386
aaagauuccuggguucuga

SEQ ID NO: 1596616 - RNA, 19 nt, Artificial Sequence
  Description of Artificial Sequence: Synthetic oligonucleotide
  Antisense strand to SEQ ID NO: 1596615
ucagaacccaggaaucuuu

SEQ ID NO: 1596617 - RNA, 19 nt, Artificial Sequence
  Description of Artificial Sequence: Synthetic oligonucleotide
  Sense strand starting at position 1170 of SEQ ID NO: 1560386
gaggguaacuggcuugcua

SEQ ID NO: 1596618 - RNA, 19 nt, Artificial Sequence
  Description of Artificial Sequence: Synthetic oligonucleotide
  Antisense strand to SEQ ID NO: 1596617
uagcaagccaguuacccuc

SEQ ID NO: 1596619 - RNA, 19 nt, Artificial Sequence
  Description of Artificial Sequence: Synthetic oligonucleotide
  Sense strand starting at position 1172 of SEQ ID NO: 1560386
ggguaacuggcuugcuaaa

SEQ ID NO: 1596620 - RNA, 19 nt, Artificial Sequence
  Description of Artificial Sequence: Synthetic oligonucleotide
  Antisense strand to SEQ ID NO: 1596619
uuuagcaagccaguuaccc

SEQ ID NO: 1596621 - RNA, 19 nt, Artificial Sequence
  Description of Artificial Sequence: Synthetic oligonucleotide
  Sense strand starting at position 1174 of SEQ ID NO: 1560386
guaacuggcuugcuaaaga

SEQ ID NO: 1596622 - RNA, 19 nt, Artificial Sequence
  Description of Artificial Sequence: Synthetic oligonucleotide
  Antisense strand to SEQ ID NO: 1596621
ucuuuagcaagccaguuac

SEQ ID NO: 1596623 - RNA, 19 nt, Artificial Sequence
  Description of Artificial Sequence: Synthetic oligonucleotide
  Sense strand starting at position 1301 of SEQ ID NO: 1560386
ggaccugucauggaagcuu

SEQ ID NO: 1596624 - RNA, 19 nt, Artificial Sequence
  Description of Artificial Sequence: Synthetic oligonucleotide
  Antisense strand to SEQ ID NO: 1596623
aagcuuccaugacaggucc

SEQ ID NO: 1596625 - RNA, 19 nt, Artificial Sequence
  Description of Artificial Sequence: Synthetic oligonucleotide
  Sense strand starting at position 2073 of SEQ ID NO: 1560386
uuucuaguuucuccgagga

SEQ ID NO: 1596626 - RNA, 19 nt, Artificial Sequence
  Description of Artificial Sequence: Synthetic oligonucleotide
  Antisense strand to SEQ ID NO: 1596625
uccucggagaaacuagaaa

SEQ ID NO: 1596627 - RNA, 19 nt, Artificial Sequence
  Description of Artificial Sequence: Synthetic oligonucleotide
  Sense strand starting at position 2077 of SEQ ID NO: 1560386
uaguuucuccgaggaggua

SEQ ID NO: 1596628 - RNA, 19 nt, Artificial Sequence
  Description of Artificial Sequence: Synthetic oligonucleotide
  Antisense strand to SEQ ID NO: 1596627
uaccuccucggagaaacua

SEQ ID NO: 1596629 - RNA, 19 nt, Artificial Sequence
  Description of Artificial Sequence: Synthetic oligonucleotide
  Sense strand starting at position 2078 of SEQ ID NO: 1560386
aguuucuccgaggagguaa

SEQ ID NO: 1596630 - RNA, 19 nt, Artificial Sequence
  Description of Artificial Sequence: Synthetic oligonucleotide
  Antisense strand to SEQ ID NO: 1596629
uuaccuccucggagaaacu

SEQ ID NO: 1596631 - RNA, 19 nt, Artificial Sequence
  Description of Artificial Sequence: Synthetic oligonucleotide
  Sense strand starting at position 2156 of SEQ ID NO: 1560386
uccuguaggcuuugaugau

SEQ ID NO: 1596632 - RNA, 19 nt, Artificial Sequence
  Description of Artificial Sequence: Synthetic oligonucleotide
  Antisense strand to SEQ ID NO: 1596631
aucaucaaagccuacagga

SEQ ID NO: 1596633 - RNA, 19 nt, Artificial Sequence
  Description of Artificial Sequence: Synthetic oligonucleotide
  Sense strand starting at position 2247 of SEQ ID NO: 1560386
ccacauucccuguagguuu

SEQ ID NO: 1596634 - RNA, 19 nt, Artificial Sequence
  Description of Artificial Sequence: Synthetic oligonucleotide
  Antisense strand to SEQ ID NO: 1596633
aaaccuacagggaaugugg

SEQ ID NO: 1596635 - RNA, 19 nt, Artificial Sequence
  Description of Artificial Sequence: Synthetic oligonucleotide
  Sense strand starting at position 2254 of SEQ ID NO: 1560386
cccuguagguuuccaguau

SEQ ID NO: 1596636 - RNA, 19 nt, Artificial Sequence
  Description of Artificial Sequence: Synthetic oligonucleotide
  Antisense strand to SEQ ID NO: 1596635
auacuggaaaccuacaggg

SEQ ID NO: 1596637 - RNA, 19 nt, Artificial Sequence
  Description of Artificial Sequence: Synthetic oligonucleotide
  Sense strand starting at position 2258 of SEQ ID NO: 1560386
guagguuuccaguauauag

SEQ ID NO: 1596638 - RNA, 19 nt, Artificial Sequence
  Description of Artificial Sequence: Synthetic oligonucleotide
  Antisense strand to SEQ ID NO: 1596637
cuauauacuggaaaccuac

SEQ ID NO: 1596639 - RNA, 19 nt, Artificial Sequence
  Description of Artificial Sequence: Synthetic oligonucleotide
  Sense strand starting at position 2260 of SEQ ID NO: 1560386
agguuuccaguauauagua

SEQ ID NO: 1596640 - RNA, 19 nt, Artificial Sequence
  Description of Artificial Sequence: Synthetic oligonucleotide
  Antisense strand to SEQ ID NO: 1596639
uacuauauacuggaaaccu

SEQ ID NO: 1596641 - RNA, 19 nt, Artificial Sequence
  Description of Artificial Sequence: Synthetic oligonucleotide
  Sense strand starting at position 2374 of SEQ ID NO: 1560386
cugugcccugcucaaagau

SEQ ID NO: 1596642 - RNA, 19 nt, Artificial Sequence
  Description of Artificial Sequence: Synthetic oligonucleotide
  Antisense strand to SEQ ID NO: 1596641
aucuuugagcagggcacag

SEQ ID NO: 1596643 - RNA, 19 nt, Artificial Sequence
  Description of Artificial Sequence: Synthetic oligonucleotide
  Sense strand starting at position 2468 of SEQ ID NO: 1560386
ggugguugaguccagcgau

SEQ ID NO: 1596644 - RNA, 19 nt, Artificial Sequence
  Description of Artificial Sequence: Synthetic oligonucleotide
  Antisense strand to SEQ ID NO: 1596643
aucgcuggacucaaccacc

SEQ ID NO: 1596645 - RNA, 19 nt, Artificial Sequence
  Description of Artificial Sequence: Synthetic oligonucleotide
  Sense strand starting at position 2662 of SEQ ID NO: 1560386
caguuuaacguagacuauu

SEQ ID NO: 1596646 - RNA, 19 nt, Artificial Sequence
  Description of Artificial Sequence: Synthetic oligonucleotide
  Antisense strand to SEQ ID NO: 1596645
aauagucuacguuaaacug

SEQ ID NO: 1596647 - RNA, 19 nt, Artificial Sequence
  Description of Artificial Sequence: Synthetic oligonucleotide
  Sense strand starting at position 2828 of SEQ ID NO: 1560386
uguacauuagguuguugaa

SEQ ID NO: 1596648 - RNA, 19 nt, Artificial Sequence
  Description of Artificial Sequence: Synthetic oligonucleotide
  Antisense strand to SEQ ID NO: 1596647
uucaacaaccuaauguaca

SEQ ID NO: 1596649 - RNA, 19 nt, Artificial Sequence
  Description of Artificial Sequence: Synthetic oligonucleotide
  Sense strand starting at position 2841 of SEQ ID NO: 1560386
guugaacuccuccagacua

SEQ ID NO: 1596650 - RNA, 19 nt, Artificial Sequence
  Description of Artificial Sequence: Synthetic oligonucleotide
  Antisense strand to SEQ ID NO: 1596649
uagucuggaggaguucaac

SEQ ID NO: 1596651 - RNA, 19 nt, Artificial Sequence
  Description of Artificial Sequence: Synthetic oligonucleotide
  Sense strand starting at position 2933 of SEQ ID NO: 1560386
ggcagcauuuacuuguaau

SEQ ID NO: 1596652 - RNA, 19 nt, Artificial Sequence
  Description of Artificial Sequence: Synthetic oligonucleotide
  Antisense strand to SEQ ID NO: 1596651
auuacaaguaaaugcugcc

SEQ ID NO: 1596653 - RNA, 19 nt, Artificial Sequence
  Description of Artificial Sequence: Synthetic oligonucleotide
  Sense strand starting at position 2936 of SEQ ID NO: 1560386
agcauuuacuuguaaugac

SEQ ID NO: 1596654 - RNA, 19 nt, Artificial Sequence
  Description of Artificial Sequence: Synthetic oligonucleotide
  Antisense strand to SEQ ID NO: 1596653
gucauuacaaguaaaugcu

SEQ ID NO: 1596655 - RNA, 19 nt, Artificial Sequence
  Description of Artificial Sequence: Synthetic oligonucleotide
  Sense strand starting at position 3123 of SEQ ID NO: 1560386
ggaaccaucucggcuaacu

SEQ ID NO: 1596656 - RNA, 19 nt, Artificial Sequence
  Description of Artificial Sequence: Synthetic oligonucleotide
  Antisense strand to SEQ ID NO: 1596655
aguuagccgagaugguucc

SEQ ID NO: 1596657 - RNA, 19 nt, Artificial Sequence
  Description of Artificial Sequence: Synthetic oligonucleotide
  Sense strand starting at position 3585 of SEQ ID NO: 1560386
agacaauuggaacguuuga

SEQ ID NO: 1596658 - RNA, 19 nt, Artificial Sequence
  Description of Artificial Sequence: Synthetic oligonucleotide
  Antisense strand to SEQ ID NO: 1596657
ucaaacguuccaauugucu

SEQ ID NO: 1596659 - RNA, 19 nt, Artificial Sequence
  Description of Artificial Sequence: Synthetic oligonucleotide
  Sense strand starting at position 3592 of SEQ ID NO: 1560386
uggaacguuugauuacaca

SEQ ID NO: 1596660 - RNA, 19 nt, Artificial Sequence
  Description of Artificial Sequence: Synthetic oligonucleotide
  Antisense strand to SEQ ID NO: 1596659
uguguaaucaaacguucca

SEQ ID NO: 1596661 - RNA, 19 nt, Artificial Sequence
  Description of Artificial Sequence: Synthetic oligonucleotide
  Sense strand starting at position 3608 of SEQ ID NO: 1560386
acacuuacuguuggaugau

SEQ ID NO: 1596662 - RNA, 19 nt, Artificial Sequence
  Description of Artificial Sequence: Synthetic oligonucleotide
  Antisense strand to SEQ ID NO: 1596661
aucauccaacaguaagugu

SEQ ID NO: 1596663 - RNA, 19 nt, Artificial Sequence
  Description of Artificial Sequence: Synthetic oligonucleotide
  Sense strand starting at position 3611 of SEQ ID NO: 1560386
cuuacuguuggaugauacu

SEQ ID NO: 1596664 - RNA, 19 nt, Artificial Sequence
  Description of Artificial Sequence: Synthetic oligonucleotide
  Antisense strand to SEQ ID NO: 1596663
aguaucauccaacaguaag

SEQ ID NO: 1596665 - RNA, 19 nt, Artificial Sequence
  Description of Artificial Sequence: Synthetic oligonucleotide
  Sense strand starting at position 3617 of SEQ ID NO: 1560386
guuggaugauacuaagaag

SEQ ID NO: 1596666 - RNA, 19 nt, Artificial Sequence
  Description of Artificial Sequence: Synthetic oligonucleotide
  Antisense strand to SEQ ID NO: 1596665
cuucuuaguaucauccaac

SEQ ID NO: 1596667 - RNA, 19 nt, Artificial Sequence
  Description of Artificial Sequence: Synthetic oligonucleotide
  Sense strand starting at position 3620 of SEQ ID NO: 1560386
ggaugauacuaagaaguua

SEQ ID NO: 1596668 - RNA, 19 nt, Artificial Sequence
  Description of Artificial Sequence: Synthetic oligonucleotide
  Antisense strand to SEQ ID NO: 1596667
uaacuucuuaguaucaucc

SEQ ID NO: 1596669 - RNA, 19 nt, Artificial Sequence
  Description of Artificial Sequence: Synthetic oligonucleotide
  Sense strand starting at position 3651 of SEQ ID NO: 1560386
guaacaauggcauacuagu

SEQ ID NO: 1596670 - RNA, 19 nt, Artificial Sequence
  Description of Artificial Sequence: Synthetic oligonucleotide
  Antisense strand to SEQ ID NO: 1596669
acuaguaugccauuguuac

SEQ ID NO: 1596671 - RNA, 19 nt, Artificial Sequence
  Description of Artificial Sequence: Synthetic oligonucleotide
  Sense strand starting at position 3694 of SEQ ID NO: 1560386
uggaaagaugccugccaag

SEQ ID NO: 1596672 - RNA, 19 nt, Artificial Sequence
  Description of Artificial Sequence: Synthetic oligonucleotide
  Antisense strand to SEQ ID NO: 1596671
cuuggcaggcaucuuucca

SEQ ID NO: 1596673 - RNA, 19 nt, Artificial Sequence
  Description of Artificial Sequence: Synthetic oligonucleotide
  Sense strand starting at position 3730 of SEQ ID NO: 1560386
auaugauuguauggauuug

SEQ ID NO: 1596674 - RNA, 19 nt, Artificial Sequence
  Description of Artificial Sequence: Synthetic oligonucleotide
  Antisense strand to SEQ ID NO: 1596673
caaauccauacaaucauau

SEQ ID NO: 1596675 - RNA, 19 nt, Artificial Sequence
  Description of Artificial Sequence: Synthetic oligonucleotide
  Sense strand starting at position 251 of SEQ ID NO: 1560387
gaaggagaaugacagagau

SEQ ID NO: 1596676 - RNA, 19 nt, Artificial Sequence
  Description of Artificial Sequence: Synthetic oligonucleotide
  Antisense strand to SEQ ID NO: 1596675
aucucugucauucuccuuc

SEQ ID NO: 1596677 - RNA, 19 nt, Artificial Sequence
  Description of Artificial Sequence: Synthetic oligonucleotide
  Sense strand starting at position 388 of SEQ ID NO: 1560387
uuuggacuuucuggaaaga

SEQ ID NO: 1596678 - RNA, 19 nt, Artificial Sequence
  Description of Artificial Sequence: Synthetic oligonucleotide
  Antisense strand to SEQ ID NO: 1596677
ucuuuccagaaaguccaaa

SEQ ID NO: 1596679 - RNA, 19 nt, Artificial Sequence
  Description of Artificial Sequence: Synthetic oligonucleotide
  Sense strand starting at position 612 of SEQ ID NO: 1560387
cugucugugacccaguuau

SEQ ID NO: 1596680 - RNA, 19 nt, Artificial Sequence
  Description of Artificial Sequence: Synthetic oligonucleotide
  Antisense strand to SEQ ID NO: 1596679
auaacugggucacagacag

SEQ ID NO: 1596681 - RNA, 19 nt, Artificial Sequence
  Description of Artificial Sequence: Synthetic oligonucleotide
  Sense strand starting at position 972 of SEQ ID NO: 1560387
gcuugaacccaagggauua

SEQ ID NO: 1596682 - RNA, 19 nt, Artificial Sequence
  Description of Artificial Sequence: Synthetic oligonucleotide
  Antisense strand to SEQ ID NO: 1596681
uaaucccuuggguucaagc

SEQ ID NO: 1596683 - RNA, 19 nt, Artificial Sequence
  Description of Artificial Sequence: Synthetic oligonucleotide
  Sense strand starting at position 984 of SEQ ID NO: 1560387
gggauuaagucagagacag

SEQ ID NO: 1596684 - RNA, 19 nt, Artificial Sequence
  Description of Artificial Sequence: Synthetic oligonucleotide
  Antisense strand to SEQ ID NO: 1596683
cugucucugacuuaauccc

SEQ ID NO: 1596685 - RNA, 19 nt, Artificial Sequence
  Description of Artificial Sequence: Synthetic oligonucleotide
  Sense strand starting at position 1007 of SEQ ID NO: 1560387
gggacugaaucacagaagu

SEQ ID NO: 1596686 - RNA, 19 nt, Artificial Sequence
  Description of Artificial Sequence: Synthetic oligonucleotide
  Antisense strand to SEQ ID NO: 1596685
acuucugugauucaguccc

SEQ ID NO: 1596687 - RNA, 19 nt, Artificial Sequence
  Description of Artificial Sequence: Synthetic oligonucleotide
  Sense strand starting at position 1020 of SEQ ID NO: 1560387
agaaguguuuguccucuau

SEQ ID NO: 1596688 - RNA, 19 nt, Artificial Sequence
  Description of Artificial Sequence: Synthetic oligonucleotide
  Antisense strand to SEQ ID NO: 1596687
auagaggacaaacacuucu

SEQ ID NO: 1596689 - RNA, 19 nt, Artificial Sequence
  Description of Artificial Sequence: Synthetic oligonucleotide
  Sense strand starting at position 1024 of SEQ ID NO: 1560387
guguuuguccucuaucuug

SEQ ID NO: 1596690 - RNA, 19 nt, Artificial Sequence
  Description of Artificial Sequence: Synthetic oligonucleotide
  Antisense strand to SEQ ID NO: 1596689
caagauagaggacaaacac

SEQ ID NO: 1596691 - RNA, 19 nt, Artificial Sequence
  Description of Artificial Sequence: Synthetic oligonucleotide
  Sense strand starting at position 1648 of SEQ ID NO: 1560387
cccagugggccuuagagau

SEQ ID NO: 1596692 - RNA, 19 nt, Artificial Sequence
  Description of Artificial Sequence: Synthetic oligonucleotide
  Antisense strand to SEQ ID NO: 1596691
aucucuaaggcccacuggg

SEQ ID NO: 1596693 - RNA, 19 nt, Artificial Sequence
  Description of Artificial Sequence: Synthetic oligonucleotide
  Sense strand starting at position 2324 of SEQ ID NO: 1560387
uugguuaacucucucaguu

SEQ ID NO: 1596694 - RNA, 19 nt, Artificial Sequence
  Description of Artificial Sequence: Synthetic oligonucleotide
  Antisense strand to SEQ ID NO: 1596693
aacugagagaguuaaccaa

SEQ ID NO: 1596695 - RNA, 19 nt, Artificial Sequence
  Description of Artificial Sequence: Synthetic oligonucleotide
  Sense strand starting at position 2631 of SEQ ID NO: 1560387
gcgcuaucugcugugguga

SEQ ID NO: 1596696 - RNA, 19 nt, Artificial Sequence
  Description of Artificial Sequence: Synthetic oligonucleotide
  Antisense strand to SEQ ID NO: 1596695
ucaccacagcagauagcgc

SEQ ID NO: 1596697 - RNA, 19 nt, Artificial Sequence
  Description of Artificial Sequence: Synthetic oligonucleotide
  Sense strand starting at position 2633 of SEQ ID NO: 1560387
gcuaucugcuguggugaga

SEQ ID NO: 1596698 - RNA, 19 nt, Artificial Sequence
  Description of Artificial Sequence: Synthetic oligonucleotide
  Antisense strand to SEQ ID NO: 1596697
ucucaccacagcagauagc

SEQ ID NO: 1596699 - RNA, 19 nt, Artificial Sequence
  Description of Artificial Sequence: Synthetic oligonucleotide
  Sense strand starting at position 2771 of SEQ ID NO: 1560387
augacacacugauagagaa

SEQ ID NO: 1596700 - RNA, 19 nt, Artificial Sequence
  Description of Artificial Sequence: Synthetic oligonucleotide
  Antisense strand to SEQ ID NO: 1596699
uucucuaucagugugucau

SEQ ID NO: 1596701 - RNA, 19 nt, Artificial Sequence
  Description of Artificial Sequence: Synthetic oligonucleotide
  Sense strand starting at position 2873 of SEQ ID NO: 1560387
cacgcacgcucauguagau

SEQ ID NO: 1596702 - RNA, 19 nt, Artificial Sequence
  Description of Artificial Sequence: Synthetic oligonucleotide
  Antisense strand to SEQ ID NO: 1596701
aucuacaugagcgugcgug

SEQ ID NO: 1596703 - RNA, 19 nt, Artificial Sequence
  Description of Artificial Sequence: Synthetic oligonucleotide
  Sense strand starting at position 2962 of SEQ ID NO: 1560387
aaugcauguuuaugugaag

SEQ ID NO: 1596704 - RNA, 19 nt, Artificial Sequence
  Description of Artificial Sequence: Synthetic oligonucleotide
  Antisense strand to SEQ ID NO: 1596703
cuucacauaaacaugcauu

SEQ ID NO: 1596705 - RNA, 19 nt, Artificial Sequence
  Description of Artificial Sequence: Synthetic oligonucleotide
  Sense strand starting at position 2963 of SEQ ID NO: 1560387
augcauguuuaugugaaga

SEQ ID NO: 1596706 - RNA, 19 nt, Artificial Sequence
  Description of Artificial Sequence: Synthetic oligonucleotide
  Antisense strand to SEQ ID NO: 1596705
ucuucacauaaacaugcau

SEQ ID NO: 1596707 - RNA, 19 nt, Artificial Sequence
  Description of Artificial Sequence: Synthetic oligonucleotide
  Sense strand starting at position 3032 of SEQ ID NO: 1560387
auaaaugcauucuaagaug

SEQ ID NO: 1596708 - RNA, 19 nt, Artificial Sequence
  Description of Artificial Sequence: Synthetic oligonucleotide
  Antisense strand to SEQ ID NO: 1596707
caucuuagaaugcauuuau

SEQ ID NO: 1596709 - RNA, 19 nt, Artificial Sequence
  Description of Artificial Sequence: Synthetic oligonucleotide
  Sense strand starting at position 3404 of SEQ ID NO: 1560387
ccuacauggucccaaagau

SEQ ID NO: 1596710 - RNA, 19 nt, Artificial Sequence
  Description of Artificial Sequence: Synthetic oligonucleotide
  Antisense strand to SEQ ID NO: 1596709
aucuuugggaccauguagg

SEQ ID NO: 1596711 - RNA, 19 nt, Artificial Sequence
  Description of Artificial Sequence: Synthetic oligonucleotide
  Sense strand starting at position 3553 of SEQ ID NO: 1560387
acacccuaugcuugagcaa

SEQ ID NO: 1596712 - RNA, 19 nt, Artificial Sequence
  Description of Artificial Sequence: Synthetic oligonucleotide
  Antisense strand to SEQ ID NO: 1596711
uugcucaagcauagggugu

SEQ ID NO: 1596713 - RNA, 19 nt, Artificial Sequence
  Description of Artificial Sequence: Synthetic oligonucleotide
  Sense strand starting at position 3556 of SEQ ID NO: 1560387
cccuaugcuugagcaaaca

SEQ ID NO: 1596714 - RNA, 19 nt, Artificial Sequence
  Description of Artificial Sequence: Synthetic oligonucleotide
  Antisense strand to SEQ ID NO: 1596713
uguuugcucaagcauaggg

SEQ ID NO: 1596715 - RNA, 19 nt, Artificial Sequence
  Description of Artificial Sequence: Synthetic oligonucleotide
  Sense strand starting at position 3839 of SEQ ID NO: 1560387
ucacuaagaucacguguau

SEQ ID NO: 1596716 - RNA, 19 nt, Artificial Sequence
  Description of Artificial Sequence: Synthetic oligonucleotide
  Antisense strand to SEQ ID NO: 1596715
auacacgugaucuuaguga

SEQ ID NO: 1596717 - RNA, 19 nt, Artificial Sequence
  Description of Artificial Sequence: Synthetic oligonucleotide
  Sense strand starting at position 3843 of SEQ ID NO: 1560387
uaagaucacguguauaauc

SEQ ID NO: 1596718 - RNA, 19 nt, Artificial Sequence
  Description of Artificial Sequence: Synthetic oligonucleotide
  Antisense strand to SEQ ID NO: 1596717
gauuauacacgugaucuua

SEQ ID NO: 1596719 - RNA, 19 nt, Artificial Sequence
  Description of Artificial Sequence: Synthetic oligonucleotide
  Sense strand starting at position 3851 of SEQ ID NO: 1560387
cguguauaauccuggacag

SEQ ID NO: 1596720 - RNA, 19 nt, Artificial Sequence
  Description of Artificial Sequence: Synthetic oligonucleotide
  Antisense strand to SEQ ID NO: 1596719
cuguccaggauuauacacg

SEQ ID NO: 1596721 - RNA, 19 nt, Artificial Sequence
  Description of Artificial Sequence: Synthetic oligonucleotide
  Sense strand starting at position 3852 of SEQ ID NO: 1560387
guguauaauccuggacagg

SEQ ID NO: 1596722 - RNA, 19 nt, Artificial Sequence
  Description of Artificial Sequence: Synthetic oligonucleotide
  Antisense strand to SEQ ID NO: 1596721
ccuguccaggauuauacac

SEQ ID NO: 1596723 - RNA, 19 nt, Artificial Sequence
  Description of Artificial Sequence: Synthetic oligonucleotide
  Sense strand starting at position 3884 of SEQ ID NO: 1560387
ugaacuugacauugucuua

SEQ ID NO: 1596724 - RNA, 19 nt, Artificial Sequence
  Description of Artificial Sequence: Synthetic oligonucleotide
  Antisense strand to SEQ ID NO: 1596723
uaagacaaugucaaguuca

SEQ ID NO: 1596725 - RNA, 19 nt, Artificial Sequence
  Description of Artificial Sequence: Synthetic oligonucleotide
  Sense strand starting at position 3887 of SEQ ID NO: 1560387
acuugacauugucuuauga

SEQ ID NO: 1596726 - RNA, 19 nt, Artificial Sequence
  Description of Artificial Sequence: Synthetic oligonucleotide
  Antisense strand to SEQ ID NO: 1596725
ucauaagacaaugucaagu

SEQ ID NO: 1596727 - RNA, 19 nt, Artificial Sequence
  Description of Artificial Sequence: Synthetic oligonucleotide
  Sense strand starting at position 3889 of SEQ ID NO: 1560387
uugacauugucuuaugauu

SEQ ID NO: 1596728 - RNA, 19 nt, Artificial Sequence
  Description of Artificial Sequence: Synthetic oligonucleotide
  Antisense strand to SEQ ID NO: 1596727
aaucauaagacaaugucaa

SEQ ID NO: 1596729 - RNA, 19 nt, Artificial Sequence
  Description of Artificial Sequence: Synthetic oligonucleotide
  Sense strand starting at position 892 of SEQ ID NO: 1560388
gaaggagaaugacagagau

SEQ ID NO: 1596730 - RNA, 19 nt, Artificial Sequence
  Description of Artificial Sequence: Synthetic oligonucleotide
  Antisense strand to SEQ ID NO: 1596729
aucucugucauucuccuuc

SEQ ID NO: 1596731 - RNA, 19 nt, Artificial Sequence
  Description of Artificial Sequence: Synthetic oligonucleotide
  Sense strand starting at position 1029 of SEQ ID NO: 1560388
uuuggacuuucuggaaaga

SEQ ID NO: 1596732 - RNA, 19 nt, Artificial Sequence
  Description of Artificial Sequence: Synthetic oligonucleotide
  Antisense strand to SEQ ID NO: 1596731
ucuuuccagaaaguccaaa

SEQ ID NO: 1596733 - RNA, 19 nt, Artificial Sequence
  Description of Artificial Sequence: Synthetic oligonucleotide
  Sense strand starting at position 1253 of SEQ ID NO: 1560388
cugucugugacccaguuau

SEQ ID NO: 1596734 - RNA, 19 nt, Artificial Sequence
  Description of Artificial Sequence: Synthetic oligonucleotide
  Antisense strand to SEQ ID NO: 1596733
auaacugggucacagacag

SEQ ID NO: 1596735 - RNA, 19 nt, Artificial Sequence
  Description of Artificial Sequence: Synthetic oligonucleotide
  Sense strand starting at position 1613 of SEQ ID NO: 1560388
gcuugaacccaagggauua

SEQ ID NO: 1596736 - RNA, 19 nt, Artificial Sequence
  Description of Artificial Sequence: Synthetic oligonucleotide
  Antisense strand to SEQ ID NO: 1596735
uaaucccuuggguucaagc

SEQ ID NO: 1596737 - RNA, 19 nt, Artificial Sequence
  Description of Artificial Sequence: Synthetic oligonucleotide
  Sense strand starting at position 1625 of SEQ ID NO: 1560388
gggauuaagucagagacag

SEQ ID NO: 1596738 - RNA, 19 nt, Artificial Sequence
  Description of Artificial Sequence: Synthetic oligonucleotide
  Antisense strand to SEQ ID NO: 1596737
cugucucugacuuaauccc

SEQ ID NO: 1596739 - RNA, 19 nt, Artificial Sequence
  Description of Artificial Sequence: Synthetic oligonucleotide
  Sense strand starting at position 1648 of SEQ ID NO: 1560388
gggacugaaucacagaagu

SEQ ID NO: 1596740 - RNA, 19 nt, Artificial Sequence
  Description of Artificial Sequence: Synthetic oligonucleotide
  Antisense strand to SEQ ID NO: 1596739
acuucugugauucaguccc

SEQ ID NO: 1596741 - RNA, 19 nt, Artificial Sequence
  Description of Artificial Sequence: Synthetic oligonucleotide
  Sense strand starting at position 1661 of SEQ ID NO: 1560388
agaaguguuuguccucuau

SEQ ID NO: 1596742 - RNA, 19 nt, Artificial Sequence
  Description of Artificial Sequence: Synthetic oligonucleotide
  Antisense strand to SEQ ID NO: 1596741
auagaggacaaacacuucu

SEQ ID NO: 1596743 - RNA, 19 nt, Artificial Sequence
  Description of Artificial Sequence: Synthetic oligonucleotide
  Sense strand starting at position 1665 of SEQ ID NO: 1560388
guguuuguccucuaucuug

SEQ ID NO: 1596744 - RNA, 19 nt, Artificial Sequence
  Description of Artificial Sequence: Synthetic oligonucleotide
  Antisense strand to SEQ ID NO: 1596743
caagauagaggacaaacac

SEQ ID NO: 1596745 - RNA, 19 nt, Artificial Sequence
  Description of Artificial Sequence: Synthetic oligonucleotide
  Sense strand starting at position 2289 of SEQ ID NO: 1560388
cccagugggccuuagagau

SEQ ID NO: 1596746 - RNA, 19 nt, Artificial Sequence
  Description of Artificial Sequence: Synthetic oligonucleotide
  Antisense strand to SEQ ID NO: 1596745
aucucuaaggcccacuggg

SEQ ID NO: 1596747 - RNA, 19 nt, Artificial Sequence
  Description of Artificial Sequence: Synthetic oligonucleotide
  Sense strand starting at position 2965 of SEQ ID NO: 1560388
uugguuaacucucucaguu

SEQ ID NO: 1596748 - RNA, 19 nt, Artificial Sequence
  Description of Artificial Sequence: Synthetic oligonucleotide
  Antisense strand to SEQ ID NO: 1596747
aacugagagaguuaaccaa

SEQ ID NO: 1596749 - RNA, 19 nt, Artificial Sequence
  Description of Artificial Sequence: Synthetic oligonucleotide
  Sense strand starting at position 3272 of SEQ ID NO: 1560388
gcgcuaucugcugugguga

SEQ ID NO: 1596750 - RNA, 19 nt, Artificial Sequence
  Description of Artificial Sequence: Synthetic oligonucleotide
  Antisense strand to SEQ ID NO: 1596749
ucaccacagcagauagcgc

SEQ ID NO: 1596751 - RNA, 19 nt, Artificial Sequence
  Description of Artificial Sequence: Synthetic oligonucleotide
  Sense strand starting at position 3274 of SEQ ID NO: 1560388
gcuaucugcuguggugaga

SEQ ID NO: 1596752 - RNA, 19 nt, Artificial Sequence
  Description of Artificial Sequence: Synthetic oligonucleotide
  Antisense strand to SEQ ID NO: 1596751
ucucaccacagcagauagc

SEQ ID NO: 1596753 - RNA, 19 nt, Artificial Sequence
  Description of Artificial Sequence: Synthetic oligonucleotide
  Sense strand starting at position 3412 of SEQ ID NO: 1560388
augacacacugauagagaa

SEQ ID NO: 1596754 - RNA, 19 nt, Artificial Sequence
  Description of Artificial Sequence: Synthetic oligonucleotide
  Antisense strand to SEQ ID NO: 1596753
uucucuaucagugugucau

SEQ ID NO: 1596755 - RNA, 19 nt, Artificial Sequence
  Description of Artificial Sequence: Synthetic oligonucleotide
  Sense strand starting at position 3514 of SEQ ID NO: 1560388
cacgcacgcucauguagau

SEQ ID NO: 1596756 - RNA, 19 nt, Artificial Sequence
  Description of Artificial Sequence: Synthetic oligonucleotide
  Antisense strand to SEQ ID NO: 1596755
aucuacaugagcgugcgug

SEQ ID NO: 1596757 - RNA, 19 nt, Artificial Sequence
  Description of Artificial Sequence: Synthetic oligonucleotide
  Sense strand starting at position 3603 of SEQ ID NO: 1560388
aaugcauguuuaugugaag

SEQ ID NO: 1596758 - RNA, 19 nt, Artificial Sequence
  Description of Artificial Sequence: Synthetic oligonucleotide
  Antisense strand to SEQ ID NO: 1596757
cuucacauaaacaugcauu

SEQ ID NO: 1596759 - RNA, 19 nt, Artificial Sequence
  Description of Artificial Sequence: Synthetic oligonucleotide
  Sense strand starting at position 3604 of SEQ ID NO: 1560388
augcauguuuaugugaaga

SEQ ID NO: 1596760 - RNA, 19 nt, Artificial Sequence
  Description of Artificial Sequence: Synthetic oligonucleotide
  Antisense strand to SEQ ID NO: 1596759
ucuucacauaaacaugcau

SEQ ID NO: 1596761 - RNA, 19 nt, Artificial Sequence
  Description of Artificial Sequence: Synthetic oligonucleotide
  Sense strand starting at position 3673 of SEQ ID NO: 1560388
auaaaugcauucuaagaug

SEQ ID NO: 1596762 - RNA, 19 nt, Artificial Sequence
  Description of Artificial Sequence: Synthetic oligonucleotide
  Antisense strand to SEQ ID NO: 1596761
caucuuagaaugcauuuau

SEQ ID NO: 1596763 - RNA, 19 nt, Artificial Sequence
  Description of Artificial Sequence: Synthetic oligonucleotide
  Sense strand starting at position 717 of SEQ ID NO: 1560389
gaaggagaaugacagagau

SEQ ID NO: 1596764 - RNA, 19 nt, Artificial Sequence
  Description of Artificial Sequence: Synthetic oligonucleotide
  Antisense strand to SEQ ID NO: 1596763
aucucugucauucuccuuc

SEQ ID NO: 1596765 - RNA, 19 nt, Artificial Sequence
  Description of Artificial Sequence: Synthetic oligonucleotide
  Sense strand starting at position 854 of SEQ ID NO: 1560389
uuuggacuuucuggaaaga

SEQ ID NO: 1596766 - RNA, 19 nt, Artificial Sequence
  Description of Artificial Sequence: Synthetic oligonucleotide
  Antisense strand to SEQ ID NO: 1596765
ucuuuccagaaaguccaaa

SEQ ID NO: 1596767 - RNA, 19 nt, Artificial Sequence
  Description of Artificial Sequence: Synthetic oligonucleotide
  Sense strand starting at position 1078 of SEQ ID NO: 1560389
cugucugugacccaguuau

SEQ ID NO: 1596768 - RNA, 19 nt, Artificial Sequence
  Description of Artificial Sequence: Synthetic oligonucleotide
  Antisense strand to SEQ ID NO: 1596767
auaacugggucacagacag

SEQ ID NO: 1596769 - RNA, 19 nt, Artificial Sequence
  Description of Artificial Sequence: Synthetic oligonucleotide
  Sense strand starting at position 1438 of SEQ ID NO: 1560389
gcuugaacccaagggauua

SEQ ID NO: 1596770 - RNA, 19 nt, Artificial Sequence
  Description of Artificial Sequence: Synthetic oligonucleotide
  Antisense strand to SEQ ID NO: 1596769
uaaucccuuggguucaagc

SEQ ID NO: 1596771 - RNA, 19 nt, Artificial Sequence
  Description of Artificial Sequence: Synthetic oligonucleotide
  Sense strand starting at position 1450 of SEQ ID NO: 1560389
gggauuaagucagagacag

SEQ ID NO: 1596772 - RNA, 19 nt, Artificial Sequence
  Description of Artificial Sequence: Synthetic oligonucleotide
  Antisense strand to SEQ ID NO: 1596771
cugucucugacuuaauccc

SEQ ID NO: 1596773 - RNA, 19 nt, Artificial Sequence
  Description of Artificial Sequence: Synthetic oligonucleotide
  Sense strand starting at position 1473 of SEQ ID NO: 1560389
gggacugaaucacagaagu

SEQ ID NO: 1596774 - RNA, 19 nt, Artificial Sequence
  Description of Artificial Sequence: Synthetic oligonucleotide
  Antisense strand to SEQ ID NO: 1596773
acuucugugauucaguccc

SEQ ID NO: 1596775 - RNA, 19 nt, Artificial Sequence
  Description of Artificial Sequence: Synthetic oligonucleotide
  Sense strand starting at position 1486 of SEQ ID NO: 1560389
agaaguguuuguccucuau

SEQ ID NO: 1596776 - RNA, 19 nt, Artificial Sequence
  Description of Artificial Sequence: Synthetic oligonucleotide
  Antisense strand to SEQ ID NO: 1596775
auagaggacaaacacuucu

SEQ ID NO: 1596777 - RNA, 19 nt, Artificial Sequence
  Description of Artificial Sequence: Synthetic oligonucleotide
  Sense strand starting at position 1490 of SEQ ID NO: 1560389
guguuuguccucuaucuug

SEQ ID NO: 1596778 - RNA, 19 nt, Artificial Sequence
  Description of Artificial Sequence: Synthetic oligonucleotide
  Antisense strand to SEQ ID NO: 1596777
caagauagaggacaaacac

SEQ ID NO: 1596779 - RNA, 19 nt, Artificial Sequence
  Description of Artificial Sequence: Synthetic oligonucleotide
  Sense strand starting at position 2114 of SEQ ID NO: 1560389
cccagugggccuuagagau

SEQ ID NO: 1596780 - RNA, 19 nt, Artificial Sequence
  Description of Artificial Sequence: Synthetic oligonucleotide
  Antisense strand to SEQ ID NO: 1596779
aucucuaaggcccacuggg

SEQ ID NO: 1596781 - RNA, 19 nt, Artificial Sequence
  Description of Artificial Sequence: Synthetic oligonucleotide
  Sense strand starting at position 2790 of SEQ ID NO: 1560389
uugguuaacucucucaguu

SEQ ID NO: 1596782 - RNA, 19 nt, Artificial Sequence
  Description of Artificial Sequence: Synthetic oligonucleotide
  Antisense strand to SEQ ID NO: 1596781
aacugagagaguuaaccaa

SEQ ID NO: 1596783 - RNA, 19 nt, Artificial Sequence
  Description of Artificial Sequence: Synthetic oligonucleotide
  Sense strand starting at position 3097 of SEQ ID NO: 1560389
gcgcuaucugcugugguga

SEQ ID NO: 1596784 - RNA, 19 nt, Artificial Sequence
  Description of Artificial Sequence: Synthetic oligonucleotide
  Antisense strand to SEQ ID NO: 1596783
ucaccacagcagauagcgc

SEQ ID NO: 1596785 - RNA, 19 nt, Artificial Sequence
  Description of Artificial Sequence: Synthetic oligonucleotide
  Sense strand starting at position 3099 of SEQ ID NO: 1560389
gcuaucugcuguggugaga

SEQ ID NO: 1596786 - RNA, 19 nt, Artificial Sequence
  Description of Artificial Sequence: Synthetic oligonucleotide
  Antisense strand to SEQ ID NO: 1596785
ucucaccacagcagauagc

SEQ ID NO: 1596787 - RNA, 19 nt, Artificial Sequence
  Description of Artificial Sequence: Synthetic oligonucleotide
  Sense strand starting at position 3237 of SEQ ID NO: 1560389
augacacacugauagagaa

SEQ ID NO: 1596788 - RNA, 19 nt, Artificial Sequence
  Description of Artificial Sequence: Synthetic oligonucleotide
  Antisense strand to SEQ ID NO: 1596787
uucucuaucagugugucau

SEQ ID NO: 1596789 - RNA, 19 nt, Artificial Sequence
  Description of Artificial Sequence: Synthetic oligonucleotide
  Sense strand starting at position 3339 of SEQ ID NO: 1560389
cacgcacgcucauguagau

SEQ ID NO: 1596790 - RNA, 19 nt, Artificial Sequence
  Description of Artificial Sequence: Synthetic oligonucleotide
  Antisense strand to SEQ ID NO: 1596789
aucuacaugagcgugcgug

SEQ ID NO: 1596791 - RNA, 19 nt, Artificial Sequence
  Description of Artificial Sequence: Synthetic oligonucleotide
  Sense strand starting at position 3428 of SEQ ID NO: 1560389
aaugcauguuuaugugaag

SEQ ID NO: 1596792 - RNA, 19 nt, Artificial Sequence
  Description of Artificial Sequence: Synthetic oligonucleotide
  Antisense strand to SEQ ID NO: 1596791
cuucacauaaacaugcauu

SEQ ID NO: 1596793 - RNA, 19 nt, Artificial Sequence
  Description of Artificial Sequence: Synthetic oligonucleotide
  Sense strand starting at position 3429 of SEQ ID NO: 1560389
augcauguuuaugugaaga

SEQ ID NO: 1596794 - RNA, 19 nt, Artificial Sequence
  Description of Artificial Sequence: Synthetic oligonucleotide
  Antisense strand to SEQ ID NO: 1596793
ucuucacauaaacaugcau

SEQ ID NO: 1596795 - RNA, 19 nt, Artificial Sequence
  Description of Artificial Sequence: Synthetic oligonucleotide
  Sense strand starting at position 3498 of SEQ ID NO: 1560389
auaaaugcauucuaagaug

SEQ ID NO: 1596796 - RNA, 19 nt, Artificial Sequence
  Description of Artificial Sequence: Synthetic oligonucleotide
  Antisense strand to SEQ ID NO: 1596795
caucuuagaaugcauuuau

SEQ ID NO: 1596797 - RNA, 19 nt, Artificial Sequence
  Description of Artificial Sequence: Synthetic oligonucleotide
  Sense strand starting at position 3870 of SEQ ID NO: 1560389
ccuacauggucccaaagau

SEQ ID NO: 1596798 - RNA, 19 nt, Artificial Sequence
  Description of Artificial Sequence: Synthetic oligonucleotide
  Antisense strand to SEQ ID NO: 1596797
aucuuugggaccauguagg

SEQ ID NO: 1596799 - RNA, 19 nt, Artificial Sequence
  Description of Artificial Sequence: Synthetic oligonucleotide
  Sense strand starting at position 47 of SEQ ID NO: 1560390
gaaggagaaugacagagau

SEQ ID NO: 1596800 - RNA, 19 nt, Artificial Sequence
  Description of Artificial Sequence: Synthetic oligonucleotide
  Antisense strand to SEQ ID NO: 1596799
aucucugucauucuccuuc

SEQ ID NO: 1596801 - RNA, 19 nt, Artificial Sequence
  Description of Artificial Sequence: Synthetic oligonucleotide
  Sense strand starting at position 184 of SEQ ID NO: 1560390
uuuggacuuucuggaaaga

SEQ ID NO: 1596802 - RNA, 19 nt, Artificial Sequence
  Description of Artificial Sequence: Synthetic oligonucleotide
  Antisense strand to SEQ ID NO: 1596801
ucuuuccagaaaguccaaa

SEQ ID NO: 1596803 - RNA, 19 nt, Artificial Sequence
  Description of Artificial Sequence: Synthetic oligonucleotide
  Sense strand starting at position 408 of SEQ ID NO: 1560390
cugucugugacccaguuau

SEQ ID NO: 1596804 - RNA, 19 nt, Artificial Sequence
  Description of Artificial Sequence: Synthetic oligonucleotide
  Antisense strand to SEQ ID NO: 1596803
auaacugggucacagacag

SEQ ID NO: 1596805 - RNA, 19 nt, Artificial Sequence
  Description of Artificial Sequence: Synthetic oligonucleotide
  Sense strand starting at position 768 of SEQ ID NO: 1560390
gcuugaacccaagggauua

SEQ ID NO: 1596806 - RNA, 19 nt, Artificial Sequence
  Description of Artificial Sequence: Synthetic oligonucleotide
  Antisense strand to SEQ ID NO: 1596805
uaaucccuuggguucaagc

SEQ ID NO: 1596807 - RNA, 19 nt, Artificial Sequence
  Description of Artificial Sequence: Synthetic oligonucleotide
  Sense strand starting at position 780 of SEQ ID NO: 1560390
gggauuaagucagagacag

SEQ ID NO: 1596808 - RNA, 19 nt, Artificial Sequence
  Description of Artificial Sequence: Synthetic oligonucleotide
  Antisense strand to SEQ ID NO: 1596807
cugucucugacuuaauccc

SEQ ID NO: 1596809 - RNA, 19 nt, Artificial Sequence
  Description of Artificial Sequence: Synthetic oligonucleotide
  Sense strand starting at position 803 of SEQ ID NO: 1560390
gggacugaaucacagaagu

SEQ ID NO: 1596810 - RNA, 19 nt, Artificial Sequence
  Description of Artificial Sequence: Synthetic oligonucleotide
  Antisense strand to SEQ ID NO: 1596809
acuucugugauucaguccc

SEQ ID NO: 1596811 - RNA, 19 nt, Artificial Sequence
  Description of Artificial Sequence: Synthetic oligonucleotide
  Sense strand starting at position 816 of SEQ ID NO: 1560390
agaaguguuuguccucuau

SEQ ID NO: 1596812 - RNA, 19 nt, Artificial Sequence
  Description of Artificial Sequence: Synthetic oligonucleotide
  Antisense strand to SEQ ID NO: 1596811
auagaggacaaacacuucu

SEQ ID NO: 1596813 - RNA, 19 nt, Artificial Sequence
  Description of Artificial Sequence: Synthetic oligonucleotide
  Sense strand starting at position 820 of SEQ ID NO: 1560390
guguuuguccucuaucuug

SEQ ID NO: 1596814 - RNA, 19 nt, Artificial Sequence
  Description of Artificial Sequence: Synthetic oligonucleotide
  Antisense strand to SEQ ID NO: 1596813
caagauagaggacaaacac

SEQ ID NO: 1596815 - RNA, 19 nt, Artificial Sequence
  Description of Artificial Sequence: Synthetic oligonucleotide
  Sense strand starting at position 1444 of SEQ ID NO: 1560390
cccagugggccuuagagau

SEQ ID NO: 1596816 - RNA, 19 nt, Artificial Sequence
  Description of Artificial Sequence: Synthetic oligonucleotide
  Antisense strand to SEQ ID NO: 1596815
aucucuaaggcccacuggg

SEQ ID NO: 1596817 - RNA, 19 nt, Artificial Sequence
  Description of Artificial Sequence: Synthetic oligonucleotide
  Sense strand starting at position 2120 of SEQ ID NO: 1560390
uugguuaacucucucaguu

SEQ ID NO: 1596818 - RNA, 19 nt, Artificial Sequence
  Description of Artificial Sequence: Synthetic oligonucleotide
  Antisense strand to SEQ ID NO: 1596817
aacugagagaguuaaccaa

SEQ ID NO: 1596819 - RNA, 19 nt, Artificial Sequence
  Description of Artificial Sequence: Synthetic oligonucleotide
  Sense strand starting at position 2427 of SEQ ID NO: 1560390
gcgcuaucugcugugguga

SEQ ID NO: 1596820 - RNA, 19 nt, Artificial Sequence
  Description of Artificial Sequence: Synthetic oligonucleotide
  Antisense strand to SEQ ID NO: 1596819
ucaccacagcagauagcgc

SEQ ID NO: 1596821 - RNA, 19 nt, Artificial Sequence
  Description of Artificial Sequence: Synthetic oligonucleotide
  Sense strand starting at position 2429 of SEQ ID NO: 1560390
gcuaucugcuguggugaga

SEQ ID NO: 1596822 - RNA, 19 nt, Artificial Sequence
  Description of Artificial Sequence: Synthetic oligonucleotide
  Antisense strand to SEQ ID NO: 1596821
ucucaccacagcagauagc

SEQ ID NO: 1596823 - RNA, 19 nt, Artificial Sequence
  Description of Artificial Sequence: Synthetic oligonucleotide
  Sense strand starting at position 2567 of SEQ ID NO: 1560390
augacacacugauagagaa

SEQ ID NO: 1596824 - RNA, 19 nt, Artificial Sequence
  Description of Artificial Sequence: Synthetic oligonucleotide
  Antisense strand to SEQ ID NO: 1596823
uucucuaucagugugucau

SEQ ID NO: 1596825 - RNA, 19 nt, Artificial Sequence
  Description of Artificial Sequence: Synthetic oligonucleotide
  Sense strand starting at position 2669 of SEQ ID NO: 1560390
cacgcacgcucauguagau

SEQ ID NO: 1596826 - RNA, 19 nt, Artificial Sequence
  Description of Artificial Sequence: Synthetic oligonucleotide
  Antisense strand to SEQ ID NO: 1596825
aucuacaugagcgugcgug

SEQ ID NO: 1596827 - RNA, 19 nt, Artificial Sequence
  Description of Artificial Sequence: Synthetic oligonucleotide
  Sense strand starting at position 2758 of SEQ ID NO: 1560390
aaugcauguuuaugugaag

SEQ ID NO: 1596828 - RNA, 19 nt, Artificial Sequence
  Description of Artificial Sequence: Synthetic oligonucleotide
  Antisense strand to SEQ ID NO: 1596827
cuucacauaaacaugcauu

SEQ ID NO: 1596829 - RNA, 19 nt, Artificial Sequence
  Description of Artificial Sequence: Synthetic oligonucleotide
  Sense strand starting at position 2759 of SEQ ID NO: 1560390
augcauguuuaugugaaga

SEQ ID NO: 1596830 - RNA, 19 nt, Artificial Sequence
  Description of Artificial Sequence: Synthetic oligonucleotide
  Antisense strand to SEQ ID NO: 1596829
ucuucacauaaacaugcau

SEQ ID NO: 1596831 - RNA, 19 nt, Artificial Sequence
  Description of Artificial Sequence: Synthetic oligonucleotide
  Sense strand starting at position 2828 of SEQ ID NO: 1560390
auaaaugcauucuaagaug

SEQ ID NO: 1596832 - RNA, 19 nt, Artificial Sequence
  Description of Artificial Sequence: Synthetic oligonucleotide
  Antisense strand to SEQ ID NO: 1596831
caucuuagaaugcauuuau

SEQ ID NO: 1596833 - RNA, 19 nt, Artificial Sequence
  Description of Artificial Sequence: Synthetic oligonucleotide
  Sense strand starting at position 3200 of SEQ ID NO: 1560390
ccuacauggucccaaagau

SEQ ID NO: 1596834 - RNA, 19 nt, Artificial Sequence
  Description of Artificial Sequence: Synthetic oligonucleotide
  Antisense strand to SEQ ID NO: 1596833
aucuuugggaccauguagg

SEQ ID NO: 1596835 - RNA, 19 nt, Artificial Sequence
  Description of Artificial Sequence: Synthetic oligonucleotide
  Sense strand starting at position 3349 of SEQ ID NO: 1560390
acacccuaugcuugagcaa

SEQ ID NO: 1596836 - RNA, 19 nt, Artificial Sequence
  Description of Artificial Sequence: Synthetic oligonucleotide
  Antisense strand to SEQ ID NO: 1596835
uugcucaagcauagggugu

SEQ ID NO: 1596837 - RNA, 19 nt, Artificial Sequence
  Description of Artificial Sequence: Synthetic oligonucleotide
  Sense strand starting at position 3352 of SEQ ID NO: 1560390
cccuaugcuugagcaaaca

SEQ ID NO: 1596838 - RNA, 19 nt, Artificial Sequence
  Description of Artificial Sequence: Synthetic oligonucleotide
  Antisense strand to SEQ ID NO: 1596837
uguuugcucaagcauaggg

SEQ ID NO: 1596839 - RNA, 19 nt, Artificial Sequence
  Description of Artificial Sequence: Synthetic oligonucleotide
  Sense strand starting at position 3635 of SEQ ID NO: 1560390
ucacuaagaucacguguau

SEQ ID NO: 1596840 - RNA, 19 nt, Artificial Sequence
  Description of Artificial Sequence: Synthetic oligonucleotide
  Antisense strand to SEQ ID NO: 1596839
auacacgugaucuuaguga

SEQ ID NO: 1596841 - RNA, 19 nt, Artificial Sequence
  Description of Artificial Sequence: Synthetic oligonucleotide
  Sense strand starting at position 3639 of SEQ ID NO: 1560390
uaagaucacguguauaauc

SEQ ID NO: 1596842 - RNA, 19 nt, Artificial Sequence
  Description of Artificial Sequence: Synthetic oligonucleotide
  Antisense strand to SEQ ID NO: 1596841
gauuauacacgugaucuua

SEQ ID NO: 1596843 - RNA, 19 nt, Artificial Sequence
  Description of Artificial Sequence: Synthetic oligonucleotide
  Sense strand starting at position 3647 of SEQ ID NO: 1560390
cguguauaauccuggacag

SEQ ID NO: 1596844 - RNA, 19 nt, Artificial Sequence
  Description of Artificial Sequence: Synthetic oligonucleotide
  Antisense strand to SEQ ID NO: 1596843
cuguccaggauuauacacg

SEQ ID NO: 1596845 - RNA, 19 nt, Artificial Sequence
  Description of Artificial Sequence: Synthetic oligonucleotide
  Sense strand starting at position 3648 of SEQ ID NO: 1560390
guguauaauccuggacagg

SEQ ID NO: 1596846 - RNA, 19 nt, Artificial Sequence
  Description of Artificial Sequence: Synthetic oligonucleotide
  Antisense strand to SEQ ID NO: 1596845
ccuguccaggauuauacac

SEQ ID NO: 1596847 - RNA, 19 nt, Artificial Sequence
  Description of Artificial Sequence: Synthetic oligonucleotide
  Sense strand starting at position 3680 of SEQ ID NO: 1560390
ugaacuugacauugucuua

SEQ ID NO: 1596848 - RNA, 19 nt, Artificial Sequence
  Description of Artificial Sequence: Synthetic oligonucleotide
  Antisense strand to SEQ ID NO: 1596847
uaagacaaugucaaguuca

SEQ ID NO: 1596849 - RNA, 19 nt, Artificial Sequence
  Description of Artificial Sequence: Synthetic oligonucleotide
  Sense strand starting at position 3683 of SEQ ID NO: 1560390
acuugacauugucuuauga

SEQ ID NO: 1596850 - RNA, 19 nt, Artificial Sequence
  Description of Artificial Sequence: Synthetic oligonucleotide
  Antisense strand to SEQ ID NO: 1596849
ucauaagacaaugucaagu

SEQ ID NO: 1596851 - RNA, 19 nt, Artificial Sequence
  Description of Artificial Sequence: Synthetic oligonucleotide
  Sense strand starting at position 3685 of SEQ ID NO: 1560390
uugacauugucuuaugauu

SEQ ID NO: 1596852 - RNA, 19 nt, Artificial Sequence
  Description of Artificial Sequence: Synthetic oligonucleotide
  Antisense strand to SEQ ID NO: 1596851
aaucauaagacaaugucaa

SEQ ID NO: 1596853 - RNA, 19 nt, Artificial Sequence
  Description of Artificial Sequence: Synthetic oligonucleotide
  Sense strand starting at position 3845 of SEQ ID NO: 1560390
ggacuaugggcgugcgaca

SEQ ID NO: 1596854 - RNA, 19 nt, Artificial Sequence
  Description of Artificial Sequence: Synthetic oligonucleotide
  Antisense strand to SEQ ID NO: 1596853
ugucgcacgcccauagucc

SEQ ID NO: 1596855 - RNA, 19 nt, Artificial Sequence
  Description of Artificial Sequence: Synthetic oligonucleotide
  Sense strand starting at position 75 of SEQ ID NO: 1560391
ggaagaaagccugaggcuu

SEQ ID NO: 1596856 - RNA, 19 nt, Artificial Sequence
  Description of Artificial Sequence: Synthetic oligonucleotide
  Antisense strand to SEQ ID NO: 1596855
aagccucaggcuuucuucc

SEQ ID NO: 1596857 - RNA, 19 nt, Artificial Sequence
  Description of Artificial Sequence: Synthetic oligonucleotide
  Sense strand starting at position 113 of SEQ ID NO: 1560391
ccaggaaguguuuaggauc

SEQ ID NO: 1596858 - RNA, 19 nt, Artificial Sequence
  Description of Artificial Sequence: Synthetic oligonucleotide
  Antisense strand to SEQ ID NO: 1596857
gauccuaaacacuuccugg

SEQ ID NO: 1596859 - RNA, 19 nt, Artificial Sequence
  Description of Artificial Sequence: Synthetic oligonucleotide
  Sense strand starting at position 231 of SEQ ID NO: 1560391
agcugucacccaugaccau

SEQ ID NO: 1596860 - RNA, 19 nt, Artificial Sequence
  Description of Artificial Sequence: Synthetic oligonucleotide
  Antisense strand to SEQ ID NO: 1596859
auggucaugggugacagcu

SEQ ID NO: 1596861 - RNA, 19 nt, Artificial Sequence
  Description of Artificial Sequence: Synthetic oligonucleotide
  Sense strand starting at position 232 of SEQ ID NO: 1560391
gcugucacccaugaccaua

SEQ ID NO: 1596862 - RNA, 19 nt, Artificial Sequence
  Description of Artificial Sequence: Synthetic oligonucleotide
  Antisense strand to SEQ ID NO: 1596861
uauggucaugggugacagc

SEQ ID NO: 1596863 - RNA, 19 nt, Artificial Sequence
  Description of Artificial Sequence: Synthetic oligonucleotide
  Sense strand starting at position 260 of SEQ ID NO: 1560391
guaauaacagcagaugcuu

SEQ ID NO: 1596864 - RNA, 19 nt, Artificial Sequence
  Description of Artificial Sequence: Synthetic oligonucleotide
  Antisense strand to SEQ ID NO: 1596863
aagcaucugcuguuauuac

SEQ ID NO: 1596865 - RNA, 19 nt, Artificial Sequence
  Description of Artificial Sequence: Synthetic oligonucleotide
  Sense strand starting at position 326 of SEQ ID NO: 1560391
cgcucaaucucugcagcuu

SEQ ID NO: 1596866 - RNA, 19 nt, Artificial Sequence
  Description of Artificial Sequence: Synthetic oligonucleotide
  Antisense strand to SEQ ID NO: 1596865
aagcugcagagauugagcg

SEQ ID NO: 1596867 - RNA, 19 nt, Artificial Sequence
  Description of Artificial Sequence: Synthetic oligonucleotide
  Sense strand starting at position 327 of SEQ ID NO: 1560391
gcucaaucucugcagcuua

SEQ ID NO: 1596868 - RNA, 19 nt, Artificial Sequence
  Description of Artificial Sequence: Synthetic oligonucleotide
  Antisense strand to SEQ ID NO: 1596867
uaagcugcagagauugagc

SEQ ID NO: 1596869 - RNA, 19 nt, Artificial Sequence
  Description of Artificial Sequence: Synthetic oligonucleotide
  Sense strand starting at position 438 of SEQ ID NO: 1560391
uguugagucucaccucuua

SEQ ID NO: 1596870 - RNA, 19 nt, Artificial Sequence
  Description of Artificial Sequence: Synthetic oligonucleotide
  Antisense strand to SEQ ID NO: 1596869
uaagaggugagacucaaca

SEQ ID NO: 1596871 - RNA, 19 nt, Artificial Sequence
  Description of Artificial Sequence: Synthetic oligonucleotide
  Sense strand starting at position 650 of SEQ ID NO: 1560391
ucaggcuguugucugaaga

SEQ ID NO: 1596872 - RNA, 19 nt, Artificial Sequence
  Description of Artificial Sequence: Synthetic oligonucleotide
  Antisense strand to SEQ ID NO: 1596871
ucuucagacaacagccuga

SEQ ID NO: 1596873 - RNA, 19 nt, Artificial Sequence
  Description of Artificial Sequence: Synthetic oligonucleotide
  Sense strand starting at position 847 of SEQ ID NO: 1560391
ggagaauggucucauguuc

SEQ ID NO: 1596874 - RNA, 19 nt, Artificial Sequence
  Description of Artificial Sequence: Synthetic oligonucleotide
  Antisense strand to SEQ ID NO: 1596873
gaacaugagaccauucucc

SEQ ID NO: 1596875 - RNA, 19 nt, Artificial Sequence
  Description of Artificial Sequence: Synthetic oligonucleotide
  Sense strand starting at position 890 of SEQ ID NO: 1560391
cgcugugugcuccugaaau

SEQ ID NO: 1596876 - RNA, 19 nt, Artificial Sequence
  Description of Artificial Sequence: Synthetic oligonucleotide
  Antisense strand to SEQ ID NO: 1596875
auuucaggagcacacagcg

SEQ ID NO: 1596877 - RNA, 19 nt, Artificial Sequence
  Description of Artificial Sequence: Synthetic oligonucleotide
  Sense strand starting at position 1400 of SEQ ID NO: 1560391
gcagguagauacuuccuaa

SEQ ID NO: 1596878 - RNA, 19 nt, Artificial Sequence
  Description of Artificial Sequence: Synthetic oligonucleotide
  Antisense strand to SEQ ID NO: 1596877
uuaggaaguaucuaccugc

SEQ ID NO: 1596879 - RNA, 19 nt, Artificial Sequence
  Description of Artificial Sequence: Synthetic oligonucleotide
  Sense strand starting at position 1750 of SEQ ID NO: 1560391
ggaggagcuuucuccaauc

SEQ ID NO: 1596880 - RNA, 19 nt, Artificial Sequence
  Description of Artificial Sequence: Synthetic oligonucleotide
  Antisense strand to SEQ ID NO: 1596879
gauuggagaaagcuccucc

SEQ ID NO: 1596881 - RNA, 19 nt, Artificial Sequence
  Description of Artificial Sequence: Synthetic oligonucleotide
  Sense strand starting at position 1991 of SEQ ID NO: 1560391
agaugcuagcgugaccaaa

SEQ ID NO: 1596882 - RNA, 19 nt, Artificial Sequence
  Description of Artificial Sequence: Synthetic oligonucleotide
  Antisense strand to SEQ ID NO: 1596881
uuuggucacgcuagcaucu

SEQ ID NO: 1596883 - RNA, 19 nt, Artificial Sequence
  Description of Artificial Sequence: Synthetic oligonucleotide
  Sense strand starting at position 2084 of SEQ ID NO: 1560391
gaccuuaguccuggucaua

SEQ ID NO: 1596884 - RNA, 19 nt, Artificial Sequence
  Description of Artificial Sequence: Synthetic oligonucleotide
  Antisense strand to SEQ ID NO: 1596883
uaugaccaggacuaagguc

SEQ ID NO: 1596885 - RNA, 19 nt, Artificial Sequence
  Description of Artificial Sequence: Synthetic oligonucleotide
  Sense strand starting at position 2450 of SEQ ID NO: 1560391
gagcgguuggcggaggauu

SEQ ID NO: 1596886 - RNA, 19 nt, Artificial Sequence
  Description of Artificial Sequence: Synthetic oligonucleotide
  Antisense strand to SEQ ID NO: 1596885
aauccuccgccaaccgcuc

SEQ ID NO: 1596887 - RNA, 19 nt, Artificial Sequence
  Description of Artificial Sequence: Synthetic oligonucleotide
  Sense strand starting at position 2639 of SEQ ID NO: 1560391
ggucaaggcucuuccggaa

SEQ ID NO: 1596888 - RNA, 19 nt, Artificial Sequence
  Description of Artificial Sequence: Synthetic oligonucleotide
  Antisense strand to SEQ ID NO: 1596887
uuccggaagagccuugacc

SEQ ID NO: 1596889 - RNA, 19 nt, Artificial Sequence
  Description of Artificial Sequence: Synthetic oligonucleotide
  Sense strand starting at position 2692 of SEQ ID NO: 1560391
acuugucaucgcugaggga

SEQ ID NO: 1596890 - RNA, 19 nt, Artificial Sequence
  Description of Artificial Sequence: Synthetic oligonucleotide
  Antisense strand to SEQ ID NO: 1596889
ucccucagcgaugacaagu

SEQ ID NO: 1596891 - RNA, 19 nt, Artificial Sequence
  Description of Artificial Sequence: Synthetic oligonucleotide
  Sense strand starting at position 2693 of SEQ ID NO: 1560391
cuugucaucgcugagggau

SEQ ID NO: 1596892 - RNA, 19 nt, Artificial Sequence
  Description of Artificial Sequence: Synthetic oligonucleotide
  Antisense strand to SEQ ID NO: 1596891
aucccucagcgaugacaag

SEQ ID NO: 1596893 - RNA, 19 nt, Artificial Sequence
  Description of Artificial Sequence: Synthetic oligonucleotide
  Sense strand starting at position 2953 of SEQ ID NO: 1560391
cuuugugucugggcggaua

SEQ ID NO: 1596894 - RNA, 19 nt, Artificial Sequence
  Description of Artificial Sequence: Synthetic oligonucleotide
  Antisense strand to SEQ ID NO: 1596893
uauccgcccagacacaaag

SEQ ID NO: 1596895 - RNA, 19 nt, Artificial Sequence
  Description of Artificial Sequence: Synthetic oligonucleotide
  Sense strand starting at position 3192 of SEQ ID NO: 1560391
cccugcccgugguuagaua

SEQ ID NO: 1596896 - RNA, 19 nt, Artificial Sequence
  Description of Artificial Sequence: Synthetic oligonucleotide
  Antisense strand to SEQ ID NO: 1596895
uaucuaaccacgggcaggg

SEQ ID NO: 1596897 - RNA, 19 nt, Artificial Sequence
  Description of Artificial Sequence: Synthetic oligonucleotide
  Sense strand starting at position 3199 of SEQ ID NO: 1560391
cgugguuagauacagaagu

SEQ ID NO: 1596898 - RNA, 19 nt, Artificial Sequence
  Description of Artificial Sequence: Synthetic oligonucleotide
  Antisense strand to SEQ ID NO: 1596897
acuucuguaucuaaccacg

SEQ ID NO: 1596899 - RNA, 19 nt, Artificial Sequence
  Description of Artificial Sequence: Synthetic oligonucleotide
  Sense strand starting at position 3212 of SEQ ID NO: 1560391
agaaguauuucccagacag

SEQ ID NO: 1596900 - RNA, 19 nt, Artificial Sequence
  Description of Artificial Sequence: Synthetic oligonucleotide
  Antisense strand to SEQ ID NO: 1596899
cugucugggaaauacuucu

SEQ ID NO: 1596901 - RNA, 19 nt, Artificial Sequence
  Description of Artificial Sequence: Synthetic oligonucleotide
  Sense strand starting at position 3279 of SEQ ID NO: 1560391
uaccauuugugagcgguaa

SEQ ID NO: 1596902 - RNA, 19 nt, Artificial Sequence
  Description of Artificial Sequence: Synthetic oligonucleotide
  Antisense strand to SEQ ID NO: 1596901
uuaccgcucacaaauggua

SEQ ID NO: 1596903 - RNA, 19 nt, Artificial Sequence
  Description of Artificial Sequence: Synthetic oligonucleotide
  Sense strand starting at position 3280 of SEQ ID NO: 1560391
accauuugugagcgguaaa

SEQ ID NO: 1596904 - RNA, 19 nt, Artificial Sequence
  Description of Artificial Sequence: Synthetic oligonucleotide
  Antisense strand to SEQ ID NO: 1596903
uuuaccgcucacaaauggu

SEQ ID NO: 1596905 - RNA, 19 nt, Artificial Sequence
  Description of Artificial Sequence: Synthetic oligonucleotide
  Sense strand starting at position 3337 of SEQ ID NO: 1560391
uuuggagauuggcauccau

SEQ ID NO: 1596906 - RNA, 19 nt, Artificial Sequence
  Description of Artificial Sequence: Synthetic oligonucleotide
  Antisense strand to SEQ ID NO: 1596905
auggaugccaaucuccaaa

SEQ ID NO: 1596907 - RNA, 19 nt, Artificial Sequence
  Description of Artificial Sequence: Synthetic oligonucleotide
  Sense strand starting at position 3573 of SEQ ID NO: 1560391
auuagagacuucugacaac

SEQ ID NO: 1596908 - RNA, 19 nt, Artificial Sequence
  Description of Artificial Sequence: Synthetic oligonucleotide
  Antisense strand to SEQ ID NO: 1596907
guugucagaagucucuaau

SEQ ID NO: 1596909 - RNA, 19 nt, Artificial Sequence
  Description of Artificial Sequence: Synthetic oligonucleotide
  Sense strand starting at position 3583 of SEQ ID NO: 1560391
ucugacaaccucugaaugu

SEQ ID NO: 1596910 - RNA, 19 nt, Artificial Sequence
  Description of Artificial Sequence: Synthetic oligonucleotide
  Antisense strand to SEQ ID NO: 1596909
acauucagagguugucaga

SEQ ID NO: 1596911 - RNA, 19 nt, Artificial Sequence
  Description of Artificial Sequence: Synthetic oligonucleotide
  Sense strand starting at position 3584 of SEQ ID NO: 1560391
cugacaaccucugaauguu

SEQ ID NO: 1596912 - RNA, 19 nt, Artificial Sequence
  Description of Artificial Sequence: Synthetic oligonucleotide
  Antisense strand to SEQ ID NO: 1596911
aacauucagagguugucag

SEQ ID NO: 1596913 - RNA, 19 nt, Artificial Sequence
  Description of Artificial Sequence: Synthetic oligonucleotide
  Sense strand starting at position 3593 of SEQ ID NO: 1560391
ucugaauguucuguaguuu

SEQ ID NO: 1596914 - RNA, 19 nt, Artificial Sequence
  Description of Artificial Sequence: Synthetic oligonucleotide
  Antisense strand to SEQ ID NO: 1596913
aaacuacagaacauucaga

SEQ ID NO: 1596915 - RNA, 19 nt, Artificial Sequence
  Description of Artificial Sequence: Synthetic oligonucleotide
  Sense strand starting at position 3743 of SEQ ID NO: 1560391
uuggguuuauggucagaag

SEQ ID NO: 1596916 - RNA, 19 nt, Artificial Sequence
  Description of Artificial Sequence: Synthetic oligonucleotide
  Antisense strand to SEQ ID NO: 1596915
cuucugaccauaaacccaa

SEQ ID NO: 1596917 - RNA, 19 nt, Artificial Sequence
  Description of Artificial Sequence: Synthetic oligonucleotide
  Sense strand starting at position 3746 of SEQ ID NO: 1560391
gguuuauggucagaaggac

SEQ ID NO: 1596918 - RNA, 19 nt, Artificial Sequence
  Description of Artificial Sequence: Synthetic oligonucleotide
  Antisense strand to SEQ ID NO: 1596917
guccuucugaccauaaacc

SEQ ID NO: 1596919 - RNA, 19 nt, Artificial Sequence
  Description of Artificial Sequence: Synthetic oligonucleotide
  Sense strand starting at position 3758 of SEQ ID NO: 1560391
gaaggacucugagacccua

SEQ ID NO: 1596920 - RNA, 19 nt, Artificial Sequence
  Description of Artificial Sequence: Synthetic oligonucleotide
  Antisense strand to SEQ ID NO: 1596919
uagggucucagaguccuuc

SEQ ID NO: 1596921 - RNA, 19 nt, Artificial Sequence
  Description of Artificial Sequence: Synthetic oligonucleotide
  Sense strand starting at position 3787 of SEQ ID NO: 1560391
cacacugagucuuaggaag

SEQ ID NO: 1596922 - RNA, 19 nt, Artificial Sequence
  Description of Artificial Sequence: Synthetic oligonucleotide
  Antisense strand to SEQ ID NO: 1596921
cuuccuaagacucagugug

SEQ ID NO: 1596923 - RNA, 19 nt, Artificial Sequence
  Description of Artificial Sequence: Synthetic oligonucleotide
  Sense strand starting at position 3806 of SEQ ID NO: 1560391
ggcugugaggaguagaguu

SEQ ID NO: 1596924 - RNA, 19 nt, Artificial Sequence
  Description of Artificial Sequence: Synthetic oligonucleotide
  Antisense strand to SEQ ID NO: 1596923
aacucuacuccucacagcc

SEQ ID NO: 1596925 - RNA, 19 nt, Artificial Sequence
  Description of Artificial Sequence: Synthetic oligonucleotide
  Sense strand starting at position 3814 of SEQ ID NO: 1560391
ggaguagaguuugugcagu

SEQ ID NO: 1596926 - RNA, 19 nt, Artificial Sequence
  Description of Artificial Sequence: Synthetic oligonucleotide
  Antisense strand to SEQ ID NO: 1596925
acugcacaaacucuacucc

SEQ ID NO: 1596927 - RNA, 19 nt, Artificial Sequence
  Description of Artificial Sequence: Synthetic oligonucleotide
  Sense strand starting at position 3816 of SEQ ID NO: 1560391
aguagaguuugugcaguca

SEQ ID NO: 1596928 - RNA, 19 nt, Artificial Sequence
  Description of Artificial Sequence: Synthetic oligonucleotide
  Antisense strand to SEQ ID NO: 1596927
ugacugcacaaacucuacu

SEQ ID NO: 1596929 - RNA, 19 nt, Artificial Sequence
  Description of Artificial Sequence: Synthetic oligonucleotide
  Sense strand starting at position 3854 of SEQ ID NO: 1560391
uaggucucauuuggaguga

SEQ ID NO: 1596930 - RNA, 19 nt, Artificial Sequence
  Description of Artificial Sequence: Synthetic oligonucleotide
  Antisense strand to SEQ ID NO: 1596929
ucacuccaaaugagaccua

SEQ ID NO: 1596931 - RNA, 19 nt, Artificial Sequence
  Description of Artificial Sequence: Synthetic oligonucleotide
  Sense strand starting at position 3869 of SEQ ID NO: 1560391
gugagucuucugggccaau

SEQ ID NO: 1596932 - RNA, 19 nt, Artificial Sequence
  Description of Artificial Sequence: Synthetic oligonucleotide
  Antisense strand to SEQ ID NO: 1596931
auuggcccagaagacucac

SEQ ID NO: 1596933 - RNA, 19 nt, Artificial Sequence
  Description of Artificial Sequence: Synthetic oligonucleotide
  Sense strand starting at position 3870 of SEQ ID NO: 1560391
ugagucuucugggccaauc

SEQ ID NO: 1596934 - RNA, 19 nt, Artificial Sequence
  Description of Artificial Sequence: Synthetic oligonucleotide
  Antisense strand to SEQ ID NO: 1596933
gauuggcccagaagacuca

SEQ ID NO: 1596935 - RNA, 19 nt, Artificial Sequence
  Description of Artificial Sequence: Synthetic oligonucleotide
  Sense strand starting at position 374 of SEQ ID NO: 1560392
ccaaguguuuguuggucca

SEQ ID NO: 1596936 - RNA, 19 nt, Artificial Sequence
  Description of Artificial Sequence: Synthetic oligonucleotide
  Antisense strand to SEQ ID NO: 1596935
uggaccaacaaacacuugg

SEQ ID NO: 1596937 - RNA, 19 nt, Artificial Sequence
  Description of Artificial Sequence: Synthetic oligonucleotide
  Sense strand starting at position 376 of SEQ ID NO: 1560392
aaguguuuguugguccaaa

SEQ ID NO: 1596938 - RNA, 19 nt, Artificial Sequence
  Description of Artificial Sequence: Synthetic oligonucleotide
  Antisense strand to SEQ ID NO: 1596937
uuuggaccaacaaacacuu

SEQ ID NO: 1596939 - RNA, 19 nt, Artificial Sequence
  Description of Artificial Sequence: Synthetic oligonucleotide
  Sense strand starting at position 377 of SEQ ID NO: 1560392
aguguuuguugguccaaau

SEQ ID NO: 1596940 - RNA, 19 nt, Artificial Sequence
  Description of Artificial Sequence: Synthetic oligonucleotide
  Antisense strand to SEQ ID NO: 1596939
auuuggaccaacaaacacu

SEQ ID NO: 1596941 - RNA, 19 nt, Artificial Sequence
  Description of Artificial Sequence: Synthetic oligonucleotide
  Sense strand starting at position 480 of SEQ ID NO: 1560392
ccuagcacacgauauaauu

SEQ ID NO: 1596942 - RNA, 19 nt, Artificial Sequence
  Description of Artificial Sequence: Synthetic oligonucleotide
  Antisense strand to SEQ ID NO: 1596941
aauuauaucgugugcuagg

SEQ ID NO: 1596943 - RNA, 19 nt, Artificial Sequence
  Description of Artificial Sequence: Synthetic oligonucleotide
  Sense strand starting at position 602 of SEQ ID NO: 1560392
uugucaaaugacugaacga

SEQ ID NO: 1596944 - RNA, 19 nt, Artificial Sequence
  Description of Artificial Sequence: Synthetic oligonucleotide
  Antisense strand to SEQ ID NO: 1596943
ucguucagucauuugacaa

SEQ ID NO: 1596945 - RNA, 19 nt, Artificial Sequence
  Description of Artificial Sequence: Synthetic oligonucleotide
  Sense strand starting at position 806 of SEQ ID NO: 1560392
gacugacugucagaggcaa

SEQ ID NO: 1596946 - RNA, 19 nt, Artificial Sequence
  Description of Artificial Sequence: Synthetic oligonucleotide
  Antisense strand to SEQ ID NO: 1596945
uugccucugacagucaguc

SEQ ID NO: 1596947 - RNA, 19 nt, Artificial Sequence
  Description of Artificial Sequence: Synthetic oligonucleotide
  Sense strand starting at position 924 of SEQ ID NO: 1560392
cugagauguugccaacucu

SEQ ID NO: 1596948 - RNA, 19 nt, Artificial Sequence
  Description of Artificial Sequence: Synthetic oligonucleotide
  Antisense strand to SEQ ID NO: 1596947
agaguuggcaacaucucag

SEQ ID NO: 1596949 - RNA, 19 nt, Artificial Sequence
  Description of Artificial Sequence: Synthetic oligonucleotide
  Sense strand starting at position 932 of SEQ ID NO: 1560392
uugccaacucuuuggacua

SEQ ID NO: 1596950 - RNA, 19 nt, Artificial Sequence
  Description of Artificial Sequence: Synthetic oligonucleotide
  Antisense strand to SEQ ID NO: 1596949
uaguccaaagaguuggcaa

SEQ ID NO: 1596951 - RNA, 19 nt, Artificial Sequence
  Description of Artificial Sequence: Synthetic oligonucleotide
  Sense strand starting at position 933 of SEQ ID NO: 1560392
ugccaacucuuuggacuaa

SEQ ID NO: 1596952 - RNA, 19 nt, Artificial Sequence
  Description of Artificial Sequence: Synthetic oligonucleotide
  Antisense strand to SEQ ID NO: 1596951
uuaguccaaagaguuggca

SEQ ID NO: 1596953 - RNA, 19 nt, Artificial Sequence
  Description of Artificial Sequence: Synthetic oligonucleotide
  Sense strand starting at position 957 of SEQ ID NO: 1560392
gcucaacagcuuugccuaa

SEQ ID NO: 1596954 - RNA, 19 nt, Artificial Sequence
  Description of Artificial Sequence: Synthetic oligonucleotide
  Antisense strand to SEQ ID NO: 1596953
uuaggcaaagcuguugagc

SEQ ID NO: 1596955 - RNA, 19 nt, Artificial Sequence
  Description of Artificial Sequence: Synthetic oligonucleotide
  Sense strand starting at position 1012 of SEQ ID NO: 1560392
ccuggcugcugaguagaaa

SEQ ID NO: 1596956 - RNA, 19 nt, Artificial Sequence
  Description of Artificial Sequence: Synthetic oligonucleotide
  Antisense strand to SEQ ID NO: 1596955
uuucuacucagcagccagg

SEQ ID NO: 1596957 - RNA, 19 nt, Artificial Sequence
  Description of Artificial Sequence: Synthetic oligonucleotide
  Sense strand starting at position 1052 of SEQ ID NO: 1560392
aaaugaaacucagugaguu

SEQ ID NO: 1596958 - RNA, 19 nt, Artificial Sequence
  Description of Artificial Sequence: Synthetic oligonucleotide
  Antisense strand to SEQ ID NO: 1596957
aacucacugaguuucauuu

SEQ ID NO: 1596959 - RNA, 19 nt, Artificial Sequence
  Description of Artificial Sequence: Synthetic oligonucleotide
  Sense strand starting at position 1053 of SEQ ID NO: 1560392
aaugaaacucagugaguuc

SEQ ID NO: 1596960 - RNA, 19 nt, Artificial Sequence
  Description of Artificial Sequence: Synthetic oligonucleotide
  Antisense strand to SEQ ID NO: 1596959
gaacucacugaguuucauu

SEQ ID NO: 1596961 - RNA, 19 nt, Artificial Sequence
  Description of Artificial Sequence: Synthetic oligonucleotide
  Sense strand starting at position 1066 of SEQ ID NO: 1560392
gaguucuucuuggagguga

SEQ ID NO: 1596962 - RNA, 19 nt, Artificial Sequence
  Description of Artificial Sequence: Synthetic oligonucleotide
  Antisense strand to SEQ ID NO: 1596961
ucaccuccaagaagaacuc

SEQ ID NO: 1596963 - RNA, 19 nt, Artificial Sequence
  Description of Artificial Sequence: Synthetic oligonucleotide
  Sense strand starting at position 1068 of SEQ ID NO: 1560392
guucuucuuggaggugaaa

SEQ ID NO: 1596964 - RNA, 19 nt, Artificial Sequence
  Description of Artificial Sequence: Synthetic oligonucleotide
  Antisense strand to SEQ ID NO: 1596963
uuucaccuccaagaagaac

SEQ ID NO: 1596965 - RNA, 19 nt, Artificial Sequence
  Description of Artificial Sequence: Synthetic oligonucleotide
  Sense strand starting at position 1070 of SEQ ID NO: 1560392
ucuucuuggaggugaaauu

SEQ ID NO: 1596966 - RNA, 19 nt, Artificial Sequence
  Description of Artificial Sequence: Synthetic oligonucleotide
  Antisense strand to SEQ ID NO: 1596965
aauuucaccuccaagaaga

SEQ ID NO: 1596967 - RNA, 19 nt, Artificial Sequence
  Description of Artificial Sequence: Synthetic oligonucleotide
  Sense strand starting at position 1144 of SEQ ID NO: 1560392
gucugagguguccaaagag

SEQ ID NO: 1596968 - RNA, 19 nt, Artificial Sequence
  Description of Artificial Sequence: Synthetic oligonucleotide
  Antisense strand to SEQ ID NO: 1596967
cucuuuggacaccucagac

SEQ ID NO: 1596969 - RNA, 19 nt, Artificial Sequence
  Description of Artificial Sequence: Synthetic oligonucleotide
  Sense strand starting at position 1312 of SEQ ID NO: 1560392
aggccagagaugggucuua

SEQ ID NO: 1596970 - RNA, 19 nt, Artificial Sequence
  Description of Artificial Sequence: Synthetic oligonucleotide
  Antisense strand to SEQ ID NO: 1596969
uaagacccaucucuggccu

SEQ ID NO: 1596971 - RNA, 19 nt, Artificial Sequence
  Description of Artificial Sequence: Synthetic oligonucleotide
  Sense strand starting at position 2255 of SEQ ID NO: 1560392
gucauuuccucuuggguuu

SEQ ID NO: 1596972 - RNA, 19 nt, Artificial Sequence
  Description of Artificial Sequence: Synthetic oligonucleotide
  Antisense strand to SEQ ID NO: 1596971
aaacccaagaggaaaugac

SEQ ID NO: 1596973 - RNA, 19 nt, Artificial Sequence
  Description of Artificial Sequence: Synthetic oligonucleotide
  Sense strand starting at position 2396 of SEQ ID NO: 1560392
aguggacgccucugagaga

SEQ ID NO: 1596974 - RNA, 19 nt, Artificial Sequence
  Description of Artificial Sequence: Synthetic oligonucleotide
  Antisense strand to SEQ ID NO: 1596973
ucucucagaggcguccacu

SEQ ID NO: 1596975 - RNA, 19 nt, Artificial Sequence
  Description of Artificial Sequence: Synthetic oligonucleotide
  Sense strand starting at position 2466 of SEQ ID NO: 1560392
aggacaaauccggaggugu

SEQ ID NO: 1596976 - RNA, 19 nt, Artificial Sequence
  Description of Artificial Sequence: Synthetic oligonucleotide
  Antisense strand to SEQ ID NO: 1596975
acaccuccggauuuguccu

SEQ ID NO: 1596977 - RNA, 19 nt, Artificial Sequence
  Description of Artificial Sequence: Synthetic oligonucleotide
  Sense strand starting at position 2468 of SEQ ID NO: 1560392
gacaaauccggagguguug

SEQ ID NO: 1596978 - RNA, 19 nt, Artificial Sequence
  Description of Artificial Sequence: Synthetic oligonucleotide
  Antisense strand to SEQ ID NO: 1596977
caacaccuccggauuuguc

SEQ ID NO: 1596979 - RNA, 19 nt, Artificial Sequence
  Description of Artificial Sequence: Synthetic oligonucleotide
  Sense strand starting at position 2473 of SEQ ID NO: 1560392
auccggagguguugaggaa

SEQ ID NO: 1596980 - RNA, 19 nt, Artificial Sequence
  Description of Artificial Sequence: Synthetic oligonucleotide
  Antisense strand to SEQ ID NO: 1596979
uuccucaacaccuccggau

SEQ ID NO: 1596981 - RNA, 19 nt, Artificial Sequence
  Description of Artificial Sequence: Synthetic oligonucleotide
  Sense strand starting at position 3236 of SEQ ID NO: 1560392
ggcugcugucauggagaga

SEQ ID NO: 1596982 - RNA, 19 nt, Artificial Sequence
  Description of Artificial Sequence: Synthetic oligonucleotide
  Antisense strand to SEQ ID NO: 1596981
ucucuccaugacagcagcc

SEQ ID NO: 1596983 - RNA, 19 nt, Artificial Sequence
  Description of Artificial Sequence: Synthetic oligonucleotide
  Sense strand starting at position 3302 of SEQ ID NO: 1560392
gggcuauccgccugccaga

SEQ ID NO: 1596984 - RNA, 19 nt, Artificial Sequence
  Description of Artificial Sequence: Synthetic oligonucleotide
  Antisense strand to SEQ ID NO: 1596983
ucuggcaggcggauagccc

SEQ ID NO: 1596985 - RNA, 19 nt, Artificial Sequence
  Description of Artificial Sequence: Synthetic oligonucleotide
  Sense strand starting at position 3391 of SEQ ID NO: 1560392
uccugaacauuuggauaca

SEQ ID NO: 1596986 - RNA, 19 nt, Artificial Sequence
  Description of Artificial Sequence: Synthetic oligonucleotide
  Antisense strand to SEQ ID NO: 1596985
uguauccaaauguucagga

SEQ ID NO: 1596987 - RNA, 19 nt, Artificial Sequence
  Description of Artificial Sequence: Synthetic oligonucleotide
  Sense strand starting at position 3392 of SEQ ID NO: 1560392
ccugaacauuuggauacaa

SEQ ID NO: 1596988 - RNA, 19 nt, Artificial Sequence
  Description of Artificial Sequence: Synthetic oligonucleotide
  Antisense strand to SEQ ID NO: 1596987
uuguauccaaauguucagg

SEQ ID NO: 1596989 - RNA, 19 nt, Artificial Sequence
  Description of Artificial Sequence: Synthetic oligonucleotide
  Sense strand starting at position 3463 of SEQ ID NO: 1560392
accagaaaccugugcaaag

SEQ ID NO: 1596990 - RNA, 19 nt, Artificial Sequence
  Description of Artificial Sequence: Synthetic oligonucleotide
  Antisense strand to SEQ ID NO: 1596989
cuuugcacagguuucuggu

SEQ ID NO: 1596991 - RNA, 19 nt, Artificial Sequence
  Description of Artificial Sequence: Synthetic oligonucleotide
  Sense strand starting at position 3464 of SEQ ID NO: 1560392
ccagaaaccugugcaaagu

SEQ ID NO: 1596992 - RNA, 19 nt, Artificial Sequence
  Description of Artificial Sequence: Synthetic oligonucleotide
  Antisense strand to SEQ ID NO: 1596991
acuuugcacagguuucugg

SEQ ID NO: 1596993 - RNA, 19 nt, Artificial Sequence
  Description of Artificial Sequence: Synthetic oligonucleotide
  Sense strand starting at position 3802 of SEQ ID NO: 1560392
guugcaguguuguaauaag

SEQ ID NO: 1596994 - RNA, 19 nt, Artificial Sequence
  Description of Artificial Sequence: Synthetic oligonucleotide
  Antisense strand to SEQ ID NO: 1596993
cuuauuacaacacugcaac

SEQ ID NO: 1596995 - RNA, 19 nt, Artificial Sequence
  Description of Artificial Sequence: Synthetic oligonucleotide
  Sense strand starting at position 154 of SEQ ID NO: 1560393
ccaaguguuuguuggucca

SEQ ID NO: 1596996 - RNA, 19 nt, Artificial Sequence
  Description of Artificial Sequence: Synthetic oligonucleotide
  Antisense strand to SEQ ID NO: 1596995
uggaccaacaaacacuugg

SEQ ID NO: 1596997 - RNA, 19 nt, Artificial Sequence
  Description of Artificial Sequence: Synthetic oligonucleotide
  Sense strand starting at position 156 of SEQ ID NO: 1560393
aaguguuuguugguccaaa

SEQ ID NO: 1596998 - RNA, 19 nt, Artificial Sequence
  Description of Artificial Sequence: Synthetic oligonucleotide
  Antisense strand to SEQ ID NO: 1596997
uuuggaccaacaaacacuu

SEQ ID NO: 1596999 - RNA, 19 nt, Artificial Sequence
  Description of Artificial Sequence: Synthetic oligonucleotide
  Sense strand starting at position 157 of SEQ ID NO: 1560393
aguguuuguugguccaaau

SEQ ID NO: 1597000 - RNA, 19 nt, Artificial Sequence
  Description of Artificial Sequence: Synthetic oligonucleotide
  Antisense strand to SEQ ID NO: 1596999
auuuggaccaacaaacacu

SEQ ID NO: 1597001 - RNA, 19 nt, Artificial Sequence
  Description of Artificial Sequence: Synthetic oligonucleotide
  Sense strand starting at position 260 of SEQ ID NO: 1560393
ccuagcacacgauauaauu

SEQ ID NO: 1597002 - RNA, 19 nt, Artificial Sequence
  Description of Artificial Sequence: Synthetic oligonucleotide
  Antisense strand to SEQ ID NO: 1597001
aauuauaucgugugcuagg

SEQ ID NO: 1597003 - RNA, 19 nt, Artificial Sequence
  Description of Artificial Sequence: Synthetic oligonucleotide
  Sense strand starting at position 382 of SEQ ID NO: 1560393
uugucaaaugacugaacga

SEQ ID NO: 1597004 - RNA, 19 nt, Artificial Sequence
  Description of Artificial Sequence: Synthetic oligonucleotide
  Antisense strand to SEQ ID NO: 1597003
ucguucagucauuugacaa

SEQ ID NO: 1597005 - RNA, 19 nt, Artificial Sequence
  Description of Artificial Sequence: Synthetic oligonucleotide
  Sense strand starting at position 586 of SEQ ID NO: 1560393
gacugacugucagaggcaa

SEQ ID NO: 1597006 - RNA, 19 nt, Artificial Sequence
  Description of Artificial Sequence: Synthetic oligonucleotide
  Antisense strand to SEQ ID NO: 1597005
uugccucugacagucaguc

SEQ ID NO: 1597007 - RNA, 19 nt, Artificial Sequence
  Description of Artificial Sequence: Synthetic oligonucleotide
  Sense strand starting at position 704 of SEQ ID NO: 1560393
cugagauguugccaacucu

SEQ ID NO: 1597008 - RNA, 19 nt, Artificial Sequence
  Description of Artificial Sequence: Synthetic oligonucleotide
  Antisense strand to SEQ ID NO: 1597007
agaguuggcaacaucucag

SEQ ID NO: 1597009 - RNA, 19 nt, Artificial Sequence
  Description of Artificial Sequence: Synthetic oligonucleotide
  Sense strand starting at position 712 of SEQ ID NO: 1560393
uugccaacucuuuggacua

SEQ ID NO: 1597010 - RNA, 19 nt, Artificial Sequence
  Description of Artificial Sequence: Synthetic oligonucleotide
  Antisense strand to SEQ ID NO: 1597009
uaguccaaagaguuggcaa

SEQ ID NO: 1597011 - RNA, 19 nt, Artificial Sequence
  Description of Artificial Sequence: Synthetic oligonucleotide
  Sense strand starting at position 713 of SEQ ID NO: 1560393
ugccaacucuuuggacuaa

SEQ ID NO: 1597012 - RNA, 19 nt, Artificial Sequence
  Description of Artificial Sequence: Synthetic oligonucleotide
  Antisense strand to SEQ ID NO: 1597011
uuaguccaaagaguuggca

SEQ ID NO: 1597013 - RNA, 19 nt, Artificial Sequence
  Description of Artificial Sequence: Synthetic oligonucleotide
  Sense strand starting at position 737 of SEQ ID NO: 1560393
gcucaacagcuuugccuaa

SEQ ID NO: 1597014 - RNA, 19 nt, Artificial Sequence
  Description of Artificial Sequence: Synthetic oligonucleotide
  Antisense strand to SEQ ID NO: 1597013
uuaggcaaagcuguugagc

SEQ ID NO: 1597015 - RNA, 19 nt, Artificial Sequence
  Description of Artificial Sequence: Synthetic oligonucleotide
  Sense strand starting at position 792 of SEQ ID NO: 1560393
ccuggcugcugaguagaaa

SEQ ID NO: 1597016 - RNA, 19 nt, Artificial Sequence
  Description of Artificial Sequence: Synthetic oligonucleotide
  Antisense strand to SEQ ID NO: 1597015
uuucuacucagcagccagg

SEQ ID NO: 1597017 - RNA, 19 nt, Artificial Sequence
  Description of Artificial Sequence: Synthetic oligonucleotide
  Sense strand starting at position 832 of SEQ ID NO: 1560393
aaaugaaacucagugaguu

SEQ ID NO: 1597018 - RNA, 19 nt, Artificial Sequence
  Description of Artificial Sequence: Synthetic oligonucleotide
  Antisense strand to SEQ ID NO: 1597017
aacucacugaguuucauuu

SEQ ID NO: 1597019 - RNA, 19 nt, Artificial Sequence
  Description of Artificial Sequence: Synthetic oligonucleotide
  Sense strand starting at position 833 of SEQ ID NO: 1560393
aaugaaacucagugaguuc

SEQ ID NO: 1597020 - RNA, 19 nt, Artificial Sequence
  Description of Artificial Sequence: Synthetic oligonucleotide
  Antisense strand to SEQ ID NO: 1597019
gaacucacugaguuucauu

SEQ ID NO: 1597021 - RNA, 19 nt, Artificial Sequence
  Description of Artificial Sequence: Synthetic oligonucleotide
  Sense strand starting at position 846 of SEQ ID NO: 1560393
gaguucuucuuggagguga

SEQ ID NO: 1597022 - RNA, 19 nt, Artificial Sequence
  Description of Artificial Sequence: Synthetic oligonucleotide
  Antisense strand to SEQ ID NO: 1597021
ucaccuccaagaagaacuc

SEQ ID NO: 1597023 - RNA, 19 nt, Artificial Sequence
  Description of Artificial Sequence: Synthetic oligonucleotide
  Sense strand starting at position 848 of SEQ ID NO: 1560393
guucuucuuggaggugaaa

SEQ ID NO: 1597024 - RNA, 19 nt, Artificial Sequence
  Description of Artificial Sequence: Synthetic oligonucleotide
  Antisense strand to SEQ ID NO: 1597023
uuucaccuccaagaagaac

SEQ ID NO: 1597025 - RNA, 19 nt, Artificial Sequence
  Description of Artificial Sequence: Synthetic oligonucleotide
  Sense strand starting at position 850 of SEQ ID NO: 1560393
ucuucuuggaggugaaauu

SEQ ID NO: 1597026 - RNA, 19 nt, Artificial Sequence
  Description of Artificial Sequence: Synthetic oligonucleotide
  Antisense strand to SEQ ID NO: 1597025
aauuucaccuccaagaaga

SEQ ID NO: 1597027 - RNA, 19 nt, Artificial Sequence
  Description of Artificial Sequence: Synthetic oligonucleotide
  Sense strand starting at position 924 of SEQ ID NO: 1560393
gucugagguguccaaagag

SEQ ID NO: 1597028 - RNA, 19 nt, Artificial Sequence
  Description of Artificial Sequence: Synthetic oligonucleotide
  Antisense strand to SEQ ID NO: 1597027
cucuuuggacaccucagac

SEQ ID NO: 1597029 - RNA, 19 nt, Artificial Sequence
  Description of Artificial Sequence: Synthetic oligonucleotide
  Sense strand starting at position 1092 of SEQ ID NO: 1560393
aggccagagaugggucuua

SEQ ID NO: 1597030 - RNA, 19 nt, Artificial Sequence
  Description of Artificial Sequence: Synthetic oligonucleotide
  Antisense strand to SEQ ID NO: 1597029
uaagacccaucucuggccu

SEQ ID NO: 1597031 - RNA, 19 nt, Artificial Sequence
  Description of Artificial Sequence: Synthetic oligonucleotide
  Sense strand starting at position 2035 of SEQ ID NO: 1560393
gucauuuccucuuggguuu

SEQ ID NO: 1597032 - RNA, 19 nt, Artificial Sequence
  Description of Artificial Sequence: Synthetic oligonucleotide
  Antisense strand to SEQ ID NO: 1597031
aaacccaagaggaaaugac

SEQ ID NO: 1597033 - RNA, 19 nt, Artificial Sequence
  Description of Artificial Sequence: Synthetic oligonucleotide
  Sense strand starting at position 2176 of SEQ ID NO: 1560393
aguggacgccucugagaga

SEQ ID NO: 1597034 - RNA, 19 nt, Artificial Sequence
  Description of Artificial Sequence: Synthetic oligonucleotide
  Antisense strand to SEQ ID NO: 1597033
ucucucagaggcguccacu

SEQ ID NO: 1597035 - RNA, 19 nt, Artificial Sequence
  Description of Artificial Sequence: Synthetic oligonucleotide
  Sense strand starting at position 2246 of SEQ ID NO: 1560393
aggacaaauccggaggugu

SEQ ID NO: 1597036 - RNA, 19 nt, Artificial Sequence
  Description of Artificial Sequence: Synthetic oligonucleotide
  Antisense strand to SEQ ID NO: 1597035
acaccuccggauuuguccu

SEQ ID NO: 1597037 - RNA, 19 nt, Artificial Sequence
  Description of Artificial Sequence: Synthetic oligonucleotide
  Sense strand starting at position 2248 of SEQ ID NO: 1560393
gacaaauccggagguguug

SEQ ID NO: 1597038 - RNA, 19 nt, Artificial Sequence
  Description of Artificial Sequence: Synthetic oligonucleotide
  Antisense strand to SEQ ID NO: 1597037
caacaccuccggauuuguc

SEQ ID NO: 1597039 - RNA, 19 nt, Artificial Sequence
  Description of Artificial Sequence: Synthetic oligonucleotide
  Sense strand starting at position 2253 of SEQ ID NO: 1560393
auccggagguguugaggaa

SEQ ID NO: 1597040 - RNA, 19 nt, Artificial Sequence
  Description of Artificial Sequence: Synthetic oligonucleotide
  Antisense strand to SEQ ID NO: 1597039
uuccucaacaccuccggau

SEQ ID NO: 1597041 - RNA, 19 nt, Artificial Sequence
  Description of Artificial Sequence: Synthetic oligonucleotide
  Sense strand starting at position 3016 of SEQ ID NO: 1560393
ggcugcugucauggagaga

SEQ ID NO: 1597042 - RNA, 19 nt, Artificial Sequence
  Description of Artificial Sequence: Synthetic oligonucleotide
  Antisense strand to SEQ ID NO: 1597041
ucucuccaugacagcagcc

SEQ ID NO: 1597043 - RNA, 19 nt, Artificial Sequence
  Description of Artificial Sequence: Synthetic oligonucleotide
  Sense strand starting at position 3082 of SEQ ID NO: 1560393
gggcuauccgccugccaga

SEQ ID NO: 1597044 - RNA, 19 nt, Artificial Sequence
  Description of Artificial Sequence: Synthetic oligonucleotide
  Antisense strand to SEQ ID NO: 1597043
ucuggcaggcggauagccc

SEQ ID NO: 1597045 - RNA, 19 nt, Artificial Sequence
  Description of Artificial Sequence: Synthetic oligonucleotide
  Sense strand starting at position 3171 of SEQ ID NO: 1560393
uccugaacauuuggauaca

SEQ ID NO: 1597046 - RNA, 19 nt, Artificial Sequence
  Description of Artificial Sequence: Synthetic oligonucleotide
  Antisense strand to SEQ ID NO: 1597045
uguauccaaauguucagga

SEQ ID NO: 1597047 - RNA, 19 nt, Artificial Sequence
  Description of Artificial Sequence: Synthetic oligonucleotide
  Sense strand starting at position 3172 of SEQ ID NO: 1560393
ccugaacauuuggauacaa

SEQ ID NO: 1597048 - RNA, 19 nt, Artificial Sequence
  Description of Artificial Sequence: Synthetic oligonucleotide
  Antisense strand to SEQ ID NO: 1597047
uuguauccaaauguucagg

SEQ ID NO: 1597049 - RNA, 19 nt, Artificial Sequence
  Description of Artificial Sequence: Synthetic oligonucleotide
  Sense strand starting at position 3243 of SEQ ID NO: 1560393
accagaaaccugugcaaag

SEQ ID NO: 1597050 - RNA, 19 nt, Artificial Sequence
  Description of Artificial Sequence: Synthetic oligonucleotide
  Antisense strand to SEQ ID NO: 1597049
cuuugcacagguuucuggu

SEQ ID NO: 1597051 - RNA, 19 nt, Artificial Sequence
  Description of Artificial Sequence: Synthetic oligonucleotide
  Sense strand starting at position 3244 of SEQ ID NO: 1560393
ccagaaaccugugcaaagu

SEQ ID NO: 1597052 - RNA, 19 nt, Artificial Sequence
  Description of Artificial Sequence: Synthetic oligonucleotide
  Antisense strand to SEQ ID NO: 1597051
acuuugcacagguuucugg

SEQ ID NO: 1597053 - RNA, 19 nt, Artificial Sequence
  Description of Artificial Sequence: Synthetic oligonucleotide
  Sense strand starting at position 3582 of SEQ ID NO: 1560393
guugcaguguuguaauaag

SEQ ID NO: 1597054 - RNA, 19 nt, Artificial Sequence
  Description of Artificial Sequence: Synthetic oligonucleotide
  Antisense strand to SEQ ID NO: 1597053
cuuauuacaacacugcaac

SEQ ID NO: 1597055 - RNA, 19 nt, Artificial Sequence
  Description of Artificial Sequence: Synthetic oligonucleotide
  Sense strand starting at position 3912 of SEQ ID NO: 1560393
agaucagucuuucguugac

SEQ ID NO: 1597056 - RNA, 19 nt, Artificial Sequence
  Description of Artificial Sequence: Synthetic oligonucleotide
  Antisense strand to SEQ ID NO: 1597055
gucaacgaaagacugaucu

SEQ ID NO: 1597057 - RNA, 19 nt, Artificial Sequence
  Description of Artificial Sequence: Synthetic oligonucleotide
  Sense strand starting at position 3914 of SEQ ID NO: 1560393
aucagucuuucguugacau

SEQ ID NO: 1597058 - RNA, 19 nt, Artificial Sequence
  Description of Artificial Sequence: Synthetic oligonucleotide
  Antisense strand to SEQ ID NO: 1597057
augucaacgaaagacugau

SEQ ID NO: 1597059 - RNA, 19 nt, Artificial Sequence
  Description of Artificial Sequence: Synthetic oligonucleotide
  Sense strand starting at position 3915 of SEQ ID NO: 1560393
ucagucuuucguugacaug

SEQ ID NO: 1597060 - RNA, 19 nt, Artificial Sequence
  Description of Artificial Sequence: Synthetic oligonucleotide
  Antisense strand to SEQ ID NO: 1597059
caugucaacgaaagacuga

SEQ ID NO: 1597061 - RNA, 19 nt, Artificial Sequence
  Description of Artificial Sequence: Synthetic oligonucleotide
  Sense strand starting at position 201 of SEQ ID NO: 1560394
ccaaguguuuguuggucca

SEQ ID NO: 1597062 - RNA, 19 nt, Artificial Sequence
  Description of Artificial Sequence: Synthetic oligonucleotide
  Antisense strand to SEQ ID NO: 1597061
uggaccaacaaacacuugg

SEQ ID NO: 1597063 - RNA, 19 nt, Artificial Sequence
  Description of Artificial Sequence: Synthetic oligonucleotide
  Sense strand starting at position 203 of SEQ ID NO: 1560394
aaguguuuguugguccaaa

SEQ ID NO: 1597064 - RNA, 19 nt, Artificial Sequence
  Description of Artificial Sequence: Synthetic oligonucleotide
  Antisense strand to SEQ ID NO: 1597063
uuuggaccaacaaacacuu

SEQ ID NO: 1597065 - RNA, 19 nt, Artificial Sequence
  Description of Artificial Sequence: Synthetic oligonucleotide
  Sense strand starting at position 204 of SEQ ID NO: 1560394
aguguuuguugguccaaau

SEQ ID NO: 1597066 - RNA, 19 nt, Artificial Sequence
  Description of Artificial Sequence: Synthetic oligonucleotide
  Antisense strand to SEQ ID NO: 1597065
auuuggaccaacaaacacu

SEQ ID NO: 1597067 - RNA, 19 nt, Artificial Sequence
  Description of Artificial Sequence: Synthetic oligonucleotide
  Sense strand starting at position 307 of SEQ ID NO: 1560394
ccuagcacacgauauaauu

SEQ ID NO: 1597068 - RNA, 19 nt, Artificial Sequence
  Description of Artificial Sequence: Synthetic oligonucleotide
  Antisense strand to SEQ ID NO: 1597067
aauuauaucgugugcuagg

SEQ ID NO: 1597069 - RNA, 19 nt, Artificial Sequence
  Description of Artificial Sequence: Synthetic oligonucleotide
  Sense strand starting at position 429 of SEQ ID NO: 1560394
uugucaaaugacugaacga

SEQ ID NO: 1597070 - RNA, 19 nt, Artificial Sequence
  Description of Artificial Sequence: Synthetic oligonucleotide
  Antisense strand to SEQ ID NO: 1597069
ucguucagucauuugacaa

SEQ ID NO: 1597071 - RNA, 19 nt, Artificial Sequence
  Description of Artificial Sequence: Synthetic oligonucleotide
  Sense strand starting at position 633 of SEQ ID NO: 1560394
gacugacugucagaggcaa

SEQ ID NO: 1597072 - RNA, 19 nt, Artificial Sequence
  Description of Artificial Sequence: Synthetic oligonucleotide
  Antisense strand to SEQ ID NO: 1597071
uugccucugacagucaguc

SEQ ID NO: 1597073 - RNA, 19 nt, Artificial Sequence
  Description of Artificial Sequence: Synthetic oligonucleotide
  Sense strand starting at position 751 of SEQ ID NO: 1560394
cugagauguugccaacucu

SEQ ID NO: 1597074 - RNA, 19 nt, Artificial Sequence
  Description of Artificial Sequence: Synthetic oligonucleotide
  Antisense strand to SEQ ID NO: 1597073
agaguuggcaacaucucag

SEQ ID NO: 1597075 - RNA, 19 nt, Artificial Sequence
  Description of Artificial Sequence: Synthetic oligonucleotide
  Sense strand starting at position 759 of SEQ ID NO: 1560394
uugccaacucuuuggacua

SEQ ID NO: 1597076 - RNA, 19 nt, Artificial Sequence
  Description of Artificial Sequence: Synthetic oligonucleotide
  Antisense strand to SEQ ID NO: 1597075
uaguccaaagaguuggcaa

SEQ ID NO: 1597077 - RNA, 19 nt, Artificial Sequence
  Description of Artificial Sequence: Synthetic oligonucleotide
  Sense strand starting at position 760 of SEQ ID NO: 1560394
ugccaacucuuuggacuaa

SEQ ID NO: 1597078 - RNA, 19 nt, Artificial Sequence
  Description of Artificial Sequence: Synthetic oligonucleotide
  Antisense strand to SEQ ID NO: 1597077
uuaguccaaagaguuggca

SEQ ID NO: 1597079 - RNA, 19 nt, Artificial Sequence
  Description of Artificial Sequence: Synthetic oligonucleotide
  Sense strand starting at position 784 of SEQ ID NO: 1560394
gcucaacagcuuugccuaa

SEQ ID NO: 1597080 - RNA, 19 nt, Artificial Sequence
  Description of Artificial Sequence: Synthetic oligonucleotide
  Antisense strand to SEQ ID NO: 1597079
uuaggcaaagcuguugagc

SEQ ID NO: 1597081 - RNA, 19 nt, Artificial Sequence
  Description of Artificial Sequence: Synthetic oligonucleotide
  Sense strand starting at position 839 of SEQ ID NO: 1560394
ccuggcugcugaguagaaa

SEQ ID NO: 1597082 - RNA, 19 nt, Artificial Sequence
  Description of Artificial Sequence: Synthetic oligonucleotide
  Antisense strand to SEQ ID NO: 1597081
uuucuacucagcagccagg

SEQ ID NO: 1597083 - RNA, 19 nt, Artificial Sequence
  Description of Artificial Sequence: Synthetic oligonucleotide
  Sense strand starting at position 879 of SEQ ID NO: 1560394
aaaugaaacucagugaguu

SEQ ID NO: 1597084 - RNA, 19 nt, Artificial Sequence
  Description of Artificial Sequence: Synthetic oligonucleotide
  Antisense strand to SEQ ID NO: 1597083
aacucacugaguuucauuu

SEQ ID NO: 1597085 - RNA, 19 nt, Artificial Sequence
  Description of Artificial Sequence: Synthetic oligonucleotide
  Sense strand starting at position 880 of SEQ ID NO: 1560394
aaugaaacucagugaguuc

SEQ ID NO: 1597086 - RNA, 19 nt, Artificial Sequence
  Description of Artificial Sequence: Synthetic oligonucleotide
  Antisense strand to SEQ ID NO: 1597085
gaacucacugaguuucauu

SEQ ID NO: 1597087 - RNA, 19 nt, Artificial Sequence
  Description of Artificial Sequence: Synthetic oligonucleotide
  Sense strand starting at position 893 of SEQ ID NO: 1560394
gaguucuucuuggagguga

SEQ ID NO: 1597088 - RNA, 19 nt, Artificial Sequence
  Description of Artificial Sequence: Synthetic oligonucleotide
  Antisense strand to SEQ ID NO: 1597087
ucaccuccaagaagaacuc

SEQ ID NO: 1597089 - RNA, 19 nt, Artificial Sequence
  Description of Artificial Sequence: Synthetic oligonucleotide
  Sense strand starting at position 895 of SEQ ID NO: 1560394
guucuucuuggaggugaaa

SEQ ID NO: 1597090 - RNA, 19 nt, Artificial Sequence
  Description of Artificial Sequence: Synthetic oligonucleotide
  Antisense strand to SEQ ID NO: 1597089
uuucaccuccaagaagaac

SEQ ID NO: 1597091 - RNA, 19 nt, Artificial Sequence
  Description of Artificial Sequence: Synthetic oligonucleotide
  Sense strand starting at position 897 of SEQ ID NO: 1560394
ucuucuuggaggugaaauu

SEQ ID NO: 1597092 - RNA, 19 nt, Artificial Sequence
  Description of Artificial Sequence: Synthetic oligonucleotide
  Antisense strand to SEQ ID NO: 1597091
aauuucaccuccaagaaga

SEQ ID NO: 1597093 - RNA, 19 nt, Artificial Sequence
  Description of Artificial Sequence: Synthetic oligonucleotide
  Sense strand starting at position 971 of SEQ ID NO: 1560394
gucugagguguccaaagag

SEQ ID NO: 1597094 - RNA, 19 nt, Artificial Sequence
  Description of Artificial Sequence: Synthetic oligonucleotide
  Antisense strand to SEQ ID NO: 1597093
cucuuuggacaccucagac

SEQ ID NO: 1597095 - RNA, 19 nt, Artificial Sequence
  Description of Artificial Sequence: Synthetic oligonucleotide
  Sense strand starting at position 1139 of SEQ ID NO: 1560394
aggccagagaugggucuua

SEQ ID NO: 1597096 - RNA, 19 nt, Artificial Sequence
  Description of Artificial Sequence: Synthetic oligonucleotide
  Antisense strand to SEQ ID NO: 1597095
uaagacccaucucuggccu

SEQ ID NO: 1597097 - RNA, 19 nt, Artificial Sequence
  Description of Artificial Sequence: Synthetic oligonucleotide
  Sense strand starting at position 2082 of SEQ ID NO: 1560394
gucauuuccucuuggguuu

SEQ ID NO: 1597098 - RNA, 19 nt, Artificial Sequence
  Description of Artificial Sequence: Synthetic oligonucleotide
  Antisense strand to SEQ ID NO: 1597097
aaacccaagaggaaaugac

SEQ ID NO: 1597099 - RNA, 19 nt, Artificial Sequence
  Description of Artificial Sequence: Synthetic oligonucleotide
  Sense strand starting at position 2223 of SEQ ID NO: 1560394
aguggacgccucugagaga

SEQ ID NO: 1597100 - RNA, 19 nt, Artificial Sequence
  Description of Artificial Sequence: Synthetic oligonucleotide
  Antisense strand to SEQ ID NO: 1597099
ucucucagaggcguccacu

SEQ ID NO: 1597101 - RNA, 19 nt, Artificial Sequence
  Description of Artificial Sequence: Synthetic oligonucleotide
  Sense strand starting at position 2293 of SEQ ID NO: 1560394
aggacaaauccggaggugu

SEQ ID NO: 1597102 - RNA, 19 nt, Artificial Sequence
  Description of Artificial Sequence: Synthetic oligonucleotide
  Antisense strand to SEQ ID NO: 1597101
acaccuccggauuuguccu

SEQ ID NO: 1597103 - RNA, 19 nt, Artificial Sequence
  Description of Artificial Sequence: Synthetic oligonucleotide
  Sense strand starting at position 2295 of SEQ ID NO: 1560394
gacaaauccggagguguug

SEQ ID NO: 1597104 - RNA, 19 nt, Artificial Sequence
  Description of Artificial Sequence: Synthetic oligonucleotide
  Antisense strand to SEQ ID NO: 1597103
caacaccuccggauuuguc

SEQ ID NO: 1597105 - RNA, 19 nt, Artificial Sequence
  Description of Artificial Sequence: Synthetic oligonucleotide
  Sense strand starting at position 2300 of SEQ ID NO: 1560394
auccggagguguugaggaa

SEQ ID NO: 1597106 - RNA, 19 nt, Artificial Sequence
  Description of Artificial Sequence: Synthetic oligonucleotide
  Antisense strand to SEQ ID NO: 1597105
uuccucaacaccuccggau

SEQ ID NO: 1597107 - RNA, 19 nt, Artificial Sequence
  Description of Artificial Sequence: Synthetic oligonucleotide
  Sense strand starting at position 3063 of SEQ ID NO: 1560394
ggcugcugucauggagaga

SEQ ID NO: 1597108 - RNA, 19 nt, Artificial Sequence
  Description of Artificial Sequence: Synthetic oligonucleotide
  Antisense strand to SEQ ID NO: 1597107
ucucuccaugacagcagcc

SEQ ID NO: 1597109 - RNA, 19 nt, Artificial Sequence
  Description of Artificial Sequence: Synthetic oligonucleotide
  Sense strand starting at position 3129 of SEQ ID NO: 1560394
gggcuauccgccugccaga

SEQ ID NO: 1597110 - RNA, 19 nt, Artificial Sequence
  Description of Artificial Sequence: Synthetic oligonucleotide
  Antisense strand to SEQ ID NO: 1597109
ucuggcaggcggauagccc

SEQ ID NO: 1597111 - RNA, 19 nt, Artificial Sequence
  Description of Artificial Sequence: Synthetic oligonucleotide
  Sense strand starting at position 3218 of SEQ ID NO: 1560394
uccugaacauuuggauaca

SEQ ID NO: 1597112 - RNA, 19 nt, Artificial Sequence
  Description of Artificial Sequence: Synthetic oligonucleotide
  Antisense strand to SEQ ID NO: 1597111
uguauccaaauguucagga

SEQ ID NO: 1597113 - RNA, 19 nt, Artificial Sequence
  Description of Artificial Sequence: Synthetic oligonucleotide
  Sense strand starting at position 3219 of SEQ ID NO: 1560394
ccugaacauuuggauacaa

SEQ ID NO: 1597114 - RNA, 19 nt, Artificial Sequence
  Description of Artificial Sequence: Synthetic oligonucleotide
  Antisense strand to SEQ ID NO: 1597113
uuguauccaaauguucagg

SEQ ID NO: 1597115 - RNA, 19 nt, Artificial Sequence
  Description of Artificial Sequence: Synthetic oligonucleotide
  Sense strand starting at position 3290 of SEQ ID NO: 1560394
accagaaaccugugcaaag

SEQ ID NO: 1597116 - RNA, 19 nt, Artificial Sequence
  Description of Artificial Sequence: Synthetic oligonucleotide
  Antisense strand to SEQ ID NO: 1597115
cuuugcacagguuucuggu

SEQ ID NO: 1597117 - RNA, 19 nt, Artificial Sequence
  Description of Artificial Sequence: Synthetic oligonucleotide
  Sense strand starting at position 3291 of SEQ ID NO: 1560394
ccagaaaccugugcaaagu

SEQ ID NO: 1597118 - RNA, 19 nt, Artificial Sequence
  Description of Artificial Sequence: Synthetic oligonucleotide
  Antisense strand to SEQ ID NO: 1597117
acuuugcacagguuucugg

SEQ ID NO: 1597119 - RNA, 19 nt, Artificial Sequence
  Description of Artificial Sequence: Synthetic oligonucleotide
  Sense strand starting at position 3629 of SEQ ID NO: 1560394
guugcaguguuguaauaag

SEQ ID NO: 1597120 - RNA, 19 nt, Artificial Sequence
  Description of Artificial Sequence: Synthetic oligonucleotide
  Antisense strand to SEQ ID NO: 1597119
cuuauuacaacacugcaac

SEQ ID NO: 1597121 - RNA, 19 nt, Artificial Sequence
  Description of Artificial Sequence: Synthetic oligonucleotide
  Sense strand starting at position 3959 of SEQ ID NO: 1560394
agaucagucuuucguugac

SEQ ID NO: 1597122 - RNA, 19 nt, Artificial Sequence
  Description of Artificial Sequence: Synthetic oligonucleotide
  Antisense strand to SEQ ID NO: 1597121
gucaacgaaagacugaucu

SEQ ID NO: 1597123 - RNA, 19 nt, Artificial Sequence
  Description of Artificial Sequence: Synthetic oligonucleotide
  Sense strand starting at position 3961 of SEQ ID NO: 1560394
aucagucuuucguugacau

SEQ ID NO: 1597124 - RNA, 19 nt, Artificial Sequence
  Description of Artificial Sequence: Synthetic oligonucleotide
  Antisense strand to SEQ ID NO: 1597123
augucaacgaaagacugau

SEQ ID NO: 1597125 - RNA, 19 nt, Artificial Sequence
  Description of Artificial Sequence: Synthetic oligonucleotide
  Sense strand starting at position 3962 of SEQ ID NO: 1560394
ucagucuuucguugacaug

SEQ ID NO: 1597126 - RNA, 19 nt, Artificial Sequence
  Description of Artificial Sequence: Synthetic oligonucleotide
  Antisense strand to SEQ ID NO: 1597125
caugucaacgaaagacuga

SEQ ID NO: 1597127 - RNA, 19 nt, Artificial Sequence
  Description of Artificial Sequence: Synthetic oligonucleotide
  Sense strand starting at position 91 of SEQ ID NO: 1560395
ugagguccugugugagaug

SEQ ID NO: 1597128 - RNA, 19 nt, Artificial Sequence
  Description of Artificial Sequence: Synthetic oligonucleotide
  Antisense strand to SEQ ID NO: 1597127
caucucacacaggaccuca

SEQ ID NO: 1597129 - RNA, 19 nt, Artificial Sequence
  Description of Artificial Sequence: Synthetic oligonucleotide
  Sense strand starting at position 100 of SEQ ID NO: 1560395
gugugagaugcagguuuca

SEQ ID NO: 1597130 - RNA, 19 nt, Artificial Sequence
  Description of Artificial Sequence: Synthetic oligonucleotide
  Antisense strand to SEQ ID NO: 1597129
ugaaaccugcaucucacac

SEQ ID NO: 1597131 - RNA, 19 nt, Artificial Sequence
  Description of Artificial Sequence: Synthetic oligonucleotide
  Sense strand starting at position 409 of SEQ ID NO: 1560395
ucaugcugugacugggaaa

SEQ ID NO: 1597132 - RNA, 19 nt, Artificial Sequence
  Description of Artificial Sequence: Synthetic oligonucleotide
  Antisense strand to SEQ ID NO: 1597131
uuucccagucacagcauga

SEQ ID NO: 1597133 - RNA, 19 nt, Artificial Sequence
  Description of Artificial Sequence: Synthetic oligonucleotide
  Sense strand starting at position 620 of SEQ ID NO: 1560395
ggauucugcagauauggcu

SEQ ID NO: 1597134 - RNA, 19 nt, Artificial Sequence
  Description of Artificial Sequence: Synthetic oligonucleotide
  Antisense strand to SEQ ID NO: 1597133
agccauaucugcagaaucc

SEQ ID NO: 1597135 - RNA, 19 nt, Artificial Sequence
  Description of Artificial Sequence: Synthetic oligonucleotide
  Sense strand starting at position 627 of SEQ ID NO: 1560395
gcagauauggcucagugca

SEQ ID NO: 1597136 - RNA, 19 nt, Artificial Sequence
  Description of Artificial Sequence: Synthetic oligonucleotide
  Antisense strand to SEQ ID NO: 1597135
ugcacugagccauaucugc

SEQ ID NO: 1597137 - RNA, 19 nt, Artificial Sequence
  Description of Artificial Sequence: Synthetic oligonucleotide
  Sense strand starting at position 853 of SEQ ID NO: 1560395
cgguagaaguggguguuua

SEQ ID NO: 1597138 - RNA, 19 nt, Artificial Sequence
  Description of Artificial Sequence: Synthetic oligonucleotide
  Antisense strand to SEQ ID NO: 1597137
uaaacacccacuucuaccg

SEQ ID NO: 1597139 - RNA, 19 nt, Artificial Sequence
  Description of Artificial Sequence: Synthetic oligonucleotide
  Sense strand starting at position 854 of SEQ ID NO: 1560395
gguagaaguggguguuuaa

SEQ ID NO: 1597140 - RNA, 19 nt, Artificial Sequence
  Description of Artificial Sequence: Synthetic oligonucleotide
  Antisense strand to SEQ ID NO: 1597139
uuaaacacccacuucuacc

SEQ ID NO: 1597141 - RNA, 19 nt, Artificial Sequence
  Description of Artificial Sequence: Synthetic oligonucleotide
  Sense strand starting at position 865 of SEQ ID NO: 1560395
guguuuaagugggugcaua

SEQ ID NO: 1597142 - RNA, 19 nt, Artificial Sequence
  Description of Artificial Sequence: Synthetic oligonucleotide
  Antisense strand to SEQ ID NO: 1597141
uaugcacccacuuaaacac

SEQ ID NO: 1597143 - RNA, 19 nt, Artificial Sequence
  Description of Artificial Sequence: Synthetic oligonucleotide
  Sense strand starting at position 866 of SEQ ID NO: 1560395
uguuuaagugggugcauaa

SEQ ID NO: 1597144 - RNA, 19 nt, Artificial Sequence
  Description of Artificial Sequence: Synthetic oligonucleotide
  Antisense strand to SEQ ID NO: 1597143
uuaugcacccacuuaaaca

SEQ ID NO: 1597145 - RNA, 19 nt, Artificial Sequence
  Description of Artificial Sequence: Synthetic oligonucleotide
  Sense strand starting at position 875 of SEQ ID NO: 1560395
gggugcauaacuggguuaa

SEQ ID NO: 1597146 - RNA, 19 nt, Artificial Sequence
  Description of Artificial Sequence: Synthetic oligonucleotide
  Antisense strand to SEQ ID NO: 1597145
uuaacccaguuaugcaccc

SEQ ID NO: 1597147 - RNA, 19 nt, Artificial Sequence
  Description of Artificial Sequence: Synthetic oligonucleotide
  Sense strand starting at position 876 of SEQ ID NO: 1560395
ggugcauaacuggguuaau

SEQ ID NO: 1597148 - RNA, 19 nt, Artificial Sequence
  Description of Artificial Sequence: Synthetic oligonucleotide
  Antisense strand to SEQ ID NO: 1597147
auuaacccaguuaugcacc

SEQ ID NO: 1597149 - RNA, 19 nt, Artificial Sequence
  Description of Artificial Sequence: Synthetic oligonucleotide
  Sense strand starting at position 877 of SEQ ID NO: 1560395
gugcauaacuggguuaauu

SEQ ID NO: 1597150 - RNA, 19 nt, Artificial Sequence
  Description of Artificial Sequence: Synthetic oligonucleotide
  Antisense strand to SEQ ID NO: 1597149
aauuaacccaguuaugcac

SEQ ID NO: 1597151 - RNA, 19 nt, Artificial Sequence
  Description of Artificial Sequence: Synthetic oligonucleotide
  Sense strand starting at position 888 of SEQ ID NO: 1560395
gguuaauugguguggaaug

SEQ ID NO: 1597152 - RNA, 19 nt, Artificial Sequence
  Description of Artificial Sequence: Synthetic oligonucleotide
  Antisense strand to SEQ ID NO: 1597151
cauuccacaccaauuaacc

SEQ ID NO: 1597153 - RNA, 19 nt, Artificial Sequence
  Description of Artificial Sequence: Synthetic oligonucleotide
  Sense strand starting at position 893 of SEQ ID NO: 1560395
auugguguggaauggaaau

SEQ ID NO: 1597154 - RNA, 19 nt, Artificial Sequence
  Description of Artificial Sequence: Synthetic oligonucleotide
  Antisense strand to SEQ ID NO: 1597153
auuuccauuccacaccaau

SEQ ID NO: 1597155 - RNA, 19 nt, Artificial Sequence
  Description of Artificial Sequence: Synthetic oligonucleotide
  Sense strand starting at position 905 of SEQ ID NO: 1560395
uggaaaucaguguguggcu

SEQ ID NO: 1597156 - RNA, 19 nt, Artificial Sequence
  Description of Artificial Sequence: Synthetic oligonucleotide
  Antisense strand to SEQ ID NO: 1597155
agccacacacugauuucca

SEQ ID NO: 1597157 - RNA, 19 nt, Artificial Sequence
  Description of Artificial Sequence: Synthetic oligonucleotide
  Sense strand starting at position 1242 of SEQ ID NO: 1560395
cugggaaucucucugaguc

SEQ ID NO: 1597158 - RNA, 19 nt, Artificial Sequence
  Description of Artificial Sequence: Synthetic oligonucleotide
  Antisense strand to SEQ ID NO: 1597157
gacucagagagauucccag

SEQ ID NO: 1597159 - RNA, 19 nt, Artificial Sequence
  Description of Artificial Sequence: Synthetic oligonucleotide
  Sense strand starting at position 1279 of SEQ ID NO: 1560395
ggucuuuguaucugugacu

SEQ ID NO: 1597160 - RNA, 19 nt, Artificial Sequence
  Description of Artificial Sequence: Synthetic oligonucleotide
  Antisense strand to SEQ ID NO: 1597159
agucacagauacaaagacc

SEQ ID NO: 1597161 - RNA, 19 nt, Artificial Sequence
  Description of Artificial Sequence: Synthetic oligonucleotide
  Sense strand starting at position 1511 of SEQ ID NO: 1560395
ugaaaucuuccagaacguc

SEQ ID NO: 1597162 - RNA, 19 nt, Artificial Sequence
  Description of Artificial Sequence: Synthetic oligonucleotide
  Antisense strand to SEQ ID NO: 1597161
gacguucuggaagauuuca

SEQ ID NO: 1597163 - RNA, 19 nt, Artificial Sequence
  Description of Artificial Sequence: Synthetic oligonucleotide
  Sense strand starting at position 1793 of SEQ ID NO: 1560395
uugccuuaccauugcuuga

SEQ ID NO: 1597164 - RNA, 19 nt, Artificial Sequence
  Description of Artificial Sequence: Synthetic oligonucleotide
  Antisense strand to SEQ ID NO: 1597163
ucaagcaaugguaaggcaa

SEQ ID NO: 1597165 - RNA, 19 nt, Artificial Sequence
  Description of Artificial Sequence: Synthetic oligonucleotide
  Sense strand starting at position 1795 of SEQ ID NO: 1560395
gccuuaccauugcuugaau

SEQ ID NO: 1597166 - RNA, 19 nt, Artificial Sequence
  Description of Artificial Sequence: Synthetic oligonucleotide
  Antisense strand to SEQ ID NO: 1597165
auucaagcaaugguaaggc

SEQ ID NO: 1597167 - RNA, 19 nt, Artificial Sequence
  Description of Artificial Sequence: Synthetic oligonucleotide
  Sense strand starting at position 2191 of SEQ ID NO: 1560395
caaagugcugucgagagga

SEQ ID NO: 1597168 - RNA, 19 nt, Artificial Sequence
  Description of Artificial Sequence: Synthetic oligonucleotide
  Antisense strand to SEQ ID NO: 1597167
uccucucgacagcacuuug

SEQ ID NO: 1597169 - RNA, 19 nt, Artificial Sequence
  Description of Artificial Sequence: Synthetic oligonucleotide
  Sense strand starting at position 2554 of SEQ ID NO: 1560395
gggucauucuggagaggca

SEQ ID NO: 1597170 - RNA, 19 nt, Artificial Sequence
  Description of Artificial Sequence: Synthetic oligonucleotide
  Antisense strand to SEQ ID NO: 1597169
ugccucuccagaaugaccc

SEQ ID NO: 1597171 - RNA, 19 nt, Artificial Sequence
  Description of Artificial Sequence: Synthetic oligonucleotide
  Sense strand starting at position 2555 of SEQ ID NO: 1560395
ggucauucuggagaggcau

SEQ ID NO: 1597172 - RNA, 19 nt, Artificial Sequence
  Description of Artificial Sequence: Synthetic oligonucleotide
  Antisense strand to SEQ ID NO: 1597171
augccucuccagaaugacc

SEQ ID NO: 1597173 - RNA, 19 nt, Artificial Sequence
  Description of Artificial Sequence: Synthetic oligonucleotide
  Sense strand starting at position 2796 of SEQ ID NO: 1560395
agagggauuucgggaugga

SEQ ID NO: 1597174 - RNA, 19 nt, Artificial Sequence
  Description of Artificial Sequence: Synthetic oligonucleotide
  Antisense strand to SEQ ID NO: 1597173
uccaucccgaaaucccucu

SEQ ID NO: 1597175 - RNA, 19 nt, Artificial Sequence
  Description of Artificial Sequence: Synthetic oligonucleotide
  Sense strand starting at position 2856 of SEQ ID NO: 1560395
ccuccuuucccagauuggu

SEQ ID NO: 1597176 - RNA, 19 nt, Artificial Sequence
  Description of Artificial Sequence: Synthetic oligonucleotide
  Antisense strand to SEQ ID NO: 1597175
accaaucugggaaaggagg

SEQ ID NO: 1597177 - RNA, 19 nt, Artificial Sequence
  Description of Artificial Sequence: Synthetic oligonucleotide
  Sense strand starting at position 2864 of SEQ ID NO: 1560395
cccagauugguguaacuag

SEQ ID NO: 1597178 - RNA, 19 nt, Artificial Sequence
  Description of Artificial Sequence: Synthetic oligonucleotide
  Antisense strand to SEQ ID NO: 1597177
cuaguuacaccaaucuggg

SEQ ID NO: 1597179 - RNA, 19 nt, Artificial Sequence
  Description of Artificial Sequence: Synthetic oligonucleotide
  Sense strand starting at position 2874 of SEQ ID NO: 1560395
uguaacuaggcccagauau

SEQ ID NO: 1597180 - RNA, 19 nt, Artificial Sequence
  Description of Artificial Sequence: Synthetic oligonucleotide
  Antisense strand to SEQ ID NO: 1597179
auaucugggccuaguuaca

SEQ ID NO: 1597181 - RNA, 19 nt, Artificial Sequence
  Description of Artificial Sequence: Synthetic oligonucleotide
  Sense strand starting at position 2961 of SEQ ID NO: 1560395
gggcuucuaagcugguuaa

SEQ ID NO: 1597182 - RNA, 19 nt, Artificial Sequence
  Description of Artificial Sequence: Synthetic oligonucleotide
  Antisense strand to SEQ ID NO: 1597181
uuaaccagcuuagaagccc

SEQ ID NO: 1597183 - RNA, 19 nt, Artificial Sequence
  Description of Artificial Sequence: Synthetic oligonucleotide
  Sense strand starting at position 2971 of SEQ ID NO: 1560395
gcugguuaacagugaguac

SEQ ID NO: 1597184 - RNA, 19 nt, Artificial Sequence
  Description of Artificial Sequence: Synthetic oligonucleotide
  Antisense strand to SEQ ID NO: 1597183
guacucacuguuaaccagc

SEQ ID NO: 1597185 - RNA, 19 nt, Artificial Sequence
  Description of Artificial Sequence: Synthetic oligonucleotide
  Sense strand starting at position 2983 of SEQ ID NO: 1560395
ugaguaccuccgcggauuu

SEQ ID NO: 1597186 - RNA, 19 nt, Artificial Sequence
  Description of Artificial Sequence: Synthetic oligonucleotide
  Antisense strand to SEQ ID NO: 1597185
aaauccgcggagguacuca

SEQ ID NO: 1597187 - RNA, 19 nt, Artificial Sequence
  Description of Artificial Sequence: Synthetic oligonucleotide
  Sense strand starting at position 3050 of SEQ ID NO: 1560395
ggcagacugccaugagaug

SEQ ID NO: 1597188 - RNA, 19 nt, Artificial Sequence
  Description of Artificial Sequence: Synthetic oligonucleotide
  Antisense strand to SEQ ID NO: 1597187
caucucauggcagucugcc

SEQ ID NO: 1597189 - RNA, 19 nt, Artificial Sequence
  Description of Artificial Sequence: Synthetic oligonucleotide
  Sense strand starting at position 3098 of SEQ ID NO: 1560395
cuuccacuugagugaucuu

SEQ ID NO: 1597190 - RNA, 19 nt, Artificial Sequence
  Description of Artificial Sequence: Synthetic oligonucleotide
  Antisense strand to SEQ ID NO: 1597189
aagaucacucaaguggaag

SEQ ID NO: 1597191 - RNA, 19 nt, Artificial Sequence
  Description of Artificial Sequence: Synthetic oligonucleotide
  Sense strand starting at position 3101 of SEQ ID NO: 1560395
ccacuugagugaucuugaa

SEQ ID NO: 1597192 - RNA, 19 nt, Artificial Sequence
  Description of Artificial Sequence: Synthetic oligonucleotide
  Antisense strand to SEQ ID NO: 1597191
uucaagaucacucaagugg

SEQ ID NO: 1597193 - RNA, 19 nt, Artificial Sequence
  Description of Artificial Sequence: Synthetic oligonucleotide
  Sense strand starting at position 3208 of SEQ ID NO: 1560395
guaucuaacacgugguaca

SEQ ID NO: 1597194 - RNA, 19 nt, Artificial Sequence
  Description of Artificial Sequence: Synthetic oligonucleotide
  Antisense strand to SEQ ID NO: 1597193
uguaccacguguuagauac

SEQ ID NO: 1597195 - RNA, 19 nt, Artificial Sequence
  Description of Artificial Sequence: Synthetic oligonucleotide
  Sense strand starting at position 3219 of SEQ ID NO: 1560395
gugguacacacccaguaaa

SEQ ID NO: 1597196 - RNA, 19 nt, Artificial Sequence
  Description of Artificial Sequence: Synthetic oligonucleotide
  Antisense strand to SEQ ID NO: 1597195
uuuacuggguguguaccac

SEQ ID NO: 1597197 - RNA, 19 nt, Artificial Sequence
  Description of Artificial Sequence: Synthetic oligonucleotide
  Sense strand starting at position 3285 of SEQ ID NO: 1560395
auacauuguccaugcuuua

SEQ ID NO: 1597198 - RNA, 19 nt, Artificial Sequence
  Description of Artificial Sequence: Synthetic oligonucleotide
  Antisense strand to SEQ ID NO: 1597197
uaaagcauggacaauguau

SEQ ID NO: 1597199 - RNA, 19 nt, Artificial Sequence
  Description of Artificial Sequence: Synthetic oligonucleotide
  Sense strand starting at position 3410 of SEQ ID NO: 1560395
uuguguuaucacgcuuugu

SEQ ID NO: 1597200 - RNA, 19 nt, Artificial Sequence
  Description of Artificial Sequence: Synthetic oligonucleotide
  Antisense strand to SEQ ID NO: 1597199
acaaagcgugauaacacaa

SEQ ID NO: 1597201 - RNA, 19 nt, Artificial Sequence
  Description of Artificial Sequence: Synthetic oligonucleotide
  Sense strand starting at position 3411 of SEQ ID NO: 1560395
uguguuaucacgcuuugug

SEQ ID NO: 1597202 - RNA, 19 nt, Artificial Sequence
  Description of Artificial Sequence: Synthetic oligonucleotide
  Antisense strand to SEQ ID NO: 1597201
cacaaagcgugauaacaca

SEQ ID NO: 1597203 - RNA, 19 nt, Artificial Sequence
  Description of Artificial Sequence: Synthetic oligonucleotide
  Sense strand starting at position 3412 of SEQ ID NO: 1560395
guguuaucacgcuuuguga

SEQ ID NO: 1597204 - RNA, 19 nt, Artificial Sequence
  Description of Artificial Sequence: Synthetic oligonucleotide
  Antisense strand to SEQ ID NO: 1597203
ucacaaagcgugauaacac

SEQ ID NO: 1597205 - RNA, 19 nt, Artificial Sequence
  Description of Artificial Sequence: Synthetic oligonucleotide
  Sense strand starting at position 3415 of SEQ ID NO: 1560395
uuaucacgcuuugugauuu

SEQ ID NO: 1597206 - RNA, 19 nt, Artificial Sequence
  Description of Artificial Sequence: Synthetic oligonucleotide
  Antisense strand to SEQ ID NO: 1597205
aaaucacaaagcgugauaa

SEQ ID NO: 1597207 - RNA, 19 nt, Artificial Sequence
  Description of Artificial Sequence: Synthetic oligonucleotide
  Sense strand starting at position 22 of SEQ ID NO: 1560396
ucugauuggacacgaguuu

SEQ ID NO: 1597208 - RNA, 19 nt, Artificial Sequence
  Description of Artificial Sequence: Synthetic oligonucleotide
  Antisense strand to SEQ ID NO: 1597207
aaacucguguccaaucaga

SEQ ID NO: 1597209 - RNA, 19 nt, Artificial Sequence
  Description of Artificial Sequence: Synthetic oligonucleotide
  Sense strand starting at position 35 of SEQ ID NO: 1560396
gaguuucuugcagauguga

SEQ ID NO: 1597210 - RNA, 19 nt, Artificial Sequence
  Description of Artificial Sequence: Synthetic oligonucleotide
  Antisense strand to SEQ ID NO: 1597209
ucacaucugcaagaaacuc

SEQ ID NO: 1597211 - RNA, 19 nt, Artificial Sequence
  Description of Artificial Sequence: Synthetic oligonucleotide
  Sense strand starting at position 37 of SEQ ID NO: 1560396
guuucuugcagaugugauu

SEQ ID NO: 1597212 - RNA, 19 nt, Artificial Sequence
  Description of Artificial Sequence: Synthetic oligonucleotide
  Antisense strand to SEQ ID NO: 1597211
aaucacaucugcaagaaac

SEQ ID NO: 1597213 - RNA, 19 nt, Artificial Sequence
  Description of Artificial Sequence: Synthetic oligonucleotide
  Sense strand starting at position 43 of SEQ ID NO: 1560396
ugcagaugugauuauacuc

SEQ ID NO: 1597214 - RNA, 19 nt, Artificial Sequence
  Description of Artificial Sequence: Synthetic oligonucleotide
  Antisense strand to SEQ ID NO: 1597213
gaguauaaucacaucugca

SEQ ID NO: 1597215 - RNA, 19 nt, Artificial Sequence
  Description of Artificial Sequence: Synthetic oligonucleotide
  Sense strand starting at position 81 of SEQ ID NO: 1560396
gagcccugauuugaugaca

SEQ ID NO: 1597216 - RNA, 19 nt, Artificial Sequence
  Description of Artificial Sequence: Synthetic oligonucleotide
  Antisense strand to SEQ ID NO: 1597215
ugucaucaaaucagggcuc

SEQ ID NO: 1597217 - RNA, 19 nt, Artificial Sequence
  Description of Artificial Sequence: Synthetic oligonucleotide
  Sense strand starting at position 86 of SEQ ID NO: 1560396
cugauuugaugacaagcau

SEQ ID NO: 1597218 - RNA, 19 nt, Artificial Sequence
  Description of Artificial Sequence: Synthetic oligonucleotide
  Antisense strand to SEQ ID NO: 1597217
augcuugucaucaaaucag

SEQ ID NO: 1597219 - RNA, 19 nt, Artificial Sequence
  Description of Artificial Sequence: Synthetic oligonucleotide
  Sense strand starting at position 95 of SEQ ID NO: 1560396
ugacaagcauccucauaag

SEQ ID NO: 1597220 - RNA, 19 nt, Artificial Sequence
  Description of Artificial Sequence: Synthetic oligonucleotide
  Antisense strand to SEQ ID NO: 1597219
cuuaugaggaugcuuguca

SEQ ID NO: 1597221 - RNA, 19 nt, Artificial Sequence
  Description of Artificial Sequence: Synthetic oligonucleotide
  Sense strand starting at position 142 of SEQ ID NO: 1560396
agcagaugguuccaggaca

SEQ ID NO: 1597222 - RNA, 19 nt, Artificial Sequence
  Description of Artificial Sequence: Synthetic oligonucleotide
  Antisense strand to SEQ ID NO: 1597221
uguccuggaaccaucugcu

SEQ ID NO: 1597223 - RNA, 19 nt, Artificial Sequence
  Description of Artificial Sequence: Synthetic oligonucleotide
  Sense strand starting at position 378 of SEQ ID NO: 1560396
gcuugcguagggucauauu

SEQ ID NO: 1597224 - RNA, 19 nt, Artificial Sequence
  Description of Artificial Sequence: Synthetic oligonucleotide
  Antisense strand to SEQ ID NO: 1597223
aauaugacccuacgcaagc

SEQ ID NO: 1597225 - RNA, 19 nt, Artificial Sequence
  Description of Artificial Sequence: Synthetic oligonucleotide
  Sense strand starting at position 387 of SEQ ID NO: 1560396
gggucauauuccgucugcu

SEQ ID NO: 1597226 - RNA, 19 nt, Artificial Sequence
  Description of Artificial Sequence: Synthetic oligonucleotide
  Antisense strand to SEQ ID NO: 1597225
agcagacggaauaugaccc

SEQ ID NO: 1597227 - RNA, 19 nt, Artificial Sequence
  Description of Artificial Sequence: Synthetic oligonucleotide
  Sense strand starting at position 389 of SEQ ID NO: 1560396
gucauauuccgucugcugu

SEQ ID NO: 1597228 - RNA, 19 nt, Artificial Sequence
  Description of Artificial Sequence: Synthetic oligonucleotide
  Antisense strand to SEQ ID NO: 1597227
acagcagacggaauaugac

SEQ ID NO: 1597229 - RNA, 19 nt, Artificial Sequence
  Description of Artificial Sequence: Synthetic oligonucleotide
  Sense strand starting at position 633 of SEQ ID NO: 1560396
ggcugcauccgggagacuu

SEQ ID NO: 1597230 - RNA, 19 nt, Artificial Sequence
  Description of Artificial Sequence: Synthetic oligonucleotide
  Antisense strand to SEQ ID NO: 1597229
aagucucccggaugcagcc

SEQ ID NO: 1597231 - RNA, 19 nt, Artificial Sequence
  Description of Artificial Sequence: Synthetic oligonucleotide
  Sense strand starting at position 749 of SEQ ID NO: 1560396
ccgagagugcucuggagac

SEQ ID NO: 1597232 - RNA, 19 nt, Artificial Sequence
  Description of Artificial Sequence: Synthetic oligonucleotide
  Antisense strand to SEQ ID NO: 1597231
gucuccagagcacucucgg

SEQ ID NO: 1597233 - RNA, 19 nt, Artificial Sequence
  Description of Artificial Sequence: Synthetic oligonucleotide
  Sense strand starting at position 866 of SEQ ID NO: 1560396
ugaaaucccugagauugca

SEQ ID NO: 1597234 - RNA, 19 nt, Artificial Sequence
  Description of Artificial Sequence: Synthetic oligonucleotide
  Antisense strand to SEQ ID NO: 1597233
ugcaaucucagggauuuca

SEQ ID NO: 1597235 - RNA, 19 nt, Artificial Sequence
  Description of Artificial Sequence: Synthetic oligonucleotide
  Sense strand starting at position 1080 of SEQ ID NO: 1560396
ugaacaaagccuugaaggu

SEQ ID NO: 1597236 - RNA, 19 nt, Artificial Sequence
  Description of Artificial Sequence: Synthetic oligonucleotide
  Antisense strand to SEQ ID NO: 1597235
accuucaaggcuuuguuca

SEQ ID NO: 1597237 - RNA, 19 nt, Artificial Sequence
  Description of Artificial Sequence: Synthetic oligonucleotide
  Sense strand starting at position 1245 of SEQ ID NO: 1560396
gcaacuucgucuucgagaa

SEQ ID NO: 1597238 - RNA, 19 nt, Artificial Sequence
  Description of Artificial Sequence: Synthetic oligonucleotide
  Antisense strand to SEQ ID NO: 1597237
uucucgaagacgaaguugc

SEQ ID NO: 1597239 - RNA, 19 nt, Artificial Sequence
  Description of Artificial Sequence: Synthetic oligonucleotide
  Sense strand starting at position 1246 of SEQ ID NO: 1560396
caacuucgucuucgagaau

SEQ ID NO: 1597240 - RNA, 19 nt, Artificial Sequence
  Description of Artificial Sequence: Synthetic oligonucleotide
  Antisense strand to SEQ ID NO: 1597239
auucucgaagacgaaguug

SEQ ID NO: 1597241 - RNA, 19 nt, Artificial Sequence
  Description of Artificial Sequence: Synthetic oligonucleotide
  Sense strand starting at position 1249 of SEQ ID NO: 1560396
cuucgucuucgagaaugau

SEQ ID NO: 1597242 - RNA, 19 nt, Artificial Sequence
  Description of Artificial Sequence: Synthetic oligonucleotide
  Antisense strand to SEQ ID NO: 1597241
aucauucucgaagacgaag

SEQ ID NO: 1597243 - RNA, 19 nt, Artificial Sequence
  Description of Artificial Sequence: Synthetic oligonucleotide
  Sense strand starting at position 1411 of SEQ ID NO: 1560396
gagggauguggcugucaca

SEQ ID NO: 1597244 - RNA, 19 nt, Artificial Sequence
  Description of Artificial Sequence: Synthetic oligonucleotide
  Antisense strand to SEQ ID NO: 1597243
ugugacagccacaucccuc

SEQ ID NO: 1597245 - RNA, 19 nt, Artificial Sequence
  Description of Artificial Sequence: Synthetic oligonucleotide
  Sense strand starting at position 2626 of SEQ ID NO: 1560396
cauuuauguugagguguga

SEQ ID NO: 1597246 - RNA, 19 nt, Artificial Sequence
  Description of Artificial Sequence: Synthetic oligonucleotide
  Antisense strand to SEQ ID NO: 1597245
ucacaccucaacauaaaug

SEQ ID NO: 1597247 - RNA, 19 nt, Artificial Sequence
  Description of Artificial Sequence: Synthetic oligonucleotide
  Sense strand starting at position 2630 of SEQ ID NO: 1560396
uauguugaggugugaagaa

SEQ ID NO: 1597248 - RNA, 19 nt, Artificial Sequence
  Description of Artificial Sequence: Synthetic oligonucleotide
  Antisense strand to SEQ ID NO: 1597247
uucuucacaccucaacaua

SEQ ID NO: 1597249 - RNA, 19 nt, Artificial Sequence
  Description of Artificial Sequence: Synthetic oligonucleotide
  Sense strand starting at position 2826 of SEQ ID NO: 1560396
ggcugccggucuguaaaua

SEQ ID NO: 1597250 - RNA, 19 nt, Artificial Sequence
  Description of Artificial Sequence: Synthetic oligonucleotide
  Antisense strand to SEQ ID NO: 1597249
uauuuacagaccggcagcc

SEQ ID NO: 1597251 - RNA, 19 nt, Artificial Sequence
  Description of Artificial Sequence: Synthetic oligonucleotide
  Sense strand starting at position 3502 of SEQ ID NO: 1560396
cacggucaucucuagaacu

SEQ ID NO: 1597252 - RNA, 19 nt, Artificial Sequence
  Description of Artificial Sequence: Synthetic oligonucleotide
  Antisense strand to SEQ ID NO: 1597251
aguucuagagaugaccgug

SEQ ID NO: 1597253 - RNA, 19 nt, Artificial Sequence
  Description of Artificial Sequence: Synthetic oligonucleotide
  Sense strand starting at position 3504 of SEQ ID NO: 1560396
cggucaucucuagaacuuu

SEQ ID NO: 1597254 - RNA, 19 nt, Artificial Sequence
  Description of Artificial Sequence: Synthetic oligonucleotide
  Antisense strand to SEQ ID NO: 1597253
aaaguucuagagaugaccg

SEQ ID NO: 1597255 - RNA, 19 nt, Artificial Sequence
  Description of Artificial Sequence: Synthetic oligonucleotide
  Sense strand starting at position 3539 of SEQ ID NO: 1560396
gaaacucugucgccaugga

SEQ ID NO: 1597256 - RNA, 19 nt, Artificial Sequence
  Description of Artificial Sequence: Synthetic oligonucleotide
  Antisense strand to SEQ ID NO: 1597255
uccauggcgacagaguuuc

SEQ ID NO: 1597257 - RNA, 19 nt, Artificial Sequence
  Description of Artificial Sequence: Synthetic oligonucleotide
  Sense strand starting at position 3540 of SEQ ID NO: 1560396
aaacucugucgccauggaa

SEQ ID NO: 1597258 - RNA, 19 nt, Artificial Sequence
  Description of Artificial Sequence: Synthetic oligonucleotide
  Antisense strand to SEQ ID NO: 1597257
uuccauggcgacagaguuu

SEQ ID NO: 1597259 - RNA, 19 nt, Artificial Sequence
  Description of Artificial Sequence: Synthetic oligonucleotide
  Sense strand starting at position 3587 of SEQ ID NO: 1560396
ccuggugacuucuuuggca

SEQ ID NO: 1597260 - RNA, 19 nt, Artificial Sequence
  Description of Artificial Sequence: Synthetic oligonucleotide
  Antisense strand to SEQ ID NO: 1597259
ugccaaagaagucaccagg

SEQ ID NO: 1597261 - RNA, 19 nt, Artificial Sequence
  Description of Artificial Sequence: Synthetic oligonucleotide
  Sense strand starting at position 3591 of SEQ ID NO: 1560396
gugacuucuuuggcaggua

SEQ ID NO: 1597262 - RNA, 19 nt, Artificial Sequence
  Description of Artificial Sequence: Synthetic oligonucleotide
  Antisense strand to SEQ ID NO: 1597261
uaccugccaaagaagucac

SEQ ID NO: 1597263 - RNA, 19 nt, Artificial Sequence
  Description of Artificial Sequence: Synthetic oligonucleotide
  Sense strand starting at position 3603 of SEQ ID NO: 1560396
gcagguaaguuccucaauc

SEQ ID NO: 1597264 - RNA, 19 nt, Artificial Sequence
  Description of Artificial Sequence: Synthetic oligonucleotide
  Antisense strand to SEQ ID NO: 1597263
gauugaggaacuuaccugc

SEQ ID NO: 1597265 - RNA, 19 nt, Artificial Sequence
  Description of Artificial Sequence: Synthetic oligonucleotide
  Sense strand starting at position 3605 of SEQ ID NO: 1560396
agguaaguuccucaaucgu

SEQ ID NO: 1597266 - RNA, 19 nt, Artificial Sequence
  Description of Artificial Sequence: Synthetic oligonucleotide
  Antisense strand to SEQ ID NO: 1597265
acgauugaggaacuuaccu

SEQ ID NO: 1597267 - RNA, 19 nt, Artificial Sequence
  Description of Artificial Sequence: Synthetic oligonucleotide
  Sense strand starting at position 3611 of SEQ ID NO: 1560396
guuccucaaucguuaaaca

SEQ ID NO: 1597268 - RNA, 19 nt, Artificial Sequence
  Description of Artificial Sequence: Synthetic oligonucleotide
  Antisense strand to SEQ ID NO: 1597267
uguuuaacgauugaggaac

SEQ ID NO: 1597269 - RNA, 19 nt, Artificial Sequence
  Description of Artificial Sequence: Synthetic oligonucleotide
  Sense strand starting at position 3630 of SEQ ID NO: 1560396
cagagucugucagugauga

SEQ ID NO: 1597270 - RNA, 19 nt, Artificial Sequence
  Description of Artificial Sequence: Synthetic oligonucleotide
  Antisense strand to SEQ ID NO: 1597269
ucaucacugacagacucug

SEQ ID NO: 1597271 - RNA, 19 nt, Artificial Sequence
  Description of Artificial Sequence: Synthetic oligonucleotide
  Sense strand starting at position 3631 of SEQ ID NO: 1560396
agagucugucagugaugaa

SEQ ID NO: 1597272 - RNA, 19 nt, Artificial Sequence
  Description of Artificial Sequence: Synthetic oligonucleotide
  Antisense strand to SEQ ID NO: 1597271
uucaucacugacagacucu

SEQ ID NO: 1597273 - RNA, 19 nt, Artificial Sequence
  Description of Artificial Sequence: Synthetic oligonucleotide
  Sense strand starting at position 3632 of SEQ ID NO: 1560396
gagucugucagugaugaaa

SEQ ID NO: 1597274 - RNA, 19 nt, Artificial Sequence
  Description of Artificial Sequence: Synthetic oligonucleotide
  Antisense strand to SEQ ID NO: 1597273
uuucaucacugacagacuc

SEQ ID NO: 1597275 - RNA, 19 nt, Artificial Sequence
  Description of Artificial Sequence: Synthetic oligonucleotide
  Sense strand starting at position 3668 of SEQ ID NO: 1560396
uacuaauguuaagugauga

SEQ ID NO: 1597276 - RNA, 19 nt, Artificial Sequence
  Description of Artificial Sequence: Synthetic oligonucleotide
  Antisense strand to SEQ ID NO: 1597275
ucaucacuuaacauuagua

SEQ ID NO: 1597277 - RNA, 19 nt, Artificial Sequence
  Description of Artificial Sequence: Synthetic oligonucleotide
  Sense strand starting at position 3687 of SEQ ID NO: 1560396
uaaaguuaugucuacgcaa

SEQ ID NO: 1597278 - RNA, 19 nt, Artificial Sequence
  Description of Artificial Sequence: Synthetic oligonucleotide
  Antisense strand to SEQ ID NO: 1597277
uugcguagacauaacuuua

SEQ ID NO: 1597279 - RNA, 19 nt, Artificial Sequence
  Description of Artificial Sequence: Synthetic oligonucleotide
  Sense strand starting at position 3689 of SEQ ID NO: 1560396
aaguuaugucuacgcaaga

SEQ ID NO: 1597280 - RNA, 19 nt, Artificial Sequence
  Description of Artificial Sequence: Synthetic oligonucleotide
  Antisense strand to SEQ ID NO: 1597279
ucuugcguagacauaacuu

SEQ ID NO: 1597281 - RNA, 19 nt, Artificial Sequence
  Description of Artificial Sequence: Synthetic oligonucleotide
  Sense strand starting at position 3690 of SEQ ID NO: 1560396
aguuaugucuacgcaagag

SEQ ID NO: 1597282 - RNA, 19 nt, Artificial Sequence
  Description of Artificial Sequence: Synthetic oligonucleotide
  Antisense strand to SEQ ID NO: 1597281
cucuugcguagacauaacu

SEQ ID NO: 1597283 - RNA, 19 nt, Artificial Sequence
  Description of Artificial Sequence: Synthetic oligonucleotide
  Sense strand starting at position 3953 of SEQ ID NO: 1560396
gacguugcacccugugaga

SEQ ID NO: 1597284 - RNA, 19 nt, Artificial Sequence
  Description of Artificial Sequence: Synthetic oligonucleotide
  Antisense strand to SEQ ID NO: 1597283
ucucacagggugcaacguc

SEQ ID NO: 1597285 - RNA, 19 nt, Artificial Sequence
  Description of Artificial Sequence: Synthetic oligonucleotide
  Sense strand starting at position 3955 of SEQ ID NO: 1560396
cguugcacccugugagaga

SEQ ID NO: 1597286 - RNA, 19 nt, Artificial Sequence
  Description of Artificial Sequence: Synthetic oligonucleotide
  Antisense strand to SEQ ID NO: 1597285
ucucucacagggugcaacg

SEQ ID NO: 1597287 - RNA, 19 nt, Artificial Sequence
  Description of Artificial Sequence: Synthetic oligonucleotide
  Sense strand starting at position 132 of SEQ ID NO: 1560397
cggcuugucuguuucuaga

SEQ ID NO: 1597288 - RNA, 19 nt, Artificial Sequence
  Description of Artificial Sequence: Synthetic oligonucleotide
  Antisense strand to SEQ ID NO: 1597287
ucuagaaacagacaagccg

SEQ ID NO: 1597289 - RNA, 19 nt, Artificial Sequence
  Description of Artificial Sequence: Synthetic oligonucleotide
  Sense strand starting at position 134 of SEQ ID NO: 1560397
gcuugucuguuucuagaaa

SEQ ID NO: 1597290 - RNA, 19 nt, Artificial Sequence
  Description of Artificial Sequence: Synthetic oligonucleotide
  Antisense strand to SEQ ID NO: 1597289
uuucuagaaacagacaagc

SEQ ID NO: 1597291 - RNA, 19 nt, Artificial Sequence
  Description of Artificial Sequence: Synthetic oligonucleotide
  Sense strand starting at position 135 of SEQ ID NO: 1560397
cuugucuguuucuagaaac

SEQ ID NO: 1597292 - RNA, 19 nt, Artificial Sequence
  Description of Artificial Sequence: Synthetic oligonucleotide
  Antisense strand to SEQ ID NO: 1597291
guuucuagaaacagacaag

SEQ ID NO: 1597293 - RNA, 19 nt, Artificial Sequence
  Description of Artificial Sequence: Synthetic oligonucleotide
  Sense strand starting at position 213 of SEQ ID NO: 1560397
gggcacagguucugaaauu

SEQ ID NO: 1597294 - RNA, 19 nt, Artificial Sequence
  Description of Artificial Sequence: Synthetic oligonucleotide
  Antisense strand to SEQ ID NO: 1597293
aauuucagaaccugugccc

SEQ ID NO: 1597295 - RNA, 19 nt, Artificial Sequence
  Description of Artificial Sequence: Synthetic oligonucleotide
  Sense strand starting at position 214 of SEQ ID NO: 1560397
ggcacagguucugaaauuu

SEQ ID NO: 1597296 - RNA, 19 nt, Artificial Sequence
  Description of Artificial Sequence: Synthetic oligonucleotide
  Antisense strand to SEQ ID NO: 1597295
aaauuucagaaccugugcc

SEQ ID NO: 1597297 - RNA, 19 nt, Artificial Sequence
  Description of Artificial Sequence: Synthetic oligonucleotide
  Sense strand starting at position 268 of SEQ ID NO: 1560397
guaccaccuugccaagaua

SEQ ID NO: 1597298 - RNA, 19 nt, Artificial Sequence
  Description of Artificial Sequence: Synthetic oligonucleotide
  Antisense strand to SEQ ID NO: 1597297
uaucuuggcaaggugguac

SEQ ID NO: 1597299 - RNA, 19 nt, Artificial Sequence
  Description of Artificial Sequence: Synthetic oligonucleotide
  Sense strand starting at position 306 of SEQ ID NO: 1560397
cgggcuugccuuugaguaa

SEQ ID NO: 1597300 - RNA, 19 nt, Artificial Sequence
  Description of Artificial Sequence: Synthetic oligonucleotide
  Antisense strand to SEQ ID NO: 1597299
uuacucaaaggcaagcccg

SEQ ID NO: 1597301 - RNA, 19 nt, Artificial Sequence
  Description of Artificial Sequence: Synthetic oligonucleotide
  Sense strand starting at position 307 of SEQ ID NO: 1560397
gggcuugccuuugaguaag

SEQ ID NO: 1597302 - RNA, 19 nt, Artificial Sequence
  Description of Artificial Sequence: Synthetic oligonucleotide
  Antisense strand to SEQ ID NO: 1597301
cuuacucaaaggcaagccc

SEQ ID NO: 1597303 - RNA, 19 nt, Artificial Sequence
  Description of Artificial Sequence: Synthetic oligonucleotide
  Sense strand starting at position 321 of SEQ ID NO: 1560397
guaagugucugcucccuua

SEQ ID NO: 1597304 - RNA, 19 nt, Artificial Sequence
  Description of Artificial Sequence: Synthetic oligonucleotide
  Antisense strand to SEQ ID NO: 1597303
uaagggagcagacacuuac

SEQ ID NO: 1597305 - RNA, 19 nt, Artificial Sequence
  Description of Artificial Sequence: Synthetic oligonucleotide
  Sense strand starting at position 490 of SEQ ID NO: 1560397
cgcggaauuccgcaugaca

SEQ ID NO: 1597306 - RNA, 19 nt, Artificial Sequence
  Description of Artificial Sequence: Synthetic oligonucleotide
  Antisense strand to SEQ ID NO: 1597305
ugucaugcggaauuccgcg

SEQ ID NO: 1597307 - RNA, 19 nt, Artificial Sequence
  Description of Artificial Sequence: Synthetic oligonucleotide
  Sense strand starting at position 492 of SEQ ID NO: 1560397
cggaauuccgcaugacaga

SEQ ID NO: 1597308 - RNA, 19 nt, Artificial Sequence
  Description of Artificial Sequence: Synthetic oligonucleotide
  Antisense strand to SEQ ID NO: 1597307
ucugucaugcggaauuccg

SEQ ID NO: 1597309 - RNA, 19 nt, Artificial Sequence
  Description of Artificial Sequence: Synthetic oligonucleotide
  Sense strand starting at position 732 of SEQ ID NO: 1560397
gaggucaucgcccgguaga

SEQ ID NO: 1597310 - RNA, 19 nt, Artificial Sequence
  Description of Artificial Sequence: Synthetic oligonucleotide
  Antisense strand to SEQ ID NO: 1597309
ucuaccgggcgaugaccuc

SEQ ID NO: 1597311 - RNA, 19 nt, Artificial Sequence
  Description of Artificial Sequence: Synthetic oligonucleotide
  Sense strand starting at position 997 of SEQ ID NO: 1560397
caggcuugcguuuggagaa

SEQ ID NO: 1597312 - RNA, 19 nt, Artificial Sequence
  Description of Artificial Sequence: Synthetic oligonucleotide
  Antisense strand to SEQ ID NO: 1597311
uucuccaaacgcaagccug

SEQ ID NO: 1597313 - RNA, 19 nt, Artificial Sequence
  Description of Artificial Sequence: Synthetic oligonucleotide
  Sense strand starting at position 1157 of SEQ ID NO: 1560397
agcagaaaucagcgagaug

SEQ ID NO: 1597314 - RNA, 19 nt, Artificial Sequence
  Description of Artificial Sequence: Synthetic oligonucleotide
  Antisense strand to SEQ ID NO: 1597313
caucucgcugauuucugcu

SEQ ID NO: 1597315 - RNA, 19 nt, Artificial Sequence
  Description of Artificial Sequence: Synthetic oligonucleotide
  Sense strand starting at position 1158 of SEQ ID NO: 1560397
gcagaaaucagcgagauga

SEQ ID NO: 1597316 - RNA, 19 nt, Artificial Sequence
  Description of Artificial Sequence: Synthetic oligonucleotide
  Antisense strand to SEQ ID NO: 1597315
ucaucucgcugauuucugc

SEQ ID NO: 1597317 - RNA, 19 nt, Artificial Sequence
  Description of Artificial Sequence: Synthetic oligonucleotide
  Sense strand starting at position 1419 of SEQ ID NO: 1560397
ggagaaaucacccggguua

SEQ ID NO: 1597318 - RNA, 19 nt, Artificial Sequence
  Description of Artificial Sequence: Synthetic oligonucleotide
  Antisense strand to SEQ ID NO: 1597317
uaacccgggugauuucucc

SEQ ID NO: 1597319 - RNA, 19 nt, Artificial Sequence
  Description of Artificial Sequence: Synthetic oligonucleotide
  Sense strand starting at position 1420 of SEQ ID NO: 1560397
gagaaaucacccggguuag

SEQ ID NO: 1597320 - RNA, 19 nt, Artificial Sequence
  Description of Artificial Sequence: Synthetic oligonucleotide
  Antisense strand to SEQ ID NO: 1597319
cuaacccgggugauuucuc

SEQ ID NO: 1597321 - RNA, 19 nt, Artificial Sequence
  Description of Artificial Sequence: Synthetic oligonucleotide
  Sense strand starting at position 1617 of SEQ ID NO: 1560397
ggguguuaacucgggagac

SEQ ID NO: 1597322 - RNA, 19 nt, Artificial Sequence
  Description of Artificial Sequence: Synthetic oligonucleotide
  Antisense strand to SEQ ID NO: 1597321
gucucccgaguuaacaccc

SEQ ID NO: 1597323 - RNA, 19 nt, Artificial Sequence
  Description of Artificial Sequence: Synthetic oligonucleotide
  Sense strand starting at position 2193 of SEQ ID NO: 1560397
ugacgucucccgcgauuca

SEQ ID NO: 1597324 - RNA, 19 nt, Artificial Sequence
  Description of Artificial Sequence: Synthetic oligonucleotide
  Antisense strand to SEQ ID NO: 1597323
ugaaucgcgggagacguca

SEQ ID NO: 1597325 - RNA, 19 nt, Artificial Sequence
  Description of Artificial Sequence: Synthetic oligonucleotide
  Sense strand starting at position 2196 of SEQ ID NO: 1560397
cgucucccgcgauucaaau

SEQ ID NO: 1597326 - RNA, 19 nt, Artificial Sequence
  Description of Artificial Sequence: Synthetic oligonucleotide
  Antisense strand to SEQ ID NO: 1597325
auuugaaucgcgggagacg

SEQ ID NO: 1597327 - RNA, 19 nt, Artificial Sequence
  Description of Artificial Sequence: Synthetic oligonucleotide
  Sense strand starting at position 2278 of SEQ ID NO: 1560397
ggugcuagacguugcagaa

SEQ ID NO: 1597328 - RNA, 19 nt, Artificial Sequence
  Description of Artificial Sequence: Synthetic oligonucleotide
  Antisense strand to SEQ ID NO: 1597327
uucugcaacgucuagcacc

SEQ ID NO: 1597329 - RNA, 19 nt, Artificial Sequence
  Description of Artificial Sequence: Synthetic oligonucleotide
  Sense strand starting at position 2292 of SEQ ID NO: 1560397
cagaaauggcucugguaga

SEQ ID NO: 1597330 - RNA, 19 nt, Artificial Sequence
  Description of Artificial Sequence: Synthetic oligonucleotide
  Antisense strand to SEQ ID NO: 1597329
ucuaccagagccauuucug

SEQ ID NO: 1597331 - RNA, 19 nt, Artificial Sequence
  Description of Artificial Sequence: Synthetic oligonucleotide
  Sense strand starting at position 2293 of SEQ ID NO: 1560397
agaaauggcucugguagau

SEQ ID NO: 1597332 - RNA, 19 nt, Artificial Sequence
  Description of Artificial Sequence: Synthetic oligonucleotide
  Antisense strand to SEQ ID NO: 1597331
aucuaccagagccauuucu

SEQ ID NO: 1597333 - RNA, 19 nt, Artificial Sequence
  Description of Artificial Sequence: Synthetic oligonucleotide
  Sense strand starting at position 2364 of SEQ ID NO: 1560397
gacccuuccuaggguagau

SEQ ID NO: 1597334 - RNA, 19 nt, Artificial Sequence
  Description of Artificial Sequence: Synthetic oligonucleotide
  Antisense strand to SEQ ID NO: 1597333
aucuacccuaggaaggguc

SEQ ID NO: 1597335 - RNA, 19 nt, Artificial Sequence
  Description of Artificial Sequence: Synthetic oligonucleotide
  Sense strand starting at position 2408 of SEQ ID NO: 1560397
cauugacgucgcgccuaau

SEQ ID NO: 1597336 - RNA, 19 nt, Artificial Sequence
  Description of Artificial Sequence: Synthetic oligonucleotide
  Antisense strand to SEQ ID NO: 1597335
auuaggcgcgacgucaaug

SEQ ID NO: 1597337 - RNA, 19 nt, Artificial Sequence
  Description of Artificial Sequence: Synthetic oligonucleotide
  Sense strand starting at position 2451 of SEQ ID NO: 1560397
ggugcgugucccgaacgua

SEQ ID NO: 1597338 - RNA, 19 nt, Artificial Sequence
  Description of Artificial Sequence: Synthetic oligonucleotide
  Antisense strand to SEQ ID NO: 1597337
uacguucgggacacgcacc

SEQ ID NO: 1597339 - RNA, 19 nt, Artificial Sequence
  Description of Artificial Sequence: Synthetic oligonucleotide
  Sense strand starting at position 2474 of SEQ ID NO: 1560397
cgucacugcugagagucau

SEQ ID NO: 1597340 - RNA, 19 nt, Artificial Sequence
  Description of Artificial Sequence: Synthetic oligonucleotide
  Antisense strand to SEQ ID NO: 1597339
augacucucagcagugacg

SEQ ID NO: 1597341 - RNA, 19 nt, Artificial Sequence
  Description of Artificial Sequence: Synthetic oligonucleotide
  Sense strand starting at position 2510 of SEQ ID NO: 1560397
cugcauugcgcuccuaagu

SEQ ID NO: 1597342 - RNA, 19 nt, Artificial Sequence
  Description of Artificial Sequence: Synthetic oligonucleotide
  Antisense strand to SEQ ID NO: 1597341
acuuaggagcgcaaugcag

SEQ ID NO: 1597343 - RNA, 19 nt, Artificial Sequence
  Description of Artificial Sequence: Synthetic oligonucleotide
  Sense strand starting at position 3156 of SEQ ID NO: 1560397
guaacacuccuagguaucu

SEQ ID NO: 1597344 - RNA, 19 nt, Artificial Sequence
  Description of Artificial Sequence: Synthetic oligonucleotide
  Antisense strand to SEQ ID NO: 1597343
agauaccuaggaguguuac

SEQ ID NO: 1597345 - RNA, 19 nt, Artificial Sequence
  Description of Artificial Sequence: Synthetic oligonucleotide
  Sense strand starting at position 3382 of SEQ ID NO: 1560397
aagcaucaugcccagugaa

SEQ ID NO: 1597346 - RNA, 19 nt, Artificial Sequence
  Description of Artificial Sequence: Synthetic oligonucleotide
  Antisense strand to SEQ ID NO: 1597345
uucacugggcaugaugcuu

SEQ ID NO: 1597347 - RNA, 19 nt, Artificial Sequence
  Description of Artificial Sequence: Synthetic oligonucleotide
  Sense strand starting at position 3385 of SEQ ID NO: 1560397
caucaugcccagugaaaga

SEQ ID NO: 1597348 - RNA, 19 nt, Artificial Sequence
  Description of Artificial Sequence: Synthetic oligonucleotide
  Antisense strand to SEQ ID NO: 1597347
ucuuucacugggcaugaug

SEQ ID NO: 1597349 - RNA, 19 nt, Artificial Sequence
  Description of Artificial Sequence: Synthetic oligonucleotide
  Sense strand starting at position 3423 of SEQ ID NO: 1560397
cauagugagugauuccauu

SEQ ID NO: 1597350 - RNA, 19 nt, Artificial Sequence
  Description of Artificial Sequence: Synthetic oligonucleotide
  Antisense strand to SEQ ID NO: 1597349
aauggaaucacucacuaug

SEQ ID NO: 1597351 - RNA, 19 nt, Artificial Sequence
  Description of Artificial Sequence: Synthetic oligonucleotide
  Sense strand starting at position 3429 of SEQ ID NO: 1560397
gagugauuccauugauacg

SEQ ID NO: 1597352 - RNA, 19 nt, Artificial Sequence
  Description of Artificial Sequence: Synthetic oligonucleotide
  Antisense strand to SEQ ID NO: 1597351
cguaucaauggaaucacuc

SEQ ID NO: 1597353 - RNA, 19 nt, Artificial Sequence
  Description of Artificial Sequence: Synthetic oligonucleotide
  Sense strand starting at position 3430 of SEQ ID NO: 1560397
agugauuccauugauacga

SEQ ID NO: 1597354 - RNA, 19 nt, Artificial Sequence
  Description of Artificial Sequence: Synthetic oligonucleotide
  Antisense strand to SEQ ID NO: 1597353
ucguaucaauggaaucacu

SEQ ID NO: 1597355 - RNA, 19 nt, Artificial Sequence
  Description of Artificial Sequence: Synthetic oligonucleotide
  Sense strand starting at position 3432 of SEQ ID NO: 1560397
ugauuccauugauacgaaa

SEQ ID NO: 1597356 - RNA, 19 nt, Artificial Sequence
  Description of Artificial Sequence: Synthetic oligonucleotide
  Antisense strand to SEQ ID NO: 1597355
uuucguaucaauggaauca

SEQ ID NO: 1597357 - RNA, 19 nt, Artificial Sequence
  Description of Artificial Sequence: Synthetic oligonucleotide
  Sense strand starting at position 3435 of SEQ ID NO: 1560397
uuccauugauacgaaaugu

SEQ ID NO: 1597358 - RNA, 19 nt, Artificial Sequence
  Description of Artificial Sequence: Synthetic oligonucleotide
  Antisense strand to SEQ ID NO: 1597357
acauuucguaucaauggaa

SEQ ID NO: 1597359 - RNA, 19 nt, Artificial Sequence
  Description of Artificial Sequence: Synthetic oligonucleotide
  Sense strand starting at position 3445 of SEQ ID NO: 1560397
acgaaauguccagauaagc

SEQ ID NO: 1597360 - RNA, 19 nt, Artificial Sequence
  Description of Artificial Sequence: Synthetic oligonucleotide
  Antisense strand to SEQ ID NO: 1597359
gcuuaucuggacauuucgu

SEQ ID NO: 1597361 - RNA, 19 nt, Artificial Sequence
  Description of Artificial Sequence: Synthetic oligonucleotide
  Sense strand starting at position 3552 of SEQ ID NO: 1560397
gguugauggauauguucua

SEQ ID NO: 1597362 - RNA, 19 nt, Artificial Sequence
  Description of Artificial Sequence: Synthetic oligonucleotide
  Antisense strand to SEQ ID NO: 1597361
uagaacauauccaucaacc

SEQ ID NO: 1597363 - RNA, 19 nt, Artificial Sequence
  Description of Artificial Sequence: Synthetic oligonucleotide
  Sense strand starting at position 3899 of SEQ ID NO: 1560397
cugcccgacucugaauaua

SEQ ID NO: 1597364 - RNA, 19 nt, Artificial Sequence
  Description of Artificial Sequence: Synthetic oligonucleotide
  Antisense strand to SEQ ID NO: 1597363
uauauucagagucgggcag

SEQ ID NO: 1597365 - RNA, 19 nt, Artificial Sequence
  Description of Artificial Sequence: Synthetic oligonucleotide
  Sense strand starting at position 3945 of SEQ ID NO: 1560397
acagaugaauuguacagua

SEQ ID NO: 1597366 - RNA, 19 nt, Artificial Sequence
  Description of Artificial Sequence: Synthetic oligonucleotide
  Antisense strand to SEQ ID NO: 1597365
uacuguacaauucaucugu

SEQ ID NO: 1597367 - RNA, 19 nt, Artificial Sequence
  Description of Artificial Sequence: Synthetic oligonucleotide
  Sense strand starting at position 628 of SEQ ID NO: 1560398
gugugaggguucuguagga

SEQ ID NO: 1597368 - RNA, 19 nt, Artificial Sequence
  Description of Artificial Sequence: Synthetic oligonucleotide
  Antisense strand to SEQ ID NO: 1597367
uccuacagaacccucacac

SEQ ID NO: 1597369 - RNA, 19 nt, Artificial Sequence
  Description of Artificial Sequence: Synthetic oligonucleotide
  Sense strand starting at position 632 of SEQ ID NO: 1560398
gaggguucuguaggaggga

SEQ ID NO: 1597370 - RNA, 19 nt, Artificial Sequence
  Description of Artificial Sequence: Synthetic oligonucleotide
  Antisense strand to SEQ ID NO: 1597369
ucccuccuacagaacccuc

SEQ ID NO: 1597371 - RNA, 19 nt, Artificial Sequence
  Description of Artificial Sequence: Synthetic oligonucleotide
  Sense strand starting at position 805 of SEQ ID NO: 1560398
gcccgacuuuguugacaaa

SEQ ID NO: 1597372 - RNA, 19 nt, Artificial Sequence
  Description of Artificial Sequence: Synthetic oligonucleotide
  Antisense strand to SEQ ID NO: 1597371
uuugucaacaaagucgggc

SEQ ID NO: 1597373 - RNA, 19 nt, Artificial Sequence
  Description of Artificial Sequence: Synthetic oligonucleotide
  Sense strand starting at position 1214 of SEQ ID NO: 1560398
gggauugccucugcaagcu

SEQ ID NO: 1597374 - RNA, 19 nt, Artificial Sequence
  Description of Artificial Sequence: Synthetic oligonucleotide
  Antisense strand to SEQ ID NO: 1597373
agcuugcagaggcaauccc

SEQ ID NO: 1597375 - RNA, 19 nt, Artificial Sequence
  Description of Artificial Sequence: Synthetic oligonucleotide
  Sense strand starting at position 1306 of SEQ ID NO: 1560398
gguguuugcagacgauaca

SEQ ID NO: 1597376 - RNA, 19 nt, Artificial Sequence
  Description of Artificial Sequence: Synthetic oligonucleotide
  Antisense strand to SEQ ID NO: 1597375
uguaucgucugcaaacacc

SEQ ID NO: 1597377 - RNA, 19 nt, Artificial Sequence
  Description of Artificial Sequence: Synthetic oligonucleotide
  Sense strand starting at position 1307 of SEQ ID NO: 1560398
guguuugcagacgauacau

SEQ ID NO: 1597378 - RNA, 19 nt, Artificial Sequence
  Description of Artificial Sequence: Synthetic oligonucleotide
  Antisense strand to SEQ ID NO: 1597377
auguaucgucugcaaacac

SEQ ID NO: 1597379 - RNA, 19 nt, Artificial Sequence
  Description of Artificial Sequence: Synthetic oligonucleotide
  Sense strand starting at position 2071 of SEQ ID NO: 1560398
ccuccuauugguggaaaga

SEQ ID NO: 1597380 - RNA, 19 nt, Artificial Sequence
  Description of Artificial Sequence: Synthetic oligonucleotide
  Antisense strand to SEQ ID NO: 1597379
ucuuuccaccaauaggagg

SEQ ID NO: 1597381 - RNA, 19 nt, Artificial Sequence
  Description of Artificial Sequence: Synthetic oligonucleotide
  Sense strand starting at position 2525 of SEQ ID NO: 1560398
ucuguucccgucugaguaa

SEQ ID NO: 1597382 - RNA, 19 nt, Artificial Sequence
  Description of Artificial Sequence: Synthetic oligonucleotide
  Antisense strand to SEQ ID NO: 1597381
uuacucagacgggaacaga

SEQ ID NO: 1597383 - RNA, 19 nt, Artificial Sequence
  Description of Artificial Sequence: Synthetic oligonucleotide
  Sense strand starting at position 2526 of SEQ ID NO: 1560398
cuguucccgucugaguaau

SEQ ID NO: 1597384 - RNA, 19 nt, Artificial Sequence
  Description of Artificial Sequence: Synthetic oligonucleotide
  Antisense strand to SEQ ID NO: 1597383
auuacucagacgggaacag

SEQ ID NO: 1597385 - RNA, 19 nt, Artificial Sequence
  Description of Artificial Sequence: Synthetic oligonucleotide
  Sense strand starting at position 2602 of SEQ ID NO: 1560398
guaagagcccaauacacau

SEQ ID NO: 1597386 - RNA, 19 nt, Artificial Sequence
  Description of Artificial Sequence: Synthetic oligonucleotide
  Antisense strand to SEQ ID NO: 1597385
auguguauugggcucuuac

SEQ ID NO: 1597387 - RNA, 19 nt, Artificial Sequence
  Description of Artificial Sequence: Synthetic oligonucleotide
  Sense strand starting at position 2688 of SEQ ID NO: 1560398
gggcgcucuggagaagaaa

SEQ ID NO: 1597388 - RNA, 19 nt, Artificial Sequence
  Description of Artificial Sequence: Synthetic oligonucleotide
  Antisense strand to SEQ ID NO: 1597387
uuucuucuccagagcgccc

SEQ ID NO: 1597389 - RNA, 19 nt, Artificial Sequence
  Description of Artificial Sequence: Synthetic oligonucleotide
  Sense strand starting at position 2833 of SEQ ID NO: 1560398
ccuggagaaagccauuguu

SEQ ID NO: 1597390 - RNA, 19 nt, Artificial Sequence
  Description of Artificial Sequence: Synthetic oligonucleotide
  Antisense strand to SEQ ID NO: 1597389
aacaauggcuuucuccagg

SEQ ID NO: 1597391 - RNA, 19 nt, Artificial Sequence
  Description of Artificial Sequence: Synthetic oligonucleotide
  Sense strand starting at position 2836 of SEQ ID NO: 1560398
ggagaaagccauuguugag

SEQ ID NO: 1597392 - RNA, 19 nt, Artificial Sequence
  Description of Artificial Sequence: Synthetic oligonucleotide
  Antisense strand to SEQ ID NO: 1597391
cucaacaauggcuuucucc

SEQ ID NO: 1597393 - RNA, 19 nt, Artificial Sequence
  Description of Artificial Sequence: Synthetic oligonucleotide
  Sense strand starting at position 3035 of SEQ ID NO: 1560398
ggaugcuuaugugcauuau

SEQ ID NO: 1597394 - RNA, 19 nt, Artificial Sequence
  Description of Artificial Sequence: Synthetic oligonucleotide
  Antisense strand to SEQ ID NO: 1597393
auaaugcacauaagcaucc

SEQ ID NO: 1597395 - RNA, 19 nt, Artificial Sequence
  Description of Artificial Sequence: Synthetic oligonucleotide
  Sense strand starting at position 3039 of SEQ ID NO: 1560398
gcuuaugugcauuaugcaa

SEQ ID NO: 1597396 - RNA, 19 nt, Artificial Sequence
  Description of Artificial Sequence: Synthetic oligonucleotide
  Antisense strand to SEQ ID NO: 1597395
uugcauaaugcacauaagc

SEQ ID NO: 1597397 - RNA, 19 nt, Artificial Sequence
  Description of Artificial Sequence: Synthetic oligonucleotide
  Sense strand starting at position 3069 of SEQ ID NO: 1560398
gaggcuuggugaggccaua

SEQ ID NO: 1597398 - RNA, 19 nt, Artificial Sequence
  Description of Artificial Sequence: Synthetic oligonucleotide
  Antisense strand to SEQ ID NO: 1597397
uauggccucaccaagccuc

SEQ ID NO: 1597399 - RNA, 19 nt, Artificial Sequence
  Description of Artificial Sequence: Synthetic oligonucleotide
  Sense strand starting at position 3086 of SEQ ID NO: 1560398
uaggcuaguucguguugga

SEQ ID NO: 1597400 - RNA, 19 nt, Artificial Sequence
  Description of Artificial Sequence: Synthetic oligonucleotide
  Antisense strand to SEQ ID NO: 1597399
uccaacacgaacuagccua

SEQ ID NO: 1597401 - RNA, 19 nt, Artificial Sequence
  Description of Artificial Sequence: Synthetic oligonucleotide
  Sense strand starting at position 3223 of SEQ ID NO: 1560398
ccgggugacucacaucuga

SEQ ID NO: 1597402 - RNA, 19 nt, Artificial Sequence
  Description of Artificial Sequence: Synthetic oligonucleotide
  Antisense strand to SEQ ID NO: 1597401
ucagaugugagucacccgg

SEQ ID NO: 1597403 - RNA, 19 nt, Artificial Sequence
  Description of Artificial Sequence: Synthetic oligonucleotide
  Sense strand starting at position 3793 of SEQ ID NO: 1560398
uggauacuugggcauugau

SEQ ID NO: 1597404 - RNA, 19 nt, Artificial Sequence
  Description of Artificial Sequence: Synthetic oligonucleotide
  Antisense strand to SEQ ID NO: 1597403
aucaaugcccaaguaucca

SEQ ID NO: 1597405 - RNA, 19 nt, Artificial Sequence
  Description of Artificial Sequence: Synthetic oligonucleotide
  Sense strand starting at position 3839 of SEQ ID NO: 1560398
ggguaaucccagcacauua

SEQ ID NO: 1597406 - RNA, 19 nt, Artificial Sequence
  Description of Artificial Sequence: Synthetic oligonucleotide
  Antisense strand to SEQ ID NO: 1597405
uaaugugcugggauuaccc

SEQ ID NO: 1597407 - RNA, 19 nt, Artificial Sequence
  Description of Artificial Sequence: Synthetic oligonucleotide
  Sense strand starting at position 3871 of SEQ ID NO: 1560398
ggcagaucgugaggucagu

SEQ ID NO: 1597408 - RNA, 19 nt, Artificial Sequence
  Description of Artificial Sequence: Synthetic oligonucleotide
  Antisense strand to SEQ ID NO: 1597407
acugaccucacgaucugcc

SEQ ID NO: 1597409 - RNA, 19 nt, Artificial Sequence
  Description of Artificial Sequence: Synthetic oligonucleotide
  Sense strand starting at position 77 of SEQ ID NO: 1560399
cuauaauggucaucuggcu

SEQ ID NO: 1597410 - RNA, 19 nt, Artificial Sequence
  Description of Artificial Sequence: Synthetic oligonucleotide
  Antisense strand to SEQ ID NO: 1597409
agccagaugaccauuauag

SEQ ID NO: 1597411 - RNA, 19 nt, Artificial Sequence
  Description of Artificial Sequence: Synthetic oligonucleotide
  Sense strand starting at position 114 of SEQ ID NO: 1560399
gagucccugcuccaugauu

SEQ ID NO: 1597412 - RNA, 19 nt, Artificial Sequence
  Description of Artificial Sequence: Synthetic oligonucleotide
  Antisense strand to SEQ ID NO: 1597411
aaucauggagcagggacuc

SEQ ID NO: 1597413 - RNA, 19 nt, Artificial Sequence
  Description of Artificial Sequence: Synthetic oligonucleotide
  Sense strand starting at position 142 of SEQ ID NO: 1560399
ggugaucagacgcaugacu

SEQ ID NO: 1597414 - RNA, 19 nt, Artificial Sequence
  Description of Artificial Sequence: Synthetic oligonucleotide
  Antisense strand to SEQ ID NO: 1597413
agucaugcgucugaucacc

SEQ ID NO: 1597415 - RNA, 19 nt, Artificial Sequence
  Description of Artificial Sequence: Synthetic oligonucleotide
  Sense strand starting at position 217 of SEQ ID NO: 1560399
ucuuaaggcuauuaggaaa

SEQ ID NO: 1597416 - RNA, 19 nt, Artificial Sequence
  Description of Artificial Sequence: Synthetic oligonucleotide
  Antisense strand to SEQ ID NO: 1597415
uuuccuaauagccuuaaga

SEQ ID NO: 1597417 - RNA, 19 nt, Artificial Sequence
  Description of Artificial Sequence: Synthetic oligonucleotide
  Sense strand starting at position 730 of SEQ ID NO: 1560399
cuuccuggcuguucuuuaa

SEQ ID NO: 1597418 - RNA, 19 nt, Artificial Sequence
  Description of Artificial Sequence: Synthetic oligonucleotide
  Antisense strand to SEQ ID NO: 1597417
uuaaagaacagccaggaag

SEQ ID NO: 1597419 - RNA, 19 nt, Artificial Sequence
  Description of Artificial Sequence: Synthetic oligonucleotide
  Sense strand starting at position 737 of SEQ ID NO: 1560399
gcuguucuuuaaggcauau

SEQ ID NO: 1597420 - RNA, 19 nt, Artificial Sequence
  Description of Artificial Sequence: Synthetic oligonucleotide
  Antisense strand to SEQ ID NO: 1597419
auaugccuuaaagaacagc

SEQ ID NO: 1597421 - RNA, 19 nt, Artificial Sequence
  Description of Artificial Sequence: Synthetic oligonucleotide
  Sense strand starting at position 741 of SEQ ID NO: 1560399
uucuuuaaggcauaucgua

SEQ ID NO: 1597422 - RNA, 19 nt, Artificial Sequence
  Description of Artificial Sequence: Synthetic oligonucleotide
  Antisense strand to SEQ ID NO: 1597421
uacgauaugccuuaaagaa

SEQ ID NO: 1597423 - RNA, 19 nt, Artificial Sequence
  Description of Artificial Sequence: Synthetic oligonucleotide
  Sense strand starting at position 746 of SEQ ID NO: 1560399
uaaggcauaucguaucuca

SEQ ID NO: 1597424 - RNA, 19 nt, Artificial Sequence
  Description of Artificial Sequence: Synthetic oligonucleotide
  Antisense strand to SEQ ID NO: 1597423
ugagauacgauaugccuua

SEQ ID NO: 1597425 - RNA, 19 nt, Artificial Sequence
  Description of Artificial Sequence: Synthetic oligonucleotide
  Sense strand starting at position 753 of SEQ ID NO: 1560399
uaucguaucucagggcauu

SEQ ID NO: 1597426 - RNA, 19 nt, Artificial Sequence
  Description of Artificial Sequence: Synthetic oligonucleotide
  Antisense strand to SEQ ID NO: 1597425
aaugcccugagauacgaua

SEQ ID NO: 1597427 - RNA, 19 nt, Artificial Sequence
  Description of Artificial Sequence: Synthetic oligonucleotide
  Sense strand starting at position 778 of SEQ ID NO: 1560399
agcuguucccuuuaccaga

SEQ ID NO: 1597428 - RNA, 19 nt, Artificial Sequence
  Description of Artificial Sequence: Synthetic oligonucleotide
  Antisense strand to SEQ ID NO: 1597427
ucugguaaagggaacagcu

SEQ ID NO: 1597429 - RNA, 19 nt, Artificial Sequence
  Description of Artificial Sequence: Synthetic oligonucleotide
  Sense strand starting at position 821 of SEQ ID NO: 1560399
cauagcuaagucugguuau

SEQ ID NO: 1597430 - RNA, 19 nt, Artificial Sequence
  Description of Artificial Sequence: Synthetic oligonucleotide
  Antisense strand to SEQ ID NO: 1597429
auaaccagacuuagcuaug

SEQ ID NO: 1597431 - RNA, 19 nt, Artificial Sequence
  Description of Artificial Sequence: Synthetic oligonucleotide
  Sense strand starting at position 822 of SEQ ID NO: 1560399
auagcuaagucugguuauu

SEQ ID NO: 1597432 - RNA, 19 nt, Artificial Sequence
  Description of Artificial Sequence: Synthetic oligonucleotide
  Antisense strand to SEQ ID NO: 1597431
aauaaccagacuuagcuau

SEQ ID NO: 1597433 - RNA, 19 nt, Artificial Sequence
  Description of Artificial Sequence: Synthetic oligonucleotide
  Sense strand starting at position 944 of SEQ ID NO: 1560399
ggcugucaccauugguauu

SEQ ID NO: 1597434 - RNA, 19 nt, Artificial Sequence
  Description of Artificial Sequence: Synthetic oligonucleotide
  Antisense strand to SEQ ID NO: 1597433
aauaccaauggugacagcc

SEQ ID NO: 1597435 - RNA, 19 nt, Artificial Sequence
  Description of Artificial Sequence: Synthetic oligonucleotide
  Sense strand starting at position 946 of SEQ ID NO: 1560399
cugucaccauugguauuau

SEQ ID NO: 1597436 - RNA, 19 nt, Artificial Sequence
  Description of Artificial Sequence: Synthetic oligonucleotide
  Antisense strand to SEQ ID NO: 1597435
auaauaccaauggugacag

SEQ ID NO: 1597437 - RNA, 19 nt, Artificial Sequence
  Description of Artificial Sequence: Synthetic oligonucleotide
  Sense strand starting at position 957 of SEQ ID NO: 1560399
gguauuaucuugccuguca

SEQ ID NO: 1597438 - RNA, 19 nt, Artificial Sequence
  Description of Artificial Sequence: Synthetic oligonucleotide
  Antisense strand to SEQ ID NO: 1597437
ugacaggcaagauaauacc

SEQ ID NO: 1597439 - RNA, 19 nt, Artificial Sequence
  Description of Artificial Sequence: Synthetic oligonucleotide
  Sense strand starting at position 958 of SEQ ID NO: 1560399
guauuaucuugccugucag

SEQ ID NO: 1597440 - RNA, 19 nt, Artificial Sequence
  Description of Artificial Sequence: Synthetic oligonucleotide
  Antisense strand to SEQ ID NO: 1597439
cugacaggcaagauaauac

SEQ ID NO: 1597441 - RNA, 19 nt, Artificial Sequence
  Description of Artificial Sequence: Synthetic oligonucleotide
  Sense strand starting at position 976 of SEQ ID NO: 1560399
gcugucgccaucugauauu

SEQ ID NO: 1597442 - RNA, 19 nt, Artificial Sequence
  Description of Artificial Sequence: Synthetic oligonucleotide
  Antisense strand to SEQ ID NO: 1597441
aauaucagauggcgacagc

SEQ ID NO: 1597443 - RNA, 19 nt, Artificial Sequence
  Description of Artificial Sequence: Synthetic oligonucleotide
  Sense strand starting at position 979 of SEQ ID NO: 1560399
gucgccaucugauauuaag

SEQ ID NO: 1597444 - RNA, 19 nt, Artificial Sequence
  Description of Artificial Sequence: Synthetic oligonucleotide
  Antisense strand to SEQ ID NO: 1597443
cuuaauaucagauggcgac

SEQ ID NO: 1597445 - RNA, 19 nt, Artificial Sequence
  Description of Artificial Sequence: Synthetic oligonucleotide
  Sense strand starting at position 1084 of SEQ ID NO: 1560399
cacgguaugcgcucaguaa

SEQ ID NO: 1597446 - RNA, 19 nt, Artificial Sequence
  Description of Artificial Sequence: Synthetic oligonucleotide
  Antisense strand to SEQ ID NO: 1597445
uuacugagcgcauaccgug

SEQ ID NO: 1597447 - RNA, 19 nt, Artificial Sequence
  Description of Artificial Sequence: Synthetic oligonucleotide
  Sense strand starting at position 1085 of SEQ ID NO: 1560399
acgguaugcgcucaguaaa

SEQ ID NO: 1597448 - RNA, 19 nt, Artificial Sequence
  Description of Artificial Sequence: Synthetic oligonucleotide
  Antisense strand to SEQ ID NO: 1597447
uuuacugagcgcauaccgu

SEQ ID NO: 1597449 - RNA, 19 nt, Artificial Sequence
  Description of Artificial Sequence: Synthetic oligonucleotide
  Sense strand starting at position 1086 of SEQ ID NO: 1560399
cgguaugcgcucaguaaag

SEQ ID NO: 1597450 - RNA, 19 nt, Artificial Sequence
  Description of Artificial Sequence: Synthetic oligonucleotide
  Antisense strand to SEQ ID NO: 1597449
cuuuacugagcgcauaccg

SEQ ID NO: 1597451 - RNA, 19 nt, Artificial Sequence
  Description of Artificial Sequence: Synthetic oligonucleotide
  Sense strand starting at position 1096 of SEQ ID NO: 1560399
ucaguaaagacuugguggu

SEQ ID NO: 1597452 - RNA, 19 nt, Artificial Sequence
  Description of Artificial Sequence: Synthetic oligonucleotide
  Antisense strand to SEQ ID NO: 1597451
accaccaagucuuuacuga

SEQ ID NO: 1597453 - RNA, 19 nt, Artificial Sequence
  Description of Artificial Sequence: Synthetic oligonucleotide
  Sense strand starting at position 1429 of SEQ ID NO: 1560399
cuugcugaugaaugacuaa

SEQ ID NO: 1597454 - RNA, 19 nt, Artificial Sequence
  Description of Artificial Sequence: Synthetic oligonucleotide
  Antisense strand to SEQ ID NO: 1597453
uuagucauucaucagcaag

SEQ ID NO: 1597455 - RNA, 19 nt, Artificial Sequence
  Description of Artificial Sequence: Synthetic oligonucleotide
  Sense strand starting at position 1441 of SEQ ID NO: 1560399
ugacuaaauggacguuauu

SEQ ID NO: 1597456 - RNA, 19 nt, Artificial Sequence
  Description of Artificial Sequence: Synthetic oligonucleotide
  Antisense strand to SEQ ID NO: 1597455
aauaacguccauuuaguca

SEQ ID NO: 1597457 - RNA, 19 nt, Artificial Sequence
  Description of Artificial Sequence: Synthetic oligonucleotide
  Sense strand starting at position 1447 of SEQ ID NO: 1560399
aauggacguuauucugagu

SEQ ID NO: 1597458 - RNA, 19 nt, Artificial Sequence
  Description of Artificial Sequence: Synthetic oligonucleotide
  Antisense strand to SEQ ID NO: 1597457
acucagaauaacguccauu

SEQ ID NO: 1597459 - RNA, 19 nt, Artificial Sequence
  Description of Artificial Sequence: Synthetic oligonucleotide
  Sense strand starting at position 1450 of SEQ ID NO: 1560399
ggacguuauucugaguuug

SEQ ID NO: 1597460 - RNA, 19 nt, Artificial Sequence
  Description of Artificial Sequence: Synthetic oligonucleotide
  Antisense strand to SEQ ID NO: 1597459
caaacucagaauaacgucc

SEQ ID NO: 1597461 - RNA, 19 nt, Artificial Sequence
  Description of Artificial Sequence: Synthetic oligonucleotide
  Sense strand starting at position 2102 of SEQ ID NO: 1560399
uuuauacguuuccaaguau

SEQ ID NO: 1597462 - RNA, 19 nt, Artificial Sequence
  Description of Artificial Sequence: Synthetic oligonucleotide
  Antisense strand to SEQ ID NO: 1597461
auacuuggaaacguauaaa

SEQ ID NO: 1597463 - RNA, 19 nt, Artificial Sequence
  Description of Artificial Sequence: Synthetic oligonucleotide
  Sense strand starting at position 2136 of SEQ ID NO: 1560399
uuaagcaguuacugauuaa

SEQ ID NO: 1597464 - RNA, 19 nt, Artificial Sequence
  Description of Artificial Sequence: Synthetic oligonucleotide
  Antisense strand to SEQ ID NO: 1597463
uuaaucaguaacugcuuaa

SEQ ID NO: 1597465 - RNA, 19 nt, Artificial Sequence
  Description of Artificial Sequence: Synthetic oligonucleotide
  Sense strand starting at position 2139 of SEQ ID NO: 1560399
agcaguuacugauuaaagu

SEQ ID NO: 1597466 - RNA, 19 nt, Artificial Sequence
  Description of Artificial Sequence: Synthetic oligonucleotide
  Antisense strand to SEQ ID NO: 1597465
acuuuaaucaguaacugcu

SEQ ID NO: 1597467 - RNA, 19 nt, Artificial Sequence
  Description of Artificial Sequence: Synthetic oligonucleotide
  Sense strand starting at position 2140 of SEQ ID NO: 1560399
gcaguuacugauuaaaguc

SEQ ID NO: 1597468 - RNA, 19 nt, Artificial Sequence
  Description of Artificial Sequence: Synthetic oligonucleotide
  Antisense strand to SEQ ID NO: 1597467
gacuuuaaucaguaacugc

SEQ ID NO: 1597469 - RNA, 19 nt, Artificial Sequence
  Description of Artificial Sequence: Synthetic oligonucleotide
  Sense strand starting at position 2798 of SEQ ID NO: 1560399
acaguagcccuccaaugaa

SEQ ID NO: 1597470 - RNA, 19 nt, Artificial Sequence
  Description of Artificial Sequence: Synthetic oligonucleotide
  Antisense strand to SEQ ID NO: 1597469
uucauuggagggcuacugu

SEQ ID NO: 1597471 - RNA, 19 nt, Artificial Sequence
  Description of Artificial Sequence: Synthetic oligonucleotide
  Sense strand starting at position 2801 of SEQ ID NO: 1560399
guagcccuccaaugaauaa

SEQ ID NO: 1597472 - RNA, 19 nt, Artificial Sequence
  Description of Artificial Sequence: Synthetic oligonucleotide
  Antisense strand to SEQ ID NO: 1597471
uuauucauuggagggcuac

SEQ ID NO: 1597473 - RNA, 19 nt, Artificial Sequence
  Description of Artificial Sequence: Synthetic oligonucleotide
  Sense strand starting at position 2821 of SEQ ID NO: 1560399
cugaaaucauguugaauga

SEQ ID NO: 1597474 - RNA, 19 nt, Artificial Sequence
  Description of Artificial Sequence: Synthetic oligonucleotide
  Antisense strand to SEQ ID NO: 1597473
ucauucaacaugauuucag

SEQ ID NO: 1597475 - RNA, 19 nt, Artificial Sequence
  Description of Artificial Sequence: Synthetic oligonucleotide
  Sense strand starting at position 3731 of SEQ ID NO: 1560399
gugagacucugucugaaca

SEQ ID NO: 1597476 - RNA, 19 nt, Artificial Sequence
  Description of Artificial Sequence: Synthetic oligonucleotide
  Antisense strand to SEQ ID NO: 1597475
uguucagacagagucucac

SEQ ID NO: 1597477 - RNA, 19 nt, Artificial Sequence
  Description of Artificial Sequence: Synthetic oligonucleotide
  Sense strand starting at position 3732 of SEQ ID NO: 1560399
ugagacucugucugaacaa

SEQ ID NO: 1597478 - RNA, 19 nt, Artificial Sequence
  Description of Artificial Sequence: Synthetic oligonucleotide
  Antisense strand to SEQ ID NO: 1597477
uuguucagacagagucuca

SEQ ID NO: 1597479 - RNA, 19 nt, Artificial Sequence
  Description of Artificial Sequence: Synthetic oligonucleotide
  Sense strand starting at position 3790 of SEQ ID NO: 1560399
uaauguaaauguggcugaa

SEQ ID NO: 1597480 - RNA, 19 nt, Artificial Sequence
  Description of Artificial Sequence: Synthetic oligonucleotide
  Antisense strand to SEQ ID NO: 1597479
uucagccacauuuacauua

SEQ ID NO: 1597481 - RNA, 19 nt, Artificial Sequence
  Description of Artificial Sequence: Synthetic oligonucleotide
  Sense strand starting at position 3853 of SEQ ID NO: 1560399
gcagguaucacugagguca

SEQ ID NO: 1597482 - RNA, 19 nt, Artificial Sequence
  Description of Artificial Sequence: Synthetic oligonucleotide
  Antisense strand to SEQ ID NO: 1597481
ugaccucagugauaccugc

SEQ ID NO: 1597483 - RNA, 19 nt, Artificial Sequence
  Description of Artificial Sequence: Synthetic oligonucleotide
  Sense strand starting at position 3964 of SEQ ID NO: 1560399
ccaacuacucgagaagcua

SEQ ID NO: 1597484 - RNA, 19 nt, Artificial Sequence
  Description of Artificial Sequence: Synthetic oligonucleotide
  Antisense strand to SEQ ID NO: 1597483
uagcuucucgaguaguugg

SEQ ID NO: 1597485 - RNA, 19 nt, Artificial Sequence
  Description of Artificial Sequence: Synthetic oligonucleotide
  Sense strand starting at position 59 of SEQ ID NO: 1560400
caugcuguaccagagaucu

SEQ ID NO: 1597486 - RNA, 19 nt, Artificial Sequence
  Description of Artificial Sequence: Synthetic oligonucleotide
  Antisense strand to SEQ ID NO: 1597485
agaucucugguacagcaug

SEQ ID NO: 1597487 - RNA, 19 nt, Artificial Sequence
  Description of Artificial Sequence: Synthetic oligonucleotide
  Sense strand starting at position 104 of SEQ ID NO: 1560400
cuguguaucccuggaccaa

SEQ ID NO: 1597488 - RNA, 19 nt, Artificial Sequence
  Description of Artificial Sequence: Synthetic oligonucleotide
  Antisense strand to SEQ ID NO: 1597487
uugguccagggauacacag

SEQ ID NO: 1597489 - RNA, 19 nt, Artificial Sequence
  Description of Artificial Sequence: Synthetic oligonucleotide
  Sense strand starting at position 164 of SEQ ID NO: 1560400
cugccugccauccgaguua

SEQ ID NO: 1597490 - RNA, 19 nt, Artificial Sequence
  Description of Artificial Sequence: Synthetic oligonucleotide
  Antisense strand to SEQ ID NO: 1597489
uaacucggauggcaggcag

SEQ ID NO: 1597491 - RNA, 19 nt, Artificial Sequence
  Description of Artificial Sequence: Synthetic oligonucleotide
  Sense strand starting at position 176 of SEQ ID NO: 1560400
cgaguuaacuguuaacucu

SEQ ID NO: 1597492 - RNA, 19 nt, Artificial Sequence
  Description of Artificial Sequence: Synthetic oligonucleotide
  Antisense strand to SEQ ID NO: 1597491
agaguuaacaguuaacucg

SEQ ID NO: 1597493 - RNA, 19 nt, Artificial Sequence
  Description of Artificial Sequence: Synthetic oligonucleotide
  Sense strand starting at position 239 of SEQ ID NO: 1560400
gagguuaggcaaugugacu

SEQ ID NO: 1597494 - RNA, 19 nt, Artificial Sequence
  Description of Artificial Sequence: Synthetic oligonucleotide
  Antisense strand to SEQ ID NO: 1597493
agucacauugccuaaccuc

SEQ ID NO: 1597495 - RNA, 19 nt, Artificial Sequence
  Description of Artificial Sequence: Synthetic oligonucleotide
  Sense strand starting at position 244 of SEQ ID NO: 1560400
uaggcaaugugacugaagu

SEQ ID NO: 1597496 - RNA, 19 nt, Artificial Sequence
  Description of Artificial Sequence: Synthetic oligonucleotide
  Antisense strand to SEQ ID NO: 1597495
acuucagucacauugccua

SEQ ID NO: 1597497 - RNA, 19 nt, Artificial Sequence
  Description of Artificial Sequence: Synthetic oligonucleotide
  Sense strand starting at position 246 of SEQ ID NO: 1560400
ggcaaugugacugaaguca

SEQ ID NO: 1597498 - RNA, 19 nt, Artificial Sequence
  Description of Artificial Sequence: Synthetic oligonucleotide
  Antisense strand to SEQ ID NO: 1597497
ugacuucagucacauugcc

SEQ ID NO: 1597499 - RNA, 19 nt, Artificial Sequence
  Description of Artificial Sequence: Synthetic oligonucleotide
  Sense strand starting at position 325 of SEQ ID NO: 1560400
uguggaggugugugaucaa

SEQ ID NO: 1597500 - RNA, 19 nt, Artificial Sequence
  Description of Artificial Sequence: Synthetic oligonucleotide
  Antisense strand to SEQ ID NO: 1597499
uugaucacacaccuccaca

SEQ ID NO: 1597501 - RNA, 19 nt, Artificial Sequence
  Description of Artificial Sequence: Synthetic oligonucleotide
  Sense strand starting at position 328 of SEQ ID NO: 1560400
ggaggugugugaucaaagg

SEQ ID NO: 1597502 - RNA, 19 nt, Artificial Sequence
  Description of Artificial Sequence: Synthetic oligonucleotide
  Antisense strand to SEQ ID NO: 1597501
ccuuugaucacacaccucc

SEQ ID NO: 1597503 - RNA, 19 nt, Artificial Sequence
  Description of Artificial Sequence: Synthetic oligonucleotide
  Sense strand starting at position 671 of SEQ ID NO: 1560400
uuaguagagacacgcaaua

SEQ ID NO: 1597504 - RNA, 19 nt, Artificial Sequence
  Description of Artificial Sequence: Synthetic oligonucleotide
  Antisense strand to SEQ ID NO: 1597503
uauugcgugucucuacuaa

SEQ ID NO: 1597505 - RNA, 19 nt, Artificial Sequence
  Description of Artificial Sequence: Synthetic oligonucleotide
  Sense strand starting at position 673 of SEQ ID NO: 1560400
aguagagacacgcaauauu

SEQ ID NO: 1597506 - RNA, 19 nt, Artificial Sequence
  Description of Artificial Sequence: Synthetic oligonucleotide
  Antisense strand to SEQ ID NO: 1597505
aauauugcgugucucuacu

SEQ ID NO: 1597507 - RNA, 19 nt, Artificial Sequence
  Description of Artificial Sequence: Synthetic oligonucleotide
  Sense strand starting at position 792 of SEQ ID NO: 1560400
acuguuguuuccgaggaac

SEQ ID NO: 1597508 - RNA, 19 nt, Artificial Sequence
  Description of Artificial Sequence: Synthetic oligonucleotide
  Antisense strand to SEQ ID NO: 1597507
guuccucggaaacaacagu

SEQ ID NO: 1597509 - RNA, 19 nt, Artificial Sequence
  Description of Artificial Sequence: Synthetic oligonucleotide
  Sense strand starting at position 794 of SEQ ID NO: 1560400
uguuguuuccgaggaacuu

SEQ ID NO: 1597510 - RNA, 19 nt, Artificial Sequence
  Description of Artificial Sequence: Synthetic oligonucleotide
  Antisense strand to SEQ ID NO: 1597509
aaguuccucggaaacaaca

SEQ ID NO: 1597511 - RNA, 19 nt, Artificial Sequence
  Description of Artificial Sequence: Synthetic oligonucleotide
  Sense strand starting at position 795 of SEQ ID NO: 1560400
guuguuuccgaggaacuua

SEQ ID NO: 1597512 - RNA, 19 nt, Artificial Sequence
  Description of Artificial Sequence: Synthetic oligonucleotide
  Antisense strand to SEQ ID NO: 1597511
uaaguuccucggaaacaac

SEQ ID NO: 1597513 - RNA, 19 nt, Artificial Sequence
  Description of Artificial Sequence: Synthetic oligonucleotide
  Sense strand starting at position 992 of SEQ ID NO: 1560400
ccaggugcauuuccgauaa

SEQ ID NO: 1597514 - RNA, 19 nt, Artificial Sequence
  Description of Artificial Sequence: Synthetic oligonucleotide
  Antisense strand to SEQ ID NO: 1597513
uuaucggaaaugcaccugg

SEQ ID NO: 1597515 - RNA, 19 nt, Artificial Sequence
  Description of Artificial Sequence: Synthetic oligonucleotide
  Sense strand starting at position 1031 of SEQ ID NO: 1560400
uagcuuuauggaggcauca

SEQ ID NO: 1597516 - RNA, 19 nt, Artificial Sequence
  Description of Artificial Sequence: Synthetic oligonucleotide
  Antisense strand to SEQ ID NO: 1597515
ugaugccuccauaaagcua

SEQ ID NO: 1597517 - RNA, 19 nt, Artificial Sequence
  Description of Artificial Sequence: Synthetic oligonucleotide
  Sense strand starting at position 1033 of SEQ ID NO: 1560400
gcuuuauggaggcaucauc

SEQ ID NO: 1597518 - RNA, 19 nt, Artificial Sequence
  Description of Artificial Sequence: Synthetic oligonucleotide
  Antisense strand to SEQ ID NO: 1597517
gaugaugccuccauaaagc

SEQ ID NO: 1597519 - RNA, 19 nt, Artificial Sequence
  Description of Artificial Sequence: Synthetic oligonucleotide
  Sense strand starting at position 1078 of SEQ ID NO: 1560400
uguacacaucuugaggagu

SEQ ID NO: 1597520 - RNA, 19 nt, Artificial Sequence
  Description of Artificial Sequence: Synthetic oligonucleotide
  Antisense strand to SEQ ID NO: 1597519
acuccucaagauguguaca

SEQ ID NO: 1597521 - RNA, 19 nt, Artificial Sequence
  Description of Artificial Sequence: Synthetic oligonucleotide
  Sense strand starting at position 1080 of SEQ ID NO: 1560400
uacacaucuugaggaguuu

SEQ ID NO: 1597522 - RNA, 19 nt, Artificial Sequence
  Description of Artificial Sequence: Synthetic oligonucleotide
  Antisense strand to SEQ ID NO: 1597521
aaacuccucaagaugugua

SEQ ID NO: 1597523 - RNA, 19 nt, Artificial Sequence
  Description of Artificial Sequence: Synthetic oligonucleotide
  Sense strand starting at position 1092 of SEQ ID NO: 1560400
ggaguuuggacgugugcaa

SEQ ID NO: 1597524 - RNA, 19 nt, Artificial Sequence
  Description of Artificial Sequence: Synthetic oligonucleotide
  Antisense strand to SEQ ID NO: 1597523
uugcacacguccaaacucc

SEQ ID NO: 1597525 - RNA, 19 nt, Artificial Sequence
  Description of Artificial Sequence: Synthetic oligonucleotide
  Sense strand starting at position 2040 of SEQ ID NO: 1560400
uaugccuucugaggagaca

SEQ ID NO: 1597526 - RNA, 19 nt, Artificial Sequence
  Description of Artificial Sequence: Synthetic oligonucleotide
  Antisense strand to SEQ ID NO: 1597525
ugucuccucagaaggcaua

SEQ ID NO: 1597527 - RNA, 19 nt, Artificial Sequence
  Description of Artificial Sequence: Synthetic oligonucleotide
  Sense strand starting at position 2282 of SEQ ID NO: 1560400
agacuuugcagcuauucga

SEQ ID NO: 1597528 - RNA, 19 nt, Artificial Sequence
  Description of Artificial Sequence: Synthetic oligonucleotide
  Antisense strand to SEQ ID NO: 1597527
ucgaauagcugcaaagucu

SEQ ID NO: 1597529 - RNA, 19 nt, Artificial Sequence
  Description of Artificial Sequence: Synthetic oligonucleotide
  Sense strand starting at position 2452 of SEQ ID NO: 1560400
uucugucuugcacgguaga

SEQ ID NO: 1597530 - RNA, 19 nt, Artificial Sequence
  Description of Artificial Sequence: Synthetic oligonucleotide
  Antisense strand to SEQ ID NO: 1597529
ucuaccgugcaagacagaa

SEQ ID NO: 1597531 - RNA, 19 nt, Artificial Sequence
  Description of Artificial Sequence: Synthetic oligonucleotide
  Sense strand starting at position 2462 of SEQ ID NO: 1560400
cacgguagacccuguuuau

SEQ ID NO: 1597532 - RNA, 19 nt, Artificial Sequence
  Description of Artificial Sequence: Synthetic oligonucleotide
  Antisense strand to SEQ ID NO: 1597531
auaaacagggucuaccgug

SEQ ID NO: 1597533 - RNA, 19 nt, Artificial Sequence
  Description of Artificial Sequence: Synthetic oligonucleotide
  Sense strand starting at position 2552 of SEQ ID NO: 1560400
gugucaacugugucuuguu

SEQ ID NO: 1597534 - RNA, 19 nt, Artificial Sequence
  Description of Artificial Sequence: Synthetic oligonucleotide
  Antisense strand to SEQ ID NO: 1597533
aacaagacacaguugacac

SEQ ID NO: 1597535 - RNA, 19 nt, Artificial Sequence
  Description of Artificial Sequence: Synthetic oligonucleotide
  Sense strand starting at position 3062 of SEQ ID NO: 1560400
ucccacagugcucaggaaa

SEQ ID NO: 1597536 - RNA, 19 nt, Artificial Sequence
  Description of Artificial Sequence: Synthetic oligonucleotide
  Antisense strand to SEQ ID NO: 1597535
uuuccugagcacuguggga

SEQ ID NO: 1597537 - RNA, 19 nt, Artificial Sequence
  Description of Artificial Sequence: Synthetic oligonucleotide
  Sense strand starting at position 3113 of SEQ ID NO: 1560400
agucaauagcuccaaagau

SEQ ID NO: 1597538 - RNA, 19 nt, Artificial Sequence
  Description of Artificial Sequence: Synthetic oligonucleotide
  Antisense strand to SEQ ID NO: 1597537
aucuuuggagcuauugacu

SEQ ID NO: 1597539 - RNA, 19 nt, Artificial Sequence
  Description of Artificial Sequence: Synthetic oligonucleotide
  Sense strand starting at position 3175 of SEQ ID NO: 1560400
ucaauacuuguugggugaa

SEQ ID NO: 1597540 - RNA, 19 nt, Artificial Sequence
  Description of Artificial Sequence: Synthetic oligonucleotide
  Antisense strand to SEQ ID NO: 1597539
uucacccaacaaguauuga

SEQ ID NO: 1597541 - RNA, 19 nt, Artificial Sequence
  Description of Artificial Sequence: Synthetic oligonucleotide
  Sense strand starting at position 3178 of SEQ ID NO: 1560400
auacuuguugggugaacga

SEQ ID NO: 1597542 - RNA, 19 nt, Artificial Sequence
  Description of Artificial Sequence: Synthetic oligonucleotide
  Antisense strand to SEQ ID NO: 1597541
ucguucacccaacaaguau

SEQ ID NO: 1597543 - RNA, 19 nt, Artificial Sequence
  Description of Artificial Sequence: Synthetic oligonucleotide
  Sense strand starting at position 3195 of SEQ ID NO: 1560400
gaauaaggagugugucguu

SEQ ID NO: 1597544 - RNA, 19 nt, Artificial Sequence
  Description of Artificial Sequence: Synthetic oligonucleotide
  Antisense strand to SEQ ID NO: 1597543
aacgacacacuccuuauuc

SEQ ID NO: 1597545 - RNA, 19 nt, Artificial Sequence
  Description of Artificial Sequence: Synthetic oligonucleotide
  Sense strand starting at position 3226 of SEQ ID NO: 1560400
uccugucauguguguugau

SEQ ID NO: 1597546 - RNA, 19 nt, Artificial Sequence
  Description of Artificial Sequence: Synthetic oligonucleotide
  Antisense strand to SEQ ID NO: 1597545
aucaacacacaugacagga

SEQ ID NO: 1597547 - RNA, 19 nt, Artificial Sequence
  Description of Artificial Sequence: Synthetic oligonucleotide
  Sense strand starting at position 3241 of SEQ ID NO: 1560400
ugaucuaucugucucugca

SEQ ID NO: 1597548 - RNA, 19 nt, Artificial Sequence
  Description of Artificial Sequence: Synthetic oligonucleotide
  Antisense strand to SEQ ID NO: 1597547
ugcagagacagauagauca

SEQ ID NO: 1597549 - RNA, 19 nt, Artificial Sequence
  Description of Artificial Sequence: Synthetic oligonucleotide
  Sense strand starting at position 3288 of SEQ ID NO: 1560400
cugcuuuccagaggaaaga

SEQ ID NO: 1597550 - RNA, 19 nt, Artificial Sequence
  Description of Artificial Sequence: Synthetic oligonucleotide
  Antisense strand to SEQ ID NO: 1597549
ucuuuccucuggaaagcag

SEQ ID NO: 1597551 - RNA, 19 nt, Artificial Sequence
  Description of Artificial Sequence: Synthetic oligonucleotide
  Sense strand starting at position 3337 of SEQ ID NO: 1560400
cccuuugcugucuaaggga

SEQ ID NO: 1597552 - RNA, 19 nt, Artificial Sequence
  Description of Artificial Sequence: Synthetic oligonucleotide
  Antisense strand to SEQ ID NO: 1597551
ucccuuagacagcaaaggg

SEQ ID NO: 1597553 - RNA, 19 nt, Artificial Sequence
  Description of Artificial Sequence: Synthetic oligonucleotide
  Sense strand starting at position 3471 of SEQ ID NO: 1560400
cuguccugucuuuacacau

SEQ ID NO: 1597554 - RNA, 19 nt, Artificial Sequence
  Description of Artificial Sequence: Synthetic oligonucleotide
  Antisense strand to SEQ ID NO: 1597553
auguguaaagacaggacag

SEQ ID NO: 1597555 - RNA, 19 nt, Artificial Sequence
  Description of Artificial Sequence: Synthetic oligonucleotide
  Sense strand starting at position 3735 of SEQ ID NO: 1560400
cugacaagaaggugugaau

SEQ ID NO: 1597556 - RNA, 19 nt, Artificial Sequence
  Description of Artificial Sequence: Synthetic oligonucleotide
  Antisense strand to SEQ ID NO: 1597555
auucacaccuucuugucag

SEQ ID NO: 1597557 - RNA, 19 nt, Artificial Sequence
  Description of Artificial Sequence: Synthetic oligonucleotide
  Sense strand starting at position 3752 of SEQ ID NO: 1560400
auggcuuugcugggaagga

SEQ ID NO: 1597558 - RNA, 19 nt, Artificial Sequence
  Description of Artificial Sequence: Synthetic oligonucleotide
  Antisense strand to SEQ ID NO: 1597557
uccuucccagcaaagccau

SEQ ID NO: 1597559 - RNA, 19 nt, Artificial Sequence
  Description of Artificial Sequence: Synthetic oligonucleotide
  Sense strand starting at position 3878 of SEQ ID NO: 1560400
gugggaaguccuugccuca

SEQ ID NO: 1597560 - RNA, 19 nt, Artificial Sequence
  Description of Artificial Sequence: Synthetic oligonucleotide
  Antisense strand to SEQ ID NO: 1597559
ugaggcaaggacuucccac

SEQ ID NO: 1597561 - RNA, 19 nt, Artificial Sequence
  Description of Artificial Sequence: Synthetic oligonucleotide
  Sense strand starting at position 3900 of SEQ ID NO: 1560400
cccauuagcuaguuuguga

SEQ ID NO: 1597562 - RNA, 19 nt, Artificial Sequence
  Description of Artificial Sequence: Synthetic oligonucleotide
  Antisense strand to SEQ ID NO: 1597561
ucacaaacuagcuaauggg

SEQ ID NO: 1597563 - RNA, 19 nt, Artificial Sequence
  Description of Artificial Sequence: Synthetic oligonucleotide
  Sense strand starting at position 3935 of SEQ ID NO: 1560400
guccaaagcuugcucuauc

SEQ ID NO: 1597564 - RNA, 19 nt, Artificial Sequence
  Description of Artificial Sequence: Synthetic oligonucleotide
  Antisense strand to SEQ ID NO: 1597563
gauagagcaagcuuuggac

SEQ ID NO: 1597565 - RNA, 19 nt, Artificial Sequence
  Description of Artificial Sequence: Synthetic oligonucleotide
  Sense strand starting at position 258 of SEQ ID NO: 1560401
gcuggaagacgccgucauu

SEQ ID NO: 1597566 - RNA, 19 nt, Artificial Sequence
  Description of Artificial Sequence: Synthetic oligonucleotide
  Antisense strand to SEQ ID NO: 1597565
aaugacggcgucuuccagc

SEQ ID NO: 1597567 - RNA, 19 nt, Artificial Sequence
  Description of Artificial Sequence: Synthetic oligonucleotide
  Sense strand starting at position 270 of SEQ ID NO: 1560401
cgucauugcacucgaugau

SEQ ID NO: 1597568 - RNA, 19 nt, Artificial Sequence
  Description of Artificial Sequence: Synthetic oligonucleotide
  Antisense strand to SEQ ID NO: 1597567
aucaucgagugcaaugacg

SEQ ID NO: 1597569 - RNA, 19 nt, Artificial Sequence
  Description of Artificial Sequence: Synthetic oligonucleotide
  Sense strand starting at position 271 of SEQ ID NO: 1560401
gucauugcacucgaugauc

SEQ ID NO: 1597570 - RNA, 19 nt, Artificial Sequence
  Description of Artificial Sequence: Synthetic oligonucleotide
  Antisense strand to SEQ ID NO: 1597569
gaucaucgagugcaaugac

SEQ ID NO: 1597571 - RNA, 19 nt, Artificial Sequence
  Description of Artificial Sequence: Synthetic oligonucleotide
  Sense strand starting at position 327 of SEQ ID NO: 1560401
cugcgauggccaugccaaa

SEQ ID NO: 1597572 - RNA, 19 nt, Artificial Sequence
  Description of Artificial Sequence: Synthetic oligonucleotide
  Antisense strand to SEQ ID NO: 1597571
uuuggcauggccaucgcag

SEQ ID NO: 1597573 - RNA, 19 nt, Artificial Sequence
  Description of Artificial Sequence: Synthetic oligonucleotide
  Sense strand starting at position 756 of SEQ ID NO: 1560401
ugaacuaggcuaugugagu

SEQ ID NO: 1597574 - RNA, 19 nt, Artificial Sequence
  Description of Artificial Sequence: Synthetic oligonucleotide
  Antisense strand to SEQ ID NO: 1597573
acucacauagccuaguuca

SEQ ID NO: 1597575 - RNA, 19 nt, Artificial Sequence
  Description of Artificial Sequence: Synthetic oligonucleotide
  Sense strand starting at position 761 of SEQ ID NO: 1560401
uaggcuaugugagucacau

SEQ ID NO: 1597576 - RNA, 19 nt, Artificial Sequence
  Description of Artificial Sequence: Synthetic oligonucleotide
  Antisense strand to SEQ ID NO: 1597575
augugacucacauagccua

SEQ ID NO: 1597577 - RNA, 19 nt, Artificial Sequence
  Description of Artificial Sequence: Synthetic oligonucleotide
  Sense strand starting at position 940 of SEQ ID NO: 1560401
aggcgagagccuuggacuu

SEQ ID NO: 1597578 - RNA, 19 nt, Artificial Sequence
  Description of Artificial Sequence: Synthetic oligonucleotide
  Antisense strand to SEQ ID NO: 1597577
aaguccaaggcucucgccu

SEQ ID NO: 1597579 - RNA, 19 nt, Artificial Sequence
  Description of Artificial Sequence: Synthetic oligonucleotide
  Sense strand starting at position 988 of SEQ ID NO: 1560401
ucccuuaucucucggguua

SEQ ID NO: 1597580 - RNA, 19 nt, Artificial Sequence
  Description of Artificial Sequence: Synthetic oligonucleotide
  Antisense strand to SEQ ID NO: 1597579
uaacccgagagauaaggga

SEQ ID NO: 1597581 - RNA, 19 nt, Artificial Sequence
  Description of Artificial Sequence: Synthetic oligonucleotide
  Sense strand starting at position 990 of SEQ ID NO: 1560401
ccuuaucucucggguuagu

SEQ ID NO: 1597582 - RNA, 19 nt, Artificial Sequence
  Description of Artificial Sequence: Synthetic oligonucleotide
  Antisense strand to SEQ ID NO: 1597581
acuaacccgagagauaagg

SEQ ID NO: 1597583 - RNA, 19 nt, Artificial Sequence
  Description of Artificial Sequence: Synthetic oligonucleotide
  Sense strand starting at position 1024 of SEQ ID NO: 1560401
cucccucuauccgaaaguu

SEQ ID NO: 1597584 - RNA, 19 nt, Artificial Sequence
  Description of Artificial Sequence: Synthetic oligonucleotide
  Antisense strand to SEQ ID NO: 1597583
aacuuucggauagagggag

SEQ ID NO: 1597585 - RNA, 19 nt, Artificial Sequence
  Description of Artificial Sequence: Synthetic oligonucleotide
  Sense strand starting at position 1133 of SEQ ID NO: 1560401
gcucaauccugauuggcac

SEQ ID NO: 1597586 - RNA, 19 nt, Artificial Sequence
  Description of Artificial Sequence: Synthetic oligonucleotide
  Antisense strand to SEQ ID NO: 1597585
gugccaaucaggauugagc

SEQ ID NO: 1597587 - RNA, 19 nt, Artificial Sequence
  Description of Artificial Sequence: Synthetic oligonucleotide
  Sense strand starting at position 1305 of SEQ ID NO: 1560401
ucagcuuuccgagugcuau

SEQ ID NO: 1597588 - RNA, 19 nt, Artificial Sequence
  Description of Artificial Sequence: Synthetic oligonucleotide
  Antisense strand to SEQ ID NO: 1597587
auagcacucggaaagcuga

SEQ ID NO: 1597589 - RNA, 19 nt, Artificial Sequence
  Description of Artificial Sequence: Synthetic oligonucleotide
  Sense strand starting at position 1306 of SEQ ID NO: 1560401
cagcuuuccgagugcuauu

SEQ ID NO: 1597590 - RNA, 19 nt, Artificial Sequence
  Description of Artificial Sequence: Synthetic oligonucleotide
  Antisense strand to SEQ ID NO: 1597589
aauagcacucggaaagcug

SEQ ID NO: 1597591 - RNA, 19 nt, Artificial Sequence
  Description of Artificial Sequence: Synthetic oligonucleotide
  Sense strand starting at position 1321 of SEQ ID NO: 1560401
uauucuuagccgggcgagu

SEQ ID NO: 1597592 - RNA, 19 nt, Artificial Sequence
  Description of Artificial Sequence: Synthetic oligonucleotide
  Antisense strand to SEQ ID NO: 1597591
acucgcccggcuaagaaua

SEQ ID NO: 1597593 - RNA, 19 nt, Artificial Sequence
  Description of Artificial Sequence: Synthetic oligonucleotide
  Sense strand starting at position 1501 of SEQ ID NO: 1560401
agaggaaguuucugguacu

SEQ ID NO: 1597594 - RNA, 19 nt, Artificial Sequence
  Description of Artificial Sequence: Synthetic oligonucleotide
  Antisense strand to SEQ ID NO: 1597593
aguaccagaaacuuccucu

SEQ ID NO: 1597595 - RNA, 19 nt, Artificial Sequence
  Description of Artificial Sequence: Synthetic oligonucleotide
  Sense strand starting at position 1502 of SEQ ID NO: 1560401
gaggaaguuucugguacuu

SEQ ID NO: 1597596 - RNA, 19 nt, Artificial Sequence
  Description of Artificial Sequence: Synthetic oligonucleotide
  Antisense strand to SEQ ID NO: 1597595
aaguaccagaaacuuccuc

SEQ ID NO: 1597597 - RNA, 19 nt, Artificial Sequence
  Description of Artificial Sequence: Synthetic oligonucleotide
  Sense strand starting at position 1504 of SEQ ID NO: 1560401
ggaaguuucugguacuuag

SEQ ID NO: 1597598 - RNA, 19 nt, Artificial Sequence
  Description of Artificial Sequence: Synthetic oligonucleotide
  Antisense strand to SEQ ID NO: 1597597
cuaaguaccagaaacuucc

SEQ ID NO: 1597599 - RNA, 19 nt, Artificial Sequence
  Description of Artificial Sequence: Synthetic oligonucleotide
  Sense strand starting at position 2204 of SEQ ID NO: 1560401
gccgcuuacgcgccauaga

SEQ ID NO: 1597600 - RNA, 19 nt, Artificial Sequence
  Description of Artificial Sequence: Synthetic oligonucleotide
  Antisense strand to SEQ ID NO: 1597599
ucuauggcgcguaagcggc

SEQ ID NO: 1597601 - RNA, 19 nt, Artificial Sequence
  Description of Artificial Sequence: Synthetic oligonucleotide
  Sense strand starting at position 2205 of SEQ ID NO: 1560401
ccgcuuacgcgccauagau

SEQ ID NO: 1597602 - RNA, 19 nt, Artificial Sequence
  Description of Artificial Sequence: Synthetic oligonucleotide
  Antisense strand to SEQ ID NO: 1597601
aucuauggcgcguaagcgg

SEQ ID NO: 1597603 - RNA, 19 nt, Artificial Sequence
  Description of Artificial Sequence: Synthetic oligonucleotide
  Sense strand starting at position 2214 of SEQ ID NO: 1560401
cgccauagauuccucaucu

SEQ ID NO: 1597604 - RNA, 19 nt, Artificial Sequence
  Description of Artificial Sequence: Synthetic oligonucleotide
  Antisense strand to SEQ ID NO: 1597603
agaugaggaaucuauggcg

SEQ ID NO: 1597605 - RNA, 19 nt, Artificial Sequence
  Description of Artificial Sequence: Synthetic oligonucleotide
  Sense strand starting at position 2215 of SEQ ID NO: 1560401
gccauagauuccucaucug

SEQ ID NO: 1597606 - RNA, 19 nt, Artificial Sequence
  Description of Artificial Sequence: Synthetic oligonucleotide
  Antisense strand to SEQ ID NO: 1597605
cagaugaggaaucuauggc

SEQ ID NO: 1597607 - RNA, 19 nt, Artificial Sequence
  Description of Artificial Sequence: Synthetic oligonucleotide
  Sense strand starting at position 2218 of SEQ ID NO: 1560401
auagauuccucaucuguca

SEQ ID NO: 1597608 - RNA, 19 nt, Artificial Sequence
  Description of Artificial Sequence: Synthetic oligonucleotide
  Antisense strand to SEQ ID NO: 1597607
ugacagaugaggaaucuau

SEQ ID NO: 1597609 - RNA, 19 nt, Artificial Sequence
  Description of Artificial Sequence: Synthetic oligonucleotide
  Sense strand starting at position 2269 of SEQ ID NO: 1560401
gugagaaucugaggaucuu

SEQ ID NO: 1597610 - RNA, 19 nt, Artificial Sequence
  Description of Artificial Sequence: Synthetic oligonucleotide
  Antisense strand to SEQ ID NO: 1597609
aagauccucagauucucac

SEQ ID NO: 1597611 - RNA, 19 nt, Artificial Sequence
  Description of Artificial Sequence: Synthetic oligonucleotide
  Sense strand starting at position 2293 of SEQ ID NO: 1560401
cgcuguuggaagugcuuua

SEQ ID NO: 1597612 - RNA, 19 nt, Artificial Sequence
  Description of Artificial Sequence: Synthetic oligonucleotide
  Antisense strand to SEQ ID NO: 1597611
uaaagcacuuccaacagcg

SEQ ID NO: 1597613 - RNA, 19 nt, Artificial Sequence
  Description of Artificial Sequence: Synthetic oligonucleotide
  Sense strand starting at position 2298 of SEQ ID NO: 1560401
uuggaagugcuuuaagugu

SEQ ID NO: 1597614 - RNA, 19 nt, Artificial Sequence
  Description of Artificial Sequence: Synthetic oligonucleotide
  Antisense strand to SEQ ID NO: 1597613
acacuuaaagcacuuccaa

SEQ ID NO: 1597615 - RNA, 19 nt, Artificial Sequence
  Description of Artificial Sequence: Synthetic oligonucleotide
  Sense strand starting at position 2345 of SEQ ID NO: 1560401
uacagugaguucugucuuu

SEQ ID NO: 1597616 - RNA, 19 nt, Artificial Sequence
  Description of Artificial Sequence: Synthetic oligonucleotide
  Antisense strand to SEQ ID NO: 1597615
aaagacagaacucacugua

SEQ ID NO: 1597617 - RNA, 19 nt, Artificial Sequence
  Description of Artificial Sequence: Synthetic oligonucleotide
  Sense strand starting at position 2583 of SEQ ID NO: 1560401
agagcagccgacugucauu

SEQ ID NO: 1597618 - RNA, 19 nt, Artificial Sequence
  Description of Artificial Sequence: Synthetic oligonucleotide
  Antisense strand to SEQ ID NO: 1597617
aaugacagucggcugcucu

SEQ ID NO: 1597619 - RNA, 19 nt, Artificial Sequence
  Description of Artificial Sequence: Synthetic oligonucleotide
  Sense strand starting at position 3045 of SEQ ID NO: 1560401
gugcguucugcacggguua

SEQ ID NO: 1597620 - RNA, 19 nt, Artificial Sequence
  Description of Artificial Sequence: Synthetic oligonucleotide
  Antisense strand to SEQ ID NO: 1597619
uaacccgugcagaacgcac

SEQ ID NO: 1597621 - RNA, 19 nt, Artificial Sequence
  Description of Artificial Sequence: Synthetic oligonucleotide
  Sense strand starting at position 3046 of SEQ ID NO: 1560401
ugcguucugcacggguuaa

SEQ ID NO: 1597622 - RNA, 19 nt, Artificial Sequence
  Description of Artificial Sequence: Synthetic oligonucleotide
  Antisense strand to SEQ ID NO: 1597621
uuaacccgugcagaacgca

SEQ ID NO: 1597623 - RNA, 19 nt, Artificial Sequence
  Description of Artificial Sequence: Synthetic oligonucleotide
  Sense strand starting at position 3057 of SEQ ID NO: 1560401
cggguuaacagaugcaguu

SEQ ID NO: 1597624 - RNA, 19 nt, Artificial Sequence
  Description of Artificial Sequence: Synthetic oligonucleotide
  Antisense strand to SEQ ID NO: 1597623
aacugcaucuguuaacccg

SEQ ID NO: 1597625 - RNA, 19 nt, Artificial Sequence
  Description of Artificial Sequence: Synthetic oligonucleotide
  Sense strand starting at position 3059 of SEQ ID NO: 1560401
gguuaacagaugcaguuau

SEQ ID NO: 1597626 - RNA, 19 nt, Artificial Sequence
  Description of Artificial Sequence: Synthetic oligonucleotide
  Antisense strand to SEQ ID NO: 1597625
auaacugcaucuguuaacc

SEQ ID NO: 1597627 - RNA, 19 nt, Artificial Sequence
  Description of Artificial Sequence: Synthetic oligonucleotide
  Sense strand starting at position 3069 of SEQ ID NO: 1560401
ugcaguuauuaugcccauu

SEQ ID NO: 1597628 - RNA, 19 nt, Artificial Sequence
  Description of Artificial Sequence: Synthetic oligonucleotide
  Antisense strand to SEQ ID NO: 1597627
aaugggcauaauaacugca

SEQ ID NO: 1597629 - RNA, 19 nt, Artificial Sequence
  Description of Artificial Sequence: Synthetic oligonucleotide
  Sense strand starting at position 3344 of SEQ ID NO: 1560401
gcuuucucguucugucuca

SEQ ID NO: 1597630 - RNA, 19 nt, Artificial Sequence
  Description of Artificial Sequence: Synthetic oligonucleotide
  Antisense strand to SEQ ID NO: 1597629
ugagacagaacgagaaagc

SEQ ID NO: 1597631 - RNA, 19 nt, Artificial Sequence
  Description of Artificial Sequence: Synthetic oligonucleotide
  Sense strand starting at position 3371 of SEQ ID NO: 1560401
ccacguguccucuaggaga

SEQ ID NO: 1597632 - RNA, 19 nt, Artificial Sequence
  Description of Artificial Sequence: Synthetic oligonucleotide
  Antisense strand to SEQ ID NO: 1597631
ucuccuagaggacacgugg

SEQ ID NO: 1597633 - RNA, 19 nt, Artificial Sequence
  Description of Artificial Sequence: Synthetic oligonucleotide
  Sense strand starting at position 3373 of SEQ ID NO: 1560401
acguguccucuaggagaca

SEQ ID NO: 1597634 - RNA, 19 nt, Artificial Sequence
  Description of Artificial Sequence: Synthetic oligonucleotide
  Antisense strand to SEQ ID NO: 1597633
ugucuccuagaggacacgu

SEQ ID NO: 1597635 - RNA, 19 nt, Artificial Sequence
  Description of Artificial Sequence: Synthetic oligonucleotide
  Sense strand starting at position 3411 of SEQ ID NO: 1560401
caggcauguccuggucaga

SEQ ID NO: 1597636 - RNA, 19 nt, Artificial Sequence
  Description of Artificial Sequence: Synthetic oligonucleotide
  Antisense strand to SEQ ID NO: 1597635
ucugaccaggacaugccug

SEQ ID NO: 1597637 - RNA, 19 nt, Artificial Sequence
  Description of Artificial Sequence: Synthetic oligonucleotide
  Sense strand starting at position 3722 of SEQ ID NO: 1560401
cugggauugcaagguguga

SEQ ID NO: 1597638 - RNA, 19 nt, Artificial Sequence
  Description of Artificial Sequence: Synthetic oligonucleotide
  Antisense strand to SEQ ID NO: 1597637
ucacaccuugcaaucccag

SEQ ID NO: 1597639 - RNA, 19 nt, Artificial Sequence
  Description of Artificial Sequence: Synthetic oligonucleotide
  Sense strand starting at position 3781 of SEQ ID NO: 1560401
uugguaguucacuaacgga

SEQ ID NO: 1597640 - RNA, 19 nt, Artificial Sequence
  Description of Artificial Sequence: Synthetic oligonucleotide
  Antisense strand to SEQ ID NO: 1597639
uccguuagugaacuaccaa

SEQ ID NO: 1597641 - RNA, 19 nt, Artificial Sequence
  Description of Artificial Sequence: Synthetic oligonucleotide
  Sense strand starting at position 3840 of SEQ ID NO: 1560401
gucagugauccuggcacac

SEQ ID NO: 1597642 - RNA, 19 nt, Artificial Sequence
  Description of Artificial Sequence: Synthetic oligonucleotide
  Antisense strand to SEQ ID NO: 1597641
gugugccaggaucacugac

SEQ ID NO: 1597643 - RNA, 19 nt, Artificial Sequence
  Description of Artificial Sequence: Synthetic oligonucleotide
  Sense strand starting at position 3952 of SEQ ID NO: 1560401
uugggaugccgagguagaa

SEQ ID NO: 1597644 - RNA, 19 nt, Artificial Sequence
  Description of Artificial Sequence: Synthetic oligonucleotide
  Antisense strand to SEQ ID NO: 1597643
uucuaccucggcaucccaa

SEQ ID NO: 1597645 - RNA, 19 nt, Artificial Sequence
  Description of Artificial Sequence: Synthetic oligonucleotide
  Sense strand starting at position 70 of SEQ ID NO: 1560402
uagagaguaccguguauca

SEQ ID NO: 1597646 - RNA, 19 nt, Artificial Sequence
  Description of Artificial Sequence: Synthetic oligonucleotide
  Antisense strand to SEQ ID NO: 1597645
ugauacacgguacucucua

SEQ ID NO: 1597647 - RNA, 19 nt, Artificial Sequence
  Description of Artificial Sequence: Synthetic oligonucleotide
  Sense strand starting at position 72 of SEQ ID NO: 1560402
gagaguaccguguaucaua

SEQ ID NO: 1597648 - RNA, 19 nt, Artificial Sequence
  Description of Artificial Sequence: Synthetic oligonucleotide
  Antisense strand to SEQ ID NO: 1597647
uaugauacacgguacucuc

SEQ ID NO: 1597649 - RNA, 19 nt, Artificial Sequence
  Description of Artificial Sequence: Synthetic oligonucleotide
  Sense strand starting at position 80 of SEQ ID NO: 1560402
cguguaucauacucuguga

SEQ ID NO: 1597650 - RNA, 19 nt, Artificial Sequence
  Description of Artificial Sequence: Synthetic oligonucleotide
  Antisense strand to SEQ ID NO: 1597649
ucacagaguaugauacacg

SEQ ID NO: 1597651 - RNA, 19 nt, Artificial Sequence
  Description of Artificial Sequence: Synthetic oligonucleotide
  Sense strand starting at position 82 of SEQ ID NO: 1560402
uguaucauacucugugaaa

SEQ ID NO: 1597652 - RNA, 19 nt, Artificial Sequence
  Description of Artificial Sequence: Synthetic oligonucleotide
  Antisense strand to SEQ ID NO: 1597651
uuucacagaguaugauaca

SEQ ID NO: 1597653 - RNA, 19 nt, Artificial Sequence
  Description of Artificial Sequence: Synthetic oligonucleotide
  Sense strand starting at position 83 of SEQ ID NO: 1560402
guaucauacucugugaaac

SEQ ID NO: 1597654 - RNA, 19 nt, Artificial Sequence
  Description of Artificial Sequence: Synthetic oligonucleotide
  Antisense strand to SEQ ID NO: 1597653
guuucacagaguaugauac

SEQ ID NO: 1597655 - RNA, 19 nt, Artificial Sequence
  Description of Artificial Sequence: Synthetic oligonucleotide
  Sense strand starting at position 424 of SEQ ID NO: 1560402
agggaagucugauccuaca

SEQ ID NO: 1597656 - RNA, 19 nt, Artificial Sequence
  Description of Artificial Sequence: Synthetic oligonucleotide
  Antisense strand to SEQ ID NO: 1597655
uguaggaucagacuucccu

SEQ ID NO: 1597657 - RNA, 19 nt, Artificial Sequence
  Description of Artificial Sequence: Synthetic oligonucleotide
  Sense strand starting at position 442 of SEQ ID NO: 1560402
acagauuccugaggaaagg

SEQ ID NO: 1597658 - RNA, 19 nt, Artificial Sequence
  Description of Artificial Sequence: Synthetic oligonucleotide
  Antisense strand to SEQ ID NO: 1597657
ccuuuccucaggaaucugu

SEQ ID NO: 1597659 - RNA, 19 nt, Artificial Sequence
  Description of Artificial Sequence: Synthetic oligonucleotide
  Sense strand starting at position 628 of SEQ ID NO: 1560402
gacuauagguguuuccagu

SEQ ID NO: 1597660 - RNA, 19 nt, Artificial Sequence
  Description of Artificial Sequence: Synthetic oligonucleotide
  Antisense strand to SEQ ID NO: 1597659
acuggaaacaccuauaguc

SEQ ID NO: 1597661 - RNA, 19 nt, Artificial Sequence
  Description of Artificial Sequence: Synthetic oligonucleotide
  Sense strand starting at position 666 of SEQ ID NO: 1560402
gguguuaguguuuauuggu

SEQ ID NO: 1597662 - RNA, 19 nt, Artificial Sequence
  Description of Artificial Sequence: Synthetic oligonucleotide
  Antisense strand to SEQ ID NO: 1597661
accaauaaacacuaacacc

SEQ ID NO: 1597663 - RNA, 19 nt, Artificial Sequence
  Description of Artificial Sequence: Synthetic oligonucleotide
  Sense strand starting at position 671 of SEQ ID NO: 1560402
uaguguuuauuggugaacu

SEQ ID NO: 1597664 - RNA, 19 nt, Artificial Sequence
  Description of Artificial Sequence: Synthetic oligonucleotide
  Antisense strand to SEQ ID NO: 1597663
aguucaccaauaaacacua

SEQ ID NO: 1597665 - RNA, 19 nt, Artificial Sequence
  Description of Artificial Sequence: Synthetic oligonucleotide
  Sense strand starting at position 673 of SEQ ID NO: 1560402
guguuuauuggugaacuug

SEQ ID NO: 1597666 - RNA, 19 nt, Artificial Sequence
  Description of Artificial Sequence: Synthetic oligonucleotide
  Antisense strand to SEQ ID NO: 1597665
caaguucaccaauaaacac

SEQ ID NO: 1597667 - RNA, 19 nt, Artificial Sequence
  Description of Artificial Sequence: Synthetic oligonucleotide
  Sense strand starting at position 682 of SEQ ID NO: 1560402
ggugaacuugaggauguuu

SEQ ID NO: 1597668 - RNA, 19 nt, Artificial Sequence
  Description of Artificial Sequence: Synthetic oligonucleotide
  Antisense strand to SEQ ID NO: 1597667
aaacauccucaaguucacc

SEQ ID NO: 1597669 - RNA, 19 nt, Artificial Sequence
  Description of Artificial Sequence: Synthetic oligonucleotide
  Sense strand starting at position 716 of SEQ ID NO: 1560402
guuucugcuaugggagaaa

SEQ ID NO: 1597670 - RNA, 19 nt, Artificial Sequence
  Description of Artificial Sequence: Synthetic oligonucleotide
  Antisense strand to SEQ ID NO: 1597669
uuucucccauagcagaaac

SEQ ID NO: 1597671 - RNA, 19 nt, Artificial Sequence
  Description of Artificial Sequence: Synthetic oligonucleotide
  Sense strand starting at position 758 of SEQ ID NO: 1560402
gugggaaucugagcccaau

SEQ ID NO: 1597672 - RNA, 19 nt, Artificial Sequence
  Description of Artificial Sequence: Synthetic oligonucleotide
  Antisense strand to SEQ ID NO: 1597671
auugggcucagauucccac

SEQ ID NO: 1597673 - RNA, 19 nt, Artificial Sequence
  Description of Artificial Sequence: Synthetic oligonucleotide
  Sense strand starting at position 933 of SEQ ID NO: 1560402
acugaaucccgagaggcau

SEQ ID NO: 1597674 - RNA, 19 nt, Artificial Sequence
  Description of Artificial Sequence: Synthetic oligonucleotide
  Antisense strand to SEQ ID NO: 1597673
augccucucgggauucagu

SEQ ID NO: 1597675 - RNA, 19 nt, Artificial Sequence
  Description of Artificial Sequence: Synthetic oligonucleotide
  Sense strand starting at position 944 of SEQ ID NO: 1560402
agaggcaugcgcuauaaac

SEQ ID NO: 1597676 - RNA, 19 nt, Artificial Sequence
  Description of Artificial Sequence: Synthetic oligonucleotide
  Antisense strand to SEQ ID NO: 1597675
guuuauagcgcaugccucu

SEQ ID NO: 1597677 - RNA, 19 nt, Artificial Sequence
  Description of Artificial Sequence: Synthetic oligonucleotide
  Sense strand starting at position 1282 of SEQ ID NO: 1560402
ucuguuggccgcucuguaa

SEQ ID NO: 1597678 - RNA, 19 nt, Artificial Sequence
  Description of Artificial Sequence: Synthetic oligonucleotide
  Antisense strand to SEQ ID NO: 1597677
uuacagagcggccaacaga

SEQ ID NO: 1597679 - RNA, 19 nt, Artificial Sequence
  Description of Artificial Sequence: Synthetic oligonucleotide
  Sense strand starting at position 1347 of SEQ ID NO: 1560402
gagcucucgccugcgaagu

SEQ ID NO: 1597680 - RNA, 19 nt, Artificial Sequence
  Description of Artificial Sequence: Synthetic oligonucleotide
  Antisense strand to SEQ ID NO: 1597679
acuucgcaggcgagagcuc

SEQ ID NO: 1597681 - RNA, 19 nt, Artificial Sequence
  Description of Artificial Sequence: Synthetic oligonucleotide
  Sense strand starting at position 1563 of SEQ ID NO: 1560402
gcucuuucuaccgcgugau

SEQ ID NO: 1597682 - RNA, 19 nt, Artificial Sequence
  Description of Artificial Sequence: Synthetic oligonucleotide
  Antisense strand to SEQ ID NO: 1597681
aucacgcgguagaaagagc

SEQ ID NO: 1597683 - RNA, 19 nt, Artificial Sequence
  Description of Artificial Sequence: Synthetic oligonucleotide
  Sense strand starting at position 2550 of SEQ ID NO: 1560402
uggauucuccaguggagug

SEQ ID NO: 1597684 - RNA, 19 nt, Artificial Sequence
  Description of Artificial Sequence: Synthetic oligonucleotide
  Antisense strand to SEQ ID NO: 1597683
cacuccacuggagaaucca

SEQ ID NO: 1597685 - RNA, 19 nt, Artificial Sequence
  Description of Artificial Sequence: Synthetic oligonucleotide
  Sense strand starting at position 2732 of SEQ ID NO: 1560402
caggaagccuugucugacu

SEQ ID NO: 1597686 - RNA, 19 nt, Artificial Sequence
  Description of Artificial Sequence: Synthetic oligonucleotide
  Antisense strand to SEQ ID NO: 1597685
agucagacaaggcuuccug

SEQ ID NO: 1597687 - RNA, 19 nt, Artificial Sequence
  Description of Artificial Sequence: Synthetic oligonucleotide
  Sense strand starting at position 2760 of SEQ ID NO: 1560402
ugaguuaugcuucagugug

SEQ ID NO: 1597688 - RNA, 19 nt, Artificial Sequence
  Description of Artificial Sequence: Synthetic oligonucleotide
  Antisense strand to SEQ ID NO: 1597687
cacacugaagcauaacuca

SEQ ID NO: 1597689 - RNA, 19 nt, Artificial Sequence
  Description of Artificial Sequence: Synthetic oligonucleotide
  Sense strand starting at position 2792 of SEQ ID NO: 1560402
gggcuacacugucuauguu

SEQ ID NO: 1597690 - RNA, 19 nt, Artificial Sequence
  Description of Artificial Sequence: Synthetic oligonucleotide
  Antisense strand to SEQ ID NO: 1597689
aacauagacaguguagccc

SEQ ID NO: 1597691 - RNA, 19 nt, Artificial Sequence
  Description of Artificial Sequence: Synthetic oligonucleotide
  Sense strand starting at position 2901 of SEQ ID NO: 1560402
agggacgucaucuauguca

SEQ ID NO: 1597692 - RNA, 19 nt, Artificial Sequence
  Description of Artificial Sequence: Synthetic oligonucleotide
  Antisense strand to SEQ ID NO: 1597691
ugacauagaugacgucccu

SEQ ID NO: 1597693 - RNA, 19 nt, Artificial Sequence
  Description of Artificial Sequence: Synthetic oligonucleotide
  Sense strand starting at position 2903 of SEQ ID NO: 1560402
ggacgucaucuaugucacu

SEQ ID NO: 1597694 - RNA, 19 nt, Artificial Sequence
  Description of Artificial Sequence: Synthetic oligonucleotide
  Antisense strand to SEQ ID NO: 1597693
agugacauagaugacgucc

SEQ ID NO: 1597695 - RNA, 19 nt, Artificial Sequence
  Description of Artificial Sequence: Synthetic oligonucleotide
  Sense strand starting at position 2904 of SEQ ID NO: 1560402
gacgucaucuaugucacuu

SEQ ID NO: 1597696 - RNA, 19 nt, Artificial Sequence
  Description of Artificial Sequence: Synthetic oligonucleotide
  Antisense strand to SEQ ID NO: 1597695
aagugacauagaugacguc

SEQ ID NO: 1597697 - RNA, 19 nt, Artificial Sequence
  Description of Artificial Sequence: Synthetic oligonucleotide
  Sense strand starting at position 2922 of SEQ ID NO: 1560402
ucuguaucccauugacaag

SEQ ID NO: 1597698 - RNA, 19 nt, Artificial Sequence
  Description of Artificial Sequence: Synthetic oligonucleotide
  Antisense strand to SEQ ID NO: 1597697
cuugucaaugggauacaga

SEQ ID NO: 1597699 - RNA, 19 nt, Artificial Sequence
  Description of Artificial Sequence: Synthetic oligonucleotide
  Sense strand starting at position 2925 of SEQ ID NO: 1560402
guaucccauugacaagaaa

SEQ ID NO: 1597700 - RNA, 19 nt, Artificial Sequence
  Description of Artificial Sequence: Synthetic oligonucleotide
  Antisense strand to SEQ ID NO: 1597699
uuucuugucaaugggauac

SEQ ID NO: 1597701 - RNA, 19 nt, Artificial Sequence
  Description of Artificial Sequence: Synthetic oligonucleotide
  Sense strand starting at position 3259 of SEQ ID NO: 1560402
gcguuagcccaauaaacua

SEQ ID NO: 1597702 - RNA, 19 nt, Artificial Sequence
  Description of Artificial Sequence: Synthetic oligonucleotide
  Antisense strand to SEQ ID NO: 1597701
uaguuuauugggcuaacgc

SEQ ID NO: 1597703 - RNA, 19 nt, Artificial Sequence
  Description of Artificial Sequence: Synthetic oligonucleotide
  Sense strand starting at position 3293 of SEQ ID NO: 1560402
augucaauuccucagguuu

SEQ ID NO: 1597704 - RNA, 19 nt, Artificial Sequence
  Description of Artificial Sequence: Synthetic oligonucleotide
  Antisense strand to SEQ ID NO: 1597703
aaaccugaggaauugacau

SEQ ID NO: 1597705 - RNA, 19 nt, Artificial Sequence
  Description of Artificial Sequence: Synthetic oligonucleotide
  Sense strand starting at position 3311 of SEQ ID NO: 1560402
ucaucugaucgcuaaucuu

SEQ ID NO: 1597706 - RNA, 19 nt, Artificial Sequence
  Description of Artificial Sequence: Synthetic oligonucleotide
  Antisense strand to SEQ ID NO: 1597705
aagauuagcgaucagauga

SEQ ID NO: 1597707 - RNA, 19 nt, Artificial Sequence
  Description of Artificial Sequence: Synthetic oligonucleotide
  Sense strand starting at position 3641 of SEQ ID NO: 1560402
ggcccugaucgccaaucuu

SEQ ID NO: 1597708 - RNA, 19 nt, Artificial Sequence
  Description of Artificial Sequence: Synthetic oligonucleotide
  Antisense strand to SEQ ID NO: 1597707
aagauuggcgaucagggcc

SEQ ID NO: 1597709 - RNA, 19 nt, Artificial Sequence
  Description of Artificial Sequence: Synthetic oligonucleotide
  Sense strand starting at position 3716 of SEQ ID NO: 1560402
ucauguaguuugucaugau

SEQ ID NO: 1597710 - RNA, 19 nt, Artificial Sequence
  Description of Artificial Sequence: Synthetic oligonucleotide
  Antisense strand to SEQ ID NO: 1597709
aucaugacaaacuacauga

SEQ ID NO: 1597711 - RNA, 19 nt, Artificial Sequence
  Description of Artificial Sequence: Synthetic oligonucleotide
  Sense strand starting at position 3720 of SEQ ID NO: 1560402
guaguuugucaugaucuac

SEQ ID NO: 1597712 - RNA, 19 nt, Artificial Sequence
  Description of Artificial Sequence: Synthetic oligonucleotide
  Antisense strand to SEQ ID NO: 1597711
guagaucaugacaaacuac

SEQ ID NO: 1597713 - RNA, 19 nt, Artificial Sequence
  Description of Artificial Sequence: Synthetic oligonucleotide
  Sense strand starting at position 3731 of SEQ ID NO: 1560402
ugaucuacugauugguuua

SEQ ID NO: 1597714 - RNA, 19 nt, Artificial Sequence
  Description of Artificial Sequence: Synthetic oligonucleotide
  Antisense strand to SEQ ID NO: 1597713
uaaaccaaucaguagauca

SEQ ID NO: 1597715 - RNA, 19 nt, Artificial Sequence
  Description of Artificial Sequence: Synthetic oligonucleotide
  Sense strand starting at position 3741 of SEQ ID NO: 1560402
auugguuuauuuguucgau

SEQ ID NO: 1597716 - RNA, 19 nt, Artificial Sequence
  Description of Artificial Sequence: Synthetic oligonucleotide
  Antisense strand to SEQ ID NO: 1597715
aucgaacaaauaaaccaau

SEQ ID NO: 1597717 - RNA, 19 nt, Artificial Sequence
  Description of Artificial Sequence: Synthetic oligonucleotide
  Sense strand starting at position 3742 of SEQ ID NO: 1560402
uugguuuauuuguucgaug

SEQ ID NO: 1597718 - RNA, 19 nt, Artificial Sequence
  Description of Artificial Sequence: Synthetic oligonucleotide
  Antisense strand to SEQ ID NO: 1597717
caucgaacaaauaaaccaa

SEQ ID NO: 1597719 - RNA, 19 nt, Artificial Sequence
  Description of Artificial Sequence: Synthetic oligonucleotide
  Sense strand starting at position 3743 of SEQ ID NO: 1560402
ugguuuauuuguucgaugu

SEQ ID NO: 1597720 - RNA, 19 nt, Artificial Sequence
  Description of Artificial Sequence: Synthetic oligonucleotide
  Antisense strand to SEQ ID NO: 1597719
acaucgaacaaauaaacca

SEQ ID NO: 1597721 - RNA, 19 nt, Artificial Sequence
  Description of Artificial Sequence: Synthetic oligonucleotide
  Sense strand starting at position 3744 of SEQ ID NO: 1560402
gguuuauuuguucgauguc

SEQ ID NO: 1597722 - RNA, 19 nt, Artificial Sequence
  Description of Artificial Sequence: Synthetic oligonucleotide
  Antisense strand to SEQ ID NO: 1597721
gacaucgaacaaauaaacc

SEQ ID NO: 1597723 - RNA, 19 nt, Artificial Sequence
  Description of Artificial Sequence: Synthetic oligonucleotide
  Sense strand starting at position 3861 of SEQ ID NO: 1560402
augaacgucugacaaagaa

SEQ ID NO: 1597724 - RNA, 19 nt, Artificial Sequence
  Description of Artificial Sequence: Synthetic oligonucleotide
  Antisense strand to SEQ ID NO: 1597723
uucuuugucagacguucau

SEQ ID NO: 1597725 - RNA, 19 nt, Artificial Sequence
  Description of Artificial Sequence: Synthetic oligonucleotide
  Sense strand starting at position 242 of SEQ ID NO: 1560403
ccagcugaacucugaguuu

SEQ ID NO: 1597726 - RNA, 19 nt, Artificial Sequence
  Description of Artificial Sequence: Synthetic oligonucleotide
  Antisense strand to SEQ ID NO: 1597725
aaacucagaguucagcugg

SEQ ID NO: 1597727 - RNA, 19 nt, Artificial Sequence
  Description of Artificial Sequence: Synthetic oligonucleotide
  Sense strand starting at position 245 of SEQ ID NO: 1560403
gcugaacucugaguuucuu

SEQ ID NO: 1597728 - RNA, 19 nt, Artificial Sequence
  Description of Artificial Sequence: Synthetic oligonucleotide
  Antisense strand to SEQ ID NO: 1597727
aagaaacucagaguucagc

SEQ ID NO: 1597729 - RNA, 19 nt, Artificial Sequence
  Description of Artificial Sequence: Synthetic oligonucleotide
  Sense strand starting at position 382 of SEQ ID NO: 1560403
ugcagauucccaugaacau

SEQ ID NO: 1597730 - RNA, 19 nt, Artificial Sequence
  Description of Artificial Sequence: Synthetic oligonucleotide
  Antisense strand to SEQ ID NO: 1597729
auguucaugggaaucugca

SEQ ID NO: 1597731 - RNA, 19 nt, Artificial Sequence
  Description of Artificial Sequence: Synthetic oligonucleotide
  Sense strand starting at position 502 of SEQ ID NO: 1560403
aaaggagacuuggaccuau

SEQ ID NO: 1597732 - RNA, 19 nt, Artificial Sequence
  Description of Artificial Sequence: Synthetic oligonucleotide
  Antisense strand to SEQ ID NO: 1597731
auagguccaagucuccuuu

SEQ ID NO: 1597733 - RNA, 19 nt, Artificial Sequence
  Description of Artificial Sequence: Synthetic oligonucleotide
  Sense strand starting at position 639 of SEQ ID NO: 1560403
cuaggaggcuuugucaaca

SEQ ID NO: 1597734 - RNA, 19 nt, Artificial Sequence
  Description of Artificial Sequence: Synthetic oligonucleotide
  Antisense strand to SEQ ID NO: 1597733
uguugacaaagccuccuag

SEQ ID NO: 1597735 - RNA, 19 nt, Artificial Sequence
  Description of Artificial Sequence: Synthetic oligonucleotide
  Sense strand starting at position 709 of SEQ ID NO: 1560403
accagaugaucucugaagu

SEQ ID NO: 1597736 - RNA, 19 nt, Artificial Sequence
  Description of Artificial Sequence: Synthetic oligonucleotide
  Antisense strand to SEQ ID NO: 1597735
acuucagagaucaucuggu

SEQ ID NO: 1597737 - RNA, 19 nt, Artificial Sequence
  Description of Artificial Sequence: Synthetic oligonucleotide
  Sense strand starting at position 710 of SEQ ID NO: 1560403
ccagaugaucucugaaguc

SEQ ID NO: 1597738 - RNA, 19 nt, Artificial Sequence
  Description of Artificial Sequence: Synthetic oligonucleotide
  Antisense strand to SEQ ID NO: 1597737
gacuucagagaucaucugg

SEQ ID NO: 1597739 - RNA, 19 nt, Artificial Sequence
  Description of Artificial Sequence: Synthetic oligonucleotide
  Sense strand starting at position 719 of SEQ ID NO: 1560403
cucugaaguccucaggauc

SEQ ID NO: 1597740 - RNA, 19 nt, Artificial Sequence
  Description of Artificial Sequence: Synthetic oligonucleotide
  Antisense strand to SEQ ID NO: 1597739
gauccugaggacuucagag

SEQ ID NO: 1597741 - RNA, 19 nt, Artificial Sequence
  Description of Artificial Sequence: Synthetic oligonucleotide
  Sense strand starting at position 738 of SEQ ID NO: 1560403
ccaacaguuuggguuccaa

SEQ ID NO: 1597742 - RNA, 19 nt, Artificial Sequence
  Description of Artificial Sequence: Synthetic oligonucleotide
  Antisense strand to SEQ ID NO: 1597741
uuggaacccaaacuguugg

SEQ ID NO: 1597743 - RNA, 19 nt, Artificial Sequence
  Description of Artificial Sequence: Synthetic oligonucleotide
  Sense strand starting at position 830 of SEQ ID NO: 1560403
ccagcugucccuuaugaac

SEQ ID NO: 1597744 - RNA, 19 nt, Artificial Sequence
  Description of Artificial Sequence: Synthetic oligonucleotide
  Antisense strand to SEQ ID NO: 1597743
guucauaagggacagcugg

SEQ ID NO: 1597745 - RNA, 19 nt, Artificial Sequence
  Description of Artificial Sequence: Synthetic oligonucleotide
  Sense strand starting at position 918 of SEQ ID NO: 1560403
cacagaggaguuugucaga

SEQ ID NO: 1597746 - RNA, 19 nt, Artificial Sequence
  Description of Artificial Sequence: Synthetic oligonucleotide
  Antisense strand to SEQ ID NO: 1597745
ucugacaaacuccucugug

SEQ ID NO: 1597747 - RNA, 19 nt, Artificial Sequence
  Description of Artificial Sequence: Synthetic oligonucleotide
  Sense strand starting at position 975 of SEQ ID NO: 1560403
gugggugucugggcaugaa

SEQ ID NO: 1597748 - RNA, 19 nt, Artificial Sequence
  Description of Artificial Sequence: Synthetic oligonucleotide
  Antisense strand to SEQ ID NO: 1597747
uucaugcccagacacccac

SEQ ID NO: 1597749 - RNA, 19 nt, Artificial Sequence
  Description of Artificial Sequence: Synthetic oligonucleotide
  Sense strand starting at position 978 of SEQ ID NO: 1560403
ggugucugggcaugaacau

SEQ ID NO: 1597750 - RNA, 19 nt, Artificial Sequence
  Description of Artificial Sequence: Synthetic oligonucleotide
  Antisense strand to SEQ ID NO: 1597749
auguucaugcccagacacc

SEQ ID NO: 1597751 - RNA, 19 nt, Artificial Sequence
  Description of Artificial Sequence: Synthetic oligonucleotide
  Sense strand starting at position 979 of SEQ ID NO: 1560403
gugucugggcaugaacauu

SEQ ID NO: 1597752 - RNA, 19 nt, Artificial Sequence
  Description of Artificial Sequence: Synthetic oligonucleotide
  Antisense strand to SEQ ID NO: 1597751
aauguucaugcccagacac

SEQ ID NO: 1597753 - RNA, 19 nt, Artificial Sequence
  Description of Artificial Sequence: Synthetic oligonucleotide
  Sense strand starting at position 1033 of SEQ ID NO: 1560403
aggugcugggucugaauuu

SEQ ID NO: 1597754 - RNA, 19 nt, Artificial Sequence
  Description of Artificial Sequence: Synthetic oligonucleotide
  Antisense strand to SEQ ID NO: 1597753
aaauucagacccagcaccu

SEQ ID NO: 1597755 - RNA, 19 nt, Artificial Sequence
  Description of Artificial Sequence: Synthetic oligonucleotide
  Sense strand starting at position 1094 of SEQ ID NO: 1560403
gugguagauugggucuuau

SEQ ID NO: 1597756 - RNA, 19 nt, Artificial Sequence
  Description of Artificial Sequence: Synthetic oligonucleotide
  Antisense strand to SEQ ID NO: 1597755
auaagacccaaucuaccac

SEQ ID NO: 1597757 - RNA, 19 nt, Artificial Sequence
  Description of Artificial Sequence: Synthetic oligonucleotide
  Sense strand starting at position 1147 of SEQ ID NO: 1560403
aaaggugaauaugaggaaa

SEQ ID NO: 1597758 - RNA, 19 nt, Artificial Sequence
  Description of Artificial Sequence: Synthetic oligonucleotide
  Antisense strand to SEQ ID NO: 1597757
uuuccucauauucaccuuu

SEQ ID NO: 1597759 - RNA, 19 nt, Artificial Sequence
  Description of Artificial Sequence: Synthetic oligonucleotide
  Sense strand starting at position 1149 of SEQ ID NO: 1560403
aggugaauaugaggaaagu

SEQ ID NO: 1597760 - RNA, 19 nt, Artificial Sequence
  Description of Artificial Sequence: Synthetic oligonucleotide
  Antisense strand to SEQ ID NO: 1597759
acuuuccucauauucaccu

SEQ ID NO: 1597761 - RNA, 19 nt, Artificial Sequence
  Description of Artificial Sequence: Synthetic oligonucleotide
  Sense strand starting at position 1158 of SEQ ID NO: 1560403
ugaggaaagucacucuuga

SEQ ID NO: 1597762 - RNA, 19 nt, Artificial Sequence
  Description of Artificial Sequence: Synthetic oligonucleotide
  Antisense strand to SEQ ID NO: 1597761
ucaagagugacuuuccuca

SEQ ID NO: 1597763 - RNA, 19 nt, Artificial Sequence
  Description of Artificial Sequence: Synthetic oligonucleotide
  Sense strand starting at position 1174 of SEQ ID NO: 1560403
ugaaguaaucaguguugac

SEQ ID NO: 1597764 - RNA, 19 nt, Artificial Sequence
  Description of Artificial Sequence: Synthetic oligonucleotide
  Antisense strand to SEQ ID NO: 1597763
gucaacacugauuacuuca

SEQ ID NO: 1597765 - RNA, 19 nt, Artificial Sequence
  Description of Artificial Sequence: Synthetic oligonucleotide
  Sense strand starting at position 1238 of SEQ ID NO: 1560403
cauggagucgagugagcau

SEQ ID NO: 1597766 - RNA, 19 nt, Artificial Sequence
  Description of Artificial Sequence: Synthetic oligonucleotide
  Antisense strand to SEQ ID NO: 1597765
augcucacucgacuccaug

SEQ ID NO: 1597767 - RNA, 19 nt, Artificial Sequence
  Description of Artificial Sequence: Synthetic oligonucleotide
  Sense strand starting at position 1393 of SEQ ID NO: 1560403
acucaagugucccuacaaa

SEQ ID NO: 1597768 - RNA, 19 nt, Artificial Sequence
  Description of Artificial Sequence: Synthetic oligonucleotide
  Antisense strand to SEQ ID NO: 1597767
uuuguagggacacuugagu

SEQ ID NO: 1597769 - RNA, 19 nt, Artificial Sequence
  Description of Artificial Sequence: Synthetic oligonucleotide
  Sense strand starting at position 1449 of SEQ ID NO: 1560403
guggcaaaggccuacugau

SEQ ID NO: 1597770 - RNA, 19 nt, Artificial Sequence
  Description of Artificial Sequence: Synthetic oligonucleotide
  Antisense strand to SEQ ID NO: 1597769
aucaguaggccuuugccac

SEQ ID NO: 1597771 - RNA, 19 nt, Artificial Sequence
  Description of Artificial Sequence: Synthetic oligonucleotide
  Sense strand starting at position 2164 of SEQ ID NO: 1560403
ucaucacugccuugaggaa

SEQ ID NO: 1597772 - RNA, 19 nt, Artificial Sequence
  Description of Artificial Sequence: Synthetic oligonucleotide
  Antisense strand to SEQ ID NO: 1597771
uuccucaaggcagugauga

SEQ ID NO: 1597773 - RNA, 19 nt, Artificial Sequence
  Description of Artificial Sequence: Synthetic oligonucleotide
  Sense strand starting at position 2214 of SEQ ID NO: 1560403
cacuguguggcugaacauu

SEQ ID NO: 1597774 - RNA, 19 nt, Artificial Sequence
  Description of Artificial Sequence: Synthetic oligonucleotide
  Antisense strand to SEQ ID NO: 1597773
aauguucagccacacagug

SEQ ID NO: 1597775 - RNA, 19 nt, Artificial Sequence
  Description of Artificial Sequence: Synthetic oligonucleotide
  Sense strand starting at position 2306 of SEQ ID NO: 1560403
ggcugcuuaucagcaagga

SEQ ID NO: 1597776 - RNA, 19 nt, Artificial Sequence
  Description of Artificial Sequence: Synthetic oligonucleotide
  Antisense strand to SEQ ID NO: 1597775
uccuugcugauaagcagcc

SEQ ID NO: 1597777 - RNA, 19 nt, Artificial Sequence
  Description of Artificial Sequence: Synthetic oligonucleotide
  Sense strand starting at position 2307 of SEQ ID NO: 1560403
gcugcuuaucagcaaggaa

SEQ ID NO: 1597778 - RNA, 19 nt, Artificial Sequence
  Description of Artificial Sequence: Synthetic oligonucleotide
  Antisense strand to SEQ ID NO: 1597777
uuccuugcugauaagcagc

SEQ ID NO: 1597779 - RNA, 19 nt, Artificial Sequence
  Description of Artificial Sequence: Synthetic oligonucleotide
  Sense strand starting at position 2394 of SEQ ID NO: 1560403
cugcaaugucuggaaucca

SEQ ID NO: 1597780 - RNA, 19 nt, Artificial Sequence
  Description of Artificial Sequence: Synthetic oligonucleotide
  Antisense strand to SEQ ID NO: 1597779
uggauuccagacauugcag

SEQ ID NO: 1597781 - RNA, 19 nt, Artificial Sequence
  Description of Artificial Sequence: Synthetic oligonucleotide
  Sense strand starting at position 2576 of SEQ ID NO: 1560403
uuugguugccagugaggua

SEQ ID NO: 1597782 - RNA, 19 nt, Artificial Sequence
  Description of Artificial Sequence: Synthetic oligonucleotide
  Antisense strand to SEQ ID NO: 1597781
uaccucacuggcaaccaaa

SEQ ID NO: 1597783 - RNA, 19 nt, Artificial Sequence
  Description of Artificial Sequence: Synthetic oligonucleotide
  Sense strand starting at position 2589 of SEQ ID NO: 1560403
gagguacacuuugaguaga

SEQ ID NO: 1597784 - RNA, 19 nt, Artificial Sequence
  Description of Artificial Sequence: Synthetic oligonucleotide
  Antisense strand to SEQ ID NO: 1597783
ucuacucaaaguguaccuc

SEQ ID NO: 1597785 - RNA, 19 nt, Artificial Sequence
  Description of Artificial Sequence: Synthetic oligonucleotide
  Sense strand starting at position 2591 of SEQ ID NO: 1560403
gguacacuuugaguagagu

SEQ ID NO: 1597786 - RNA, 19 nt, Artificial Sequence
  Description of Artificial Sequence: Synthetic oligonucleotide
  Antisense strand to SEQ ID NO: 1597785
acucuacucaaaguguacc

SEQ ID NO: 1597787 - RNA, 19 nt, Artificial Sequence
  Description of Artificial Sequence: Synthetic oligonucleotide
  Sense strand starting at position 2750 of SEQ ID NO: 1560403
caggauucagucggagaga

SEQ ID NO: 1597788 - RNA, 19 nt, Artificial Sequence
  Description of Artificial Sequence: Synthetic oligonucleotide
  Antisense strand to SEQ ID NO: 1597787
ucucuccgacugaauccug

SEQ ID NO: 1597789 - RNA, 19 nt, Artificial Sequence
  Description of Artificial Sequence: Synthetic oligonucleotide
  Sense strand starting at position 3015 of SEQ ID NO: 1560403
guguuuaccagaggacaaa

SEQ ID NO: 1597790 - RNA, 19 nt, Artificial Sequence
  Description of Artificial Sequence: Synthetic oligonucleotide
  Antisense strand to SEQ ID NO: 1597789
uuuguccucugguaaacac

SEQ ID NO: 1597791 - RNA, 19 nt, Artificial Sequence
  Description of Artificial Sequence: Synthetic oligonucleotide
  Sense strand starting at position 3034 of SEQ ID NO: 1560403
agagaaauuuagcagcuga

SEQ ID NO: 1597792 - RNA, 19 nt, Artificial Sequence
  Description of Artificial Sequence: Synthetic oligonucleotide
  Antisense strand to SEQ ID NO: 1597791
ucagcugcuaaauuucucu

SEQ ID NO: 1597793 - RNA, 19 nt, Artificial Sequence
  Description of Artificial Sequence: Synthetic oligonucleotide
  Sense strand starting at position 3058 of SEQ ID NO: 1560403
aguggaauucccgaagugu

SEQ ID NO: 1597794 - RNA, 19 nt, Artificial Sequence
  Description of Artificial Sequence: Synthetic oligonucleotide
  Antisense strand to SEQ ID NO: 1597793
acacuucgggaauuccacu

SEQ ID NO: 1597795 - RNA, 19 nt, Artificial Sequence
  Description of Artificial Sequence: Synthetic oligonucleotide
  Sense strand starting at position 3141 of SEQ ID NO: 1560403
uggcaugcucuaugcugaa

SEQ ID NO: 1597796 - RNA, 19 nt, Artificial Sequence
  Description of Artificial Sequence: Synthetic oligonucleotide
  Antisense strand to SEQ ID NO: 1597795
uucagcauagagcaugcca

SEQ ID NO: 1597797 - RNA, 19 nt, Artificial Sequence
  Description of Artificial Sequence: Synthetic oligonucleotide
  Sense strand starting at position 3167 of SEQ ID NO: 1560403
gguccuaucuguguccuca

SEQ ID NO: 1597798 - RNA, 19 nt, Artificial Sequence
  Description of Artificial Sequence: Synthetic oligonucleotide
  Antisense strand to SEQ ID NO: 1597797
ugaggacacagauaggacc

SEQ ID NO: 1597799 - RNA, 19 nt, Artificial Sequence
  Description of Artificial Sequence: Synthetic oligonucleotide
  Sense strand starting at position 3572 of SEQ ID NO: 1560403
ccaggaaaucccuggugcu

SEQ ID NO: 1597800 - RNA, 19 nt, Artificial Sequence
  Description of Artificial Sequence: Synthetic oligonucleotide
  Antisense strand to SEQ ID NO: 1597799
agcaccagggauuuccugg

SEQ ID NO: 1597801 - RNA, 19 nt, Artificial Sequence
  Description of Artificial Sequence: Synthetic oligonucleotide
  Sense strand starting at position 3573 of SEQ ID NO: 1560403
caggaaaucccuggugcuu

SEQ ID NO: 1597802 - RNA, 19 nt, Artificial Sequence
  Description of Artificial Sequence: Synthetic oligonucleotide
  Antisense strand to SEQ ID NO: 1597801
aagcaccagggauuuccug

SEQ ID NO: 1597803 - RNA, 19 nt, Artificial Sequence
  Description of Artificial Sequence: Synthetic oligonucleotide
  Sense strand starting at position 3883 of SEQ ID NO: 1560403
ggucgaauguggaggucau

SEQ ID NO: 1597804 - RNA, 19 nt, Artificial Sequence
  Description of Artificial Sequence: Synthetic oligonucleotide
  Antisense strand to SEQ ID NO: 1597803
augaccuccacauucgacc

SEQ ID NO: 1597805 - RNA, 19 nt, Artificial Sequence
  Description of Artificial Sequence: Synthetic oligonucleotide
  Sense strand starting at position 57 of SEQ ID NO: 1560404
gcaggauccauagagcauu

SEQ ID NO: 1597806 - RNA, 19 nt, Artificial Sequence
  Description of Artificial Sequence: Synthetic oligonucleotide
  Antisense strand to SEQ ID NO: 1597805
aaugcucuauggauccugc

SEQ ID NO: 1597807 - RNA, 19 nt, Artificial Sequence
  Description of Artificial Sequence: Synthetic oligonucleotide
  Sense strand starting at position 97 of SEQ ID NO: 1560404
aaagaaggauacugguaaa

SEQ ID NO: 1597808 - RNA, 19 nt, Artificial Sequence
  Description of Artificial Sequence: Synthetic oligonucleotide
  Antisense strand to SEQ ID NO: 1597807
uuuaccaguauccuucuuu

SEQ ID NO: 1597809 - RNA, 19 nt, Artificial Sequence
  Description of Artificial Sequence: Synthetic oligonucleotide
  Sense strand starting at position 100 of SEQ ID NO: 1560404
gaaggauacugguaaagua

SEQ ID NO: 1597810 - RNA, 19 nt, Artificial Sequence
  Description of Artificial Sequence: Synthetic oligonucleotide
  Antisense strand to SEQ ID NO: 1597809
uacuuuaccaguauccuuc

SEQ ID NO: 1597811 - RNA, 19 nt, Artificial Sequence
  Description of Artificial Sequence: Synthetic oligonucleotide
  Sense strand starting at position 580 of SEQ ID NO: 1560404
caaggcuuccuccgagaag

SEQ ID NO: 1597812 - RNA, 19 nt, Artificial Sequence
  Description of Artificial Sequence: Synthetic oligonucleotide
  Antisense strand to SEQ ID NO: 1597811
cuucucggaggaagccuug

SEQ ID NO: 1597813 - RNA, 19 nt, Artificial Sequence
  Description of Artificial Sequence: Synthetic oligonucleotide
  Sense strand starting at position 598 of SEQ ID NO: 1560404
gcagcaaugucuucugaaa

SEQ ID NO: 1597814 - RNA, 19 nt, Artificial Sequence
  Description of Artificial Sequence: Synthetic oligonucleotide
  Antisense strand to SEQ ID NO: 1597813
uuucagaagacauugcugc

SEQ ID NO: 1597815 - RNA, 19 nt, Artificial Sequence
  Description of Artificial Sequence: Synthetic oligonucleotide
  Sense strand starting at position 684 of SEQ ID NO: 1560404
aguacacccugauagaauc

SEQ ID NO: 1597816 - RNA, 19 nt, Artificial Sequence
  Description of Artificial Sequence: Synthetic oligonucleotide
  Antisense strand to SEQ ID NO: 1597815
gauucuaucaggguguacu

SEQ ID NO: 1597817 - RNA, 19 nt, Artificial Sequence
  Description of Artificial Sequence: Synthetic oligonucleotide
  Sense strand starting at position 706 of SEQ ID NO: 1560404
ggucucuccuuagaggagu

SEQ ID NO: 1597818 - RNA, 19 nt, Artificial Sequence
  Description of Artificial Sequence: Synthetic oligonucleotide
  Antisense strand to SEQ ID NO: 1597817
acuccucuaaggagagacc

SEQ ID NO: 1597819 - RNA, 19 nt, Artificial Sequence
  Description of Artificial Sequence: Synthetic oligonucleotide
  Sense strand starting at position 712 of SEQ ID NO: 1560404
uccuuagaggagugaggau

SEQ ID NO: 1597820 - RNA, 19 nt, Artificial Sequence
  Description of Artificial Sequence: Synthetic oligonucleotide
  Antisense strand to SEQ ID NO: 1597819
auccucacuccucuaagga

SEQ ID NO: 1597821 - RNA, 19 nt, Artificial Sequence
  Description of Artificial Sequence: Synthetic oligonucleotide
  Sense strand starting at position 721 of SEQ ID NO: 1560404
gagugaggauagggucuua

SEQ ID NO: 1597822 - RNA, 19 nt, Artificial Sequence
  Description of Artificial Sequence: Synthetic oligonucleotide
  Antisense strand to SEQ ID NO: 1597821
uaagacccuauccucacuc

SEQ ID NO: 1597823 - RNA, 19 nt, Artificial Sequence
  Description of Artificial Sequence: Synthetic oligonucleotide
  Sense strand starting at position 726 of SEQ ID NO: 1560404
aggauagggucuuagagag

SEQ ID NO: 1597824 - RNA, 19 nt, Artificial Sequence
  Description of Artificial Sequence: Synthetic oligonucleotide
  Antisense strand to SEQ ID NO: 1597823
cucucuaagacccuauccu

SEQ ID NO: 1597825 - RNA, 19 nt, Artificial Sequence
  Description of Artificial Sequence: Synthetic oligonucleotide
  Sense strand starting at position 787 of SEQ ID NO: 1560404
gagggucucucagagagau

SEQ ID NO: 1597826 - RNA, 19 nt, Artificial Sequence
  Description of Artificial Sequence: Synthetic oligonucleotide
  Antisense strand to SEQ ID NO: 1597825
aucucucugagagacccuc

SEQ ID NO: 1597827 - RNA, 19 nt, Artificial Sequence
  Description of Artificial Sequence: Synthetic oligonucleotide
  Sense strand starting at position 966 of SEQ ID NO: 1560404
ucagauaagcgggaauucu

SEQ ID NO: 1597828 - RNA, 19 nt, Artificial Sequence
  Description of Artificial Sequence: Synthetic oligonucleotide
  Antisense strand to SEQ ID NO: 1597827
agaauucccgcuuaucuga

SEQ ID NO: 1597829 - RNA, 19 nt, Artificial Sequence
  Description of Artificial Sequence: Synthetic oligonucleotide
  Sense strand starting at position 1010 of SEQ ID NO: 1560404
gggaguuaguuccugucaa

SEQ ID NO: 1597830 - RNA, 19 nt, Artificial Sequence
  Description of Artificial Sequence: Synthetic oligonucleotide
  Antisense strand to SEQ ID NO: 1597829
uugacaggaacuaacuccc

SEQ ID NO: 1597831 - RNA, 19 nt, Artificial Sequence
  Description of Artificial Sequence: Synthetic oligonucleotide
  Sense strand starting at position 1011 of SEQ ID NO: 1560404
ggaguuaguuccugucaaa

SEQ ID NO: 1597832 - RNA, 19 nt, Artificial Sequence
  Description of Artificial Sequence: Synthetic oligonucleotide
  Antisense strand to SEQ ID NO: 1597831
uuugacaggaacuaacucc

SEQ ID NO: 1597833 - RNA, 19 nt, Artificial Sequence
  Description of Artificial Sequence: Synthetic oligonucleotide
  Sense strand starting at position 1597 of SEQ ID NO: 1560404
aguaaacucggccaaggua

SEQ ID NO: 1597834 - RNA, 19 nt, Artificial Sequence
  Description of Artificial Sequence: Synthetic oligonucleotide
  Antisense strand to SEQ ID NO: 1597833
uaccuuggccgaguuuacu

SEQ ID NO: 1597835 - RNA, 19 nt, Artificial Sequence
  Description of Artificial Sequence: Synthetic oligonucleotide
  Sense strand starting at position 2065 of SEQ ID NO: 1560404
cgcgucucuccgagugaag

SEQ ID NO: 1597836 - RNA, 19 nt, Artificial Sequence
  Description of Artificial Sequence: Synthetic oligonucleotide
  Antisense strand to SEQ ID NO: 1597835
cuucacucggagagacgcg

SEQ ID NO: 1597837 - RNA, 19 nt, Artificial Sequence
  Description of Artificial Sequence: Synthetic oligonucleotide
  Sense strand starting at position 2260 of SEQ ID NO: 1560404
gcauccugccaaugguaga

SEQ ID NO: 1597838 - RNA, 19 nt, Artificial Sequence
  Description of Artificial Sequence: Synthetic oligonucleotide
  Antisense strand to SEQ ID NO: 1597837
ucuaccauuggcaggaugc

SEQ ID NO: 1597839 - RNA, 19 nt, Artificial Sequence
  Description of Artificial Sequence: Synthetic oligonucleotide
  Sense strand starting at position 2647 of SEQ ID NO: 1560404
ccucucuauccaggagaau

SEQ ID NO: 1597840 - RNA, 19 nt, Artificial Sequence
  Description of Artificial Sequence: Synthetic oligonucleotide
  Antisense strand to SEQ ID NO: 1597839
auucuccuggauagagagg

SEQ ID NO: 1597841 - RNA, 19 nt, Artificial Sequence
  Description of Artificial Sequence: Synthetic oligonucleotide
  Sense strand starting at position 2656 of SEQ ID NO: 1560404
ccaggagaaucuuggagau

SEQ ID NO: 1597842 - RNA, 19 nt, Artificial Sequence
  Description of Artificial Sequence: Synthetic oligonucleotide
  Antisense strand to SEQ ID NO: 1597841
aucuccaagauucuccugg

SEQ ID NO: 1597843 - RNA, 19 nt, Artificial Sequence
  Description of Artificial Sequence: Synthetic oligonucleotide
  Sense strand starting at position 2697 of SEQ ID NO: 1560404
agaagacucugcuucggga

SEQ ID NO: 1597844 - RNA, 19 nt, Artificial Sequence
  Description of Artificial Sequence: Synthetic oligonucleotide
  Antisense strand to SEQ ID NO: 1597843
ucccgaagcagagucuucu

SEQ ID NO: 1597845 - RNA, 19 nt, Artificial Sequence
  Description of Artificial Sequence: Synthetic oligonucleotide
  Sense strand starting at position 2699 of SEQ ID NO: 1560404
aagacucugcuucgggauu

SEQ ID NO: 1597846 - RNA, 19 nt, Artificial Sequence
  Description of Artificial Sequence: Synthetic oligonucleotide
  Antisense strand to SEQ ID NO: 1597845
aaucccgaagcagagucuu

SEQ ID NO: 1597847 - RNA, 19 nt, Artificial Sequence
  Description of Artificial Sequence: Synthetic oligonucleotide
  Sense strand starting at position 2741 of SEQ ID NO: 1560404
ggaggaucuucggaaaucu

SEQ ID NO: 1597848 - RNA, 19 nt, Artificial Sequence
  Description of Artificial Sequence: Synthetic oligonucleotide
  Antisense strand to SEQ ID NO: 1597847
agauuuccgaagauccucc

SEQ ID NO: 1597849 - RNA, 19 nt, Artificial Sequence
  Description of Artificial Sequence: Synthetic oligonucleotide
  Sense strand starting at position 2817 of SEQ ID NO: 1560404
aggacaauugccgggauca

SEQ ID NO: 1597850 - RNA, 19 nt, Artificial Sequence
  Description of Artificial Sequence: Synthetic oligonucleotide
  Antisense strand to SEQ ID NO: 1597849
ugaucccggcaauuguccu

SEQ ID NO: 1597851 - RNA, 19 nt, Artificial Sequence
  Description of Artificial Sequence: Synthetic oligonucleotide
  Sense strand starting at position 2818 of SEQ ID NO: 1560404
ggacaauugccgggaucac

SEQ ID NO: 1597852 - RNA, 19 nt, Artificial Sequence
  Description of Artificial Sequence: Synthetic oligonucleotide
  Antisense strand to SEQ ID NO: 1597851
gugaucccggcaauugucc

SEQ ID NO: 1597853 - RNA, 19 nt, Artificial Sequence
  Description of Artificial Sequence: Synthetic oligonucleotide
  Sense strand starting at position 2830 of SEQ ID NO: 1560404
ggaucacgauuauguugua

SEQ ID NO: 1597854 - RNA, 19 nt, Artificial Sequence
  Description of Artificial Sequence: Synthetic oligonucleotide
  Antisense strand to SEQ ID NO: 1597853
uacaacauaaucgugaucc

SEQ ID NO: 1597855 - RNA, 19 nt, Artificial Sequence
  Description of Artificial Sequence: Synthetic oligonucleotide
  Sense strand starting at position 2833 of SEQ ID NO: 1560404
ucacgauuauguuguagau

SEQ ID NO: 1597856 - RNA, 19 nt, Artificial Sequence
  Description of Artificial Sequence: Synthetic oligonucleotide
  Antisense strand to SEQ ID NO: 1597855
aucuacaacauaaucguga

SEQ ID NO: 1597857 - RNA, 19 nt, Artificial Sequence
  Description of Artificial Sequence: Synthetic oligonucleotide
  Sense strand starting at position 2835 of SEQ ID NO: 1560404
acgauuauguuguagauuc

SEQ ID NO: 1597858 - RNA, 19 nt, Artificial Sequence
  Description of Artificial Sequence: Synthetic oligonucleotide
  Antisense strand to SEQ ID NO: 1597857
gaaucuacaacauaaucgu

SEQ ID NO: 1597859 - RNA, 19 nt, Artificial Sequence
  Description of Artificial Sequence: Synthetic oligonucleotide
  Sense strand starting at position 2862 of SEQ ID NO: 1560404
agcucuguuuccuaagaaa

SEQ ID NO: 1597860 - RNA, 19 nt, Artificial Sequence
  Description of Artificial Sequence: Synthetic oligonucleotide
  Antisense strand to SEQ ID NO: 1597859
uuucuuaggaaacagagcu

SEQ ID NO: 1597861 - RNA, 19 nt, Artificial Sequence
  Description of Artificial Sequence: Synthetic oligonucleotide
  Sense strand starting at position 2901 of SEQ ID NO: 1560404
uaaggagcauuuggagaau

SEQ ID NO: 1597862 - RNA, 19 nt, Artificial Sequence
  Description of Artificial Sequence: Synthetic oligonucleotide
  Antisense strand to SEQ ID NO: 1597861
auucuccaaaugcuccuua

SEQ ID NO: 1597863 - RNA, 19 nt, Artificial Sequence
  Description of Artificial Sequence: Synthetic oligonucleotide
  Sense strand starting at position 3003 of SEQ ID NO: 1560404
ccuccuuuaucugaggaaa

SEQ ID NO: 1597864 - RNA, 19 nt, Artificial Sequence
  Description of Artificial Sequence: Synthetic oligonucleotide
  Antisense strand to SEQ ID NO: 1597863
uuuccucagauaaaggagg

SEQ ID NO: 1597865 - RNA, 19 nt, Artificial Sequence
  Description of Artificial Sequence: Synthetic oligonucleotide
  Sense strand starting at position 3005 of SEQ ID NO: 1560404
uccuuuaucugaggaaagu

SEQ ID NO: 1597866 - RNA, 19 nt, Artificial Sequence
  Description of Artificial Sequence: Synthetic oligonucleotide
  Antisense strand to SEQ ID NO: 1597865
acuuuccucagauaaagga

SEQ ID NO: 1597867 - RNA, 19 nt, Artificial Sequence
  Description of Artificial Sequence: Synthetic oligonucleotide
  Sense strand starting at position 3043 of SEQ ID NO: 1560404
ccaccuucguuucugaaga

SEQ ID NO: 1597868 - RNA, 19 nt, Artificial Sequence
  Description of Artificial Sequence: Synthetic oligonucleotide
  Antisense strand to SEQ ID NO: 1597867
ucuucagaaacgaaggugg

SEQ ID NO: 1597869 - RNA, 19 nt, Artificial Sequence
  Description of Artificial Sequence: Synthetic oligonucleotide
  Sense strand starting at position 3044 of SEQ ID NO: 1560404
caccuucguuucugaagau

SEQ ID NO: 1597870 - RNA, 19 nt, Artificial Sequence
  Description of Artificial Sequence: Synthetic oligonucleotide
  Antisense strand to SEQ ID NO: 1597869
aucuucagaaacgaaggug

SEQ ID NO: 1597871 - RNA, 19 nt, Artificial Sequence
  Description of Artificial Sequence: Synthetic oligonucleotide
  Sense strand starting at position 3045 of SEQ ID NO: 1560404
accuucguuucugaagaua

SEQ ID NO: 1597872 - RNA, 19 nt, Artificial Sequence
  Description of Artificial Sequence: Synthetic oligonucleotide
  Antisense strand to SEQ ID NO: 1597871
uaucuucagaaacgaaggu

SEQ ID NO: 1597873 - RNA, 19 nt, Artificial Sequence
  Description of Artificial Sequence: Synthetic oligonucleotide
  Sense strand starting at position 3048 of SEQ ID NO: 1560404
uucguuucugaagauaucu

SEQ ID NO: 1597874 - RNA, 19 nt, Artificial Sequence
  Description of Artificial Sequence: Synthetic oligonucleotide
  Antisense strand to SEQ ID NO: 1597873
agauaucuucagaaacgaa

SEQ ID NO: 1597875 - RNA, 19 nt, Artificial Sequence
  Description of Artificial Sequence: Synthetic oligonucleotide
  Sense strand starting at position 3102 of SEQ ID NO: 1560404
cgaggaauuugggacuuca

SEQ ID NO: 1597876 - RNA, 19 nt, Artificial Sequence
  Description of Artificial Sequence: Synthetic oligonucleotide
  Antisense strand to SEQ ID NO: 1597875
ugaagucccaaauuccucg

SEQ ID NO: 1597877 - RNA, 19 nt, Artificial Sequence
  Description of Artificial Sequence: Synthetic oligonucleotide
  Sense strand starting at position 3390 of SEQ ID NO: 1560404
ggaggaucguuugaaccga

SEQ ID NO: 1597878 - RNA, 19 nt, Artificial Sequence
  Description of Artificial Sequence: Synthetic oligonucleotide
  Antisense strand to SEQ ID NO: 1597877
ucgguucaaacgauccucc

SEQ ID NO: 1597879 - RNA, 19 nt, Artificial Sequence
  Description of Artificial Sequence: Synthetic oligonucleotide
  Sense strand starting at position 3497 of SEQ ID NO: 1560404
gaaaguuaucgggcgcggu

SEQ ID NO: 1597880 - RNA, 19 nt, Artificial Sequence
  Description of Artificial Sequence: Synthetic oligonucleotide
  Antisense strand to SEQ ID NO: 1597879
accgcgcccgauaacuuuc

SEQ ID NO: 1597881 - RNA, 19 nt, Artificial Sequence
  Description of Artificial Sequence: Synthetic oligonucleotide
  Sense strand starting at position 3895 of SEQ ID NO: 1560404
gccucagcccuaggacaau

SEQ ID NO: 1597882 - RNA, 19 nt, Artificial Sequence
  Description of Artificial Sequence: Synthetic oligonucleotide
  Antisense strand to SEQ ID NO: 1597881
auuguccuagggcugaggc

SEQ ID NO: 1597883 - RNA, 19 nt, Artificial Sequence
  Description of Artificial Sequence: Synthetic oligonucleotide
  Sense strand starting at position 3906 of SEQ ID NO: 1560404
aggacaaugcggugaguua

SEQ ID NO: 1597884 - RNA, 19 nt, Artificial Sequence
  Description of Artificial Sequence: Synthetic oligonucleotide
  Antisense strand to SEQ ID NO: 1597883
uaacucaccgcauuguccu

SEQ ID NO: 1597885 - RNA, 19 nt, Artificial Sequence
  Description of Artificial Sequence: Synthetic oligonucleotide
  Sense strand starting at position 187 of SEQ ID NO: 1560405
acuguaauccaguaaucca

SEQ ID NO: 1597886 - RNA, 19 nt, Artificial Sequence
  Description of Artificial Sequence: Synthetic oligonucleotide
  Antisense strand to SEQ ID NO: 1597885
uggauuacuggauuacagu

SEQ ID NO: 1597887 - RNA, 19 nt, Artificial Sequence
  Description of Artificial Sequence: Synthetic oligonucleotide
  Sense strand starting at position 931 of SEQ ID NO: 1560405
uggagagauacuuguuccu

SEQ ID NO: 1597888 - RNA, 19 nt, Artificial Sequence
  Description of Artificial Sequence: Synthetic oligonucleotide
  Antisense strand to SEQ ID NO: 1597887
aggaacaaguaucucucca

SEQ ID NO: 1597889 - RNA, 19 nt, Artificial Sequence
  Description of Artificial Sequence: Synthetic oligonucleotide
  Sense strand starting at position 933 of SEQ ID NO: 1560405
gagagauacuuguuccuac

SEQ ID NO: 1597890 - RNA, 19 nt, Artificial Sequence
  Description of Artificial Sequence: Synthetic oligonucleotide
  Antisense strand to SEQ ID NO: 1597889
guaggaacaaguaucucuc

SEQ ID NO: 1597891 - RNA, 19 nt, Artificial Sequence
  Description of Artificial Sequence: Synthetic oligonucleotide
  Sense strand starting at position 940 of SEQ ID NO: 1560405
acuuguuccuaccuuugau

SEQ ID NO: 1597892 - RNA, 19 nt, Artificial Sequence
  Description of Artificial Sequence: Synthetic oligonucleotide
  Antisense strand to SEQ ID NO: 1597891
aucaaagguaggaacaagu

SEQ ID NO: 1597893 - RNA, 19 nt, Artificial Sequence
  Description of Artificial Sequence: Synthetic oligonucleotide
  Sense strand starting at position 2088 of SEQ ID NO: 1560405
uagccuugccuguggaaau

SEQ ID NO: 1597894 - RNA, 19 nt, Artificial Sequence
  Description of Artificial Sequence: Synthetic oligonucleotide
  Antisense strand to SEQ ID NO: 1597893
auuuccacaggcaaggcua

SEQ ID NO: 1597895 - RNA, 19 nt, Artificial Sequence
  Description of Artificial Sequence: Synthetic oligonucleotide
  Sense strand starting at position 2194 of SEQ ID NO: 1560405
cuggguuucuccucuuauu

SEQ ID NO: 1597896 - RNA, 19 nt, Artificial Sequence
  Description of Artificial Sequence: Synthetic oligonucleotide
  Antisense strand to SEQ ID NO: 1597895
aauaagaggagaaacccag

SEQ ID NO: 1597897 - RNA, 19 nt, Artificial Sequence
  Description of Artificial Sequence: Synthetic oligonucleotide
  Sense strand starting at position 2206 of SEQ ID NO: 1560405
ucuuauuggccguaggaaa

SEQ ID NO: 1597898 - RNA, 19 nt, Artificial Sequence
  Description of Artificial Sequence: Synthetic oligonucleotide
  Antisense strand to SEQ ID NO: 1597897
uuuccuacggccaauaaga

SEQ ID NO: 1597899 - RNA, 19 nt, Artificial Sequence
  Description of Artificial Sequence: Synthetic oligonucleotide
  Sense strand starting at position 2266 of SEQ ID NO: 1560405
ugcggagggagucaagaau

SEQ ID NO: 1597900 - RNA, 19 nt, Artificial Sequence
  Description of Artificial Sequence: Synthetic oligonucleotide
  Antisense strand to SEQ ID NO: 1597899
auucuugacucccuccgca

SEQ ID NO: 1597901 - RNA, 19 nt, Artificial Sequence
  Description of Artificial Sequence: Synthetic oligonucleotide
  Sense strand starting at position 2339 of SEQ ID NO: 1560405
agacucgaguucucuaauu

SEQ ID NO: 1597902 - RNA, 19 nt, Artificial Sequence
  Description of Artificial Sequence: Synthetic oligonucleotide
  Antisense strand to SEQ ID NO: 1597901
aauuagagaacucgagucu

SEQ ID NO: 1597903 - RNA, 19 nt, Artificial Sequence
  Description of Artificial Sequence: Synthetic oligonucleotide
  Sense strand starting at position 2341 of SEQ ID NO: 1560405
acucgaguucucuaauugg

SEQ ID NO: 1597904 - RNA, 19 nt, Artificial Sequence
  Description of Artificial Sequence: Synthetic oligonucleotide
  Antisense strand to SEQ ID NO: 1597903
ccaauuagagaacucgagu

SEQ ID NO: 1597905 - RNA, 19 nt, Artificial Sequence
  Description of Artificial Sequence: Synthetic oligonucleotide
  Sense strand starting at position 2383 of SEQ ID NO: 1560405
cuccaagugggcgaucuua

SEQ ID NO: 1597906 - RNA, 19 nt, Artificial Sequence
  Description of Artificial Sequence: Synthetic oligonucleotide
  Antisense strand to SEQ ID NO: 1597905
uaagaucgcccacuuggag

SEQ ID NO: 1597907 - RNA, 19 nt, Artificial Sequence
  Description of Artificial Sequence: Synthetic oligonucleotide
  Sense strand starting at position 2425 of SEQ ID NO: 1560405
ccaggaagcacauguagau

SEQ ID NO: 1597908 - RNA, 19 nt, Artificial Sequence
  Description of Artificial Sequence: Synthetic oligonucleotide
  Antisense strand to SEQ ID NO: 1597907
aucuacaugugcuuccugg

SEQ ID NO: 1597909 - RNA, 19 nt, Artificial Sequence
  Description of Artificial Sequence: Synthetic oligonucleotide
  Sense strand starting at position 2511 of SEQ ID NO: 1560405
ugugaacuugugugauucu

SEQ ID NO: 1597910 - RNA, 19 nt, Artificial Sequence
  Description of Artificial Sequence: Synthetic oligonucleotide
  Antisense strand to SEQ ID NO: 1597909
agaaucacacaaguucaca

SEQ ID NO: 1597911 - RNA, 19 nt, Artificial Sequence
  Description of Artificial Sequence: Synthetic oligonucleotide
  Sense strand starting at position 2522 of SEQ ID NO: 1560405
gugauucugugagucuaug

SEQ ID NO: 1597912 - RNA, 19 nt, Artificial Sequence
  Description of Artificial Sequence: Synthetic oligonucleotide
  Antisense strand to SEQ ID NO: 1597911
cauagacucacagaaucac

SEQ ID NO: 1597913 - RNA, 19 nt, Artificial Sequence
  Description of Artificial Sequence: Synthetic oligonucleotide
  Sense strand starting at position 3055 of SEQ ID NO: 1560405
acccauucugauuguguau

SEQ ID NO: 1597914 - RNA, 19 nt, Artificial Sequence
  Description of Artificial Sequence: Synthetic oligonucleotide
  Antisense strand to SEQ ID NO: 1597913
auacacaaucagaaugggu

SEQ ID NO: 1597915 - RNA, 19 nt, Artificial Sequence
  Description of Artificial Sequence: Synthetic oligonucleotide
  Sense strand starting at position 3062 of SEQ ID NO: 1560405
cugauuguguaucuguuga

SEQ ID NO: 1597916 - RNA, 19 nt, Artificial Sequence
  Description of Artificial Sequence: Synthetic oligonucleotide
  Antisense strand to SEQ ID NO: 1597915
ucaacagauacacaaucag

SEQ ID NO: 1597917 - RNA, 19 nt, Artificial Sequence
  Description of Artificial Sequence: Synthetic oligonucleotide
  Sense strand starting at position 3064 of SEQ ID NO: 1560405
gauuguguaucuguugaga

SEQ ID NO: 1597918 - RNA, 19 nt, Artificial Sequence
  Description of Artificial Sequence: Synthetic oligonucleotide
  Antisense strand to SEQ ID NO: 1597917
ucucaacagauacacaauc

SEQ ID NO: 1597919 - RNA, 19 nt, Artificial Sequence
  Description of Artificial Sequence: Synthetic oligonucleotide
  Sense strand starting at position 3167 of SEQ ID NO: 1560405
ggcacugguagcuaugcaa

SEQ ID NO: 1597920 - RNA, 19 nt, Artificial Sequence
  Description of Artificial Sequence: Synthetic oligonucleotide
  Antisense strand to SEQ ID NO: 1597919
uugcauagcuaccagugcc

SEQ ID NO: 1597921 - RNA, 19 nt, Artificial Sequence
  Description of Artificial Sequence: Synthetic oligonucleotide
  Sense strand starting at position 3180 of SEQ ID NO: 1560405
augcaacugugacuaaaua

SEQ ID NO: 1597922 - RNA, 19 nt, Artificial Sequence
  Description of Artificial Sequence: Synthetic oligonucleotide
  Antisense strand to SEQ ID NO: 1597921
uauuuagucacaguugcau

SEQ ID NO: 1597923 - RNA, 19 nt, Artificial Sequence
  Description of Artificial Sequence: Synthetic oligonucleotide
  Sense strand starting at position 3181 of SEQ ID NO: 1560405
ugcaacugugacuaaauaa

SEQ ID NO: 1597924 - RNA, 19 nt, Artificial Sequence
  Description of Artificial Sequence: Synthetic oligonucleotide
  Antisense strand to SEQ ID NO: 1597923
uuauuuagucacaguugca

SEQ ID NO: 1597925 - RNA, 19 nt, Artificial Sequence
  Description of Artificial Sequence: Synthetic oligonucleotide
  Sense strand starting at position 3762 of SEQ ID NO: 1560405
uaaauugugucaguaggau

SEQ ID NO: 1597926 - RNA, 19 nt, Artificial Sequence
  Description of Artificial Sequence: Synthetic oligonucleotide
  Antisense strand to SEQ ID NO: 1597925
auccuacugacacaauuua

SEQ ID NO: 1597927 - RNA, 19 nt, Artificial Sequence
  Description of Artificial Sequence: Synthetic oligonucleotide
  Sense strand starting at position 3796 of SEQ ID NO: 1560405
cugccuguggauuaugaau

SEQ ID NO: 1597928 - RNA, 19 nt, Artificial Sequence
  Description of Artificial Sequence: Synthetic oligonucleotide
  Antisense strand to SEQ ID NO: 1597927
auucauaauccacaggcag

SEQ ID NO: 1597929 - RNA, 19 nt, Artificial Sequence
  Description of Artificial Sequence: Synthetic oligonucleotide
  Sense strand starting at position 3822 of SEQ ID NO: 1560405
uuuagagauuguuuggcua

SEQ ID NO: 1597930 - RNA, 19 nt, Artificial Sequence
  Description of Artificial Sequence: Synthetic oligonucleotide
  Antisense strand to SEQ ID NO: 1597929
uagccaaacaaucucuaaa

SEQ ID NO: 1597931 - RNA, 19 nt, Artificial Sequence
  Description of Artificial Sequence: Synthetic oligonucleotide
  Sense strand starting at position 3825 of SEQ ID NO: 1560405
agagauuguuuggcuauga

SEQ ID NO: 1597932 - RNA, 19 nt, Artificial Sequence
  Description of Artificial Sequence: Synthetic oligonucleotide
  Antisense strand to SEQ ID NO: 1597931
ucauagccaaacaaucucu

SEQ ID NO: 1597933 - RNA, 19 nt, Artificial Sequence
  Description of Artificial Sequence: Synthetic oligonucleotide
  Sense strand starting at position 3826 of SEQ ID NO: 1560405
gagauuguuuggcuaugac

SEQ ID NO: 1597934 - RNA, 19 nt, Artificial Sequence
  Description of Artificial Sequence: Synthetic oligonucleotide
  Antisense strand to SEQ ID NO: 1597933
gucauagccaaacaaucuc

SEQ ID NO: 1597935 - RNA, 19 nt, Artificial Sequence
  Description of Artificial Sequence: Synthetic oligonucleotide
  Sense strand starting at position 3829 of SEQ ID NO: 1560405
auuguuuggcuaugacauu

SEQ ID NO: 1597936 - RNA, 19 nt, Artificial Sequence
  Description of Artificial Sequence: Synthetic oligonucleotide
  Antisense strand to SEQ ID NO: 1597935
aaugucauagccaaacaau

SEQ ID NO: 1597937 - RNA, 19 nt, Artificial Sequence
  Description of Artificial Sequence: Synthetic oligonucleotide
  Sense strand starting at position 3835 of SEQ ID NO: 1560405
uggcuaugacauuguguaa

SEQ ID NO: 1597938 - RNA, 19 nt, Artificial Sequence
  Description of Artificial Sequence: Synthetic oligonucleotide
  Antisense strand to SEQ ID NO: 1597937
uuacacaaugucauagcca

SEQ ID NO: 1597939 - RNA, 19 nt, Artificial Sequence
  Description of Artificial Sequence: Synthetic oligonucleotide
  Sense strand starting at position 3838 of SEQ ID NO: 1560405
cuaugacauuguguaacca

SEQ ID NO: 1597940 - RNA, 19 nt, Artificial Sequence
  Description of Artificial Sequence: Synthetic oligonucleotide
  Antisense strand to SEQ ID NO: 1597939
ugguuacacaaugucauag

SEQ ID NO: 1597941 - RNA, 19 nt, Artificial Sequence
  Description of Artificial Sequence: Synthetic oligonucleotide
  Sense strand starting at position 3846 of SEQ ID NO: 1560405
uuguguaaccaauauagca

SEQ ID NO: 1597942 - RNA, 19 nt, Artificial Sequence
  Description of Artificial Sequence: Synthetic oligonucleotide
  Antisense strand to SEQ ID NO: 1597941
ugcuauauugguuacacaa

SEQ ID NO: 1597943 - RNA, 19 nt, Artificial Sequence
  Description of Artificial Sequence: Synthetic oligonucleotide
  Sense strand starting at position 3884 of SEQ ID NO: 1560405
cugggaauuguaugucugu

SEQ ID NO: 1597944 - RNA, 19 nt, Artificial Sequence
  Description of Artificial Sequence: Synthetic oligonucleotide
  Antisense strand to SEQ ID NO: 1597943
acagacauacaauucccag

SEQ ID NO: 1597945 - RNA, 19 nt, Artificial Sequence
  Description of Artificial Sequence: Synthetic oligonucleotide
  Sense strand starting at position 3901 of SEQ ID NO: 1560405
gugcauaguccauauacau

SEQ ID NO: 1597946 - RNA, 19 nt, Artificial Sequence
  Description of Artificial Sequence: Synthetic oligonucleotide
  Antisense strand to SEQ ID NO: 1597945
auguauauggacuaugcac

SEQ ID NO: 1597947 - RNA, 19 nt, Artificial Sequence
  Description of Artificial Sequence: Synthetic oligonucleotide
  Sense strand starting at position 3930 of SEQ ID NO: 1560405
acaauuauaugugcacgga

SEQ ID NO: 1597948 - RNA, 19 nt, Artificial Sequence
  Description of Artificial Sequence: Synthetic oligonucleotide
  Antisense strand to SEQ ID NO: 1597947
uccgugcacauauaauugu

SEQ ID NO: 1597949 - RNA, 19 nt, Artificial Sequence
  Description of Artificial Sequence: Synthetic oligonucleotide
  Sense strand starting at position 3931 of SEQ ID NO: 1560405
caauuauaugugcacggau

SEQ ID NO: 1597950 - RNA, 19 nt, Artificial Sequence
  Description of Artificial Sequence: Synthetic oligonucleotide
  Antisense strand to SEQ ID NO: 1597949
auccgugcacauauaauug

SEQ ID NO: 1597951 - RNA, 19 nt, Artificial Sequence
  Description of Artificial Sequence: Synthetic oligonucleotide
  Sense strand starting at position 3933 of SEQ ID NO: 1560405
auuauaugugcacggauua

SEQ ID NO: 1597952 - RNA, 19 nt, Artificial Sequence
  Description of Artificial Sequence: Synthetic oligonucleotide
  Antisense strand to SEQ ID NO: 1597951
uaauccgugcacauauaau

SEQ ID NO: 1597953 - RNA, 19 nt, Artificial Sequence
  Description of Artificial Sequence: Synthetic oligonucleotide
  Sense strand starting at position 3934 of SEQ ID NO: 1560405
uuauaugugcacggauuau

SEQ ID NO: 1597954 - RNA, 19 nt, Artificial Sequence
  Description of Artificial Sequence: Synthetic oligonucleotide
  Antisense strand to SEQ ID NO: 1597953
auaauccgugcacauauaa

SEQ ID NO: 1597955 - RNA, 19 nt, Artificial Sequence
  Description of Artificial Sequence: Synthetic oligonucleotide
  Sense strand starting at position 3945 of SEQ ID NO: 1560405
cggauuauaugaucagugu

SEQ ID NO: 1597956 - RNA, 19 nt, Artificial Sequence
  Description of Artificial Sequence: Synthetic oligonucleotide
  Antisense strand to SEQ ID NO: 1597955
acacugaucauauaauccg

SEQ ID NO: 1597957 - RNA, 19 nt, Artificial Sequence
  Description of Artificial Sequence: Synthetic oligonucleotide
  Sense strand starting at position 3946 of SEQ ID NO: 1560405
ggauuauaugaucagugug

SEQ ID NO: 1597958 - RNA, 19 nt, Artificial Sequence
  Description of Artificial Sequence: Synthetic oligonucleotide
  Antisense strand to SEQ ID NO: 1597957
cacacugaucauauaaucc

SEQ ID NO: 1597959 - RNA, 19 nt, Artificial Sequence
  Description of Artificial Sequence: Synthetic oligonucleotide
  Sense strand starting at position 3948 of SEQ ID NO: 1560405
auuauaugaucagugugac

SEQ ID NO: 1597960 - RNA, 19 nt, Artificial Sequence
  Description of Artificial Sequence: Synthetic oligonucleotide
  Antisense strand to SEQ ID NO: 1597959
gucacacugaucauauaau

SEQ ID NO: 1597961 - RNA, 19 nt, Artificial Sequence
  Description of Artificial Sequence: Synthetic oligonucleotide
  Sense strand starting at position 3949 of SEQ ID NO: 1560405
uuauaugaucagugugacu

SEQ ID NO: 1597962 - RNA, 19 nt, Artificial Sequence
  Description of Artificial Sequence: Synthetic oligonucleotide
  Antisense strand to SEQ ID NO: 1597961
agucacacugaucauauaa

SEQ ID NO: 1597963 - RNA, 19 nt, Artificial Sequence
  Description of Artificial Sequence: Synthetic oligonucleotide
  Sense strand starting at position 3951 of SEQ ID NO: 1560405
auaugaucagugugacuga

SEQ ID NO: 1597964 - RNA, 19 nt, Artificial Sequence
  Description of Artificial Sequence: Synthetic oligonucleotide
  Antisense strand to SEQ ID NO: 1597963
ucagucacacugaucauau

SEQ ID NO: 1597965 - RNA, 19 nt, Artificial Sequence
  Description of Artificial Sequence: Synthetic oligonucleotide
  Sense strand starting at position 214 of SEQ ID NO: 1560406
agcaguugucauggagaca

SEQ ID NO: 1597966 - RNA, 19 nt, Artificial Sequence
  Description of Artificial Sequence: Synthetic oligonucleotide
  Antisense strand to SEQ ID NO: 1597965
ugucuccaugacaacugcu

SEQ ID NO: 1597967 - RNA, 19 nt, Artificial Sequence
  Description of Artificial Sequence: Synthetic oligonucleotide
  Sense strand starting at position 215 of SEQ ID NO: 1560406
gcaguugucauggagacag

SEQ ID NO: 1597968 - RNA, 19 nt, Artificial Sequence
  Description of Artificial Sequence: Synthetic oligonucleotide
  Antisense strand to SEQ ID NO: 1597967
cugucuccaugacaacugc

SEQ ID NO: 1597969 - RNA, 19 nt, Artificial Sequence
  Description of Artificial Sequence: Synthetic oligonucleotide
  Sense strand starting at position 278 of SEQ ID NO: 1560406
gaagaucagcuuuggaaca

SEQ ID NO: 1597970 - RNA, 19 nt, Artificial Sequence
  Description of Artificial Sequence: Synthetic oligonucleotide
  Antisense strand to SEQ ID NO: 1597969
uguuccaaagcugaucuuc

SEQ ID NO: 1597971 - RNA, 19 nt, Artificial Sequence
  Description of Artificial Sequence: Synthetic oligonucleotide
  Sense strand starting at position 591 of SEQ ID NO: 1560406
cucccucaugugggugaua

SEQ ID NO: 1597972 - RNA, 19 nt, Artificial Sequence
  Description of Artificial Sequence: Synthetic oligonucleotide
  Antisense strand to SEQ ID NO: 1597971
uaucacccacaugagggag

SEQ ID NO: 1597973 - RNA, 19 nt, Artificial Sequence
  Description of Artificial Sequence: Synthetic oligonucleotide
  Sense strand starting at position 592 of SEQ ID NO: 1560406
ucccucaugugggugauau

SEQ ID NO: 1597974 - RNA, 19 nt, Artificial Sequence
  Description of Artificial Sequence: Synthetic oligonucleotide
  Antisense strand to SEQ ID NO: 1597973
auaucacccacaugaggga

SEQ ID NO: 1597975 - RNA, 19 nt, Artificial Sequence
  Description of Artificial Sequence: Synthetic oligonucleotide
  Sense strand starting at position 593 of SEQ ID NO: 1560406
cccucaugugggugauaug

SEQ ID NO: 1597976 - RNA, 19 nt, Artificial Sequence
  Description of Artificial Sequence: Synthetic oligonucleotide
  Antisense strand to SEQ ID NO: 1597975
cauaucacccacaugaggg

SEQ ID NO: 1597977 - RNA, 19 nt, Artificial Sequence
  Description of Artificial Sequence: Synthetic oligonucleotide
  Sense strand starting at position 626 of SEQ ID NO: 1560406
gagaguggcagucagacaa

SEQ ID NO: 1597978 - RNA, 19 nt, Artificial Sequence
  Description of Artificial Sequence: Synthetic oligonucleotide
  Antisense strand to SEQ ID NO: 1597977
uugucugacugccacucuc

SEQ ID NO: 1597979 - RNA, 19 nt, Artificial Sequence
  Description of Artificial Sequence: Synthetic oligonucleotide
  Sense strand starting at position 862 of SEQ ID NO: 1560406
gcgccaaugucaccaucau

SEQ ID NO: 1597980 - RNA, 19 nt, Artificial Sequence
  Description of Artificial Sequence: Synthetic oligonucleotide
  Antisense strand to SEQ ID NO: 1597979
augauggugacauuggcgc

SEQ ID NO: 1597981 - RNA, 19 nt, Artificial Sequence
  Description of Artificial Sequence: Synthetic oligonucleotide
  Sense strand starting at position 897 of SEQ ID NO: 1560406
gggcgauggucuccgcaga

SEQ ID NO: 1597982 - RNA, 19 nt, Artificial Sequence
  Description of Artificial Sequence: Synthetic oligonucleotide
  Antisense strand to SEQ ID NO: 1597981
ucugcggagaccaucgccc

SEQ ID NO: 1597983 - RNA, 19 nt, Artificial Sequence
  Description of Artificial Sequence: Synthetic oligonucleotide
  Sense strand starting at position 898 of SEQ ID NO: 1560406
ggcgauggucuccgcagaa

SEQ ID NO: 1597984 - RNA, 19 nt, Artificial Sequence
  Description of Artificial Sequence: Synthetic oligonucleotide
  Antisense strand to SEQ ID NO: 1597983
uucugcggagaccaucgcc

SEQ ID NO: 1597985 - RNA, 19 nt, Artificial Sequence
  Description of Artificial Sequence: Synthetic oligonucleotide
  Sense strand starting at position 1093 of SEQ ID NO: 1560406
cugccucuucccgauuaca

SEQ ID NO: 1597986 - RNA, 19 nt, Artificial Sequence
  Description of Artificial Sequence: Synthetic oligonucleotide
  Antisense strand to SEQ ID NO: 1597985
uguaaucgggaagaggcag

SEQ ID NO: 1597987 - RNA, 19 nt, Artificial Sequence
  Description of Artificial Sequence: Synthetic oligonucleotide
  Sense strand starting at position 2148 of SEQ ID NO: 1560406
cccguuucccagcagagaa

SEQ ID NO: 1597988 - RNA, 19 nt, Artificial Sequence
  Description of Artificial Sequence: Synthetic oligonucleotide
  Antisense strand to SEQ ID NO: 1597987
uucucugcugggaaacggg

SEQ ID NO: 1597989 - RNA, 19 nt, Artificial Sequence
  Description of Artificial Sequence: Synthetic oligonucleotide
  Sense strand starting at position 2468 of SEQ ID NO: 1560406
ggcacagucuugggaccau

SEQ ID NO: 1597990 - RNA, 19 nt, Artificial Sequence
  Description of Artificial Sequence: Synthetic oligonucleotide
  Antisense strand to SEQ ID NO: 1597989
auggucccaagacugugcc

SEQ ID NO: 1597991 - RNA, 19 nt, Artificial Sequence
  Description of Artificial Sequence: Synthetic oligonucleotide
  Sense strand starting at position 2870 of SEQ ID NO: 1560406
gaucgacugugacaucauu

SEQ ID NO: 1597992 - RNA, 19 nt, Artificial Sequence
  Description of Artificial Sequence: Synthetic oligonucleotide
  Antisense strand to SEQ ID NO: 1597991
aaugaugucacagucgauc

SEQ ID NO: 1597993 - RNA, 19 nt, Artificial Sequence
  Description of Artificial Sequence: Synthetic oligonucleotide
  Sense strand starting at position 3069 of SEQ ID NO: 1560406
gcaggaugcagggaugagu

SEQ ID NO: 1597994 - RNA, 19 nt, Artificial Sequence
  Description of Artificial Sequence: Synthetic oligonucleotide
  Antisense strand to SEQ ID NO: 1597993
acucaucccugcauccugc

SEQ ID NO: 1597995 - RNA, 19 nt, Artificial Sequence
  Description of Artificial Sequence: Synthetic oligonucleotide
  Sense strand starting at position 3078 of SEQ ID NO: 1560406
agggaugaguccugcagca

SEQ ID NO: 1597996 - RNA, 19 nt, Artificial Sequence
  Description of Artificial Sequence: Synthetic oligonucleotide
  Antisense strand to SEQ ID NO: 1597995
ugcugcaggacucaucccu

SEQ ID NO: 1597997 - RNA, 19 nt, Artificial Sequence
  Description of Artificial Sequence: Synthetic oligonucleotide
  Sense strand starting at position 3961 of SEQ ID NO: 1560406
acucuuuauucuugaacgu

SEQ ID NO: 1597998 - RNA, 19 nt, Artificial Sequence
  Description of Artificial Sequence: Synthetic oligonucleotide
  Antisense strand to SEQ ID NO: 1597997
acguucaagaauaaagagu

SEQ ID NO: 1597999 - RNA, 19 nt, Artificial Sequence
  Description of Artificial Sequence: Synthetic oligonucleotide
  Sense strand starting at position 118 of SEQ ID NO: 1560407
ccgauauguggccaauaug

SEQ ID NO: 1598000 - RNA, 19 nt, Artificial Sequence
  Description of Artificial Sequence: Synthetic oligonucleotide
  Antisense strand to SEQ ID NO: 1597999
cauauuggccacauaucgg

SEQ ID NO: 1598001 - RNA, 19 nt, Artificial Sequence
  Description of Artificial Sequence: Synthetic oligonucleotide
  Sense strand starting at position 136 of SEQ ID NO: 1560407
ggugaaacgcccgcuucua

SEQ ID NO: 1598002 - RNA, 19 nt, Artificial Sequence
  Description of Artificial Sequence: Synthetic oligonucleotide
  Antisense strand to SEQ ID NO: 1598001
uagaagcgggcguuucacc

SEQ ID NO: 1598003 - RNA, 19 nt, Artificial Sequence
  Description of Artificial Sequence: Synthetic oligonucleotide
  Sense strand starting at position 368 of SEQ ID NO: 1560407
ccugaaucucaguauggcu

SEQ ID NO: 1598004 - RNA, 19 nt, Artificial Sequence
  Description of Artificial Sequence: Synthetic oligonucleotide
  Antisense strand to SEQ ID NO: 1598003
agccauacugagauucagg

SEQ ID NO: 1598005 - RNA, 19 nt, Artificial Sequence
  Description of Artificial Sequence: Synthetic oligonucleotide
  Sense strand starting at position 435 of SEQ ID NO: 1560407
uuauuuccuuguguaucau

SEQ ID NO: 1598006 - RNA, 19 nt, Artificial Sequence
  Description of Artificial Sequence: Synthetic oligonucleotide
  Antisense strand to SEQ ID NO: 1598005
augauacacaaggaaauaa

SEQ ID NO: 1598007 - RNA, 19 nt, Artificial Sequence
  Description of Artificial Sequence: Synthetic oligonucleotide
  Sense strand starting at position 466 of SEQ ID NO: 1560407
cuuagaaucuuagcuuggu

SEQ ID NO: 1598008 - RNA, 19 nt, Artificial Sequence
  Description of Artificial Sequence: Synthetic oligonucleotide
  Antisense strand to SEQ ID NO: 1598007
accaagcuaagauucuaag

SEQ ID NO: 1598009 - RNA, 19 nt, Artificial Sequence
  Description of Artificial Sequence: Synthetic oligonucleotide
  Sense strand starting at position 467 of SEQ ID NO: 1560407
uuagaaucuuagcuugguu

SEQ ID NO: 1598010 - RNA, 19 nt, Artificial Sequence
  Description of Artificial Sequence: Synthetic oligonucleotide
  Antisense strand to SEQ ID NO: 1598009
aaccaagcuaagauucuaa

SEQ ID NO: 1598011 - RNA, 19 nt, Artificial Sequence
  Description of Artificial Sequence: Synthetic oligonucleotide
  Sense strand starting at position 469 of SEQ ID NO: 1560407
agaaucuuagcuugguuga

SEQ ID NO: 1598012 - RNA, 19 nt, Artificial Sequence
  Description of Artificial Sequence: Synthetic oligonucleotide
  Antisense strand to SEQ ID NO: 1598011
ucaaccaagcuaagauucu

SEQ ID NO: 1598013 - RNA, 19 nt, Artificial Sequence
  Description of Artificial Sequence: Synthetic oligonucleotide
  Sense strand starting at position 471 of SEQ ID NO: 1560407
aaucuuagcuugguugaca

SEQ ID NO: 1598014 - RNA, 19 nt, Artificial Sequence
  Description of Artificial Sequence: Synthetic oligonucleotide
  Antisense strand to SEQ ID NO: 1598013
ugucaaccaagcuaagauu

SEQ ID NO: 1598015 - RNA, 19 nt, Artificial Sequence
  Description of Artificial Sequence: Synthetic oligonucleotide
  Sense strand starting at position 503 of SEQ ID NO: 1560407
acaauaggugcuuaguaaa

SEQ ID NO: 1598016 - RNA, 19 nt, Artificial Sequence
  Description of Artificial Sequence: Synthetic oligonucleotide
  Antisense strand to SEQ ID NO: 1598015
uuuacuaagcaccuauugu

SEQ ID NO: 1598017 - RNA, 19 nt, Artificial Sequence
  Description of Artificial Sequence: Synthetic oligonucleotide
  Sense strand starting at position 803 of SEQ ID NO: 1560407
gauggauucucgcuauacu

SEQ ID NO: 1598018 - RNA, 19 nt, Artificial Sequence
  Description of Artificial Sequence: Synthetic oligonucleotide
  Antisense strand to SEQ ID NO: 1598017
aguauagcgagaauccauc

SEQ ID NO: 1598019 - RNA, 19 nt, Artificial Sequence
  Description of Artificial Sequence: Synthetic oligonucleotide
  Sense strand starting at position 804 of SEQ ID NO: 1560407
auggauucucgcuauacug

SEQ ID NO: 1598020 - RNA, 19 nt, Artificial Sequence
  Description of Artificial Sequence: Synthetic oligonucleotide
  Antisense strand to SEQ ID NO: 1598019
caguauagcgagaauccau

SEQ ID NO: 1598021 - RNA, 19 nt, Artificial Sequence
  Description of Artificial Sequence: Synthetic oligonucleotide
  Sense strand starting at position 889 of SEQ ID NO: 1560407
agguguaaucccgagaaau

SEQ ID NO: 1598022 - RNA, 19 nt, Artificial Sequence
  Description of Artificial Sequence: Synthetic oligonucleotide
  Antisense strand to SEQ ID NO: 1598021
auuucucgggauuacaccu

SEQ ID NO: 1598023 - RNA, 19 nt, Artificial Sequence
  Description of Artificial Sequence: Synthetic oligonucleotide
  Sense strand starting at position 891 of SEQ ID NO: 1560407
guguaaucccgagaaauga

SEQ ID NO: 1598024 - RNA, 19 nt, Artificial Sequence
  Description of Artificial Sequence: Synthetic oligonucleotide
  Antisense strand to SEQ ID NO: 1598023
ucauuucucgggauuacac

SEQ ID NO: 1598025 - RNA, 19 nt, Artificial Sequence
  Description of Artificial Sequence: Synthetic oligonucleotide
  Sense strand starting at position 1032 of SEQ ID NO: 1560407
aggcuuagcaagggugaga

SEQ ID NO: 1598026 - RNA, 19 nt, Artificial Sequence
  Description of Artificial Sequence: Synthetic oligonucleotide
  Antisense strand to SEQ ID NO: 1598025
ucucacccuugcuaagccu

SEQ ID NO: 1598027 - RNA, 19 nt, Artificial Sequence
  Description of Artificial Sequence: Synthetic oligonucleotide
  Sense strand starting at position 1244 of SEQ ID NO: 1560407
uuagcagugccuugacaag

SEQ ID NO: 1598028 - RNA, 19 nt, Artificial Sequence
  Description of Artificial Sequence: Synthetic oligonucleotide
  Antisense strand to SEQ ID NO: 1598027
cuugucaaggcacugcuaa

SEQ ID NO: 1598029 - RNA, 19 nt, Artificial Sequence
  Description of Artificial Sequence: Synthetic oligonucleotide
  Sense strand starting at position 1334 of SEQ ID NO: 1560407
cccauuguuucucuuggau

SEQ ID NO: 1598030 - RNA, 19 nt, Artificial Sequence
  Description of Artificial Sequence: Synthetic oligonucleotide
  Antisense strand to SEQ ID NO: 1598029
auccaagagaaacaauggg

SEQ ID NO: 1598031 - RNA, 19 nt, Artificial Sequence
  Description of Artificial Sequence: Synthetic oligonucleotide
  Sense strand starting at position 2180 of SEQ ID NO: 1560407
ggcacauuucugggccuca

SEQ ID NO: 1598032 - RNA, 19 nt, Artificial Sequence
  Description of Artificial Sequence: Synthetic oligonucleotide
  Antisense strand to SEQ ID NO: 1598031
ugaggcccagaaaugugcc

SEQ ID NO: 1598033 - RNA, 19 nt, Artificial Sequence
  Description of Artificial Sequence: Synthetic oligonucleotide
  Sense strand starting at position 2198 of SEQ ID NO: 1560407
aguauccucuuccucgaua

SEQ ID NO: 1598034 - RNA, 19 nt, Artificial Sequence
  Description of Artificial Sequence: Synthetic oligonucleotide
  Antisense strand to SEQ ID NO: 1598033
uaucgaggaagaggauacu

SEQ ID NO: 1598035 - RNA, 19 nt, Artificial Sequence
  Description of Artificial Sequence: Synthetic oligonucleotide
  Sense strand starting at position 2199 of SEQ ID NO: 1560407
guauccucuuccucgauau

SEQ ID NO: 1598036 - RNA, 19 nt, Artificial Sequence
  Description of Artificial Sequence: Synthetic oligonucleotide
  Antisense strand to SEQ ID NO: 1598035
auaucgaggaagaggauac

SEQ ID NO: 1598037 - RNA, 19 nt, Artificial Sequence
  Description of Artificial Sequence: Synthetic oligonucleotide
  Sense strand starting at position 2201 of SEQ ID NO: 1560407
auccucuuccucgauauga

SEQ ID NO: 1598038 - RNA, 19 nt, Artificial Sequence
  Description of Artificial Sequence: Synthetic oligonucleotide
  Antisense strand to SEQ ID NO: 1598037
ucauaucgaggaagaggau

SEQ ID NO: 1598039 - RNA, 19 nt, Artificial Sequence
  Description of Artificial Sequence: Synthetic oligonucleotide
  Sense strand starting at position 2293 of SEQ ID NO: 1560407
gaguuuaagagguggcugu

SEQ ID NO: 1598040 - RNA, 19 nt, Artificial Sequence
  Description of Artificial Sequence: Synthetic oligonucleotide
  Antisense strand to SEQ ID NO: 1598039
acagccaccucuuaaacuc

SEQ ID NO: 1598041 - RNA, 19 nt, Artificial Sequence
  Description of Artificial Sequence: Synthetic oligonucleotide
  Sense strand starting at position 2297 of SEQ ID NO: 1560407
uuaagagguggcugucuau

SEQ ID NO: 1598042 - RNA, 19 nt, Artificial Sequence
  Description of Artificial Sequence: Synthetic oligonucleotide
  Antisense strand to SEQ ID NO: 1598041
auagacagccaccucuuaa

SEQ ID NO: 1598043 - RNA, 19 nt, Artificial Sequence
  Description of Artificial Sequence: Synthetic oligonucleotide
  Sense strand starting at position 2309 of SEQ ID NO: 1560407
ugucuaugcccaugggauu

SEQ ID NO: 1598044 - RNA, 19 nt, Artificial Sequence
  Description of Artificial Sequence: Synthetic oligonucleotide
  Antisense strand to SEQ ID NO: 1598043
aaucccaugggcauagaca

SEQ ID NO: 1598045 - RNA, 19 nt, Artificial Sequence
  Description of Artificial Sequence: Synthetic oligonucleotide
  Sense strand starting at position 2430 of SEQ ID NO: 1560407
gugucaugccucucugcca

SEQ ID NO: 1598046 - RNA, 19 nt, Artificial Sequence
  Description of Artificial Sequence: Synthetic oligonucleotide
  Antisense strand to SEQ ID NO: 1598045
uggcagagaggcaugacac

SEQ ID NO: 1598047 - RNA, 19 nt, Artificial Sequence
  Description of Artificial Sequence: Synthetic oligonucleotide
  Sense strand starting at position 2451 of SEQ ID NO: 1560407
ccuguuuccucaccaggaa

SEQ ID NO: 1598048 - RNA, 19 nt, Artificial Sequence
  Description of Artificial Sequence: Synthetic oligonucleotide
  Antisense strand to SEQ ID NO: 1598047
uuccuggugaggaaacagg

SEQ ID NO: 1598049 - RNA, 19 nt, Artificial Sequence
  Description of Artificial Sequence: Synthetic oligonucleotide
  Sense strand starting at position 2452 of SEQ ID NO: 1560407
cuguuuccucaccaggaaa

SEQ ID NO: 1598050 - RNA, 19 nt, Artificial Sequence
  Description of Artificial Sequence: Synthetic oligonucleotide
  Antisense strand to SEQ ID NO: 1598049
uuuccuggugaggaaacag

SEQ ID NO: 1598051 - RNA, 19 nt, Artificial Sequence
  Description of Artificial Sequence: Synthetic oligonucleotide
  Sense strand starting at position 2544 of SEQ ID NO: 1560407
cuugauaaacuggguguua

SEQ ID NO: 1598052 - RNA, 19 nt, Artificial Sequence
  Description of Artificial Sequence: Synthetic oligonucleotide
  Antisense strand to SEQ ID NO: 1598051
uaacacccaguuuaucaag

SEQ ID NO: 1598053 - RNA, 19 nt, Artificial Sequence
  Description of Artificial Sequence: Synthetic oligonucleotide
  Sense strand starting at position 2545 of SEQ ID NO: 1560407
uugauaaacuggguguuau

SEQ ID NO: 1598054 - RNA, 19 nt, Artificial Sequence
  Description of Artificial Sequence: Synthetic oligonucleotide
  Antisense strand to SEQ ID NO: 1598053
auaacacccaguuuaucaa

SEQ ID NO: 1598055 - RNA, 19 nt, Artificial Sequence
  Description of Artificial Sequence: Synthetic oligonucleotide
  Sense strand starting at position 2546 of SEQ ID NO: 1560407
ugauaaacuggguguuauu

SEQ ID NO: 1598056 - RNA, 19 nt, Artificial Sequence
  Description of Artificial Sequence: Synthetic oligonucleotide
  Antisense strand to SEQ ID NO: 1598055
aauaacacccaguuuauca

SEQ ID NO: 1598057 - RNA, 19 nt, Artificial Sequence
  Description of Artificial Sequence: Synthetic oligonucleotide
  Sense strand starting at position 2572 of SEQ ID NO: 1560407
cucauccuccucuggagaa

SEQ ID NO: 1598058 - RNA, 19 nt, Artificial Sequence
  Description of Artificial Sequence: Synthetic oligonucleotide
  Antisense strand to SEQ ID NO: 1598057
uucuccagaggaggaugag

SEQ ID NO: 1598059 - RNA, 19 nt, Artificial Sequence
  Description of Artificial Sequence: Synthetic oligonucleotide
  Sense strand starting at position 2636 of SEQ ID NO: 1560407
ggaagucuucuccaacauu

SEQ ID NO: 1598060 - RNA, 19 nt, Artificial Sequence
  Description of Artificial Sequence: Synthetic oligonucleotide
  Antisense strand to SEQ ID NO: 1598059
aauguuggagaagacuucc

SEQ ID NO: 1598061 - RNA, 19 nt, Artificial Sequence
  Description of Artificial Sequence: Synthetic oligonucleotide
  Sense strand starting at position 2763 of SEQ ID NO: 1560407
uggcuuaugucaguaaucu

SEQ ID NO: 1598062 - RNA, 19 nt, Artificial Sequence
  Description of Artificial Sequence: Synthetic oligonucleotide
  Antisense strand to SEQ ID NO: 1598061
agauuacugacauaagcca

SEQ ID NO: 1598063 - RNA, 19 nt, Artificial Sequence
  Description of Artificial Sequence: Synthetic oligonucleotide
  Sense strand starting at position 2764 of SEQ ID NO: 1560407
ggcuuaugucaguaaucuc

SEQ ID NO: 1598064 - RNA, 19 nt, Artificial Sequence
  Description of Artificial Sequence: Synthetic oligonucleotide
  Antisense strand to SEQ ID NO: 1598063
gagauuacugacauaagcc

SEQ ID NO: 1598065 - RNA, 19 nt, Artificial Sequence
  Description of Artificial Sequence: Synthetic oligonucleotide
  Sense strand starting at position 2831 of SEQ ID NO: 1560407
gagacaagucugggcaaga

SEQ ID NO: 1598066 - RNA, 19 nt, Artificial Sequence
  Description of Artificial Sequence: Synthetic oligonucleotide
  Antisense strand to SEQ ID NO: 1598065
ucuugcccagacuugucuc

SEQ ID NO: 1598067 - RNA, 19 nt, Artificial Sequence
  Description of Artificial Sequence: Synthetic oligonucleotide
  Sense strand starting at position 2844 of SEQ ID NO: 1560407
gcaagauggcaauaccuca

SEQ ID NO: 1598068 - RNA, 19 nt, Artificial Sequence
  Description of Artificial Sequence: Synthetic oligonucleotide
  Antisense strand to SEQ ID NO: 1598067
ugagguauugccaucuugc

SEQ ID NO: 1598069 - RNA, 19 nt, Artificial Sequence
  Description of Artificial Sequence: Synthetic oligonucleotide
  Sense strand starting at position 3022 of SEQ ID NO: 1560407
gggcuugguggugggauua

SEQ ID NO: 1598070 - RNA, 19 nt, Artificial Sequence
  Description of Artificial Sequence: Synthetic oligonucleotide
  Antisense strand to SEQ ID NO: 1598069
uaaucccaccaccaagccc

SEQ ID NO: 1598071 - RNA, 19 nt, Artificial Sequence
  Description of Artificial Sequence: Synthetic oligonucleotide
  Sense strand starting at position 3134 of SEQ ID NO: 1560407
gcacuuccgccugaucaac

SEQ ID NO: 1598072 - RNA, 19 nt, Artificial Sequence
  Description of Artificial Sequence: Synthetic oligonucleotide
  Antisense strand to SEQ ID NO: 1598071
guugaucaggcggaagugc

SEQ ID NO: 1598073 - RNA, 19 nt, Artificial Sequence
  Description of Artificial Sequence: Synthetic oligonucleotide
  Sense strand starting at position 3276 of SEQ ID NO: 1560407
ccgaccauuugcuauagau

SEQ ID NO: 1598074 - RNA, 19 nt, Artificial Sequence
  Description of Artificial Sequence: Synthetic oligonucleotide
  Antisense strand to SEQ ID NO: 1598073
aucuauagcaaauggucgg

SEQ ID NO: 1598075 - RNA, 19 nt, Artificial Sequence
  Description of Artificial Sequence: Synthetic oligonucleotide
  Sense strand starting at position 3400 of SEQ ID NO: 1560407
acggaaucugcaugagaau

SEQ ID NO: 1598076 - RNA, 19 nt, Artificial Sequence
  Description of Artificial Sequence: Synthetic oligonucleotide
  Antisense strand to SEQ ID NO: 1598075
auucucaugcagauuccgu

SEQ ID NO: 1598077 - RNA, 19 nt, Artificial Sequence
  Description of Artificial Sequence: Synthetic oligonucleotide
  Sense strand starting at position 3423 of SEQ ID NO: 1560407
uuucuuacugucugugacu

SEQ ID NO: 1598078 - RNA, 19 nt, Artificial Sequence
  Description of Artificial Sequence: Synthetic oligonucleotide
  Antisense strand to SEQ ID NO: 1598077
agucacagacaguaagaaa

SEQ ID NO: 1598079 - RNA, 19 nt, Artificial Sequence
  Description of Artificial Sequence: Synthetic oligonucleotide
  Sense strand starting at position 314 of SEQ ID NO: 1560408
agggucuuuccugagccua

SEQ ID NO: 1598080 - RNA, 19 nt, Artificial Sequence
  Description of Artificial Sequence: Synthetic oligonucleotide
  Antisense strand to SEQ ID NO: 1598079
uaggcucaggaaagacccu

SEQ ID NO: 1598081 - RNA, 19 nt, Artificial Sequence
  Description of Artificial Sequence: Synthetic oligonucleotide
  Sense strand starting at position 319 of SEQ ID NO: 1560408
cuuuccugagccuagauua

SEQ ID NO: 1598082 - RNA, 19 nt, Artificial Sequence
  Description of Artificial Sequence: Synthetic oligonucleotide
  Antisense strand to SEQ ID NO: 1598081
uaaucuaggcucaggaaag

SEQ ID NO: 1598083 - RNA, 19 nt, Artificial Sequence
  Description of Artificial Sequence: Synthetic oligonucleotide
  Sense strand starting at position 367 of SEQ ID NO: 1560408
ucucuagggugaguacuua

SEQ ID NO: 1598084 - RNA, 19 nt, Artificial Sequence
  Description of Artificial Sequence: Synthetic oligonucleotide
  Antisense strand to SEQ ID NO: 1598083
uaaguacucacccuagaga

SEQ ID NO: 1598085 - RNA, 19 nt, Artificial Sequence
  Description of Artificial Sequence: Synthetic oligonucleotide
  Sense strand starting at position 371 of SEQ ID NO: 1560408
uagggugaguacuuacuaa

SEQ ID NO: 1598086 - RNA, 19 nt, Artificial Sequence
  Description of Artificial Sequence: Synthetic oligonucleotide
  Antisense strand to SEQ ID NO: 1598085
uuaguaaguacucacccua

SEQ ID NO: 1598087 - RNA, 19 nt, Artificial Sequence
  Description of Artificial Sequence: Synthetic oligonucleotide
  Sense strand starting at position 386 of SEQ ID NO: 1560408
cuaaaugacuuagauagga

SEQ ID NO: 1598088 - RNA, 19 nt, Artificial Sequence
  Description of Artificial Sequence: Synthetic oligonucleotide
  Antisense strand to SEQ ID NO: 1598087
uccuaucuaagucauuuag

SEQ ID NO: 1598089 - RNA, 19 nt, Artificial Sequence
  Description of Artificial Sequence: Synthetic oligonucleotide
  Sense strand starting at position 391 of SEQ ID NO: 1560408
ugacuuagauaggauuaga

SEQ ID NO: 1598090 - RNA, 19 nt, Artificial Sequence
  Description of Artificial Sequence: Synthetic oligonucleotide
  Antisense strand to SEQ ID NO: 1598089
ucuaauccuaucuaaguca

SEQ ID NO: 1598091 - RNA, 19 nt, Artificial Sequence
  Description of Artificial Sequence: Synthetic oligonucleotide
  Sense strand starting at position 399 of SEQ ID NO: 1560408
auaggauuagaguggccaa

SEQ ID NO: 1598092 - RNA, 19 nt, Artificial Sequence
  Description of Artificial Sequence: Synthetic oligonucleotide
  Antisense strand to SEQ ID NO: 1598091
uuggccacucuaauccuau

SEQ ID NO: 1598093 - RNA, 19 nt, Artificial Sequence
  Description of Artificial Sequence: Synthetic oligonucleotide
  Sense strand starting at position 402 of SEQ ID NO: 1560408
ggauuagaguggccaaaga

SEQ ID NO: 1598094 - RNA, 19 nt, Artificial Sequence
  Description of Artificial Sequence: Synthetic oligonucleotide
  Antisense strand to SEQ ID NO: 1598093
ucuuuggccacucuaaucc

SEQ ID NO: 1598095 - RNA, 19 nt, Artificial Sequence
  Description of Artificial Sequence: Synthetic oligonucleotide
  Sense strand starting at position 423 of SEQ ID NO: 1560408
ucuguuaaaucccuggaua

SEQ ID NO: 1598096 - RNA, 19 nt, Artificial Sequence
  Description of Artificial Sequence: Synthetic oligonucleotide
  Antisense strand to SEQ ID NO: 1598095
uauccagggauuuaacaga

SEQ ID NO: 1598097 - RNA, 19 nt, Artificial Sequence
  Description of Artificial Sequence: Synthetic oligonucleotide
  Sense strand starting at position 424 of SEQ ID NO: 1560408
cuguuaaaucccuggauaa

SEQ ID NO: 1598098 - RNA, 19 nt, Artificial Sequence
  Description of Artificial Sequence: Synthetic oligonucleotide
  Antisense strand to SEQ ID NO: 1598097
uuauccagggauuuaacag

SEQ ID NO: 1598099 - RNA, 19 nt, Artificial Sequence
  Description of Artificial Sequence: Synthetic oligonucleotide
  Sense strand starting at position 425 of SEQ ID NO: 1560408
uguuaaaucccuggauaaa

SEQ ID NO: 1598100 - RNA, 19 nt, Artificial Sequence
  Description of Artificial Sequence: Synthetic oligonucleotide
  Antisense strand to SEQ ID NO: 1598099
uuuauccagggauuuaaca

SEQ ID NO: 1598101 - RNA, 19 nt, Artificial Sequence
  Description of Artificial Sequence: Synthetic oligonucleotide
  Sense strand starting at position 520 of SEQ ID NO: 1560408
gagauuuggucauauugau

SEQ ID NO: 1598102 - RNA, 19 nt, Artificial Sequence
  Description of Artificial Sequence: Synthetic oligonucleotide
  Antisense strand to SEQ ID NO: 1598101
aucaauaugaccaaaucuc

SEQ ID NO: 1598103 - RNA, 19 nt, Artificial Sequence
  Description of Artificial Sequence: Synthetic oligonucleotide
  Sense strand starting at position 552 of SEQ ID NO: 1560408
uuguaaaguggccagugaa

SEQ ID NO: 1598104 - RNA, 19 nt, Artificial Sequence
  Description of Artificial Sequence: Synthetic oligonucleotide
  Antisense strand to SEQ ID NO: 1598103
uucacuggccacuuuacaa

SEQ ID NO: 1598105 - RNA, 19 nt, Artificial Sequence
  Description of Artificial Sequence: Synthetic oligonucleotide
  Sense strand starting at position 1064 of SEQ ID NO: 1560408
uauccauugucccugguga

SEQ ID NO: 1598106 - RNA, 19 nt, Artificial Sequence
  Description of Artificial Sequence: Synthetic oligonucleotide
  Antisense strand to SEQ ID NO: 1598105
ucaccagggacaauggaua

SEQ ID NO: 1598107 - RNA, 19 nt, Artificial Sequence
  Description of Artificial Sequence: Synthetic oligonucleotide
  Sense strand starting at position 1089 of SEQ ID NO: 1560408
cccagaggccuuuauccuu

SEQ ID NO: 1598108 - RNA, 19 nt, Artificial Sequence
  Description of Artificial Sequence: Synthetic oligonucleotide
  Antisense strand to SEQ ID NO: 1598107
aaggauaaaggccucuggg

SEQ ID NO: 1598109 - RNA, 19 nt, Artificial Sequence
  Description of Artificial Sequence: Synthetic oligonucleotide
  Sense strand starting at position 1419 of SEQ ID NO: 1560408
gacaucaucggcugcugaa

SEQ ID NO: 1598110 - RNA, 19 nt, Artificial Sequence
  Description of Artificial Sequence: Synthetic oligonucleotide
  Antisense strand to SEQ ID NO: 1598109
uucagcagccgaugauguc

SEQ ID NO: 1598111 - RNA, 19 nt, Artificial Sequence
  Description of Artificial Sequence: Synthetic oligonucleotide
  Sense strand starting at position 1675 of SEQ ID NO: 1560408
gagcgauuccgcuccaggu

SEQ ID NO: 1598112 - RNA, 19 nt, Artificial Sequence
  Description of Artificial Sequence: Synthetic oligonucleotide
  Antisense strand to SEQ ID NO: 1598111
accuggagcggaaucgcuc

SEQ ID NO: 1598113 - RNA, 19 nt, Artificial Sequence
  Description of Artificial Sequence: Synthetic oligonucleotide
  Sense strand starting at position 1676 of SEQ ID NO: 1560408
agcgauuccgcuccaggua

SEQ ID NO: 1598114 - RNA, 19 nt, Artificial Sequence
  Description of Artificial Sequence: Synthetic oligonucleotide
  Antisense strand to SEQ ID NO: 1598113
uaccuggagcggaaucgcu

SEQ ID NO: 1598115 - RNA, 19 nt, Artificial Sequence
  Description of Artificial Sequence: Synthetic oligonucleotide
  Sense strand starting at position 1677 of SEQ ID NO: 1560408
gcgauuccgcuccagguaa

SEQ ID NO: 1598116 - RNA, 19 nt, Artificial Sequence
  Description of Artificial Sequence: Synthetic oligonucleotide
  Antisense strand to SEQ ID NO: 1598115
uuaccuggagcggaaucgc

SEQ ID NO: 1598117 - RNA, 19 nt, Artificial Sequence
  Description of Artificial Sequence: Synthetic oligonucleotide
  Sense strand starting at position 1708 of SEQ ID NO: 1560408
gccaccgaugcuucuguua

SEQ ID NO: 1598118 - RNA, 19 nt, Artificial Sequence
  Description of Artificial Sequence: Synthetic oligonucleotide
  Antisense strand to SEQ ID NO: 1598117
uaacagaagcaucgguggc

SEQ ID NO: 1598119 - RNA, 19 nt, Artificial Sequence
  Description of Artificial Sequence: Synthetic oligonucleotide
  Sense strand starting at position 1721 of SEQ ID NO: 1560408
cuguuaucguggccauuua

SEQ ID NO: 1598120 - RNA, 19 nt, Artificial Sequence
  Description of Artificial Sequence: Synthetic oligonucleotide
  Antisense strand to SEQ ID NO: 1598119
uaaauggccacgauaacag

SEQ ID NO: 1598121 - RNA, 19 nt, Artificial Sequence
  Description of Artificial Sequence: Synthetic oligonucleotide
  Sense strand starting at position 1722 of SEQ ID NO: 1560408
uguuaucguggccauuuau

SEQ ID NO: 1598122 - RNA, 19 nt, Artificial Sequence
  Description of Artificial Sequence: Synthetic oligonucleotide
  Antisense strand to SEQ ID NO: 1598121
auaaauggccacgauaaca

SEQ ID NO: 1598123 - RNA, 19 nt, Artificial Sequence
  Description of Artificial Sequence: Synthetic oligonucleotide
  Sense strand starting at position 2387 of SEQ ID NO: 1560408
uggagaucaugguuucaga

SEQ ID NO: 1598124 - RNA, 19 nt, Artificial Sequence
  Description of Artificial Sequence: Synthetic oligonucleotide
  Antisense strand to SEQ ID NO: 1598123
ucugaaaccaugaucucca

SEQ ID NO: 1598125 - RNA, 19 nt, Artificial Sequence
  Description of Artificial Sequence: Synthetic oligonucleotide
  Sense strand starting at position 2568 of SEQ ID NO: 1560408
guccucuuuacgcagggau

SEQ ID NO: 1598126 - RNA, 19 nt, Artificial Sequence
  Description of Artificial Sequence: Synthetic oligonucleotide
  Antisense strand to SEQ ID NO: 1598125
aucccugcguaaagaggac

SEQ ID NO: 1598127 - RNA, 19 nt, Artificial Sequence
  Description of Artificial Sequence: Synthetic oligonucleotide
  Sense strand starting at position 2637 of SEQ ID NO: 1560408
acaauuuggugcucugcaa

SEQ ID NO: 1598128 - RNA, 19 nt, Artificial Sequence
  Description of Artificial Sequence: Synthetic oligonucleotide
  Antisense strand to SEQ ID NO: 1598127
uugcagagcaccaaauugu

SEQ ID NO: 1598129 - RNA, 19 nt, Artificial Sequence
  Description of Artificial Sequence: Synthetic oligonucleotide
  Sense strand starting at position 2641 of SEQ ID NO: 1560408
uuuggugcucugcaaauau

SEQ ID NO: 1598130 - RNA, 19 nt, Artificial Sequence
  Description of Artificial Sequence: Synthetic oligonucleotide
  Antisense strand to SEQ ID NO: 1598129
auauuugcagagcaccaaa

SEQ ID NO: 1598131 - RNA, 19 nt, Artificial Sequence
  Description of Artificial Sequence: Synthetic oligonucleotide
  Sense strand starting at position 2650 of SEQ ID NO: 1560408
cugcaaauaucuguugaaa

SEQ ID NO: 1598132 - RNA, 19 nt, Artificial Sequence
  Description of Artificial Sequence: Synthetic oligonucleotide
  Antisense strand to SEQ ID NO: 1598131
uuucaacagauauuugcag

SEQ ID NO: 1598133 - RNA, 19 nt, Artificial Sequence
  Description of Artificial Sequence: Synthetic oligonucleotide
  Sense strand starting at position 2663 of SEQ ID NO: 1560408
uugaaagaauaucaucaga

SEQ ID NO: 1598134 - RNA, 19 nt, Artificial Sequence
  Description of Artificial Sequence: Synthetic oligonucleotide
  Antisense strand to SEQ ID NO: 1598133
ucugaugauauucuuucaa

SEQ ID NO: 1598135 - RNA, 19 nt, Artificial Sequence
  Description of Artificial Sequence: Synthetic oligonucleotide
  Sense strand starting at position 2710 of SEQ ID NO: 1560408
uugacuuaacuaugaacga

SEQ ID NO: 1598136 - RNA, 19 nt, Artificial Sequence
  Description of Artificial Sequence: Synthetic oligonucleotide
  Antisense strand to SEQ ID NO: 1598135
ucguucauaguuaagucaa

SEQ ID NO: 1598137 - RNA, 19 nt, Artificial Sequence
  Description of Artificial Sequence: Synthetic oligonucleotide
  Sense strand starting at position 2734 of SEQ ID NO: 1560408
gguuguauuuaugaacaag

SEQ ID NO: 1598138 - RNA, 19 nt, Artificial Sequence
  Description of Artificial Sequence: Synthetic oligonucleotide
  Antisense strand to SEQ ID NO: 1598137
cuuguucauaaauacaacc

SEQ ID NO: 1598139 - RNA, 19 nt, Artificial Sequence
  Description of Artificial Sequence: Synthetic oligonucleotide
  Sense strand starting at position 2851 of SEQ ID NO: 1560408
guuugaucaaagugaugua

SEQ ID NO: 1598140 - RNA, 19 nt, Artificial Sequence
  Description of Artificial Sequence: Synthetic oligonucleotide
  Antisense strand to SEQ ID NO: 1598139
uacaucacuuugaucaaac

SEQ ID NO: 1598141 - RNA, 19 nt, Artificial Sequence
  Description of Artificial Sequence: Synthetic oligonucleotide
  Sense strand starting at position 3531 of SEQ ID NO: 1560408
gaggucauggaguguaauu

SEQ ID NO: 1598142 - RNA, 19 nt, Artificial Sequence
  Description of Artificial Sequence: Synthetic oligonucleotide
  Antisense strand to SEQ ID NO: 1598141
aauuacacuccaugaccuc

SEQ ID NO: 1598143 - RNA, 19 nt, Artificial Sequence
  Description of Artificial Sequence: Synthetic oligonucleotide
  Sense strand starting at position 3660 of SEQ ID NO: 1560408
agaucagcaucugaaauca

SEQ ID NO: 1598144 - RNA, 19 nt, Artificial Sequence
  Description of Artificial Sequence: Synthetic oligonucleotide
  Antisense strand to SEQ ID NO: 1598143
ugauuucagaugcugaucu

SEQ ID NO: 1598145 - RNA, 19 nt, Artificial Sequence
  Description of Artificial Sequence: Synthetic oligonucleotide
  Sense strand starting at position 3915 of SEQ ID NO: 1560408
aggugagcugcuuggcuau

SEQ ID NO: 1598146 - RNA, 19 nt, Artificial Sequence
  Description of Artificial Sequence: Synthetic oligonucleotide
  Antisense strand to SEQ ID NO: 1598145
auagccaagcagcucaccu

SEQ ID NO: 1598147 - RNA, 19 nt, Artificial Sequence
  Description of Artificial Sequence: Synthetic oligonucleotide
  Sense strand starting at position 3945 of SEQ ID NO: 1560408
ggcgacuucuggucuagga

SEQ ID NO: 1598148 - RNA, 19 nt, Artificial Sequence
  Description of Artificial Sequence: Synthetic oligonucleotide
  Antisense strand to SEQ ID NO: 1598147
uccuagaccagaagucgcc

SEQ ID NO: 1598149 - RNA, 19 nt, Artificial Sequence
  Description of Artificial Sequence: Synthetic oligonucleotide
  Sense strand starting at position 3947 of SEQ ID NO: 1560408
cgacuucuggucuaggaac

SEQ ID NO: 1598150 - RNA, 19 nt, Artificial Sequence
  Description of Artificial Sequence: Synthetic oligonucleotide
  Antisense strand to SEQ ID NO: 1598149
guuccuagaccagaagucg

SEQ ID NO: 1598151 - RNA, 19 nt, Artificial Sequence
  Description of Artificial Sequence: Synthetic oligonucleotide
  Sense strand starting at position 3965 of SEQ ID NO: 1560408
cagagucgauguguaugau

SEQ ID NO: 1598152 - RNA, 19 nt, Artificial Sequence
  Description of Artificial Sequence: Synthetic oligonucleotide
  Antisense strand to SEQ ID NO: 1598151
aucauacacaucgacucug

SEQ ID NO: 1598153 - RNA, 19 nt, Artificial Sequence
  Description of Artificial Sequence: Synthetic oligonucleotide
  Sense strand starting at position 3966 of SEQ ID NO: 1560408
agagucgauguguaugauu

SEQ ID NO: 1598154 - RNA, 19 nt, Artificial Sequence
  Description of Artificial Sequence: Synthetic oligonucleotide
  Antisense strand to SEQ ID NO: 1598153
aaucauacacaucgacucu

SEQ ID NO: 1598155 - RNA, 19 nt, Artificial Sequence
  Description of Artificial Sequence: Synthetic oligonucleotide
  Sense strand starting at position 3968 of SEQ ID NO: 1560408
agucgauguguaugauuac

SEQ ID NO: 1598156 - RNA, 19 nt, Artificial Sequence
  Description of Artificial Sequence: Synthetic oligonucleotide
  Antisense strand to SEQ ID NO: 1598155
guaaucauacacaucgacu

SEQ ID NO: 1598157 - RNA, 19 nt, Artificial Sequence
  Description of Artificial Sequence: Synthetic oligonucleotide
  Sense strand starting at position 3971 of SEQ ID NO: 1560408
cgauguguaugauuacagu

SEQ ID NO: 1598158 - RNA, 19 nt, Artificial Sequence
  Description of Artificial Sequence: Synthetic oligonucleotide
  Antisense strand to SEQ ID NO: 1598157
acuguaaucauacacaucg

SEQ ID NO: 1598159 - RNA, 19 nt, Artificial Sequence
  Description of Artificial Sequence: Synthetic oligonucleotide
  Sense strand starting at position 302 of SEQ ID NO: 1560409
agggucuuuccugagccua

SEQ ID NO: 1598160 - RNA, 19 nt, Artificial Sequence
  Description of Artificial Sequence: Synthetic oligonucleotide
  Antisense strand to SEQ ID NO: 1598159
uaggcucaggaaagacccu

SEQ ID NO: 1598161 - RNA, 19 nt, Artificial Sequence
  Description of Artificial Sequence: Synthetic oligonucleotide
  Sense strand starting at position 307 of SEQ ID NO: 1560409
cuuuccugagccuagauua

SEQ ID NO: 1598162 - RNA, 19 nt, Artificial Sequence
  Description of Artificial Sequence: Synthetic oligonucleotide
  Antisense strand to SEQ ID NO: 1598161
uaaucuaggcucaggaaag

SEQ ID NO: 1598163 - RNA, 19 nt, Artificial Sequence
  Description of Artificial Sequence: Synthetic oligonucleotide
  Sense strand starting at position 355 of SEQ ID NO: 1560409
ucucuagggugaguacuua

SEQ ID NO: 1598164 - RNA, 19 nt, Artificial Sequence
  Description of Artificial Sequence: Synthetic oligonucleotide
  Antisense strand to SEQ ID NO: 1598163
uaaguacucacccuagaga

SEQ ID NO: 1598165 - RNA, 19 nt, Artificial Sequence
  Description of Artificial Sequence: Synthetic oligonucleotide
  Sense strand starting at position 359 of SEQ ID NO: 1560409
uagggugaguacuuacuaa

SEQ ID NO: 1598166 - RNA, 19 nt, Artificial Sequence
  Description of Artificial Sequence: Synthetic oligonucleotide
  Antisense strand to SEQ ID NO: 1598165
uuaguaaguacucacccua

SEQ ID NO: 1598167 - RNA, 19 nt, Artificial Sequence
  Description of Artificial Sequence: Synthetic oligonucleotide
  Sense strand starting at position 374 of SEQ ID NO: 1560409
cuaaaugacuuagauagga

SEQ ID NO: 1598168 - RNA, 19 nt, Artificial Sequence
  Description of Artificial Sequence: Synthetic oligonucleotide
  Antisense strand to SEQ ID NO: 1598167
uccuaucuaagucauuuag

SEQ ID NO: 1598169 - RNA, 19 nt, Artificial Sequence
  Description of Artificial Sequence: Synthetic oligonucleotide
  Sense strand starting at position 379 of SEQ ID NO: 1560409
ugacuuagauaggauuaga

SEQ ID NO: 1598170 - RNA, 19 nt, Artificial Sequence
  Description of Artificial Sequence: Synthetic oligonucleotide
  Antisense strand to SEQ ID NO: 1598169
ucuaauccuaucuaaguca

SEQ ID NO: 1598171 - RNA, 19 nt, Artificial Sequence
  Description of Artificial Sequence: Synthetic oligonucleotide
  Sense strand starting at position 387 of SEQ ID NO: 1560409
auaggauuagaguggccaa

SEQ ID NO: 1598172 - RNA, 19 nt, Artificial Sequence
  Description of Artificial Sequence: Synthetic oligonucleotide
  Antisense strand to SEQ ID NO: 1598171
uuggccacucuaauccuau

SEQ ID NO: 1598173 - RNA, 19 nt, Artificial Sequence
  Description of Artificial Sequence: Synthetic oligonucleotide
  Sense strand starting at position 390 of SEQ ID NO: 1560409
ggauuagaguggccaaaga

SEQ ID NO: 1598174 - RNA, 19 nt, Artificial Sequence
  Description of Artificial Sequence: Synthetic oligonucleotide
  Antisense strand to SEQ ID NO: 1598173
ucuuuggccacucuaaucc

SEQ ID NO: 1598175 - RNA, 19 nt, Artificial Sequence
  Description of Artificial Sequence: Synthetic oligonucleotide
  Sense strand starting at position 411 of SEQ ID NO: 1560409
ucuguuaaaucccuggaua

SEQ ID NO: 1598176 - RNA, 19 nt, Artificial Sequence
  Description of Artificial Sequence: Synthetic oligonucleotide
  Antisense strand to SEQ ID NO: 1598175
uauccagggauuuaacaga

SEQ ID NO: 1598177 - RNA, 19 nt, Artificial Sequence
  Description of Artificial Sequence: Synthetic oligonucleotide
  Sense strand starting at position 412 of SEQ ID NO: 1560409
cuguuaaaucccuggauaa

SEQ ID NO: 1598178 - RNA, 19 nt, Artificial Sequence
  Description of Artificial Sequence: Synthetic oligonucleotide
  Antisense strand to SEQ ID NO: 1598177
uuauccagggauuuaacag

SEQ ID NO: 1598179 - RNA, 19 nt, Artificial Sequence
  Description of Artificial Sequence: Synthetic oligonucleotide
  Sense strand starting at position 413 of SEQ ID NO: 1560409
uguuaaaucccuggauaaa

SEQ ID NO: 1598180 - RNA, 19 nt, Artificial Sequence
  Description of Artificial Sequence: Synthetic oligonucleotide
  Antisense strand to SEQ ID NO: 1598179
uuuauccagggauuuaaca

SEQ ID NO: 1598181 - RNA, 19 nt, Artificial Sequence
  Description of Artificial Sequence: Synthetic oligonucleotide
  Sense strand starting at position 508 of SEQ ID NO: 1560409
gagauuuggucauauugau

SEQ ID NO: 1598182 - RNA, 19 nt, Artificial Sequence
  Description of Artificial Sequence: Synthetic oligonucleotide
  Antisense strand to SEQ ID NO: 1598181
aucaauaugaccaaaucuc

SEQ ID NO: 1598183 - RNA, 19 nt, Artificial Sequence
  Description of Artificial Sequence: Synthetic oligonucleotide
  Sense strand starting at position 540 of SEQ ID NO: 1560409
uuguaaaguggccagugaa

SEQ ID NO: 1598184 - RNA, 19 nt, Artificial Sequence
  Description of Artificial Sequence: Synthetic oligonucleotide
  Antisense strand to SEQ ID NO: 1598183
uucacuggccacuuuacaa

SEQ ID NO: 1598185 - RNA, 19 nt, Artificial Sequence
  Description of Artificial Sequence: Synthetic oligonucleotide
  Sense strand starting at position 1052 of SEQ ID NO: 1560409
uauccauugucccugguga

SEQ ID NO: 1598186 - RNA, 19 nt, Artificial Sequence
  Description of Artificial Sequence: Synthetic oligonucleotide
  Antisense strand to SEQ ID NO: 1598185
ucaccagggacaauggaua

SEQ ID NO: 1598187 - RNA, 19 nt, Artificial Sequence
  Description of Artificial Sequence: Synthetic oligonucleotide
  Sense strand starting at position 1077 of SEQ ID NO: 1560409
cccagaggccuuuauccuu

SEQ ID NO: 1598188 - RNA, 19 nt, Artificial Sequence
  Description of Artificial Sequence: Synthetic oligonucleotide
  Antisense strand to SEQ ID NO: 1598187
aaggauaaaggccucuggg

SEQ ID NO: 1598189 - RNA, 19 nt, Artificial Sequence
  Description of Artificial Sequence: Synthetic oligonucleotide
  Sense strand starting at position 1407 of SEQ ID NO: 1560409
gacaucaucggcugcugaa

SEQ ID NO: 1598190 - RNA, 19 nt, Artificial Sequence
  Description of Artificial Sequence: Synthetic oligonucleotide
  Antisense strand to SEQ ID NO: 1598189
uucagcagccgaugauguc

SEQ ID NO: 1598191 - RNA, 19 nt, Artificial Sequence
  Description of Artificial Sequence: Synthetic oligonucleotide
  Sense strand starting at position 1663 of SEQ ID NO: 1560409
gagcgauuccgcuccaggu

SEQ ID NO: 1598192 - RNA, 19 nt, Artificial Sequence
  Description of Artificial Sequence: Synthetic oligonucleotide
  Antisense strand to SEQ ID NO: 1598191
accuggagcggaaucgcuc

SEQ ID NO: 1598193 - RNA, 19 nt, Artificial Sequence
  Description of Artificial Sequence: Synthetic oligonucleotide
  Sense strand starting at position 1664 of SEQ ID NO: 1560409
agcgauuccgcuccaggua

SEQ ID NO: 1598194 - RNA, 19 nt, Artificial Sequence
  Description of Artificial Sequence: Synthetic oligonucleotide
  Antisense strand to SEQ ID NO: 1598193
uaccuggagcggaaucgcu

SEQ ID NO: 1598195 - RNA, 19 nt, Artificial Sequence
  Description of Artificial Sequence: Synthetic oligonucleotide
  Sense strand starting at position 1665 of SEQ ID NO: 1560409
gcgauuccgcuccagguaa

SEQ ID NO: 1598196 - RNA, 19 nt, Artificial Sequence
  Description of Artificial Sequence: Synthetic oligonucleotide
  Antisense strand to SEQ ID NO: 1598195
uuaccuggagcggaaucgc

SEQ ID NO: 1598197 - RNA, 19 nt, Artificial Sequence
  Description of Artificial Sequence: Synthetic oligonucleotide
  Sense strand starting at position 1696 of SEQ ID NO: 1560409
gccaccgaugcuucuguua

SEQ ID NO: 1598198 - RNA, 19 nt, Artificial Sequence
  Description of Artificial Sequence: Synthetic oligonucleotide
  Antisense strand to SEQ ID NO: 1598197
uaacagaagcaucgguggc

SEQ ID NO: 1598199 - RNA, 19 nt, Artificial Sequence
  Description of Artificial Sequence: Synthetic oligonucleotide
  Sense strand starting at position 1709 of SEQ ID NO: 1560409
cuguuaucguggccauuua

SEQ ID NO: 1598200 - RNA, 19 nt, Artificial Sequence
  Description of Artificial Sequence: Synthetic oligonucleotide
  Antisense strand to SEQ ID NO: 1598199
uaaauggccacgauaacag

SEQ ID NO: 1598201 - RNA, 19 nt, Artificial Sequence
  Description of Artificial Sequence: Synthetic oligonucleotide
  Sense strand starting at position 1710 of SEQ ID NO: 1560409
uguuaucguggccauuuau

SEQ ID NO: 1598202 - RNA, 19 nt, Artificial Sequence
  Description of Artificial Sequence: Synthetic oligonucleotide
  Antisense strand to SEQ ID NO: 1598201
auaaauggccacgauaaca

SEQ ID NO: 1598203 - RNA, 19 nt, Artificial Sequence
  Description of Artificial Sequence: Synthetic oligonucleotide
  Sense strand starting at position 2375 of SEQ ID NO: 1560409
uggagaucaugguuucaga

SEQ ID NO: 1598204 - RNA, 19 nt, Artificial Sequence
  Description of Artificial Sequence: Synthetic oligonucleotide
  Antisense strand to SEQ ID NO: 1598203
ucugaaaccaugaucucca

SEQ ID NO: 1598205 - RNA, 19 nt, Artificial Sequence
  Description of Artificial Sequence: Synthetic oligonucleotide
  Sense strand starting at position 2556 of SEQ ID NO: 1560409
guccucuuuacgcagggau

SEQ ID NO: 1598206 - RNA, 19 nt, Artificial Sequence
  Description of Artificial Sequence: Synthetic oligonucleotide
  Antisense strand to SEQ ID NO: 1598205
aucccugcguaaagaggac

SEQ ID NO: 1598207 - RNA, 19 nt, Artificial Sequence
  Description of Artificial Sequence: Synthetic oligonucleotide
  Sense strand starting at position 2625 of SEQ ID NO: 1560409
acaauuuggugcucugcaa

SEQ ID NO: 1598208 - RNA, 19 nt, Artificial Sequence
  Description of Artificial Sequence: Synthetic oligonucleotide
  Antisense strand to SEQ ID NO: 1598207
uugcagagcaccaaauugu

SEQ ID NO: 1598209 - RNA, 19 nt, Artificial Sequence
  Description of Artificial Sequence: Synthetic oligonucleotide
  Sense strand starting at position 2629 of SEQ ID NO: 1560409
uuuggugcucugcaaauau

SEQ ID NO: 1598210 - RNA, 19 nt, Artificial Sequence
  Description of Artificial Sequence: Synthetic oligonucleotide
  Antisense strand to SEQ ID NO: 1598209
auauuugcagagcaccaaa

SEQ ID NO: 1598211 - RNA, 19 nt, Artificial Sequence
  Description of Artificial Sequence: Synthetic oligonucleotide
  Sense strand starting at position 2638 of SEQ ID NO: 1560409
cugcaaauaucuguugaaa

SEQ ID NO: 1598212 - RNA, 19 nt, Artificial Sequence
  Description of Artificial Sequence: Synthetic oligonucleotide
  Antisense strand to SEQ ID NO: 1598211
uuucaacagauauuugcag

SEQ ID NO: 1598213 - RNA, 19 nt, Artificial Sequence
  Description of Artificial Sequence: Synthetic oligonucleotide
  Sense strand starting at position 2651 of SEQ ID NO: 1560409
uugaaagaauaucaucaga

SEQ ID NO: 1598214 - RNA, 19 nt, Artificial Sequence
  Description of Artificial Sequence: Synthetic oligonucleotide
  Antisense strand to SEQ ID NO: 1598213
ucugaugauauucuuucaa

SEQ ID NO: 1598215 - RNA, 19 nt, Artificial Sequence
  Description of Artificial Sequence: Synthetic oligonucleotide
  Sense strand starting at position 2698 of SEQ ID NO: 1560409
uugacuuaacuaugaacga

SEQ ID NO: 1598216 - RNA, 19 nt, Artificial Sequence
  Description of Artificial Sequence: Synthetic oligonucleotide
  Antisense strand to SEQ ID NO: 1598215
ucguucauaguuaagucaa

SEQ ID NO: 1598217 - RNA, 19 nt, Artificial Sequence
  Description of Artificial Sequence: Synthetic oligonucleotide
  Sense strand starting at position 2722 of SEQ ID NO: 1560409
gguuguauuuaugaacaag

SEQ ID NO: 1598218 - RNA, 19 nt, Artificial Sequence
  Description of Artificial Sequence: Synthetic oligonucleotide
  Antisense strand to SEQ ID NO: 1598217
cuuguucauaaauacaacc

SEQ ID NO: 1598219 - RNA, 19 nt, Artificial Sequence
  Description of Artificial Sequence: Synthetic oligonucleotide
  Sense strand starting at position 2839 of SEQ ID NO: 1560409
guuugaucaaagugaugua

SEQ ID NO: 1598220 - RNA, 19 nt, Artificial Sequence
  Description of Artificial Sequence: Synthetic oligonucleotide
  Antisense strand to SEQ ID NO: 1598219
uacaucacuuugaucaaac

SEQ ID NO: 1598221 - RNA, 19 nt, Artificial Sequence
  Description of Artificial Sequence: Synthetic oligonucleotide
  Sense strand starting at position 3519 of SEQ ID NO: 1560409
gaggucauggaguguaauu

SEQ ID NO: 1598222 - RNA, 19 nt, Artificial Sequence
  Description of Artificial Sequence: Synthetic oligonucleotide
  Antisense strand to SEQ ID NO: 1598221
aauuacacuccaugaccuc

SEQ ID NO: 1598223 - RNA, 19 nt, Artificial Sequence
  Description of Artificial Sequence: Synthetic oligonucleotide
  Sense strand starting at position 3648 of SEQ ID NO: 1560409
agaucagcaucugaaauca

SEQ ID NO: 1598224 - RNA, 19 nt, Artificial Sequence
  Description of Artificial Sequence: Synthetic oligonucleotide
  Antisense strand to SEQ ID NO: 1598223
ugauuucagaugcugaucu

SEQ ID NO: 1598225 - RNA, 19 nt, Artificial Sequence
  Description of Artificial Sequence: Synthetic oligonucleotide
  Sense strand starting at position 3903 of SEQ ID NO: 1560409
aggugagcugcuuggcuau

SEQ ID NO: 1598226 - RNA, 19 nt, Artificial Sequence
  Description of Artificial Sequence: Synthetic oligonucleotide
  Antisense strand to SEQ ID NO: 1598225
auagccaagcagcucaccu

SEQ ID NO: 1598227 - RNA, 19 nt, Artificial Sequence
  Description of Artificial Sequence: Synthetic oligonucleotide
  Sense strand starting at position 3933 of SEQ ID NO: 1560409
ggcgacuucuggucuagga

SEQ ID NO: 1598228 - RNA, 19 nt, Artificial Sequence
  Description of Artificial Sequence: Synthetic oligonucleotide
  Antisense strand to SEQ ID NO: 1598227
uccuagaccagaagucgcc

SEQ ID NO: 1598229 - RNA, 19 nt, Artificial Sequence
  Description of Artificial Sequence: Synthetic oligonucleotide
  Sense strand starting at position 3935 of SEQ ID NO: 1560409
cgacuucuggucuaggaac

SEQ ID NO: 1598230 - RNA, 19 nt, Artificial Sequence
  Description of Artificial Sequence: Synthetic oligonucleotide
  Antisense strand to SEQ ID NO: 1598229
guuccuagaccagaagucg

SEQ ID NO: 1598231 - RNA, 19 nt, Artificial Sequence
  Description of Artificial Sequence: Synthetic oligonucleotide
  Sense strand starting at position 3953 of SEQ ID NO: 1560409
cagagucgauguguaugau

SEQ ID NO: 1598232 - RNA, 19 nt, Artificial Sequence
  Description of Artificial Sequence: Synthetic oligonucleotide
  Antisense strand to SEQ ID NO: 1598231
aucauacacaucgacucug

SEQ ID NO: 1598233 - RNA, 19 nt, Artificial Sequence
  Description of Artificial Sequence: Synthetic oligonucleotide
  Sense strand starting at position 3954 of SEQ ID NO: 1560409
agagucgauguguaugauu

SEQ ID NO: 1598234 - RNA, 19 nt, Artificial Sequence
  Description of Artificial Sequence: Synthetic oligonucleotide
  Antisense strand to SEQ ID NO: 1598233
aaucauacacaucgacucu

SEQ ID NO: 1598235 - RNA, 19 nt, Artificial Sequence
  Description of Artificial Sequence: Synthetic oligonucleotide
  Sense strand starting at position 3956 of SEQ ID NO: 1560409
agucgauguguaugauuac

SEQ ID NO: 1598236 - RNA, 19 nt, Artificial Sequence
  Description of Artificial Sequence: Synthetic oligonucleotide
  Antisense strand to SEQ ID NO: 1598235
guaaucauacacaucgacu

SEQ ID NO: 1598237 - RNA, 19 nt, Artificial Sequence
  Description of Artificial Sequence: Synthetic oligonucleotide
  Sense strand starting at position 3959 of SEQ ID NO: 1560409
cgauguguaugauuacagu

SEQ ID NO: 1598238 - RNA, 19 nt, Artificial Sequence
  Description of Artificial Sequence: Synthetic oligonucleotide
  Antisense strand to SEQ ID NO: 1598237
acuguaaucauacacaucg

SEQ ID NO: 1598239 - RNA, 19 nt, Artificial Sequence
  Description of Artificial Sequence: Synthetic oligonucleotide
  Sense strand starting at position 139 of SEQ ID NO: 1560410
acuggacucuugggugaaa

SEQ ID NO: 1598240 - RNA, 19 nt, Artificial Sequence
  Description of Artificial Sequence: Synthetic oligonucleotide
  Antisense strand to SEQ ID NO: 1598239
uuucacccaagaguccagu

SEQ ID NO: 1598241 - RNA, 19 nt, Artificial Sequence
  Description of Artificial Sequence: Synthetic oligonucleotide
  Sense strand starting at position 140 of SEQ ID NO: 1560410
cuggacucuugggugaaau

SEQ ID NO: 1598242 - RNA, 19 nt, Artificial Sequence
  Description of Artificial Sequence: Synthetic oligonucleotide
  Antisense strand to SEQ ID NO: 1598241
auuucacccaagaguccag

SEQ ID NO: 1598243 - RNA, 19 nt, Artificial Sequence
  Description of Artificial Sequence: Synthetic oligonucleotide
  Sense strand starting at position 141 of SEQ ID NO: 1560410
uggacucuugggugaaauu

SEQ ID NO: 1598244 - RNA, 19 nt, Artificial Sequence
  Description of Artificial Sequence: Synthetic oligonucleotide
  Antisense strand to SEQ ID NO: 1598243
aauuucacccaagagucca

SEQ ID NO: 1598245 - RNA, 19 nt, Artificial Sequence
  Description of Artificial Sequence: Synthetic oligonucleotide
  Sense strand starting at position 577 of SEQ ID NO: 1560410
aggaauuccuguucccaaa

SEQ ID NO: 1598246 - RNA, 19 nt, Artificial Sequence
  Description of Artificial Sequence: Synthetic oligonucleotide
  Antisense strand to SEQ ID NO: 1598245
uuugggaacaggaauuccu

SEQ ID NO: 1598247 - RNA, 19 nt, Artificial Sequence
  Description of Artificial Sequence: Synthetic oligonucleotide
  Sense strand starting at position 2230 of SEQ ID NO: 1560410
gggcuacuugggagucgua

SEQ ID NO: 1598248 - RNA, 19 nt, Artificial Sequence
  Description of Artificial Sequence: Synthetic oligonucleotide
  Antisense strand to SEQ ID NO: 1598247
uacgacucccaaguagccc

SEQ ID NO: 1598249 - RNA, 19 nt, Artificial Sequence
  Description of Artificial Sequence: Synthetic oligonucleotide
  Sense strand starting at position 2233 of SEQ ID NO: 1560410
cuacuugggagucguaguu

SEQ ID NO: 1598250 - RNA, 19 nt, Artificial Sequence
  Description of Artificial Sequence: Synthetic oligonucleotide
  Antisense strand to SEQ ID NO: 1598249
aacuacgacucccaaguag

SEQ ID NO: 1598251 - RNA, 19 nt, Artificial Sequence
  Description of Artificial Sequence: Synthetic oligonucleotide
  Sense strand starting at position 2317 of SEQ ID NO: 1560410
cucagaucuccucgacuuc

SEQ ID NO: 1598252 - RNA, 19 nt, Artificial Sequence
  Description of Artificial Sequence: Synthetic oligonucleotide
  Antisense strand to SEQ ID NO: 1598251
gaagucgaggagaucugag

SEQ ID NO: 1598253 - RNA, 19 nt, Artificial Sequence
  Description of Artificial Sequence: Synthetic oligonucleotide
  Sense strand starting at position 2411 of SEQ ID NO: 1560410
ucaacaguuguuuacacua

SEQ ID NO: 1598254 - RNA, 19 nt, Artificial Sequence
  Description of Artificial Sequence: Synthetic oligonucleotide
  Antisense strand to SEQ ID NO: 1598253
uaguguaaacaacuguuga

SEQ ID NO: 1598255 - RNA, 19 nt, Artificial Sequence
  Description of Artificial Sequence: Synthetic oligonucleotide
  Sense strand starting at position 2416 of SEQ ID NO: 1560410
aguuguuuacacuacagga

SEQ ID NO: 1598256 - RNA, 19 nt, Artificial Sequence
  Description of Artificial Sequence: Synthetic oligonucleotide
  Antisense strand to SEQ ID NO: 1598255
uccuguaguguaaacaacu

SEQ ID NO: 1598257 - RNA, 19 nt, Artificial Sequence
  Description of Artificial Sequence: Synthetic oligonucleotide
  Sense strand starting at position 2563 of SEQ ID NO: 1560410
gcuccugguucuuuagaga

SEQ ID NO: 1598258 - RNA, 19 nt, Artificial Sequence
  Description of Artificial Sequence: Synthetic oligonucleotide
  Antisense strand to SEQ ID NO: 1598257
ucucuaaagaaccaggagc

SEQ ID NO: 1598259 - RNA, 19 nt, Artificial Sequence
  Description of Artificial Sequence: Synthetic oligonucleotide
  Sense strand starting at position 2566 of SEQ ID NO: 1560410
ccugguucuuuagagagga

SEQ ID NO: 1598260 - RNA, 19 nt, Artificial Sequence
  Description of Artificial Sequence: Synthetic oligonucleotide
  Antisense strand to SEQ ID NO: 1598259
uccucucuaaagaaccagg

SEQ ID NO: 1598261 - RNA, 19 nt, Artificial Sequence
  Description of Artificial Sequence: Synthetic oligonucleotide
  Sense strand starting at position 2673 of SEQ ID NO: 1560410
gcucuugguuccugaguua

SEQ ID NO: 1598262 - RNA, 19 nt, Artificial Sequence
  Description of Artificial Sequence: Synthetic oligonucleotide
  Antisense strand to SEQ ID NO: 1598261
uaacucaggaaccaagagc

SEQ ID NO: 1598263 - RNA, 19 nt, Artificial Sequence
  Description of Artificial Sequence: Synthetic oligonucleotide
  Sense strand starting at position 2676 of SEQ ID NO: 1560410
cuugguuccugaguuagaa

SEQ ID NO: 1598264 - RNA, 19 nt, Artificial Sequence
  Description of Artificial Sequence: Synthetic oligonucleotide
  Antisense strand to SEQ ID NO: 1598263
uucuaacucaggaaccaag

SEQ ID NO: 1598265 - RNA, 19 nt, Artificial Sequence
  Description of Artificial Sequence: Synthetic oligonucleotide
  Sense strand starting at position 2678 of SEQ ID NO: 1560410
ugguuccugaguuagaaag

SEQ ID NO: 1598266 - RNA, 19 nt, Artificial Sequence
  Description of Artificial Sequence: Synthetic oligonucleotide
  Antisense strand to SEQ ID NO: 1598265
cuuucuaacucaggaacca

SEQ ID NO: 1598267 - RNA, 19 nt, Artificial Sequence
  Description of Artificial Sequence: Synthetic oligonucleotide
  Sense strand starting at position 2680 of SEQ ID NO: 1560410
guuccugaguuagaaagga

SEQ ID NO: 1598268 - RNA, 19 nt, Artificial Sequence
  Description of Artificial Sequence: Synthetic oligonucleotide
  Antisense strand to SEQ ID NO: 1598267
uccuuucuaacucaggaac

SEQ ID NO: 1598269 - RNA, 19 nt, Artificial Sequence
  Description of Artificial Sequence: Synthetic oligonucleotide
  Sense strand starting at position 2705 of SEQ ID NO: 1560410
agcucugaguccuccagaa

SEQ ID NO: 1598270 - RNA, 19 nt, Artificial Sequence
  Description of Artificial Sequence: Synthetic oligonucleotide
  Antisense strand to SEQ ID NO: 1598269
uucuggaggacucagagcu

SEQ ID NO: 1598271 - RNA, 19 nt, Artificial Sequence
  Description of Artificial Sequence: Synthetic oligonucleotide
  Sense strand starting at position 2707 of SEQ ID NO: 1560410
cucugaguccuccagaaau

SEQ ID NO: 1598272 - RNA, 19 nt, Artificial Sequence
  Description of Artificial Sequence: Synthetic oligonucleotide
  Antisense strand to SEQ ID NO: 1598271
auuucuggaggacucagag

SEQ ID NO: 1598273 - RNA, 19 nt, Artificial Sequence
  Description of Artificial Sequence: Synthetic oligonucleotide
  Sense strand starting at position 2795 of SEQ ID NO: 1560410
ucucaagucuguuauugaa

SEQ ID NO: 1598274 - RNA, 19 nt, Artificial Sequence
  Description of Artificial Sequence: Synthetic oligonucleotide
  Antisense strand to SEQ ID NO: 1598273
uucaauaacagacuugaga

SEQ ID NO: 1598275 - RNA, 19 nt, Artificial Sequence
  Description of Artificial Sequence: Synthetic oligonucleotide
  Sense strand starting at position 2797 of SEQ ID NO: 1560410
ucaagucuguuauugaaga

SEQ ID NO: 1598276 - RNA, 19 nt, Artificial Sequence
  Description of Artificial Sequence: Synthetic oligonucleotide
  Antisense strand to SEQ ID NO: 1598275
ucuucaauaacagacuuga

SEQ ID NO: 1598277 - RNA, 19 nt, Artificial Sequence
  Description of Artificial Sequence: Synthetic oligonucleotide
  Sense strand starting at position 2798 of SEQ ID NO: 1560410
caagucuguuauugaagau

SEQ ID NO: 1598278 - RNA, 19 nt, Artificial Sequence
  Description of Artificial Sequence: Synthetic oligonucleotide
  Antisense strand to SEQ ID NO: 1598277
aucuucaauaacagacuug

SEQ ID NO: 1598279 - RNA, 19 nt, Artificial Sequence
  Description of Artificial Sequence: Synthetic oligonucleotide
  Sense strand starting at position 2858 of SEQ ID NO: 1560410
gaagcauaggucuguguuc

SEQ ID NO: 1598280 - RNA, 19 nt, Artificial Sequence
  Description of Artificial Sequence: Synthetic oligonucleotide
  Antisense strand to SEQ ID NO: 1598279
gaacacagaccuaugcuuc

SEQ ID NO: 1598281 - RNA, 19 nt, Artificial Sequence
  Description of Artificial Sequence: Synthetic oligonucleotide
  Sense strand starting at position 2860 of SEQ ID NO: 1560410
agcauaggucuguguucag

SEQ ID NO: 1598282 - RNA, 19 nt, Artificial Sequence
  Description of Artificial Sequence: Synthetic oligonucleotide
  Antisense strand to SEQ ID NO: 1598281
cugaacacagaccuaugcu

SEQ ID NO: 1598283 - RNA, 19 nt, Artificial Sequence
  Description of Artificial Sequence: Synthetic oligonucleotide
  Sense strand starting at position 2895 of SEQ ID NO: 1560410
ccgacacaucgaugggaca

SEQ ID NO: 1598284 - RNA, 19 nt, Artificial Sequence
  Description of Artificial Sequence: Synthetic oligonucleotide
  Antisense strand to SEQ ID NO: 1598283
ugucccaucgaugugucgg

SEQ ID NO: 1598285 - RNA, 19 nt, Artificial Sequence
  Description of Artificial Sequence: Synthetic oligonucleotide
  Sense strand starting at position 2947 of SEQ ID NO: 1560410
ucugguguccaagguaaca

SEQ ID NO: 1598286 - RNA, 19 nt, Artificial Sequence
  Description of Artificial Sequence: Synthetic oligonucleotide
  Antisense strand to SEQ ID NO: 1598285
uguuaccuuggacaccaga

SEQ ID NO: 1598287 - RNA, 19 nt, Artificial Sequence
  Description of Artificial Sequence: Synthetic oligonucleotide
  Sense strand starting at position 2983 of SEQ ID NO: 1560410
gaugcagagaacggugaau

SEQ ID NO: 1598288 - RNA, 19 nt, Artificial Sequence
  Description of Artificial Sequence: Synthetic oligonucleotide
  Antisense strand to SEQ ID NO: 1598287
auucaccguucucugcauc

SEQ ID NO: 1598289 - RNA, 19 nt, Artificial Sequence
  Description of Artificial Sequence: Synthetic oligonucleotide
  Sense strand starting at position 2992 of SEQ ID NO: 1560410
aacggugaauguugcagaa

SEQ ID NO: 1598290 - RNA, 19 nt, Artificial Sequence
  Description of Artificial Sequence: Synthetic oligonucleotide
  Antisense strand to SEQ ID NO: 1598289
uucugcaacauucaccguu

SEQ ID NO: 1598291 - RNA, 19 nt, Artificial Sequence
  Description of Artificial Sequence: Synthetic oligonucleotide
  Sense strand starting at position 2994 of SEQ ID NO: 1560410
cggugaauguugcagaaca

SEQ ID NO: 1598292 - RNA, 19 nt, Artificial Sequence
  Description of Artificial Sequence: Synthetic oligonucleotide
  Antisense strand to SEQ ID NO: 1598291
uguucugcaacauucaccg

SEQ ID NO: 1598293 - RNA, 19 nt, Artificial Sequence
  Description of Artificial Sequence: Synthetic oligonucleotide
  Sense strand starting at position 2996 of SEQ ID NO: 1560410
gugaauguugcagaacaga

SEQ ID NO: 1598294 - RNA, 19 nt, Artificial Sequence
  Description of Artificial Sequence: Synthetic oligonucleotide
  Antisense strand to SEQ ID NO: 1598293
ucuguucugcaacauucac

SEQ ID NO: 1598295 - RNA, 19 nt, Artificial Sequence
  Description of Artificial Sequence: Synthetic oligonucleotide
  Sense strand starting at position 3104 of SEQ ID NO: 1560410
gacuuagacucuuaaaggg

SEQ ID NO: 1598296 - RNA, 19 nt, Artificial Sequence
  Description of Artificial Sequence: Synthetic oligonucleotide
  Antisense strand to SEQ ID NO: 1598295
cccuuuaagagucuaaguc

SEQ ID NO: 1598297 - RNA, 19 nt, Artificial Sequence
  Description of Artificial Sequence: Synthetic oligonucleotide
  Sense strand starting at position 3173 of SEQ ID NO: 1560410
gauugaucuaguggagaug

SEQ ID NO: 1598298 - RNA, 19 nt, Artificial Sequence
  Description of Artificial Sequence: Synthetic oligonucleotide
  Antisense strand to SEQ ID NO: 1598297
caucuccacuagaucaauc

SEQ ID NO: 1598299 - RNA, 19 nt, Artificial Sequence
  Description of Artificial Sequence: Synthetic oligonucleotide
  Sense strand starting at position 3509 of SEQ ID NO: 1560410
uuucuacugcucuguagga

SEQ ID NO: 1598300 - RNA, 19 nt, Artificial Sequence
  Description of Artificial Sequence: Synthetic oligonucleotide
  Antisense strand to SEQ ID NO: 1598299
uccuacagagcaguagaaa

SEQ ID NO: 1598301 - RNA, 19 nt, Artificial Sequence
  Description of Artificial Sequence: Synthetic oligonucleotide
  Sense strand starting at position 3547 of SEQ ID NO: 1560410
uucuccucacuguguauaa

SEQ ID NO: 1598302 - RNA, 19 nt, Artificial Sequence
  Description of Artificial Sequence: Synthetic oligonucleotide
  Antisense strand to SEQ ID NO: 1598301
uuauacacagugaggagaa

SEQ ID NO: 1598303 - RNA, 19 nt, Artificial Sequence
  Description of Artificial Sequence: Synthetic oligonucleotide
  Sense strand starting at position 3548 of SEQ ID NO: 1560410
ucuccucacuguguauaaa

SEQ ID NO: 1598304 - RNA, 19 nt, Artificial Sequence
  Description of Artificial Sequence: Synthetic oligonucleotide
  Antisense strand to SEQ ID NO: 1598303
uuuauacacagugaggaga

SEQ ID NO: 1598305 - RNA, 19 nt, Artificial Sequence
  Description of Artificial Sequence: Synthetic oligonucleotide
  Sense strand starting at position 167 of SEQ ID NO: 1560411
gcgcuaacccagucgaauu

SEQ ID NO: 1598306 - RNA, 19 nt, Artificial Sequence
  Description of Artificial Sequence: Synthetic oligonucleotide
  Antisense strand to SEQ ID NO: 1598305
aauucgacuggguuagcgc

SEQ ID NO: 1598307 - RNA, 19 nt, Artificial Sequence
  Description of Artificial Sequence: Synthetic oligonucleotide
  Sense strand starting at position 168 of SEQ ID NO: 1560411
cgcuaacccagucgaauuu

SEQ ID NO: 1598308 - RNA, 19 nt, Artificial Sequence
  Description of Artificial Sequence: Synthetic oligonucleotide
  Antisense strand to SEQ ID NO: 1598307
aaauucgacuggguuagcg

SEQ ID NO: 1598309 - RNA, 19 nt, Artificial Sequence
  Description of Artificial Sequence: Synthetic oligonucleotide
  Sense strand starting at position 436 of SEQ ID NO: 1560411
agcuuuggcugcuaaggaa

SEQ ID NO: 1598310 - RNA, 19 nt, Artificial Sequence
  Description of Artificial Sequence: Synthetic oligonucleotide
  Antisense strand to SEQ ID NO: 1598309
uuccuuagcagccaaagcu

SEQ ID NO: 1598311 - RNA, 19 nt, Artificial Sequence
  Description of Artificial Sequence: Synthetic oligonucleotide
  Sense strand starting at position 484 of SEQ ID NO: 1560411
ccucgacuugaaggugauu

SEQ ID NO: 1598312 - RNA, 19 nt, Artificial Sequence
  Description of Artificial Sequence: Synthetic oligonucleotide
  Antisense strand to SEQ ID NO: 1598311
aaucaccuucaagucgagg

SEQ ID NO: 1598313 - RNA, 19 nt, Artificial Sequence
  Description of Artificial Sequence: Synthetic oligonucleotide
  Sense strand starting at position 1245 of SEQ ID NO: 1560411
cucggagacuagucagaaa

SEQ ID NO: 1598314 - RNA, 19 nt, Artificial Sequence
  Description of Artificial Sequence: Synthetic oligonucleotide
  Antisense strand to SEQ ID NO: 1598313
uuucugacuagucuccgag

SEQ ID NO: 1598315 - RNA, 19 nt, Artificial Sequence
  Description of Artificial Sequence: Synthetic oligonucleotide
  Sense strand starting at position 1308 of SEQ ID NO: 1560411
gcuggcuguacuugaucua

SEQ ID NO: 1598316 - RNA, 19 nt, Artificial Sequence
  Description of Artificial Sequence: Synthetic oligonucleotide
  Antisense strand to SEQ ID NO: 1598315
uagaucaaguacagccagc

SEQ ID NO: 1598317 - RNA, 19 nt, Artificial Sequence
  Description of Artificial Sequence: Synthetic oligonucleotide
  Sense strand starting at position 1309 of SEQ ID NO: 1560411
cuggcuguacuugaucuaa

SEQ ID NO: 1598318 - RNA, 19 nt, Artificial Sequence
  Description of Artificial Sequence: Synthetic oligonucleotide
  Antisense strand to SEQ ID NO: 1598317
uuagaucaaguacagccag

SEQ ID NO: 1598319 - RNA, 19 nt, Artificial Sequence
  Description of Artificial Sequence: Synthetic oligonucleotide
  Sense strand starting at position 1311 of SEQ ID NO: 1560411
ggcuguacuugaucuaaug

SEQ ID NO: 1598320 - RNA, 19 nt, Artificial Sequence
  Description of Artificial Sequence: Synthetic oligonucleotide
  Antisense strand to SEQ ID NO: 1598319
cauuagaucaaguacagcc

SEQ ID NO: 1598321 - RNA, 19 nt, Artificial Sequence
  Description of Artificial Sequence: Synthetic oligonucleotide
  Sense strand starting at position 1442 of SEQ ID NO: 1560411
cacagcugcuguuaagaua

SEQ ID NO: 1598322 - RNA, 19 nt, Artificial Sequence
  Description of Artificial Sequence: Synthetic oligonucleotide
  Antisense strand to SEQ ID NO: 1598321
uaucuuaacagcagcugug

SEQ ID NO: 1598323 - RNA, 19 nt, Artificial Sequence
  Description of Artificial Sequence: Synthetic oligonucleotide
  Sense strand starting at position 1474 of SEQ ID NO: 1560411
cccauuauguacuaagguu

SEQ ID NO: 1598324 - RNA, 19 nt, Artificial Sequence
  Description of Artificial Sequence: Synthetic oligonucleotide
  Antisense strand to SEQ ID NO: 1598323
aaccuuaguacauaauggg

SEQ ID NO: 1598325 - RNA, 19 nt, Artificial Sequence
  Description of Artificial Sequence: Synthetic oligonucleotide
  Sense strand starting at position 1959 of SEQ ID NO: 1560411
uugaaauacuccgaggucu

SEQ ID NO: 1598326 - RNA, 19 nt, Artificial Sequence
  Description of Artificial Sequence: Synthetic oligonucleotide
  Antisense strand to SEQ ID NO: 1598325
agaccucggaguauuucaa

SEQ ID NO: 1598327 - RNA, 19 nt, Artificial Sequence
  Description of Artificial Sequence: Synthetic oligonucleotide
  Sense strand starting at position 1961 of SEQ ID NO: 1560411
gaaauacuccgaggucuug

SEQ ID NO: 1598328 - RNA, 19 nt, Artificial Sequence
  Description of Artificial Sequence: Synthetic oligonucleotide
  Antisense strand to SEQ ID NO: 1598327
caagaccucggaguauuuc

SEQ ID NO: 1598329 - RNA, 19 nt, Artificial Sequence
  Description of Artificial Sequence: Synthetic oligonucleotide
  Sense strand starting at position 2968 of SEQ ID NO: 1560411
cuggacuuucuccgaggau

SEQ ID NO: 1598330 - RNA, 19 nt, Artificial Sequence
  Description of Artificial Sequence: Synthetic oligonucleotide
  Antisense strand to SEQ ID NO: 1598329
auccucggagaaaguccag

SEQ ID NO: 1598331 - RNA, 19 nt, Artificial Sequence
  Description of Artificial Sequence: Synthetic oligonucleotide
  Sense strand starting at position 2969 of SEQ ID NO: 1560411
uggacuuucuccgaggaug

SEQ ID NO: 1598332 - RNA, 19 nt, Artificial Sequence
  Description of Artificial Sequence: Synthetic oligonucleotide
  Antisense strand to SEQ ID NO: 1598331
cauccucggagaaagucca

SEQ ID NO: 1598333 - RNA, 19 nt, Artificial Sequence
  Description of Artificial Sequence: Synthetic oligonucleotide
  Sense strand starting at position 3012 of SEQ ID NO: 1560411
gacccucaccguugaggaa

SEQ ID NO: 1598334 - RNA, 19 nt, Artificial Sequence
  Description of Artificial Sequence: Synthetic oligonucleotide
  Antisense strand to SEQ ID NO: 1598333
uuccucaacggugaggguc

SEQ ID NO: 1598335 - RNA, 19 nt, Artificial Sequence
  Description of Artificial Sequence: Synthetic oligonucleotide
  Sense strand starting at position 3381 of SEQ ID NO: 1560411
gacacugaucccgauuacu

SEQ ID NO: 1598336 - RNA, 19 nt, Artificial Sequence
  Description of Artificial Sequence: Synthetic oligonucleotide
  Antisense strand to SEQ ID NO: 1598335
aguaaucgggaucaguguc

SEQ ID NO: 1598337 - RNA, 19 nt, Artificial Sequence
  Description of Artificial Sequence: Synthetic oligonucleotide
  Sense strand starting at position 3574 of SEQ ID NO: 1560411
augaaaugcucucuggaug

SEQ ID NO: 1598338 - RNA, 19 nt, Artificial Sequence
  Description of Artificial Sequence: Synthetic oligonucleotide
  Antisense strand to SEQ ID NO: 1598337
cauccagagagcauuucau

SEQ ID NO: 1598339 - RNA, 19 nt, Artificial Sequence
  Description of Artificial Sequence: Synthetic oligonucleotide
  Sense strand starting at position 3575 of SEQ ID NO: 1560411
ugaaaugcucucuggaugu

SEQ ID NO: 1598340 - RNA, 19 nt, Artificial Sequence
  Description of Artificial Sequence: Synthetic oligonucleotide
  Antisense strand to SEQ ID NO: 1598339
acauccagagagcauuuca

SEQ ID NO: 1598341 - RNA, 19 nt, Artificial Sequence
  Description of Artificial Sequence: Synthetic oligonucleotide
  Sense strand starting at position 3909 of SEQ ID NO: 1560411
guggguaugugcugaggga

SEQ ID NO: 1598342 - RNA, 19 nt, Artificial Sequence
  Description of Artificial Sequence: Synthetic oligonucleotide
  Antisense strand to SEQ ID NO: 1598341
ucccucagcacauacccac

SEQ ID NO: 1598343 - RNA, 19 nt, Artificial Sequence
  Description of Artificial Sequence: Synthetic oligonucleotide
  Sense strand starting at position 298 of SEQ ID NO: 1560412
guaccacccgcucauauuu

SEQ ID NO: 1598344 - RNA, 19 nt, Artificial Sequence
  Description of Artificial Sequence: Synthetic oligonucleotide
  Antisense strand to SEQ ID NO: 1598343
aaauaugagcgggugguac

SEQ ID NO: 1598345 - RNA, 19 nt, Artificial Sequence
  Description of Artificial Sequence: Synthetic oligonucleotide
  Sense strand starting at position 481 of SEQ ID NO: 1560412
guagcaggugcucacuaaa

SEQ ID NO: 1598346 - RNA, 19 nt, Artificial Sequence
  Description of Artificial Sequence: Synthetic oligonucleotide
  Antisense strand to SEQ ID NO: 1598345
uuuagugagcaccugcuac

SEQ ID NO: 1598347 - RNA, 19 nt, Artificial Sequence
  Description of Artificial Sequence: Synthetic oligonucleotide
  Sense strand starting at position 502 of SEQ ID NO: 1560412
uuuguagacugagugaaug

SEQ ID NO: 1598348 - RNA, 19 nt, Artificial Sequence
  Description of Artificial Sequence: Synthetic oligonucleotide
  Antisense strand to SEQ ID NO: 1598347
cauucacucagucuacaaa

SEQ ID NO: 1598349 - RNA, 19 nt, Artificial Sequence
  Description of Artificial Sequence: Synthetic oligonucleotide
  Sense strand starting at position 513 of SEQ ID NO: 1560412
agugaaugaaugugucuca

SEQ ID NO: 1598350 - RNA, 19 nt, Artificial Sequence
  Description of Artificial Sequence: Synthetic oligonucleotide
  Antisense strand to SEQ ID NO: 1598349
ugagacacauucauucacu

SEQ ID NO: 1598351 - RNA, 19 nt, Artificial Sequence
  Description of Artificial Sequence: Synthetic oligonucleotide
  Sense strand starting at position 516 of SEQ ID NO: 1560412
gaaugaaugugucucaggu

SEQ ID NO: 1598352 - RNA, 19 nt, Artificial Sequence
  Description of Artificial Sequence: Synthetic oligonucleotide
  Antisense strand to SEQ ID NO: 1598351
accugagacacauucauuc

SEQ ID NO: 1598353 - RNA, 19 nt, Artificial Sequence
  Description of Artificial Sequence: Synthetic oligonucleotide
  Sense strand starting at position 685 of SEQ ID NO: 1560412
uugaguguuugggcuggaa

SEQ ID NO: 1598354 - RNA, 19 nt, Artificial Sequence
  Description of Artificial Sequence: Synthetic oligonucleotide
  Antisense strand to SEQ ID NO: 1598353
uuccagcccaaacacucaa

SEQ ID NO: 1598355 - RNA, 19 nt, Artificial Sequence
  Description of Artificial Sequence: Synthetic oligonucleotide
  Sense strand starting at position 687 of SEQ ID NO: 1560412
gaguguuugggcuggaauu

SEQ ID NO: 1598356 - RNA, 19 nt, Artificial Sequence
  Description of Artificial Sequence: Synthetic oligonucleotide
  Antisense strand to SEQ ID NO: 1598355
aauuccagcccaaacacuc

SEQ ID NO: 1598357 - RNA, 19 nt, Artificial Sequence
  Description of Artificial Sequence: Synthetic oligonucleotide
  Sense strand starting at position 688 of SEQ ID NO: 1560412
aguguuugggcuggaauuu

SEQ ID NO: 1598358 - RNA, 19 nt, Artificial Sequence
  Description of Artificial Sequence: Synthetic oligonucleotide
  Antisense strand to SEQ ID NO: 1598357
aaauuccagcccaaacacu

SEQ ID NO: 1598359 - RNA, 19 nt, Artificial Sequence
  Description of Artificial Sequence: Synthetic oligonucleotide
  Sense strand starting at position 1208 of SEQ ID NO: 1560412
aacugagccguggaguuau

SEQ ID NO: 1598360 - RNA, 19 nt, Artificial Sequence
  Description of Artificial Sequence: Synthetic oligonucleotide
  Antisense strand to SEQ ID NO: 1598359
auaacuccacggcucaguu

SEQ ID NO: 1598361 - RNA, 19 nt, Artificial Sequence
  Description of Artificial Sequence: Synthetic oligonucleotide
  Sense strand starting at position 1222 of SEQ ID NO: 1560412
guuauugguauccagucua

SEQ ID NO: 1598362 - RNA, 19 nt, Artificial Sequence
  Description of Artificial Sequence: Synthetic oligonucleotide
  Antisense strand to SEQ ID NO: 1598361
uagacuggauaccaauaac

SEQ ID NO: 1598363 - RNA, 19 nt, Artificial Sequence
  Description of Artificial Sequence: Synthetic oligonucleotide
  Sense strand starting at position 1383 of SEQ ID NO: 1560412
ccaugagguguuuagaguc

SEQ ID NO: 1598364 - RNA, 19 nt, Artificial Sequence
  Description of Artificial Sequence: Synthetic oligonucleotide
  Antisense strand to SEQ ID NO: 1598363
gacucuaaacaccucaugg

SEQ ID NO: 1598365 - RNA, 19 nt, Artificial Sequence
  Description of Artificial Sequence: Synthetic oligonucleotide
  Sense strand starting at position 1389 of SEQ ID NO: 1560412
gguguuuagagucaauuau

SEQ ID NO: 1598366 - RNA, 19 nt, Artificial Sequence
  Description of Artificial Sequence: Synthetic oligonucleotide
  Antisense strand to SEQ ID NO: 1598365
auaauugacucuaaacacc

SEQ ID NO: 1598367 - RNA, 19 nt, Artificial Sequence
  Description of Artificial Sequence: Synthetic oligonucleotide
  Sense strand starting at position 1398 of SEQ ID NO: 1560412
agucaauuauccucauggu

SEQ ID NO: 1598368 - RNA, 19 nt, Artificial Sequence
  Description of Artificial Sequence: Synthetic oligonucleotide
  Antisense strand to SEQ ID NO: 1598367
accaugaggauaauugacu

SEQ ID NO: 1598369 - RNA, 19 nt, Artificial Sequence
  Description of Artificial Sequence: Synthetic oligonucleotide
  Sense strand starting at position 1399 of SEQ ID NO: 1560412
gucaauuauccucauggua

SEQ ID NO: 1598370 - RNA, 19 nt, Artificial Sequence
  Description of Artificial Sequence: Synthetic oligonucleotide
  Antisense strand to SEQ ID NO: 1598369
uaccaugaggauaauugac

SEQ ID NO: 1598371 - RNA, 19 nt, Artificial Sequence
  Description of Artificial Sequence: Synthetic oligonucleotide
  Sense strand starting at position 1428 of SEQ ID NO: 1560412
acggaagcucuccaauaaa

SEQ ID NO: 1598372 - RNA, 19 nt, Artificial Sequence
  Description of Artificial Sequence: Synthetic oligonucleotide
  Antisense strand to SEQ ID NO: 1598371
uuuauuggagagcuuccgu

SEQ ID NO: 1598373 - RNA, 19 nt, Artificial Sequence
  Description of Artificial Sequence: Synthetic oligonucleotide
  Sense strand starting at position 1859 of SEQ ID NO: 1560412
gacacauccuucucgcaga

SEQ ID NO: 1598374 - RNA, 19 nt, Artificial Sequence
  Description of Artificial Sequence: Synthetic oligonucleotide
  Antisense strand to SEQ ID NO: 1598373
ucugcgagaaggauguguc

SEQ ID NO: 1598375 - RNA, 19 nt, Artificial Sequence
  Description of Artificial Sequence: Synthetic oligonucleotide
  Sense strand starting at position 2700 of SEQ ID NO: 1560412
ugaagacgcgucagugaau

SEQ ID NO: 1598376 - RNA, 19 nt, Artificial Sequence
  Description of Artificial Sequence: Synthetic oligonucleotide
  Antisense strand to SEQ ID NO: 1598375
auucacugacgcgucuuca

SEQ ID NO: 1598377 - RNA, 19 nt, Artificial Sequence
  Description of Artificial Sequence: Synthetic oligonucleotide
  Sense strand starting at position 2709 of SEQ ID NO: 1560412
gucagugaauaagcugaau

SEQ ID NO: 1598378 - RNA, 19 nt, Artificial Sequence
  Description of Artificial Sequence: Synthetic oligonucleotide
  Antisense strand to SEQ ID NO: 1598377
auucagcuuauucacugac

SEQ ID NO: 1598379 - RNA, 19 nt, Artificial Sequence
  Description of Artificial Sequence: Synthetic oligonucleotide
  Sense strand starting at position 2724 of SEQ ID NO: 1560412
gaaugugcuccugguagag

SEQ ID NO: 1598380 - RNA, 19 nt, Artificial Sequence
  Description of Artificial Sequence: Synthetic oligonucleotide
  Antisense strand to SEQ ID NO: 1598379
cucuaccaggagcacauuc

SEQ ID NO: 1598381 - RNA, 19 nt, Artificial Sequence
  Description of Artificial Sequence: Synthetic oligonucleotide
  Sense strand starting at position 2770 of SEQ ID NO: 1560412
agagauacagcacgcuuua

SEQ ID NO: 1598382 - RNA, 19 nt, Artificial Sequence
  Description of Artificial Sequence: Synthetic oligonucleotide
  Antisense strand to SEQ ID NO: 1598381
uaaagcgugcuguaucucu

SEQ ID NO: 1598383 - RNA, 19 nt, Artificial Sequence
  Description of Artificial Sequence: Synthetic oligonucleotide
  Sense strand starting at position 2775 of SEQ ID NO: 1560412
uacagcacgcuuuaggaua

SEQ ID NO: 1598384 - RNA, 19 nt, Artificial Sequence
  Description of Artificial Sequence: Synthetic oligonucleotide
  Antisense strand to SEQ ID NO: 1598383
uauccuaaagcgugcugua

SEQ ID NO: 1598385 - RNA, 19 nt, Artificial Sequence
  Description of Artificial Sequence: Synthetic oligonucleotide
  Sense strand starting at position 2800 of SEQ ID NO: 1560412
uaucgugggagcuaguaaa

SEQ ID NO: 1598386 - RNA, 19 nt, Artificial Sequence
  Description of Artificial Sequence: Synthetic oligonucleotide
  Antisense strand to SEQ ID NO: 1598385
uuuacuagcucccacgaua

SEQ ID NO: 1598387 - RNA, 19 nt, Artificial Sequence
  Description of Artificial Sequence: Synthetic oligonucleotide
  Sense strand starting at position 2810 of SEQ ID NO: 1560412
gcuaguaaaucagugugga

SEQ ID NO: 1598388 - RNA, 19 nt, Artificial Sequence
  Description of Artificial Sequence: Synthetic oligonucleotide
  Antisense strand to SEQ ID NO: 1598387
uccacacugauuuacuagc

SEQ ID NO: 1598389 - RNA, 19 nt, Artificial Sequence
  Description of Artificial Sequence: Synthetic oligonucleotide
  Sense strand starting at position 2811 of SEQ ID NO: 1560412
cuaguaaaucaguguggaa

SEQ ID NO: 1598390 - RNA, 19 nt, Artificial Sequence
  Description of Artificial Sequence: Synthetic oligonucleotide
  Antisense strand to SEQ ID NO: 1598389
uuccacacugauuuacuag

SEQ ID NO: 1598391 - RNA, 19 nt, Artificial Sequence
  Description of Artificial Sequence: Synthetic oligonucleotide
  Sense strand starting at position 2813 of SEQ ID NO: 1560412
aguaaaucaguguggaaag

SEQ ID NO: 1598392 - RNA, 19 nt, Artificial Sequence
  Description of Artificial Sequence: Synthetic oligonucleotide
  Antisense strand to SEQ ID NO: 1598391
cuuuccacacugauuuacu

SEQ ID NO: 1598393 - RNA, 19 nt, Artificial Sequence
  Description of Artificial Sequence: Synthetic oligonucleotide
  Sense strand starting at position 2856 of SEQ ID NO: 1560412
ugagauaguuuaucugcuu

SEQ ID NO: 1598394 - RNA, 19 nt, Artificial Sequence
  Description of Artificial Sequence: Synthetic oligonucleotide
  Antisense strand to SEQ ID NO: 1598393
aagcagauaaacuaucuca

SEQ ID NO: 1598395 - RNA, 19 nt, Artificial Sequence
  Description of Artificial Sequence: Synthetic oligonucleotide
  Sense strand starting at position 2857 of SEQ ID NO: 1560412
gagauaguuuaucugcuug

SEQ ID NO: 1598396 - RNA, 19 nt, Artificial Sequence
  Description of Artificial Sequence: Synthetic oligonucleotide
  Antisense strand to SEQ ID NO: 1598395
caagcagauaaacuaucuc

SEQ ID NO: 1598397 - RNA, 19 nt, Artificial Sequence
  Description of Artificial Sequence: Synthetic oligonucleotide
  Sense strand starting at position 2924 of SEQ ID NO: 1560412
auagaucugucuccuccau

SEQ ID NO: 1598398 - RNA, 19 nt, Artificial Sequence
  Description of Artificial Sequence: Synthetic oligonucleotide
  Antisense strand to SEQ ID NO: 1598397
auggaggagacagaucuau

SEQ ID NO: 1598399 - RNA, 19 nt, Artificial Sequence
  Description of Artificial Sequence: Synthetic oligonucleotide
  Sense strand starting at position 3010 of SEQ ID NO: 1560412
gcagguucucagcaaaccu

SEQ ID NO: 1598400 - RNA, 19 nt, Artificial Sequence
  Description of Artificial Sequence: Synthetic oligonucleotide
  Antisense strand to SEQ ID NO: 1598399
agguuugcugagaaccugc

SEQ ID NO: 1598401 - RNA, 19 nt, Artificial Sequence
  Description of Artificial Sequence: Synthetic oligonucleotide
  Sense strand starting at position 3035 of SEQ ID NO: 1560412
acaaauagaccauguaguu

SEQ ID NO: 1598402 - RNA, 19 nt, Artificial Sequence
  Description of Artificial Sequence: Synthetic oligonucleotide
  Antisense strand to SEQ ID NO: 1598401
aacuacauggucuauuugu

SEQ ID NO: 1598403 - RNA, 19 nt, Artificial Sequence
  Description of Artificial Sequence: Synthetic oligonucleotide
  Sense strand starting at position 3133 of SEQ ID NO: 1560412
cucaguucccgggacaagu

SEQ ID NO: 1598404 - RNA, 19 nt, Artificial Sequence
  Description of Artificial Sequence: Synthetic oligonucleotide
  Antisense strand to SEQ ID NO: 1598403
acuugucccgggaacugag

SEQ ID NO: 1598405 - RNA, 19 nt, Artificial Sequence
  Description of Artificial Sequence: Synthetic oligonucleotide
  Sense strand starting at position 3153 of SEQ ID NO: 1560412
agauuuccuuguucuaguu

SEQ ID NO: 1598406 - RNA, 19 nt, Artificial Sequence
  Description of Artificial Sequence: Synthetic oligonucleotide
  Antisense strand to SEQ ID NO: 1598405
aacuagaacaaggaaaucu

SEQ ID NO: 1598407 - RNA, 19 nt, Artificial Sequence
  Description of Artificial Sequence: Synthetic oligonucleotide
  Sense strand starting at position 3259 of SEQ ID NO: 1560412
cugcucaagcuccauagaa

SEQ ID NO: 1598408 - RNA, 19 nt, Artificial Sequence
  Description of Artificial Sequence: Synthetic oligonucleotide
  Antisense strand to SEQ ID NO: 1598407
uucuauggagcuugagcag

SEQ ID NO: 1598409 - RNA, 19 nt, Artificial Sequence
  Description of Artificial Sequence: Synthetic oligonucleotide
  Sense strand starting at position 3261 of SEQ ID NO: 1560412
gcucaagcuccauagaaag

SEQ ID NO: 1598410 - RNA, 19 nt, Artificial Sequence
  Description of Artificial Sequence: Synthetic oligonucleotide
  Antisense strand to SEQ ID NO: 1598409
cuuucuauggagcuugagc

SEQ ID NO: 1598411 - RNA, 19 nt, Artificial Sequence
  Description of Artificial Sequence: Synthetic oligonucleotide
  Sense strand starting at position 3290 of SEQ ID NO: 1560412
ugcaguucccagggugaga

SEQ ID NO: 1598412 - RNA, 19 nt, Artificial Sequence
  Description of Artificial Sequence: Synthetic oligonucleotide
  Antisense strand to SEQ ID NO: 1598411
ucucacccugggaacugca

SEQ ID NO: 1598413 - RNA, 19 nt, Artificial Sequence
  Description of Artificial Sequence: Synthetic oligonucleotide
  Sense strand starting at position 3304 of SEQ ID NO: 1560412
ugagauguugugcauauca

SEQ ID NO: 1598414 - RNA, 19 nt, Artificial Sequence
  Description of Artificial Sequence: Synthetic oligonucleotide
  Antisense strand to SEQ ID NO: 1598413
ugauaugcacaacaucuca

SEQ ID NO: 1598415 - RNA, 19 nt, Artificial Sequence
  Description of Artificial Sequence: Synthetic oligonucleotide
  Sense strand starting at position 3306 of SEQ ID NO: 1560412
agauguugugcauaucagu

SEQ ID NO: 1598416 - RNA, 19 nt, Artificial Sequence
  Description of Artificial Sequence: Synthetic oligonucleotide
  Antisense strand to SEQ ID NO: 1598415
acugauaugcacaacaucu

SEQ ID NO: 1598417 - RNA, 19 nt, Artificial Sequence
  Description of Artificial Sequence: Synthetic oligonucleotide
  Sense strand starting at position 3374 of SEQ ID NO: 1560412
agcuuugcugcugaggauu

SEQ ID NO: 1598418 - RNA, 19 nt, Artificial Sequence
  Description of Artificial Sequence: Synthetic oligonucleotide
  Antisense strand to SEQ ID NO: 1598417
aauccucagcagcaaagcu

SEQ ID NO: 1598419 - RNA, 19 nt, Artificial Sequence
  Description of Artificial Sequence: Synthetic oligonucleotide
  Sense strand starting at position 3705 of SEQ ID NO: 1560412
gggugaugggauuguggga

SEQ ID NO: 1598420 - RNA, 19 nt, Artificial Sequence
  Description of Artificial Sequence: Synthetic oligonucleotide
  Antisense strand to SEQ ID NO: 1598419
ucccacaaucccaucaccc

SEQ ID NO: 1598421 - RNA, 19 nt, Artificial Sequence
  Description of Artificial Sequence: Synthetic oligonucleotide
  Sense strand starting at position 3749 of SEQ ID NO: 1560412
ggcaccuccuuucugaauu

SEQ ID NO: 1598422 - RNA, 19 nt, Artificial Sequence
  Description of Artificial Sequence: Synthetic oligonucleotide
  Antisense strand to SEQ ID NO: 1598421
aauucagaaaggaggugcc

SEQ ID NO: 1598423 - RNA, 19 nt, Artificial Sequence
  Description of Artificial Sequence: Synthetic oligonucleotide
  Sense strand starting at position 419 of SEQ ID NO: 1560413
agaaacuaccuacgaguuu

SEQ ID NO: 1598424 - RNA, 19 nt, Artificial Sequence
  Description of Artificial Sequence: Synthetic oligonucleotide
  Antisense strand to SEQ ID NO: 1598423
aaacucguagguaguuucu

SEQ ID NO: 1598425 - RNA, 19 nt, Artificial Sequence
  Description of Artificial Sequence: Synthetic oligonucleotide
  Sense strand starting at position 750 of SEQ ID NO: 1560413
cuugauucucugcagggau

SEQ ID NO: 1598426 - RNA, 19 nt, Artificial Sequence
  Description of Artificial Sequence: Synthetic oligonucleotide
  Antisense strand to SEQ ID NO: 1598425
aucccugcagagaaucaag

SEQ ID NO: 1598427 - RNA, 19 nt, Artificial Sequence
  Description of Artificial Sequence: Synthetic oligonucleotide
  Sense strand starting at position 1283 of SEQ ID NO: 1560413
cccagaccuccagguuuaa

SEQ ID NO: 1598428 - RNA, 19 nt, Artificial Sequence
  Description of Artificial Sequence: Synthetic oligonucleotide
  Antisense strand to SEQ ID NO: 1598427
uuaaaccuggaggucuggg

SEQ ID NO: 1598429 - RNA, 19 nt, Artificial Sequence
  Description of Artificial Sequence: Synthetic oligonucleotide
  Sense strand starting at position 1485 of SEQ ID NO: 1560413
cuaggucugcgcagaggau

SEQ ID NO: 1598430 - RNA, 19 nt, Artificial Sequence
  Description of Artificial Sequence: Synthetic oligonucleotide
  Antisense strand to SEQ ID NO: 1598429
auccucugcgcagaccuag

SEQ ID NO: 1598431 - RNA, 19 nt, Artificial Sequence
  Description of Artificial Sequence: Synthetic oligonucleotide
  Sense strand starting at position 1603 of SEQ ID NO: 1560413
agggcugggucucugagau

SEQ ID NO: 1598432 - RNA, 19 nt, Artificial Sequence
  Description of Artificial Sequence: Synthetic oligonucleotide
  Antisense strand to SEQ ID NO: 1598431
aucucagagacccagcccu

SEQ ID NO: 1598433 - RNA, 19 nt, Artificial Sequence
  Description of Artificial Sequence: Synthetic oligonucleotide
  Sense strand starting at position 3901 of SEQ ID NO: 1560413
gcaggugcccagugaucuu

SEQ ID NO: 1598434 - RNA, 19 nt, Artificial Sequence
  Description of Artificial Sequence: Synthetic oligonucleotide
  Antisense strand to SEQ ID NO: 1598433
aagaucacugggcaccugc

SEQ ID NO: 1598435 - RNA, 19 nt, Artificial Sequence
  Description of Artificial Sequence: Synthetic oligonucleotide
  Sense strand starting at position 3908 of SEQ ID NO: 1560413
cccagugaucuuuggugag

SEQ ID NO: 1598436 - RNA, 19 nt, Artificial Sequence
  Description of Artificial Sequence: Synthetic oligonucleotide
  Antisense strand to SEQ ID NO: 1598435
cucaccaaagaucacuggg

SEQ ID NO: 1598437 - RNA, 19 nt, Artificial Sequence
  Description of Artificial Sequence: Synthetic oligonucleotide
  Sense strand starting at position 3910 of SEQ ID NO: 1560413
cagugaucuuuggugagga

SEQ ID NO: 1598438 - RNA, 19 nt, Artificial Sequence
  Description of Artificial Sequence: Synthetic oligonucleotide
  Antisense strand to SEQ ID NO: 1598437
uccucaccaaagaucacug

SEQ ID NO: 1598439 - RNA, 19 nt, Artificial Sequence
  Description of Artificial Sequence: Synthetic oligonucleotide
  Sense strand starting at position 3911 of SEQ ID NO: 1560413
agugaucuuuggugaggaa

SEQ ID NO: 1598440 - RNA, 19 nt, Artificial Sequence
  Description of Artificial Sequence: Synthetic oligonucleotide
  Antisense strand to SEQ ID NO: 1598439
uuccucaccaaagaucacu

SEQ ID NO: 1598441 - RNA, 19 nt, Artificial Sequence
  Description of Artificial Sequence: Synthetic oligonucleotide
  Sense strand starting at position 3912 of SEQ ID NO: 1560413
gugaucuuuggugaggaau

SEQ ID NO: 1598442 - RNA, 19 nt, Artificial Sequence
  Description of Artificial Sequence: Synthetic oligonucleotide
  Antisense strand to SEQ ID NO: 1598441
auuccucaccaaagaucac

SEQ ID NO: 1598443 - RNA, 19 nt, Artificial Sequence
  Description of Artificial Sequence: Synthetic oligonucleotide
  Sense strand starting at position 3914 of SEQ ID NO: 1560413
gaucuuuggugaggaauga

SEQ ID NO: 1598444 - RNA, 19 nt, Artificial Sequence
  Description of Artificial Sequence: Synthetic oligonucleotide
  Antisense strand to SEQ ID NO: 1598443
ucauuccucaccaaagauc

SEQ ID NO: 1598445 - RNA, 19 nt, Artificial Sequence
  Description of Artificial Sequence: Synthetic oligonucleotide
  Sense strand starting at position 3932 of SEQ ID NO: 1560413
aacggauguccaggucaca

SEQ ID NO: 1598446 - RNA, 19 nt, Artificial Sequence
  Description of Artificial Sequence: Synthetic oligonucleotide
  Antisense strand to SEQ ID NO: 1598445
ugugaccuggacauccguu

SEQ ID NO: 1598447 - RNA, 19 nt, Artificial Sequence
  Description of Artificial Sequence: Synthetic oligonucleotide
  Sense strand starting at position 242 of SEQ ID NO: 1560414
gcgggacagucuugaaacu

SEQ ID NO: 1598448 - RNA, 19 nt, Artificial Sequence
  Description of Artificial Sequence: Synthetic oligonucleotide
  Antisense strand to SEQ ID NO: 1598447
aguuucaagacugucccgc

SEQ ID NO: 1598449 - RNA, 19 nt, Artificial Sequence
  Description of Artificial Sequence: Synthetic oligonucleotide
  Sense strand starting at position 259 of SEQ ID NO: 1560414
cucucuuugcgcugaggga

SEQ ID NO: 1598450 - RNA, 19 nt, Artificial Sequence
  Description of Artificial Sequence: Synthetic oligonucleotide
  Antisense strand to SEQ ID NO: 1598449
ucccucagcgcaaagagag

SEQ ID NO: 1598451 - RNA, 19 nt, Artificial Sequence
  Description of Artificial Sequence: Synthetic oligonucleotide
  Sense strand starting at position 260 of SEQ ID NO: 1560414
ucucuuugcgcugagggaa

SEQ ID NO: 1598452 - RNA, 19 nt, Artificial Sequence
  Description of Artificial Sequence: Synthetic oligonucleotide
  Antisense strand to SEQ ID NO: 1598451
uucccucagcgcaaagaga

SEQ ID NO: 1598453 - RNA, 19 nt, Artificial Sequence
  Description of Artificial Sequence: Synthetic oligonucleotide
  Sense strand starting at position 1061 of SEQ ID NO: 1560414
ggcgguugcccuagagcua

SEQ ID NO: 1598454 - RNA, 19 nt, Artificial Sequence
  Description of Artificial Sequence: Synthetic oligonucleotide
  Antisense strand to SEQ ID NO: 1598453
uagcucuagggcaaccgcc

SEQ ID NO: 1598455 - RNA, 19 nt, Artificial Sequence
  Description of Artificial Sequence: Synthetic oligonucleotide
  Sense strand starting at position 1085 of SEQ ID NO: 1560414
ggcggaagugucaguguca

SEQ ID NO: 1598456 - RNA, 19 nt, Artificial Sequence
  Description of Artificial Sequence: Synthetic oligonucleotide
  Antisense strand to SEQ ID NO: 1598455
ugacacugacacuuccgcc

SEQ ID NO: 1598457 - RNA, 19 nt, Artificial Sequence
  Description of Artificial Sequence: Synthetic oligonucleotide
  Sense strand starting at position 1092 of SEQ ID NO: 1560414
gugucagugucaccgaagu

SEQ ID NO: 1598458 - RNA, 19 nt, Artificial Sequence
  Description of Artificial Sequence: Synthetic oligonucleotide
  Antisense strand to SEQ ID NO: 1598457
acuucggugacacugacac

SEQ ID NO: 1598459 - RNA, 19 nt, Artificial Sequence
  Description of Artificial Sequence: Synthetic oligonucleotide
  Sense strand starting at position 1094 of SEQ ID NO: 1560414
gucagugucaccgaagucu

SEQ ID NO: 1598460 - RNA, 19 nt, Artificial Sequence
  Description of Artificial Sequence: Synthetic oligonucleotide
  Antisense strand to SEQ ID NO: 1598459
agacuucggugacacugac

SEQ ID NO: 1598461 - RNA, 19 nt, Artificial Sequence
  Description of Artificial Sequence: Synthetic oligonucleotide
  Sense strand starting at position 1160 of SEQ ID NO: 1560414
gguagaaaccgucagccua

SEQ ID NO: 1598462 - RNA, 19 nt, Artificial Sequence
  Description of Artificial Sequence: Synthetic oligonucleotide
  Antisense strand to SEQ ID NO: 1598461
uaggcugacgguuucuacc

SEQ ID NO: 1598463 - RNA, 19 nt, Artificial Sequence
  Description of Artificial Sequence: Synthetic oligonucleotide
  Sense strand starting at position 1372 of SEQ ID NO: 1560414
guagauaaagcccagagua

SEQ ID NO: 1598464 - RNA, 19 nt, Artificial Sequence
  Description of Artificial Sequence: Synthetic oligonucleotide
  Antisense strand to SEQ ID NO: 1598463
uacucugggcuuuaucuac

SEQ ID NO: 1598465 - RNA, 19 nt, Artificial Sequence
  Description of Artificial Sequence: Synthetic oligonucleotide
  Sense strand starting at position 1414 of SEQ ID NO: 1560414
uccaaauacuuagggacua

SEQ ID NO: 1598466 - RNA, 19 nt, Artificial Sequence
  Description of Artificial Sequence: Synthetic oligonucleotide
  Antisense strand to SEQ ID NO: 1598465
uagucccuaaguauuugga

SEQ ID NO: 1598467 - RNA, 19 nt, Artificial Sequence
  Description of Artificial Sequence: Synthetic oligonucleotide
  Sense strand starting at position 1458 of SEQ ID NO: 1560414
ugugcagaugccuggaaau

SEQ ID NO: 1598468 - RNA, 19 nt, Artificial Sequence
  Description of Artificial Sequence: Synthetic oligonucleotide
  Antisense strand to SEQ ID NO: 1598467
auuuccaggcaucugcaca

SEQ ID NO: 1598469 - RNA, 19 nt, Artificial Sequence
  Description of Artificial Sequence: Synthetic oligonucleotide
  Sense strand starting at position 1690 of SEQ ID NO: 1560414
gcagaugugggcuaggaga

SEQ ID NO: 1598470 - RNA, 19 nt, Artificial Sequence
  Description of Artificial Sequence: Synthetic oligonucleotide
  Antisense strand to SEQ ID NO: 1598469
ucuccuagcccacaucugc

SEQ ID NO: 1598471 - RNA, 19 nt, Artificial Sequence
  Description of Artificial Sequence: Synthetic oligonucleotide
  Sense strand starting at position 1750 of SEQ ID NO: 1560414
aagagaaguuaucuagcag

SEQ ID NO: 1598472 - RNA, 19 nt, Artificial Sequence
  Description of Artificial Sequence: Synthetic oligonucleotide
  Antisense strand to SEQ ID NO: 1598471
cugcuagauaacuucucuu

SEQ ID NO: 1598473 - RNA, 19 nt, Artificial Sequence
  Description of Artificial Sequence: Synthetic oligonucleotide
  Sense strand starting at position 1754 of SEQ ID NO: 1560414
gaaguuaucuagcagcuaa

SEQ ID NO: 1598474 - RNA, 19 nt, Artificial Sequence
  Description of Artificial Sequence: Synthetic oligonucleotide
  Antisense strand to SEQ ID NO: 1598473
uuagcugcuagauaacuuc

SEQ ID NO: 1598475 - RNA, 19 nt, Artificial Sequence
  Description of Artificial Sequence: Synthetic oligonucleotide
  Sense strand starting at position 2159 of SEQ ID NO: 1560414
guuacugaauuguccuuau

SEQ ID NO: 1598476 - RNA, 19 nt, Artificial Sequence
  Description of Artificial Sequence: Synthetic oligonucleotide
  Antisense strand to SEQ ID NO: 1598475
auaaggacaauucaguaac

SEQ ID NO: 1598477 - RNA, 19 nt, Artificial Sequence
  Description of Artificial Sequence: Synthetic oligonucleotide
  Sense strand starting at position 2162 of SEQ ID NO: 1560414
acugaauuguccuuaucgu

SEQ ID NO: 1598478 - RNA, 19 nt, Artificial Sequence
  Description of Artificial Sequence: Synthetic oligonucleotide
  Antisense strand to SEQ ID NO: 1598477
acgauaaggacaauucagu

SEQ ID NO: 1598479 - RNA, 19 nt, Artificial Sequence
  Description of Artificial Sequence: Synthetic oligonucleotide
  Sense strand starting at position 2163 of SEQ ID NO: 1560414
cugaauuguccuuaucguc

SEQ ID NO: 1598480 - RNA, 19 nt, Artificial Sequence
  Description of Artificial Sequence: Synthetic oligonucleotide
  Antisense strand to SEQ ID NO: 1598479
gacgauaaggacaauucag

SEQ ID NO: 1598481 - RNA, 19 nt, Artificial Sequence
  Description of Artificial Sequence: Synthetic oligonucleotide
  Sense strand starting at position 2171 of SEQ ID NO: 1560414
uccuuaucguccugaggac

SEQ ID NO: 1598482 - RNA, 19 nt, Artificial Sequence
  Description of Artificial Sequence: Synthetic oligonucleotide
  Antisense strand to SEQ ID NO: 1598481
guccucaggacgauaagga

SEQ ID NO: 1598483 - RNA, 19 nt, Artificial Sequence
  Description of Artificial Sequence: Synthetic oligonucleotide
  Sense strand starting at position 2439 of SEQ ID NO: 1560414
acagucauccacugugaca

SEQ ID NO: 1598484 - RNA, 19 nt, Artificial Sequence
  Description of Artificial Sequence: Synthetic oligonucleotide
  Antisense strand to SEQ ID NO: 1598483
ugucacaguggaugacugu

SEQ ID NO: 1598485 - RNA, 19 nt, Artificial Sequence
  Description of Artificial Sequence: Synthetic oligonucleotide
  Sense strand starting at position 2441 of SEQ ID NO: 1560414
agucauccacugugacaca

SEQ ID NO: 1598486 - RNA, 19 nt, Artificial Sequence
  Description of Artificial Sequence: Synthetic oligonucleotide
  Antisense strand to SEQ ID NO: 1598485
ugugucacaguggaugacu

SEQ ID NO: 1598487 - RNA, 19 nt, Artificial Sequence
  Description of Artificial Sequence: Synthetic oligonucleotide
  Sense strand starting at position 2678 of SEQ ID NO: 1560414
gaaggauugucaugaaaua

SEQ ID NO: 1598488 - RNA, 19 nt, Artificial Sequence
  Description of Artificial Sequence: Synthetic oligonucleotide
  Antisense strand to SEQ ID NO: 1598487
uauuucaugacaauccuuc

SEQ ID NO: 1598489 - RNA, 19 nt, Artificial Sequence
  Description of Artificial Sequence: Synthetic oligonucleotide
  Sense strand starting at position 2707 of SEQ ID NO: 1560414
guaugcaguugugugguua

SEQ ID NO: 1598490 - RNA, 19 nt, Artificial Sequence
  Description of Artificial Sequence: Synthetic oligonucleotide
  Antisense strand to SEQ ID NO: 1598489
uaaccacacaacugcauac

SEQ ID NO: 1598491 - RNA, 19 nt, Artificial Sequence
  Description of Artificial Sequence: Synthetic oligonucleotide
  Sense strand starting at position 2715 of SEQ ID NO: 1560414
uugugugguuacucgcaga

SEQ ID NO: 1598492 - RNA, 19 nt, Artificial Sequence
  Description of Artificial Sequence: Synthetic oligonucleotide
  Antisense strand to SEQ ID NO: 1598491
ucugcgaguaaccacacaa

SEQ ID NO: 1598493 - RNA, 19 nt, Artificial Sequence
  Description of Artificial Sequence: Synthetic oligonucleotide
  Sense strand starting at position 2718 of SEQ ID NO: 1560414
ugugguuacucgcagacau

SEQ ID NO: 1598494 - RNA, 19 nt, Artificial Sequence
  Description of Artificial Sequence: Synthetic oligonucleotide
  Antisense strand to SEQ ID NO: 1598493
augucugcgaguaaccaca

SEQ ID NO: 1598495 - RNA, 19 nt, Artificial Sequence
  Description of Artificial Sequence: Synthetic oligonucleotide
  Sense strand starting at position 2720 of SEQ ID NO: 1560414
ugguuacucgcagacauag

SEQ ID NO: 1598496 - RNA, 19 nt, Artificial Sequence
  Description of Artificial Sequence: Synthetic oligonucleotide
  Antisense strand to SEQ ID NO: 1598495
cuaugucugcgaguaacca

SEQ ID NO: 1598497 - RNA, 19 nt, Artificial Sequence
  Description of Artificial Sequence: Synthetic oligonucleotide
  Sense strand starting at position 2722 of SEQ ID NO: 1560414
guuacucgcagacauagaa

SEQ ID NO: 1598498 - RNA, 19 nt, Artificial Sequence
  Description of Artificial Sequence: Synthetic oligonucleotide
  Antisense strand to SEQ ID NO: 1598497
uucuaugucugcgaguaac

SEQ ID NO: 1598499 - RNA, 19 nt, Artificial Sequence
  Description of Artificial Sequence: Synthetic oligonucleotide
  Sense strand starting at position 2967 of SEQ ID NO: 1560414
ucagguguuccacaugucu

SEQ ID NO: 1598500 - RNA, 19 nt, Artificial Sequence
  Description of Artificial Sequence: Synthetic oligonucleotide
  Antisense strand to SEQ ID NO: 1598499
agacauguggaacaccuga

SEQ ID NO: 1598501 - RNA, 19 nt, Artificial Sequence
  Description of Artificial Sequence: Synthetic oligonucleotide
  Sense strand starting at position 3750 of SEQ ID NO: 1560414
ccauguuggccauauuguu

SEQ ID NO: 1598502 - RNA, 19 nt, Artificial Sequence
  Description of Artificial Sequence: Synthetic oligonucleotide
  Antisense strand to SEQ ID NO: 1598501
aacaauauggccaacaugg

SEQ ID NO: 1598503 - RNA, 19 nt, Artificial Sequence
  Description of Artificial Sequence: Synthetic oligonucleotide
  Sense strand starting at position 3756 of SEQ ID NO: 1560414
uggccauauuguucuccaa

SEQ ID NO: 1598504 - RNA, 19 nt, Artificial Sequence
  Description of Artificial Sequence: Synthetic oligonucleotide
  Antisense strand to SEQ ID NO: 1598503
uuggagaacaauauggcca

SEQ ID NO: 1598505 - RNA, 19 nt, Artificial Sequence
  Description of Artificial Sequence: Synthetic oligonucleotide
  Sense strand starting at position 90 of SEQ ID NO: 1560415
aagggcugccuuugucuaa

SEQ ID NO: 1598506 - RNA, 19 nt, Artificial Sequence
  Description of Artificial Sequence: Synthetic oligonucleotide
  Antisense strand to SEQ ID NO: 1598505
uuagacaaaggcagcccuu

SEQ ID NO: 1598507 - RNA, 19 nt, Artificial Sequence
  Description of Artificial Sequence: Synthetic oligonucleotide
  Sense strand starting at position 91 of SEQ ID NO: 1560415
agggcugccuuugucuaaa

SEQ ID NO: 1598508 - RNA, 19 nt, Artificial Sequence
  Description of Artificial Sequence: Synthetic oligonucleotide
  Antisense strand to SEQ ID NO: 1598507
uuuagacaaaggcagcccu

SEQ ID NO: 1598509 - RNA, 19 nt, Artificial Sequence
  Description of Artificial Sequence: Synthetic oligonucleotide
  Sense strand starting at position 94 of SEQ ID NO: 1560415
gcugccuuugucuaaaggu

SEQ ID NO: 1598510 - RNA, 19 nt, Artificial Sequence
  Description of Artificial Sequence: Synthetic oligonucleotide
  Antisense strand to SEQ ID NO: 1598509
accuuuagacaaaggcagc

SEQ ID NO: 1598511 - RNA, 19 nt, Artificial Sequence
  Description of Artificial Sequence: Synthetic oligonucleotide
  Sense strand starting at position 1000 of SEQ ID NO: 1560415
gagaaauugcuacauugug

SEQ ID NO: 1598512 - RNA, 19 nt, Artificial Sequence
  Description of Artificial Sequence: Synthetic oligonucleotide
  Antisense strand to SEQ ID NO: 1598511
cacaauguagcaauuucuc

SEQ ID NO: 1598513 - RNA, 19 nt, Artificial Sequence
  Description of Artificial Sequence: Synthetic oligonucleotide
  Sense strand starting at position 1008 of SEQ ID NO: 1560415
gcuacauugugagaaacuc

SEQ ID NO: 1598514 - RNA, 19 nt, Artificial Sequence
  Description of Artificial Sequence: Synthetic oligonucleotide
  Antisense strand to SEQ ID NO: 1598513
gaguuucucacaauguagc

SEQ ID NO: 1598515 - RNA, 19 nt, Artificial Sequence
  Description of Artificial Sequence: Synthetic oligonucleotide
  Sense strand starting at position 1016 of SEQ ID NO: 1560415
gugagaaacucacccugau

SEQ ID NO: 1598516 - RNA, 19 nt, Artificial Sequence
  Description of Artificial Sequence: Synthetic oligonucleotide
  Antisense strand to SEQ ID NO: 1598515
aucagggugaguuucucac

SEQ ID NO: 1598517 - RNA, 19 nt, Artificial Sequence
  Description of Artificial Sequence: Synthetic oligonucleotide
  Sense strand starting at position 1019 of SEQ ID NO: 1560415
agaaacucacccugauguu

SEQ ID NO: 1598518 - RNA, 19 nt, Artificial Sequence
  Description of Artificial Sequence: Synthetic oligonucleotide
  Antisense strand to SEQ ID NO: 1598517
aacaucagggugaguuucu

SEQ ID NO: 1598519 - RNA, 19 nt, Artificial Sequence
  Description of Artificial Sequence: Synthetic oligonucleotide
  Sense strand starting at position 2282 of SEQ ID NO: 1560415
gugaaugcggguugaauaa

SEQ ID NO: 1598520 - RNA, 19 nt, Artificial Sequence
  Description of Artificial Sequence: Synthetic oligonucleotide
  Antisense strand to SEQ ID NO: 1598519
uuauucaacccgcauucac

SEQ ID NO: 1598521 - RNA, 19 nt, Artificial Sequence
  Description of Artificial Sequence: Synthetic oligonucleotide
  Sense strand starting at position 2329 of SEQ ID NO: 1560415
guuguuguuguguuauauu

SEQ ID NO: 1598522 - RNA, 19 nt, Artificial Sequence
  Description of Artificial Sequence: Synthetic oligonucleotide
  Antisense strand to SEQ ID NO: 1598521
aauauaacacaacaacaac

SEQ ID NO: 1598523 - RNA, 19 nt, Artificial Sequence
  Description of Artificial Sequence: Synthetic oligonucleotide
  Sense strand starting at position 2486 of SEQ ID NO: 1560415
gccuuaacauguguucuag

SEQ ID NO: 1598524 - RNA, 19 nt, Artificial Sequence
  Description of Artificial Sequence: Synthetic oligonucleotide
  Antisense strand to SEQ ID NO: 1598523
cuagaacacauguuaaggc

SEQ ID NO: 1598525 - RNA, 19 nt, Artificial Sequence
  Description of Artificial Sequence: Synthetic oligonucleotide
  Sense strand starting at position 2488 of SEQ ID NO: 1560415
cuuaacauguguucuagua

SEQ ID NO: 1598526 - RNA, 19 nt, Artificial Sequence
  Description of Artificial Sequence: Synthetic oligonucleotide
  Antisense strand to SEQ ID NO: 1598525
uacuagaacacauguuaag

SEQ ID NO: 1598527 - RNA, 19 nt, Artificial Sequence
  Description of Artificial Sequence: Synthetic oligonucleotide
  Sense strand starting at position 2501 of SEQ ID NO: 1560415
cuaguaucuuggcgguacu

SEQ ID NO: 1598528 - RNA, 19 nt, Artificial Sequence
  Description of Artificial Sequence: Synthetic oligonucleotide
  Antisense strand to SEQ ID NO: 1598527
aguaccgccaagauacuag

SEQ ID NO: 1598529 - RNA, 19 nt, Artificial Sequence
  Description of Artificial Sequence: Synthetic oligonucleotide
  Sense strand starting at position 2502 of SEQ ID NO: 1560415
uaguaucuuggcgguacua

SEQ ID NO: 1598530 - RNA, 19 nt, Artificial Sequence
  Description of Artificial Sequence: Synthetic oligonucleotide
  Antisense strand to SEQ ID NO: 1598529
uaguaccgccaagauacua

SEQ ID NO: 1598531 - RNA, 19 nt, Artificial Sequence
  Description of Artificial Sequence: Synthetic oligonucleotide
  Sense strand starting at position 2511 of SEQ ID NO: 1560415
ggcgguacuacccauaaua

SEQ ID NO: 1598532 - RNA, 19 nt, Artificial Sequence
  Description of Artificial Sequence: Synthetic oligonucleotide
  Antisense strand to SEQ ID NO: 1598531
uauuauggguaguaccgcc

SEQ ID NO: 1598533 - RNA, 19 nt, Artificial Sequence
  Description of Artificial Sequence: Synthetic oligonucleotide
  Sense strand starting at position 2513 of SEQ ID NO: 1560415
cgguacuacccauaauauu

SEQ ID NO: 1598534 - RNA, 19 nt, Artificial Sequence
  Description of Artificial Sequence: Synthetic oligonucleotide
  Antisense strand to SEQ ID NO: 1598533
aauauuauggguaguaccg

SEQ ID NO: 1598535 - RNA, 19 nt, Artificial Sequence
  Description of Artificial Sequence: Synthetic oligonucleotide
  Sense strand starting at position 2894 of SEQ ID NO: 1560415
gcgagacccuguccaaaca

SEQ ID NO: 1598536 - RNA, 19 nt, Artificial Sequence
  Description of Artificial Sequence: Synthetic oligonucleotide
  Antisense strand to SEQ ID NO: 1598535
uguuuggacagggucucgc

SEQ ID NO: 1598537 - RNA, 19 nt, Artificial Sequence
  Description of Artificial Sequence: Synthetic oligonucleotide
  Sense strand starting at position 2992 of SEQ ID NO: 1560415
ggaagucgagguuguaguu

SEQ ID NO: 1598538 - RNA, 19 nt, Artificial Sequence
  Description of Artificial Sequence: Synthetic oligonucleotide
  Antisense strand to SEQ ID NO: 1598537
aacuacaaccucgacuucc

SEQ ID NO: 1598539 - RNA, 19 nt, Artificial Sequence
  Description of Artificial Sequence: Synthetic oligonucleotide
  Sense strand starting at position 3173 of SEQ ID NO: 1560415
cugugugacaguggacaaa

SEQ ID NO: 1598540 - RNA, 19 nt, Artificial Sequence
  Description of Artificial Sequence: Synthetic oligonucleotide
  Antisense strand to SEQ ID NO: 1598539
uuuguccacugucacacag

SEQ ID NO: 1598541 - RNA, 19 nt, Artificial Sequence
  Description of Artificial Sequence: Synthetic oligonucleotide
  Sense strand starting at position 3201 of SEQ ID NO: 1560415
cucuguguguccucaucuu

SEQ ID NO: 1598542 - RNA, 19 nt, Artificial Sequence
  Description of Artificial Sequence: Synthetic oligonucleotide
  Antisense strand to SEQ ID NO: 1598541
aagaugaggacacacagag

SEQ ID NO: 1598543 - RNA, 19 nt, Artificial Sequence
  Description of Artificial Sequence: Synthetic oligonucleotide
  Sense strand starting at position 3207 of SEQ ID NO: 1560415
guguccucaucuuuaacau

SEQ ID NO: 1598544 - RNA, 19 nt, Artificial Sequence
  Description of Artificial Sequence: Synthetic oligonucleotide
  Antisense strand to SEQ ID NO: 1598543
auguuaaagaugaggacac

SEQ ID NO: 1598545 - RNA, 19 nt, Artificial Sequence
  Description of Artificial Sequence: Synthetic oligonucleotide
  Sense strand starting at position 3247 of SEQ ID NO: 1560415
uucauagggucaugaggaa

SEQ ID NO: 1598546 - RNA, 19 nt, Artificial Sequence
  Description of Artificial Sequence: Synthetic oligonucleotide
  Antisense strand to SEQ ID NO: 1598545
uuccucaugacccuaugaa

SEQ ID NO: 1598547 - RNA, 19 nt, Artificial Sequence
  Description of Artificial Sequence: Synthetic oligonucleotide
  Sense strand starting at position 3305 of SEQ ID NO: 1560415
uauaaaugcuggccguuau

SEQ ID NO: 1598548 - RNA, 19 nt, Artificial Sequence
  Description of Artificial Sequence: Synthetic oligonucleotide
  Antisense strand to SEQ ID NO: 1598547
auaacggccagcauuuaua

SEQ ID NO: 1598549 - RNA, 19 nt, Artificial Sequence
  Description of Artificial Sequence: Synthetic oligonucleotide
  Sense strand starting at position 3309 of SEQ ID NO: 1560415
aaugcuggccguuaucauu

SEQ ID NO: 1598550 - RNA, 19 nt, Artificial Sequence
  Description of Artificial Sequence: Synthetic oligonucleotide
  Antisense strand to SEQ ID NO: 1598549
aaugauaacggccagcauu

SEQ ID NO: 1598551 - RNA, 19 nt, Artificial Sequence
  Description of Artificial Sequence: Synthetic oligonucleotide
  Sense strand starting at position 3315 of SEQ ID NO: 1560415
ggccguuaucauuaguaag

SEQ ID NO: 1598552 - RNA, 19 nt, Artificial Sequence
  Description of Artificial Sequence: Synthetic oligonucleotide
  Antisense strand to SEQ ID NO: 1598551
cuuacuaaugauaacggcc

SEQ ID NO: 1598553 - RNA, 19 nt, Artificial Sequence
  Description of Artificial Sequence: Synthetic oligonucleotide
  Sense strand starting at position 3317 of SEQ ID NO: 1560415
ccguuaucauuaguaagua

SEQ ID NO: 1598554 - RNA, 19 nt, Artificial Sequence
  Description of Artificial Sequence: Synthetic oligonucleotide
  Antisense strand to SEQ ID NO: 1598553
uacuuacuaaugauaacgg

SEQ ID NO: 1598555 - RNA, 19 nt, Artificial Sequence
  Description of Artificial Sequence: Synthetic oligonucleotide
  Sense strand starting at position 3318 of SEQ ID NO: 1560415
cguuaucauuaguaaguaa

SEQ ID NO: 1598556 - RNA, 19 nt, Artificial Sequence
  Description of Artificial Sequence: Synthetic oligonucleotide
  Antisense strand to SEQ ID NO: 1598555
uuacuuacuaaugauaacg

SEQ ID NO: 1598557 - RNA, 19 nt, Artificial Sequence
  Description of Artificial Sequence: Synthetic oligonucleotide
  Sense strand starting at position 3343 of SEQ ID NO: 1560415
aguuaucaguuccacaagu

SEQ ID NO: 1598558 - RNA, 19 nt, Artificial Sequence
  Description of Artificial Sequence: Synthetic oligonucleotide
  Antisense strand to SEQ ID NO: 1598557
acuuguggaacugauaacu

SEQ ID NO: 1598559 - RNA, 19 nt, Artificial Sequence
  Description of Artificial Sequence: Synthetic oligonucleotide
  Sense strand starting at position 3345 of SEQ ID NO: 1560415
uuaucaguuccacaaguga

SEQ ID NO: 1598560 - RNA, 19 nt, Artificial Sequence
  Description of Artificial Sequence: Synthetic oligonucleotide
  Antisense strand to SEQ ID NO: 1598559
ucacuuguggaacugauaa

SEQ ID NO: 1598561 - RNA, 19 nt, Artificial Sequence
  Description of Artificial Sequence: Synthetic oligonucleotide
  Sense strand starting at position 3360 of SEQ ID NO: 1560415
gugaauaccuuaugcaaug

SEQ ID NO: 1598562 - RNA, 19 nt, Artificial Sequence
  Description of Artificial Sequence: Synthetic oligonucleotide
  Antisense strand to SEQ ID NO: 1598561
cauugcauaagguauucac

SEQ ID NO: 1598563 - RNA, 19 nt, Artificial Sequence
  Description of Artificial Sequence: Synthetic oligonucleotide
  Sense strand starting at position 3402 of SEQ ID NO: 1560415
aucuauaacuuaguacagu

SEQ ID NO: 1598564 - RNA, 19 nt, Artificial Sequence
  Description of Artificial Sequence: Synthetic oligonucleotide
  Antisense strand to SEQ ID NO: 1598563
acuguacuaaguuauagau

SEQ ID NO: 1598565 - RNA, 19 nt, Artificial Sequence
  Description of Artificial Sequence: Synthetic oligonucleotide
  Sense strand starting at position 3429 of SEQ ID NO: 1560415
ccgcaaugcuauuuacaau

SEQ ID NO: 1598566 - RNA, 19 nt, Artificial Sequence
  Description of Artificial Sequence: Synthetic oligonucleotide
  Antisense strand to SEQ ID NO: 1598565
auuguaaauagcauugcgg

SEQ ID NO: 1598567 - RNA, 19 nt, Artificial Sequence
  Description of Artificial Sequence: Synthetic oligonucleotide
  Sense strand starting at position 3970 of SEQ ID NO: 1560415
guaaacauuggguaugcau

SEQ ID NO: 1598568 - RNA, 19 nt, Artificial Sequence
  Description of Artificial Sequence: Synthetic oligonucleotide
  Antisense strand to SEQ ID NO: 1598567
augcauacccaauguuuac

SEQ ID NO: 1598569 - RNA, 19 nt, Artificial Sequence
  Description of Artificial Sequence: Synthetic oligonucleotide
  Sense strand starting at position 225 of SEQ ID NO: 1560416
gagauccuuuaauguguuu

SEQ ID NO: 1598570 - RNA, 19 nt, Artificial Sequence
  Description of Artificial Sequence: Synthetic oligonucleotide
  Antisense strand to SEQ ID NO: 1598569
aaacacauuaaaggaucuc

SEQ ID NO: 1598571 - RNA, 19 nt, Artificial Sequence
  Description of Artificial Sequence: Synthetic oligonucleotide
  Sense strand starting at position 228 of SEQ ID NO: 1560416
auccuuuaauguguuucua

SEQ ID NO: 1598572 - RNA, 19 nt, Artificial Sequence
  Description of Artificial Sequence: Synthetic oligonucleotide
  Antisense strand to SEQ ID NO: 1598571
uagaaacacauuaaaggau

SEQ ID NO: 1598573 - RNA, 19 nt, Artificial Sequence
  Description of Artificial Sequence: Synthetic oligonucleotide
  Sense strand starting at position 230 of SEQ ID NO: 1560416
ccuuuaauguguuucuaac

SEQ ID NO: 1598574 - RNA, 19 nt, Artificial Sequence
  Description of Artificial Sequence: Synthetic oligonucleotide
  Antisense strand to SEQ ID NO: 1598573
guuagaaacacauuaaagg

SEQ ID NO: 1598575 - RNA, 19 nt, Artificial Sequence
  Description of Artificial Sequence: Synthetic oligonucleotide
  Sense strand starting at position 236 of SEQ ID NO: 1560416
auguguuucuaacuuauuc

SEQ ID NO: 1598576 - RNA, 19 nt, Artificial Sequence
  Description of Artificial Sequence: Synthetic oligonucleotide
  Antisense strand to SEQ ID NO: 1598575
gaauaaguuagaaacacau

SEQ ID NO: 1598577 - RNA, 19 nt, Artificial Sequence
  Description of Artificial Sequence: Synthetic oligonucleotide
  Sense strand starting at position 273 of SEQ ID NO: 1560416
cagcuuaucugugcaugga

SEQ ID NO: 1598578 - RNA, 19 nt, Artificial Sequence
  Description of Artificial Sequence: Synthetic oligonucleotide
  Antisense strand to SEQ ID NO: 1598577
uccaugcacagauaagcug

SEQ ID NO: 1598579 - RNA, 19 nt, Artificial Sequence
  Description of Artificial Sequence: Synthetic oligonucleotide
  Sense strand starting at position 276 of SEQ ID NO: 1560416
cuuaucugugcauggagau

SEQ ID NO: 1598580 - RNA, 19 nt, Artificial Sequence
  Description of Artificial Sequence: Synthetic oligonucleotide
  Antisense strand to SEQ ID NO: 1598579
aucuccaugcacagauaag

SEQ ID NO: 1598581 - RNA, 19 nt, Artificial Sequence
  Description of Artificial Sequence: Synthetic oligonucleotide
  Sense strand starting at position 277 of SEQ ID NO: 1560416
uuaucugugcauggagauc

SEQ ID NO: 1598582 - RNA, 19 nt, Artificial Sequence
  Description of Artificial Sequence: Synthetic oligonucleotide
  Antisense strand to SEQ ID NO: 1598581
gaucuccaugcacagauaa

SEQ ID NO: 1598583 - RNA, 19 nt, Artificial Sequence
  Description of Artificial Sequence: Synthetic oligonucleotide
  Sense strand starting at position 289 of SEQ ID NO: 1560416
ggagaucacugacaucuca

SEQ ID NO: 1598584 - RNA, 19 nt, Artificial Sequence
  Description of Artificial Sequence: Synthetic oligonucleotide
  Antisense strand to SEQ ID NO: 1598583
ugagaugucagugaucucc

SEQ ID NO: 1598585 - RNA, 19 nt, Artificial Sequence
  Description of Artificial Sequence: Synthetic oligonucleotide
  Sense strand starting at position 368 of SEQ ID NO: 1560416
ccuuguuuauauuaagguu

SEQ ID NO: 1598586 - RNA, 19 nt, Artificial Sequence
  Description of Artificial Sequence: Synthetic oligonucleotide
  Antisense strand to SEQ ID NO: 1598585
aaccuuaauauaaacaagg

SEQ ID NO: 1598587 - RNA, 19 nt, Artificial Sequence
  Description of Artificial Sequence: Synthetic oligonucleotide
  Sense strand starting at position 386 of SEQ ID NO: 1560416
ugaccuguuuccgcagaua

SEQ ID NO: 1598588 - RNA, 19 nt, Artificial Sequence
  Description of Artificial Sequence: Synthetic oligonucleotide
  Antisense strand to SEQ ID NO: 1598587
uaucugcggaaacagguca

SEQ ID NO: 1598589 - RNA, 19 nt, Artificial Sequence
  Description of Artificial Sequence: Synthetic oligonucleotide
  Sense strand starting at position 389 of SEQ ID NO: 1560416
ccuguuuccgcagauauuu

SEQ ID NO: 1598590 - RNA, 19 nt, Artificial Sequence
  Description of Artificial Sequence: Synthetic oligonucleotide
  Antisense strand to SEQ ID NO: 1598589
aaauaucugcggaaacagg

SEQ ID NO: 1598591 - RNA, 19 nt, Artificial Sequence
  Description of Artificial Sequence: Synthetic oligonucleotide
  Sense strand starting at position 397 of SEQ ID NO: 1560416
cgcagauauuugccuucca

SEQ ID NO: 1598592 - RNA, 19 nt, Artificial Sequence
  Description of Artificial Sequence: Synthetic oligonucleotide
  Antisense strand to SEQ ID NO: 1598591
uggaaggcaaauaucugcg

SEQ ID NO: 1598593 - RNA, 19 nt, Artificial Sequence
  Description of Artificial Sequence: Synthetic oligonucleotide
  Sense strand starting at position 447 of SEQ ID NO: 1560416
accguaagcugacuaacaa

SEQ ID NO: 1598594 - RNA, 19 nt, Artificial Sequence
  Description of Artificial Sequence: Synthetic oligonucleotide
  Antisense strand to SEQ ID NO: 1598593
uuguuagucagcuuacggu

SEQ ID NO: 1598595 - RNA, 19 nt, Artificial Sequence
  Description of Artificial Sequence: Synthetic oligonucleotide
  Sense strand starting at position 448 of SEQ ID NO: 1560416
ccguaagcugacuaacaau

SEQ ID NO: 1598596 - RNA, 19 nt, Artificial Sequence
  Description of Artificial Sequence: Synthetic oligonucleotide
  Antisense strand to SEQ ID NO: 1598595
auuguuagucagcuuacgg

SEQ ID NO: 1598597 - RNA, 19 nt, Artificial Sequence
  Description of Artificial Sequence: Synthetic oligonucleotide
  Sense strand starting at position 645 of SEQ ID NO: 1560416
ucaucuuccgcuuagucaa

SEQ ID NO: 1598598 - RNA, 19 nt, Artificial Sequence
  Description of Artificial Sequence: Synthetic oligonucleotide
  Antisense strand to SEQ ID NO: 1598597
uugacuaagcggaagauga

SEQ ID NO: 1598599 - RNA, 19 nt, Artificial Sequence
  Description of Artificial Sequence: Synthetic oligonucleotide
  Sense strand starting at position 961 of SEQ ID NO: 1560416
uggccuguaacauggcaaa

SEQ ID NO: 1598600 - RNA, 19 nt, Artificial Sequence
  Description of Artificial Sequence: Synthetic oligonucleotide
  Antisense strand to SEQ ID NO: 1598599
uuugccauguuacaggcca

SEQ ID NO: 1598601 - RNA, 19 nt, Artificial Sequence
  Description of Artificial Sequence: Synthetic oligonucleotide
  Sense strand starting at position 1525 of SEQ ID NO: 1560416
uugagcguccuguauauuu

SEQ ID NO: 1598602 - RNA, 19 nt, Artificial Sequence
  Description of Artificial Sequence: Synthetic oligonucleotide
  Antisense strand to SEQ ID NO: 1598601
aaauauacaggacgcucaa

SEQ ID NO: 1598603 - RNA, 19 nt, Artificial Sequence
  Description of Artificial Sequence: Synthetic oligonucleotide
  Sense strand starting at position 1527 of SEQ ID NO: 1560416
gagcguccuguauauuuau

SEQ ID NO: 1598604 - RNA, 19 nt, Artificial Sequence
  Description of Artificial Sequence: Synthetic oligonucleotide
  Antisense strand to SEQ ID NO: 1598603
auaaauauacaggacgcuc

SEQ ID NO: 1598605 - RNA, 19 nt, Artificial Sequence
  Description of Artificial Sequence: Synthetic oligonucleotide
  Sense strand starting at position 1545 of SEQ ID NO: 1560416
ucugcuaaaucugguaacu

SEQ ID NO: 1598606 - RNA, 19 nt, Artificial Sequence
  Description of Artificial Sequence: Synthetic oligonucleotide
  Antisense strand to SEQ ID NO: 1598605
aguuaccagauuuagcaga

SEQ ID NO: 1598607 - RNA, 19 nt, Artificial Sequence
  Description of Artificial Sequence: Synthetic oligonucleotide
  Sense strand starting at position 2048 of SEQ ID NO: 1560416
cacccucuuccgugacgua

SEQ ID NO: 1598608 - RNA, 19 nt, Artificial Sequence
  Description of Artificial Sequence: Synthetic oligonucleotide
  Antisense strand to SEQ ID NO: 1598607
uacgucacggaagagggug

SEQ ID NO: 1598609 - RNA, 19 nt, Artificial Sequence
  Description of Artificial Sequence: Synthetic oligonucleotide
  Sense strand starting at position 2086 of SEQ ID NO: 1560416
uuauaaagugacuggaguu

SEQ ID NO: 1598610 - RNA, 19 nt, Artificial Sequence
  Description of Artificial Sequence: Synthetic oligonucleotide
  Antisense strand to SEQ ID NO: 1598609
aacuccagucacuuuauaa

SEQ ID NO: 1598611 - RNA, 19 nt, Artificial Sequence
  Description of Artificial Sequence: Synthetic oligonucleotide
  Sense strand starting at position 2164 of SEQ ID NO: 1560416
gcgggaucugaagauuccu

SEQ ID NO: 1598612 - RNA, 19 nt, Artificial Sequence
  Description of Artificial Sequence: Synthetic oligonucleotide
  Antisense strand to SEQ ID NO: 1598611
aggaaucuucagaucccgc

SEQ ID NO: 1598613 - RNA, 19 nt, Artificial Sequence
  Description of Artificial Sequence: Synthetic oligonucleotide
  Sense strand starting at position 2229 of SEQ ID NO: 1560416
agcuuucgcccuuaagcga

SEQ ID NO: 1598614 - RNA, 19 nt, Artificial Sequence
  Description of Artificial Sequence: Synthetic oligonucleotide
  Antisense strand to SEQ ID NO: 1598613
ucgcuuaagggcgaaagcu

SEQ ID NO: 1598615 - RNA, 19 nt, Artificial Sequence
  Description of Artificial Sequence: Synthetic oligonucleotide
  Sense strand starting at position 2722 of SEQ ID NO: 1560416
ccaugcucggccugauuau

SEQ ID NO: 1598616 - RNA, 19 nt, Artificial Sequence
  Description of Artificial Sequence: Synthetic oligonucleotide
  Antisense strand to SEQ ID NO: 1598615
auaaucaggccgagcaugg

SEQ ID NO: 1598617 - RNA, 19 nt, Artificial Sequence
  Description of Artificial Sequence: Synthetic oligonucleotide
  Sense strand starting at position 2723 of SEQ ID NO: 1560416
caugcucggccugauuauu

SEQ ID NO: 1598618 - RNA, 19 nt, Artificial Sequence
  Description of Artificial Sequence: Synthetic oligonucleotide
  Antisense strand to SEQ ID NO: 1598617
aauaaucaggccgagcaug

SEQ ID NO: 1598619 - RNA, 19 nt, Artificial Sequence
  Description of Artificial Sequence: Synthetic oligonucleotide
  Sense strand starting at position 2781 of SEQ ID NO: 1560416
gcagauuccgcacaacaca

SEQ ID NO: 1598620 - RNA, 19 nt, Artificial Sequence
  Description of Artificial Sequence: Synthetic oligonucleotide
  Antisense strand to SEQ ID NO: 1598619
uguguugugcggaaucugc

SEQ ID NO: 1598621 - RNA, 19 nt, Artificial Sequence
  Description of Artificial Sequence: Synthetic oligonucleotide
  Sense strand starting at position 2833 of SEQ ID NO: 1560416
guuccaauccuaggaucuu

SEQ ID NO: 1598622 - RNA, 19 nt, Artificial Sequence
  Description of Artificial Sequence: Synthetic oligonucleotide
  Antisense strand to SEQ ID NO: 1598621
aagauccuaggauuggaac

SEQ ID NO: 1598623 - RNA, 19 nt, Artificial Sequence
  Description of Artificial Sequence: Synthetic oligonucleotide
  Sense strand starting at position 2839 of SEQ ID NO: 1560416
auccuaggaucuuagaaau

SEQ ID NO: 1598624 - RNA, 19 nt, Artificial Sequence
  Description of Artificial Sequence: Synthetic oligonucleotide
  Antisense strand to SEQ ID NO: 1598623
auuucuaagauccuaggau

SEQ ID NO: 1598625 - RNA, 19 nt, Artificial Sequence
  Description of Artificial Sequence: Synthetic oligonucleotide
  Sense strand starting at position 2857 of SEQ ID NO: 1560416
ucaaguaacuuucggaaua

SEQ ID NO: 1598626 - RNA, 19 nt, Artificial Sequence
  Description of Artificial Sequence: Synthetic oligonucleotide
  Antisense strand to SEQ ID NO: 1598625
uauuccgaaaguuacuuga

SEQ ID NO: 1598627 - RNA, 19 nt, Artificial Sequence
  Description of Artificial Sequence: Synthetic oligonucleotide
  Sense strand starting at position 2900 of SEQ ID NO: 1560416
agaggaauguuagaaacau

SEQ ID NO: 1598628 - RNA, 19 nt, Artificial Sequence
  Description of Artificial Sequence: Synthetic oligonucleotide
  Antisense strand to SEQ ID NO: 1598627
auguuucuaacauuccucu

SEQ ID NO: 1598629 - RNA, 19 nt, Artificial Sequence
  Description of Artificial Sequence: Synthetic oligonucleotide
  Sense strand starting at position 2938 of SEQ ID NO: 1560416
agugcagacucagaaucau

SEQ ID NO: 1598630 - RNA, 19 nt, Artificial Sequence
  Description of Artificial Sequence: Synthetic oligonucleotide
  Antisense strand to SEQ ID NO: 1598629
augauucugagucugcacu

SEQ ID NO: 1598631 - RNA, 19 nt, Artificial Sequence
  Description of Artificial Sequence: Synthetic oligonucleotide
  Sense strand starting at position 3018 of SEQ ID NO: 1560416
acaguacaucugcgucaua

SEQ ID NO: 1598632 - RNA, 19 nt, Artificial Sequence
  Description of Artificial Sequence: Synthetic oligonucleotide
  Antisense strand to SEQ ID NO: 1598631
uaugacgcagauguacugu

SEQ ID NO: 1598633 - RNA, 19 nt, Artificial Sequence
  Description of Artificial Sequence: Synthetic oligonucleotide
  Sense strand starting at position 3019 of SEQ ID NO: 1560416
caguacaucugcgucauaa

SEQ ID NO: 1598634 - RNA, 19 nt, Artificial Sequence
  Description of Artificial Sequence: Synthetic oligonucleotide
  Antisense strand to SEQ ID NO: 1598633
uuaugacgcagauguacug

SEQ ID NO: 1598635 - RNA, 19 nt, Artificial Sequence
  Description of Artificial Sequence: Synthetic oligonucleotide
  Sense strand starting at position 3021 of SEQ ID NO: 1560416
guacaucugcgucauaagu

SEQ ID NO: 1598636 - RNA, 19 nt, Artificial Sequence
  Description of Artificial Sequence: Synthetic oligonucleotide
  Antisense strand to SEQ ID NO: 1598635
acuuaugacgcagauguac

SEQ ID NO: 1598637 - RNA, 19 nt, Artificial Sequence
  Description of Artificial Sequence: Synthetic oligonucleotide
  Sense strand starting at position 3023 of SEQ ID NO: 1560416
acaucugcgucauaaguca

SEQ ID NO: 1598638 - RNA, 19 nt, Artificial Sequence
  Description of Artificial Sequence: Synthetic oligonucleotide
  Antisense strand to SEQ ID NO: 1598637
ugacuuaugacgcagaugu

SEQ ID NO: 1598639 - RNA, 19 nt, Artificial Sequence
  Description of Artificial Sequence: Synthetic oligonucleotide
  Sense strand starting at position 3089 of SEQ ID NO: 1560416
cugaguguuagcuauuguu

SEQ ID NO: 1598640 - RNA, 19 nt, Artificial Sequence
  Description of Artificial Sequence: Synthetic oligonucleotide
  Antisense strand to SEQ ID NO: 1598639
aacaauagcuaacacucag

SEQ ID NO: 1598641 - RNA, 19 nt, Artificial Sequence
  Description of Artificial Sequence: Synthetic oligonucleotide
  Sense strand starting at position 3324 of SEQ ID NO: 1560416
agauccugugucugccaaa

SEQ ID NO: 1598642 - RNA, 19 nt, Artificial Sequence
  Description of Artificial Sequence: Synthetic oligonucleotide
  Antisense strand to SEQ ID NO: 1598641
uuuggcagacacaggaucu

SEQ ID NO: 1598643 - RNA, 19 nt, Artificial Sequence
  Description of Artificial Sequence: Synthetic oligonucleotide
  Sense strand starting at position 3598 of SEQ ID NO: 1560416
auggucacacagcgaaauu

SEQ ID NO: 1598644 - RNA, 19 nt, Artificial Sequence
  Description of Artificial Sequence: Synthetic oligonucleotide
  Antisense strand to SEQ ID NO: 1598643
aauuucgcugugugaccau

SEQ ID NO: 1598645 - RNA, 19 nt, Artificial Sequence
  Description of Artificial Sequence: Synthetic oligonucleotide
  Sense strand starting at position 3635 of SEQ ID NO: 1560416
gagcguuggaaaggugaca

SEQ ID NO: 1598646 - RNA, 19 nt, Artificial Sequence
  Description of Artificial Sequence: Synthetic oligonucleotide
  Antisense strand to SEQ ID NO: 1598645
ugucaccuuuccaacgcuc

SEQ ID NO: 1598647 - RNA, 19 nt, Artificial Sequence
  Description of Artificial Sequence: Synthetic oligonucleotide
  Sense strand starting at position 3978 of SEQ ID NO: 1560416
cagcguguuccugguguua

SEQ ID NO: 1598648 - RNA, 19 nt, Artificial Sequence
  Description of Artificial Sequence: Synthetic oligonucleotide
  Antisense strand to SEQ ID NO: 1598647
uaacaccaggaacacgcug

SEQ ID NO: 1598649 - RNA, 19 nt, Artificial Sequence
  Description of Artificial Sequence: Synthetic oligonucleotide
  Sense strand starting at position 366 of SEQ ID NO: 1560417
gaguuaggguguuaccaug

SEQ ID NO: 1598650 - RNA, 19 nt, Artificial Sequence
  Description of Artificial Sequence: Synthetic oligonucleotide
  Antisense strand to SEQ ID NO: 1598649
caugguaacacccuaacuc

SEQ ID NO: 1598651 - RNA, 19 nt, Artificial Sequence
  Description of Artificial Sequence: Synthetic oligonucleotide
  Sense strand starting at position 611 of SEQ ID NO: 1560417
gaauuaaaucacuggaugu

SEQ ID NO: 1598652 - RNA, 19 nt, Artificial Sequence
  Description of Artificial Sequence: Synthetic oligonucleotide
  Antisense strand to SEQ ID NO: 1598651
acauccagugauuuaauuc

SEQ ID NO: 1598653 - RNA, 19 nt, Artificial Sequence
  Description of Artificial Sequence: Synthetic oligonucleotide
  Sense strand starting at position 716 of SEQ ID NO: 1560417
ggucaugagugagcuagaa

SEQ ID NO: 1598654 - RNA, 19 nt, Artificial Sequence
  Description of Artificial Sequence: Synthetic oligonucleotide
  Antisense strand to SEQ ID NO: 1598653
uucuagcucacucaugacc

SEQ ID NO: 1598655 - RNA, 19 nt, Artificial Sequence
  Description of Artificial Sequence: Synthetic oligonucleotide
  Sense strand starting at position 718 of SEQ ID NO: 1560417
ucaugagugagcuagaacu

SEQ ID NO: 1598656 - RNA, 19 nt, Artificial Sequence
  Description of Artificial Sequence: Synthetic oligonucleotide
  Antisense strand to SEQ ID NO: 1598655
aguucuagcucacucauga

SEQ ID NO: 1598657 - RNA, 19 nt, Artificial Sequence
  Description of Artificial Sequence: Synthetic oligonucleotide
  Sense strand starting at position 728 of SEQ ID NO: 1560417
gcuagaacuugaucuccag

SEQ ID NO: 1598658 - RNA, 19 nt, Artificial Sequence
  Description of Artificial Sequence: Synthetic oligonucleotide
  Antisense strand to SEQ ID NO: 1598657
cuggagaucaaguucuagc

SEQ ID NO: 1598659 - RNA, 19 nt, Artificial Sequence
  Description of Artificial Sequence: Synthetic oligonucleotide
  Sense strand starting at position 1061 of SEQ ID NO: 1560417
ggccaaucuccaggucuuu

SEQ ID NO: 1598660 - RNA, 19 nt, Artificial Sequence
  Description of Artificial Sequence: Synthetic oligonucleotide
  Antisense strand to SEQ ID NO: 1598659
aaagaccuggagauuggcc

SEQ ID NO: 1598661 - RNA, 19 nt, Artificial Sequence
  Description of Artificial Sequence: Synthetic oligonucleotide
  Sense strand starting at position 1336 of SEQ ID NO: 1560417
agaugucacucacuuauga

SEQ ID NO: 1598662 - RNA, 19 nt, Artificial Sequence
  Description of Artificial Sequence: Synthetic oligonucleotide
  Antisense strand to SEQ ID NO: 1598661
ucauaagugagugacaucu

SEQ ID NO: 1598663 - RNA, 19 nt, Artificial Sequence
  Description of Artificial Sequence: Synthetic oligonucleotide
  Sense strand starting at position 1346 of SEQ ID NO: 1560417
cacuuaugauggcugcauu

SEQ ID NO: 1598664 - RNA, 19 nt, Artificial Sequence
  Description of Artificial Sequence: Synthetic oligonucleotide
  Antisense strand to SEQ ID NO: 1598663
aaugcagccaucauaagug

SEQ ID NO: 1598665 - RNA, 19 nt, Artificial Sequence
  Description of Artificial Sequence: Synthetic oligonucleotide
  Sense strand starting at position 1382 of SEQ ID NO: 1560417
agcggaauuuccucagcuu

SEQ ID NO: 1598666 - RNA, 19 nt, Artificial Sequence
  Description of Artificial Sequence: Synthetic oligonucleotide
  Antisense strand to SEQ ID NO: 1598665
aagcugaggaaauuccgcu

SEQ ID NO: 1598667 - RNA, 19 nt, Artificial Sequence
  Description of Artificial Sequence: Synthetic oligonucleotide
  Sense strand starting at position 1383 of SEQ ID NO: 1560417
gcggaauuuccucagcuuu

SEQ ID NO: 1598668 - RNA, 19 nt, Artificial Sequence
  Description of Artificial Sequence: Synthetic oligonucleotide
  Antisense strand to SEQ ID NO: 1598667
aaagcugaggaaauuccgc

SEQ ID NO: 1598669 - RNA, 19 nt, Artificial Sequence
  Description of Artificial Sequence: Synthetic oligonucleotide
  Sense strand starting at position 1402 of SEQ ID NO: 1560417
ucuguuagcucugggucua

SEQ ID NO: 1598670 - RNA, 19 nt, Artificial Sequence
  Description of Artificial Sequence: Synthetic oligonucleotide
  Antisense strand to SEQ ID NO: 1598669
uagacccagagcuaacaga

SEQ ID NO: 1598671 - RNA, 19 nt, Artificial Sequence
  Description of Artificial Sequence: Synthetic oligonucleotide
  Sense strand starting at position 1552 of SEQ ID NO: 1560417
aucugaugccuuugugaac

SEQ ID NO: 1598672 - RNA, 19 nt, Artificial Sequence
  Description of Artificial Sequence: Synthetic oligonucleotide
  Antisense strand to SEQ ID NO: 1598671
guucacaaaggcaucagau

SEQ ID NO: 1598673 - RNA, 19 nt, Artificial Sequence
  Description of Artificial Sequence: Synthetic oligonucleotide
  Sense strand starting at position 1561 of SEQ ID NO: 1560417
cuuugugaacauugagaaa

SEQ ID NO: 1598674 - RNA, 19 nt, Artificial Sequence
  Description of Artificial Sequence: Synthetic oligonucleotide
  Antisense strand to SEQ ID NO: 1598673
uuucucaauguucacaaag

SEQ ID NO: 1598675 - RNA, 19 nt, Artificial Sequence
  Description of Artificial Sequence: Synthetic oligonucleotide
  Sense strand starting at position 1582 of SEQ ID NO: 1560417
gcacccuucccacagagua

SEQ ID NO: 1598676 - RNA, 19 nt, Artificial Sequence
  Description of Artificial Sequence: Synthetic oligonucleotide
  Antisense strand to SEQ ID NO: 1598675
uacucugugggaagggugc

SEQ ID NO: 1598677 - RNA, 19 nt, Artificial Sequence
  Description of Artificial Sequence: Synthetic oligonucleotide
  Sense strand starting at position 1887 of SEQ ID NO: 1560417
ccaugauuguucuguccac

SEQ ID NO: 1598678 - RNA, 19 nt, Artificial Sequence
  Description of Artificial Sequence: Synthetic oligonucleotide
  Antisense strand to SEQ ID NO: 1598677
guggacagaacaaucaugg

SEQ ID NO: 1598679 - RNA, 19 nt, Artificial Sequence
  Description of Artificial Sequence: Synthetic oligonucleotide
  Sense strand starting at position 2016 of SEQ ID NO: 1560417
ugcccuuucugggacaacu

SEQ ID NO: 1598680 - RNA, 19 nt, Artificial Sequence
  Description of Artificial Sequence: Synthetic oligonucleotide
  Antisense strand to SEQ ID NO: 1598679
aguugucccagaaagggca

SEQ ID NO: 1598681 - RNA, 19 nt, Artificial Sequence
  Description of Artificial Sequence: Synthetic oligonucleotide
  Sense strand starting at position 2087 of SEQ ID NO: 1560417
caggaaaucgcucagacca

SEQ ID NO: 1598682 - RNA, 19 nt, Artificial Sequence
  Description of Artificial Sequence: Synthetic oligonucleotide
  Antisense strand to SEQ ID NO: 1598681
uggucugagcgauuuccug

SEQ ID NO: 1598683 - RNA, 19 nt, Artificial Sequence
  Description of Artificial Sequence: Synthetic oligonucleotide
  Sense strand starting at position 2114 of SEQ ID NO: 1560417
aagcuuccuugcuguguga

SEQ ID NO: 1598684 - RNA, 19 nt, Artificial Sequence
  Description of Artificial Sequence: Synthetic oligonucleotide
  Antisense strand to SEQ ID NO: 1598683
ucacacagcaaggaagcuu

SEQ ID NO: 1598685 - RNA, 19 nt, Artificial Sequence
  Description of Artificial Sequence: Synthetic oligonucleotide
  Sense strand starting at position 2127 of SEQ ID NO: 1560417
gugugacccuagcuaagua

SEQ ID NO: 1598686 - RNA, 19 nt, Artificial Sequence
  Description of Artificial Sequence: Synthetic oligonucleotide
  Antisense strand to SEQ ID NO: 1598685
uacuuagcuagggucacac

SEQ ID NO: 1598687 - RNA, 19 nt, Artificial Sequence
  Description of Artificial Sequence: Synthetic oligonucleotide
  Sense strand starting at position 2162 of SEQ ID NO: 1560417
uugagauuguggugaggau

SEQ ID NO: 1598688 - RNA, 19 nt, Artificial Sequence
  Description of Artificial Sequence: Synthetic oligonucleotide
  Antisense strand to SEQ ID NO: 1598687
auccucaccacaaucucaa

SEQ ID NO: 1598689 - RNA, 19 nt, Artificial Sequence
  Description of Artificial Sequence: Synthetic oligonucleotide
  Sense strand starting at position 2661 of SEQ ID NO: 1560417
ccauuaugucaauggcaaa

SEQ ID NO: 1598690 - RNA, 19 nt, Artificial Sequence
  Description of Artificial Sequence: Synthetic oligonucleotide
  Antisense strand to SEQ ID NO: 1598689
uuugccauugacauaaugg

SEQ ID NO: 1598691 - RNA, 19 nt, Artificial Sequence
  Description of Artificial Sequence: Synthetic oligonucleotide
  Sense strand starting at position 2700 of SEQ ID NO: 1560417
cccacagugccuggguaau

SEQ ID NO: 1598692 - RNA, 19 nt, Artificial Sequence
  Description of Artificial Sequence: Synthetic oligonucleotide
  Antisense strand to SEQ ID NO: 1598691
auuacccaggcacuguggg

SEQ ID NO: 1598693 - RNA, 19 nt, Artificial Sequence
  Description of Artificial Sequence: Synthetic oligonucleotide
  Sense strand starting at position 2787 of SEQ ID NO: 1560417
ggaguucaaucccgucaga

SEQ ID NO: 1598694 - RNA, 19 nt, Artificial Sequence
  Description of Artificial Sequence: Synthetic oligonucleotide
  Antisense strand to SEQ ID NO: 1598693
ucugacgggauugaacucc

SEQ ID NO: 1598695 - RNA, 19 nt, Artificial Sequence
  Description of Artificial Sequence: Synthetic oligonucleotide
  Sense strand starting at position 3230 of SEQ ID NO: 1560417
uguccugacugucauauaa

SEQ ID NO: 1598696 - RNA, 19 nt, Artificial Sequence
  Description of Artificial Sequence: Synthetic oligonucleotide
  Antisense strand to SEQ ID NO: 1598695
uuauaugacagucaggaca

SEQ ID NO: 1598697 - RNA, 19 nt, Artificial Sequence
  Description of Artificial Sequence: Synthetic oligonucleotide
  Sense strand starting at position 3232 of SEQ ID NO: 1560417
uccugacugucauauaaag

SEQ ID NO: 1598698 - RNA, 19 nt, Artificial Sequence
  Description of Artificial Sequence: Synthetic oligonucleotide
  Antisense strand to SEQ ID NO: 1598697
cuuuauaugacagucagga

SEQ ID NO: 1598699 - RNA, 19 nt, Artificial Sequence
  Description of Artificial Sequence: Synthetic oligonucleotide
  Sense strand starting at position 3476 of SEQ ID NO: 1560417
ggaucuuucuccuuagccu

SEQ ID NO: 1598700 - RNA, 19 nt, Artificial Sequence
  Description of Artificial Sequence: Synthetic oligonucleotide
  Antisense strand to SEQ ID NO: 1598699
aggcuaaggagaaagaucc

SEQ ID NO: 1598701 - RNA, 19 nt, Artificial Sequence
  Description of Artificial Sequence: Synthetic oligonucleotide
  Sense strand starting at position 3491 of SEQ ID NO: 1560417
gccuccaugcaguguuacu

SEQ ID NO: 1598702 - RNA, 19 nt, Artificial Sequence
  Description of Artificial Sequence: Synthetic oligonucleotide
  Antisense strand to SEQ ID NO: 1598701
aguaacacugcauggaggc

SEQ ID NO: 1598703 - RNA, 19 nt, Artificial Sequence
  Description of Artificial Sequence: Synthetic oligonucleotide
  Sense strand starting at position 3501 of SEQ ID NO: 1560417
aguguuacuucuuccaucu

SEQ ID NO: 1598704 - RNA, 19 nt, Artificial Sequence
  Description of Artificial Sequence: Synthetic oligonucleotide
  Antisense strand to SEQ ID NO: 1598703
agauggaagaaguaacacu

SEQ ID NO: 1598705 - RNA, 19 nt, Artificial Sequence
  Description of Artificial Sequence: Synthetic oligonucleotide
  Sense strand starting at position 334 of SEQ ID NO: 1560418
gguucugggucuucugaga

SEQ ID NO: 1598706 - RNA, 19 nt, Artificial Sequence
  Description of Artificial Sequence: Synthetic oligonucleotide
  Antisense strand to SEQ ID NO: 1598705
ucucagaagacccagaacc

SEQ ID NO: 1598707 - RNA, 19 nt, Artificial Sequence
  Description of Artificial Sequence: Synthetic oligonucleotide
  Sense strand starting at position 390 of SEQ ID NO: 1560418
ggauaaaggugugucagga

SEQ ID NO: 1598708 - RNA, 19 nt, Artificial Sequence
  Description of Artificial Sequence: Synthetic oligonucleotide
  Antisense strand to SEQ ID NO: 1598707
uccugacacaccuuuaucc

SEQ ID NO: 1598709 - RNA, 19 nt, Artificial Sequence
  Description of Artificial Sequence: Synthetic oligonucleotide
  Sense strand starting at position 580 of SEQ ID NO: 1560418
cccagauaacuuugagguu

SEQ ID NO: 1598710 - RNA, 19 nt, Artificial Sequence
  Description of Artificial Sequence: Synthetic oligonucleotide
  Antisense strand to SEQ ID NO: 1598709
aaccucaaaguuaucuggg

SEQ ID NO: 1598711 - RNA, 19 nt, Artificial Sequence
  Description of Artificial Sequence: Synthetic oligonucleotide
  Sense strand starting at position 594 of SEQ ID NO: 1560418
agguucauagagugggauu

SEQ ID NO: 1598712 - RNA, 19 nt, Artificial Sequence
  Description of Artificial Sequence: Synthetic oligonucleotide
  Antisense strand to SEQ ID NO: 1598711
aaucccacucuaugaaccu

SEQ ID NO: 1598713 - RNA, 19 nt, Artificial Sequence
  Description of Artificial Sequence: Synthetic oligonucleotide
  Sense strand starting at position 596 of SEQ ID NO: 1560418
guucauagagugggauuau

SEQ ID NO: 1598714 - RNA, 19 nt, Artificial Sequence
  Description of Artificial Sequence: Synthetic oligonucleotide
  Antisense strand to SEQ ID NO: 1598713
auaaucccacucuaugaac

SEQ ID NO: 1598715 - RNA, 19 nt, Artificial Sequence
  Description of Artificial Sequence: Synthetic oligonucleotide
  Sense strand starting at position 606 of SEQ ID NO: 1560418
ugggauuauagggaucgca

SEQ ID NO: 1598716 - RNA, 19 nt, Artificial Sequence
  Description of Artificial Sequence: Synthetic oligonucleotide
  Antisense strand to SEQ ID NO: 1598715
ugcgaucccuauaauccca

SEQ ID NO: 1598717 - RNA, 19 nt, Artificial Sequence
  Description of Artificial Sequence: Synthetic oligonucleotide
  Sense strand starting at position 609 of SEQ ID NO: 1560418
gauuauagggaucgcaaau

SEQ ID NO: 1598718 - RNA, 19 nt, Artificial Sequence
  Description of Artificial Sequence: Synthetic oligonucleotide
  Antisense strand to SEQ ID NO: 1598717
auuugcgaucccuauaauc

SEQ ID NO: 1598719 - RNA, 19 nt, Artificial Sequence
  Description of Artificial Sequence: Synthetic oligonucleotide
  Sense strand starting at position 734 of SEQ ID NO: 1560418
auccuagacuucucugguu

SEQ ID NO: 1598720 - RNA, 19 nt, Artificial Sequence
  Description of Artificial Sequence: Synthetic oligonucleotide
  Antisense strand to SEQ ID NO: 1598719
aaccagagaagucuaggau

SEQ ID NO: 1598721 - RNA, 19 nt, Artificial Sequence
  Description of Artificial Sequence: Synthetic oligonucleotide
  Sense strand starting at position 736 of SEQ ID NO: 1560418
ccuagacuucucugguuau

SEQ ID NO: 1598722 - RNA, 19 nt, Artificial Sequence
  Description of Artificial Sequence: Synthetic oligonucleotide
  Antisense strand to SEQ ID NO: 1598721
auaaccagagaagucuagg

SEQ ID NO: 1598723 - RNA, 19 nt, Artificial Sequence
  Description of Artificial Sequence: Synthetic oligonucleotide
  Sense strand starting at position 739 of SEQ ID NO: 1560418
agacuucucugguuauuag

SEQ ID NO: 1598724 - RNA, 19 nt, Artificial Sequence
  Description of Artificial Sequence: Synthetic oligonucleotide
  Antisense strand to SEQ ID NO: 1598723
cuaauaaccagagaagucu

SEQ ID NO: 1598725 - RNA, 19 nt, Artificial Sequence
  Description of Artificial Sequence: Synthetic oligonucleotide
  Sense strand starting at position 742 of SEQ ID NO: 1560418
cuucucugguuauuaggua

SEQ ID NO: 1598726 - RNA, 19 nt, Artificial Sequence
  Description of Artificial Sequence: Synthetic oligonucleotide
  Antisense strand to SEQ ID NO: 1598725
uaccuaauaaccagagaag

SEQ ID NO: 1598727 - RNA, 19 nt, Artificial Sequence
  Description of Artificial Sequence: Synthetic oligonucleotide
  Sense strand starting at position 746 of SEQ ID NO: 1560418
ucugguuauuagguaugua

SEQ ID NO: 1598728 - RNA, 19 nt, Artificial Sequence
  Description of Artificial Sequence: Synthetic oligonucleotide
  Antisense strand to SEQ ID NO: 1598727
uacauaccuaauaaccaga

SEQ ID NO: 1598729 - RNA, 19 nt, Artificial Sequence
  Description of Artificial Sequence: Synthetic oligonucleotide
  Sense strand starting at position 747 of SEQ ID NO: 1560418
cugguuauuagguauguag

SEQ ID NO: 1598730 - RNA, 19 nt, Artificial Sequence
  Description of Artificial Sequence: Synthetic oligonucleotide
  Antisense strand to SEQ ID NO: 1598729
cuacauaccuaauaaccag

SEQ ID NO: 1598731 - RNA, 19 nt, Artificial Sequence
  Description of Artificial Sequence: Synthetic oligonucleotide
  Sense strand starting at position 749 of SEQ ID NO: 1560418
gguuauuagguauguaggu

SEQ ID NO: 1598732 - RNA, 19 nt, Artificial Sequence
  Description of Artificial Sequence: Synthetic oligonucleotide
  Antisense strand to SEQ ID NO: 1598731
accuacauaccuaauaacc

SEQ ID NO: 1598733 - RNA, 19 nt, Artificial Sequence
  Description of Artificial Sequence: Synthetic oligonucleotide
  Sense strand starting at position 754 of SEQ ID NO: 1560418
uuagguauguagguccaga

SEQ ID NO: 1598734 - RNA, 19 nt, Artificial Sequence
  Description of Artificial Sequence: Synthetic oligonucleotide
  Antisense strand to SEQ ID NO: 1598733
ucuggaccuacauaccuaa

SEQ ID NO: 1598735 - RNA, 19 nt, Artificial Sequence
  Description of Artificial Sequence: Synthetic oligonucleotide
  Sense strand starting at position 759 of SEQ ID NO: 1560418
uauguagguccagauguua

SEQ ID NO: 1598736 - RNA, 19 nt, Artificial Sequence
  Description of Artificial Sequence: Synthetic oligonucleotide
  Antisense strand to SEQ ID NO: 1598735
uaacaucuggaccuacaua

SEQ ID NO: 1598737 - RNA, 19 nt, Artificial Sequence
  Description of Artificial Sequence: Synthetic oligonucleotide
  Sense strand starting at position 878 of SEQ ID NO: 1560418
gugagauuucgagguuguc

SEQ ID NO: 1598738 - RNA, 19 nt, Artificial Sequence
  Description of Artificial Sequence: Synthetic oligonucleotide
  Antisense strand to SEQ ID NO: 1598737
gacaaccucgaaaucucac

SEQ ID NO: 1598739 - RNA, 19 nt, Artificial Sequence
  Description of Artificial Sequence: Synthetic oligonucleotide
  Sense strand starting at position 905 of SEQ ID NO: 1560418
ggaagaugucacuguaccu

SEQ ID NO: 1598740 - RNA, 19 nt, Artificial Sequence
  Description of Artificial Sequence: Synthetic oligonucleotide
  Antisense strand to SEQ ID NO: 1598739
agguacagugacaucuucc

SEQ ID NO: 1598741 - RNA, 19 nt, Artificial Sequence
  Description of Artificial Sequence: Synthetic oligonucleotide
  Sense strand starting at position 964 of SEQ ID NO: 1560418
gaguguaauacaugggcua

SEQ ID NO: 1598742 - RNA, 19 nt, Artificial Sequence
  Description of Artificial Sequence: Synthetic oligonucleotide
  Antisense strand to SEQ ID NO: 1598741
uagcccauguauuacacuc

SEQ ID NO: 1598743 - RNA, 19 nt, Artificial Sequence
  Description of Artificial Sequence: Synthetic oligonucleotide
  Sense strand starting at position 965 of SEQ ID NO: 1560418
aguguaauacaugggcuaa

SEQ ID NO: 1598744 - RNA, 19 nt, Artificial Sequence
  Description of Artificial Sequence: Synthetic oligonucleotide
  Antisense strand to SEQ ID NO: 1598743
uuagcccauguauuacacu

SEQ ID NO: 1598745 - RNA, 19 nt, Artificial Sequence
  Description of Artificial Sequence: Synthetic oligonucleotide
  Sense strand starting at position 966 of SEQ ID NO: 1560418
guguaauacaugggcuaac

SEQ ID NO: 1598746 - RNA, 19 nt, Artificial Sequence
  Description of Artificial Sequence: Synthetic oligonucleotide
  Antisense strand to SEQ ID NO: 1598745
guuagcccauguauuacac

SEQ ID NO: 1598747 - RNA, 19 nt, Artificial Sequence
  Description of Artificial Sequence: Synthetic oligonucleotide
  Sense strand starting at position 1228 of SEQ ID NO: 1560418
ccaggcugucccgagaaga

SEQ ID NO: 1598748 - RNA, 19 nt, Artificial Sequence
  Description of Artificial Sequence: Synthetic oligonucleotide
  Antisense strand to SEQ ID NO: 1598747
ucuucucgggacagccugg

SEQ ID NO: 1598749 - RNA, 19 nt, Artificial Sequence
  Description of Artificial Sequence: Synthetic oligonucleotide
  Sense strand starting at position 1710 of SEQ ID NO: 1560418
ggaggaucccuggguccuu

SEQ ID NO: 1598750 - RNA, 19 nt, Artificial Sequence
  Description of Artificial Sequence: Synthetic oligonucleotide
  Antisense strand to SEQ ID NO: 1598749
aaggacccagggauccucc

SEQ ID NO: 1598751 - RNA, 19 nt, Artificial Sequence
  Description of Artificial Sequence: Synthetic oligonucleotide
  Sense strand starting at position 1846 of SEQ ID NO: 1560418
ggcucugcugcguccauau

SEQ ID NO: 1598752 - RNA, 19 nt, Artificial Sequence
  Description of Artificial Sequence: Synthetic oligonucleotide
  Antisense strand to SEQ ID NO: 1598751
auauggacgcagcagagcc

SEQ ID NO: 1598753 - RNA, 19 nt, Artificial Sequence
  Description of Artificial Sequence: Synthetic oligonucleotide
  Sense strand starting at position 2213 of SEQ ID NO: 1560418
cucccugaaugguugcaga

SEQ ID NO: 1598754 - RNA, 19 nt, Artificial Sequence
  Description of Artificial Sequence: Synthetic oligonucleotide
  Antisense strand to SEQ ID NO: 1598753
ucugcaaccauucagggag

SEQ ID NO: 1598755 - RNA, 19 nt, Artificial Sequence
  Description of Artificial Sequence: Synthetic oligonucleotide
  Sense strand starting at position 2367 of SEQ ID NO: 1560418
cugauauucuguccgauuc

SEQ ID NO: 1598756 - RNA, 19 nt, Artificial Sequence
  Description of Artificial Sequence: Synthetic oligonucleotide
  Antisense strand to SEQ ID NO: 1598755
gaaucggacagaauaucag

SEQ ID NO: 1598757 - RNA, 19 nt, Artificial Sequence
  Description of Artificial Sequence: Synthetic oligonucleotide
  Sense strand starting at position 2398 of SEQ ID NO: 1560418
uaauacucgggcuggagaa

SEQ ID NO: 1598758 - RNA, 19 nt, Artificial Sequence
  Description of Artificial Sequence: Synthetic oligonucleotide
  Antisense strand to SEQ ID NO: 1598757
uucuccagcccgaguauua

SEQ ID NO: 1598759 - RNA, 19 nt, Artificial Sequence
  Description of Artificial Sequence: Synthetic oligonucleotide
  Sense strand starting at position 2668 of SEQ ID NO: 1560418
aggcaaggauucucugacu

SEQ ID NO: 1598760 - RNA, 19 nt, Artificial Sequence
  Description of Artificial Sequence: Synthetic oligonucleotide
  Antisense strand to SEQ ID NO: 1598759
agucagagaauccuugccu

SEQ ID NO: 1598761 - RNA, 19 nt, Artificial Sequence
  Description of Artificial Sequence: Synthetic oligonucleotide
  Sense strand starting at position 2708 of SEQ ID NO: 1560418
caguucuugaguugugaug

SEQ ID NO: 1598762 - RNA, 19 nt, Artificial Sequence
  Description of Artificial Sequence: Synthetic oligonucleotide
  Antisense strand to SEQ ID NO: 1598761
caucacaacucaagaacug

SEQ ID NO: 1598763 - RNA, 19 nt, Artificial Sequence
  Description of Artificial Sequence: Synthetic oligonucleotide
  Sense strand starting at position 2720 of SEQ ID NO: 1560418
ugugaugagugaguccauu

SEQ ID NO: 1598764 - RNA, 19 nt, Artificial Sequence
  Description of Artificial Sequence: Synthetic oligonucleotide
  Antisense strand to SEQ ID NO: 1598763
aauggacucacucaucaca

SEQ ID NO: 1598765 - RNA, 19 nt, Artificial Sequence
  Description of Artificial Sequence: Synthetic oligonucleotide
  Sense strand starting at position 2726 of SEQ ID NO: 1560418
gagugaguccauugaaagg

SEQ ID NO: 1598766 - RNA, 19 nt, Artificial Sequence
  Description of Artificial Sequence: Synthetic oligonucleotide
  Antisense strand to SEQ ID NO: 1598765
ccuuucaauggacucacuc

SEQ ID NO: 1598767 - RNA, 19 nt, Artificial Sequence
  Description of Artificial Sequence: Synthetic oligonucleotide
  Sense strand starting at position 2817 of SEQ ID NO: 1560418
cugacugugacaugagaug

SEQ ID NO: 1598768 - RNA, 19 nt, Artificial Sequence
  Description of Artificial Sequence: Synthetic oligonucleotide
  Antisense strand to SEQ ID NO: 1598767
caucucaugucacagucag

SEQ ID NO: 1598769 - RNA, 19 nt, Artificial Sequence
  Description of Artificial Sequence: Synthetic oligonucleotide
  Sense strand starting at position 2861 of SEQ ID NO: 1560418
gcaugacagagucaguacu

SEQ ID NO: 1598770 - RNA, 19 nt, Artificial Sequence
  Description of Artificial Sequence: Synthetic oligonucleotide
  Antisense strand to SEQ ID NO: 1598769
aguacugacucugucaugc

SEQ ID NO: 1598771 - RNA, 19 nt, Artificial Sequence
  Description of Artificial Sequence: Synthetic oligonucleotide
  Sense strand starting at position 3183 of SEQ ID NO: 1560418
uguaaugaugcagaucaua

SEQ ID NO: 1598772 - RNA, 19 nt, Artificial Sequence
  Description of Artificial Sequence: Synthetic oligonucleotide
  Antisense strand to SEQ ID NO: 1598771
uaugaucugcaucauuaca

SEQ ID NO: 1598773 - RNA, 19 nt, Artificial Sequence
  Description of Artificial Sequence: Synthetic oligonucleotide
  Sense strand starting at position 3226 of SEQ ID NO: 1560418
gagagaaaggcaugcuguu

SEQ ID NO: 1598774 - RNA, 19 nt, Artificial Sequence
  Description of Artificial Sequence: Synthetic oligonucleotide
  Antisense strand to SEQ ID NO: 1598773
aacagcaugccuuucucuc

SEQ ID NO: 1598775 - RNA, 19 nt, Artificial Sequence
  Description of Artificial Sequence: Synthetic oligonucleotide
  Sense strand starting at position 3244 of SEQ ID NO: 1560418
uauguauuaugggaaagaa

SEQ ID NO: 1598776 - RNA, 19 nt, Artificial Sequence
  Description of Artificial Sequence: Synthetic oligonucleotide
  Antisense strand to SEQ ID NO: 1598775
uucuuucccauaauacaua

SEQ ID NO: 1598777 - RNA, 19 nt, Artificial Sequence
  Description of Artificial Sequence: Synthetic oligonucleotide
  Sense strand starting at position 3363 of SEQ ID NO: 1560418
cacugaauucucugggcag

SEQ ID NO: 1598778 - RNA, 19 nt, Artificial Sequence
  Description of Artificial Sequence: Synthetic oligonucleotide
  Antisense strand to SEQ ID NO: 1598777
cugcccagagaauucagug

SEQ ID NO: 1598779 - RNA, 19 nt, Artificial Sequence
  Description of Artificial Sequence: Synthetic oligonucleotide
  Sense strand starting at position 3366 of SEQ ID NO: 1560418
ugaauucucugggcaggga

SEQ ID NO: 1598780 - RNA, 19 nt, Artificial Sequence
  Description of Artificial Sequence: Synthetic oligonucleotide
  Antisense strand to SEQ ID NO: 1598779
ucccugcccagagaauuca

SEQ ID NO: 1598781 - RNA, 19 nt, Artificial Sequence
  Description of Artificial Sequence: Synthetic oligonucleotide
  Sense strand starting at position 3541 of SEQ ID NO: 1560418
cucagaugcugcuuuauuu

SEQ ID NO: 1598782 - RNA, 19 nt, Artificial Sequence
  Description of Artificial Sequence: Synthetic oligonucleotide
  Antisense strand to SEQ ID NO: 1598781
aaauaaagcagcaucugag

SEQ ID NO: 1598783 - RNA, 19 nt, Artificial Sequence
  Description of Artificial Sequence: Synthetic oligonucleotide
  Sense strand starting at position 3627 of SEQ ID NO: 1560418
cagucuuccaagggcgaga

SEQ ID NO: 1598784 - RNA, 19 nt, Artificial Sequence
  Description of Artificial Sequence: Synthetic oligonucleotide
  Antisense strand to SEQ ID NO: 1598783
ucucgcccuuggaagacug

SEQ ID NO: 1598785 - RNA, 19 nt, Artificial Sequence
  Description of Artificial Sequence: Synthetic oligonucleotide
  Sense strand starting at position 147 of SEQ ID NO: 1560419
uuagaacccuuagguaaau

SEQ ID NO: 1598786 - RNA, 19 nt, Artificial Sequence
  Description of Artificial Sequence: Synthetic oligonucleotide
  Antisense strand to SEQ ID NO: 1598785
auuuaccuaaggguucuaa

SEQ ID NO: 1598787 - RNA, 19 nt, Artificial Sequence
  Description of Artificial Sequence: Synthetic oligonucleotide
  Sense strand starting at position 667 of SEQ ID NO: 1560419
gagauagcugcuugggaca

SEQ ID NO: 1598788 - RNA, 19 nt, Artificial Sequence
  Description of Artificial Sequence: Synthetic oligonucleotide
  Antisense strand to SEQ ID NO: 1598787
ugucccaagcagcuaucuc

SEQ ID NO: 1598789 - RNA, 19 nt, Artificial Sequence
  Description of Artificial Sequence: Synthetic oligonucleotide
  Sense strand starting at position 985 of SEQ ID NO: 1560419
gagugugcccuguggguua

SEQ ID NO: 1598790 - RNA, 19 nt, Artificial Sequence
  Description of Artificial Sequence: Synthetic oligonucleotide
  Antisense strand to SEQ ID NO: 1598789
uaacccacagggcacacuc

SEQ ID NO: 1598791 - RNA, 19 nt, Artificial Sequence
  Description of Artificial Sequence: Synthetic oligonucleotide
  Sense strand starting at position 1084 of SEQ ID NO: 1560419
agggacuggucccuugaga

SEQ ID NO: 1598792 - RNA, 19 nt, Artificial Sequence
  Description of Artificial Sequence: Synthetic oligonucleotide
  Antisense strand to SEQ ID NO: 1598791
ucucaagggaccagucccu

SEQ ID NO: 1598793 - RNA, 19 nt, Artificial Sequence
  Description of Artificial Sequence: Synthetic oligonucleotide
  Sense strand starting at position 2434 of SEQ ID NO: 1560419
cgggaagcgcccugacauu

SEQ ID NO: 1598794 - RNA, 19 nt, Artificial Sequence
  Description of Artificial Sequence: Synthetic oligonucleotide
  Antisense strand to SEQ ID NO: 1598793
aaugucagggcgcuucccg

SEQ ID NO: 1598795 - RNA, 19 nt, Artificial Sequence
  Description of Artificial Sequence: Synthetic oligonucleotide
  Sense strand starting at position 2766 of SEQ ID NO: 1560419
gaaacuccgucuccaaaga

SEQ ID NO: 1598796 - RNA, 19 nt, Artificial Sequence
  Description of Artificial Sequence: Synthetic oligonucleotide
  Antisense strand to SEQ ID NO: 1598795
ucuuuggagacggaguuuc

SEQ ID NO: 1598797 - RNA, 19 nt, Artificial Sequence
  Description of Artificial Sequence: Synthetic oligonucleotide
  Sense strand starting at position 3117 of SEQ ID NO: 1560419
uacuguguaucaggcauua

SEQ ID NO: 1598798 - RNA, 19 nt, Artificial Sequence
  Description of Artificial Sequence: Synthetic oligonucleotide
  Antisense strand to SEQ ID NO: 1598797
uaaugccugauacacagua

SEQ ID NO: 1598799 - RNA, 19 nt, Artificial Sequence
  Description of Artificial Sequence: Synthetic oligonucleotide
  Sense strand starting at position 3128 of SEQ ID NO: 1560419
aggcauuaaugggacacau

SEQ ID NO: 1598800 - RNA, 19 nt, Artificial Sequence
  Description of Artificial Sequence: Synthetic oligonucleotide
  Antisense strand to SEQ ID NO: 1598799
augugucccauuaaugccu

SEQ ID NO: 1598801 - RNA, 19 nt, Artificial Sequence
  Description of Artificial Sequence: Synthetic oligonucleotide
  Sense strand starting at position 3139 of SEQ ID NO: 1560419
ggacacauucuauaugcca

SEQ ID NO: 1598802 - RNA, 19 nt, Artificial Sequence
  Description of Artificial Sequence: Synthetic oligonucleotide
  Antisense strand to SEQ ID NO: 1598801
uggcauauagaaugugucc

SEQ ID NO: 1598803 - RNA, 19 nt, Artificial Sequence
  Description of Artificial Sequence: Synthetic oligonucleotide
  Sense strand starting at position 3188 of SEQ ID NO: 1560419
cuguccaucaggugucaau

SEQ ID NO: 1598804 - RNA, 19 nt, Artificial Sequence
  Description of Artificial Sequence: Synthetic oligonucleotide
  Antisense strand to SEQ ID NO: 1598803
auugacaccugauggacag

SEQ ID NO: 1598805 - RNA, 19 nt, Artificial Sequence
  Description of Artificial Sequence: Synthetic oligonucleotide
  Sense strand starting at position 3197 of SEQ ID NO: 1560419
aggugucaaucaggccuua

SEQ ID NO: 1598806 - RNA, 19 nt, Artificial Sequence
  Description of Artificial Sequence: Synthetic oligonucleotide
  Antisense strand to SEQ ID NO: 1598805
uaaggccugauugacaccu

SEQ ID NO: 1598807 - RNA, 19 nt, Artificial Sequence
  Description of Artificial Sequence: Synthetic oligonucleotide
  Sense strand starting at position 3284 of SEQ ID NO: 1560419
gcuguaagcccguuaagcu

SEQ ID NO: 1598808 - RNA, 19 nt, Artificial Sequence
  Description of Artificial Sequence: Synthetic oligonucleotide
  Antisense strand to SEQ ID NO: 1598807
agcuuaacgggcuuacagc

SEQ ID NO: 1598809 - RNA, 19 nt, Artificial Sequence
  Description of Artificial Sequence: Synthetic oligonucleotide
  Sense strand starting at position 3285 of SEQ ID NO: 1560419
cuguaagcccguuaagcua

SEQ ID NO: 1598810 - RNA, 19 nt, Artificial Sequence
  Description of Artificial Sequence: Synthetic oligonucleotide
  Antisense strand to SEQ ID NO: 1598809
uagcuuaacgggcuuacag

SEQ ID NO: 1598811 - RNA, 19 nt, Artificial Sequence
  Description of Artificial Sequence: Synthetic oligonucleotide
  Sense strand starting at position 3384 of SEQ ID NO: 1560419
gggcgugaucuagguucau

SEQ ID NO: 1598812 - RNA, 19 nt, Artificial Sequence
  Description of Artificial Sequence: Synthetic oligonucleotide
  Antisense strand to SEQ ID NO: 1598811
augaaccuagaucacgccc

SEQ ID NO: 1598813 - RNA, 19 nt, Artificial Sequence
  Description of Artificial Sequence: Synthetic oligonucleotide
  Sense strand starting at position 3632 of SEQ ID NO: 1560419
auccuuacuuugcagauga

SEQ ID NO: 1598814 - RNA, 19 nt, Artificial Sequence
  Description of Artificial Sequence: Synthetic oligonucleotide
  Antisense strand to SEQ ID NO: 1598813
ucaucugcaaaguaaggau

SEQ ID NO: 1598815 - RNA, 19 nt, Artificial Sequence
  Description of Artificial Sequence: Synthetic oligonucleotide
  Sense strand starting at position 3634 of SEQ ID NO: 1560419
ccuuacuuugcagaugaaa

SEQ ID NO: 1598816 - RNA, 19 nt, Artificial Sequence
  Description of Artificial Sequence: Synthetic oligonucleotide
  Antisense strand to SEQ ID NO: 1598815
uuucaucugcaaaguaagg

SEQ ID NO: 1598817 - RNA, 19 nt, Artificial Sequence
  Description of Artificial Sequence: Synthetic oligonucleotide
  Sense strand starting at position 3822 of SEQ ID NO: 1560419
gguaccuucucuugagcca

SEQ ID NO: 1598818 - RNA, 19 nt, Artificial Sequence
  Description of Artificial Sequence: Synthetic oligonucleotide
  Antisense strand to SEQ ID NO: 1598817
uggcucaagagaagguacc

SEQ ID NO: 1598819 - RNA, 19 nt, Artificial Sequence
  Description of Artificial Sequence: Synthetic oligonucleotide
  Sense strand starting at position 757 of SEQ ID NO: 1560420
agauaauucuuguugccag

SEQ ID NO: 1598820 - RNA, 19 nt, Artificial Sequence
  Description of Artificial Sequence: Synthetic oligonucleotide
  Antisense strand to SEQ ID NO: 1598819
cuggcaacaagaauuaucu

SEQ ID NO: 1598821 - RNA, 19 nt, Artificial Sequence
  Description of Artificial Sequence: Synthetic oligonucleotide
  Sense strand starting at position 758 of SEQ ID NO: 1560420
gauaauucuuguugccaga

SEQ ID NO: 1598822 - RNA, 19 nt, Artificial Sequence
  Description of Artificial Sequence: Synthetic oligonucleotide
  Antisense strand to SEQ ID NO: 1598821
ucuggcaacaagaauuauc

SEQ ID NO: 1598823 - RNA, 19 nt, Artificial Sequence
  Description of Artificial Sequence: Synthetic oligonucleotide
  Sense strand starting at position 782 of SEQ ID NO: 1560420
uuuaucugcuuaugaguuu

SEQ ID NO: 1598824 - RNA, 19 nt, Artificial Sequence
  Description of Artificial Sequence: Synthetic oligonucleotide
  Antisense strand to SEQ ID NO: 1598823
aaacucauaagcagauaaa

SEQ ID NO: 1598825 - RNA, 19 nt, Artificial Sequence
  Description of Artificial Sequence: Synthetic oligonucleotide
  Sense strand starting at position 783 of SEQ ID NO: 1560420
uuaucugcuuaugaguuua

SEQ ID NO: 1598826 - RNA, 19 nt, Artificial Sequence
  Description of Artificial Sequence: Synthetic oligonucleotide
  Antisense strand to SEQ ID NO: 1598825
uaaacucauaagcagauaa

SEQ ID NO: 1598827 - RNA, 19 nt, Artificial Sequence
  Description of Artificial Sequence: Synthetic oligonucleotide
  Sense strand starting at position 785 of SEQ ID NO: 1560420
aucugcuuaugaguuuaca

SEQ ID NO: 1598828 - RNA, 19 nt, Artificial Sequence
  Description of Artificial Sequence: Synthetic oligonucleotide
  Antisense strand to SEQ ID NO: 1598827
uguaaacucauaagcagau

SEQ ID NO: 1598829 - RNA, 19 nt, Artificial Sequence
  Description of Artificial Sequence: Synthetic oligonucleotide
  Sense strand starting at position 788 of SEQ ID NO: 1560420
ugcuuaugaguuuacagac

SEQ ID NO: 1598830 - RNA, 19 nt, Artificial Sequence
  Description of Artificial Sequence: Synthetic oligonucleotide
  Antisense strand to SEQ ID NO: 1598829
gucuguaaacucauaagca

SEQ ID NO: 1598831 - RNA, 19 nt, Artificial Sequence
  Description of Artificial Sequence: Synthetic oligonucleotide
  Sense strand starting at position 1018 of SEQ ID NO: 1560420
gagggagcguccuggugaa

SEQ ID NO: 1598832 - RNA, 19 nt, Artificial Sequence
  Description of Artificial Sequence: Synthetic oligonucleotide
  Antisense strand to SEQ ID NO: 1598831
uucaccaggacgcucccuc

SEQ ID NO: 1598833 - RNA, 19 nt, Artificial Sequence
  Description of Artificial Sequence: Synthetic oligonucleotide
  Sense strand starting at position 1168 of SEQ ID NO: 1560420
agccacgucugcuauugua

SEQ ID NO: 1598834 - RNA, 19 nt, Artificial Sequence
  Description of Artificial Sequence: Synthetic oligonucleotide
  Antisense strand to SEQ ID NO: 1598833
uacaauagcagacguggcu

SEQ ID NO: 1598835 - RNA, 19 nt, Artificial Sequence
  Description of Artificial Sequence: Synthetic oligonucleotide
  Sense strand starting at position 1171 of SEQ ID NO: 1560420
cacgucugcuauuguauau

SEQ ID NO: 1598836 - RNA, 19 nt, Artificial Sequence
  Description of Artificial Sequence: Synthetic oligonucleotide
  Antisense strand to SEQ ID NO: 1598835
auauacaauagcagacgug

SEQ ID NO: 1598837 - RNA, 19 nt, Artificial Sequence
  Description of Artificial Sequence: Synthetic oligonucleotide
  Sense strand starting at position 1328 of SEQ ID NO: 1560420
ccacgaugccaaugucuga

SEQ ID NO: 1598838 - RNA, 19 nt, Artificial Sequence
  Description of Artificial Sequence: Synthetic oligonucleotide
  Antisense strand to SEQ ID NO: 1598837
ucagacauuggcaucgugg

SEQ ID NO: 1598839 - RNA, 19 nt, Artificial Sequence
  Description of Artificial Sequence: Synthetic oligonucleotide
  Sense strand starting at position 1332 of SEQ ID NO: 1560420
gaugccaaugucugaccua

SEQ ID NO: 1598840 - RNA, 19 nt, Artificial Sequence
  Description of Artificial Sequence: Synthetic oligonucleotide
  Antisense strand to SEQ ID NO: 1598839
uaggucagacauuggcauc

SEQ ID NO: 1598841 - RNA, 19 nt, Artificial Sequence
  Description of Artificial Sequence: Synthetic oligonucleotide
  Sense strand starting at position 2009 of SEQ ID NO: 1560420
ggcggauucuccucaggcu

SEQ ID NO: 1598842 - RNA, 19 nt, Artificial Sequence
  Description of Artificial Sequence: Synthetic oligonucleotide
  Antisense strand to SEQ ID NO: 1598841
agccugaggagaauccgcc

SEQ ID NO: 1598843 - RNA, 19 nt, Artificial Sequence
  Description of Artificial Sequence: Synthetic oligonucleotide
  Sense strand starting at position 2010 of SEQ ID NO: 1560420
gcggauucuccucaggcuu

SEQ ID NO: 1598844 - RNA, 19 nt, Artificial Sequence
  Description of Artificial Sequence: Synthetic oligonucleotide
  Antisense strand to SEQ ID NO: 1598843
aagccugaggagaauccgc

SEQ ID NO: 1598845 - RNA, 19 nt, Artificial Sequence
  Description of Artificial Sequence: Synthetic oligonucleotide
  Sense strand starting at position 2076 of SEQ ID NO: 1560420
ccgugcuacugcugauaca

SEQ ID NO: 1598846 - RNA, 19 nt, Artificial Sequence
  Description of Artificial Sequence: Synthetic oligonucleotide
  Antisense strand to SEQ ID NO: 1598845
uguaucagcaguagcacgg

SEQ ID NO: 1598847 - RNA, 19 nt, Artificial Sequence
  Description of Artificial Sequence: Synthetic oligonucleotide
  Sense strand starting at position 2077 of SEQ ID NO: 1560420
cgugcuacugcugauacau

SEQ ID NO: 1598848 - RNA, 19 nt, Artificial Sequence
  Description of Artificial Sequence: Synthetic oligonucleotide
  Antisense strand to SEQ ID NO: 1598847
auguaucagcaguagcacg

SEQ ID NO: 1598849 - RNA, 19 nt, Artificial Sequence
  Description of Artificial Sequence: Synthetic oligonucleotide
  Sense strand starting at position 2079 of SEQ ID NO: 1560420
ugcuacugcugauacauua

SEQ ID NO: 1598850 - RNA, 19 nt, Artificial Sequence
  Description of Artificial Sequence: Synthetic oligonucleotide
  Antisense strand to SEQ ID NO: 1598849
uaauguaucagcaguagca

SEQ ID NO: 1598851 - RNA, 19 nt, Artificial Sequence
  Description of Artificial Sequence: Synthetic oligonucleotide
  Sense strand starting at position 2251 of SEQ ID NO: 1560420
ggaucuugacucugcaaca

SEQ ID NO: 1598852 - RNA, 19 nt, Artificial Sequence
  Description of Artificial Sequence: Synthetic oligonucleotide
  Antisense strand to SEQ ID NO: 1598851
uguugcagagucaagaucc

SEQ ID NO: 1598853 - RNA, 19 nt, Artificial Sequence
  Description of Artificial Sequence: Synthetic oligonucleotide
  Sense strand starting at position 2476 of SEQ ID NO: 1560420
acgcucggcccuucugaua

SEQ ID NO: 1598854 - RNA, 19 nt, Artificial Sequence
  Description of Artificial Sequence: Synthetic oligonucleotide
  Antisense strand to SEQ ID NO: 1598853
uaucagaagggccgagcgu

SEQ ID NO: 1598855 - RNA, 19 nt, Artificial Sequence
  Description of Artificial Sequence: Synthetic oligonucleotide
  Sense strand starting at position 2479 of SEQ ID NO: 1560420
cucggcccuucugauauau

SEQ ID NO: 1598856 - RNA, 19 nt, Artificial Sequence
  Description of Artificial Sequence: Synthetic oligonucleotide
  Antisense strand to SEQ ID NO: 1598855
auauaucagaagggccgag

SEQ ID NO: 1598857 - RNA, 19 nt, Artificial Sequence
  Description of Artificial Sequence: Synthetic oligonucleotide
  Sense strand starting at position 2481 of SEQ ID NO: 1560420
cggcccuucugauauauuu

SEQ ID NO: 1598858 - RNA, 19 nt, Artificial Sequence
  Description of Artificial Sequence: Synthetic oligonucleotide
  Antisense strand to SEQ ID NO: 1598857
aaauauaucagaagggccg

SEQ ID NO: 1598859 - RNA, 19 nt, Artificial Sequence
  Description of Artificial Sequence: Synthetic oligonucleotide
  Sense strand starting at position 2517 of SEQ ID NO: 1560420
ccaggugucauggacuguu

SEQ ID NO: 1598860 - RNA, 19 nt, Artificial Sequence
  Description of Artificial Sequence: Synthetic oligonucleotide
  Antisense strand to SEQ ID NO: 1598859
aacaguccaugacaccugg

SEQ ID NO: 1598861 - RNA, 19 nt, Artificial Sequence
  Description of Artificial Sequence: Synthetic oligonucleotide
  Sense strand starting at position 2529 of SEQ ID NO: 1560420
gacuguuuccagcgacucu

SEQ ID NO: 1598862 - RNA, 19 nt, Artificial Sequence
  Description of Artificial Sequence: Synthetic oligonucleotide
  Antisense strand to SEQ ID NO: 1598861
agagucgcuggaaacaguc

SEQ ID NO: 1598863 - RNA, 19 nt, Artificial Sequence
  Description of Artificial Sequence: Synthetic oligonucleotide
  Sense strand starting at position 2727 of SEQ ID NO: 1560420
aucccuguuugacugauga

SEQ ID NO: 1598864 - RNA, 19 nt, Artificial Sequence
  Description of Artificial Sequence: Synthetic oligonucleotide
  Antisense strand to SEQ ID NO: 1598863
ucaucagucaaacagggau

SEQ ID NO: 1598865 - RNA, 19 nt, Artificial Sequence
  Description of Artificial Sequence: Synthetic oligonucleotide
  Sense strand starting at position 2731 of SEQ ID NO: 1560420
cuguuugacugaugaggag

SEQ ID NO: 1598866 - RNA, 19 nt, Artificial Sequence
  Description of Artificial Sequence: Synthetic oligonucleotide
  Antisense strand to SEQ ID NO: 1598865
cuccucaucagucaaacag

SEQ ID NO: 1598867 - RNA, 19 nt, Artificial Sequence
  Description of Artificial Sequence: Synthetic oligonucleotide
  Sense strand starting at position 3967 of SEQ ID NO: 1560420
aggucauugcucuaaaugg

SEQ ID NO: 1598868 - RNA, 19 nt, Artificial Sequence
  Description of Artificial Sequence: Synthetic oligonucleotide
  Antisense strand to SEQ ID NO: 1598867
ccauuuagagcaaugaccu

SEQ ID NO: 1598869 - RNA, 19 nt, Artificial Sequence
  Description of Artificial Sequence: Synthetic oligonucleotide
  Sense strand starting at position 107 of SEQ ID NO: 1560421
gggaacaaguuugugaacu

SEQ ID NO: 1598870 - RNA, 19 nt, Artificial Sequence
  Description of Artificial Sequence: Synthetic oligonucleotide
  Antisense strand to SEQ ID NO: 1598869
aguucacaaacuuguuccc

SEQ ID NO: 1598871 - RNA, 19 nt, Artificial Sequence
  Description of Artificial Sequence: Synthetic oligonucleotide
  Sense strand starting at position 455 of SEQ ID NO: 1560421
ugcccaguucuagagcaaa

SEQ ID NO: 1598872 - RNA, 19 nt, Artificial Sequence
  Description of Artificial Sequence: Synthetic oligonucleotide
  Antisense strand to SEQ ID NO: 1598871
uuugcucuagaacugggca

SEQ ID NO: 1598873 - RNA, 19 nt, Artificial Sequence
  Description of Artificial Sequence: Synthetic oligonucleotide
  Sense strand starting at position 458 of SEQ ID NO: 1560421
ccaguucuagagcaaacaa

SEQ ID NO: 1598874 - RNA, 19 nt, Artificial Sequence
  Description of Artificial Sequence: Synthetic oligonucleotide
  Antisense strand to SEQ ID NO: 1598873
uuguuugcucuagaacugg

SEQ ID NO: 1598875 - RNA, 19 nt, Artificial Sequence
  Description of Artificial Sequence: Synthetic oligonucleotide
  Sense strand starting at position 503 of SEQ ID NO: 1560421
gugaguccucuccaaauuc

SEQ ID NO: 1598876 - RNA, 19 nt, Artificial Sequence
  Description of Artificial Sequence: Synthetic oligonucleotide
  Antisense strand to SEQ ID NO: 1598875
gaauuuggagaggacucac

SEQ ID NO: 1598877 - RNA, 19 nt, Artificial Sequence
  Description of Artificial Sequence: Synthetic oligonucleotide
  Sense strand starting at position 567 of SEQ ID NO: 1560421
ccuccugauuagucaaugu

SEQ ID NO: 1598878 - RNA, 19 nt, Artificial Sequence
  Description of Artificial Sequence: Synthetic oligonucleotide
  Antisense strand to SEQ ID NO: 1598877
acauugacuaaucaggagg

SEQ ID NO: 1598879 - RNA, 19 nt, Artificial Sequence
  Description of Artificial Sequence: Synthetic oligonucleotide
  Sense strand starting at position 571 of SEQ ID NO: 1560421
cugauuagucaaugucuag

SEQ ID NO: 1598880 - RNA, 19 nt, Artificial Sequence
  Description of Artificial Sequence: Synthetic oligonucleotide
  Antisense strand to SEQ ID NO: 1598879
cuagacauugacuaaucag

SEQ ID NO: 1598881 - RNA, 19 nt, Artificial Sequence
  Description of Artificial Sequence: Synthetic oligonucleotide
  Sense strand starting at position 574 of SEQ ID NO: 1560421
auuagucaaugucuagcaa

SEQ ID NO: 1598882 - RNA, 19 nt, Artificial Sequence
  Description of Artificial Sequence: Synthetic oligonucleotide
  Antisense strand to SEQ ID NO: 1598881
uugcuagacauugacuaau

SEQ ID NO: 1598883 - RNA, 19 nt, Artificial Sequence
  Description of Artificial Sequence: Synthetic oligonucleotide
  Sense strand starting at position 575 of SEQ ID NO: 1560421
uuagucaaugucuagcaaa

SEQ ID NO: 1598884 - RNA, 19 nt, Artificial Sequence
  Description of Artificial Sequence: Synthetic oligonucleotide
  Antisense strand to SEQ ID NO: 1598883
uuugcuagacauugacuaa

SEQ ID NO: 1598885 - RNA, 19 nt, Artificial Sequence
  Description of Artificial Sequence: Synthetic oligonucleotide
  Sense strand starting at position 2158 of SEQ ID NO: 1560421
gcggcuuuccagggugacu

SEQ ID NO: 1598886 - RNA, 19 nt, Artificial Sequence
  Description of Artificial Sequence: Synthetic oligonucleotide
  Antisense strand to SEQ ID NO: 1598885
agucacccuggaaagccgc

SEQ ID NO: 1598887 - RNA, 19 nt, Artificial Sequence
  Description of Artificial Sequence: Synthetic oligonucleotide
  Sense strand starting at position 2169 of SEQ ID NO: 1560421
gggugacuucgugacguca

SEQ ID NO: 1598888 - RNA, 19 nt, Artificial Sequence
  Description of Artificial Sequence: Synthetic oligonucleotide
  Antisense strand to SEQ ID NO: 1598887
ugacgucacgaagucaccc

SEQ ID NO: 1598889 - RNA, 19 nt, Artificial Sequence
  Description of Artificial Sequence: Synthetic oligonucleotide
  Sense strand starting at position 2186 of SEQ ID NO: 1560421
caggaaggcgcgaguaguu

SEQ ID NO: 1598890 - RNA, 19 nt, Artificial Sequence
  Description of Artificial Sequence: Synthetic oligonucleotide
  Antisense strand to SEQ ID NO: 1598889
aacuacucgcgccuuccug

SEQ ID NO: 1598891 - RNA, 19 nt, Artificial Sequence
  Description of Artificial Sequence: Synthetic oligonucleotide
  Sense strand starting at position 2198 of SEQ ID NO: 1560421
aguaguuucgcgaguucga

SEQ ID NO: 1598892 - RNA, 19 nt, Artificial Sequence
  Description of Artificial Sequence: Synthetic oligonucleotide
  Antisense strand to SEQ ID NO: 1598891
ucgaacucgcgaaacuacu

SEQ ID NO: 1598893 - RNA, 19 nt, Artificial Sequence
  Description of Artificial Sequence: Synthetic oligonucleotide
  Sense strand starting at position 2199 of SEQ ID NO: 1560421
guaguuucgcgaguucgaa

SEQ ID NO: 1598894 - RNA, 19 nt, Artificial Sequence
  Description of Artificial Sequence: Synthetic oligonucleotide
  Antisense strand to SEQ ID NO: 1598893
uucgaacucgcgaaacuac

SEQ ID NO: 1598895 - RNA, 19 nt, Artificial Sequence
  Description of Artificial Sequence: Synthetic oligonucleotide
  Sense strand starting at position 2200 of SEQ ID NO: 1560421
uaguuucgcgaguucgaau

SEQ ID NO: 1598896 - RNA, 19 nt, Artificial Sequence
  Description of Artificial Sequence: Synthetic oligonucleotide
  Antisense strand to SEQ ID NO: 1598895
auucgaacucgcgaaacua

SEQ ID NO: 1598897 - RNA, 19 nt, Artificial Sequence
  Description of Artificial Sequence: Synthetic oligonucleotide
  Sense strand starting at position 2237 of SEQ ID NO: 1560421
guucgaauccugcaugcca

SEQ ID NO: 1598898 - RNA, 19 nt, Artificial Sequence
  Description of Artificial Sequence: Synthetic oligonucleotide
  Antisense strand to SEQ ID NO: 1598897
uggcaugcaggauucgaac

SEQ ID NO: 1598899 - RNA, 19 nt, Artificial Sequence
  Description of Artificial Sequence: Synthetic oligonucleotide
  Sense strand starting at position 2278 of SEQ ID NO: 1560421
ggaagaaugucagugauca

SEQ ID NO: 1598900 - RNA, 19 nt, Artificial Sequence
  Description of Artificial Sequence: Synthetic oligonucleotide
  Antisense strand to SEQ ID NO: 1598899
ugaucacugacauucuucc

SEQ ID NO: 1598901 - RNA, 19 nt, Artificial Sequence
  Description of Artificial Sequence: Synthetic oligonucleotide
  Sense strand starting at position 2279 of SEQ ID NO: 1560421
gaagaaugucagugaucau

SEQ ID NO: 1598902 - RNA, 19 nt, Artificial Sequence
  Description of Artificial Sequence: Synthetic oligonucleotide
  Antisense strand to SEQ ID NO: 1598901
augaucacugacauucuuc

SEQ ID NO: 1598903 - RNA, 19 nt, Artificial Sequence
  Description of Artificial Sequence: Synthetic oligonucleotide
  Sense strand starting at position 2282 of SEQ ID NO: 1560421
gaaugucagugaucauaac

SEQ ID NO: 1598904 - RNA, 19 nt, Artificial Sequence
  Description of Artificial Sequence: Synthetic oligonucleotide
  Antisense strand to SEQ ID NO: 1598903
guuaugaucacugacauuc

SEQ ID NO: 1598905 - RNA, 19 nt, Artificial Sequence
  Description of Artificial Sequence: Synthetic oligonucleotide
  Sense strand starting at position 2302 of SEQ ID NO: 1560421
gcugcaccgcuuucuugaa

SEQ ID NO: 1598906 - RNA, 19 nt, Artificial Sequence
  Description of Artificial Sequence: Synthetic oligonucleotide
  Antisense strand to SEQ ID NO: 1598905
uucaagaaagcggugcagc

SEQ ID NO: 1598907 - RNA, 19 nt, Artificial Sequence
  Description of Artificial Sequence: Synthetic oligonucleotide
  Sense strand starting at position 2309 of SEQ ID NO: 1560421
cgcuuucuugaagacuuua

SEQ ID NO: 1598908 - RNA, 19 nt, Artificial Sequence
  Description of Artificial Sequence: Synthetic oligonucleotide
  Antisense strand to SEQ ID NO: 1598907
uaaagucuucaagaaagcg

SEQ ID NO: 1598909 - RNA, 19 nt, Artificial Sequence
  Description of Artificial Sequence: Synthetic oligonucleotide
  Sense strand starting at position 2360 of SEQ ID NO: 1560421
gccagaaggcgagauuacu

SEQ ID NO: 1598910 - RNA, 19 nt, Artificial Sequence
  Description of Artificial Sequence: Synthetic oligonucleotide
  Antisense strand to SEQ ID NO: 1598909
aguaaucucgccuucuggc

SEQ ID NO: 1598911 - RNA, 19 nt, Artificial Sequence
  Description of Artificial Sequence: Synthetic oligonucleotide
  Sense strand starting at position 2369 of SEQ ID NO: 1560421
cgagauuacuauccacauu

SEQ ID NO: 1598912 - RNA, 19 nt, Artificial Sequence
  Description of Artificial Sequence: Synthetic oligonucleotide
  Antisense strand to SEQ ID NO: 1598911
aauguggauaguaaucucg

SEQ ID NO: 1598913 - RNA, 19 nt, Artificial Sequence
  Description of Artificial Sequence: Synthetic oligonucleotide
  Sense strand starting at position 2405 of SEQ ID NO: 1560421
gggucucagaaaggugaaa

SEQ ID NO: 1598914 - RNA, 19 nt, Artificial Sequence
  Description of Artificial Sequence: Synthetic oligonucleotide
  Antisense strand to SEQ ID NO: 1598913
uuucaccuuucugagaccc

SEQ ID NO: 1598915 - RNA, 19 nt, Artificial Sequence
  Description of Artificial Sequence: Synthetic oligonucleotide
  Sense strand starting at position 2983 of SEQ ID NO: 1560421
ggauuacaggccuggaauc

SEQ ID NO: 1598916 - RNA, 19 nt, Artificial Sequence
  Description of Artificial Sequence: Synthetic oligonucleotide
  Antisense strand to SEQ ID NO: 1598915
gauuccaggccuguaaucc

SEQ ID NO: 1598917 - RNA, 19 nt, Artificial Sequence
  Description of Artificial Sequence: Synthetic oligonucleotide
  Sense strand starting at position 3012 of SEQ ID NO: 1560421
acaagcucccuugggaaua

SEQ ID NO: 1598918 - RNA, 19 nt, Artificial Sequence
  Description of Artificial Sequence: Synthetic oligonucleotide
  Antisense strand to SEQ ID NO: 1598917
uauucccaagggagcuugu

SEQ ID NO: 1598919 - RNA, 19 nt, Artificial Sequence
  Description of Artificial Sequence: Synthetic oligonucleotide
  Sense strand starting at position 3150 of SEQ ID NO: 1560421
ccaccugagcccugggauu

SEQ ID NO: 1598920 - RNA, 19 nt, Artificial Sequence
  Description of Artificial Sequence: Synthetic oligonucleotide
  Antisense strand to SEQ ID NO: 1598919
aaucccagggcucaggugg

SEQ ID NO: 1598921 - RNA, 19 nt, Artificial Sequence
  Description of Artificial Sequence: Synthetic oligonucleotide
  Sense strand starting at position 3209 of SEQ ID NO: 1560421
uccugucaucccugcaaga

SEQ ID NO: 1598922 - RNA, 19 nt, Artificial Sequence
  Description of Artificial Sequence: Synthetic oligonucleotide
  Antisense strand to SEQ ID NO: 1598921
ucuugcagggaugacagga

SEQ ID NO: 1598923 - RNA, 19 nt, Artificial Sequence
  Description of Artificial Sequence: Synthetic oligonucleotide
  Sense strand starting at position 3211 of SEQ ID NO: 1560421
cugucaucccugcaagaac

SEQ ID NO: 1598924 - RNA, 19 nt, Artificial Sequence
  Description of Artificial Sequence: Synthetic oligonucleotide
  Antisense strand to SEQ ID NO: 1598923
guucuugcagggaugacag

SEQ ID NO: 1598925 - RNA, 19 nt, Artificial Sequence
  Description of Artificial Sequence: Synthetic oligonucleotide
  Sense strand starting at position 3678 of SEQ ID NO: 1560421
ugcaauaugauucggccau

SEQ ID NO: 1598926 - RNA, 19 nt, Artificial Sequence
  Description of Artificial Sequence: Synthetic oligonucleotide
  Antisense strand to SEQ ID NO: 1598925
auggccgaaucauauugca

SEQ ID NO: 1598927 - RNA, 19 nt, Artificial Sequence
  Description of Artificial Sequence: Synthetic oligonucleotide
  Sense strand starting at position 3682 of SEQ ID NO: 1560421
auaugauucggccauaaca

SEQ ID NO: 1598928 - RNA, 19 nt, Artificial Sequence
  Description of Artificial Sequence: Synthetic oligonucleotide
  Antisense strand to SEQ ID NO: 1598927
uguuauggccgaaucauau

SEQ ID NO: 1598929 - RNA, 19 nt, Artificial Sequence
  Description of Artificial Sequence: Synthetic oligonucleotide
  Sense strand starting at position 3684 of SEQ ID NO: 1560421
augauucggccauaacaaa

SEQ ID NO: 1598930 - RNA, 19 nt, Artificial Sequence
  Description of Artificial Sequence: Synthetic oligonucleotide
  Antisense strand to SEQ ID NO: 1598929
uuuguuauggccgaaucau

SEQ ID NO: 1598931 - RNA, 19 nt, Artificial Sequence
  Description of Artificial Sequence: Synthetic oligonucleotide
  Sense strand starting at position 3711 of SEQ ID NO: 1560421
cccugucauuugcagcaaa

SEQ ID NO: 1598932 - RNA, 19 nt, Artificial Sequence
  Description of Artificial Sequence: Synthetic oligonucleotide
  Antisense strand to SEQ ID NO: 1598931
uuugcugcaaaugacaggg

SEQ ID NO: 1598933 - RNA, 19 nt, Artificial Sequence
  Description of Artificial Sequence: Synthetic oligonucleotide
  Sense strand starting at position 3800 of SEQ ID NO: 1560421
gcauguugucacugauacg

SEQ ID NO: 1598934 - RNA, 19 nt, Artificial Sequence
  Description of Artificial Sequence: Synthetic oligonucleotide
  Antisense strand to SEQ ID NO: 1598933
cguaucagugacaacaugc

SEQ ID NO: 1598935 - RNA, 19 nt, Artificial Sequence
  Description of Artificial Sequence: Synthetic oligonucleotide
  Sense strand starting at position 3807 of SEQ ID NO: 1560421
gucacugauacgugggaac

SEQ ID NO: 1598936 - RNA, 19 nt, Artificial Sequence
  Description of Artificial Sequence: Synthetic oligonucleotide
  Antisense strand to SEQ ID NO: 1598935
guucccacguaucagugac

SEQ ID NO: 1598937 - RNA, 19 nt, Artificial Sequence
  Description of Artificial Sequence: Synthetic oligonucleotide
  Sense strand starting at position 3809 of SEQ ID NO: 1560421
cacugauacgugggaacca

SEQ ID NO: 1598938 - RNA, 19 nt, Artificial Sequence
  Description of Artificial Sequence: Synthetic oligonucleotide
  Antisense strand to SEQ ID NO: 1598937
ugguucccacguaucagug

SEQ ID NO: 1598939 - RNA, 19 nt, Artificial Sequence
  Description of Artificial Sequence: Synthetic oligonucleotide
  Sense strand starting at position 3828 of SEQ ID NO: 1560421
gagaguugaucucauggag

SEQ ID NO: 1598940 - RNA, 19 nt, Artificial Sequence
  Description of Artificial Sequence: Synthetic oligonucleotide
  Antisense strand to SEQ ID NO: 1598939
cuccaugagaucaacucuc

SEQ ID NO: 1598941 - RNA, 19 nt, Artificial Sequence
  Description of Artificial Sequence: Synthetic oligonucleotide
  Sense strand starting at position 3876 of SEQ ID NO: 1560421
cuggaaaguuguguagguu

SEQ ID NO: 1598942 - RNA, 19 nt, Artificial Sequence
  Description of Artificial Sequence: Synthetic oligonucleotide
  Antisense strand to SEQ ID NO: 1598941
aaccuacacaacuuuccag

SEQ ID NO: 1598943 - RNA, 19 nt, Artificial Sequence
  Description of Artificial Sequence: Synthetic oligonucleotide
  Sense strand starting at position 3880 of SEQ ID NO: 1560421
aaaguuguguagguugagu

SEQ ID NO: 1598944 - RNA, 19 nt, Artificial Sequence
  Description of Artificial Sequence: Synthetic oligonucleotide
  Antisense strand to SEQ ID NO: 1598943
acucaaccuacacaacuuu

SEQ ID NO: 1598945 - RNA, 19 nt, Artificial Sequence
  Description of Artificial Sequence: Synthetic oligonucleotide
  Sense strand starting at position 3918 of SEQ ID NO: 1560421
gugaguuaugaguacaaac

SEQ ID NO: 1598946 - RNA, 19 nt, Artificial Sequence
  Description of Artificial Sequence: Synthetic oligonucleotide
  Antisense strand to SEQ ID NO: 1598945
guuuguacucauaacucac

SEQ ID NO: 1598947 - RNA, 19 nt, Artificial Sequence
  Description of Artificial Sequence: Synthetic oligonucleotide
  Sense strand starting at position 3975 of SEQ ID NO: 1560421
agcagaauaggauguauuc

SEQ ID NO: 1598948 - RNA, 19 nt, Artificial Sequence
  Description of Artificial Sequence: Synthetic oligonucleotide
  Antisense strand to SEQ ID NO: 1598947
gaauacauccuauucugcu

SEQ ID NO: 1598949 - RNA, 19 nt, Artificial Sequence
  Description of Artificial Sequence: Synthetic oligonucleotide
  Sense strand starting at position 336 of SEQ ID NO: 1560422
auagauagaucugcaagcu

SEQ ID NO: 1598950 - RNA, 19 nt, Artificial Sequence
  Description of Artificial Sequence: Synthetic oligonucleotide
  Antisense strand to SEQ ID NO: 1598949
agcuugcagaucuaucuau

SEQ ID NO: 1598951 - RNA, 19 nt, Artificial Sequence
  Description of Artificial Sequence: Synthetic oligonucleotide
  Sense strand starting at position 368 of SEQ ID NO: 1560422
aggccagcaguaugugaau

SEQ ID NO: 1598952 - RNA, 19 nt, Artificial Sequence
  Description of Artificial Sequence: Synthetic oligonucleotide
  Antisense strand to SEQ ID NO: 1598951
auucacauacugcuggccu

SEQ ID NO: 1598953 - RNA, 19 nt, Artificial Sequence
  Description of Artificial Sequence: Synthetic oligonucleotide
  Sense strand starting at position 465 of SEQ ID NO: 1560422
gaaggaauguacucauuau

SEQ ID NO: 1598954 - RNA, 19 nt, Artificial Sequence
  Description of Artificial Sequence: Synthetic oligonucleotide
  Antisense strand to SEQ ID NO: 1598953
auaaugaguacauuccuuc

SEQ ID NO: 1598955 - RNA, 19 nt, Artificial Sequence
  Description of Artificial Sequence: Synthetic oligonucleotide
  Sense strand starting at position 597 of SEQ ID NO: 1560422
caagcugagucaggaguua

SEQ ID NO: 1598956 - RNA, 19 nt, Artificial Sequence
  Description of Artificial Sequence: Synthetic oligonucleotide
  Antisense strand to SEQ ID NO: 1598955
uaacuccugacucagcuug

SEQ ID NO: 1598957 - RNA, 19 nt, Artificial Sequence
  Description of Artificial Sequence: Synthetic oligonucleotide
  Sense strand starting at position 602 of SEQ ID NO: 1560422
ugagucaggaguuaucucu

SEQ ID NO: 1598958 - RNA, 19 nt, Artificial Sequence
  Description of Artificial Sequence: Synthetic oligonucleotide
  Antisense strand to SEQ ID NO: 1598957
agagauaacuccugacuca

SEQ ID NO: 1598959 - RNA, 19 nt, Artificial Sequence
  Description of Artificial Sequence: Synthetic oligonucleotide
  Sense strand starting at position 608 of SEQ ID NO: 1560422
aggaguuaucucugcgcuc

SEQ ID NO: 1598960 - RNA, 19 nt, Artificial Sequence
  Description of Artificial Sequence: Synthetic oligonucleotide
  Antisense strand to SEQ ID NO: 1598959
gagcgcagagauaacuccu

SEQ ID NO: 1598961 - RNA, 19 nt, Artificial Sequence
  Description of Artificial Sequence: Synthetic oligonucleotide
  Sense strand starting at position 726 of SEQ ID NO: 1560422
caaggcugucuuggucaca

SEQ ID NO: 1598962 - RNA, 19 nt, Artificial Sequence
  Description of Artificial Sequence: Synthetic oligonucleotide
  Antisense strand to SEQ ID NO: 1598961
ugugaccaagacagccuug

SEQ ID NO: 1598963 - RNA, 19 nt, Artificial Sequence
  Description of Artificial Sequence: Synthetic oligonucleotide
  Sense strand starting at position 765 of SEQ ID NO: 1560422
cagcgcuggucagagagua

SEQ ID NO: 1598964 - RNA, 19 nt, Artificial Sequence
  Description of Artificial Sequence: Synthetic oligonucleotide
  Antisense strand to SEQ ID NO: 1598963
uacucucugaccagcgcug

SEQ ID NO: 1598965 - RNA, 19 nt, Artificial Sequence
  Description of Artificial Sequence: Synthetic oligonucleotide
  Sense strand starting at position 782 of SEQ ID NO: 1560422
uagguacucagggaguguu

SEQ ID NO: 1598966 - RNA, 19 nt, Artificial Sequence
  Description of Artificial Sequence: Synthetic oligonucleotide
  Antisense strand to SEQ ID NO: 1598965
aacacucccugaguaccua

SEQ ID NO: 1598967 - RNA, 19 nt, Artificial Sequence
  Description of Artificial Sequence: Synthetic oligonucleotide
  Sense strand starting at position 790 of SEQ ID NO: 1560422
cagggaguguuuggaagaa

SEQ ID NO: 1598968 - RNA, 19 nt, Artificial Sequence
  Description of Artificial Sequence: Synthetic oligonucleotide
  Antisense strand to SEQ ID NO: 1598967
uucuuccaaacacucccug

SEQ ID NO: 1598969 - RNA, 19 nt, Artificial Sequence
  Description of Artificial Sequence: Synthetic oligonucleotide
  Sense strand starting at position 792 of SEQ ID NO: 1560422
gggaguguuuggaagaaug

SEQ ID NO: 1598970 - RNA, 19 nt, Artificial Sequence
  Description of Artificial Sequence: Synthetic oligonucleotide
  Antisense strand to SEQ ID NO: 1598969
cauucuuccaaacacuccc

SEQ ID NO: 1598971 - RNA, 19 nt, Artificial Sequence
  Description of Artificial Sequence: Synthetic oligonucleotide
  Sense strand starting at position 1040 of SEQ ID NO: 1560422
cuagcuuugugacucugaa

SEQ ID NO: 1598972 - RNA, 19 nt, Artificial Sequence
  Description of Artificial Sequence: Synthetic oligonucleotide
  Antisense strand to SEQ ID NO: 1598971
uucagagucacaaagcuag

SEQ ID NO: 1598973 - RNA, 19 nt, Artificial Sequence
  Description of Artificial Sequence: Synthetic oligonucleotide
  Sense strand starting at position 1044 of SEQ ID NO: 1560422
cuuugugacucugaauaaa

SEQ ID NO: 1598974 - RNA, 19 nt, Artificial Sequence
  Description of Artificial Sequence: Synthetic oligonucleotide
  Antisense strand to SEQ ID NO: 1598973
uuuauucagagucacaaag

SEQ ID NO: 1598975 - RNA, 19 nt, Artificial Sequence
  Description of Artificial Sequence: Synthetic oligonucleotide
  Sense strand starting at position 1077 of SEQ ID NO: 1560422
ucaguuuccucuuggguau

SEQ ID NO: 1598976 - RNA, 19 nt, Artificial Sequence
  Description of Artificial Sequence: Synthetic oligonucleotide
  Antisense strand to SEQ ID NO: 1598975
auacccaagaggaaacuga

SEQ ID NO: 1598977 - RNA, 19 nt, Artificial Sequence
  Description of Artificial Sequence: Synthetic oligonucleotide
  Sense strand starting at position 1080 of SEQ ID NO: 1560422
guuuccucuuggguaucau

SEQ ID NO: 1598978 - RNA, 19 nt, Artificial Sequence
  Description of Artificial Sequence: Synthetic oligonucleotide
  Antisense strand to SEQ ID NO: 1598977
augauacccaagaggaaac

SEQ ID NO: 1598979 - RNA, 19 nt, Artificial Sequence
  Description of Artificial Sequence: Synthetic oligonucleotide
  Sense strand starting at position 1081 of SEQ ID NO: 1560422
uuuccucuuggguaucaua

SEQ ID NO: 1598980 - RNA, 19 nt, Artificial Sequence
  Description of Artificial Sequence: Synthetic oligonucleotide
  Antisense strand to SEQ ID NO: 1598979
uaugauacccaagaggaaa

SEQ ID NO: 1598981 - RNA, 19 nt, Artificial Sequence
  Description of Artificial Sequence: Synthetic oligonucleotide
  Sense strand starting at position 1084 of SEQ ID NO: 1560422
ccucuuggguaucauacaa

SEQ ID NO: 1598982 - RNA, 19 nt, Artificial Sequence
  Description of Artificial Sequence: Synthetic oligonucleotide
  Antisense strand to SEQ ID NO: 1598981
uuguaugauacccaagagg

SEQ ID NO: 1598983 - RNA, 19 nt, Artificial Sequence
  Description of Artificial Sequence: Synthetic oligonucleotide
  Sense strand starting at position 1092 of SEQ ID NO: 1560422
guaucauacaaguaguuag

SEQ ID NO: 1598984 - RNA, 19 nt, Artificial Sequence
  Description of Artificial Sequence: Synthetic oligonucleotide
  Antisense strand to SEQ ID NO: 1598983
cuaacuacuuguaugauac

SEQ ID NO: 1598985 - RNA, 19 nt, Artificial Sequence
  Description of Artificial Sequence: Synthetic oligonucleotide
  Sense strand starting at position 1302 of SEQ ID NO: 1560422
gccucagucucccugaaag

SEQ ID NO: 1598986 - RNA, 19 nt, Artificial Sequence
  Description of Artificial Sequence: Synthetic oligonucleotide
  Antisense strand to SEQ ID NO: 1598985
cuuucagggagacugaggc

SEQ ID NO: 1598987 - RNA, 19 nt, Artificial Sequence
  Description of Artificial Sequence: Synthetic oligonucleotide
  Sense strand starting at position 1304 of SEQ ID NO: 1560422
cucagucucccugaaagca

SEQ ID NO: 1598988 - RNA, 19 nt, Artificial Sequence
  Description of Artificial Sequence: Synthetic oligonucleotide
  Antisense strand to SEQ ID NO: 1598987
ugcuuucagggagacugag

SEQ ID NO: 1598989 - RNA, 19 nt, Artificial Sequence
  Description of Artificial Sequence: Synthetic oligonucleotide
  Sense strand starting at position 1341 of SEQ ID NO: 1560422
ccaaguuuauuggauccau

SEQ ID NO: 1598990 - RNA, 19 nt, Artificial Sequence
  Description of Artificial Sequence: Synthetic oligonucleotide
  Antisense strand to SEQ ID NO: 1598989
auggauccaauaaacuugg

SEQ ID NO: 1598991 - RNA, 19 nt, Artificial Sequence
  Description of Artificial Sequence: Synthetic oligonucleotide
  Sense strand starting at position 1462 of SEQ ID NO: 1560422
gcgggucaucuuuggcaug

SEQ ID NO: 1598992 - RNA, 19 nt, Artificial Sequence
  Description of Artificial Sequence: Synthetic oligonucleotide
  Antisense strand to SEQ ID NO: 1598991
caugccaaagaugacccgc

SEQ ID NO: 1598993 - RNA, 19 nt, Artificial Sequence
  Description of Artificial Sequence: Synthetic oligonucleotide
  Sense strand starting at position 1474 of SEQ ID NO: 1560422
uggcaugcgucucgcagaa

SEQ ID NO: 1598994 - RNA, 19 nt, Artificial Sequence
  Description of Artificial Sequence: Synthetic oligonucleotide
  Antisense strand to SEQ ID NO: 1598993
uucugcgagacgcaugcca

SEQ ID NO: 1598995 - RNA, 19 nt, Artificial Sequence
  Description of Artificial Sequence: Synthetic oligonucleotide
  Sense strand starting at position 1476 of SEQ ID NO: 1560422
gcaugcgucucgcagaaag

SEQ ID NO: 1598996 - RNA, 19 nt, Artificial Sequence
  Description of Artificial Sequence: Synthetic oligonucleotide
  Antisense strand to SEQ ID NO: 1598995
cuuucugcgagacgcaugc

SEQ ID NO: 1598997 - RNA, 19 nt, Artificial Sequence
  Description of Artificial Sequence: Synthetic oligonucleotide
  Sense strand starting at position 1973 of SEQ ID NO: 1560422
cggcaaucuuggccauguu

SEQ ID NO: 1598998 - RNA, 19 nt, Artificial Sequence
  Description of Artificial Sequence: Synthetic oligonucleotide
  Antisense strand to SEQ ID NO: 1598997
aacauggccaagauugccg

SEQ ID NO: 1598999 - RNA, 19 nt, Artificial Sequence
  Description of Artificial Sequence: Synthetic oligonucleotide
  Sense strand starting at position 1982 of SEQ ID NO: 1560422
uggccauguuguuggacau

SEQ ID NO: 1599000 - RNA, 19 nt, Artificial Sequence
  Description of Artificial Sequence: Synthetic oligonucleotide
  Antisense strand to SEQ ID NO: 1598999
auguccaacaacauggcca

SEQ ID NO: 1599001 - RNA, 19 nt, Artificial Sequence
  Description of Artificial Sequence: Synthetic oligonucleotide
  Sense strand starting at position 2118 of SEQ ID NO: 1560422
gguggaagggcgcgugaau

SEQ ID NO: 1599002 - RNA, 19 nt, Artificial Sequence
  Description of Artificial Sequence: Synthetic oligonucleotide
  Antisense strand to SEQ ID NO: 1599001
auucacgcgcccuuccacc

SEQ ID NO: 1599003 - RNA, 19 nt, Artificial Sequence
  Description of Artificial Sequence: Synthetic oligonucleotide
  Sense strand starting at position 3640 of SEQ ID NO: 1560422
ucuugucugucaguccuau

SEQ ID NO: 1599004 - RNA, 19 nt, Artificial Sequence
  Description of Artificial Sequence: Synthetic oligonucleotide
  Antisense strand to SEQ ID NO: 1599003
auaggacugacagacaaga

SEQ ID NO: 1599005 - RNA, 19 nt, Artificial Sequence
  Description of Artificial Sequence: Synthetic oligonucleotide
  Sense strand starting at position 3644 of SEQ ID NO: 1560422
gucugucaguccuaucuuu

SEQ ID NO: 1599006 - RNA, 19 nt, Artificial Sequence
  Description of Artificial Sequence: Synthetic oligonucleotide
  Antisense strand to SEQ ID NO: 1599005
aaagauaggacugacagac

SEQ ID NO: 1599007 - RNA, 19 nt, Artificial Sequence
  Description of Artificial Sequence: Synthetic oligonucleotide
  Sense strand starting at position 3691 of SEQ ID NO: 1560422
uguccuauugugugacucu

SEQ ID NO: 1599008 - RNA, 19 nt, Artificial Sequence
  Description of Artificial Sequence: Synthetic oligonucleotide
  Antisense strand to SEQ ID NO: 1599007
agagucacacaauaggaca

SEQ ID NO: 1599009 - RNA, 19 nt, Artificial Sequence
  Description of Artificial Sequence: Synthetic oligonucleotide
  Sense strand starting at position 3902 of SEQ ID NO: 1560422
acuaucuugcccugucaca

SEQ ID NO: 1599010 - RNA, 19 nt, Artificial Sequence
  Description of Artificial Sequence: Synthetic oligonucleotide
  Antisense strand to SEQ ID NO: 1599009
ugugacagggcaagauagu

SEQ ID NO: 1599011 - RNA, 19 nt, Artificial Sequence
  Description of Artificial Sequence: Synthetic oligonucleotide
  Sense strand starting at position 38 of SEQ ID NO: 1560423
guacacuagucaggugaca

SEQ ID NO: 1599012 - RNA, 19 nt, Artificial Sequence
  Description of Artificial Sequence: Synthetic oligonucleotide
  Antisense strand to SEQ ID NO: 1599011
ugucaccugacuaguguac

SEQ ID NO: 1599013 - RNA, 19 nt, Artificial Sequence
  Description of Artificial Sequence: Synthetic oligonucleotide
  Sense strand starting at position 291 of SEQ ID NO: 1560423
caggcaugaugguguacaa

SEQ ID NO: 1599014 - RNA, 19 nt, Artificial Sequence
  Description of Artificial Sequence: Synthetic oligonucleotide
  Antisense strand to SEQ ID NO: 1599013
uuguacaccaucaugccug

SEQ ID NO: 1599015 - RNA, 19 nt, Artificial Sequence
  Description of Artificial Sequence: Synthetic oligonucleotide
  Sense strand starting at position 304 of SEQ ID NO: 1560423
guacaacuguaguuccaga

SEQ ID NO: 1599016 - RNA, 19 nt, Artificial Sequence
  Description of Artificial Sequence: Synthetic oligonucleotide
  Antisense strand to SEQ ID NO: 1599015
ucuggaacuacaguuguac

SEQ ID NO: 1599017 - RNA, 19 nt, Artificial Sequence
  Description of Artificial Sequence: Synthetic oligonucleotide
  Sense strand starting at position 518 of SEQ ID NO: 1560423
gcggguggaaccugaagua

SEQ ID NO: 1599018 - RNA, 19 nt, Artificial Sequence
  Description of Artificial Sequence: Synthetic oligonucleotide
  Antisense strand to SEQ ID NO: 1599017
uacuucagguuccacccgc

SEQ ID NO: 1599019 - RNA, 19 nt, Artificial Sequence
  Description of Artificial Sequence: Synthetic oligonucleotide
  Sense strand starting at position 800 of SEQ ID NO: 1560423
augagagguuguuuauauu

SEQ ID NO: 1599020 - RNA, 19 nt, Artificial Sequence
  Description of Artificial Sequence: Synthetic oligonucleotide
  Antisense strand to SEQ ID NO: 1599019
aauauaaacaaccucucau

SEQ ID NO: 1599021 - RNA, 19 nt, Artificial Sequence
  Description of Artificial Sequence: Synthetic oligonucleotide
  Sense strand starting at position 875 of SEQ ID NO: 1560423
uggagaugcugucccuuua

SEQ ID NO: 1599022 - RNA, 19 nt, Artificial Sequence
  Description of Artificial Sequence: Synthetic oligonucleotide
  Antisense strand to SEQ ID NO: 1599021
uaaagggacagcaucucca

SEQ ID NO: 1599023 - RNA, 19 nt, Artificial Sequence
  Description of Artificial Sequence: Synthetic oligonucleotide
  Sense strand starting at position 884 of SEQ ID NO: 1560423
ugucccuuuaguggucaaa

SEQ ID NO: 1599024 - RNA, 19 nt, Artificial Sequence
  Description of Artificial Sequence: Synthetic oligonucleotide
  Antisense strand to SEQ ID NO: 1599023
uuugaccacuaaagggaca

SEQ ID NO: 1599025 - RNA, 19 nt, Artificial Sequence
  Description of Artificial Sequence: Synthetic oligonucleotide
  Sense strand starting at position 886 of SEQ ID NO: 1560423
ucccuuuaguggucaaauu

SEQ ID NO: 1599026 - RNA, 19 nt, Artificial Sequence
  Description of Artificial Sequence: Synthetic oligonucleotide
  Antisense strand to SEQ ID NO: 1599025
aauuugaccacuaaaggga

SEQ ID NO: 1599027 - RNA, 19 nt, Artificial Sequence
  Description of Artificial Sequence: Synthetic oligonucleotide
  Sense strand starting at position 887 of SEQ ID NO: 1560423
cccuuuaguggucaaauuc

SEQ ID NO: 1599028 - RNA, 19 nt, Artificial Sequence
  Description of Artificial Sequence: Synthetic oligonucleotide
  Antisense strand to SEQ ID NO: 1599027
gaauuugaccacuaaaggg

SEQ ID NO: 1599029 - RNA, 19 nt, Artificial Sequence
  Description of Artificial Sequence: Synthetic oligonucleotide
  Sense strand starting at position 894 of SEQ ID NO: 1560423
guggucaaauucugaagaa

SEQ ID NO: 1599030 - RNA, 19 nt, Artificial Sequence
  Description of Artificial Sequence: Synthetic oligonucleotide
  Antisense strand to SEQ ID NO: 1599029
uucuucagaauuugaccac

SEQ ID NO: 1599031 - RNA, 19 nt, Artificial Sequence
  Description of Artificial Sequence: Synthetic oligonucleotide
  Sense strand starting at position 895 of SEQ ID NO: 1560423
uggucaaauucugaagaaa

SEQ ID NO: 1599032 - RNA, 19 nt, Artificial Sequence
  Description of Artificial Sequence: Synthetic oligonucleotide
  Antisense strand to SEQ ID NO: 1599031
uuucuucagaauuugacca

SEQ ID NO: 1599033 - RNA, 19 nt, Artificial Sequence
  Description of Artificial Sequence: Synthetic oligonucleotide
  Sense strand starting at position 1040 of SEQ ID NO: 1560423
auccauaccuaguccagau

SEQ ID NO: 1599034 - RNA, 19 nt, Artificial Sequence
  Description of Artificial Sequence: Synthetic oligonucleotide
  Antisense strand to SEQ ID NO: 1599033
aucuggacuagguauggau

SEQ ID NO: 1599035 - RNA, 19 nt, Artificial Sequence
  Description of Artificial Sequence: Synthetic oligonucleotide
  Sense strand starting at position 1336 of SEQ ID NO: 1560423
guguguaagccauggcacu

SEQ ID NO: 1599036 - RNA, 19 nt, Artificial Sequence
  Description of Artificial Sequence: Synthetic oligonucleotide
  Antisense strand to SEQ ID NO: 1599035
agugccauggcuuacacac

SEQ ID NO: 1599037 - RNA, 19 nt, Artificial Sequence
  Description of Artificial Sequence: Synthetic oligonucleotide
  Sense strand starting at position 1615 of SEQ ID NO: 1560423
ucccaagguugagauuaca

SEQ ID NO: 1599038 - RNA, 19 nt, Artificial Sequence
  Description of Artificial Sequence: Synthetic oligonucleotide
  Antisense strand to SEQ ID NO: 1599037
uguaaucucaaccuuggga

SEQ ID NO: 1599039 - RNA, 19 nt, Artificial Sequence
  Description of Artificial Sequence: Synthetic oligonucleotide
  Sense strand starting at position 1674 of SEQ ID NO: 1560423
gggcaacugcaguguagua

SEQ ID NO: 1599040 - RNA, 19 nt, Artificial Sequence
  Description of Artificial Sequence: Synthetic oligonucleotide
  Antisense strand to SEQ ID NO: 1599039
uacuacacugcaguugccc

SEQ ID NO: 1599041 - RNA, 19 nt, Artificial Sequence
  Description of Artificial Sequence: Synthetic oligonucleotide
  Sense strand starting at position 1681 of SEQ ID NO: 1560423
ugcaguguaguagaacaaa

SEQ ID NO: 1599042 - RNA, 19 nt, Artificial Sequence
  Description of Artificial Sequence: Synthetic oligonucleotide
  Antisense strand to SEQ ID NO: 1599041
uuuguucuacuacacugca

SEQ ID NO: 1599043 - RNA, 19 nt, Artificial Sequence
  Description of Artificial Sequence: Synthetic oligonucleotide
  Sense strand starting at position 1684 of SEQ ID NO: 1560423
aguguaguagaacaaaguu

SEQ ID NO: 1599044 - RNA, 19 nt, Artificial Sequence
  Description of Artificial Sequence: Synthetic oligonucleotide
  Antisense strand to SEQ ID NO: 1599043
aacuuuguucuacuacacu

SEQ ID NO: 1599045 - RNA, 19 nt, Artificial Sequence
  Description of Artificial Sequence: Synthetic oligonucleotide
  Sense strand starting at position 1692 of SEQ ID NO: 1560423
agaacaaaguugugaccaa

SEQ ID NO: 1599046 - RNA, 19 nt, Artificial Sequence
  Description of Artificial Sequence: Synthetic oligonucleotide
  Antisense strand to SEQ ID NO: 1599045
uuggucacaacuuuguucu

SEQ ID NO: 1599047 - RNA, 19 nt, Artificial Sequence
  Description of Artificial Sequence: Synthetic oligonucleotide
  Sense strand starting at position 1693 of SEQ ID NO: 1560423
gaacaaaguugugaccaau

SEQ ID NO: 1599048 - RNA, 19 nt, Artificial Sequence
  Description of Artificial Sequence: Synthetic oligonucleotide
  Antisense strand to SEQ ID NO: 1599047
auuggucacaacuuuguuc

SEQ ID NO: 1599049 - RNA, 19 nt, Artificial Sequence
  Description of Artificial Sequence: Synthetic oligonucleotide
  Sense strand starting at position 1702 of SEQ ID NO: 1560423
ugugaccaaugcuaggaua

SEQ ID NO: 1599050 - RNA, 19 nt, Artificial Sequence
  Description of Artificial Sequence: Synthetic oligonucleotide
  Antisense strand to SEQ ID NO: 1599049
uauccuagcauuggucaca

SEQ ID NO: 1599051 - RNA, 19 nt, Artificial Sequence
  Description of Artificial Sequence: Synthetic oligonucleotide
  Sense strand starting at position 1704 of SEQ ID NO: 1560423
ugaccaaugcuaggauacu

SEQ ID NO: 1599052 - RNA, 19 nt, Artificial Sequence
  Description of Artificial Sequence: Synthetic oligonucleotide
  Antisense strand to SEQ ID NO: 1599051
aguauccuagcauugguca

SEQ ID NO: 1599053 - RNA, 19 nt, Artificial Sequence
  Description of Artificial Sequence: Synthetic oligonucleotide
  Sense strand starting at position 2091 of SEQ ID NO: 1560423
ggccuuuccuaauugagac

SEQ ID NO: 1599054 - RNA, 19 nt, Artificial Sequence
  Description of Artificial Sequence: Synthetic oligonucleotide
  Antisense strand to SEQ ID NO: 1599053
gucucaauuaggaaaggcc

SEQ ID NO: 1599055 - RNA, 19 nt, Artificial Sequence
  Description of Artificial Sequence: Synthetic oligonucleotide
  Sense strand starting at position 2649 of SEQ ID NO: 1560423
agcagauauuggugaguau

SEQ ID NO: 1599056 - RNA, 19 nt, Artificial Sequence
  Description of Artificial Sequence: Synthetic oligonucleotide
  Antisense strand to SEQ ID NO: 1599055
auacucaccaauaucugcu

SEQ ID NO: 1599057 - RNA, 19 nt, Artificial Sequence
  Description of Artificial Sequence: Synthetic oligonucleotide
  Sense strand starting at position 2650 of SEQ ID NO: 1560423
gcagauauuggugaguaug

SEQ ID NO: 1599058 - RNA, 19 nt, Artificial Sequence
  Description of Artificial Sequence: Synthetic oligonucleotide
  Antisense strand to SEQ ID NO: 1599057
cauacucaccaauaucugc

SEQ ID NO: 1599059 - RNA, 19 nt, Artificial Sequence
  Description of Artificial Sequence: Synthetic oligonucleotide
  Sense strand starting at position 2742 of SEQ ID NO: 1560423
gcagcuccuccagaaguua

SEQ ID NO: 1599060 - RNA, 19 nt, Artificial Sequence
  Description of Artificial Sequence: Synthetic oligonucleotide
  Antisense strand to SEQ ID NO: 1599059
uaacuucuggaggagcugc

SEQ ID NO: 1599061 - RNA, 19 nt, Artificial Sequence
  Description of Artificial Sequence: Synthetic oligonucleotide
  Sense strand starting at position 2753 of SEQ ID NO: 1560423
agaaguuaaacgugggauu

SEQ ID NO: 1599062 - RNA, 19 nt, Artificial Sequence
  Description of Artificial Sequence: Synthetic oligonucleotide
  Antisense strand to SEQ ID NO: 1599061
aaucccacguuuaacuucu

SEQ ID NO: 1599063 - RNA, 19 nt, Artificial Sequence
  Description of Artificial Sequence: Synthetic oligonucleotide
  Sense strand starting at position 2754 of SEQ ID NO: 1560423
gaaguuaaacgugggauug

SEQ ID NO: 1599064 - RNA, 19 nt, Artificial Sequence
  Description of Artificial Sequence: Synthetic oligonucleotide
  Antisense strand to SEQ ID NO: 1599063
caaucccacguuuaacuuc

SEQ ID NO: 1599065 - RNA, 19 nt, Artificial Sequence
  Description of Artificial Sequence: Synthetic oligonucleotide
  Sense strand starting at position 3064 of SEQ ID NO: 1560423
ccgagaccagccugguuaa

SEQ ID NO: 1599066 - RNA, 19 nt, Artificial Sequence
  Description of Artificial Sequence: Synthetic oligonucleotide
  Antisense strand to SEQ ID NO: 1599065
uuaaccaggcuggucucgg

SEQ ID NO: 1599067 - RNA, 19 nt, Artificial Sequence
  Description of Artificial Sequence: Synthetic oligonucleotide
  Sense strand starting at position 3116 of SEQ ID NO: 1560423
aaauuagcugggcguuaaa

SEQ ID NO: 1599068 - RNA, 19 nt, Artificial Sequence
  Description of Artificial Sequence: Synthetic oligonucleotide
  Antisense strand to SEQ ID NO: 1599067
uuuaacgcccagcuaauuu

SEQ ID NO: 1599069 - RNA, 19 nt, Artificial Sequence
  Description of Artificial Sequence: Synthetic oligonucleotide
  Sense strand starting at position 3119 of SEQ ID NO: 1560423
uuagcugggcguuaaauua

SEQ ID NO: 1599070 - RNA, 19 nt, Artificial Sequence
  Description of Artificial Sequence: Synthetic oligonucleotide
  Antisense strand to SEQ ID NO: 1599069
uaauuuaacgcccagcuaa

SEQ ID NO: 1599071 - RNA, 19 nt, Artificial Sequence
  Description of Artificial Sequence: Synthetic oligonucleotide
  Sense strand starting at position 3128 of SEQ ID NO: 1560423
cguuaaauuagccgggcau

SEQ ID NO: 1599072 - RNA, 19 nt, Artificial Sequence
  Description of Artificial Sequence: Synthetic oligonucleotide
  Antisense strand to SEQ ID NO: 1599071
augcccggcuaauuuaacg

SEQ ID NO: 1599073 - RNA, 19 nt, Artificial Sequence
  Description of Artificial Sequence: Synthetic oligonucleotide
  Sense strand starting at position 3652 of SEQ ID NO: 1560423
aaggaaauauuccggacuu

SEQ ID NO: 1599074 - RNA, 19 nt, Artificial Sequence
  Description of Artificial Sequence: Synthetic oligonucleotide
  Antisense strand to SEQ ID NO: 1599073
aaguccggaauauuuccuu

SEQ ID NO: 1599075 - RNA, 19 nt, Artificial Sequence
  Description of Artificial Sequence: Synthetic oligonucleotide
  Sense strand starting at position 3653 of SEQ ID NO: 1560423
aggaaauauuccggacuug

SEQ ID NO: 1599076 - RNA, 19 nt, Artificial Sequence
  Description of Artificial Sequence: Synthetic oligonucleotide
  Antisense strand to SEQ ID NO: 1599075
caaguccggaauauuuccu

SEQ ID NO: 1599077 - RNA, 19 nt, Artificial Sequence
  Description of Artificial Sequence: Synthetic oligonucleotide
  Sense strand starting at position 3658 of SEQ ID NO: 1560423
auauuccggacuugacaga

SEQ ID NO: 1599078 - RNA, 19 nt, Artificial Sequence
  Description of Artificial Sequence: Synthetic oligonucleotide
  Antisense strand to SEQ ID NO: 1599077
ucugucaaguccggaauau

SEQ ID NO: 1599079 - RNA, 19 nt, Artificial Sequence
  Description of Artificial Sequence: Synthetic oligonucleotide
  Sense strand starting at position 3695 of SEQ ID NO: 1560423
gcuuaucugagguaucgag

SEQ ID NO: 1599080 - RNA, 19 nt, Artificial Sequence
  Description of Artificial Sequence: Synthetic oligonucleotide
  Antisense strand to SEQ ID NO: 1599079
cucgauaccucagauaagc

SEQ ID NO: 1599081 - RNA, 19 nt, Artificial Sequence
  Description of Artificial Sequence: Synthetic oligonucleotide
  Sense strand starting at position 3701 of SEQ ID NO: 1560423
cugagguaucgagaggagu

SEQ ID NO: 1599082 - RNA, 19 nt, Artificial Sequence
  Description of Artificial Sequence: Synthetic oligonucleotide
  Antisense strand to SEQ ID NO: 1599081
acuccucucgauaccucag

SEQ ID NO: 1599083 - RNA, 19 nt, Artificial Sequence
  Description of Artificial Sequence: Synthetic oligonucleotide
  Sense strand starting at position 3703 of SEQ ID NO: 1560423
gagguaucgagaggaguca

SEQ ID NO: 1599084 - RNA, 19 nt, Artificial Sequence
  Description of Artificial Sequence: Synthetic oligonucleotide
  Antisense strand to SEQ ID NO: 1599083
ugacuccucucgauaccuc

SEQ ID NO: 1599085 - RNA, 19 nt, Artificial Sequence
  Description of Artificial Sequence: Synthetic oligonucleotide
  Sense strand starting at position 3794 of SEQ ID NO: 1560423
gagcgcuuagguugaagau

SEQ ID NO: 1599086 - RNA, 19 nt, Artificial Sequence
  Description of Artificial Sequence: Synthetic oligonucleotide
  Antisense strand to SEQ ID NO: 1599085
aucuucaaccuaagcgcuc

SEQ ID NO: 1599087 - RNA, 19 nt, Artificial Sequence
  Description of Artificial Sequence: Synthetic oligonucleotide
  Sense strand starting at position 3796 of SEQ ID NO: 1560423
gcgcuuagguugaagauga

SEQ ID NO: 1599088 - RNA, 19 nt, Artificial Sequence
  Description of Artificial Sequence: Synthetic oligonucleotide
  Antisense strand to SEQ ID NO: 1599087
ucaucuucaaccuaagcgc

SEQ ID NO: 1599089 - RNA, 19 nt, Artificial Sequence
  Description of Artificial Sequence: Synthetic oligonucleotide
  Sense strand starting at position 3803 of SEQ ID NO: 1560423
gguugaagaugaugacaaa

SEQ ID NO: 1599090 - RNA, 19 nt, Artificial Sequence
  Description of Artificial Sequence: Synthetic oligonucleotide
  Antisense strand to SEQ ID NO: 1599089
uuugucaucaucuucaacc

SEQ ID NO: 1599091 - RNA, 19 nt, Artificial Sequence
  Description of Artificial Sequence: Synthetic oligonucleotide
  Sense strand starting at position 79 of SEQ ID NO: 1560424
uugggauagugaguguaga

SEQ ID NO: 1599092 - RNA, 19 nt, Artificial Sequence
  Description of Artificial Sequence: Synthetic oligonucleotide
  Antisense strand to SEQ ID NO: 1599091
ucuacacucacuaucccaa

SEQ ID NO: 1599093 - RNA, 19 nt, Artificial Sequence
  Description of Artificial Sequence: Synthetic oligonucleotide
  Sense strand starting at position 80 of SEQ ID NO: 1560424
ugggauagugaguguagaa

SEQ ID NO: 1599094 - RNA, 19 nt, Artificial Sequence
  Description of Artificial Sequence: Synthetic oligonucleotide
  Antisense strand to SEQ ID NO: 1599093
uucuacacucacuauccca

SEQ ID NO: 1599095 - RNA, 19 nt, Artificial Sequence
  Description of Artificial Sequence: Synthetic oligonucleotide
  Sense strand starting at position 93 of SEQ ID NO: 1560424
guagaacagagaugucuua

SEQ ID NO: 1599096 - RNA, 19 nt, Artificial Sequence
  Description of Artificial Sequence: Synthetic oligonucleotide
  Antisense strand to SEQ ID NO: 1599095
uaagacaucucuguucuac

SEQ ID NO: 1599097 - RNA, 19 nt, Artificial Sequence
  Description of Artificial Sequence: Synthetic oligonucleotide
  Sense strand starting at position 358 of SEQ ID NO: 1560424
gccaguauccagcagaagu

SEQ ID NO: 1599098 - RNA, 19 nt, Artificial Sequence
  Description of Artificial Sequence: Synthetic oligonucleotide
  Antisense strand to SEQ ID NO: 1599097
acuucugcuggauacuggc

SEQ ID NO: 1599099 - RNA, 19 nt, Artificial Sequence
  Description of Artificial Sequence: Synthetic oligonucleotide
  Sense strand starting at position 360 of SEQ ID NO: 1560424
caguauccagcagaaguuu

SEQ ID NO: 1599100 - RNA, 19 nt, Artificial Sequence
  Description of Artificial Sequence: Synthetic oligonucleotide
  Antisense strand to SEQ ID NO: 1599099
aaacuucugcuggauacug

SEQ ID NO: 1599101 - RNA, 19 nt, Artificial Sequence
  Description of Artificial Sequence: Synthetic oligonucleotide
  Sense strand starting at position 368 of SEQ ID NO: 1560424
agcagaaguuuccaccaga

SEQ ID NO: 1599102 - RNA, 19 nt, Artificial Sequence
  Description of Artificial Sequence: Synthetic oligonucleotide
  Antisense strand to SEQ ID NO: 1599101
ucugguggaaacuucugcu

SEQ ID NO: 1599103 - RNA, 19 nt, Artificial Sequence
  Description of Artificial Sequence: Synthetic oligonucleotide
  Sense strand starting at position 381 of SEQ ID NO: 1560424
accagaacuguuuguagga

SEQ ID NO: 1599104 - RNA, 19 nt, Artificial Sequence
  Description of Artificial Sequence: Synthetic oligonucleotide
  Antisense strand to SEQ ID NO: 1599103
uccuacaaacaguucuggu

SEQ ID NO: 1599105 - RNA, 19 nt, Artificial Sequence
  Description of Artificial Sequence: Synthetic oligonucleotide
  Sense strand starting at position 382 of SEQ ID NO: 1560424
ccagaacuguuuguaggaa

SEQ ID NO: 1599106 - RNA, 19 nt, Artificial Sequence
  Description of Artificial Sequence: Synthetic oligonucleotide
  Antisense strand to SEQ ID NO: 1599105
uuccuacaaacaguucugg

SEQ ID NO: 1599107 - RNA, 19 nt, Artificial Sequence
  Description of Artificial Sequence: Synthetic oligonucleotide
  Sense strand starting at position 383 of SEQ ID NO: 1560424
cagaacuguuuguaggaaa

SEQ ID NO: 1599108 - RNA, 19 nt, Artificial Sequence
  Description of Artificial Sequence: Synthetic oligonucleotide
  Antisense strand to SEQ ID NO: 1599107
uuuccuacaaacaguucug

SEQ ID NO: 1599109 - RNA, 19 nt, Artificial Sequence
  Description of Artificial Sequence: Synthetic oligonucleotide
  Sense strand starting at position 449 of SEQ ID NO: 1560424
aggauguggucagggugaa

SEQ ID NO: 1599110 - RNA, 19 nt, Artificial Sequence
  Description of Artificial Sequence: Synthetic oligonucleotide
  Antisense strand to SEQ ID NO: 1599109
uucacccugaccacauccu

SEQ ID NO: 1599111 - RNA, 19 nt, Artificial Sequence
  Description of Artificial Sequence: Synthetic oligonucleotide
  Sense strand starting at position 450 of SEQ ID NO: 1560424
ggauguggucagggugaaa

SEQ ID NO: 1599112 - RNA, 19 nt, Artificial Sequence
  Description of Artificial Sequence: Synthetic oligonucleotide
  Antisense strand to SEQ ID NO: 1599111
uuucacccugaccacaucc

SEQ ID NO: 1599113 - RNA, 19 nt, Artificial Sequence
  Description of Artificial Sequence: Synthetic oligonucleotide
  Sense strand starting at position 506 of SEQ ID NO: 1560424
uaaauuguggcccaaugau

SEQ ID NO: 1599114 - RNA, 19 nt, Artificial Sequence
  Description of Artificial Sequence: Synthetic oligonucleotide
  Antisense strand to SEQ ID NO: 1599113
aucauugggccacaauuua

SEQ ID NO: 1599115 - RNA, 19 nt, Artificial Sequence
  Description of Artificial Sequence: Synthetic oligonucleotide
  Sense strand starting at position 607 of SEQ ID NO: 1560424
caagucaagucguuaagug

SEQ ID NO: 1599116 - RNA, 19 nt, Artificial Sequence
  Description of Artificial Sequence: Synthetic oligonucleotide
  Antisense strand to SEQ ID NO: 1599115
cacuuaacgacuugacuug

SEQ ID NO: 1599117 - RNA, 19 nt, Artificial Sequence
  Description of Artificial Sequence: Synthetic oligonucleotide
  Sense strand starting at position 614 of SEQ ID NO: 1560424
agucguuaaguggaacaga

SEQ ID NO: 1599118 - RNA, 19 nt, Artificial Sequence
  Description of Artificial Sequence: Synthetic oligonucleotide
  Antisense strand to SEQ ID NO: 1599117
ucuguuccacuuaacgacu

SEQ ID NO: 1599119 - RNA, 19 nt, Artificial Sequence
  Description of Artificial Sequence: Synthetic oligonucleotide
  Sense strand starting at position 830 of SEQ ID NO: 1560424
accaguguauucucaacau

SEQ ID NO: 1599120 - RNA, 19 nt, Artificial Sequence
  Description of Artificial Sequence: Synthetic oligonucleotide
  Antisense strand to SEQ ID NO: 1599119
auguugagaauacacuggu

SEQ ID NO: 1599121 - RNA, 19 nt, Artificial Sequence
  Description of Artificial Sequence: Synthetic oligonucleotide
  Sense strand starting at position 834 of SEQ ID NO: 1560424
guguauucucaacaucaaa

SEQ ID NO: 1599122 - RNA, 19 nt, Artificial Sequence
  Description of Artificial Sequence: Synthetic oligonucleotide
  Antisense strand to SEQ ID NO: 1599121
uuugauguugagaauacac

SEQ ID NO: 1599123 - RNA, 19 nt, Artificial Sequence
  Description of Artificial Sequence: Synthetic oligonucleotide
  Sense strand starting at position 1002 of SEQ ID NO: 1560424
auauaucccucccugugua

SEQ ID NO: 1599124 - RNA, 19 nt, Artificial Sequence
  Description of Artificial Sequence: Synthetic oligonucleotide
  Antisense strand to SEQ ID NO: 1599123
uacacagggagggauauau

SEQ ID NO: 1599125 - RNA, 19 nt, Artificial Sequence
  Description of Artificial Sequence: Synthetic oligonucleotide
  Sense strand starting at position 1006 of SEQ ID NO: 1560424
aucccucccuguguaauuu

SEQ ID NO: 1599126 - RNA, 19 nt, Artificial Sequence
  Description of Artificial Sequence: Synthetic oligonucleotide
  Antisense strand to SEQ ID NO: 1599125
aaauuacacagggagggau

SEQ ID NO: 1599127 - RNA, 19 nt, Artificial Sequence
  Description of Artificial Sequence: Synthetic oligonucleotide
  Sense strand starting at position 1015 of SEQ ID NO: 1560424
uguguaauuucccaugacc

SEQ ID NO: 1599128 - RNA, 19 nt, Artificial Sequence
  Description of Artificial Sequence: Synthetic oligonucleotide
  Antisense strand to SEQ ID NO: 1599127
ggucaugggaaauuacaca

SEQ ID NO: 1599129 - RNA, 19 nt, Artificial Sequence
  Description of Artificial Sequence: Synthetic oligonucleotide
  Sense strand starting at position 1147 of SEQ ID NO: 1560424
ugucaucugcugcaaccau

SEQ ID NO: 1599130 - RNA, 19 nt, Artificial Sequence
  Description of Artificial Sequence: Synthetic oligonucleotide
  Antisense strand to SEQ ID NO: 1599129
augguugcagcagaugaca

SEQ ID NO: 1599131 - RNA, 19 nt, Artificial Sequence
  Description of Artificial Sequence: Synthetic oligonucleotide
  Sense strand starting at position 1258 of SEQ ID NO: 1560424
cagauuugcucaugguugu

SEQ ID NO: 1599132 - RNA, 19 nt, Artificial Sequence
  Description of Artificial Sequence: Synthetic oligonucleotide
  Antisense strand to SEQ ID NO: 1599131
acaaccaugagcaaaucug

SEQ ID NO: 1599133 - RNA, 19 nt, Artificial Sequence
  Description of Artificial Sequence: Synthetic oligonucleotide
  Sense strand starting at position 1259 of SEQ ID NO: 1560424
agauuugcucaugguuguu

SEQ ID NO: 1599134 - RNA, 19 nt, Artificial Sequence
  Description of Artificial Sequence: Synthetic oligonucleotide
  Antisense strand to SEQ ID NO: 1599133
aacaaccaugagcaaaucu

SEQ ID NO: 1599135 - RNA, 19 nt, Artificial Sequence
  Description of Artificial Sequence: Synthetic oligonucleotide
  Sense strand starting at position 1354 of SEQ ID NO: 1560424
acuagcuauuccgucauuu

SEQ ID NO: 1599136 - RNA, 19 nt, Artificial Sequence
  Description of Artificial Sequence: Synthetic oligonucleotide
  Antisense strand to SEQ ID NO: 1599135
aaaugacggaauagcuagu

SEQ ID NO: 1599137 - RNA, 19 nt, Artificial Sequence
  Description of Artificial Sequence: Synthetic oligonucleotide
  Sense strand starting at position 2238 of SEQ ID NO: 1560424
ggauuuggguuacagauua

SEQ ID NO: 1599138 - RNA, 19 nt, Artificial Sequence
  Description of Artificial Sequence: Synthetic oligonucleotide
  Antisense strand to SEQ ID NO: 1599137
uaaucuguaacccaaaucc

SEQ ID NO: 1599139 - RNA, 19 nt, Artificial Sequence
  Description of Artificial Sequence: Synthetic oligonucleotide
  Sense strand starting at position 2349 of SEQ ID NO: 1560424
caaguaggcccugguguua

SEQ ID NO: 1599140 - RNA, 19 nt, Artificial Sequence
  Description of Artificial Sequence: Synthetic oligonucleotide
  Antisense strand to SEQ ID NO: 1599139
uaacaccagggccuacuug

SEQ ID NO: 1599141 - RNA, 19 nt, Artificial Sequence
  Description of Artificial Sequence: Synthetic oligonucleotide
  Sense strand starting at position 3184 of SEQ ID NO: 1560424
aggacauggucuuguuguu

SEQ ID NO: 1599142 - RNA, 19 nt, Artificial Sequence
  Description of Artificial Sequence: Synthetic oligonucleotide
  Antisense strand to SEQ ID NO: 1599141
aacaacaagaccauguccu

SEQ ID NO: 1599143 - RNA, 19 nt, Artificial Sequence
  Description of Artificial Sequence: Synthetic oligonucleotide
  Sense strand starting at position 3520 of SEQ ID NO: 1560424
caccauuugugggcaugua

SEQ ID NO: 1599144 - RNA, 19 nt, Artificial Sequence
  Description of Artificial Sequence: Synthetic oligonucleotide
  Antisense strand to SEQ ID NO: 1599143
uacaugcccacaaauggug

SEQ ID NO: 1599145 - RNA, 19 nt, Artificial Sequence
  Description of Artificial Sequence: Synthetic oligonucleotide
  Sense strand starting at position 3564 of SEQ ID NO: 1560424
ugaguagugccucaaugaa

SEQ ID NO: 1599146 - RNA, 19 nt, Artificial Sequence
  Description of Artificial Sequence: Synthetic oligonucleotide
  Antisense strand to SEQ ID NO: 1599145
uucauugaggcacuacuca

SEQ ID NO: 1599147 - RNA, 19 nt, Artificial Sequence
  Description of Artificial Sequence: Synthetic oligonucleotide
  Sense strand starting at position 3704 of SEQ ID NO: 1560424
gcuuuccaguuguaauugu

SEQ ID NO: 1599148 - RNA, 19 nt, Artificial Sequence
  Description of Artificial Sequence: Synthetic oligonucleotide
  Antisense strand to SEQ ID NO: 1599147
acaauuacaacuggaaagc

SEQ ID NO: 1599149 - RNA, 19 nt, Artificial Sequence
  Description of Artificial Sequence: Synthetic oligonucleotide
  Sense strand starting at position 3 of SEQ ID NO: 1560425
aaaugucagccuugagaaa

SEQ ID NO: 1599150 - RNA, 19 nt, Artificial Sequence
  Description of Artificial Sequence: Synthetic oligonucleotide
  Antisense strand to SEQ ID NO: 1599149
uuucucaaggcugacauuu

SEQ ID NO: 1599151 - RNA, 19 nt, Artificial Sequence
  Description of Artificial Sequence: Synthetic oligonucleotide
  Sense strand starting at position 4 of SEQ ID NO: 1560425
aaugucagccuugagaaac

SEQ ID NO: 1599152 - RNA, 19 nt, Artificial Sequence
  Description of Artificial Sequence: Synthetic oligonucleotide
  Antisense strand to SEQ ID NO: 1599151
guuucucaaggcugacauu

SEQ ID NO: 1599153 - RNA, 19 nt, Artificial Sequence
  Description of Artificial Sequence: Synthetic oligonucleotide
  Sense strand starting at position 26 of SEQ ID NO: 1560425
cccuguggguaugagauau

SEQ ID NO: 1599154 - RNA, 19 nt, Artificial Sequence
  Description of Artificial Sequence: Synthetic oligonucleotide
  Antisense strand to SEQ ID NO: 1599153
auaucucauacccacaggg

SEQ ID NO: 1599155 - RNA, 19 nt, Artificial Sequence
  Description of Artificial Sequence: Synthetic oligonucleotide
  Sense strand starting at position 32 of SEQ ID NO: 1560425
ggguaugagauaugcuccu

SEQ ID NO: 1599156 - RNA, 19 nt, Artificial Sequence
  Description of Artificial Sequence: Synthetic oligonucleotide
  Antisense strand to SEQ ID NO: 1599155
aggagcauaucucauaccc

SEQ ID NO: 1599157 - RNA, 19 nt, Artificial Sequence
  Description of Artificial Sequence: Synthetic oligonucleotide
  Sense strand starting at position 38 of SEQ ID NO: 1560425
gagauaugcuccucccagg

SEQ ID NO: 1599158 - RNA, 19 nt, Artificial Sequence
  Description of Artificial Sequence: Synthetic oligonucleotide
  Antisense strand to SEQ ID NO: 1599157
ccugggaggagcauaucuc

SEQ ID NO: 1599159 - RNA, 19 nt, Artificial Sequence
  Description of Artificial Sequence: Synthetic oligonucleotide
  Sense strand starting at position 201 of SEQ ID NO: 1560425
gggugaugcggcuaacagu

SEQ ID NO: 1599160 - RNA, 19 nt, Artificial Sequence
  Description of Artificial Sequence: Synthetic oligonucleotide
  Antisense strand to SEQ ID NO: 1599159
acuguuagccgcaucaccc

SEQ ID NO: 1599161 - RNA, 19 nt, Artificial Sequence
  Description of Artificial Sequence: Synthetic oligonucleotide
  Sense strand starting at position 208 of SEQ ID NO: 1560425
gcggcuaacagucagauaa

SEQ ID NO: 1599162 - RNA, 19 nt, Artificial Sequence
  Description of Artificial Sequence: Synthetic oligonucleotide
  Antisense strand to SEQ ID NO: 1599161
uuaucugacuguuagccgc

SEQ ID NO: 1599163 - RNA, 19 nt, Artificial Sequence
  Description of Artificial Sequence: Synthetic oligonucleotide
  Sense strand starting at position 210 of SEQ ID NO: 1560425
ggcuaacagucagauaaac

SEQ ID NO: 1599164 - RNA, 19 nt, Artificial Sequence
  Description of Artificial Sequence: Synthetic oligonucleotide
  Antisense strand to SEQ ID NO: 1599163
guuuaucugacuguuagcc

SEQ ID NO: 1599165 - RNA, 19 nt, Artificial Sequence
  Description of Artificial Sequence: Synthetic oligonucleotide
  Sense strand starting at position 485 of SEQ ID NO: 1560425
agggucuacucagacauca

SEQ ID NO: 1599166 - RNA, 19 nt, Artificial Sequence
  Description of Artificial Sequence: Synthetic oligonucleotide
  Antisense strand to SEQ ID NO: 1599165
ugaugucugaguagacccu

SEQ ID NO: 1599167 - RNA, 19 nt, Artificial Sequence
  Description of Artificial Sequence: Synthetic oligonucleotide
  Sense strand starting at position 517 of SEQ ID NO: 1560425
cugggaugcugcuuagaac

SEQ ID NO: 1599168 - RNA, 19 nt, Artificial Sequence
  Description of Artificial Sequence: Synthetic oligonucleotide
  Antisense strand to SEQ ID NO: 1599167
guucuaagcagcaucccag

SEQ ID NO: 1599169 - RNA, 19 nt, Artificial Sequence
  Description of Artificial Sequence: Synthetic oligonucleotide
  Sense strand starting at position 520 of SEQ ID NO: 1560425
ggaugcugcuuagaaccua

SEQ ID NO: 1599170 - RNA, 19 nt, Artificial Sequence
  Description of Artificial Sequence: Synthetic oligonucleotide
  Antisense strand to SEQ ID NO: 1599169
uagguucuaagcagcaucc

SEQ ID NO: 1599171 - RNA, 19 nt, Artificial Sequence
  Description of Artificial Sequence: Synthetic oligonucleotide
  Sense strand starting at position 569 of SEQ ID NO: 1560425
ggaggugacugaggucuaa

SEQ ID NO: 1599172 - RNA, 19 nt, Artificial Sequence
  Description of Artificial Sequence: Synthetic oligonucleotide
  Antisense strand to SEQ ID NO: 1599171
uuagaccucagucaccucc

SEQ ID NO: 1599173 - RNA, 19 nt, Artificial Sequence
  Description of Artificial Sequence: Synthetic oligonucleotide
  Sense strand starting at position 777 of SEQ ID NO: 1560425
ggucaagcugcagaaagau

SEQ ID NO: 1599174 - RNA, 19 nt, Artificial Sequence
  Description of Artificial Sequence: Synthetic oligonucleotide
  Antisense strand to SEQ ID NO: 1599173
aucuuucugcagcuugacc

SEQ ID NO: 1599175 - RNA, 19 nt, Artificial Sequence
  Description of Artificial Sequence: Synthetic oligonucleotide
  Sense strand starting at position 850 of SEQ ID NO: 1560425
aggagcuguucccagaaga

SEQ ID NO: 1599176 - RNA, 19 nt, Artificial Sequence
  Description of Artificial Sequence: Synthetic oligonucleotide
  Antisense strand to SEQ ID NO: 1599175
ucuucugggaacagcuccu

SEQ ID NO: 1599177 - RNA, 19 nt, Artificial Sequence
  Description of Artificial Sequence: Synthetic oligonucleotide
  Sense strand starting at position 1063 of SEQ ID NO: 1560425
uccacuuucugccguaagu

SEQ ID NO: 1599178 - RNA, 19 nt, Artificial Sequence
  Description of Artificial Sequence: Synthetic oligonucleotide
  Antisense strand to SEQ ID NO: 1599177
acuuacggcagaaagugga

SEQ ID NO: 1599179 - RNA, 19 nt, Artificial Sequence
  Description of Artificial Sequence: Synthetic oligonucleotide
  Sense strand starting at position 1065 of SEQ ID NO: 1560425
cacuuucugccguaaguua

SEQ ID NO: 1599180 - RNA, 19 nt, Artificial Sequence
  Description of Artificial Sequence: Synthetic oligonucleotide
  Antisense strand to SEQ ID NO: 1599179
uaacuuacggcagaaagug

SEQ ID NO: 1599181 - RNA, 19 nt, Artificial Sequence
  Description of Artificial Sequence: Synthetic oligonucleotide
  Sense strand starting at position 1073 of SEQ ID NO: 1560425
gccguaaguuacucaggca

SEQ ID NO: 1599182 - RNA, 19 nt, Artificial Sequence
  Description of Artificial Sequence: Synthetic oligonucleotide
  Antisense strand to SEQ ID NO: 1599181
ugccugaguaacuuacggc

SEQ ID NO: 1599183 - RNA, 19 nt, Artificial Sequence
  Description of Artificial Sequence: Synthetic oligonucleotide
  Sense strand starting at position 1162 of SEQ ID NO: 1560425
ccaccaguaucagugauca

SEQ ID NO: 1599184 - RNA, 19 nt, Artificial Sequence
  Description of Artificial Sequence: Synthetic oligonucleotide
  Antisense strand to SEQ ID NO: 1599183
ugaucacugauacuggugg

SEQ ID NO: 1599185 - RNA, 19 nt, Artificial Sequence
  Description of Artificial Sequence: Synthetic oligonucleotide
  Sense strand starting at position 1202 of SEQ ID NO: 1560425
cgcccaugauuugcucaaa

SEQ ID NO: 1599186 - RNA, 19 nt, Artificial Sequence
  Description of Artificial Sequence: Synthetic oligonucleotide
  Antisense strand to SEQ ID NO: 1599185
uuugagcaaaucaugggcg

SEQ ID NO: 1599187 - RNA, 19 nt, Artificial Sequence
  Description of Artificial Sequence: Synthetic oligonucleotide
  Sense strand starting at position 1247 of SEQ ID NO: 1560425
acaggugucuucugcagga

SEQ ID NO: 1599188 - RNA, 19 nt, Artificial Sequence
  Description of Artificial Sequence: Synthetic oligonucleotide
  Antisense strand to SEQ ID NO: 1599187
uccugcagaagacaccugu

SEQ ID NO: 1599189 - RNA, 19 nt, Artificial Sequence
  Description of Artificial Sequence: Synthetic oligonucleotide
  Sense strand starting at position 1249 of SEQ ID NO: 1560425
aggugucuucugcaggaau

SEQ ID NO: 1599190 - RNA, 19 nt, Artificial Sequence
  Description of Artificial Sequence: Synthetic oligonucleotide
  Antisense strand to SEQ ID NO: 1599189
auuccugcagaagacaccu

SEQ ID NO: 1599191 - RNA, 19 nt, Artificial Sequence
  Description of Artificial Sequence: Synthetic oligonucleotide
  Sense strand starting at position 1251 of SEQ ID NO: 1560425
gugucuucugcaggaauca

SEQ ID NO: 1599192 - RNA, 19 nt, Artificial Sequence
  Description of Artificial Sequence: Synthetic oligonucleotide
  Antisense strand to SEQ ID NO: 1599191
ugauuccugcagaagacac

SEQ ID NO: 1599193 - RNA, 19 nt, Artificial Sequence
  Description of Artificial Sequence: Synthetic oligonucleotide
  Sense strand starting at position 2769 of SEQ ID NO: 1560425
gcaacaagaucacguaaga

SEQ ID NO: 1599194 - RNA, 19 nt, Artificial Sequence
  Description of Artificial Sequence: Synthetic oligonucleotide
  Antisense strand to SEQ ID NO: 1599193
ucuuacgugaucuuguugc

SEQ ID NO: 1599195 - RNA, 19 nt, Artificial Sequence
  Description of Artificial Sequence: Synthetic oligonucleotide
  Sense strand starting at position 2779 of SEQ ID NO: 1560425
cacguaagaccuuguaagu

SEQ ID NO: 1599196 - RNA, 19 nt, Artificial Sequence
  Description of Artificial Sequence: Synthetic oligonucleotide
  Antisense strand to SEQ ID NO: 1599195
acuuacaaggucuuacgug

SEQ ID NO: 1599197 - RNA, 19 nt, Artificial Sequence
  Description of Artificial Sequence: Synthetic oligonucleotide
  Sense strand starting at position 2788 of SEQ ID NO: 1560425
ccuuguaagucauuguaag

SEQ ID NO: 1599198 - RNA, 19 nt, Artificial Sequence
  Description of Artificial Sequence: Synthetic oligonucleotide
  Antisense strand to SEQ ID NO: 1599197
cuuacaaugacuuacaagg

SEQ ID NO: 1599199 - RNA, 19 nt, Artificial Sequence
  Description of Artificial Sequence: Synthetic oligonucleotide
  Sense strand starting at position 2789 of SEQ ID NO: 1560425
cuuguaagucauuguaaga

SEQ ID NO: 1599200 - RNA, 19 nt, Artificial Sequence
  Description of Artificial Sequence: Synthetic oligonucleotide
  Antisense strand to SEQ ID NO: 1599199
ucuuacaaugacuuacaag

SEQ ID NO: 1599201 - RNA, 19 nt, Artificial Sequence
  Description of Artificial Sequence: Synthetic oligonucleotide
  Sense strand starting at position 2819 of SEQ ID NO: 1560425
gggcacuccugccuauaau

SEQ ID NO: 1599202 - RNA, 19 nt, Artificial Sequence
  Description of Artificial Sequence: Synthetic oligonucleotide
  Antisense strand to SEQ ID NO: 1599201
auuauaggcaggagugccc

SEQ ID NO: 1599203 - RNA, 19 nt, Artificial Sequence
  Description of Artificial Sequence: Synthetic oligonucleotide
  Sense strand starting at position 2820 of SEQ ID NO: 1560425
ggcacuccugccuauaauc

SEQ ID NO: 1599204 - RNA, 19 nt, Artificial Sequence
  Description of Artificial Sequence: Synthetic oligonucleotide
  Antisense strand to SEQ ID NO: 1599203
gauuauaggcaggagugcc

SEQ ID NO: 1599205 - RNA, 19 nt, Artificial Sequence
  Description of Artificial Sequence: Synthetic oligonucleotide
  Sense strand starting at position 3016 of SEQ ID NO: 1560425
guuagaggcugccgugauu

SEQ ID NO: 1599206 - RNA, 19 nt, Artificial Sequence
  Description of Artificial Sequence: Synthetic oligonucleotide
  Antisense strand to SEQ ID NO: 1599205
aaucacggcagccucuaac

SEQ ID NO: 1599207 - RNA, 19 nt, Artificial Sequence
  Description of Artificial Sequence: Synthetic oligonucleotide
  Sense strand starting at position 3028 of SEQ ID NO: 1560425
cgugauuaccaccacugua

SEQ ID NO: 1599208 - RNA, 19 nt, Artificial Sequence
  Description of Artificial Sequence: Synthetic oligonucleotide
  Antisense strand to SEQ ID NO: 1599207
uacaguggugguaaucacg

SEQ ID NO: 1599209 - RNA, 19 nt, Artificial Sequence
  Description of Artificial Sequence: Synthetic oligonucleotide
  Sense strand starting at position 3130 of SEQ ID NO: 1560425
agaaauaaguggucacuga

SEQ ID NO: 1599210 - RNA, 19 nt, Artificial Sequence
  Description of Artificial Sequence: Synthetic oligonucleotide
  Antisense strand to SEQ ID NO: 1599209
ucagugaccacuuauuucu

SEQ ID NO: 1599211 - RNA, 19 nt, Artificial Sequence
  Description of Artificial Sequence: Synthetic oligonucleotide
  Sense strand starting at position 3249 of SEQ ID NO: 1560425
ccugguagugcugaacagu

SEQ ID NO: 1599212 - RNA, 19 nt, Artificial Sequence
  Description of Artificial Sequence: Synthetic oligonucleotide
  Antisense strand to SEQ ID NO: 1599211
acuguucagcacuaccagg

SEQ ID NO: 1599213 - RNA, 19 nt, Artificial Sequence
  Description of Artificial Sequence: Synthetic oligonucleotide
  Sense strand starting at position 3264 of SEQ ID NO: 1560425
caguaucuguucuacugga

SEQ ID NO: 1599214 - RNA, 19 nt, Artificial Sequence
  Description of Artificial Sequence: Synthetic oligonucleotide
  Antisense strand to SEQ ID NO: 1599213
uccaguagaacagauacug

SEQ ID NO: 1599215 - RNA, 19 nt, Artificial Sequence
  Description of Artificial Sequence: Synthetic oligonucleotide
  Sense strand starting at position 3631 of SEQ ID NO: 1560425
gccaguuacucaucuacac

SEQ ID NO: 1599216 - RNA, 19 nt, Artificial Sequence
  Description of Artificial Sequence: Synthetic oligonucleotide
  Antisense strand to SEQ ID NO: 1599215
guguagaugaguaacuggc

SEQ ID NO: 1599217 - RNA, 19 nt, Artificial Sequence
  Description of Artificial Sequence: Synthetic oligonucleotide
  Sense strand starting at position 3744 of SEQ ID NO: 1560425
cccugugauuccucagaug

SEQ ID NO: 1599218 - RNA, 19 nt, Artificial Sequence
  Description of Artificial Sequence: Synthetic oligonucleotide
  Antisense strand to SEQ ID NO: 1599217
caucugaggaaucacaggg

SEQ ID NO: 1599219 - RNA, 19 nt, Artificial Sequence
  Description of Artificial Sequence: Synthetic oligonucleotide
  Sense strand starting at position 3747 of SEQ ID NO: 1560425
ugugauuccucagaugacu

SEQ ID NO: 1599220 - RNA, 19 nt, Artificial Sequence
  Description of Artificial Sequence: Synthetic oligonucleotide
  Antisense strand to SEQ ID NO: 1599219
agucaucugaggaaucaca

SEQ ID NO: 1599221 - RNA, 19 nt, Artificial Sequence
  Description of Artificial Sequence: Synthetic oligonucleotide
  Sense strand starting at position 3758 of SEQ ID NO: 1560425
agaugacucuagcccaaua

SEQ ID NO: 1599222 - RNA, 19 nt, Artificial Sequence
  Description of Artificial Sequence: Synthetic oligonucleotide
  Antisense strand to SEQ ID NO: 1599221
uauugggcuagagucaucu

SEQ ID NO: 1599223 - RNA, 19 nt, Artificial Sequence
  Description of Artificial Sequence: Synthetic oligonucleotide
  Sense strand starting at position 3864 of SEQ ID NO: 1560425
acacgaucuugucucacua

SEQ ID NO: 1599224 - RNA, 19 nt, Artificial Sequence
  Description of Artificial Sequence: Synthetic oligonucleotide
  Antisense strand to SEQ ID NO: 1599223
uagugagacaagaucgugu

SEQ ID NO: 1599225 - RNA, 19 nt, Artificial Sequence
  Description of Artificial Sequence: Synthetic oligonucleotide
  Sense strand starting at position 98 of SEQ ID NO: 1560426
agggucuacucagacauca

SEQ ID NO: 1599226 - RNA, 19 nt, Artificial Sequence
  Description of Artificial Sequence: Synthetic oligonucleotide
  Antisense strand to SEQ ID NO: 1599225
ugaugucugaguagacccu

SEQ ID NO: 1599227 - RNA, 19 nt, Artificial Sequence
  Description of Artificial Sequence: Synthetic oligonucleotide
  Sense strand starting at position 130 of SEQ ID NO: 1560426
cugggaugcugcuuagaac

SEQ ID NO: 1599228 - RNA, 19 nt, Artificial Sequence
  Description of Artificial Sequence: Synthetic oligonucleotide
  Antisense strand to SEQ ID NO: 1599227
guucuaagcagcaucccag

SEQ ID NO: 1599229 - RNA, 19 nt, Artificial Sequence
  Description of Artificial Sequence: Synthetic oligonucleotide
  Sense strand starting at position 133 of SEQ ID NO: 1560426
ggaugcugcuuagaaccua

SEQ ID NO: 1599230 - RNA, 19 nt, Artificial Sequence
  Description of Artificial Sequence: Synthetic oligonucleotide
  Antisense strand to SEQ ID NO: 1599229
uagguucuaagcagcaucc

SEQ ID NO: 1599231 - RNA, 19 nt, Artificial Sequence
  Description of Artificial Sequence: Synthetic oligonucleotide
  Sense strand starting at position 182 of SEQ ID NO: 1560426
ggaggugacugaggucuaa

SEQ ID NO: 1599232 - RNA, 19 nt, Artificial Sequence
  Description of Artificial Sequence: Synthetic oligonucleotide
  Antisense strand to SEQ ID NO: 1599231
uuagaccucagucaccucc

SEQ ID NO: 1599233 - RNA, 19 nt, Artificial Sequence
  Description of Artificial Sequence: Synthetic oligonucleotide
  Sense strand starting at position 390 of SEQ ID NO: 1560426
ggucaagcugcagaaagau

SEQ ID NO: 1599234 - RNA, 19 nt, Artificial Sequence
  Description of Artificial Sequence: Synthetic oligonucleotide
  Antisense strand to SEQ ID NO: 1599233
aucuuucugcagcuugacc

SEQ ID NO: 1599235 - RNA, 19 nt, Artificial Sequence
  Description of Artificial Sequence: Synthetic oligonucleotide
  Sense strand starting at position 463 of SEQ ID NO: 1560426
aggagcuguucccagaaga

SEQ ID NO: 1599236 - RNA, 19 nt, Artificial Sequence
  Description of Artificial Sequence: Synthetic oligonucleotide
  Antisense strand to SEQ ID NO: 1599235
ucuucugggaacagcuccu

SEQ ID NO: 1599237 - RNA, 19 nt, Artificial Sequence
  Description of Artificial Sequence: Synthetic oligonucleotide
  Sense strand starting at position 676 of SEQ ID NO: 1560426
uccacuuucugccguaagu

SEQ ID NO: 1599238 - RNA, 19 nt, Artificial Sequence
  Description of Artificial Sequence: Synthetic oligonucleotide
  Antisense strand to SEQ ID NO: 1599237
acuuacggcagaaagugga

SEQ ID NO: 1599239 - RNA, 19 nt, Artificial Sequence
  Description of Artificial Sequence: Synthetic oligonucleotide
  Sense strand starting at position 678 of SEQ ID NO: 1560426
cacuuucugccguaaguua

SEQ ID NO: 1599240 - RNA, 19 nt, Artificial Sequence
  Description of Artificial Sequence: Synthetic oligonucleotide
  Antisense strand to SEQ ID NO: 1599239
uaacuuacggcagaaagug

SEQ ID NO: 1599241 - RNA, 19 nt, Artificial Sequence
  Description of Artificial Sequence: Synthetic oligonucleotide
  Sense strand starting at position 686 of SEQ ID NO: 1560426
gccguaaguuacucaggca

SEQ ID NO: 1599242 - RNA, 19 nt, Artificial Sequence
  Description of Artificial Sequence: Synthetic oligonucleotide
  Antisense strand to SEQ ID NO: 1599241
ugccugaguaacuuacggc

SEQ ID NO: 1599243 - RNA, 19 nt, Artificial Sequence
  Description of Artificial Sequence: Synthetic oligonucleotide
  Sense strand starting at position 775 of SEQ ID NO: 1560426
ccaccaguaucagugauca

SEQ ID NO: 1599244 - RNA, 19 nt, Artificial Sequence
  Description of Artificial Sequence: Synthetic oligonucleotide
  Antisense strand to SEQ ID NO: 1599243
ugaucacugauacuggugg

SEQ ID NO: 1599245 - RNA, 19 nt, Artificial Sequence
  Description of Artificial Sequence: Synthetic oligonucleotide
  Sense strand starting at position 815 of SEQ ID NO: 1560426
cgcccaugauuugcucaaa

SEQ ID NO: 1599246 - RNA, 19 nt, Artificial Sequence
  Description of Artificial Sequence: Synthetic oligonucleotide
  Antisense strand to SEQ ID NO: 1599245
uuugagcaaaucaugggcg

SEQ ID NO: 1599247 - RNA, 19 nt, Artificial Sequence
  Description of Artificial Sequence: Synthetic oligonucleotide
  Sense strand starting at position 860 of SEQ ID NO: 1560426
acaggugucuucugcagga

SEQ ID NO: 1599248 - RNA, 19 nt, Artificial Sequence
  Description of Artificial Sequence: Synthetic oligonucleotide
  Antisense strand to SEQ ID NO: 1599247
uccugcagaagacaccugu

SEQ ID NO: 1599249 - RNA, 19 nt, Artificial Sequence
  Description of Artificial Sequence: Synthetic oligonucleotide
  Sense strand starting at position 862 of SEQ ID NO: 1560426
aggugucuucugcaggaau

SEQ ID NO: 1599250 - RNA, 19 nt, Artificial Sequence
  Description of Artificial Sequence: Synthetic oligonucleotide
  Antisense strand to SEQ ID NO: 1599249
auuccugcagaagacaccu

SEQ ID NO: 1599251 - RNA, 19 nt, Artificial Sequence
  Description of Artificial Sequence: Synthetic oligonucleotide
  Sense strand starting at position 864 of SEQ ID NO: 1560426
gugucuucugcaggaauca

SEQ ID NO: 1599252 - RNA, 19 nt, Artificial Sequence
  Description of Artificial Sequence: Synthetic oligonucleotide
  Antisense strand to SEQ ID NO: 1599251
ugauuccugcagaagacac

SEQ ID NO: 1599253 - RNA, 19 nt, Artificial Sequence
  Description of Artificial Sequence: Synthetic oligonucleotide
  Sense strand starting at position 2382 of SEQ ID NO: 1560426
gcaacaagaucacguaaga

SEQ ID NO: 1599254 - RNA, 19 nt, Artificial Sequence
  Description of Artificial Sequence: Synthetic oligonucleotide
  Antisense strand to SEQ ID NO: 1599253
ucuuacgugaucuuguugc

SEQ ID NO: 1599255 - RNA, 19 nt, Artificial Sequence
  Description of Artificial Sequence: Synthetic oligonucleotide
  Sense strand starting at position 2392 of SEQ ID NO: 1560426
cacguaagaccuuguaagu

SEQ ID NO: 1599256 - RNA, 19 nt, Artificial Sequence
  Description of Artificial Sequence: Synthetic oligonucleotide
  Antisense strand to SEQ ID NO: 1599255
acuuacaaggucuuacgug

SEQ ID NO: 1599257 - RNA, 19 nt, Artificial Sequence
  Description of Artificial Sequence: Synthetic oligonucleotide
  Sense strand starting at position 2401 of SEQ ID NO: 1560426
ccuuguaagucauuguaag

SEQ ID NO: 1599258 - RNA, 19 nt, Artificial Sequence
  Description of Artificial Sequence: Synthetic oligonucleotide
  Antisense strand to SEQ ID NO: 1599257
cuuacaaugacuuacaagg

SEQ ID NO: 1599259 - RNA, 19 nt, Artificial Sequence
  Description of Artificial Sequence: Synthetic oligonucleotide
  Sense strand starting at position 2402 of SEQ ID NO: 1560426
cuuguaagucauuguaaga

SEQ ID NO: 1599260 - RNA, 19 nt, Artificial Sequence
  Description of Artificial Sequence: Synthetic oligonucleotide
  Antisense strand to SEQ ID NO: 1599259
ucuuacaaugacuuacaag

SEQ ID NO: 1599261 - RNA, 19 nt, Artificial Sequence
  Description of Artificial Sequence: Synthetic oligonucleotide
  Sense strand starting at position 2432 of SEQ ID NO: 1560426
gggcacuccugccuauaau

SEQ ID NO: 1599262 - RNA, 19 nt, Artificial Sequence
  Description of Artificial Sequence: Synthetic oligonucleotide
  Antisense strand to SEQ ID NO: 1599261
auuauaggcaggagugccc

SEQ ID NO: 1599263 - RNA, 19 nt, Artificial Sequence
  Description of Artificial Sequence: Synthetic oligonucleotide
  Sense strand starting at position 2433 of SEQ ID NO: 1560426
ggcacuccugccuauaauc

SEQ ID NO: 1599264 - RNA, 19 nt, Artificial Sequence
  Description of Artificial Sequence: Synthetic oligonucleotide
  Antisense strand to SEQ ID NO: 1599263
gauuauaggcaggagugcc

SEQ ID NO: 1599265 - RNA, 19 nt, Artificial Sequence
  Description of Artificial Sequence: Synthetic oligonucleotide
  Sense strand starting at position 2629 of SEQ ID NO: 1560426
guuagaggcugccgugauu

SEQ ID NO: 1599266 - RNA, 19 nt, Artificial Sequence
  Description of Artificial Sequence: Synthetic oligonucleotide
  Antisense strand to SEQ ID NO: 1599265
aaucacggcagccucuaac

SEQ ID NO: 1599267 - RNA, 19 nt, Artificial Sequence
  Description of Artificial Sequence: Synthetic oligonucleotide
  Sense strand starting at position 2641 of SEQ ID NO: 1560426
cgugauuaccaccacugua

SEQ ID NO: 1599268 - RNA, 19 nt, Artificial Sequence
  Description of Artificial Sequence: Synthetic oligonucleotide
  Antisense strand to SEQ ID NO: 1599267
uacaguggugguaaucacg

SEQ ID NO: 1599269 - RNA, 19 nt, Artificial Sequence
  Description of Artificial Sequence: Synthetic oligonucleotide
  Sense strand starting at position 2743 of SEQ ID NO: 1560426
agaaauaaguggucacuga

SEQ ID NO: 1599270 - RNA, 19 nt, Artificial Sequence
  Description of Artificial Sequence: Synthetic oligonucleotide
  Antisense strand to SEQ ID NO: 1599269
ucagugaccacuuauuucu

SEQ ID NO: 1599271 - RNA, 19 nt, Artificial Sequence
  Description of Artificial Sequence: Synthetic oligonucleotide
  Sense strand starting at position 2862 of SEQ ID NO: 1560426
ccugguagugcugaacagu

SEQ ID NO: 1599272 - RNA, 19 nt, Artificial Sequence
  Description of Artificial Sequence: Synthetic oligonucleotide
  Antisense strand to SEQ ID NO: 1599271
acuguucagcacuaccagg

SEQ ID NO: 1599273 - RNA, 19 nt, Artificial Sequence
  Description of Artificial Sequence: Synthetic oligonucleotide
  Sense strand starting at position 2877 of SEQ ID NO: 1560426
caguaucuguucuacugga

SEQ ID NO: 1599274 - RNA, 19 nt, Artificial Sequence
  Description of Artificial Sequence: Synthetic oligonucleotide
  Antisense strand to SEQ ID NO: 1599273
uccaguagaacagauacug

SEQ ID NO: 1599275 - RNA, 19 nt, Artificial Sequence
  Description of Artificial Sequence: Synthetic oligonucleotide
  Sense strand starting at position 3244 of SEQ ID NO: 1560426
gccaguuacucaucuacac

SEQ ID NO: 1599276 - RNA, 19 nt, Artificial Sequence
  Description of Artificial Sequence: Synthetic oligonucleotide
  Antisense strand to SEQ ID NO: 1599275
guguagaugaguaacuggc

SEQ ID NO: 1599277 - RNA, 19 nt, Artificial Sequence
  Description of Artificial Sequence: Synthetic oligonucleotide
  Sense strand starting at position 3357 of SEQ ID NO: 1560426
cccugugauuccucagaug

SEQ ID NO: 1599278 - RNA, 19 nt, Artificial Sequence
  Description of Artificial Sequence: Synthetic oligonucleotide
  Antisense strand to SEQ ID NO: 1599277
caucugaggaaucacaggg

SEQ ID NO: 1599279 - RNA, 19 nt, Artificial Sequence
  Description of Artificial Sequence: Synthetic oligonucleotide
  Sense strand starting at position 3360 of SEQ ID NO: 1560426
ugugauuccucagaugacu

SEQ ID NO: 1599280 - RNA, 19 nt, Artificial Sequence
  Description of Artificial Sequence: Synthetic oligonucleotide
  Antisense strand to SEQ ID NO: 1599279
agucaucugaggaaucaca

SEQ ID NO: 1599281 - RNA, 19 nt, Artificial Sequence
  Description of Artificial Sequence: Synthetic oligonucleotide
  Sense strand starting at position 3371 of SEQ ID NO: 1560426
agaugacucuagcccaaua

SEQ ID NO: 1599282 - RNA, 19 nt, Artificial Sequence
  Description of Artificial Sequence: Synthetic oligonucleotide
  Antisense strand to SEQ ID NO: 1599281
uauugggcuagagucaucu

SEQ ID NO: 1599283 - RNA, 19 nt, Artificial Sequence
  Description of Artificial Sequence: Synthetic oligonucleotide
  Sense strand starting at position 3477 of SEQ ID NO: 1560426
acacgaucuugucucacua

SEQ ID NO: 1599284 - RNA, 19 nt, Artificial Sequence
  Description of Artificial Sequence: Synthetic oligonucleotide
  Antisense strand to SEQ ID NO: 1599283
uagugagacaagaucgugu

SEQ ID NO: 1599285 - RNA, 19 nt, Artificial Sequence
  Description of Artificial Sequence: Synthetic oligonucleotide
  Sense strand starting at position 3655 of SEQ ID NO: 1560426
ucucgaauccuugggugca

SEQ ID NO: 1599286 - RNA, 19 nt, Artificial Sequence
  Description of Artificial Sequence: Synthetic oligonucleotide
  Antisense strand to SEQ ID NO: 1599285
ugcacccaaggauucgaga

SEQ ID NO: 1599287 - RNA, 19 nt, Artificial Sequence
  Description of Artificial Sequence: Synthetic oligonucleotide
  Sense strand starting at position 3656 of SEQ ID NO: 1560426
cucgaauccuugggugcaa

SEQ ID NO: 1599288 - RNA, 19 nt, Artificial Sequence
  Description of Artificial Sequence: Synthetic oligonucleotide
  Antisense strand to SEQ ID NO: 1599287
uugcacccaaggauucgag

SEQ ID NO: 1599289 - RNA, 19 nt, Artificial Sequence
  Description of Artificial Sequence: Synthetic oligonucleotide
  Sense strand starting at position 3786 of SEQ ID NO: 1560426
ggcuguuguucuuugucua

SEQ ID NO: 1599290 - RNA, 19 nt, Artificial Sequence
  Description of Artificial Sequence: Synthetic oligonucleotide
  Antisense strand to SEQ ID NO: 1599289
uagacaaagaacaacagcc

SEQ ID NO: 1599291 - RNA, 19 nt, Artificial Sequence
  Description of Artificial Sequence: Synthetic oligonucleotide
  Sense strand starting at position 3787 of SEQ ID NO: 1560426
gcuguuguucuuugucuaa

SEQ ID NO: 1599292 - RNA, 19 nt, Artificial Sequence
  Description of Artificial Sequence: Synthetic oligonucleotide
  Antisense strand to SEQ ID NO: 1599291
uuagacaaagaacaacagc

SEQ ID NO: 1599293 - RNA, 19 nt, Artificial Sequence
  Description of Artificial Sequence: Synthetic oligonucleotide
  Sense strand starting at position 3840 of SEQ ID NO: 1560426
cugaauccaucagagauga

SEQ ID NO: 1599294 - RNA, 19 nt, Artificial Sequence
  Description of Artificial Sequence: Synthetic oligonucleotide
  Antisense strand to SEQ ID NO: 1599293
ucaucucugauggauucag

SEQ ID NO: 1599295 - RNA, 19 nt, Artificial Sequence
  Description of Artificial Sequence: Synthetic oligonucleotide
  Sense strand starting at position 3913 of SEQ ID NO: 1560426
agcagaaagucucugcuuu

SEQ ID NO: 1599296 - RNA, 19 nt, Artificial Sequence
  Description of Artificial Sequence: Synthetic oligonucleotide
  Antisense strand to SEQ ID NO: 1599295
aaagcagagacuuucugcu

SEQ ID NO: 1599297 - RNA, 19 nt, Artificial Sequence
  Description of Artificial Sequence: Synthetic oligonucleotide
  Sense strand starting at position 3936 of SEQ ID NO: 1560426
gguguuaagcugccuguca

SEQ ID NO: 1599298 - RNA, 19 nt, Artificial Sequence
  Description of Artificial Sequence: Synthetic oligonucleotide
  Antisense strand to SEQ ID NO: 1599297
ugacaggcagcuuaacacc

SEQ ID NO: 1599299 - RNA, 19 nt, Artificial Sequence
  Description of Artificial Sequence: Synthetic oligonucleotide
  Sense strand starting at position 3938 of SEQ ID NO: 1560426
uguuaagcugccugucaga

SEQ ID NO: 1599300 - RNA, 19 nt, Artificial Sequence
  Description of Artificial Sequence: Synthetic oligonucleotide
  Antisense strand to SEQ ID NO: 1599299
ucugacaggcagcuuaaca

SEQ ID NO: 1599301 - RNA, 19 nt, Artificial Sequence
  Description of Artificial Sequence: Synthetic oligonucleotide
  Sense strand starting at position 31 of SEQ ID NO: 1560427
ccaggaaacugcuacuguu

SEQ ID NO: 1599302 - RNA, 19 nt, Artificial Sequence
  Description of Artificial Sequence: Synthetic oligonucleotide
  Antisense strand to SEQ ID NO: 1599301
aacaguagcaguuuccugg

SEQ ID NO: 1599303 - RNA, 19 nt, Artificial Sequence
  Description of Artificial Sequence: Synthetic oligonucleotide
  Sense strand starting at position 58 of SEQ ID NO: 1560427
gagggcaguccuggaaauc

SEQ ID NO: 1599304 - RNA, 19 nt, Artificial Sequence
  Description of Artificial Sequence: Synthetic oligonucleotide
  Antisense strand to SEQ ID NO: 1599303
gauuuccaggacugcccuc

SEQ ID NO: 1599305 - RNA, 19 nt, Artificial Sequence
  Description of Artificial Sequence: Synthetic oligonucleotide
  Sense strand starting at position 100 of SEQ ID NO: 1560427
gggagugagucuugguuac

SEQ ID NO: 1599306 - RNA, 19 nt, Artificial Sequence
  Description of Artificial Sequence: Synthetic oligonucleotide
  Antisense strand to SEQ ID NO: 1599305
guaaccaagacucacuccc

SEQ ID NO: 1599307 - RNA, 19 nt, Artificial Sequence
  Description of Artificial Sequence: Synthetic oligonucleotide
  Sense strand starting at position 102 of SEQ ID NO: 1560427
gagugagucuugguuacuc

SEQ ID NO: 1599308 - RNA, 19 nt, Artificial Sequence
  Description of Artificial Sequence: Synthetic oligonucleotide
  Antisense strand to SEQ ID NO: 1599307
gaguaaccaagacucacuc

SEQ ID NO: 1599309 - RNA, 19 nt, Artificial Sequence
  Description of Artificial Sequence: Synthetic oligonucleotide
  Sense strand starting at position 176 of SEQ ID NO: 1560427
ugcuccugccucugacaaa

SEQ ID NO: 1599310 - RNA, 19 nt, Artificial Sequence
  Description of Artificial Sequence: Synthetic oligonucleotide
  Antisense strand to SEQ ID NO: 1599309
uuugucagaggcaggagca

SEQ ID NO: 1599311 - RNA, 19 nt, Artificial Sequence
  Description of Artificial Sequence: Synthetic oligonucleotide
  Sense strand starting at position 179 of SEQ ID NO: 1560427
uccugccucugacaaagaa

SEQ ID NO: 1599312 - RNA, 19 nt, Artificial Sequence
  Description of Artificial Sequence: Synthetic oligonucleotide
  Antisense strand to SEQ ID NO: 1599311
uucuuugucagaggcagga

SEQ ID NO: 1599313 - RNA, 19 nt, Artificial Sequence
  Description of Artificial Sequence: Synthetic oligonucleotide
  Sense strand starting at position 201 of SEQ ID NO: 1560427
gggcccuuggguuacagau

SEQ ID NO: 1599314 - RNA, 19 nt, Artificial Sequence
  Description of Artificial Sequence: Synthetic oligonucleotide
  Antisense strand to SEQ ID NO: 1599313
aucuguaacccaagggccc

SEQ ID NO: 1599315 - RNA, 19 nt, Artificial Sequence
  Description of Artificial Sequence: Synthetic oligonucleotide
  Sense strand starting at position 803 of SEQ ID NO: 1560427
uagcacauccuguguaaga

SEQ ID NO: 1599316 - RNA, 19 nt, Artificial Sequence
  Description of Artificial Sequence: Synthetic oligonucleotide
  Antisense strand to SEQ ID NO: 1599315
ucuuacacaggaugugcua

SEQ ID NO: 1599317 - RNA, 19 nt, Artificial Sequence
  Description of Artificial Sequence: Synthetic oligonucleotide
  Sense strand starting at position 805 of SEQ ID NO: 1560427
gcacauccuguguaagaca

SEQ ID NO: 1599318 - RNA, 19 nt, Artificial Sequence
  Description of Artificial Sequence: Synthetic oligonucleotide
  Antisense strand to SEQ ID NO: 1599317
ugucuuacacaggaugugc

SEQ ID NO: 1599319 - RNA, 19 nt, Artificial Sequence
  Description of Artificial Sequence: Synthetic oligonucleotide
  Sense strand starting at position 813 of SEQ ID NO: 1560427
uguguaagacaucauuacu

SEQ ID NO: 1599320 - RNA, 19 nt, Artificial Sequence
  Description of Artificial Sequence: Synthetic oligonucleotide
  Antisense strand to SEQ ID NO: 1599319
aguaaugaugucuuacaca

SEQ ID NO: 1599321 - RNA, 19 nt, Artificial Sequence
  Description of Artificial Sequence: Synthetic oligonucleotide
  Sense strand starting at position 864 of SEQ ID NO: 1560427
gaugacgggacuuguacaa

SEQ ID NO: 1599322 - RNA, 19 nt, Artificial Sequence
  Description of Artificial Sequence: Synthetic oligonucleotide
  Antisense strand to SEQ ID NO: 1599321
uuguacaagucccgucauc

SEQ ID NO: 1599323 - RNA, 19 nt, Artificial Sequence
  Description of Artificial Sequence: Synthetic oligonucleotide
  Sense strand starting at position 933 of SEQ ID NO: 1560427
cgugcucuccuccagcaaa

SEQ ID NO: 1599324 - RNA, 19 nt, Artificial Sequence
  Description of Artificial Sequence: Synthetic oligonucleotide
  Antisense strand to SEQ ID NO: 1599323
uuugcuggaggagagcacg

SEQ ID NO: 1599325 - RNA, 19 nt, Artificial Sequence
  Description of Artificial Sequence: Synthetic oligonucleotide
  Sense strand starting at position 1032 of SEQ ID NO: 1560427
gagagccauugguguagaa

SEQ ID NO: 1599326 - RNA, 19 nt, Artificial Sequence
  Description of Artificial Sequence: Synthetic oligonucleotide
  Antisense strand to SEQ ID NO: 1599325
uucuacaccaauggcucuc

SEQ ID NO: 1599327 - RNA, 19 nt, Artificial Sequence
  Description of Artificial Sequence: Synthetic oligonucleotide
  Sense strand starting at position 1034 of SEQ ID NO: 1560427
gagccauugguguagaaac

SEQ ID NO: 1599328 - RNA, 19 nt, Artificial Sequence
  Description of Artificial Sequence: Synthetic oligonucleotide
  Antisense strand to SEQ ID NO: 1599327
guuucuacaccaauggcuc

SEQ ID NO: 1599329 - RNA, 19 nt, Artificial Sequence
  Description of Artificial Sequence: Synthetic oligonucleotide
  Sense strand starting at position 1275 of SEQ ID NO: 1560427
cgaccucuguucugagaac

SEQ ID NO: 1599330 - RNA, 19 nt, Artificial Sequence
  Description of Artificial Sequence: Synthetic oligonucleotide
  Antisense strand to SEQ ID NO: 1599329
guucucagaacagaggucg

SEQ ID NO: 1599331 - RNA, 19 nt, Artificial Sequence
  Description of Artificial Sequence: Synthetic oligonucleotide
  Sense strand starting at position 1415 of SEQ ID NO: 1560427
uugagcucccagcaauauu

SEQ ID NO: 1599332 - RNA, 19 nt, Artificial Sequence
  Description of Artificial Sequence: Synthetic oligonucleotide
  Antisense strand to SEQ ID NO: 1599331
aauauugcugggagcucaa

SEQ ID NO: 1599333 - RNA, 19 nt, Artificial Sequence
  Description of Artificial Sequence: Synthetic oligonucleotide
  Sense strand starting at position 1454 of SEQ ID NO: 1560427
ccauuaagugcccagagga

SEQ ID NO: 1599334 - RNA, 19 nt, Artificial Sequence
  Description of Artificial Sequence: Synthetic oligonucleotide
  Antisense strand to SEQ ID NO: 1599333
uccucugggcacuuaaugg

SEQ ID NO: 1599335 - RNA, 19 nt, Artificial Sequence
  Description of Artificial Sequence: Synthetic oligonucleotide
  Sense strand starting at position 1778 of SEQ ID NO: 1560427
gcuucuccgagacaaaguu

SEQ ID NO: 1599336 - RNA, 19 nt, Artificial Sequence
  Description of Artificial Sequence: Synthetic oligonucleotide
  Antisense strand to SEQ ID NO: 1599335
aacuuugucucggagaagc

SEQ ID NO: 1599337 - RNA, 19 nt, Artificial Sequence
  Description of Artificial Sequence: Synthetic oligonucleotide
  Sense strand starting at position 2119 of SEQ ID NO: 1560427
accgguuccgaaugggaga

SEQ ID NO: 1599338 - RNA, 19 nt, Artificial Sequence
  Description of Artificial Sequence: Synthetic oligonucleotide
  Antisense strand to SEQ ID NO: 1599337
ucucccauucggaaccggu

SEQ ID NO: 1599339 - RNA, 19 nt, Artificial Sequence
  Description of Artificial Sequence: Synthetic oligonucleotide
  Sense strand starting at position 2177 of SEQ ID NO: 1560427
cuauaaagauuguccggau

SEQ ID NO: 1599340 - RNA, 19 nt, Artificial Sequence
  Description of Artificial Sequence: Synthetic oligonucleotide
  Antisense strand to SEQ ID NO: 1599339
auccggacaaucuuuauag

SEQ ID NO: 1599341 - RNA, 19 nt, Artificial Sequence
  Description of Artificial Sequence: Synthetic oligonucleotide
  Sense strand starting at position 2178 of SEQ ID NO: 1560427
uauaaagauuguccggaug

SEQ ID NO: 1599342 - RNA, 19 nt, Artificial Sequence
  Description of Artificial Sequence: Synthetic oligonucleotide
  Antisense strand to SEQ ID NO: 1599341
cauccggacaaucuuuaua

SEQ ID NO: 1599343 - RNA, 19 nt, Artificial Sequence
  Description of Artificial Sequence: Synthetic oligonucleotide
  Sense strand starting at position 2180 of SEQ ID NO: 1560427
uaaagauuguccggaugug

SEQ ID NO: 1599344 - RNA, 19 nt, Artificial Sequence
  Description of Artificial Sequence: Synthetic oligonucleotide
  Antisense strand to SEQ ID NO: 1599343
cacauccggacaaucuuua

SEQ ID NO: 1599345 - RNA, 19 nt, Artificial Sequence
  Description of Artificial Sequence: Synthetic oligonucleotide
  Sense strand starting at position 2181 of SEQ ID NO: 1560427
aaagauuguccggauguga

SEQ ID NO: 1599346 - RNA, 19 nt, Artificial Sequence
  Description of Artificial Sequence: Synthetic oligonucleotide
  Antisense strand to SEQ ID NO: 1599345
ucacauccggacaaucuuu

SEQ ID NO: 1599347 - RNA, 19 nt, Artificial Sequence
  Description of Artificial Sequence: Synthetic oligonucleotide
  Sense strand starting at position 2185 of SEQ ID NO: 1560427
auuguccggaugugauuua

SEQ ID NO: 1599348 - RNA, 19 nt, Artificial Sequence
  Description of Artificial Sequence: Synthetic oligonucleotide
  Antisense strand to SEQ ID NO: 1599347
uaaaucacauccggacaau

SEQ ID NO: 1599349 - RNA, 19 nt, Artificial Sequence
  Description of Artificial Sequence: Synthetic oligonucleotide
  Sense strand starting at position 2205 of SEQ ID NO: 1560427
ugagcaguuuaucuaacca

SEQ ID NO: 1599350 - RNA, 19 nt, Artificial Sequence
  Description of Artificial Sequence: Synthetic oligonucleotide
  Antisense strand to SEQ ID NO: 1599349
ugguuagauaaacugcuca

SEQ ID NO: 1599351 - RNA, 19 nt, Artificial Sequence
  Description of Artificial Sequence: Synthetic oligonucleotide
  Sense strand starting at position 2217 of SEQ ID NO: 1560427
cuaaccaauugucauggau

SEQ ID NO: 1599352 - RNA, 19 nt, Artificial Sequence
  Description of Artificial Sequence: Synthetic oligonucleotide
  Antisense strand to SEQ ID NO: 1599351
auccaugacaauugguuag

SEQ ID NO: 1599353 - RNA, 19 nt, Artificial Sequence
  Description of Artificial Sequence: Synthetic oligonucleotide
  Sense strand starting at position 2274 of SEQ ID NO: 1560427
ucuuaacuguccgggacua

SEQ ID NO: 1599354 - RNA, 19 nt, Artificial Sequence
  Description of Artificial Sequence: Synthetic oligonucleotide
  Antisense strand to SEQ ID NO: 1599353
uagucccggacaguuaaga

SEQ ID NO: 1599355 - RNA, 19 nt, Artificial Sequence
  Description of Artificial Sequence: Synthetic oligonucleotide
  Sense strand starting at position 2276 of SEQ ID NO: 1560427
uuaacuguccgggacuaca

SEQ ID NO: 1599356 - RNA, 19 nt, Artificial Sequence
  Description of Artificial Sequence: Synthetic oligonucleotide
  Antisense strand to SEQ ID NO: 1599355
uguagucccggacaguuaa

SEQ ID NO: 1599357 - RNA, 19 nt, Artificial Sequence
  Description of Artificial Sequence: Synthetic oligonucleotide
  Sense strand starting at position 2378 of SEQ ID NO: 1560427
cucuucuugagccagggau

SEQ ID NO: 1599358 - RNA, 19 nt, Artificial Sequence
  Description of Artificial Sequence: Synthetic oligonucleotide
  Antisense strand to SEQ ID NO: 1599357
aucccuggcucaagaagag

SEQ ID NO: 1599359 - RNA, 19 nt, Artificial Sequence
  Description of Artificial Sequence: Synthetic oligonucleotide
  Sense strand starting at position 2661 of SEQ ID NO: 1560427
ucugcaaguugaguccuaa

SEQ ID NO: 1599360 - RNA, 19 nt, Artificial Sequence
  Description of Artificial Sequence: Synthetic oligonucleotide
  Antisense strand to SEQ ID NO: 1599359
uuaggacucaacuugcaga

SEQ ID NO: 1599361 - RNA, 19 nt, Artificial Sequence
  Description of Artificial Sequence: Synthetic oligonucleotide
  Sense strand starting at position 2727 of SEQ ID NO: 1560427
gaggcuuaaucucugguuu

SEQ ID NO: 1599362 - RNA, 19 nt, Artificial Sequence
  Description of Artificial Sequence: Synthetic oligonucleotide
  Antisense strand to SEQ ID NO: 1599361
aaaccagagauuaagccuc

SEQ ID NO: 1599363 - RNA, 19 nt, Artificial Sequence
  Description of Artificial Sequence: Synthetic oligonucleotide
  Sense strand starting at position 2728 of SEQ ID NO: 1560427
aggcuuaaucucugguuua

SEQ ID NO: 1599364 - RNA, 19 nt, Artificial Sequence
  Description of Artificial Sequence: Synthetic oligonucleotide
  Antisense strand to SEQ ID NO: 1599363
uaaaccagagauuaagccu

SEQ ID NO: 1599365 - RNA, 19 nt, Artificial Sequence
  Description of Artificial Sequence: Synthetic oligonucleotide
  Sense strand starting at position 2729 of SEQ ID NO: 1560427
ggcuuaaucucugguuuag

SEQ ID NO: 1599366 - RNA, 19 nt, Artificial Sequence
  Description of Artificial Sequence: Synthetic oligonucleotide
  Antisense strand to SEQ ID NO: 1599365
cuaaaccagagauuaagcc

SEQ ID NO: 1599367 - RNA, 19 nt, Artificial Sequence
  Description of Artificial Sequence: Synthetic oligonucleotide
  Sense strand starting at position 2802 of SEQ ID NO: 1560427
ugcuaauccuucugguuaa

SEQ ID NO: 1599368 - RNA, 19 nt, Artificial Sequence
  Description of Artificial Sequence: Synthetic oligonucleotide
  Antisense strand to SEQ ID NO: 1599367
uuaaccagaaggauuagca

SEQ ID NO: 1599369 - RNA, 19 nt, Artificial Sequence
  Description of Artificial Sequence: Synthetic oligonucleotide
  Sense strand starting at position 2803 of SEQ ID NO: 1560427
gcuaauccuucugguuaag

SEQ ID NO: 1599370 - RNA, 19 nt, Artificial Sequence
  Description of Artificial Sequence: Synthetic oligonucleotide
  Antisense strand to SEQ ID NO: 1599369
cuuaaccagaaggauuagc

SEQ ID NO: 1599371 - RNA, 19 nt, Artificial Sequence
  Description of Artificial Sequence: Synthetic oligonucleotide
  Sense strand starting at position 2880 of SEQ ID NO: 1560427
caguuugagucucugagca

SEQ ID NO: 1599372 - RNA, 19 nt, Artificial Sequence
  Description of Artificial Sequence: Synthetic oligonucleotide
  Antisense strand to SEQ ID NO: 1599371
ugcucagagacucaaacug

SEQ ID NO: 1599373 - RNA, 19 nt, Artificial Sequence
  Description of Artificial Sequence: Synthetic oligonucleotide
  Sense strand starting at position 2882 of SEQ ID NO: 1560427
guuugagucucugagcaga

SEQ ID NO: 1599374 - RNA, 19 nt, Artificial Sequence
  Description of Artificial Sequence: Synthetic oligonucleotide
  Antisense strand to SEQ ID NO: 1599373
ucugcucagagacucaaac

SEQ ID NO: 1599375 - RNA, 19 nt, Artificial Sequence
  Description of Artificial Sequence: Synthetic oligonucleotide
  Sense strand starting at position 3022 of SEQ ID NO: 1560427
caggucucagcagagacau

SEQ ID NO: 1599376 - RNA, 19 nt, Artificial Sequence
  Description of Artificial Sequence: Synthetic oligonucleotide
  Antisense strand to SEQ ID NO: 1599375
augucucugcugagaccug

SEQ ID NO: 1599377 - RNA, 19 nt, Artificial Sequence
  Description of Artificial Sequence: Synthetic oligonucleotide
  Sense strand starting at position 3610 of SEQ ID NO: 1560427
agaccauuagugggacgaa

SEQ ID NO: 1599378 - RNA, 19 nt, Artificial Sequence
  Description of Artificial Sequence: Synthetic oligonucleotide
  Antisense strand to SEQ ID NO: 1599377
uucgucccacuaauggucu

SEQ ID NO: 1599379 - RNA, 19 nt, Artificial Sequence
  Description of Artificial Sequence: Synthetic oligonucleotide
  Sense strand starting at position 3884 of SEQ ID NO: 1560427
guggcaacguugcuuuaaa

SEQ ID NO: 1599380 - RNA, 19 nt, Artificial Sequence
  Description of Artificial Sequence: Synthetic oligonucleotide
  Antisense strand to SEQ ID NO: 1599379
uuuaaagcaacguugccac

SEQ ID NO: 1599381 - RNA, 19 nt, Artificial Sequence
  Description of Artificial Sequence: Synthetic oligonucleotide
  Sense strand starting at position 88 of SEQ ID NO: 1560428
acaaauuacccagguagca

SEQ ID NO: 1599382 - RNA, 19 nt, Artificial Sequence
  Description of Artificial Sequence: Synthetic oligonucleotide
  Antisense strand to SEQ ID NO: 1599381
ugcuaccuggguaauuugu

SEQ ID NO: 1599383 - RNA, 19 nt, Artificial Sequence
  Description of Artificial Sequence: Synthetic oligonucleotide
  Sense strand starting at position 2567 of SEQ ID NO: 1560428
gacagagucuccuuauguc

SEQ ID NO: 1599384 - RNA, 19 nt, Artificial Sequence
  Description of Artificial Sequence: Synthetic oligonucleotide
  Antisense strand to SEQ ID NO: 1599383
gacauaaggagacucuguc

SEQ ID NO: 1599385 - RNA, 19 nt, Artificial Sequence
  Description of Artificial Sequence: Synthetic oligonucleotide
  Sense strand starting at position 2649 of SEQ ID NO: 1560428
cuggacauaacucguguaa

SEQ ID NO: 1599386 - RNA, 19 nt, Artificial Sequence
  Description of Artificial Sequence: Synthetic oligonucleotide
  Antisense strand to SEQ ID NO: 1599385
uuacacgaguuauguccag

SEQ ID NO: 1599387 - RNA, 19 nt, Artificial Sequence
  Description of Artificial Sequence: Synthetic oligonucleotide
  Sense strand starting at position 2651 of SEQ ID NO: 1560428
ggacauaacucguguaaca

SEQ ID NO: 1599388 - RNA, 19 nt, Artificial Sequence
  Description of Artificial Sequence: Synthetic oligonucleotide
  Antisense strand to SEQ ID NO: 1599387
uguuacacgaguuaugucc

SEQ ID NO: 1599389 - RNA, 19 nt, Artificial Sequence
  Description of Artificial Sequence: Synthetic oligonucleotide
  Sense strand starting at position 2653 of SEQ ID NO: 1560428
acauaacucguguaacaaa

SEQ ID NO: 1599390 - RNA, 19 nt, Artificial Sequence
  Description of Artificial Sequence: Synthetic oligonucleotide
  Antisense strand to SEQ ID NO: 1599389
uuuguuacacgaguuaugu

SEQ ID NO: 1599391 - RNA, 19 nt, Artificial Sequence
  Description of Artificial Sequence: Synthetic oligonucleotide
  Sense strand starting at position 2688 of SEQ ID NO: 1560428
cuuacaucccagugagaga

SEQ ID NO: 1599392 - RNA, 19 nt, Artificial Sequence
  Description of Artificial Sequence: Synthetic oligonucleotide
  Antisense strand to SEQ ID NO: 1599391
ucucucacugggauguaag

SEQ ID NO: 1599393 - RNA, 19 nt, Artificial Sequence
  Description of Artificial Sequence: Synthetic oligonucleotide
  Sense strand starting at position 2702 of SEQ ID NO: 1560428
agagaugucagguguaaua

SEQ ID NO: 1599394 - RNA, 19 nt, Artificial Sequence
  Description of Artificial Sequence: Synthetic oligonucleotide
  Antisense strand to SEQ ID NO: 1599393
uauuacaccugacaucucu

SEQ ID NO: 1599395 - RNA, 19 nt, Artificial Sequence
  Description of Artificial Sequence: Synthetic oligonucleotide
  Sense strand starting at position 2704 of SEQ ID NO: 1560428
agaugucagguguaauaca

SEQ ID NO: 1599396 - RNA, 19 nt, Artificial Sequence
  Description of Artificial Sequence: Synthetic oligonucleotide
  Antisense strand to SEQ ID NO: 1599395
uguauuacaccugacaucu

SEQ ID NO: 1599397 - RNA, 19 nt, Artificial Sequence
  Description of Artificial Sequence: Synthetic oligonucleotide
  Sense strand starting at position 2750 of SEQ ID NO: 1560428
gcuuuagaagacuacaagu

SEQ ID NO: 1599398 - RNA, 19 nt, Artificial Sequence
  Description of Artificial Sequence: Synthetic oligonucleotide
  Antisense strand to SEQ ID NO: 1599397
acuuguagucuucuaaagc

SEQ ID NO: 1599399 - RNA, 19 nt, Artificial Sequence
  Description of Artificial Sequence: Synthetic oligonucleotide
  Sense strand starting at position 2759 of SEQ ID NO: 1560428
gacuacaaguguuauggaa

SEQ ID NO: 1599400 - RNA, 19 nt, Artificial Sequence
  Description of Artificial Sequence: Synthetic oligonucleotide
  Antisense strand to SEQ ID NO: 1599399
uuccauaacacuuguaguc

SEQ ID NO: 1599401 - RNA, 19 nt, Artificial Sequence
  Description of Artificial Sequence: Synthetic oligonucleotide
  Sense strand starting at position 3126 of SEQ ID NO: 1560428
gcugaagaaucacuuaaac

SEQ ID NO: 1599402 - RNA, 19 nt, Artificial Sequence
  Description of Artificial Sequence: Synthetic oligonucleotide
  Antisense strand to SEQ ID NO: 1599401
guuuaagugauucuucagc

SEQ ID NO: 1599403 - RNA, 19 nt, Artificial Sequence
  Description of Artificial Sequence: Synthetic oligonucleotide
  Sense strand starting at position 3733 of SEQ ID NO: 1560428
uaaugagauggagguucuu

SEQ ID NO: 1599404 - RNA, 19 nt, Artificial Sequence
  Description of Artificial Sequence: Synthetic oligonucleotide
  Antisense strand to SEQ ID NO: 1599403
aagaaccuccaucucauua

SEQ ID NO: 1599405 - RNA, 19 nt, Artificial Sequence
  Description of Artificial Sequence: Synthetic oligonucleotide
  Sense strand starting at position 3754 of SEQ ID NO: 1560428
aacuuuggauaaugucaga

SEQ ID NO: 1599406 - RNA, 19 nt, Artificial Sequence
  Description of Artificial Sequence: Synthetic oligonucleotide
  Antisense strand to SEQ ID NO: 1599405
ucugacauuauccaaaguu

SEQ ID NO: 1599407 - RNA, 19 nt, Artificial Sequence
  Description of Artificial Sequence: Synthetic oligonucleotide
  Sense strand starting at position 3757 of SEQ ID NO: 1560428
uuuggauaaugucagagua

SEQ ID NO: 1599408 - RNA, 19 nt, Artificial Sequence
  Description of Artificial Sequence: Synthetic oligonucleotide
  Antisense strand to SEQ ID NO: 1599407
uacucugacauuauccaaa

SEQ ID NO: 1599409 - RNA, 19 nt, Artificial Sequence
  Description of Artificial Sequence: Synthetic oligonucleotide
  Sense strand starting at position 3759 of SEQ ID NO: 1560428
uggauaaugucagaguaac

SEQ ID NO: 1599410 - RNA, 19 nt, Artificial Sequence
  Description of Artificial Sequence: Synthetic oligonucleotide
  Antisense strand to SEQ ID NO: 1599409
guuacucugacauuaucca

SEQ ID NO: 1599411 - RNA, 19 nt, Artificial Sequence
  Description of Artificial Sequence: Synthetic oligonucleotide
  Sense strand starting at position 3769 of SEQ ID NO: 1560428
cagaguaacuuugucagac

SEQ ID NO: 1599412 - RNA, 19 nt, Artificial Sequence
  Description of Artificial Sequence: Synthetic oligonucleotide
  Antisense strand to SEQ ID NO: 1599411
gucugacaaaguuacucug

SEQ ID NO: 1599413 - RNA, 19 nt, Artificial Sequence
  Description of Artificial Sequence: Synthetic oligonucleotide
  Sense strand starting at position 3770 of SEQ ID NO: 1560428
agaguaacuuugucagaca

SEQ ID NO: 1599414 - RNA, 19 nt, Artificial Sequence
  Description of Artificial Sequence: Synthetic oligonucleotide
  Antisense strand to SEQ ID NO: 1599413
ugucugacaaaguuacucu

SEQ ID NO: 1599415 - RNA, 19 nt, Artificial Sequence
  Description of Artificial Sequence: Synthetic oligonucleotide
  Sense strand starting at position 3771 of SEQ ID NO: 1560428
gaguaacuuugucagacaa

SEQ ID NO: 1599416 - RNA, 19 nt, Artificial Sequence
  Description of Artificial Sequence: Synthetic oligonucleotide
  Antisense strand to SEQ ID NO: 1599415
uugucugacaaaguuacuc

SEQ ID NO: 1599417 - RNA, 19 nt, Artificial Sequence
  Description of Artificial Sequence: Synthetic oligonucleotide
  Sense strand starting at position 3773 of SEQ ID NO: 1560428
guaacuuugucagacaaau

SEQ ID NO: 1599418 - RNA, 19 nt, Artificial Sequence
  Description of Artificial Sequence: Synthetic oligonucleotide
  Antisense strand to SEQ ID NO: 1599417
auuugucugacaaaguuac

SEQ ID NO: 1599419 - RNA, 19 nt, Artificial Sequence
  Description of Artificial Sequence: Synthetic oligonucleotide
  Sense strand starting at position 138 of SEQ ID NO: 1560429
gagacugaagcuggaguua

SEQ ID NO: 1599420 - RNA, 19 nt, Artificial Sequence
  Description of Artificial Sequence: Synthetic oligonucleotide
  Antisense strand to SEQ ID NO: 1599419
uaacuccagcuucagucuc

SEQ ID NO: 1599421 - RNA, 19 nt, Artificial Sequence
  Description of Artificial Sequence: Synthetic oligonucleotide
  Sense strand starting at position 359 of SEQ ID NO: 1560429
ccaaauuaauccgacuuag

SEQ ID NO: 1599422 - RNA, 19 nt, Artificial Sequence
  Description of Artificial Sequence: Synthetic oligonucleotide
  Antisense strand to SEQ ID NO: 1599421
cuaagucggauuaauuugg

SEQ ID NO: 1599423 - RNA, 19 nt, Artificial Sequence
  Description of Artificial Sequence: Synthetic oligonucleotide
  Sense strand starting at position 369 of SEQ ID NO: 1560429
ccgacuuagugguagcaga

SEQ ID NO: 1599424 - RNA, 19 nt, Artificial Sequence
  Description of Artificial Sequence: Synthetic oligonucleotide
  Antisense strand to SEQ ID NO: 1599423
ucugcuaccacuaagucgg

SEQ ID NO: 1599425 - RNA, 19 nt, Artificial Sequence
  Description of Artificial Sequence: Synthetic oligonucleotide
  Sense strand starting at position 390 of SEQ ID NO: 1560429
aagccagcucuguggauuu

SEQ ID NO: 1599426 - RNA, 19 nt, Artificial Sequence
  Description of Artificial Sequence: Synthetic oligonucleotide
  Antisense strand to SEQ ID NO: 1599425
aaauccacagagcuggcuu

SEQ ID NO: 1599427 - RNA, 19 nt, Artificial Sequence
  Description of Artificial Sequence: Synthetic oligonucleotide
  Sense strand starting at position 568 of SEQ ID NO: 1560429
acugaaacgugccaagauu

SEQ ID NO: 1599428 - RNA, 19 nt, Artificial Sequence
  Description of Artificial Sequence: Synthetic oligonucleotide
  Antisense strand to SEQ ID NO: 1599427
aaucuuggcacguuucagu

SEQ ID NO: 1599429 - RNA, 19 nt, Artificial Sequence
  Description of Artificial Sequence: Synthetic oligonucleotide
  Sense strand starting at position 630 of SEQ ID NO: 1560429
gaccuuugauuggaaagau

SEQ ID NO: 1599430 - RNA, 19 nt, Artificial Sequence
  Description of Artificial Sequence: Synthetic oligonucleotide
  Antisense strand to SEQ ID NO: 1599429
aucuuuccaaucaaagguc

SEQ ID NO: 1599431 - RNA, 19 nt, Artificial Sequence
  Description of Artificial Sequence: Synthetic oligonucleotide
  Sense strand starting at position 639 of SEQ ID NO: 1560429
uuggaaagaucuggaauuc

SEQ ID NO: 1599432 - RNA, 19 nt, Artificial Sequence
  Description of Artificial Sequence: Synthetic oligonucleotide
  Antisense strand to SEQ ID NO: 1599431
gaauuccagaucuuuccaa

SEQ ID NO: 1599433 - RNA, 19 nt, Artificial Sequence
  Description of Artificial Sequence: Synthetic oligonucleotide
  Sense strand starting at position 721 of SEQ ID NO: 1560429
gguacuugaucauaggauu

SEQ ID NO: 1599434 - RNA, 19 nt, Artificial Sequence
  Description of Artificial Sequence: Synthetic oligonucleotide
  Antisense strand to SEQ ID NO: 1599433
aauccuaugaucaaguacc

SEQ ID NO: 1599435 - RNA, 19 nt, Artificial Sequence
  Description of Artificial Sequence: Synthetic oligonucleotide
  Sense strand starting at position 947 of SEQ ID NO: 1560429
ucuccacuucugcgccaaa

SEQ ID NO: 1599436 - RNA, 19 nt, Artificial Sequence
  Description of Artificial Sequence: Synthetic oligonucleotide
  Antisense strand to SEQ ID NO: 1599435
uuuggcgcagaaguggaga

SEQ ID NO: 1599437 - RNA, 19 nt, Artificial Sequence
  Description of Artificial Sequence: Synthetic oligonucleotide
  Sense strand starting at position 950 of SEQ ID NO: 1560429
ccacuucugcgccaaacaa

SEQ ID NO: 1599438 - RNA, 19 nt, Artificial Sequence
  Description of Artificial Sequence: Synthetic oligonucleotide
  Antisense strand to SEQ ID NO: 1599437
uuguuuggcgcagaagugg

SEQ ID NO: 1599439 - RNA, 19 nt, Artificial Sequence
  Description of Artificial Sequence: Synthetic oligonucleotide
  Sense strand starting at position 1018 of SEQ ID NO: 1560429
accgaugccucacagauau

SEQ ID NO: 1599440 - RNA, 19 nt, Artificial Sequence
  Description of Artificial Sequence: Synthetic oligonucleotide
  Antisense strand to SEQ ID NO: 1599439
auaucugugaggcaucggu

SEQ ID NO: 1599441 - RNA, 19 nt, Artificial Sequence
  Description of Artificial Sequence: Synthetic oligonucleotide
  Sense strand starting at position 1040 of SEQ ID NO: 1560429
agagcuauuccucagccua

SEQ ID NO: 1599442 - RNA, 19 nt, Artificial Sequence
  Description of Artificial Sequence: Synthetic oligonucleotide
  Antisense strand to SEQ ID NO: 1599441
uaggcugaggaauagcucu

SEQ ID NO: 1599443 - RNA, 19 nt, Artificial Sequence
  Description of Artificial Sequence: Synthetic oligonucleotide
  Sense strand starting at position 1042 of SEQ ID NO: 1560429
agcuauuccucagccuagu

SEQ ID NO: 1599444 - RNA, 19 nt, Artificial Sequence
  Description of Artificial Sequence: Synthetic oligonucleotide
  Antisense strand to SEQ ID NO: 1599443
acuaggcugaggaauagcu

SEQ ID NO: 1599445 - RNA, 19 nt, Artificial Sequence
  Description of Artificial Sequence: Synthetic oligonucleotide
  Sense strand starting at position 1107 of SEQ ID NO: 1560429
gcaggaaagaguuaauggu

SEQ ID NO: 1599446 - RNA, 19 nt, Artificial Sequence
  Description of Artificial Sequence: Synthetic oligonucleotide
  Antisense strand to SEQ ID NO: 1599445
accauuaacucuuuccugc

SEQ ID NO: 1599447 - RNA, 19 nt, Artificial Sequence
  Description of Artificial Sequence: Synthetic oligonucleotide
  Sense strand starting at position 1113 of SEQ ID NO: 1560429
aagaguuaauggugaccca

SEQ ID NO: 1599448 - RNA, 19 nt, Artificial Sequence
  Description of Artificial Sequence: Synthetic oligonucleotide
  Antisense strand to SEQ ID NO: 1599447
ugggucaccauuaacucuu

SEQ ID NO: 1599449 - RNA, 19 nt, Artificial Sequence
  Description of Artificial Sequence: Synthetic oligonucleotide
  Sense strand starting at position 1253 of SEQ ID NO: 1560429
cugggaucauggugucacu

SEQ ID NO: 1599450 - RNA, 19 nt, Artificial Sequence
  Description of Artificial Sequence: Synthetic oligonucleotide
  Antisense strand to SEQ ID NO: 1599449
agugacaccaugaucccag

SEQ ID NO: 1599451 - RNA, 19 nt, Artificial Sequence
  Description of Artificial Sequence: Synthetic oligonucleotide
  Sense strand starting at position 1256 of SEQ ID NO: 1560429
ggaucauggugucacuuag

SEQ ID NO: 1599452 - RNA, 19 nt, Artificial Sequence
  Description of Artificial Sequence: Synthetic oligonucleotide
  Antisense strand to SEQ ID NO: 1599451
cuaagugacaccaugaucc

SEQ ID NO: 1599453 - RNA, 19 nt, Artificial Sequence
  Description of Artificial Sequence: Synthetic oligonucleotide
  Sense strand starting at position 1499 of SEQ ID NO: 1560429
gagauagagucagagacau

SEQ ID NO: 1599454 - RNA, 19 nt, Artificial Sequence
  Description of Artificial Sequence: Synthetic oligonucleotide
  Antisense strand to SEQ ID NO: 1599453
augucucugacucuaucuc

SEQ ID NO: 1599455 - RNA, 19 nt, Artificial Sequence
  Description of Artificial Sequence: Synthetic oligonucleotide
  Sense strand starting at position 1700 of SEQ ID NO: 1560429
gagacaucaggcgggaguu

SEQ ID NO: 1599456 - RNA, 19 nt, Artificial Sequence
  Description of Artificial Sequence: Synthetic oligonucleotide
  Antisense strand to SEQ ID NO: 1599455
aacucccgccugaugucuc

SEQ ID NO: 1599457 - RNA, 19 nt, Artificial Sequence
  Description of Artificial Sequence: Synthetic oligonucleotide
  Sense strand starting at position 2137 of SEQ ID NO: 1560429
gggugaggcucaucugcua

SEQ ID NO: 1599458 - RNA, 19 nt, Artificial Sequence
  Description of Artificial Sequence: Synthetic oligonucleotide
  Antisense strand to SEQ ID NO: 1599457
uagcagaugagccucaccc

SEQ ID NO: 1599459 - RNA, 19 nt, Artificial Sequence
  Description of Artificial Sequence: Synthetic oligonucleotide
  Sense strand starting at position 2448 of SEQ ID NO: 1560429
gccugacucuuggucagac

SEQ ID NO: 1599460 - RNA, 19 nt, Artificial Sequence
  Description of Artificial Sequence: Synthetic oligonucleotide
  Antisense strand to SEQ ID NO: 1599459
gucugaccaagagucaggc

SEQ ID NO: 1599461 - RNA, 19 nt, Artificial Sequence
  Description of Artificial Sequence: Synthetic oligonucleotide
  Sense strand starting at position 2452 of SEQ ID NO: 1560429
gacucuuggucagaccuua

SEQ ID NO: 1599462 - RNA, 19 nt, Artificial Sequence
  Description of Artificial Sequence: Synthetic oligonucleotide
  Antisense strand to SEQ ID NO: 1599461
uaaggucugaccaagaguc

SEQ ID NO: 1599463 - RNA, 19 nt, Artificial Sequence
  Description of Artificial Sequence: Synthetic oligonucleotide
  Sense strand starting at position 2465 of SEQ ID NO: 1560429
accuuaggcuagugacauc

SEQ ID NO: 1599464 - RNA, 19 nt, Artificial Sequence
  Description of Artificial Sequence: Synthetic oligonucleotide
  Antisense strand to SEQ ID NO: 1599463
gaugucacuagccuaaggu

SEQ ID NO: 1599465 - RNA, 19 nt, Artificial Sequence
  Description of Artificial Sequence: Synthetic oligonucleotide
  Sense strand starting at position 2476 of SEQ ID NO: 1560429
gugacaucuccgugccuca

SEQ ID NO: 1599466 - RNA, 19 nt, Artificial Sequence
  Description of Artificial Sequence: Synthetic oligonucleotide
  Antisense strand to SEQ ID NO: 1599465
ugaggcacggagaugucac

SEQ ID NO: 1599467 - RNA, 19 nt, Artificial Sequence
  Description of Artificial Sequence: Synthetic oligonucleotide
  Sense strand starting at position 2506 of SEQ ID NO: 1560429
gaaucaagguggucacuca

SEQ ID NO: 1599468 - RNA, 19 nt, Artificial Sequence
  Description of Artificial Sequence: Synthetic oligonucleotide
  Antisense strand to SEQ ID NO: 1599467
ugagugaccaccuugauuc

SEQ ID NO: 1599469 - RNA, 19 nt, Artificial Sequence
  Description of Artificial Sequence: Synthetic oligonucleotide
  Sense strand starting at position 3195 of SEQ ID NO: 1560429
ggcggucucauuuaauggu

SEQ ID NO: 1599470 - RNA, 19 nt, Artificial Sequence
  Description of Artificial Sequence: Synthetic oligonucleotide
  Antisense strand to SEQ ID NO: 1599469
accauuaaaugagaccgcc

SEQ ID NO: 1599471 - RNA, 19 nt, Artificial Sequence
  Description of Artificial Sequence: Synthetic oligonucleotide
  Sense strand starting at position 3199 of SEQ ID NO: 1560429
gucucauuuaaugguguca

SEQ ID NO: 1599472 - RNA, 19 nt, Artificial Sequence
  Description of Artificial Sequence: Synthetic oligonucleotide
  Antisense strand to SEQ ID NO: 1599471
ugacaccauuaaaugagac

SEQ ID NO: 1599473 - RNA, 19 nt, Artificial Sequence
  Description of Artificial Sequence: Synthetic oligonucleotide
  Sense strand starting at position 3201 of SEQ ID NO: 1560429
cucauuuaauggugucaau

SEQ ID NO: 1599474 - RNA, 19 nt, Artificial Sequence
  Description of Artificial Sequence: Synthetic oligonucleotide
  Antisense strand to SEQ ID NO: 1599473
auugacaccauuaaaugag

SEQ ID NO: 1599475 - RNA, 19 nt, Artificial Sequence
  Description of Artificial Sequence: Synthetic oligonucleotide
  Sense strand starting at position 3210 of SEQ ID NO: 1560429
uggugucaaugcuaucaag

SEQ ID NO: 1599476 - RNA, 19 nt, Artificial Sequence
  Description of Artificial Sequence: Synthetic oligonucleotide
  Antisense strand to SEQ ID NO: 1599475
cuugauagcauugacacca

SEQ ID NO: 1599477 - RNA, 19 nt, Artificial Sequence
  Description of Artificial Sequence: Synthetic oligonucleotide
  Sense strand starting at position 3213 of SEQ ID NO: 1560429
ugucaaugcuaucaagucu

SEQ ID NO: 1599478 - RNA, 19 nt, Artificial Sequence
  Description of Artificial Sequence: Synthetic oligonucleotide
  Antisense strand to SEQ ID NO: 1599477
agacuugauagcauugaca

SEQ ID NO: 1599479 - RNA, 19 nt, Artificial Sequence
  Description of Artificial Sequence: Synthetic oligonucleotide
  Sense strand starting at position 3326 of SEQ ID NO: 1560429
cuaguugucugccuuccua

SEQ ID NO: 1599480 - RNA, 19 nt, Artificial Sequence
  Description of Artificial Sequence: Synthetic oligonucleotide
  Antisense strand to SEQ ID NO: 1599479
uaggaaggcagacaacuag

SEQ ID NO: 1599481 - RNA, 19 nt, Artificial Sequence
  Description of Artificial Sequence: Synthetic oligonucleotide
  Sense strand starting at position 3383 of SEQ ID NO: 1560429
guugcaugucuguugccua

SEQ ID NO: 1599482 - RNA, 19 nt, Artificial Sequence
  Description of Artificial Sequence: Synthetic oligonucleotide
  Antisense strand to SEQ ID NO: 1599481
uaggcaacagacaugcaac

SEQ ID NO: 1599483 - RNA, 19 nt, Artificial Sequence
  Description of Artificial Sequence: Synthetic oligonucleotide
  Sense strand starting at position 3386 of SEQ ID NO: 1560429
gcaugucuguugccuagaa

SEQ ID NO: 1599484 - RNA, 19 nt, Artificial Sequence
  Description of Artificial Sequence: Synthetic oligonucleotide
  Antisense strand to SEQ ID NO: 1599483
uucuaggcaacagacaugc

SEQ ID NO: 1599485 - RNA, 19 nt, Artificial Sequence
  Description of Artificial Sequence: Synthetic oligonucleotide
  Sense strand starting at position 3388 of SEQ ID NO: 1560429
augucuguugccuagaaga

SEQ ID NO: 1599486 - RNA, 19 nt, Artificial Sequence
  Description of Artificial Sequence: Synthetic oligonucleotide
  Antisense strand to SEQ ID NO: 1599485
ucuucuaggcaacagacau

SEQ ID NO: 1599487 - RNA, 19 nt, Artificial Sequence
  Description of Artificial Sequence: Synthetic oligonucleotide
  Sense strand starting at position 3414 of SEQ ID NO: 1560429
gcaggugauaggugugaaa

SEQ ID NO: 1599488 - RNA, 19 nt, Artificial Sequence
  Description of Artificial Sequence: Synthetic oligonucleotide
  Antisense strand to SEQ ID NO: 1599487
uuucacaccuaucaccugc

SEQ ID NO: 1599489 - RNA, 19 nt, Artificial Sequence
  Description of Artificial Sequence: Synthetic oligonucleotide
  Sense strand starting at position 3416 of SEQ ID NO: 1560429
aggugauaggugugaaaca

SEQ ID NO: 1599490 - RNA, 19 nt, Artificial Sequence
  Description of Artificial Sequence: Synthetic oligonucleotide
  Antisense strand to SEQ ID NO: 1599489
uguuucacaccuaucaccu

SEQ ID NO: 1599491 - RNA, 19 nt, Artificial Sequence
  Description of Artificial Sequence: Synthetic oligonucleotide
  Sense strand starting at position 3423 of SEQ ID NO: 1560429
aggugugaaacacauuguu

SEQ ID NO: 1599492 - RNA, 19 nt, Artificial Sequence
  Description of Artificial Sequence: Synthetic oligonucleotide
  Antisense strand to SEQ ID NO: 1599491
aacaauguguuucacaccu

SEQ ID NO: 1599493 - RNA, 19 nt, Artificial Sequence
  Description of Artificial Sequence: Synthetic oligonucleotide
  Sense strand starting at position 3849 of SEQ ID NO: 1560429
auuauuggucaagggacuu

SEQ ID NO: 1599494 - RNA, 19 nt, Artificial Sequence
  Description of Artificial Sequence: Synthetic oligonucleotide
  Antisense strand to SEQ ID NO: 1599493
aagucccuugaccaauaau

SEQ ID NO: 1599495 - RNA, 19 nt, Artificial Sequence
  Description of Artificial Sequence: Synthetic oligonucleotide
  Sense strand starting at position 3867 of SEQ ID NO: 1560429
ucagauagauguggcauau

SEQ ID NO: 1599496 - RNA, 19 nt, Artificial Sequence
  Description of Artificial Sequence: Synthetic oligonucleotide
  Antisense strand to SEQ ID NO: 1599495
auaugccacaucuaucuga

SEQ ID NO: 1599497 - RNA, 19 nt, Artificial Sequence
  Description of Artificial Sequence: Synthetic oligonucleotide
  Sense strand starting at position 3896 of SEQ ID NO: 1560429
aaugauagcugucagguuu

SEQ ID NO: 1599498 - RNA, 19 nt, Artificial Sequence
  Description of Artificial Sequence: Synthetic oligonucleotide
  Antisense strand to SEQ ID NO: 1599497
aaaccugacagcuaucauu

SEQ ID NO: 1599499 - RNA, 19 nt, Artificial Sequence
  Description of Artificial Sequence: Synthetic oligonucleotide
  Sense strand starting at position 575 of SEQ ID NO: 1560430
cggcgucagcgcagaagaa

SEQ ID NO: 1599500 - RNA, 19 nt, Artificial Sequence
  Description of Artificial Sequence: Synthetic oligonucleotide
  Antisense strand to SEQ ID NO: 1599499
uucuucugcgcugacgccg

SEQ ID NO: 1599501 - RNA, 19 nt, Artificial Sequence
  Description of Artificial Sequence: Synthetic oligonucleotide
  Sense strand starting at position 1335 of SEQ ID NO: 1560430
ggcgcgugauccgggauuu

SEQ ID NO: 1599502 - RNA, 19 nt, Artificial Sequence
  Description of Artificial Sequence: Synthetic oligonucleotide
  Antisense strand to SEQ ID NO: 1599501
aaaucccggaucacgcgcc

SEQ ID NO: 1599503 - RNA, 19 nt, Artificial Sequence
  Description of Artificial Sequence: Synthetic oligonucleotide
  Sense strand starting at position 1336 of SEQ ID NO: 1560430
gcgcgugauccgggauuuc

SEQ ID NO: 1599504 - RNA, 19 nt, Artificial Sequence
  Description of Artificial Sequence: Synthetic oligonucleotide
  Antisense strand to SEQ ID NO: 1599503
gaaaucccggaucacgcgc

SEQ ID NO: 1599505 - RNA, 19 nt, Artificial Sequence
  Description of Artificial Sequence: Synthetic oligonucleotide
  Sense strand starting at position 2112 of SEQ ID NO: 1560430
gcaugcucgcuugugucua

SEQ ID NO: 1599506 - RNA, 19 nt, Artificial Sequence
  Description of Artificial Sequence: Synthetic oligonucleotide
  Antisense strand to SEQ ID NO: 1599505
uagacacaagcgagcaugc

SEQ ID NO: 1599507 - RNA, 19 nt, Artificial Sequence
  Description of Artificial Sequence: Synthetic oligonucleotide
  Sense strand starting at position 2169 of SEQ ID NO: 1560430
cgcaguuauccggcugguu

SEQ ID NO: 1599508 - RNA, 19 nt, Artificial Sequence
  Description of Artificial Sequence: Synthetic oligonucleotide
  Antisense strand to SEQ ID NO: 1599507
aaccagccggauaacugcg

SEQ ID NO: 1599509 - RNA, 19 nt, Artificial Sequence
  Description of Artificial Sequence: Synthetic oligonucleotide
  Sense strand starting at position 2171 of SEQ ID NO: 1560430
caguuauccggcugguuga

SEQ ID NO: 1599510 - RNA, 19 nt, Artificial Sequence
  Description of Artificial Sequence: Synthetic oligonucleotide
  Antisense strand to SEQ ID NO: 1599509
ucaaccagccggauaacug

SEQ ID NO: 1599511 - RNA, 19 nt, Artificial Sequence
  Description of Artificial Sequence: Synthetic oligonucleotide
  Sense strand starting at position 2246 of SEQ ID NO: 1560430
ggguuugguuucuccaacu

SEQ ID NO: 1599512 - RNA, 19 nt, Artificial Sequence
  Description of Artificial Sequence: Synthetic oligonucleotide
  Antisense strand to SEQ ID NO: 1599511
aguuggagaaaccaaaccc

SEQ ID NO: 1599513 - RNA, 19 nt, Artificial Sequence
  Description of Artificial Sequence: Synthetic oligonucleotide
  Sense strand starting at position 2950 of SEQ ID NO: 1560430
ggguuugcuucucaucaca

SEQ ID NO: 1599514 - RNA, 19 nt, Artificial Sequence
  Description of Artificial Sequence: Synthetic oligonucleotide
  Antisense strand to SEQ ID NO: 1599513
ugugaugagaagcaaaccc

SEQ ID NO: 1599515 - RNA, 19 nt, Artificial Sequence
  Description of Artificial Sequence: Synthetic oligonucleotide
  Sense strand starting at position 3049 of SEQ ID NO: 1560430
ugcugagccgcuuguauaa

SEQ ID NO: 1599516 - RNA, 19 nt, Artificial Sequence
  Description of Artificial Sequence: Synthetic oligonucleotide
  Antisense strand to SEQ ID NO: 1599515
uuauacaagcggcucagca

SEQ ID NO: 1599517 - RNA, 19 nt, Artificial Sequence
  Description of Artificial Sequence: Synthetic oligonucleotide
  Sense strand starting at position 3072 of SEQ ID NO: 1560430
ggcacugagaccugagagu

SEQ ID NO: 1599518 - RNA, 19 nt, Artificial Sequence
  Description of Artificial Sequence: Synthetic oligonucleotide
  Antisense strand to SEQ ID NO: 1599517
acucucaggucucagugcc

SEQ ID NO: 1599519 - RNA, 19 nt, Artificial Sequence
  Description of Artificial Sequence: Synthetic oligonucleotide
  Sense strand starting at position 3081 of SEQ ID NO: 1560430
accugagagucaucaagac

SEQ ID NO: 1599520 - RNA, 19 nt, Artificial Sequence
  Description of Artificial Sequence: Synthetic oligonucleotide
  Antisense strand to SEQ ID NO: 1599519
gucuugaugacucucaggu

SEQ ID NO: 1599521 - RNA, 19 nt, Artificial Sequence
  Description of Artificial Sequence: Synthetic oligonucleotide
  Sense strand starting at position 3101 of SEQ ID NO: 1560430
guuaccacuuaacugagaa

SEQ ID NO: 1599522 - RNA, 19 nt, Artificial Sequence
  Description of Artificial Sequence: Synthetic oligonucleotide
  Antisense strand to SEQ ID NO: 1599521
uucucaguuaagugguaac

SEQ ID NO: 1599523 - RNA, 19 nt, Artificial Sequence
  Description of Artificial Sequence: Synthetic oligonucleotide
  Sense strand starting at position 3111 of SEQ ID NO: 1560430
aacugagaaccuggaguuu

SEQ ID NO: 1599524 - RNA, 19 nt, Artificial Sequence
  Description of Artificial Sequence: Synthetic oligonucleotide
  Antisense strand to SEQ ID NO: 1599523
aaacuccagguucucaguu

SEQ ID NO: 1599525 - RNA, 19 nt, Artificial Sequence
  Description of Artificial Sequence: Synthetic oligonucleotide
  Sense strand starting at position 3171 of SEQ ID NO: 1560430
gcgcgguaugugcucagaa

SEQ ID NO: 1599526 - RNA, 19 nt, Artificial Sequence
  Description of Artificial Sequence: Synthetic oligonucleotide
  Antisense strand to SEQ ID NO: 1599525
uucugagcacauaccgcgc

SEQ ID NO: 1599527 - RNA, 19 nt, Artificial Sequence
  Description of Artificial Sequence: Synthetic oligonucleotide
  Sense strand starting at position 3172 of SEQ ID NO: 1560430
cgcgguaugugcucagaaa

SEQ ID NO: 1599528 - RNA, 19 nt, Artificial Sequence
  Description of Artificial Sequence: Synthetic oligonucleotide
  Antisense strand to SEQ ID NO: 1599527
uuucugagcacauaccgcg

SEQ ID NO: 1599529 - RNA, 19 nt, Artificial Sequence
  Description of Artificial Sequence: Synthetic oligonucleotide
  Sense strand starting at position 3331 of SEQ ID NO: 1560430
ucucauacuugggaacuga

SEQ ID NO: 1599530 - RNA, 19 nt, Artificial Sequence
  Description of Artificial Sequence: Synthetic oligonucleotide
  Antisense strand to SEQ ID NO: 1599529
ucaguucccaaguaugaga

SEQ ID NO: 1599531 - RNA, 19 nt, Artificial Sequence
  Description of Artificial Sequence: Synthetic oligonucleotide
  Sense strand starting at position 3342 of SEQ ID NO: 1560430
ggaacugagucaccgugau

SEQ ID NO: 1599532 - RNA, 19 nt, Artificial Sequence
  Description of Artificial Sequence: Synthetic oligonucleotide
  Antisense strand to SEQ ID NO: 1599531
aucacggugacucaguucc

SEQ ID NO: 1599533 - RNA, 19 nt, Artificial Sequence
  Description of Artificial Sequence: Synthetic oligonucleotide
  Sense strand starting at position 3346 of SEQ ID NO: 1560430
cugagucaccgugauugga

SEQ ID NO: 1599534 - RNA, 19 nt, Artificial Sequence
  Description of Artificial Sequence: Synthetic oligonucleotide
  Antisense strand to SEQ ID NO: 1599533
uccaaucacggugacucag

SEQ ID NO: 1599535 - RNA, 19 nt, Artificial Sequence
  Description of Artificial Sequence: Synthetic oligonucleotide
  Sense strand starting at position 3411 of SEQ ID NO: 1560430
ugaggagucuuggucuguc

SEQ ID NO: 1599536 - RNA, 19 nt, Artificial Sequence
  Description of Artificial Sequence: Synthetic oligonucleotide
  Antisense strand to SEQ ID NO: 1599535
gacagaccaagacuccuca

SEQ ID NO: 1599537 - RNA, 19 nt, Artificial Sequence
  Description of Artificial Sequence: Synthetic oligonucleotide
  Sense strand starting at position 3687 of SEQ ID NO: 1560430
cgccuaggugcuugggauu

SEQ ID NO: 1599538 - RNA, 19 nt, Artificial Sequence
  Description of Artificial Sequence: Synthetic oligonucleotide
  Antisense strand to SEQ ID NO: 1599537
aaucccaagcaccuaggcg

SEQ ID NO: 1599539 - RNA, 19 nt, Artificial Sequence
  Description of Artificial Sequence: Synthetic oligonucleotide
  Sense strand starting at position 3694 of SEQ ID NO: 1560430
gugcuugggauuuguaugu

SEQ ID NO: 1599540 - RNA, 19 nt, Artificial Sequence
  Description of Artificial Sequence: Synthetic oligonucleotide
  Antisense strand to SEQ ID NO: 1599539
acauacaaaucccaagcac

SEQ ID NO: 1599541 - RNA, 19 nt, Artificial Sequence
  Description of Artificial Sequence: Synthetic oligonucleotide
  Sense strand starting at position 3698 of SEQ ID NO: 1560430
uugggauuuguauguuguc

SEQ ID NO: 1599542 - RNA, 19 nt, Artificial Sequence
  Description of Artificial Sequence: Synthetic oligonucleotide
  Antisense strand to SEQ ID NO: 1599541
gacaacauacaaaucccaa

SEQ ID NO: 1599543 - RNA, 19 nt, Artificial Sequence
  Description of Artificial Sequence: Synthetic oligonucleotide
  Sense strand starting at position 3703 of SEQ ID NO: 1560430
auuuguauguuguccucaa

SEQ ID NO: 1599544 - RNA, 19 nt, Artificial Sequence
  Description of Artificial Sequence: Synthetic oligonucleotide
  Antisense strand to SEQ ID NO: 1599543
uugaggacaacauacaaau

SEQ ID NO: 1599545 - RNA, 19 nt, Artificial Sequence
  Description of Artificial Sequence: Synthetic oligonucleotide
  Sense strand starting at position 3704 of SEQ ID NO: 1560430
uuuguauguuguccucaag

SEQ ID NO: 1599546 - RNA, 19 nt, Artificial Sequence
  Description of Artificial Sequence: Synthetic oligonucleotide
  Antisense strand to SEQ ID NO: 1599545
cuugaggacaacauacaaa

SEQ ID NO: 1599547 - RNA, 19 nt, Artificial Sequence
  Description of Artificial Sequence: Synthetic oligonucleotide
  Sense strand starting at position 3707 of SEQ ID NO: 1560430
guauguuguccucaagguc

SEQ ID NO: 1599548 - RNA, 19 nt, Artificial Sequence
  Description of Artificial Sequence: Synthetic oligonucleotide
  Antisense strand to SEQ ID NO: 1599547
gaccuugaggacaacauac

SEQ ID NO: 1599549 - RNA, 19 nt, Artificial Sequence
  Description of Artificial Sequence: Synthetic oligonucleotide
  Sense strand starting at position 3710 of SEQ ID NO: 1560430
uguuguccucaaggucuua

SEQ ID NO: 1599550 - RNA, 19 nt, Artificial Sequence
  Description of Artificial Sequence: Synthetic oligonucleotide
  Antisense strand to SEQ ID NO: 1599549
uaagaccuugaggacaaca

SEQ ID NO: 1599551 - RNA, 19 nt, Artificial Sequence
  Description of Artificial Sequence: Synthetic oligonucleotide
  Sense strand starting at position 3911 of SEQ ID NO: 1560430
gccgaauccuggucuugca

SEQ ID NO: 1599552 - RNA, 19 nt, Artificial Sequence
  Description of Artificial Sequence: Synthetic oligonucleotide
  Antisense strand to SEQ ID NO: 1599551
ugcaagaccaggauucggc

SEQ ID NO: 1599553 - RNA, 19 nt, Artificial Sequence
  Description of Artificial Sequence: Synthetic oligonucleotide
  Sense strand starting at position 3914 of SEQ ID NO: 1560430
gaauccuggucuugcauaa

SEQ ID NO: 1599554 - RNA, 19 nt, Artificial Sequence
  Description of Artificial Sequence: Synthetic oligonucleotide
  Antisense strand to SEQ ID NO: 1599553
uuaugcaagaccaggauuc

SEQ ID NO: 1599555 - RNA, 19 nt, Artificial Sequence
  Description of Artificial Sequence: Synthetic oligonucleotide
  Sense strand starting at position 3969 of SEQ ID NO: 1560430
gaggcugaguucuuggagu

SEQ ID NO: 1599556 - RNA, 19 nt, Artificial Sequence
  Description of Artificial Sequence: Synthetic oligonucleotide
  Antisense strand to SEQ ID NO: 1599555
acuccaagaacucagccuc

SEQ ID NO: 1599557 - RNA, 19 nt, Artificial Sequence
  Description of Artificial Sequence: Synthetic oligonucleotide
  Sense strand starting at position 3971 of SEQ ID NO: 1560430
ggcugaguucuuggaguca

SEQ ID NO: 1599558 - RNA, 19 nt, Artificial Sequence
  Description of Artificial Sequence: Synthetic oligonucleotide
  Antisense strand to SEQ ID NO: 1599557
ugacuccaagaacucagcc

SEQ ID NO: 1599559 - RNA, 19 nt, Artificial Sequence
  Description of Artificial Sequence: Synthetic oligonucleotide
  Sense strand starting at position 378 of SEQ ID NO: 1560431
cccuuaccuuggugaaguu

SEQ ID NO: 1599560 - RNA, 19 nt, Artificial Sequence
  Description of Artificial Sequence: Synthetic oligonucleotide
  Antisense strand to SEQ ID NO: 1599559
aacuucaccaagguaaggg

SEQ ID NO: 1599561 - RNA, 19 nt, Artificial Sequence
  Description of Artificial Sequence: Synthetic oligonucleotide
  Sense strand starting at position 1299 of SEQ ID NO: 1560431
cggcgucagcgcagaagaa

SEQ ID NO: 1599562 - RNA, 19 nt, Artificial Sequence
  Description of Artificial Sequence: Synthetic oligonucleotide
  Antisense strand to SEQ ID NO: 1599561
uucuucugcgcugacgccg

SEQ ID NO: 1599563 - RNA, 19 nt, Artificial Sequence
  Description of Artificial Sequence: Synthetic oligonucleotide
  Sense strand starting at position 2059 of SEQ ID NO: 1560431
ggcgcgugauccgggauuu

SEQ ID NO: 1599564 - RNA, 19 nt, Artificial Sequence
  Description of Artificial Sequence: Synthetic oligonucleotide
  Antisense strand to SEQ ID NO: 1599563
aaaucccggaucacgcgcc

SEQ ID NO: 1599565 - RNA, 19 nt, Artificial Sequence
  Description of Artificial Sequence: Synthetic oligonucleotide
  Sense strand starting at position 2060 of SEQ ID NO: 1560431
gcgcgugauccgggauuuc

SEQ ID NO: 1599566 - RNA, 19 nt, Artificial Sequence
  Description of Artificial Sequence: Synthetic oligonucleotide
  Antisense strand to SEQ ID NO: 1599565
gaaaucccggaucacgcgc

SEQ ID NO: 1599567 - RNA, 19 nt, Artificial Sequence
  Description of Artificial Sequence: Synthetic oligonucleotide
  Sense strand starting at position 2836 of SEQ ID NO: 1560431
gcaugcucgcuugugucua

SEQ ID NO: 1599568 - RNA, 19 nt, Artificial Sequence
  Description of Artificial Sequence: Synthetic oligonucleotide
  Antisense strand to SEQ ID NO: 1599567
uagacacaagcgagcaugc

SEQ ID NO: 1599569 - RNA, 19 nt, Artificial Sequence
  Description of Artificial Sequence: Synthetic oligonucleotide
  Sense strand starting at position 2893 of SEQ ID NO: 1560431
cgcaguuauccggcugguu

SEQ ID NO: 1599570 - RNA, 19 nt, Artificial Sequence
  Description of Artificial Sequence: Synthetic oligonucleotide
  Antisense strand to SEQ ID NO: 1599569
aaccagccggauaacugcg

SEQ ID NO: 1599571 - RNA, 19 nt, Artificial Sequence
  Description of Artificial Sequence: Synthetic oligonucleotide
  Sense strand starting at position 2895 of SEQ ID NO: 1560431
caguuauccggcugguuga

SEQ ID NO: 1599572 - RNA, 19 nt, Artificial Sequence
  Description of Artificial Sequence: Synthetic oligonucleotide
  Antisense strand to SEQ ID NO: 1599571
ucaaccagccggauaacug

SEQ ID NO: 1599573 - RNA, 19 nt, Artificial Sequence
  Description of Artificial Sequence: Synthetic oligonucleotide
  Sense strand starting at position 2970 of SEQ ID NO: 1560431
ggguuugguuucuccaacu

SEQ ID NO: 1599574 - RNA, 19 nt, Artificial Sequence
  Description of Artificial Sequence: Synthetic oligonucleotide
  Antisense strand to SEQ ID NO: 1599573
aguuggagaaaccaaaccc

SEQ ID NO: 1599575 - RNA, 19 nt, Artificial Sequence
  Description of Artificial Sequence: Synthetic oligonucleotide
  Sense strand starting at position 3674 of SEQ ID NO: 1560431
ggguuugcuucucaucaca

SEQ ID NO: 1599576 - RNA, 19 nt, Artificial Sequence
  Description of Artificial Sequence: Synthetic oligonucleotide
  Antisense strand to SEQ ID NO: 1599575
ugugaugagaagcaaaccc

SEQ ID NO: 1599577 - RNA, 19 nt, Artificial Sequence
  Description of Artificial Sequence: Synthetic oligonucleotide
  Sense strand starting at position 3773 of SEQ ID NO: 1560431
ugcugagccgcuuguauaa

SEQ ID NO: 1599578 - RNA, 19 nt, Artificial Sequence
  Description of Artificial Sequence: Synthetic oligonucleotide
  Antisense strand to SEQ ID NO: 1599577
uuauacaagcggcucagca

SEQ ID NO: 1599579 - RNA, 19 nt, Artificial Sequence
  Description of Artificial Sequence: Synthetic oligonucleotide
  Sense strand starting at position 3796 of SEQ ID NO: 1560431
ggcacugagaccugagagu

SEQ ID NO: 1599580 - RNA, 19 nt, Artificial Sequence
  Description of Artificial Sequence: Synthetic oligonucleotide
  Antisense strand to SEQ ID NO: 1599579
acucucaggucucagugcc

SEQ ID NO: 1599581 - RNA, 19 nt, Artificial Sequence
  Description of Artificial Sequence: Synthetic oligonucleotide
  Sense strand starting at position 3805 of SEQ ID NO: 1560431
accugagagucaucaagac

SEQ ID NO: 1599582 - RNA, 19 nt, Artificial Sequence
  Description of Artificial Sequence: Synthetic oligonucleotide
  Antisense strand to SEQ ID NO: 1599581
gucuugaugacucucaggu

SEQ ID NO: 1599583 - RNA, 19 nt, Artificial Sequence
  Description of Artificial Sequence: Synthetic oligonucleotide
  Sense strand starting at position 3825 of SEQ ID NO: 1560431
guuaccacuuaacugagaa

SEQ ID NO: 1599584 - RNA, 19 nt, Artificial Sequence
  Description of Artificial Sequence: Synthetic oligonucleotide
  Antisense strand to SEQ ID NO: 1599583
uucucaguuaagugguaac

SEQ ID NO: 1599585 - RNA, 19 nt, Artificial Sequence
  Description of Artificial Sequence: Synthetic oligonucleotide
  Sense strand starting at position 3835 of SEQ ID NO: 1560431
aacugagaaccuggaguuu

SEQ ID NO: 1599586 - RNA, 19 nt, Artificial Sequence
  Description of Artificial Sequence: Synthetic oligonucleotide
  Antisense strand to SEQ ID NO: 1599585
aaacuccagguucucaguu

SEQ ID NO: 1599587 - RNA, 19 nt, Artificial Sequence
  Description of Artificial Sequence: Synthetic oligonucleotide
  Sense strand starting at position 3895 of SEQ ID NO: 1560431
gcgcgguaugugcucagaa

SEQ ID NO: 1599588 - RNA, 19 nt, Artificial Sequence
  Description of Artificial Sequence: Synthetic oligonucleotide
  Antisense strand to SEQ ID NO: 1599587
uucugagcacauaccgcgc

SEQ ID NO: 1599589 - RNA, 19 nt, Artificial Sequence
  Description of Artificial Sequence: Synthetic oligonucleotide
  Sense strand starting at position 3896 of SEQ ID NO: 1560431
cgcgguaugugcucagaaa

SEQ ID NO: 1599590 - RNA, 19 nt, Artificial Sequence
  Description of Artificial Sequence: Synthetic oligonucleotide
  Antisense strand to SEQ ID NO: 1599589
uuucugagcacauaccgcg

SEQ ID NO: 1599591 - RNA, 19 nt, Artificial Sequence
  Description of Artificial Sequence: Synthetic oligonucleotide
  Sense strand starting at position 51 of SEQ ID NO: 1560432
cguggaucucgaggacaca

SEQ ID NO: 1599592 - RNA, 19 nt, Artificial Sequence
  Description of Artificial Sequence: Synthetic oligonucleotide
  Antisense strand to SEQ ID NO: 1599591
uguguccucgagauccacg

SEQ ID NO: 1599593 - RNA, 19 nt, Artificial Sequence
  Description of Artificial Sequence: Synthetic oligonucleotide
  Sense strand starting at position 82 of SEQ ID NO: 1560432
uggaauaaugcguggcaca

SEQ ID NO: 1599594 - RNA, 19 nt, Artificial Sequence
  Description of Artificial Sequence: Synthetic oligonucleotide
  Antisense strand to SEQ ID NO: 1599593
ugugccacgcauuauucca

SEQ ID NO: 1599595 - RNA, 19 nt, Artificial Sequence
  Description of Artificial Sequence: Synthetic oligonucleotide
  Sense strand starting at position 83 of SEQ ID NO: 1560432
ggaauaaugcguggcacau

SEQ ID NO: 1599596 - RNA, 19 nt, Artificial Sequence
  Description of Artificial Sequence: Synthetic oligonucleotide
  Antisense strand to SEQ ID NO: 1599595
augugccacgcauuauucc

SEQ ID NO: 1599597 - RNA, 19 nt, Artificial Sequence
  Description of Artificial Sequence: Synthetic oligonucleotide
  Sense strand starting at position 89 of SEQ ID NO: 1560432
augcguggcacaugcuaua

SEQ ID NO: 1599598 - RNA, 19 nt, Artificial Sequence
  Description of Artificial Sequence: Synthetic oligonucleotide
  Antisense strand to SEQ ID NO: 1599597
uauagcaugugccacgcau

SEQ ID NO: 1599599 - RNA, 19 nt, Artificial Sequence
  Description of Artificial Sequence: Synthetic oligonucleotide
  Sense strand starting at position 120 of SEQ ID NO: 1560432
gguggacaacgucaguuau

SEQ ID NO: 1599600 - RNA, 19 nt, Artificial Sequence
  Description of Artificial Sequence: Synthetic oligonucleotide
  Antisense strand to SEQ ID NO: 1599599
auaacugacguuguccacc

SEQ ID NO: 1599601 - RNA, 19 nt, Artificial Sequence
  Description of Artificial Sequence: Synthetic oligonucleotide
  Sense strand starting at position 122 of SEQ ID NO: 1560432
uggacaacgucaguuauca

SEQ ID NO: 1599602 - RNA, 19 nt, Artificial Sequence
  Description of Artificial Sequence: Synthetic oligonucleotide
  Antisense strand to SEQ ID NO: 1599601
ugauaacugacguugucca

SEQ ID NO: 1599603 - RNA, 19 nt, Artificial Sequence
  Description of Artificial Sequence: Synthetic oligonucleotide
  Sense strand starting at position 162 of SEQ ID NO: 1560432
ggguacucccagggucuua

SEQ ID NO: 1599604 - RNA, 19 nt, Artificial Sequence
  Description of Artificial Sequence: Synthetic oligonucleotide
  Antisense strand to SEQ ID NO: 1599603
uaagacccugggaguaccc

SEQ ID NO: 1599605 - RNA, 19 nt, Artificial Sequence
  Description of Artificial Sequence: Synthetic oligonucleotide
  Sense strand starting at position 289 of SEQ ID NO: 1560432
ucaauacugucacaaagga

SEQ ID NO: 1599606 - RNA, 19 nt, Artificial Sequence
  Description of Artificial Sequence: Synthetic oligonucleotide
  Antisense strand to SEQ ID NO: 1599605
uccuuugugacaguauuga

SEQ ID NO: 1599607 - RNA, 19 nt, Artificial Sequence
  Description of Artificial Sequence: Synthetic oligonucleotide
  Sense strand starting at position 774 of SEQ ID NO: 1560432
cacagagggucaugguaga

SEQ ID NO: 1599608 - RNA, 19 nt, Artificial Sequence
  Description of Artificial Sequence: Synthetic oligonucleotide
  Antisense strand to SEQ ID NO: 1599607
ucuaccaugacccucugug

SEQ ID NO: 1599609 - RNA, 19 nt, Artificial Sequence
  Description of Artificial Sequence: Synthetic oligonucleotide
  Sense strand starting at position 841 of SEQ ID NO: 1560432
gacgcacacugguaacuua

SEQ ID NO: 1599610 - RNA, 19 nt, Artificial Sequence
  Description of Artificial Sequence: Synthetic oligonucleotide
  Antisense strand to SEQ ID NO: 1599609
uaaguuaccagugugcguc

SEQ ID NO: 1599611 - RNA, 19 nt, Artificial Sequence
  Description of Artificial Sequence: Synthetic oligonucleotide
  Sense strand starting at position 934 of SEQ ID NO: 1560432
acgguaacuccagacacau

SEQ ID NO: 1599612 - RNA, 19 nt, Artificial Sequence
  Description of Artificial Sequence: Synthetic oligonucleotide
  Antisense strand to SEQ ID NO: 1599611
augugucuggaguuaccgu

SEQ ID NO: 1599613 - RNA, 19 nt, Artificial Sequence
  Description of Artificial Sequence: Synthetic oligonucleotide
  Sense strand starting at position 1089 of SEQ ID NO: 1560432
gguaacuuacagugacaca

SEQ ID NO: 1599614 - RNA, 19 nt, Artificial Sequence
  Description of Artificial Sequence: Synthetic oligonucleotide
  Antisense strand to SEQ ID NO: 1599613
ugugucacuguaaguuacc

SEQ ID NO: 1599615 - RNA, 19 nt, Artificial Sequence
  Description of Artificial Sequence: Synthetic oligonucleotide
  Sense strand starting at position 1116 of SEQ ID NO: 1560432
cggucagaauuagugguua

SEQ ID NO: 1599616 - RNA, 19 nt, Artificial Sequence
  Description of Artificial Sequence: Synthetic oligonucleotide
  Antisense strand to SEQ ID NO: 1599615
uaaccacuaauucugaccg

SEQ ID NO: 1599617 - RNA, 19 nt, Artificial Sequence
  Description of Artificial Sequence: Synthetic oligonucleotide
  Sense strand starting at position 1118 of SEQ ID NO: 1560432
gucagaauuagugguuaag

SEQ ID NO: 1599618 - RNA, 19 nt, Artificial Sequence
  Description of Artificial Sequence: Synthetic oligonucleotide
  Antisense strand to SEQ ID NO: 1599617
cuuaaccacuaauucugac

SEQ ID NO: 1599619 - RNA, 19 nt, Artificial Sequence
  Description of Artificial Sequence: Synthetic oligonucleotide
  Sense strand starting at position 1120 of SEQ ID NO: 1560432
cagaauuagugguuaaguu

SEQ ID NO: 1599620 - RNA, 19 nt, Artificial Sequence
  Description of Artificial Sequence: Synthetic oligonucleotide
  Antisense strand to SEQ ID NO: 1599619
aacuuaaccacuaauucug

SEQ ID NO: 1599621 - RNA, 19 nt, Artificial Sequence
  Description of Artificial Sequence: Synthetic oligonucleotide
  Sense strand starting at position 1121 of SEQ ID NO: 1560432
agaauuagugguuaaguua

SEQ ID NO: 1599622 - RNA, 19 nt, Artificial Sequence
  Description of Artificial Sequence: Synthetic oligonucleotide
  Antisense strand to SEQ ID NO: 1599621
uaacuuaaccacuaauucu

SEQ ID NO: 1599623 - RNA, 19 nt, Artificial Sequence
  Description of Artificial Sequence: Synthetic oligonucleotide
  Sense strand starting at position 1266 of SEQ ID NO: 1560432
gaagucaauuccgagcaca

SEQ ID NO: 1599624 - RNA, 19 nt, Artificial Sequence
  Description of Artificial Sequence: Synthetic oligonucleotide
  Antisense strand to SEQ ID NO: 1599623
ugugcucggaauugacuuc

SEQ ID NO: 1599625 - RNA, 19 nt, Artificial Sequence
  Description of Artificial Sequence: Synthetic oligonucleotide
  Sense strand starting at position 1846 of SEQ ID NO: 1560432
ccgguccuuacucgaacau

SEQ ID NO: 1599626 - RNA, 19 nt, Artificial Sequence
  Description of Artificial Sequence: Synthetic oligonucleotide
  Antisense strand to SEQ ID NO: 1599625
auguucgaguaaggaccgg

SEQ ID NO: 1599627 - RNA, 19 nt, Artificial Sequence
  Description of Artificial Sequence: Synthetic oligonucleotide
  Sense strand starting at position 1850 of SEQ ID NO: 1560432
uccuuacucgaacauggau

SEQ ID NO: 1599628 - RNA, 19 nt, Artificial Sequence
  Description of Artificial Sequence: Synthetic oligonucleotide
  Antisense strand to SEQ ID NO: 1599627
auccauguucgaguaagga

SEQ ID NO: 1599629 - RNA, 19 nt, Artificial Sequence
  Description of Artificial Sequence: Synthetic oligonucleotide
  Sense strand starting at position 2398 of SEQ ID NO: 1560432
cugggaaaccgagguguau

SEQ ID NO: 1599630 - RNA, 19 nt, Artificial Sequence
  Description of Artificial Sequence: Synthetic oligonucleotide
  Antisense strand to SEQ ID NO: 1599629
auacaccucgguuucccag

SEQ ID NO: 1599631 - RNA, 19 nt, Artificial Sequence
  Description of Artificial Sequence: Synthetic oligonucleotide
  Sense strand starting at position 2402 of SEQ ID NO: 1560432
gaaaccgagguguauguau

SEQ ID NO: 1599632 - RNA, 19 nt, Artificial Sequence
  Description of Artificial Sequence: Synthetic oligonucleotide
  Antisense strand to SEQ ID NO: 1599631
auacauacaccucgguuuc

SEQ ID NO: 1599633 - RNA, 19 nt, Artificial Sequence
  Description of Artificial Sequence: Synthetic oligonucleotide
  Sense strand starting at position 2598 of SEQ ID NO: 1560432
gcucuuaucugugcugaga

SEQ ID NO: 1599634 - RNA, 19 nt, Artificial Sequence
  Description of Artificial Sequence: Synthetic oligonucleotide
  Antisense strand to SEQ ID NO: 1599633
ucucagcacagauaagagc

SEQ ID NO: 1599635 - RNA, 19 nt, Artificial Sequence
  Description of Artificial Sequence: Synthetic oligonucleotide
  Sense strand starting at position 2647 of SEQ ID NO: 1560432
cccacuaacucggugguaa

SEQ ID NO: 1599636 - RNA, 19 nt, Artificial Sequence
  Description of Artificial Sequence: Synthetic oligonucleotide
  Antisense strand to SEQ ID NO: 1599635
uuaccaccgaguuaguggg

SEQ ID NO: 1599637 - RNA, 19 nt, Artificial Sequence
  Description of Artificial Sequence: Synthetic oligonucleotide
  Sense strand starting at position 2648 of SEQ ID NO: 1560432
ccacuaacucggugguaag

SEQ ID NO: 1599638 - RNA, 19 nt, Artificial Sequence
  Description of Artificial Sequence: Synthetic oligonucleotide
  Antisense strand to SEQ ID NO: 1599637
cuuaccaccgaguuagugg

SEQ ID NO: 1599639 - RNA, 19 nt, Artificial Sequence
  Description of Artificial Sequence: Synthetic oligonucleotide
  Sense strand starting at position 3284 of SEQ ID NO: 1560432
ccaccugagucaguuaacu

SEQ ID NO: 1599640 - RNA, 19 nt, Artificial Sequence
  Description of Artificial Sequence: Synthetic oligonucleotide
  Antisense strand to SEQ ID NO: 1599639
aguuaacugacucaggugg

SEQ ID NO: 1599641 - RNA, 19 nt, Artificial Sequence
  Description of Artificial Sequence: Synthetic oligonucleotide
  Sense strand starting at position 3491 of SEQ ID NO: 1560432
agaccuuugcacugguuau

SEQ ID NO: 1599642 - RNA, 19 nt, Artificial Sequence
  Description of Artificial Sequence: Synthetic oligonucleotide
  Antisense strand to SEQ ID NO: 1599641
auaaccagugcaaaggucu

SEQ ID NO: 1599643 - RNA, 19 nt, Artificial Sequence
  Description of Artificial Sequence: Synthetic oligonucleotide
  Sense strand starting at position 3501 of SEQ ID NO: 1560432
acugguuauucccucugca

SEQ ID NO: 1599644 - RNA, 19 nt, Artificial Sequence
  Description of Artificial Sequence: Synthetic oligonucleotide
  Antisense strand to SEQ ID NO: 1599643
ugcagagggaauaaccagu

SEQ ID NO: 1599645 - RNA, 19 nt, Artificial Sequence
  Description of Artificial Sequence: Synthetic oligonucleotide
  Sense strand starting at position 3685 of SEQ ID NO: 1560432
gucuguuucuucuagugua

SEQ ID NO: 1599646 - RNA, 19 nt, Artificial Sequence
  Description of Artificial Sequence: Synthetic oligonucleotide
  Antisense strand to SEQ ID NO: 1599645
uacacuagaagaaacagac

SEQ ID NO: 1599647 - RNA, 19 nt, Artificial Sequence
  Description of Artificial Sequence: Synthetic oligonucleotide
  Sense strand starting at position 3688 of SEQ ID NO: 1560432
uguuucuucuaguguaaug

SEQ ID NO: 1599648 - RNA, 19 nt, Artificial Sequence
  Description of Artificial Sequence: Synthetic oligonucleotide
  Antisense strand to SEQ ID NO: 1599647
cauuacacuagaagaaaca

SEQ ID NO: 1599649 - RNA, 19 nt, Artificial Sequence
  Description of Artificial Sequence: Synthetic oligonucleotide
  Sense strand starting at position 178 of SEQ ID NO: 1560433
agaccagaugccuggaaau

SEQ ID NO: 1599650 - RNA, 19 nt, Artificial Sequence
  Description of Artificial Sequence: Synthetic oligonucleotide
  Antisense strand to SEQ ID NO: 1599649
auuuccaggcaucuggucu

SEQ ID NO: 1599651 - RNA, 19 nt, Artificial Sequence
  Description of Artificial Sequence: Synthetic oligonucleotide
  Sense strand starting at position 190 of SEQ ID NO: 1560433
uggaaaugguccuugccuu

SEQ ID NO: 1599652 - RNA, 19 nt, Artificial Sequence
  Description of Artificial Sequence: Synthetic oligonucleotide
  Antisense strand to SEQ ID NO: 1599651
aaggcaaggaccauuucca

SEQ ID NO: 1599653 - RNA, 19 nt, Artificial Sequence
  Description of Artificial Sequence: Synthetic oligonucleotide
  Sense strand starting at position 247 of SEQ ID NO: 1560433
gucucuucuuuguccucaa

SEQ ID NO: 1599654 - RNA, 19 nt, Artificial Sequence
  Description of Artificial Sequence: Synthetic oligonucleotide
  Antisense strand to SEQ ID NO: 1599653
uugaggacaaagaagagac

SEQ ID NO: 1599655 - RNA, 19 nt, Artificial Sequence
  Description of Artificial Sequence: Synthetic oligonucleotide
  Sense strand starting at position 330 of SEQ ID NO: 1560433
ucagacauauaucagagua

SEQ ID NO: 1599656 - RNA, 19 nt, Artificial Sequence
  Description of Artificial Sequence: Synthetic oligonucleotide
  Antisense strand to SEQ ID NO: 1599655
uacucugauauaugucuga

SEQ ID NO: 1599657 - RNA, 19 nt, Artificial Sequence
  Description of Artificial Sequence: Synthetic oligonucleotide
  Sense strand starting at position 332 of SEQ ID NO: 1560433
agacauauaucagaguaca

SEQ ID NO: 1599658 - RNA, 19 nt, Artificial Sequence
  Description of Artificial Sequence: Synthetic oligonucleotide
  Antisense strand to SEQ ID NO: 1599657
uguacucugauauaugucu

SEQ ID NO: 1599659 - RNA, 19 nt, Artificial Sequence
  Description of Artificial Sequence: Synthetic oligonucleotide
  Sense strand starting at position 392 of SEQ ID NO: 1560433
agccucacucccugguaua

SEQ ID NO: 1599660 - RNA, 19 nt, Artificial Sequence
  Description of Artificial Sequence: Synthetic oligonucleotide
  Antisense strand to SEQ ID NO: 1599659
uauaccagggagugaggcu

SEQ ID NO: 1599661 - RNA, 19 nt, Artificial Sequence
  Description of Artificial Sequence: Synthetic oligonucleotide
  Sense strand starting at position 568 of SEQ ID NO: 1560433
ccugaauccagguggauuc

SEQ ID NO: 1599662 - RNA, 19 nt, Artificial Sequence
  Description of Artificial Sequence: Synthetic oligonucleotide
  Antisense strand to SEQ ID NO: 1599661
gaauccaccuggauucagg

SEQ ID NO: 1599663 - RNA, 19 nt, Artificial Sequence
  Description of Artificial Sequence: Synthetic oligonucleotide
  Sense strand starting at position 732 of SEQ ID NO: 1560433
aguuguacucugugccaca

SEQ ID NO: 1599664 - RNA, 19 nt, Artificial Sequence
  Description of Artificial Sequence: Synthetic oligonucleotide
  Antisense strand to SEQ ID NO: 1599663
uguggcacagaguacaacu

SEQ ID NO: 1599665 - RNA, 19 nt, Artificial Sequence
  Description of Artificial Sequence: Synthetic oligonucleotide
  Sense strand starting at position 733 of SEQ ID NO: 1560433
guuguacucugugccacau

SEQ ID NO: 1599666 - RNA, 19 nt, Artificial Sequence
  Description of Artificial Sequence: Synthetic oligonucleotide
  Antisense strand to SEQ ID NO: 1599665
auguggcacagaguacaac

SEQ ID NO: 1599667 - RNA, 19 nt, Artificial Sequence
  Description of Artificial Sequence: Synthetic oligonucleotide
  Sense strand starting at position 820 of SEQ ID NO: 1560433
ccauaaagccucugauaag

SEQ ID NO: 1599668 - RNA, 19 nt, Artificial Sequence
  Description of Artificial Sequence: Synthetic oligonucleotide
  Antisense strand to SEQ ID NO: 1599667
cuuaucagaggcuuuaugg

SEQ ID NO: 1599669 - RNA, 19 nt, Artificial Sequence
  Description of Artificial Sequence: Synthetic oligonucleotide
  Sense strand starting at position 916 of SEQ ID NO: 1560433
aagugacaccuucgaacau

SEQ ID NO: 1599670 - RNA, 19 nt, Artificial Sequence
  Description of Artificial Sequence: Synthetic oligonucleotide
  Antisense strand to SEQ ID NO: 1599669
auguucgaaggugucacuu

SEQ ID NO: 1599671 - RNA, 19 nt, Artificial Sequence
  Description of Artificial Sequence: Synthetic oligonucleotide
  Sense strand starting at position 1045 of SEQ ID NO: 1560433
agacuagccuucuccagaa

SEQ ID NO: 1599672 - RNA, 19 nt, Artificial Sequence
  Description of Artificial Sequence: Synthetic oligonucleotide
  Antisense strand to SEQ ID NO: 1599671
uucuggagaaggcuagucu

SEQ ID NO: 1599673 - RNA, 19 nt, Artificial Sequence
  Description of Artificial Sequence: Synthetic oligonucleotide
  Sense strand starting at position 1157 of SEQ ID NO: 1560433
gaugauagggcuuaucuuu

SEQ ID NO: 1599674 - RNA, 19 nt, Artificial Sequence
  Description of Artificial Sequence: Synthetic oligonucleotide
  Antisense strand to SEQ ID NO: 1599673
aaagauaagcccuaucauc

SEQ ID NO: 1599675 - RNA, 19 nt, Artificial Sequence
  Description of Artificial Sequence: Synthetic oligonucleotide
  Sense strand starting at position 1253 of SEQ ID NO: 1560433
cagccaugucugggaagaa

SEQ ID NO: 1599676 - RNA, 19 nt, Artificial Sequence
  Description of Artificial Sequence: Synthetic oligonucleotide
  Antisense strand to SEQ ID NO: 1599675
uucuucccagacauggcug

SEQ ID NO: 1599677 - RNA, 19 nt, Artificial Sequence
  Description of Artificial Sequence: Synthetic oligonucleotide
  Sense strand starting at position 1254 of SEQ ID NO: 1560433
agccaugucugggaagaag

SEQ ID NO: 1599678 - RNA, 19 nt, Artificial Sequence
  Description of Artificial Sequence: Synthetic oligonucleotide
  Antisense strand to SEQ ID NO: 1599677
cuucuucccagacauggcu

SEQ ID NO: 1599679 - RNA, 19 nt, Artificial Sequence
  Description of Artificial Sequence: Synthetic oligonucleotide
  Sense strand starting at position 1486 of SEQ ID NO: 1560433
cgaugaucccguugaucug

SEQ ID NO: 1599680 - RNA, 19 nt, Artificial Sequence
  Description of Artificial Sequence: Synthetic oligonucleotide
  Antisense strand to SEQ ID NO: 1599679
cagaucaacgggaucaucg

SEQ ID NO: 1599681 - RNA, 19 nt, Artificial Sequence
  Description of Artificial Sequence: Synthetic oligonucleotide
  Sense strand starting at position 1553 of SEQ ID NO: 1560433
cugaucauccaggauugca

SEQ ID NO: 1599682 - RNA, 19 nt, Artificial Sequence
  Description of Artificial Sequence: Synthetic oligonucleotide
  Antisense strand to SEQ ID NO: 1599681
ugcaauccuggaugaucag

SEQ ID NO: 1599683 - RNA, 19 nt, Artificial Sequence
  Description of Artificial Sequence: Synthetic oligonucleotide
  Sense strand starting at position 1759 of SEQ ID NO: 1560433
ugggauuccuugcugcuga

SEQ ID NO: 1599684 - RNA, 19 nt, Artificial Sequence
  Description of Artificial Sequence: Synthetic oligonucleotide
  Antisense strand to SEQ ID NO: 1599683
ucagcagcaaggaauccca

SEQ ID NO: 1599685 - RNA, 19 nt, Artificial Sequence
  Description of Artificial Sequence: Synthetic oligonucleotide
  Sense strand starting at position 1764 of SEQ ID NO: 1560433
uuccuugcugcugaagaga

SEQ ID NO: 1599686 - RNA, 19 nt, Artificial Sequence
  Description of Artificial Sequence: Synthetic oligonucleotide
  Antisense strand to SEQ ID NO: 1599685
ucucuucagcagcaaggaa

SEQ ID NO: 1599687 - RNA, 19 nt, Artificial Sequence
  Description of Artificial Sequence: Synthetic oligonucleotide
  Sense strand starting at position 2031 of SEQ ID NO: 1560433
gggagauuacuauguggug

SEQ ID NO: 1599688 - RNA, 19 nt, Artificial Sequence
  Description of Artificial Sequence: Synthetic oligonucleotide
  Antisense strand to SEQ ID NO: 1599687
caccacauaguaaucuccc

SEQ ID NO: 1599689 - RNA, 19 nt, Artificial Sequence
  Description of Artificial Sequence: Synthetic oligonucleotide
  Sense strand starting at position 2100 of SEQ ID NO: 1560433
gggacauuguuggcaagca

SEQ ID NO: 1599690 - RNA, 19 nt, Artificial Sequence
  Description of Artificial Sequence: Synthetic oligonucleotide
  Antisense strand to SEQ ID NO: 1599689
ugcuugccaacaauguccc

SEQ ID NO: 1599691 - RNA, 19 nt, Artificial Sequence
  Description of Artificial Sequence: Synthetic oligonucleotide
  Sense strand starting at position 2134 of SEQ ID NO: 1560433
gagcccugcucuguuuaga

SEQ ID NO: 1599692 - RNA, 19 nt, Artificial Sequence
  Description of Artificial Sequence: Synthetic oligonucleotide
  Antisense strand to SEQ ID NO: 1599691
ucuaaacagagcagggcuc

SEQ ID NO: 1599693 - RNA, 19 nt, Artificial Sequence
  Description of Artificial Sequence: Synthetic oligonucleotide
  Sense strand starting at position 2144 of SEQ ID NO: 1560433
cuguuuagaagcuggcaau

SEQ ID NO: 1599694 - RNA, 19 nt, Artificial Sequence
  Description of Artificial Sequence: Synthetic oligonucleotide
  Antisense strand to SEQ ID NO: 1599693
auugccagcuucuaaacag

SEQ ID NO: 1599695 - RNA, 19 nt, Artificial Sequence
  Description of Artificial Sequence: Synthetic oligonucleotide
  Sense strand starting at position 2145 of SEQ ID NO: 1560433
uguuuagaagcuggcaaua

SEQ ID NO: 1599696 - RNA, 19 nt, Artificial Sequence
  Description of Artificial Sequence: Synthetic oligonucleotide
  Antisense strand to SEQ ID NO: 1599695
uauugccagcuucuaaaca

SEQ ID NO: 1599697 - RNA, 19 nt, Artificial Sequence
  Description of Artificial Sequence: Synthetic oligonucleotide
  Sense strand starting at position 2299 of SEQ ID NO: 1560433
gagguucucagguaggagu

SEQ ID NO: 1599698 - RNA, 19 nt, Artificial Sequence
  Description of Artificial Sequence: Synthetic oligonucleotide
  Antisense strand to SEQ ID NO: 1599697
acuccuaccugagaaccuc

SEQ ID NO: 1599699 - RNA, 19 nt, Artificial Sequence
  Description of Artificial Sequence: Synthetic oligonucleotide
  Sense strand starting at position 2314 of SEQ ID NO: 1560433
gagugaauuccugggacca

SEQ ID NO: 1599700 - RNA, 19 nt, Artificial Sequence
  Description of Artificial Sequence: Synthetic oligonucleotide
  Antisense strand to SEQ ID NO: 1599699
uggucccaggaauucacuc

SEQ ID NO: 1599701 - RNA, 19 nt, Artificial Sequence
  Description of Artificial Sequence: Synthetic oligonucleotide
  Sense strand starting at position 2315 of SEQ ID NO: 1560433
agugaauuccugggaccag

SEQ ID NO: 1599702 - RNA, 19 nt, Artificial Sequence
  Description of Artificial Sequence: Synthetic oligonucleotide
  Antisense strand to SEQ ID NO: 1599701
cuggucccaggaauucacu

SEQ ID NO: 1599703 - RNA, 19 nt, Artificial Sequence
  Description of Artificial Sequence: Synthetic oligonucleotide
  Sense strand starting at position 2402 of SEQ ID NO: 1560433
gccguuacuaggcaacaga

SEQ ID NO: 1599704 - RNA, 19 nt, Artificial Sequence
  Description of Artificial Sequence: Synthetic oligonucleotide
  Antisense strand to SEQ ID NO: 1599703
ucuguugccuaguaacggc

SEQ ID NO: 1599705 - RNA, 19 nt, Artificial Sequence
  Description of Artificial Sequence: Synthetic oligonucleotide
  Sense strand starting at position 2548 of SEQ ID NO: 1560433
gagaguaucugggaguuag

SEQ ID NO: 1599706 - RNA, 19 nt, Artificial Sequence
  Description of Artificial Sequence: Synthetic oligonucleotide
  Antisense strand to SEQ ID NO: 1599705
cuaacucccagauacucuc

SEQ ID NO: 1599707 - RNA, 19 nt, Artificial Sequence
  Description of Artificial Sequence: Synthetic oligonucleotide
  Sense strand starting at position 2564 of SEQ ID NO: 1560433
uaggaaacuucgggagaga

SEQ ID NO: 1599708 - RNA, 19 nt, Artificial Sequence
  Description of Artificial Sequence: Synthetic oligonucleotide
  Antisense strand to SEQ ID NO: 1599707
ucucucccgaaguuuccua

SEQ ID NO: 1599709 - RNA, 19 nt, Artificial Sequence
  Description of Artificial Sequence: Synthetic oligonucleotide
  Sense strand starting at position 3087 of SEQ ID NO: 1560433
gccagaagugggugccaua

SEQ ID NO: 1599710 - RNA, 19 nt, Artificial Sequence
  Description of Artificial Sequence: Synthetic oligonucleotide
  Antisense strand to SEQ ID NO: 1599709
uauggcacccacuucuggc

SEQ ID NO: 1599711 - RNA, 19 nt, Artificial Sequence
  Description of Artificial Sequence: Synthetic oligonucleotide
  Sense strand starting at position 3192 of SEQ ID NO: 1560433
cagggauuccucuaggcac

SEQ ID NO: 1599712 - RNA, 19 nt, Artificial Sequence
  Description of Artificial Sequence: Synthetic oligonucleotide
  Antisense strand to SEQ ID NO: 1599711
gugccuagaggaaucccug

SEQ ID NO: 1599713 - RNA, 19 nt, Artificial Sequence
  Description of Artificial Sequence: Synthetic oligonucleotide
  Sense strand starting at position 3308 of SEQ ID NO: 1560433
uuggguuuccauggaguag

SEQ ID NO: 1599714 - RNA, 19 nt, Artificial Sequence
  Description of Artificial Sequence: Synthetic oligonucleotide
  Antisense strand to SEQ ID NO: 1599713
cuacuccauggaaacccaa

SEQ ID NO: 1599715 - RNA, 19 nt, Artificial Sequence
  Description of Artificial Sequence: Synthetic oligonucleotide
  Sense strand starting at position 3342 of SEQ ID NO: 1560433
cacagaaugcugugaagug

SEQ ID NO: 1599716 - RNA, 19 nt, Artificial Sequence
  Description of Artificial Sequence: Synthetic oligonucleotide
  Antisense strand to SEQ ID NO: 1599715
cacuucacagcauucugug

SEQ ID NO: 1599717 - RNA, 19 nt, Artificial Sequence
  Description of Artificial Sequence: Synthetic oligonucleotide
  Sense strand starting at position 3399 of SEQ ID NO: 1560433
acagcuugagcuggugaaa

SEQ ID NO: 1599718 - RNA, 19 nt, Artificial Sequence
  Description of Artificial Sequence: Synthetic oligonucleotide
  Antisense strand to SEQ ID NO: 1599717
uuucaccagcucaagcugu

SEQ ID NO: 1599719 - RNA, 19 nt, Artificial Sequence
  Description of Artificial Sequence: Synthetic oligonucleotide
  Sense strand starting at position 3521 of SEQ ID NO: 1560433
ugacucacugcgugaucuu

SEQ ID NO: 1599720 - RNA, 19 nt, Artificial Sequence
  Description of Artificial Sequence: Synthetic oligonucleotide
  Antisense strand to SEQ ID NO: 1599719
aagaucacgcagugaguca

SEQ ID NO: 1599721 - RNA, 19 nt, Artificial Sequence
  Description of Artificial Sequence: Synthetic oligonucleotide
  Sense strand starting at position 3638 of SEQ ID NO: 1560433
ggugaaggcuugucaagga

SEQ ID NO: 1599722 - RNA, 19 nt, Artificial Sequence
  Description of Artificial Sequence: Synthetic oligonucleotide
  Antisense strand to SEQ ID NO: 1599721
uccuugacaagccuucacc

SEQ ID NO: 1599723 - RNA, 19 nt, Artificial Sequence
  Description of Artificial Sequence: Synthetic oligonucleotide
  Sense strand starting at position 3642 of SEQ ID NO: 1560433
aaggcuugucaaggaugga

SEQ ID NO: 1599724 - RNA, 19 nt, Artificial Sequence
  Description of Artificial Sequence: Synthetic oligonucleotide
  Antisense strand to SEQ ID NO: 1599723
uccauccuugacaagccuu

SEQ ID NO: 1599725 - RNA, 19 nt, Artificial Sequence
  Description of Artificial Sequence: Synthetic oligonucleotide
  Sense strand starting at position 3746 of SEQ ID NO: 1560433
gugggucauccugagacac

SEQ ID NO: 1599726 - RNA, 19 nt, Artificial Sequence
  Description of Artificial Sequence: Synthetic oligonucleotide
  Antisense strand to SEQ ID NO: 1599725
gugucucaggaugacccac

SEQ ID NO: 1599727 - RNA, 19 nt, Artificial Sequence
  Description of Artificial Sequence: Synthetic oligonucleotide
  Sense strand starting at position 3748 of SEQ ID NO: 1560433
gggucauccugagacacca

SEQ ID NO: 1599728 - RNA, 19 nt, Artificial Sequence
  Description of Artificial Sequence: Synthetic oligonucleotide
  Antisense strand to SEQ ID NO: 1599727
uggugucucaggaugaccc

SEQ ID NO: 1599729 - RNA, 19 nt, Artificial Sequence
  Description of Artificial Sequence: Synthetic oligonucleotide
  Sense strand starting at position 188 of SEQ ID NO: 1560434
agaccagaugccuggaaau

SEQ ID NO: 1599730 - RNA, 19 nt, Artificial Sequence
  Description of Artificial Sequence: Synthetic oligonucleotide
  Antisense strand to SEQ ID NO: 1599729
auuuccaggcaucuggucu

SEQ ID NO: 1599731 - RNA, 19 nt, Artificial Sequence
  Description of Artificial Sequence: Synthetic oligonucleotide
  Sense strand starting at position 200 of SEQ ID NO: 1560434
uggaaaugguccuugccuu

SEQ ID NO: 1599732 - RNA, 19 nt, Artificial Sequence
  Description of Artificial Sequence: Synthetic oligonucleotide
  Antisense strand to SEQ ID NO: 1599731
aaggcaaggaccauuucca

SEQ ID NO: 1599733 - RNA, 19 nt, Artificial Sequence
  Description of Artificial Sequence: Synthetic oligonucleotide
  Sense strand starting at position 257 of SEQ ID NO: 1560434
gucucuucuuuguccucaa

SEQ ID NO: 1599734 - RNA, 19 nt, Artificial Sequence
  Description of Artificial Sequence: Synthetic oligonucleotide
  Antisense strand to SEQ ID NO: 1599733
uugaggacaaagaagagac

SEQ ID NO: 1599735 - RNA, 19 nt, Artificial Sequence
  Description of Artificial Sequence: Synthetic oligonucleotide
  Sense strand starting at position 340 of SEQ ID NO: 1560434
ucagacauauaucagagua

SEQ ID NO: 1599736 - RNA, 19 nt, Artificial Sequence
  Description of Artificial Sequence: Synthetic oligonucleotide
  Antisense strand to SEQ ID NO: 1599735
uacucugauauaugucuga

SEQ ID NO: 1599737 - RNA, 19 nt, Artificial Sequence
  Description of Artificial Sequence: Synthetic oligonucleotide
  Sense strand starting at position 342 of SEQ ID NO: 1560434
agacauauaucagaguaca

SEQ ID NO: 1599738 - RNA, 19 nt, Artificial Sequence
  Description of Artificial Sequence: Synthetic oligonucleotide
  Antisense strand to SEQ ID NO: 1599737
uguacucugauauaugucu

SEQ ID NO: 1599739 - RNA, 19 nt, Artificial Sequence
  Description of Artificial Sequence: Synthetic oligonucleotide
  Sense strand starting at position 402 of SEQ ID NO: 1560434
agccucacucccugguaua

SEQ ID NO: 1599740 - RNA, 19 nt, Artificial Sequence
  Description of Artificial Sequence: Synthetic oligonucleotide
  Antisense strand to SEQ ID NO: 1599739
uauaccagggagugaggcu

SEQ ID NO: 1599741 - RNA, 19 nt, Artificial Sequence
  Description of Artificial Sequence: Synthetic oligonucleotide
  Sense strand starting at position 578 of SEQ ID NO: 1560434
ccugaauccagguggauuc

SEQ ID NO: 1599742 - RNA, 19 nt, Artificial Sequence
  Description of Artificial Sequence: Synthetic oligonucleotide
  Antisense strand to SEQ ID NO: 1599741
gaauccaccuggauucagg

SEQ ID NO: 1599743 - RNA, 19 nt, Artificial Sequence
  Description of Artificial Sequence: Synthetic oligonucleotide
  Sense strand starting at position 742 of SEQ ID NO: 1560434
aguuguacucugugccaca

SEQ ID NO: 1599744 - RNA, 19 nt, Artificial Sequence
  Description of Artificial Sequence: Synthetic oligonucleotide
  Antisense strand to SEQ ID NO: 1599743
uguggcacagaguacaacu

SEQ ID NO: 1599745 - RNA, 19 nt, Artificial Sequence
  Description of Artificial Sequence: Synthetic oligonucleotide
  Sense strand starting at position 743 of SEQ ID NO: 1560434
guuguacucugugccacau

SEQ ID NO: 1599746 - RNA, 19 nt, Artificial Sequence
  Description of Artificial Sequence: Synthetic oligonucleotide
  Antisense strand to SEQ ID NO: 1599745
auguggcacagaguacaac

SEQ ID NO: 1599747 - RNA, 19 nt, Artificial Sequence
  Description of Artificial Sequence: Synthetic oligonucleotide
  Sense strand starting at position 830 of SEQ ID NO: 1560434
ccauaaagccucugauaag

SEQ ID NO: 1599748 - RNA, 19 nt, Artificial Sequence
  Description of Artificial Sequence: Synthetic oligonucleotide
  Antisense strand to SEQ ID NO: 1599747
cuuaucagaggcuuuaugg

SEQ ID NO: 1599749 - RNA, 19 nt, Artificial Sequence
  Description of Artificial Sequence: Synthetic oligonucleotide
  Sense strand starting at position 926 of SEQ ID NO: 1560434
aagugacaccuucgaacau

SEQ ID NO: 1599750 - RNA, 19 nt, Artificial Sequence
  Description of Artificial Sequence: Synthetic oligonucleotide
  Antisense strand to SEQ ID NO: 1599749
auguucgaaggugucacuu

SEQ ID NO: 1599751 - RNA, 19 nt, Artificial Sequence
  Description of Artificial Sequence: Synthetic oligonucleotide
  Sense strand starting at position 1055 of SEQ ID NO: 1560434
agacuagccuucuccagaa

SEQ ID NO: 1599752 - RNA, 19 nt, Artificial Sequence
  Description of Artificial Sequence: Synthetic oligonucleotide
  Antisense strand to SEQ ID NO: 1599751
uucuggagaaggcuagucu

SEQ ID NO: 1599753 - RNA, 19 nt, Artificial Sequence
  Description of Artificial Sequence: Synthetic oligonucleotide
  Sense strand starting at position 1167 of SEQ ID NO: 1560434
gaugauagggcuuaucuuu

SEQ ID NO: 1599754 - RNA, 19 nt, Artificial Sequence
  Description of Artificial Sequence: Synthetic oligonucleotide
  Antisense strand to SEQ ID NO: 1599753
aaagauaagcccuaucauc

SEQ ID NO: 1599755 - RNA, 19 nt, Artificial Sequence
  Description of Artificial Sequence: Synthetic oligonucleotide
  Sense strand starting at position 1263 of SEQ ID NO: 1560434
cagccaugucugggaagaa

SEQ ID NO: 1599756 - RNA, 19 nt, Artificial Sequence
  Description of Artificial Sequence: Synthetic oligonucleotide
  Antisense strand to SEQ ID NO: 1599755
uucuucccagacauggcug

SEQ ID NO: 1599757 - RNA, 19 nt, Artificial Sequence
  Description of Artificial Sequence: Synthetic oligonucleotide
  Sense strand starting at position 1264 of SEQ ID NO: 1560434
agccaugucugggaagaag

SEQ ID NO: 1599758 - RNA, 19 nt, Artificial Sequence
  Description of Artificial Sequence: Synthetic oligonucleotide
  Antisense strand to SEQ ID NO: 1599757
cuucuucccagacauggcu

SEQ ID NO: 1599759 - RNA, 19 nt, Artificial Sequence
  Description of Artificial Sequence: Synthetic oligonucleotide
  Sense strand starting at position 1496 of SEQ ID NO: 1560434
cgaugaucccguugaucug

SEQ ID NO: 1599760 - RNA, 19 nt, Artificial Sequence
  Description of Artificial Sequence: Synthetic oligonucleotide
  Antisense strand to SEQ ID NO: 1599759
cagaucaacgggaucaucg

SEQ ID NO: 1599761 - RNA, 19 nt, Artificial Sequence
  Description of Artificial Sequence: Synthetic oligonucleotide
  Sense strand starting at position 1563 of SEQ ID NO: 1560434
cugaucauccaggauugca

SEQ ID NO: 1599762 - RNA, 19 nt, Artificial Sequence
  Description of Artificial Sequence: Synthetic oligonucleotide
  Antisense strand to SEQ ID NO: 1599761
ugcaauccuggaugaucag

SEQ ID NO: 1599763 - RNA, 19 nt, Artificial Sequence
  Description of Artificial Sequence: Synthetic oligonucleotide
  Sense strand starting at position 1769 of SEQ ID NO: 1560434
ugggauuccuugcugcuga

SEQ ID NO: 1599764 - RNA, 19 nt, Artificial Sequence
  Description of Artificial Sequence: Synthetic oligonucleotide
  Antisense strand to SEQ ID NO: 1599763
ucagcagcaaggaauccca

SEQ ID NO: 1599765 - RNA, 19 nt, Artificial Sequence
  Description of Artificial Sequence: Synthetic oligonucleotide
  Sense strand starting at position 1774 of SEQ ID NO: 1560434
uuccuugcugcugaagaga

SEQ ID NO: 1599766 - RNA, 19 nt, Artificial Sequence
  Description of Artificial Sequence: Synthetic oligonucleotide
  Antisense strand to SEQ ID NO: 1599765
ucucuucagcagcaaggaa

SEQ ID NO: 1599767 - RNA, 19 nt, Artificial Sequence
  Description of Artificial Sequence: Synthetic oligonucleotide
  Sense strand starting at position 2041 of SEQ ID NO: 1560434
gggagauuacuauguggug

SEQ ID NO: 1599768 - RNA, 19 nt, Artificial Sequence
  Description of Artificial Sequence: Synthetic oligonucleotide
  Antisense strand to SEQ ID NO: 1599767
caccacauaguaaucuccc

SEQ ID NO: 1599769 - RNA, 19 nt, Artificial Sequence
  Description of Artificial Sequence: Synthetic oligonucleotide
  Sense strand starting at position 2110 of SEQ ID NO: 1560434
gggacauuguuggcaagca

SEQ ID NO: 1599770 - RNA, 19 nt, Artificial Sequence
  Description of Artificial Sequence: Synthetic oligonucleotide
  Antisense strand to SEQ ID NO: 1599769
ugcuugccaacaauguccc

SEQ ID NO: 1599771 - RNA, 19 nt, Artificial Sequence
  Description of Artificial Sequence: Synthetic oligonucleotide
  Sense strand starting at position 2144 of SEQ ID NO: 1560434
gagcccugcucuguuuaga

SEQ ID NO: 1599772 - RNA, 19 nt, Artificial Sequence
  Description of Artificial Sequence: Synthetic oligonucleotide
  Antisense strand to SEQ ID NO: 1599771
ucuaaacagagcagggcuc

SEQ ID NO: 1599773 - RNA, 19 nt, Artificial Sequence
  Description of Artificial Sequence: Synthetic oligonucleotide
  Sense strand starting at position 2154 of SEQ ID NO: 1560434
cuguuuagaagcuggcaau

SEQ ID NO: 1599774 - RNA, 19 nt, Artificial Sequence
  Description of Artificial Sequence: Synthetic oligonucleotide
  Antisense strand to SEQ ID NO: 1599773
auugccagcuucuaaacag

SEQ ID NO: 1599775 - RNA, 19 nt, Artificial Sequence
  Description of Artificial Sequence: Synthetic oligonucleotide
  Sense strand starting at position 2155 of SEQ ID NO: 1560434
uguuuagaagcuggcaaua

SEQ ID NO: 1599776 - RNA, 19 nt, Artificial Sequence
  Description of Artificial Sequence: Synthetic oligonucleotide
  Antisense strand to SEQ ID NO: 1599775
uauugccagcuucuaaaca

SEQ ID NO: 1599777 - RNA, 19 nt, Artificial Sequence
  Description of Artificial Sequence: Synthetic oligonucleotide
  Sense strand starting at position 2309 of SEQ ID NO: 1560434
gagguucucagguaggagu

SEQ ID NO: 1599778 - RNA, 19 nt, Artificial Sequence
  Description of Artificial Sequence: Synthetic oligonucleotide
  Antisense strand to SEQ ID NO: 1599777
acuccuaccugagaaccuc

SEQ ID NO: 1599779 - RNA, 19 nt, Artificial Sequence
  Description of Artificial Sequence: Synthetic oligonucleotide
  Sense strand starting at position 2324 of SEQ ID NO: 1560434
gagugaauuccugggacca

SEQ ID NO: 1599780 - RNA, 19 nt, Artificial Sequence
  Description of Artificial Sequence: Synthetic oligonucleotide
  Antisense strand to SEQ ID NO: 1599779
uggucccaggaauucacuc

SEQ ID NO: 1599781 - RNA, 19 nt, Artificial Sequence
  Description of Artificial Sequence: Synthetic oligonucleotide
  Sense strand starting at position 2325 of SEQ ID NO: 1560434
agugaauuccugggaccag

SEQ ID NO: 1599782 - RNA, 19 nt, Artificial Sequence
  Description of Artificial Sequence: Synthetic oligonucleotide
  Antisense strand to SEQ ID NO: 1599781
cuggucccaggaauucacu

SEQ ID NO: 1599783 - RNA, 19 nt, Artificial Sequence
  Description of Artificial Sequence: Synthetic oligonucleotide
  Sense strand starting at position 2412 of SEQ ID NO: 1560434
gccguuacuaggcaacaga

SEQ ID NO: 1599784 - RNA, 19 nt, Artificial Sequence
  Description of Artificial Sequence: Synthetic oligonucleotide
  Antisense strand to SEQ ID NO: 1599783
ucuguugccuaguaacggc

SEQ ID NO: 1599785 - RNA, 19 nt, Artificial Sequence
  Description of Artificial Sequence: Synthetic oligonucleotide
  Sense strand starting at position 2558 of SEQ ID NO: 1560434
gagaguaucugggaguuag

SEQ ID NO: 1599786 - RNA, 19 nt, Artificial Sequence
  Description of Artificial Sequence: Synthetic oligonucleotide
  Antisense strand to SEQ ID NO: 1599785
cuaacucccagauacucuc

SEQ ID NO: 1599787 - RNA, 19 nt, Artificial Sequence
  Description of Artificial Sequence: Synthetic oligonucleotide
  Sense strand starting at position 2574 of SEQ ID NO: 1560434
uaggaaacuucgggagaga

SEQ ID NO: 1599788 - RNA, 19 nt, Artificial Sequence
  Description of Artificial Sequence: Synthetic oligonucleotide
  Antisense strand to SEQ ID NO: 1599787
ucucucccgaaguuuccua

SEQ ID NO: 1599789 - RNA, 19 nt, Artificial Sequence
  Description of Artificial Sequence: Synthetic oligonucleotide
  Sense strand starting at position 3097 of SEQ ID NO: 1560434
gccagaagugggugccaua

SEQ ID NO: 1599790 - RNA, 19 nt, Artificial Sequence
  Description of Artificial Sequence: Synthetic oligonucleotide
  Antisense strand to SEQ ID NO: 1599789
uauggcacccacuucuggc

SEQ ID NO: 1599791 - RNA, 19 nt, Artificial Sequence
  Description of Artificial Sequence: Synthetic oligonucleotide
  Sense strand starting at position 3202 of SEQ ID NO: 1560434
cagggauuccucuaggcac

SEQ ID NO: 1599792 - RNA, 19 nt, Artificial Sequence
  Description of Artificial Sequence: Synthetic oligonucleotide
  Antisense strand to SEQ ID NO: 1599791
gugccuagaggaaucccug

SEQ ID NO: 1599793 - RNA, 19 nt, Artificial Sequence
  Description of Artificial Sequence: Synthetic oligonucleotide
  Sense strand starting at position 3318 of SEQ ID NO: 1560434
uuggguuuccauggaguag

SEQ ID NO: 1599794 - RNA, 19 nt, Artificial Sequence
  Description of Artificial Sequence: Synthetic oligonucleotide
  Antisense strand to SEQ ID NO: 1599793
cuacuccauggaaacccaa

SEQ ID NO: 1599795 - RNA, 19 nt, Artificial Sequence
  Description of Artificial Sequence: Synthetic oligonucleotide
  Sense strand starting at position 3352 of SEQ ID NO: 1560434
cacagaaugcugugaagug

SEQ ID NO: 1599796 - RNA, 19 nt, Artificial Sequence
  Description of Artificial Sequence: Synthetic oligonucleotide
  Antisense strand to SEQ ID NO: 1599795
cacuucacagcauucugug

SEQ ID NO: 1599797 - RNA, 19 nt, Artificial Sequence
  Description of Artificial Sequence: Synthetic oligonucleotide
  Sense strand starting at position 3409 of SEQ ID NO: 1560434
acagcuugagcuggugaaa

SEQ ID NO: 1599798 - RNA, 19 nt, Artificial Sequence
  Description of Artificial Sequence: Synthetic oligonucleotide
  Antisense strand to SEQ ID NO: 1599797
uuucaccagcucaagcugu

SEQ ID NO: 1599799 - RNA, 19 nt, Artificial Sequence
  Description of Artificial Sequence: Synthetic oligonucleotide
  Sense strand starting at position 3531 of SEQ ID NO: 1560434
ugacucacugcgugaucuu

SEQ ID NO: 1599800 - RNA, 19 nt, Artificial Sequence
  Description of Artificial Sequence: Synthetic oligonucleotide
  Antisense strand to SEQ ID NO: 1599799
aagaucacgcagugaguca

SEQ ID NO: 1599801 - RNA, 19 nt, Artificial Sequence
  Description of Artificial Sequence: Synthetic oligonucleotide
  Sense strand starting at position 3648 of SEQ ID NO: 1560434
ggugaaggcuugucaagga

SEQ ID NO: 1599802 - RNA, 19 nt, Artificial Sequence
  Description of Artificial Sequence: Synthetic oligonucleotide
  Antisense strand to SEQ ID NO: 1599801
uccuugacaagccuucacc

SEQ ID NO: 1599803 - RNA, 19 nt, Artificial Sequence
  Description of Artificial Sequence: Synthetic oligonucleotide
  Sense strand starting at position 3652 of SEQ ID NO: 1560434
aaggcuugucaaggaugga

SEQ ID NO: 1599804 - RNA, 19 nt, Artificial Sequence
  Description of Artificial Sequence: Synthetic oligonucleotide
  Antisense strand to SEQ ID NO: 1599803
uccauccuugacaagccuu

SEQ ID NO: 1599805 - RNA, 19 nt, Artificial Sequence
  Description of Artificial Sequence: Synthetic oligonucleotide
  Sense strand starting at position 3756 of SEQ ID NO: 1560434
gugggucauccugagacac

SEQ ID NO: 1599806 - RNA, 19 nt, Artificial Sequence
  Description of Artificial Sequence: Synthetic oligonucleotide
  Antisense strand to SEQ ID NO: 1599805
gugucucaggaugacccac

SEQ ID NO: 1599807 - RNA, 19 nt, Artificial Sequence
  Description of Artificial Sequence: Synthetic oligonucleotide
  Sense strand starting at position 3758 of SEQ ID NO: 1560434
gggucauccugagacacca

SEQ ID NO: 1599808 - RNA, 19 nt, Artificial Sequence
  Description of Artificial Sequence: Synthetic oligonucleotide
  Antisense strand to SEQ ID NO: 1599807
uggugucucaggaugaccc

SEQ ID NO: 1599809 - RNA, 19 nt, Artificial Sequence
  Description of Artificial Sequence: Synthetic oligonucleotide
  Sense strand starting at position 293 of SEQ ID NO: 1560435
ucaaucagcgcucagaaua

SEQ ID NO: 1599810 - RNA, 19 nt, Artificial Sequence
  Description of Artificial Sequence: Synthetic oligonucleotide
  Antisense strand to SEQ ID NO: 1599809
uauucugagcgcugauuga

SEQ ID NO: 1599811 - RNA, 19 nt, Artificial Sequence
  Description of Artificial Sequence: Synthetic oligonucleotide
  Sense strand starting at position 1070 of SEQ ID NO: 1560435
ccuguccucccuuaaggau

SEQ ID NO: 1599812 - RNA, 19 nt, Artificial Sequence
  Description of Artificial Sequence: Synthetic oligonucleotide
  Antisense strand to SEQ ID NO: 1599811
auccuuaagggaggacagg

SEQ ID NO: 1599813 - RNA, 19 nt, Artificial Sequence
  Description of Artificial Sequence: Synthetic oligonucleotide
  Sense strand starting at position 1165 of SEQ ID NO: 1560435
ccacuuagauccuguacau

SEQ ID NO: 1599814 - RNA, 19 nt, Artificial Sequence
  Description of Artificial Sequence: Synthetic oligonucleotide
  Antisense strand to SEQ ID NO: 1599813
auguacaggaucuaagugg

SEQ ID NO: 1599815 - RNA, 19 nt, Artificial Sequence
  Description of Artificial Sequence: Synthetic oligonucleotide
  Sense strand starting at position 1212 of SEQ ID NO: 1560435
ggaggagggugccagaaau

SEQ ID NO: 1599816 - RNA, 19 nt, Artificial Sequence
  Description of Artificial Sequence: Synthetic oligonucleotide
  Antisense strand to SEQ ID NO: 1599815
auuucuggcacccuccucc

SEQ ID NO: 1599817 - RNA, 19 nt, Artificial Sequence
  Description of Artificial Sequence: Synthetic oligonucleotide
  Sense strand starting at position 1222 of SEQ ID NO: 1560435
gccagaaauuccuagggug

SEQ ID NO: 1599818 - RNA, 19 nt, Artificial Sequence
  Description of Artificial Sequence: Synthetic oligonucleotide
  Antisense strand to SEQ ID NO: 1599817
cacccuaggaauuucuggc

SEQ ID NO: 1599819 - RNA, 19 nt, Artificial Sequence
  Description of Artificial Sequence: Synthetic oligonucleotide
  Sense strand starting at position 1224 of SEQ ID NO: 1560435
cagaaauuccuaggguguc

SEQ ID NO: 1599820 - RNA, 19 nt, Artificial Sequence
  Description of Artificial Sequence: Synthetic oligonucleotide
  Antisense strand to SEQ ID NO: 1599819
gacacccuaggaauuucug

SEQ ID NO: 1599821 - RNA, 19 nt, Artificial Sequence
  Description of Artificial Sequence: Synthetic oligonucleotide
  Sense strand starting at position 1319 of SEQ ID NO: 1560435
ccucgaguugugcugcaga

SEQ ID NO: 1599822 - RNA, 19 nt, Artificial Sequence
  Description of Artificial Sequence: Synthetic oligonucleotide
  Antisense strand to SEQ ID NO: 1599821
ucugcagcacaacucgagg

SEQ ID NO: 1599823 - RNA, 19 nt, Artificial Sequence
  Description of Artificial Sequence: Synthetic oligonucleotide
  Sense strand starting at position 1404 of SEQ ID NO: 1560435
aauccugaugcuuggaaga

SEQ ID NO: 1599824 - RNA, 19 nt, Artificial Sequence
  Description of Artificial Sequence: Synthetic oligonucleotide
  Antisense strand to SEQ ID NO: 1599823
ucuuccaagcaucaggauu

SEQ ID NO: 1599825 - RNA, 19 nt, Artificial Sequence
  Description of Artificial Sequence: Synthetic oligonucleotide
  Sense strand starting at position 1425 of SEQ ID NO: 1560435
cuggaaggguguuccagaa

SEQ ID NO: 1599826 - RNA, 19 nt, Artificial Sequence
  Description of Artificial Sequence: Synthetic oligonucleotide
  Antisense strand to SEQ ID NO: 1599825
uucuggaacacccuuccag

SEQ ID NO: 1599827 - RNA, 19 nt, Artificial Sequence
  Description of Artificial Sequence: Synthetic oligonucleotide
  Sense strand starting at position 1429 of SEQ ID NO: 1560435
aaggguguuccagaaccuu

SEQ ID NO: 1599828 - RNA, 19 nt, Artificial Sequence
  Description of Artificial Sequence: Synthetic oligonucleotide
  Antisense strand to SEQ ID NO: 1599827
aagguucuggaacacccuu

SEQ ID NO: 1599829 - RNA, 19 nt, Artificial Sequence
  Description of Artificial Sequence: Synthetic oligonucleotide
  Sense strand starting at position 1435 of SEQ ID NO: 1560435
guuccagaaccuugaggaa

SEQ ID NO: 1599830 - RNA, 19 nt, Artificial Sequence
  Description of Artificial Sequence: Synthetic oligonucleotide
  Antisense strand to SEQ ID NO: 1599829
uuccucaagguucuggaac

SEQ ID NO: 1599831 - RNA, 19 nt, Artificial Sequence
  Description of Artificial Sequence: Synthetic oligonucleotide
  Sense strand starting at position 1516 of SEQ ID NO: 1560435
guauuaauagcagacucau

SEQ ID NO: 1599832 - RNA, 19 nt, Artificial Sequence
  Description of Artificial Sequence: Synthetic oligonucleotide
  Antisense strand to SEQ ID NO: 1599831
augagucugcuauuaauac

SEQ ID NO: 1599833 - RNA, 19 nt, Artificial Sequence
  Description of Artificial Sequence: Synthetic oligonucleotide
  Sense strand starting at position 1528 of SEQ ID NO: 1560435
gacucauagcucugacaug

SEQ ID NO: 1599834 - RNA, 19 nt, Artificial Sequence
  Description of Artificial Sequence: Synthetic oligonucleotide
  Antisense strand to SEQ ID NO: 1599833
caugucagagcuaugaguc

SEQ ID NO: 1599835 - RNA, 19 nt, Artificial Sequence
  Description of Artificial Sequence: Synthetic oligonucleotide
  Sense strand starting at position 1689 of SEQ ID NO: 1560435
ggagccaagugucagagaa

SEQ ID NO: 1599836 - RNA, 19 nt, Artificial Sequence
  Description of Artificial Sequence: Synthetic oligonucleotide
  Antisense strand to SEQ ID NO: 1599835
uucucugacacuuggcucc

SEQ ID NO: 1599837 - RNA, 19 nt, Artificial Sequence
  Description of Artificial Sequence: Synthetic oligonucleotide
  Sense strand starting at position 1691 of SEQ ID NO: 1560435
agccaagugucagagaaau

SEQ ID NO: 1599838 - RNA, 19 nt, Artificial Sequence
  Description of Artificial Sequence: Synthetic oligonucleotide
  Antisense strand to SEQ ID NO: 1599837
auuucucugacacuuggcu

SEQ ID NO: 1599839 - RNA, 19 nt, Artificial Sequence
  Description of Artificial Sequence: Synthetic oligonucleotide
  Sense strand starting at position 1714 of SEQ ID NO: 1560435
gcgugaaaggucugaggug

SEQ ID NO: 1599840 - RNA, 19 nt, Artificial Sequence
  Description of Artificial Sequence: Synthetic oligonucleotide
  Antisense strand to SEQ ID NO: 1599839
caccucagaccuuucacgc

SEQ ID NO: 1599841 - RNA, 19 nt, Artificial Sequence
  Description of Artificial Sequence: Synthetic oligonucleotide
  Sense strand starting at position 1715 of SEQ ID NO: 1560435
cgugaaaggucugaggugu

SEQ ID NO: 1599842 - RNA, 19 nt, Artificial Sequence
  Description of Artificial Sequence: Synthetic oligonucleotide
  Antisense strand to SEQ ID NO: 1599841
acaccucagaccuuucacg

SEQ ID NO: 1599843 - RNA, 19 nt, Artificial Sequence
  Description of Artificial Sequence: Synthetic oligonucleotide
  Sense strand starting at position 1852 of SEQ ID NO: 1560435
ccacgaggcuucuugccaa

SEQ ID NO: 1599844 - RNA, 19 nt, Artificial Sequence
  Description of Artificial Sequence: Synthetic oligonucleotide
  Antisense strand to SEQ ID NO: 1599843
uuggcaagaagccucgugg

SEQ ID NO: 1599845 - RNA, 19 nt, Artificial Sequence
  Description of Artificial Sequence: Synthetic oligonucleotide
  Sense strand starting at position 1855 of SEQ ID NO: 1560435
cgaggcuucuugccaacuu

SEQ ID NO: 1599846 - RNA, 19 nt, Artificial Sequence
  Description of Artificial Sequence: Synthetic oligonucleotide
  Antisense strand to SEQ ID NO: 1599845
aaguuggcaagaagccucg

SEQ ID NO: 1599847 - RNA, 19 nt, Artificial Sequence
  Description of Artificial Sequence: Synthetic oligonucleotide
  Sense strand starting at position 1871 of SEQ ID NO: 1560435
cuuccucuguccuagauuu

SEQ ID NO: 1599848 - RNA, 19 nt, Artificial Sequence
  Description of Artificial Sequence: Synthetic oligonucleotide
  Antisense strand to SEQ ID NO: 1599847
aaaucuaggacagaggaag

SEQ ID NO: 1599849 - RNA, 19 nt, Artificial Sequence
  Description of Artificial Sequence: Synthetic oligonucleotide
  Sense strand starting at position 2206 of SEQ ID NO: 1560435
uacacauguugcucuggaa

SEQ ID NO: 1599850 - RNA, 19 nt, Artificial Sequence
  Description of Artificial Sequence: Synthetic oligonucleotide
  Antisense strand to SEQ ID NO: 1599849
uuccagagcaacaugugua

SEQ ID NO: 1599851 - RNA, 19 nt, Artificial Sequence
  Description of Artificial Sequence: Synthetic oligonucleotide
  Sense strand starting at position 2209 of SEQ ID NO: 1560435
acauguugcucuggaaguu

SEQ ID NO: 1599852 - RNA, 19 nt, Artificial Sequence
  Description of Artificial Sequence: Synthetic oligonucleotide
  Antisense strand to SEQ ID NO: 1599851
aacuuccagagcaacaugu

SEQ ID NO: 1599853 - RNA, 19 nt, Artificial Sequence
  Description of Artificial Sequence: Synthetic oligonucleotide
  Sense strand starting at position 2620 of SEQ ID NO: 1560435
aucucacuucccugggauu

SEQ ID NO: 1599854 - RNA, 19 nt, Artificial Sequence
  Description of Artificial Sequence: Synthetic oligonucleotide
  Antisense strand to SEQ ID NO: 1599853
aaucccagggaagugagau

SEQ ID NO: 1599855 - RNA, 19 nt, Artificial Sequence
  Description of Artificial Sequence: Synthetic oligonucleotide
  Sense strand starting at position 3174 of SEQ ID NO: 1560435
cgcuguguucucgcacaca

SEQ ID NO: 1599856 - RNA, 19 nt, Artificial Sequence
  Description of Artificial Sequence: Synthetic oligonucleotide
  Antisense strand to SEQ ID NO: 1599855
ugugugcgagaacacagcg

SEQ ID NO: 1599857 - RNA, 19 nt, Artificial Sequence
  Description of Artificial Sequence: Synthetic oligonucleotide
  Sense strand starting at position 3202 of SEQ ID NO: 1560435
ucgggaugcgauuaacauu

SEQ ID NO: 1599858 - RNA, 19 nt, Artificial Sequence
  Description of Artificial Sequence: Synthetic oligonucleotide
  Antisense strand to SEQ ID NO: 1599857
aauguuaaucgcaucccga

SEQ ID NO: 1599859 - RNA, 19 nt, Artificial Sequence
  Description of Artificial Sequence: Synthetic oligonucleotide
  Sense strand starting at position 3337 of SEQ ID NO: 1560435
cugccuuccuccugggaca

SEQ ID NO: 1599860 - RNA, 19 nt, Artificial Sequence
  Description of Artificial Sequence: Synthetic oligonucleotide
  Antisense strand to SEQ ID NO: 1599859
ugucccaggaggaaggcag

SEQ ID NO: 1599861 - RNA, 19 nt, Artificial Sequence
  Description of Artificial Sequence: Synthetic oligonucleotide
  Sense strand starting at position 3338 of SEQ ID NO: 1560435
ugccuuccuccugggacaa

SEQ ID NO: 1599862 - RNA, 19 nt, Artificial Sequence
  Description of Artificial Sequence: Synthetic oligonucleotide
  Antisense strand to SEQ ID NO: 1599861
uugucccaggaggaaggca

SEQ ID NO: 1599863 - RNA, 19 nt, Artificial Sequence
  Description of Artificial Sequence: Synthetic oligonucleotide
  Sense strand starting at position 3498 of SEQ ID NO: 1560435
ccuugaggcucuggaaaca

SEQ ID NO: 1599864 - RNA, 19 nt, Artificial Sequence
  Description of Artificial Sequence: Synthetic oligonucleotide
  Antisense strand to SEQ ID NO: 1599863
uguuuccagagccucaagg

SEQ ID NO: 1599865 - RNA, 19 nt, Artificial Sequence
  Description of Artificial Sequence: Synthetic oligonucleotide
  Sense strand starting at position 3536 of SEQ ID NO: 1560435
caguguucgccacacuaag

SEQ ID NO: 1599866 - RNA, 19 nt, Artificial Sequence
  Description of Artificial Sequence: Synthetic oligonucleotide
  Antisense strand to SEQ ID NO: 1599865
cuuaguguggcgaacacug

SEQ ID NO: 1599867 - RNA, 19 nt, Artificial Sequence
  Description of Artificial Sequence: Synthetic oligonucleotide
  Sense strand starting at position 3767 of SEQ ID NO: 1560435
ggacccaagacucguggau

SEQ ID NO: 1599868 - RNA, 19 nt, Artificial Sequence
  Description of Artificial Sequence: Synthetic oligonucleotide
  Antisense strand to SEQ ID NO: 1599867
auccacgagucuugggucc

SEQ ID NO: 1599869 - RNA, 19 nt, Artificial Sequence
  Description of Artificial Sequence: Synthetic oligonucleotide
  Sense strand starting at position 3769 of SEQ ID NO: 1560435
acccaagacucguggaugu

SEQ ID NO: 1599870 - RNA, 19 nt, Artificial Sequence
  Description of Artificial Sequence: Synthetic oligonucleotide
  Antisense strand to SEQ ID NO: 1599869
acauccacgagucuugggu

SEQ ID NO: 1599871 - RNA, 19 nt, Artificial Sequence
  Description of Artificial Sequence: Synthetic oligonucleotide
  Sense strand starting at position 3771 of SEQ ID NO: 1560435
ccaagacucguggauguca

SEQ ID NO: 1599872 - RNA, 19 nt, Artificial Sequence
  Description of Artificial Sequence: Synthetic oligonucleotide
  Antisense strand to SEQ ID NO: 1599871
ugacauccacgagucuugg

SEQ ID NO: 1599873 - RNA, 19 nt, Artificial Sequence
  Description of Artificial Sequence: Synthetic oligonucleotide
  Sense strand starting at position 3807 of SEQ ID NO: 1560435
cuuccagcccucugaagaa

SEQ ID NO: 1599874 - RNA, 19 nt, Artificial Sequence
  Description of Artificial Sequence: Synthetic oligonucleotide
  Antisense strand to SEQ ID NO: 1599873
uucuucagagggcuggaag

SEQ ID NO: 1599875 - RNA, 19 nt, Artificial Sequence
  Description of Artificial Sequence: Synthetic oligonucleotide
  Sense strand starting at position 3867 of SEQ ID NO: 1560435
ccuccaucaucugugggua

SEQ ID NO: 1599876 - RNA, 19 nt, Artificial Sequence
  Description of Artificial Sequence: Synthetic oligonucleotide
  Antisense strand to SEQ ID NO: 1599875
uacccacagaugauggagg

SEQ ID NO: 1599877 - RNA, 19 nt, Artificial Sequence
  Description of Artificial Sequence: Synthetic oligonucleotide
  Sense strand starting at position 208 of SEQ ID NO: 1560436
uauauauccugaguagcug

SEQ ID NO: 1599878 - RNA, 19 nt, Artificial Sequence
  Description of Artificial Sequence: Synthetic oligonucleotide
  Antisense strand to SEQ ID NO: 1599877
cagcuacucaggauauaua

SEQ ID NO: 1599879 - RNA, 19 nt, Artificial Sequence
  Description of Artificial Sequence: Synthetic oligonucleotide
  Sense strand starting at position 405 of SEQ ID NO: 1560436
uaguauauuaaagguggga

SEQ ID NO: 1599880 - RNA, 19 nt, Artificial Sequence
  Description of Artificial Sequence: Synthetic oligonucleotide
  Antisense strand to SEQ ID NO: 1599879
ucccaccuuuaauauacua

SEQ ID NO: 1599881 - RNA, 19 nt, Artificial Sequence
  Description of Artificial Sequence: Synthetic oligonucleotide
  Sense strand starting at position 407 of SEQ ID NO: 1560436
guauauuaaaggugggaga

SEQ ID NO: 1599882 - RNA, 19 nt, Artificial Sequence
  Description of Artificial Sequence: Synthetic oligonucleotide
  Antisense strand to SEQ ID NO: 1599881
ucucccaccuuuaauauac

SEQ ID NO: 1599883 - RNA, 19 nt, Artificial Sequence
  Description of Artificial Sequence: Synthetic oligonucleotide
  Sense strand starting at position 2832 of SEQ ID NO: 1560436
acaggcaugucugauggaa

SEQ ID NO: 1599884 - RNA, 19 nt, Artificial Sequence
  Description of Artificial Sequence: Synthetic oligonucleotide
  Antisense strand to SEQ ID NO: 1599883
uuccaucagacaugccugu

SEQ ID NO: 1599885 - RNA, 19 nt, Artificial Sequence
  Description of Artificial Sequence: Synthetic oligonucleotide
  Sense strand starting at position 3078 of SEQ ID NO: 1560436
cuucuuauuuagugaccau

SEQ ID NO: 1599886 - RNA, 19 nt, Artificial Sequence
  Description of Artificial Sequence: Synthetic oligonucleotide
  Antisense strand to SEQ ID NO: 1599885
auggucacuaaauaagaag

SEQ ID NO: 1599887 - RNA, 19 nt, Artificial Sequence
  Description of Artificial Sequence: Synthetic oligonucleotide
  Sense strand starting at position 3169 of SEQ ID NO: 1560436
uugcuuguggcuugagcaa

SEQ ID NO: 1599888 - RNA, 19 nt, Artificial Sequence
  Description of Artificial Sequence: Synthetic oligonucleotide
  Antisense strand to SEQ ID NO: 1599887
uugcucaagccacaagcaa

SEQ ID NO: 1599889 - RNA, 19 nt, Artificial Sequence
  Description of Artificial Sequence: Synthetic oligonucleotide
  Sense strand starting at position 3352 of SEQ ID NO: 1560436
gcugcauccgucuauccau

SEQ ID NO: 1599890 - RNA, 19 nt, Artificial Sequence
  Description of Artificial Sequence: Synthetic oligonucleotide
  Antisense strand to SEQ ID NO: 1599889
auggauagacggaugcagc

SEQ ID NO: 1599891 - RNA, 19 nt, Artificial Sequence
  Description of Artificial Sequence: Synthetic oligonucleotide
  Sense strand starting at position 3457 of SEQ ID NO: 1560436
gccgcuguguugggaacau

SEQ ID NO: 1599892 - RNA, 19 nt, Artificial Sequence
  Description of Artificial Sequence: Synthetic oligonucleotide
  Antisense strand to SEQ ID NO: 1599891
auguucccaacacagcggc

SEQ ID NO: 1599893 - RNA, 19 nt, Artificial Sequence
  Description of Artificial Sequence: Synthetic oligonucleotide
  Sense strand starting at position 3684 of SEQ ID NO: 1560436
gagggauggcucgguucca

SEQ ID NO: 1599894 - RNA, 19 nt, Artificial Sequence
  Description of Artificial Sequence: Synthetic oligonucleotide
  Antisense strand to SEQ ID NO: 1599893
uggaaccgagccaucccuc

SEQ ID NO: 1599895 - RNA, 19 nt, Artificial Sequence
  Description of Artificial Sequence: Synthetic oligonucleotide
  Sense strand starting at position 21 of SEQ ID NO: 1560437
auguaaugacacugaucau

SEQ ID NO: 1599896 - RNA, 19 nt, Artificial Sequence
  Description of Artificial Sequence: Synthetic oligonucleotide
  Antisense strand to SEQ ID NO: 1599895
augaucagugucauuacau

SEQ ID NO: 1599897 - RNA, 19 nt, Artificial Sequence
  Description of Artificial Sequence: Synthetic oligonucleotide
  Sense strand starting at position 151 of SEQ ID NO: 1560437
ggaucaaucacucgagguc

SEQ ID NO: 1599898 - RNA, 19 nt, Artificial Sequence
  Description of Artificial Sequence: Synthetic oligonucleotide
  Antisense strand to SEQ ID NO: 1599897
gaccucgagugauugaucc

SEQ ID NO: 1599899 - RNA, 19 nt, Artificial Sequence
  Description of Artificial Sequence: Synthetic oligonucleotide
  Sense strand starting at position 152 of SEQ ID NO: 1560437
gaucaaucacucgagguca

SEQ ID NO: 1599900 - RNA, 19 nt, Artificial Sequence
  Description of Artificial Sequence: Synthetic oligonucleotide
  Antisense strand to SEQ ID NO: 1599899
ugaccucgagugauugauc

SEQ ID NO: 1599901 - RNA, 19 nt, Artificial Sequence
  Description of Artificial Sequence: Synthetic oligonucleotide
  Sense strand starting at position 1083 of SEQ ID NO: 1560437
gcaucaucagucugggaga

SEQ ID NO: 1599902 - RNA, 19 nt, Artificial Sequence
  Description of Artificial Sequence: Synthetic oligonucleotide
  Antisense strand to SEQ ID NO: 1599901
ucucccagacugaugaugc

SEQ ID NO: 1599903 - RNA, 19 nt, Artificial Sequence
  Description of Artificial Sequence: Synthetic oligonucleotide
  Sense strand starting at position 1109 of SEQ ID NO: 1560437
gggugaguuaggcacuaga

SEQ ID NO: 1599904 - RNA, 19 nt, Artificial Sequence
  Description of Artificial Sequence: Synthetic oligonucleotide
  Antisense strand to SEQ ID NO: 1599903
ucuagugccuaacucaccc

SEQ ID NO: 1599905 - RNA, 19 nt, Artificial Sequence
  Description of Artificial Sequence: Synthetic oligonucleotide
  Sense strand starting at position 1112 of SEQ ID NO: 1560437
ugaguuaggcacuagauuc

SEQ ID NO: 1599906 - RNA, 19 nt, Artificial Sequence
  Description of Artificial Sequence: Synthetic oligonucleotide
  Antisense strand to SEQ ID NO: 1599905
gaaucuagugccuaacuca

SEQ ID NO: 1599907 - RNA, 19 nt, Artificial Sequence
  Description of Artificial Sequence: Synthetic oligonucleotide
  Sense strand starting at position 1119 of SEQ ID NO: 1560437
ggcacuagauuccaggauu

SEQ ID NO: 1599908 - RNA, 19 nt, Artificial Sequence
  Description of Artificial Sequence: Synthetic oligonucleotide
  Antisense strand to SEQ ID NO: 1599907
aauccuggaaucuagugcc

SEQ ID NO: 1599909 - RNA, 19 nt, Artificial Sequence
  Description of Artificial Sequence: Synthetic oligonucleotide
  Sense strand starting at position 1130 of SEQ ID NO: 1560437
ccaggauucuuaggaagga

SEQ ID NO: 1599910 - RNA, 19 nt, Artificial Sequence
  Description of Artificial Sequence: Synthetic oligonucleotide
  Antisense strand to SEQ ID NO: 1599909
uccuuccuaagaauccugg

SEQ ID NO: 1599911 - RNA, 19 nt, Artificial Sequence
  Description of Artificial Sequence: Synthetic oligonucleotide
  Sense strand starting at position 1166 of SEQ ID NO: 1560437
gacuccuggaucugcgaga

SEQ ID NO: 1599912 - RNA, 19 nt, Artificial Sequence
  Description of Artificial Sequence: Synthetic oligonucleotide
  Antisense strand to SEQ ID NO: 1599911
ucucgcagauccaggaguc

SEQ ID NO: 1599913 - RNA, 19 nt, Artificial Sequence
  Description of Artificial Sequence: Synthetic oligonucleotide
  Sense strand starting at position 1413 of SEQ ID NO: 1560437
cgaguuaagacgggacagu

SEQ ID NO: 1599914 - RNA, 19 nt, Artificial Sequence
  Description of Artificial Sequence: Synthetic oligonucleotide
  Antisense strand to SEQ ID NO: 1599913
acugucccgucuuaacucg

SEQ ID NO: 1599915 - RNA, 19 nt, Artificial Sequence
  Description of Artificial Sequence: Synthetic oligonucleotide
  Sense strand starting at position 1463 of SEQ ID NO: 1560437
aaccgccuccgguaugaaa

SEQ ID NO: 1599916 - RNA, 19 nt, Artificial Sequence
  Description of Artificial Sequence: Synthetic oligonucleotide
  Antisense strand to SEQ ID NO: 1599915
uuucauaccggaggcgguu

SEQ ID NO: 1599917 - RNA, 19 nt, Artificial Sequence
  Description of Artificial Sequence: Synthetic oligonucleotide
  Sense strand starting at position 1526 of SEQ ID NO: 1560437
gguuaaaggcucgggauca

SEQ ID NO: 1599918 - RNA, 19 nt, Artificial Sequence
  Description of Artificial Sequence: Synthetic oligonucleotide
  Antisense strand to SEQ ID NO: 1599917
ugaucccgagccuuuaacc

SEQ ID NO: 1599919 - RNA, 19 nt, Artificial Sequence
  Description of Artificial Sequence: Synthetic oligonucleotide
  Sense strand starting at position 2022 of SEQ ID NO: 1560437
guaguucuacgggaggcuu

SEQ ID NO: 1599920 - RNA, 19 nt, Artificial Sequence
  Description of Artificial Sequence: Synthetic oligonucleotide
  Antisense strand to SEQ ID NO: 1599919
aagccucccguagaacuac

SEQ ID NO: 1599921 - RNA, 19 nt, Artificial Sequence
  Description of Artificial Sequence: Synthetic oligonucleotide
  Sense strand starting at position 2058 of SEQ ID NO: 1560437
guuugauuccgagagcguu

SEQ ID NO: 1599922 - RNA, 19 nt, Artificial Sequence
  Description of Artificial Sequence: Synthetic oligonucleotide
  Antisense strand to SEQ ID NO: 1599921
aacgcucucggaaucaaac

SEQ ID NO: 1599923 - RNA, 19 nt, Artificial Sequence
  Description of Artificial Sequence: Synthetic oligonucleotide
  Sense strand starting at position 2126 of SEQ ID NO: 1560437
caaggagacugaguuucua

SEQ ID NO: 1599924 - RNA, 19 nt, Artificial Sequence
  Description of Artificial Sequence: Synthetic oligonucleotide
  Antisense strand to SEQ ID NO: 1599923
uagaaacucagucuccuug

SEQ ID NO: 1599925 - RNA, 19 nt, Artificial Sequence
  Description of Artificial Sequence: Synthetic oligonucleotide
  Sense strand starting at position 2215 of SEQ ID NO: 1560437
ugcuuucuuguagacagga

SEQ ID NO: 1599926 - RNA, 19 nt, Artificial Sequence
  Description of Artificial Sequence: Synthetic oligonucleotide
  Antisense strand to SEQ ID NO: 1599925
uccugucuacaagaaagca

SEQ ID NO: 1599927 - RNA, 19 nt, Artificial Sequence
  Description of Artificial Sequence: Synthetic oligonucleotide
  Sense strand starting at position 2232 of SEQ ID NO: 1560437
gauggauauuaucuguaag

SEQ ID NO: 1599928 - RNA, 19 nt, Artificial Sequence
  Description of Artificial Sequence: Synthetic oligonucleotide
  Antisense strand to SEQ ID NO: 1599927
cuuacagauaauauccauc

SEQ ID NO: 1599929 - RNA, 19 nt, Artificial Sequence
  Description of Artificial Sequence: Synthetic oligonucleotide
  Sense strand starting at position 2234 of SEQ ID NO: 1560437
uggauauuaucuguaaguu

SEQ ID NO: 1599930 - RNA, 19 nt, Artificial Sequence
  Description of Artificial Sequence: Synthetic oligonucleotide
  Antisense strand to SEQ ID NO: 1599929
aacuuacagauaauaucca

SEQ ID NO: 1599931 - RNA, 19 nt, Artificial Sequence
  Description of Artificial Sequence: Synthetic oligonucleotide
  Sense strand starting at position 2235 of SEQ ID NO: 1560437
ggauauuaucuguaaguua

SEQ ID NO: 1599932 - RNA, 19 nt, Artificial Sequence
  Description of Artificial Sequence: Synthetic oligonucleotide
  Antisense strand to SEQ ID NO: 1599931
uaacuuacagauaauaucc

SEQ ID NO: 1599933 - RNA, 19 nt, Artificial Sequence
  Description of Artificial Sequence: Synthetic oligonucleotide
  Sense strand starting at position 2322 of SEQ ID NO: 1560437
gcgagcacuuaaucagaaa

SEQ ID NO: 1599934 - RNA, 19 nt, Artificial Sequence
  Description of Artificial Sequence: Synthetic oligonucleotide
  Antisense strand to SEQ ID NO: 1599933
uuucugauuaagugcucgc

SEQ ID NO: 1599935 - RNA, 19 nt, Artificial Sequence
  Description of Artificial Sequence: Synthetic oligonucleotide
  Sense strand starting at position 2325 of SEQ ID NO: 1560437
agcacuuaaucagaaaguc

SEQ ID NO: 1599936 - RNA, 19 nt, Artificial Sequence
  Description of Artificial Sequence: Synthetic oligonucleotide
  Antisense strand to SEQ ID NO: 1599935
gacuuucugauuaagugcu

SEQ ID NO: 1599937 - RNA, 19 nt, Artificial Sequence
  Description of Artificial Sequence: Synthetic oligonucleotide
  Sense strand starting at position 2369 of SEQ ID NO: 1560437
gugcuucgucucucuuuau

SEQ ID NO: 1599938 - RNA, 19 nt, Artificial Sequence
  Description of Artificial Sequence: Synthetic oligonucleotide
  Antisense strand to SEQ ID NO: 1599937
auaaagagagacgaagcac

SEQ ID NO: 1599939 - RNA, 19 nt, Artificial Sequence
  Description of Artificial Sequence: Synthetic oligonucleotide
  Sense strand starting at position 2404 of SEQ ID NO: 1560437
cgguuuggcuaauugacau

SEQ ID NO: 1599940 - RNA, 19 nt, Artificial Sequence
  Description of Artificial Sequence: Synthetic oligonucleotide
  Antisense strand to SEQ ID NO: 1599939
augucaauuagccaaaccg

SEQ ID NO: 1599941 - RNA, 19 nt, Artificial Sequence
  Description of Artificial Sequence: Synthetic oligonucleotide
  Sense strand starting at position 2435 of SEQ ID NO: 1560437
gaaauagauucucauuggu

SEQ ID NO: 1599942 - RNA, 19 nt, Artificial Sequence
  Description of Artificial Sequence: Synthetic oligonucleotide
  Antisense strand to SEQ ID NO: 1599941
accaaugagaaucuauuuc

SEQ ID NO: 1599943 - RNA, 19 nt, Artificial Sequence
  Description of Artificial Sequence: Synthetic oligonucleotide
  Sense strand starting at position 2437 of SEQ ID NO: 1560437
aauagauucucauugguga

SEQ ID NO: 1599944 - RNA, 19 nt, Artificial Sequence
  Description of Artificial Sequence: Synthetic oligonucleotide
  Antisense strand to SEQ ID NO: 1599943
ucaccaaugagaaucuauu

SEQ ID NO: 1599945 - RNA, 19 nt, Artificial Sequence
  Description of Artificial Sequence: Synthetic oligonucleotide
  Sense strand starting at position 2438 of SEQ ID NO: 1560437
auagauucucauuggugag

SEQ ID NO: 1599946 - RNA, 19 nt, Artificial Sequence
  Description of Artificial Sequence: Synthetic oligonucleotide
  Antisense strand to SEQ ID NO: 1599945
cucaccaaugagaaucuau

SEQ ID NO: 1599947 - RNA, 19 nt, Artificial Sequence
  Description of Artificial Sequence: Synthetic oligonucleotide
  Sense strand starting at position 2440 of SEQ ID NO: 1560437
agauucucauuggugagau

SEQ ID NO: 1599948 - RNA, 19 nt, Artificial Sequence
  Description of Artificial Sequence: Synthetic oligonucleotide
  Antisense strand to SEQ ID NO: 1599947
aucucaccaaugagaaucu

SEQ ID NO: 1599949 - RNA, 19 nt, Artificial Sequence
  Description of Artificial Sequence: Synthetic oligonucleotide
  Sense strand starting at position 2444 of SEQ ID NO: 1560437
ucucauuggugagauuaac

SEQ ID NO: 1599950 - RNA, 19 nt, Artificial Sequence
  Description of Artificial Sequence: Synthetic oligonucleotide
  Antisense strand to SEQ ID NO: 1599949
guuaaucucaccaaugaga

SEQ ID NO: 1599951 - RNA, 19 nt, Artificial Sequence
  Description of Artificial Sequence: Synthetic oligonucleotide
  Sense strand starting at position 2477 of SEQ ID NO: 1560437
ugcggauuggcugggauau

SEQ ID NO: 1599952 - RNA, 19 nt, Artificial Sequence
  Description of Artificial Sequence: Synthetic oligonucleotide
  Antisense strand to SEQ ID NO: 1599951
auaucccagccaauccgca

SEQ ID NO: 1599953 - RNA, 19 nt, Artificial Sequence
  Description of Artificial Sequence: Synthetic oligonucleotide
  Sense strand starting at position 2478 of SEQ ID NO: 1560437
gcggauuggcugggauaug

SEQ ID NO: 1599954 - RNA, 19 nt, Artificial Sequence
  Description of Artificial Sequence: Synthetic oligonucleotide
  Antisense strand to SEQ ID NO: 1599953
cauaucccagccaauccgc

SEQ ID NO: 1599955 - RNA, 19 nt, Artificial Sequence
  Description of Artificial Sequence: Synthetic oligonucleotide
  Sense strand starting at position 2483 of SEQ ID NO: 1560437
uuggcugggauaugucaga

SEQ ID NO: 1599956 - RNA, 19 nt, Artificial Sequence
  Description of Artificial Sequence: Synthetic oligonucleotide
  Antisense strand to SEQ ID NO: 1599955
ucugacauaucccagccaa

SEQ ID NO: 1599957 - RNA, 19 nt, Artificial Sequence
  Description of Artificial Sequence: Synthetic oligonucleotide
  Sense strand starting at position 2488 of SEQ ID NO: 1560437
ugggauaugucagacacuc

SEQ ID NO: 1599958 - RNA, 19 nt, Artificial Sequence
  Description of Artificial Sequence: Synthetic oligonucleotide
  Antisense strand to SEQ ID NO: 1599957
gagugucugacauauccca

SEQ ID NO: 1599959 - RNA, 19 nt, Artificial Sequence
  Description of Artificial Sequence: Synthetic oligonucleotide
  Sense strand starting at position 2519 of SEQ ID NO: 1560437
ugaacaggauauugagaau

SEQ ID NO: 1599960 - RNA, 19 nt, Artificial Sequence
  Description of Artificial Sequence: Synthetic oligonucleotide
  Antisense strand to SEQ ID NO: 1599959
auucucaauauccuguuca

SEQ ID NO: 1599961 - RNA, 19 nt, Artificial Sequence
  Description of Artificial Sequence: Synthetic oligonucleotide
  Sense strand starting at position 2522 of SEQ ID NO: 1560437
acaggauauugagaaugua

SEQ ID NO: 1599962 - RNA, 19 nt, Artificial Sequence
  Description of Artificial Sequence: Synthetic oligonucleotide
  Antisense strand to SEQ ID NO: 1599961
uacauucucaauauccugu

SEQ ID NO: 1599963 - RNA, 19 nt, Artificial Sequence
  Description of Artificial Sequence: Synthetic oligonucleotide
  Sense strand starting at position 2525 of SEQ ID NO: 1560437
ggauauugagaauguagca

SEQ ID NO: 1599964 - RNA, 19 nt, Artificial Sequence
  Description of Artificial Sequence: Synthetic oligonucleotide
  Antisense strand to SEQ ID NO: 1599963
ugcuacauucucaauaucc

SEQ ID NO: 1599965 - RNA, 19 nt, Artificial Sequence
  Description of Artificial Sequence: Synthetic oligonucleotide
  Sense strand starting at position 2782 of SEQ ID NO: 1560437
uguuucuguuuccuccaga

SEQ ID NO: 1599966 - RNA, 19 nt, Artificial Sequence
  Description of Artificial Sequence: Synthetic oligonucleotide
  Antisense strand to SEQ ID NO: 1599965
ucuggaggaaacagaaaca

SEQ ID NO: 1599967 - RNA, 19 nt, Artificial Sequence
  Description of Artificial Sequence: Synthetic oligonucleotide
  Sense strand starting at position 2783 of SEQ ID NO: 1560437
guuucuguuuccuccagag

SEQ ID NO: 1599968 - RNA, 19 nt, Artificial Sequence
  Description of Artificial Sequence: Synthetic oligonucleotide
  Antisense strand to SEQ ID NO: 1599967
cucuggaggaaacagaaac

SEQ ID NO: 1599969 - RNA, 19 nt, Artificial Sequence
  Description of Artificial Sequence: Synthetic oligonucleotide
  Sense strand starting at position 2785 of SEQ ID NO: 1560437
uucuguuuccuccagagaa

SEQ ID NO: 1599970 - RNA, 19 nt, Artificial Sequence
  Description of Artificial Sequence: Synthetic oligonucleotide
  Antisense strand to SEQ ID NO: 1599969
uucucuggaggaaacagaa

SEQ ID NO: 1599971 - RNA, 19 nt, Artificial Sequence
  Description of Artificial Sequence: Synthetic oligonucleotide
  Sense strand starting at position 2787 of SEQ ID NO: 1560437
cuguuuccuccagagaauu

SEQ ID NO: 1599972 - RNA, 19 nt, Artificial Sequence
  Description of Artificial Sequence: Synthetic oligonucleotide
  Antisense strand to SEQ ID NO: 1599971
aauucucuggaggaaacag

SEQ ID NO: 1599973 - RNA, 19 nt, Artificial Sequence
  Description of Artificial Sequence: Synthetic oligonucleotide
  Sense strand starting at position 2827 of SEQ ID NO: 1560437
gagcuuaggcuuggacuga

SEQ ID NO: 1599974 - RNA, 19 nt, Artificial Sequence
  Description of Artificial Sequence: Synthetic oligonucleotide
  Antisense strand to SEQ ID NO: 1599973
ucaguccaagccuaagcuc

SEQ ID NO: 1599975 - RNA, 19 nt, Artificial Sequence
  Description of Artificial Sequence: Synthetic oligonucleotide
  Sense strand starting at position 70 of SEQ ID NO: 1560438
cugguucuuggugacagaa

SEQ ID NO: 1599976 - RNA, 19 nt, Artificial Sequence
  Description of Artificial Sequence: Synthetic oligonucleotide
  Antisense strand to SEQ ID NO: 1599975
uucugucaccaagaaccag

SEQ ID NO: 1599977 - RNA, 19 nt, Artificial Sequence
  Description of Artificial Sequence: Synthetic oligonucleotide
  Sense strand starting at position 217 of SEQ ID NO: 1560438
guggguggucccuaaugga

SEQ ID NO: 1599978 - RNA, 19 nt, Artificial Sequence
  Description of Artificial Sequence: Synthetic oligonucleotide
  Antisense strand to SEQ ID NO: 1599977
uccauuagggaccacccac

SEQ ID NO: 1599979 - RNA, 19 nt, Artificial Sequence
  Description of Artificial Sequence: Synthetic oligonucleotide
  Sense strand starting at position 256 of SEQ ID NO: 1560438
ugaugaaccugaccuuuau

SEQ ID NO: 1599980 - RNA, 19 nt, Artificial Sequence
  Description of Artificial Sequence: Synthetic oligonucleotide
  Antisense strand to SEQ ID NO: 1599979
auaaaggucagguucauca

SEQ ID NO: 1599981 - RNA, 19 nt, Artificial Sequence
  Description of Artificial Sequence: Synthetic oligonucleotide
  Sense strand starting at position 269 of SEQ ID NO: 1560438
cuuuauuaucaaggagcua

SEQ ID NO: 1599982 - RNA, 19 nt, Artificial Sequence
  Description of Artificial Sequence: Synthetic oligonucleotide
  Antisense strand to SEQ ID NO: 1599981
uagcuccuugauaauaaag

SEQ ID NO: 1599983 - RNA, 19 nt, Artificial Sequence
  Description of Artificial Sequence: Synthetic oligonucleotide
  Sense strand starting at position 293 of SEQ ID NO: 1560438
gccucaguccuuugaagga

SEQ ID NO: 1599984 - RNA, 19 nt, Artificial Sequence
  Description of Artificial Sequence: Synthetic oligonucleotide
  Antisense strand to SEQ ID NO: 1599983
uccuucaaaggacugaggc

SEQ ID NO: 1599985 - RNA, 19 nt, Artificial Sequence
  Description of Artificial Sequence: Synthetic oligonucleotide
  Sense strand starting at position 360 of SEQ ID NO: 1560438
gccauucuuagaggauagu

SEQ ID NO: 1599986 - RNA, 19 nt, Artificial Sequence
  Description of Artificial Sequence: Synthetic oligonucleotide
  Antisense strand to SEQ ID NO: 1599985
acuauccucuaagaauggc

SEQ ID NO: 1599987 - RNA, 19 nt, Artificial Sequence
  Description of Artificial Sequence: Synthetic oligonucleotide
  Sense strand starting at position 742 of SEQ ID NO: 1560438
guucuuucagagggagaua

SEQ ID NO: 1599988 - RNA, 19 nt, Artificial Sequence
  Description of Artificial Sequence: Synthetic oligonucleotide
  Antisense strand to SEQ ID NO: 1599987
uaucucccucugaaagaac

SEQ ID NO: 1599989 - RNA, 19 nt, Artificial Sequence
  Description of Artificial Sequence: Synthetic oligonucleotide
  Sense strand starting at position 835 of SEQ ID NO: 1560438
gauccauauucuguaggaa

SEQ ID NO: 1599990 - RNA, 19 nt, Artificial Sequence
  Description of Artificial Sequence: Synthetic oligonucleotide
  Antisense strand to SEQ ID NO: 1599989
uuccuacagaauauggauc

SEQ ID NO: 1599991 - RNA, 19 nt, Artificial Sequence
  Description of Artificial Sequence: Synthetic oligonucleotide
  Sense strand starting at position 838 of SEQ ID NO: 1560438
ccauauucuguaggaaacu

SEQ ID NO: 1599992 - RNA, 19 nt, Artificial Sequence
  Description of Artificial Sequence: Synthetic oligonucleotide
  Antisense strand to SEQ ID NO: 1599991
aguuuccuacagaauaugg

SEQ ID NO: 1599993 - RNA, 19 nt, Artificial Sequence
  Description of Artificial Sequence: Synthetic oligonucleotide
  Sense strand starting at position 943 of SEQ ID NO: 1560438
aggauaugcugacucccaa

SEQ ID NO: 1599994 - RNA, 19 nt, Artificial Sequence
  Description of Artificial Sequence: Synthetic oligonucleotide
  Antisense strand to SEQ ID NO: 1599993
uugggagucagcauauccu

SEQ ID NO: 1599995 - RNA, 19 nt, Artificial Sequence
  Description of Artificial Sequence: Synthetic oligonucleotide
  Sense strand starting at position 1008 of SEQ ID NO: 1560438
aguacagcucaacaagauu

SEQ ID NO: 1599996 - RNA, 19 nt, Artificial Sequence
  Description of Artificial Sequence: Synthetic oligonucleotide
  Antisense strand to SEQ ID NO: 1599995
aaucuuguugagcuguacu

SEQ ID NO: 1599997 - RNA, 19 nt, Artificial Sequence
  Description of Artificial Sequence: Synthetic oligonucleotide
  Sense strand starting at position 1088 of SEQ ID NO: 1560438
uggaaagccuggcccuauu

SEQ ID NO: 1599998 - RNA, 19 nt, Artificial Sequence
  Description of Artificial Sequence: Synthetic oligonucleotide
  Antisense strand to SEQ ID NO: 1599997
aauagggccaggcuuucca

SEQ ID NO: 1599999 - RNA, 19 nt, Artificial Sequence
  Description of Artificial Sequence: Synthetic oligonucleotide
  Sense strand starting at position 1137 of SEQ ID NO: 1560438
cccugcuucuaagugauau

SEQ ID NO: 1600000 - RNA, 19 nt, Artificial Sequence
  Description of Artificial Sequence: Synthetic oligonucleotide
  Antisense strand to SEQ ID NO: 1599999
auaucacuuagaagcaggg

SEQ ID NO: 1600001 - RNA, 19 nt, Artificial Sequence
  Description of Artificial Sequence: Synthetic oligonucleotide
  Sense strand starting at position 1147 of SEQ ID NO: 1560438
aagugauauucgcuccaaa

SEQ ID NO: 1600002 - RNA, 19 nt, Artificial Sequence
  Description of Artificial Sequence: Synthetic oligonucleotide
  Antisense strand to SEQ ID NO: 1600001
uuuggagcgaauaucacuu

SEQ ID NO: 1600003 - RNA, 19 nt, Artificial Sequence
  Description of Artificial Sequence: Synthetic oligonucleotide
  Sense strand starting at position 1269 of SEQ ID NO: 1560438
gacugugaccucugaucca

SEQ ID NO: 1600004 - RNA, 19 nt, Artificial Sequence
  Description of Artificial Sequence: Synthetic oligonucleotide
  Antisense strand to SEQ ID NO: 1600003
uggaucagaggucacaguc

SEQ ID NO: 1600005 - RNA, 19 nt, Artificial Sequence
  Description of Artificial Sequence: Synthetic oligonucleotide
  Sense strand starting at position 1272 of SEQ ID NO: 1560438
ugugaccucugauccaaua

SEQ ID NO: 1600006 - RNA, 19 nt, Artificial Sequence
  Description of Artificial Sequence: Synthetic oligonucleotide
  Antisense strand to SEQ ID NO: 1600005
uauuggaucagaggucaca

SEQ ID NO: 1600007 - RNA, 19 nt, Artificial Sequence
  Description of Artificial Sequence: Synthetic oligonucleotide
  Sense strand starting at position 1309 of SEQ ID NO: 1560438
ucagauaccuguucuuaag

SEQ ID NO: 1600008 - RNA, 19 nt, Artificial Sequence
  Description of Artificial Sequence: Synthetic oligonucleotide
  Antisense strand to SEQ ID NO: 1600007
cuuaagaacagguaucuga

SEQ ID NO: 1600009 - RNA, 19 nt, Artificial Sequence
  Description of Artificial Sequence: Synthetic oligonucleotide
  Sense strand starting at position 1381 of SEQ ID NO: 1560438
cuuuaaguguuaguaauuc

SEQ ID NO: 1600010 - RNA, 19 nt, Artificial Sequence
  Description of Artificial Sequence: Synthetic oligonucleotide
  Antisense strand to SEQ ID NO: 1600009
gaauuacuaacacuuaaag

SEQ ID NO: 1600011 - RNA, 19 nt, Artificial Sequence
  Description of Artificial Sequence: Synthetic oligonucleotide
  Sense strand starting at position 1385 of SEQ ID NO: 1560438
aaguguuaguaauucugau

SEQ ID NO: 1600012 - RNA, 19 nt, Artificial Sequence
  Description of Artificial Sequence: Synthetic oligonucleotide
  Antisense strand to SEQ ID NO: 1600011
aucagaauuacuaacacuu

SEQ ID NO: 1600013 - RNA, 19 nt, Artificial Sequence
  Description of Artificial Sequence: Synthetic oligonucleotide
  Sense strand starting at position 1391 of SEQ ID NO: 1560438
uaguaauucugauccacga

SEQ ID NO: 1600014 - RNA, 19 nt, Artificial Sequence
  Description of Artificial Sequence: Synthetic oligonucleotide
  Antisense strand to SEQ ID NO: 1600013
ucguggaucagaauuacua

SEQ ID NO: 1600015 - RNA, 19 nt, Artificial Sequence
  Description of Artificial Sequence: Synthetic oligonucleotide
  Sense strand starting at position 1393 of SEQ ID NO: 1560438
guaauucugauccacgagu

SEQ ID NO: 1600016 - RNA, 19 nt, Artificial Sequence
  Description of Artificial Sequence: Synthetic oligonucleotide
  Antisense strand to SEQ ID NO: 1600015
acucguggaucagaauuac

SEQ ID NO: 1600017 - RNA, 19 nt, Artificial Sequence
  Description of Artificial Sequence: Synthetic oligonucleotide
  Sense strand starting at position 1395 of SEQ ID NO: 1560438
aauucugauccacgaguaa

SEQ ID NO: 1600018 - RNA, 19 nt, Artificial Sequence
  Description of Artificial Sequence: Synthetic oligonucleotide
  Antisense strand to SEQ ID NO: 1600017
uuacucguggaucagaauu

SEQ ID NO: 1600019 - RNA, 19 nt, Artificial Sequence
  Description of Artificial Sequence: Synthetic oligonucleotide
  Sense strand starting at position 1522 of SEQ ID NO: 1560438
augaaagaaucugauggau

SEQ ID NO: 1600020 - RNA, 19 nt, Artificial Sequence
  Description of Artificial Sequence: Synthetic oligonucleotide
  Antisense strand to SEQ ID NO: 1600019
auccaucagauucuuucau

SEQ ID NO: 1600021 - RNA, 19 nt, Artificial Sequence
  Description of Artificial Sequence: Synthetic oligonucleotide
  Sense strand starting at position 1528 of SEQ ID NO: 1560438
gaaucugauggaugucuga

SEQ ID NO: 1600022 - RNA, 19 nt, Artificial Sequence
  Description of Artificial Sequence: Synthetic oligonucleotide
  Antisense strand to SEQ ID NO: 1600021
ucagacauccaucagauuc

SEQ ID NO: 1600023 - RNA, 19 nt, Artificial Sequence
  Description of Artificial Sequence: Synthetic oligonucleotide
  Sense strand starting at position 2136 of SEQ ID NO: 1560438
cagaguagaccgcgggaau

SEQ ID NO: 1600024 - RNA, 19 nt, Artificial Sequence
  Description of Artificial Sequence: Synthetic oligonucleotide
  Antisense strand to SEQ ID NO: 1600023
auucccgcggucuacucug

SEQ ID NO: 1600025 - RNA, 19 nt, Artificial Sequence
  Description of Artificial Sequence: Synthetic oligonucleotide
  Sense strand starting at position 2149 of SEQ ID NO: 1560438
gggaaugaugggcgggaau

SEQ ID NO: 1600026 - RNA, 19 nt, Artificial Sequence
  Description of Artificial Sequence: Synthetic oligonucleotide
  Antisense strand to SEQ ID NO: 1600025
auucccgcccaucauuccc

SEQ ID NO: 1600027 - RNA, 19 nt, Artificial Sequence
  Description of Artificial Sequence: Synthetic oligonucleotide
  Sense strand starting at position 2151 of SEQ ID NO: 1560438
gaaugaugggcgggaauga

SEQ ID NO: 1600028 - RNA, 19 nt, Artificial Sequence
  Description of Artificial Sequence: Synthetic oligonucleotide
  Antisense strand to SEQ ID NO: 1600027
ucauucccgcccaucauuc

SEQ ID NO: 1600029 - RNA, 19 nt, Artificial Sequence
  Description of Artificial Sequence: Synthetic oligonucleotide
  Sense strand starting at position 2192 of SEQ ID NO: 1560438
aauggaguccaggguaauc

SEQ ID NO: 1600030 - RNA, 19 nt, Artificial Sequence
  Description of Artificial Sequence: Synthetic oligonucleotide
  Antisense strand to SEQ ID NO: 1600029
gauuacccuggacuccauu

SEQ ID NO: 1600031 - RNA, 19 nt, Artificial Sequence
  Description of Artificial Sequence: Synthetic oligonucleotide
  Sense strand starting at position 2632 of SEQ ID NO: 1560438
ugguguguucugggaaaug

SEQ ID NO: 1600032 - RNA, 19 nt, Artificial Sequence
  Description of Artificial Sequence: Synthetic oligonucleotide
  Antisense strand to SEQ ID NO: 1600031
cauuucccagaacacacca

SEQ ID NO: 1600033 - RNA, 19 nt, Artificial Sequence
  Description of Artificial Sequence: Synthetic oligonucleotide
  Sense strand starting at position 2644 of SEQ ID NO: 1560438
ggaaauggaguucgacgua

SEQ ID NO: 1600034 - RNA, 19 nt, Artificial Sequence
  Description of Artificial Sequence: Synthetic oligonucleotide
  Antisense strand to SEQ ID NO: 1600033
uacgucgaacuccauuucc

SEQ ID NO: 1600035 - RNA, 19 nt, Artificial Sequence
  Description of Artificial Sequence: Synthetic oligonucleotide
  Sense strand starting at position 2692 of SEQ ID NO: 1560438
gcccaugagcuccaagcau

SEQ ID NO: 1600036 - RNA, 19 nt, Artificial Sequence
  Description of Artificial Sequence: Synthetic oligonucleotide
  Antisense strand to SEQ ID NO: 1600035
augcuuggagcucaugggc

SEQ ID NO: 1600037 - RNA, 19 nt, Artificial Sequence
  Description of Artificial Sequence: Synthetic oligonucleotide
  Sense strand starting at position 2799 of SEQ ID NO: 1560438
gugugaacgaaagguuaga

SEQ ID NO: 1600038 - RNA, 19 nt, Artificial Sequence
  Description of Artificial Sequence: Synthetic oligonucleotide
  Antisense strand to SEQ ID NO: 1600037
ucuaaccuuucguucacac

SEQ ID NO: 1600039 - RNA, 19 nt, Artificial Sequence
  Description of Artificial Sequence: Synthetic oligonucleotide
  Sense strand starting at position 2875 of SEQ ID NO: 1560438
ccagguccuucuuuaagaa

SEQ ID NO: 1600040 - RNA, 19 nt, Artificial Sequence
  Description of Artificial Sequence: Synthetic oligonucleotide
  Antisense strand to SEQ ID NO: 1600039
uucuuaaagaaggaccugg

SEQ ID NO: 1600041 - RNA, 19 nt, Artificial Sequence
  Description of Artificial Sequence: Synthetic oligonucleotide
  Sense strand starting at position 2945 of SEQ ID NO: 1560438
guuccaggugaccauagau

SEQ ID NO: 1600042 - RNA, 19 nt, Artificial Sequence
  Description of Artificial Sequence: Synthetic oligonucleotide
  Antisense strand to SEQ ID NO: 1600041
aucuauggucaccuggaac

SEQ ID NO: 1600043 - RNA, 19 nt, Artificial Sequence
  Description of Artificial Sequence: Synthetic oligonucleotide
  Sense strand starting at position 2991 of SEQ ID NO: 1560438
accgcaacucugcaaagau

SEQ ID NO: 1600044 - RNA, 19 nt, Artificial Sequence
  Description of Artificial Sequence: Synthetic oligonucleotide
  Antisense strand to SEQ ID NO: 1600043
aucuuugcagaguugcggu

SEQ ID NO: 1600045 - RNA, 19 nt, Artificial Sequence
  Description of Artificial Sequence: Synthetic oligonucleotide
  Sense strand starting at position 2999 of SEQ ID NO: 1560438
ucugcaaagauucgggaaa

SEQ ID NO: 1600046 - RNA, 19 nt, Artificial Sequence
  Description of Artificial Sequence: Synthetic oligonucleotide
  Antisense strand to SEQ ID NO: 1600045
uuucccgaaucuuugcaga

SEQ ID NO: 1600047 - RNA, 19 nt, Artificial Sequence
  Description of Artificial Sequence: Synthetic oligonucleotide
  Sense strand starting at position 3044 of SEQ ID NO: 1560438
acuaacuagucuucggaua

SEQ ID NO: 1600048 - RNA, 19 nt, Artificial Sequence
  Description of Artificial Sequence: Synthetic oligonucleotide
  Antisense strand to SEQ ID NO: 1600047
uauccgaagacuaguuagu

SEQ ID NO: 1600049 - RNA, 19 nt, Artificial Sequence
  Description of Artificial Sequence: Synthetic oligonucleotide
  Sense strand starting at position 3900 of SEQ ID NO: 1560438
agucguccuauuuaucgau

SEQ ID NO: 1600050 - RNA, 19 nt, Artificial Sequence
  Description of Artificial Sequence: Synthetic oligonucleotide
  Antisense strand to SEQ ID NO: 1600049
aucgauaaauaggacgacu

SEQ ID NO: 1600051 - RNA, 19 nt, Artificial Sequence
  Description of Artificial Sequence: Synthetic oligonucleotide
  Sense strand starting at position 3902 of SEQ ID NO: 1560438
ucguccuauuuaucgauua

SEQ ID NO: 1600052 - RNA, 19 nt, Artificial Sequence
  Description of Artificial Sequence: Synthetic oligonucleotide
  Antisense strand to SEQ ID NO: 1600051
uaaucgauaaauaggacga

SEQ ID NO: 1600053 - RNA, 19 nt, Artificial Sequence
  Description of Artificial Sequence: Synthetic oligonucleotide
  Sense strand starting at position 3914 of SEQ ID NO: 1560438
ucgauuaauacccgaagga

SEQ ID NO: 1600054 - RNA, 19 nt, Artificial Sequence
  Description of Artificial Sequence: Synthetic oligonucleotide
  Antisense strand to SEQ ID NO: 1600053
uccuucggguauuaaucga

SEQ ID NO: 1600055 - RNA, 19 nt, Artificial Sequence
  Description of Artificial Sequence: Synthetic oligonucleotide
  Sense strand starting at position 20 of SEQ ID NO: 1560439
ccagauaaaccauggccaa

SEQ ID NO: 1600056 - RNA, 19 nt, Artificial Sequence
  Description of Artificial Sequence: Synthetic oligonucleotide
  Antisense strand to SEQ ID NO: 1600055
uuggccaugguuuaucugg

SEQ ID NO: 1600057 - RNA, 19 nt, Artificial Sequence
  Description of Artificial Sequence: Synthetic oligonucleotide
  Sense strand starting at position 568 of SEQ ID NO: 1560439
gggucaaguucucucacca

SEQ ID NO: 1600058 - RNA, 19 nt, Artificial Sequence
  Description of Artificial Sequence: Synthetic oligonucleotide
  Antisense strand to SEQ ID NO: 1600057
uggugagagaacuugaccc

SEQ ID NO: 1600059 - RNA, 19 nt, Artificial Sequence
  Description of Artificial Sequence: Synthetic oligonucleotide
  Sense strand starting at position 609 of SEQ ID NO: 1560439
cucagagacuuaccugauu

SEQ ID NO: 1600060 - RNA, 19 nt, Artificial Sequence
  Description of Artificial Sequence: Synthetic oligonucleotide
  Antisense strand to SEQ ID NO: 1600059
aaucagguaagucucugag

SEQ ID NO: 1600061 - RNA, 19 nt, Artificial Sequence
  Description of Artificial Sequence: Synthetic oligonucleotide
  Sense strand starting at position 642 of SEQ ID NO: 1560439
ugacuuugucggcugcauu

SEQ ID NO: 1600062 - RNA, 19 nt, Artificial Sequence
  Description of Artificial Sequence: Synthetic oligonucleotide
  Antisense strand to SEQ ID NO: 1600061
aaugcagccgacaaaguca

SEQ ID NO: 1600063 - RNA, 19 nt, Artificial Sequence
  Description of Artificial Sequence: Synthetic oligonucleotide
  Sense strand starting at position 686 of SEQ ID NO: 1560439
guuguauuccuggagugga

SEQ ID NO: 1600064 - RNA, 19 nt, Artificial Sequence
  Description of Artificial Sequence: Synthetic oligonucleotide
  Antisense strand to SEQ ID NO: 1600063
uccacuccaggaauacaac

SEQ ID NO: 1600065 - RNA, 19 nt, Artificial Sequence
  Description of Artificial Sequence: Synthetic oligonucleotide
  Sense strand starting at position 689 of SEQ ID NO: 1560439
guauuccuggaguggauga

SEQ ID NO: 1600066 - RNA, 19 nt, Artificial Sequence
  Description of Artificial Sequence: Synthetic oligonucleotide
  Antisense strand to SEQ ID NO: 1600065
ucauccacuccaggaauac

SEQ ID NO: 1600067 - RNA, 19 nt, Artificial Sequence
  Description of Artificial Sequence: Synthetic oligonucleotide
  Sense strand starting at position 717 of SEQ ID NO: 1560439
gugucaauccaauacagca

SEQ ID NO: 1600068 - RNA, 19 nt, Artificial Sequence
  Description of Artificial Sequence: Synthetic oligonucleotide
  Antisense strand to SEQ ID NO: 1600067
ugcuguauuggauugacac

SEQ ID NO: 1600069 - RNA, 19 nt, Artificial Sequence
  Description of Artificial Sequence: Synthetic oligonucleotide
  Sense strand starting at position 790 of SEQ ID NO: 1560439
acccaacuggaucguuaau

SEQ ID NO: 1600070 - RNA, 19 nt, Artificial Sequence
  Description of Artificial Sequence: Synthetic oligonucleotide
  Antisense strand to SEQ ID NO: 1600069
auuaacgauccaguugggu

SEQ ID NO: 1600071 - RNA, 19 nt, Artificial Sequence
  Description of Artificial Sequence: Synthetic oligonucleotide
  Sense strand starting at position 792 of SEQ ID NO: 1560439
ccaacuggaucguuaauuc

SEQ ID NO: 1600072 - RNA, 19 nt, Artificial Sequence
  Description of Artificial Sequence: Synthetic oligonucleotide
  Antisense strand to SEQ ID NO: 1600071
gaauuaacgauccaguugg

SEQ ID NO: 1600073 - RNA, 19 nt, Artificial Sequence
  Description of Artificial Sequence: Synthetic oligonucleotide
  Sense strand starting at position 1120 of SEQ ID NO: 1560439
gggaguauuuccuggagga

SEQ ID NO: 1600074 - RNA, 19 nt, Artificial Sequence
  Description of Artificial Sequence: Synthetic oligonucleotide
  Antisense strand to SEQ ID NO: 1600073
uccuccaggaaauacuccc

SEQ ID NO: 1600075 - RNA, 19 nt, Artificial Sequence
  Description of Artificial Sequence: Synthetic oligonucleotide
  Sense strand starting at position 1139 of SEQ ID NO: 1560439
ggaagauacuggaguugag

SEQ ID NO: 1600076 - RNA, 19 nt, Artificial Sequence
  Description of Artificial Sequence: Synthetic oligonucleotide
  Antisense strand to SEQ ID NO: 1600075
cucaacuccaguaucuucc

SEQ ID NO: 1600077 - RNA, 19 nt, Artificial Sequence
  Description of Artificial Sequence: Synthetic oligonucleotide
  Sense strand starting at position 1142 of SEQ ID NO: 1560439
agauacuggaguugaguuu

SEQ ID NO: 1600078 - RNA, 19 nt, Artificial Sequence
  Description of Artificial Sequence: Synthetic oligonucleotide
  Antisense strand to SEQ ID NO: 1600077
aaacucaacuccaguaucu

SEQ ID NO: 1600079 - RNA, 19 nt, Artificial Sequence
  Description of Artificial Sequence: Synthetic oligonucleotide
  Sense strand starting at position 1159 of SEQ ID NO: 1560439
uuugcagaaucaucaagaa

SEQ ID NO: 1600080 - RNA, 19 nt, Artificial Sequence
  Description of Artificial Sequence: Synthetic oligonucleotide
  Antisense strand to SEQ ID NO: 1600079
uucuugaugauucugcaaa

SEQ ID NO: 1600081 - RNA, 19 nt, Artificial Sequence
  Description of Artificial Sequence: Synthetic oligonucleotide
  Sense strand starting at position 1266 of SEQ ID NO: 1560439
gccugaccacuuugaaaca

SEQ ID NO: 1600082 - RNA, 19 nt, Artificial Sequence
  Description of Artificial Sequence: Synthetic oligonucleotide
  Antisense strand to SEQ ID NO: 1600081
uguuucaaaguggucaggc

SEQ ID NO: 1600083 - RNA, 19 nt, Artificial Sequence
  Description of Artificial Sequence: Synthetic oligonucleotide
  Sense strand starting at position 1285 of SEQ ID NO: 1560439
ggacgaggaauauguccuu

SEQ ID NO: 1600084 - RNA, 19 nt, Artificial Sequence
  Description of Artificial Sequence: Synthetic oligonucleotide
  Antisense strand to SEQ ID NO: 1600083
aaggacauauuccucgucc

SEQ ID NO: 1600085 - RNA, 19 nt, Artificial Sequence
  Description of Artificial Sequence: Synthetic oligonucleotide
  Sense strand starting at position 1288 of SEQ ID NO: 1560439
cgaggaauauguccuuaca

SEQ ID NO: 1600086 - RNA, 19 nt, Artificial Sequence
  Description of Artificial Sequence: Synthetic oligonucleotide
  Antisense strand to SEQ ID NO: 1600085
uguaaggacauauuccucg

SEQ ID NO: 1600087 - RNA, 19 nt, Artificial Sequence
  Description of Artificial Sequence: Synthetic oligonucleotide
  Sense strand starting at position 1290 of SEQ ID NO: 1560439
aggaauauguccuuacagc

SEQ ID NO: 1600088 - RNA, 19 nt, Artificial Sequence
  Description of Artificial Sequence: Synthetic oligonucleotide
  Antisense strand to SEQ ID NO: 1600087
gcuguaaggacauauuccu

SEQ ID NO: 1600089 - RNA, 19 nt, Artificial Sequence
  Description of Artificial Sequence: Synthetic oligonucleotide
  Sense strand starting at position 1291 of SEQ ID NO: 1560439
ggaauauguccuuacagcu

SEQ ID NO: 1600090 - RNA, 19 nt, Artificial Sequence
  Description of Artificial Sequence: Synthetic oligonucleotide
  Antisense strand to SEQ ID NO: 1600089
agcuguaaggacauauucc

SEQ ID NO: 1600091 - RNA, 19 nt, Artificial Sequence
  Description of Artificial Sequence: Synthetic oligonucleotide
  Sense strand starting at position 1328 of SEQ ID NO: 1560439
ccauauacuccucgaaggu

SEQ ID NO: 1600092 - RNA, 19 nt, Artificial Sequence
  Description of Artificial Sequence: Synthetic oligonucleotide
  Antisense strand to SEQ ID NO: 1600091
accuucgaggaguauaugg

SEQ ID NO: 1600093 - RNA, 19 nt, Artificial Sequence
  Description of Artificial Sequence: Synthetic oligonucleotide
  Sense strand starting at position 1329 of SEQ ID NO: 1560439
cauauacuccucgaagguu

SEQ ID NO: 1600094 - RNA, 19 nt, Artificial Sequence
  Description of Artificial Sequence: Synthetic oligonucleotide
  Antisense strand to SEQ ID NO: 1600093
aaccuucgaggaguauaug

SEQ ID NO: 1600095 - RNA, 19 nt, Artificial Sequence
  Description of Artificial Sequence: Synthetic oligonucleotide
  Sense strand starting at position 1360 of SEQ ID NO: 1560439
uggaucaccguguauuaau

SEQ ID NO: 1600096 - RNA, 19 nt, Artificial Sequence
  Description of Artificial Sequence: Synthetic oligonucleotide
  Antisense strand to SEQ ID NO: 1600095
auuaauacacggugaucca

SEQ ID NO: 1600097 - RNA, 19 nt, Artificial Sequence
  Description of Artificial Sequence: Synthetic oligonucleotide
  Sense strand starting at position 1421 of SEQ ID NO: 1560439
agagaagccucagcuuaau

SEQ ID NO: 1600098 - RNA, 19 nt, Artificial Sequence
  Description of Artificial Sequence: Synthetic oligonucleotide
  Antisense strand to SEQ ID NO: 1600097
auuaagcugaggcuucucu

SEQ ID NO: 1600099 - RNA, 19 nt, Artificial Sequence
  Description of Artificial Sequence: Synthetic oligonucleotide
  Sense strand starting at position 1496 of SEQ ID NO: 1560439
agaaauggcuggcuaagaa

SEQ ID NO: 1600100 - RNA, 19 nt, Artificial Sequence
  Description of Artificial Sequence: Synthetic oligonucleotide
  Antisense strand to SEQ ID NO: 1600099
uucuuagccagccauuucu

SEQ ID NO: 1600101 - RNA, 19 nt, Artificial Sequence
  Description of Artificial Sequence: Synthetic oligonucleotide
  Sense strand starting at position 1509 of SEQ ID NO: 1560439
uaagaagaucgugaagguu

SEQ ID NO: 1600102 - RNA, 19 nt, Artificial Sequence
  Description of Artificial Sequence: Synthetic oligonucleotide
  Antisense strand to SEQ ID NO: 1600101
aaccuucacgaucuucuua

SEQ ID NO: 1600103 - RNA, 19 nt, Artificial Sequence
  Description of Artificial Sequence: Synthetic oligonucleotide
  Sense strand starting at position 1715 of SEQ ID NO: 1560439
ugggcaauggucagugguu

SEQ ID NO: 1600104 - RNA, 19 nt, Artificial Sequence
  Description of Artificial Sequence: Synthetic oligonucleotide
  Antisense strand to SEQ ID NO: 1600103
aaccacugaccauugccca

SEQ ID NO: 1600105 - RNA, 19 nt, Artificial Sequence
  Description of Artificial Sequence: Synthetic oligonucleotide
  Sense strand starting at position 2071 of SEQ ID NO: 1560439
cuaggccgagucugagaua

SEQ ID NO: 1600106 - RNA, 19 nt, Artificial Sequence
  Description of Artificial Sequence: Synthetic oligonucleotide
  Antisense strand to SEQ ID NO: 1600105
uaucucagacucggccuag

SEQ ID NO: 1600107 - RNA, 19 nt, Artificial Sequence
  Description of Artificial Sequence: Synthetic oligonucleotide
  Sense strand starting at position 2108 of SEQ ID NO: 1560439
gcuggcgcucuuguauaua

SEQ ID NO: 1600108 - RNA, 19 nt, Artificial Sequence
  Description of Artificial Sequence: Synthetic oligonucleotide
  Antisense strand to SEQ ID NO: 1600107
uauauacaagagcgccagc

SEQ ID NO: 1600109 - RNA, 19 nt, Artificial Sequence
  Description of Artificial Sequence: Synthetic oligonucleotide
  Sense strand starting at position 2784 of SEQ ID NO: 1560439
caaggugaaucugucaaac

SEQ ID NO: 1600110 - RNA, 19 nt, Artificial Sequence
  Description of Artificial Sequence: Synthetic oligonucleotide
  Antisense strand to SEQ ID NO: 1600109
guuugacagauucaccuug

SEQ ID NO: 1600111 - RNA, 19 nt, Artificial Sequence
  Description of Artificial Sequence: Synthetic oligonucleotide
  Sense strand starting at position 2814 of SEQ ID NO: 1560439
ggaggauuacaguguccuc

SEQ ID NO: 1600112 - RNA, 19 nt, Artificial Sequence
  Description of Artificial Sequence: Synthetic oligonucleotide
  Antisense strand to SEQ ID NO: 1600111
gaggacacuguaauccucc

SEQ ID NO: 1600113 - RNA, 19 nt, Artificial Sequence
  Description of Artificial Sequence: Synthetic oligonucleotide
  Sense strand starting at position 2841 of SEQ ID NO: 1560439
uacagugucguggaagaga

SEQ ID NO: 1600114 - RNA, 19 nt, Artificial Sequence
  Description of Artificial Sequence: Synthetic oligonucleotide
  Antisense strand to SEQ ID NO: 1600113
ucucuuccacgacacugua

SEQ ID NO: 1600115 - RNA, 19 nt, Artificial Sequence
  Description of Artificial Sequence: Synthetic oligonucleotide
  Sense strand starting at position 2964 of SEQ ID NO: 1560439
augcauaggaguuggcuaa

SEQ ID NO: 1600116 - RNA, 19 nt, Artificial Sequence
  Description of Artificial Sequence: Synthetic oligonucleotide
  Antisense strand to SEQ ID NO: 1600115
uuagccaacuccuaugcau

SEQ ID NO: 1600117 - RNA, 19 nt, Artificial Sequence
  Description of Artificial Sequence: Synthetic oligonucleotide
  Sense strand starting at position 2968 of SEQ ID NO: 1560439
auaggaguuggcuaagcaa

SEQ ID NO: 1600118 - RNA, 19 nt, Artificial Sequence
  Description of Artificial Sequence: Synthetic oligonucleotide
  Antisense strand to SEQ ID NO: 1600117
uugcuuagccaacuccuau

SEQ ID NO: 1600119 - RNA, 19 nt, Artificial Sequence
  Description of Artificial Sequence: Synthetic oligonucleotide
  Sense strand starting at position 3008 of SEQ ID NO: 1560439
aaaguugggccaugaacua

SEQ ID NO: 1600120 - RNA, 19 nt, Artificial Sequence
  Description of Artificial Sequence: Synthetic oligonucleotide
  Antisense strand to SEQ ID NO: 1600119
uaguucauggcccaacuuu

SEQ ID NO: 1600121 - RNA, 19 nt, Artificial Sequence
  Description of Artificial Sequence: Synthetic oligonucleotide
  Sense strand starting at position 3541 of SEQ ID NO: 1560439
gccauugcuguggaggaaa

SEQ ID NO: 1600122 - RNA, 19 nt, Artificial Sequence
  Description of Artificial Sequence: Synthetic oligonucleotide
  Antisense strand to SEQ ID NO: 1600121
uuuccuccacagcaauggc

SEQ ID NO: 1600123 - RNA, 19 nt, Artificial Sequence
  Description of Artificial Sequence: Synthetic oligonucleotide
  Sense strand starting at position 3543 of SEQ ID NO: 1560439
cauugcuguggaggaaaua

SEQ ID NO: 1600124 - RNA, 19 nt, Artificial Sequence
  Description of Artificial Sequence: Synthetic oligonucleotide
  Antisense strand to SEQ ID NO: 1600123
uauuuccuccacagcaaug

SEQ ID NO: 1600125 - RNA, 19 nt, Artificial Sequence
  Description of Artificial Sequence: Synthetic oligonucleotide
  Sense strand starting at position 3552 of SEQ ID NO: 1560439
ggaggaaauaggugucuca

SEQ ID NO: 1600126 - RNA, 19 nt, Artificial Sequence
  Description of Artificial Sequence: Synthetic oligonucleotide
  Antisense strand to SEQ ID NO: 1600125
ugagacaccuauuuccucc

SEQ ID NO: 1600127 - RNA, 19 nt, Artificial Sequence
  Description of Artificial Sequence: Synthetic oligonucleotide
  Sense strand starting at position 3555 of SEQ ID NO: 1560439
ggaaauaggugucucagac

SEQ ID NO: 1600128 - RNA, 19 nt, Artificial Sequence
  Description of Artificial Sequence: Synthetic oligonucleotide
  Antisense strand to SEQ ID NO: 1600127
gucugagacaccuauuucc

SEQ ID NO: 1600129 - RNA, 19 nt, Artificial Sequence
  Description of Artificial Sequence: Synthetic oligonucleotide
  Sense strand starting at position 3888 of SEQ ID NO: 1560439
augauagaguccucaggau

SEQ ID NO: 1600130 - RNA, 19 nt, Artificial Sequence
  Description of Artificial Sequence: Synthetic oligonucleotide
  Antisense strand to SEQ ID NO: 1600129
auccugaggacucuaucau

SEQ ID NO: 1600131 - RNA, 19 nt, Artificial Sequence
  Description of Artificial Sequence: Synthetic oligonucleotide
  Sense strand starting at position 3892 of SEQ ID NO: 1560439
uagaguccucaggaugcuu

SEQ ID NO: 1600132 - RNA, 19 nt, Artificial Sequence
  Description of Artificial Sequence: Synthetic oligonucleotide
  Antisense strand to SEQ ID NO: 1600131
aagcauccugaggacucua

SEQ ID NO: 1600133 - RNA, 19 nt, Artificial Sequence
  Description of Artificial Sequence: Synthetic oligonucleotide
  Sense strand starting at position 3894 of SEQ ID NO: 1560439
gaguccucaggaugcuuua

SEQ ID NO: 1600134 - RNA, 19 nt, Artificial Sequence
  Description of Artificial Sequence: Synthetic oligonucleotide
  Antisense strand to SEQ ID NO: 1600133
uaaagcauccugaggacuc

SEQ ID NO: 1600135 - RNA, 19 nt, Artificial Sequence
  Description of Artificial Sequence: Synthetic oligonucleotide
  Sense strand starting at position 686 of SEQ ID NO: 1560440
agggaaugaaugcgggauu

SEQ ID NO: 1600136 - RNA, 19 nt, Artificial Sequence
  Description of Artificial Sequence: Synthetic oligonucleotide
  Antisense strand to SEQ ID NO: 1600135
aaucccgcauucauucccu

SEQ ID NO: 1600137 - RNA, 19 nt, Artificial Sequence
  Description of Artificial Sequence: Synthetic oligonucleotide
  Sense strand starting at position 1578 of SEQ ID NO: 1560440
gcucgaugaucgcgagaug

SEQ ID NO: 1600138 - RNA, 19 nt, Artificial Sequence
  Description of Artificial Sequence: Synthetic oligonucleotide
  Antisense strand to SEQ ID NO: 1600137
caucucgcgaucaucgagc

SEQ ID NO: 1600139 - RNA, 19 nt, Artificial Sequence
  Description of Artificial Sequence: Synthetic oligonucleotide
  Sense strand starting at position 1638 of SEQ ID NO: 1560440
ggauguucugaaggccgaa

SEQ ID NO: 1600140 - RNA, 19 nt, Artificial Sequence
  Description of Artificial Sequence: Synthetic oligonucleotide
  Antisense strand to SEQ ID NO: 1600139
uucggccuucagaacaucc

SEQ ID NO: 1600141 - RNA, 19 nt, Artificial Sequence
  Description of Artificial Sequence: Synthetic oligonucleotide
  Sense strand starting at position 1715 of SEQ ID NO: 1560440
aagggucaugaacgauuga

SEQ ID NO: 1600142 - RNA, 19 nt, Artificial Sequence
  Description of Artificial Sequence: Synthetic oligonucleotide
  Antisense strand to SEQ ID NO: 1600141
ucaaucguucaugacccuu

SEQ ID NO: 1600143 - RNA, 19 nt, Artificial Sequence
  Description of Artificial Sequence: Synthetic oligonucleotide
  Sense strand starting at position 1724 of SEQ ID NO: 1560440
gaacgauugaggcacggaa

SEQ ID NO: 1600144 - RNA, 19 nt, Artificial Sequence
  Description of Artificial Sequence: Synthetic oligonucleotide
  Antisense strand to SEQ ID NO: 1600143
uuccgugccucaaucguuc

SEQ ID NO: 1600145 - RNA, 19 nt, Artificial Sequence
  Description of Artificial Sequence: Synthetic oligonucleotide
  Sense strand starting at position 1749 of SEQ ID NO: 1560440
gaaugauugcucugccgca

SEQ ID NO: 1600146 - RNA, 19 nt, Artificial Sequence
  Description of Artificial Sequence: Synthetic oligonucleotide
  Antisense strand to SEQ ID NO: 1600145
ugcggcagagcaaucauuc

SEQ ID NO: 1600147 - RNA, 19 nt, Artificial Sequence
  Description of Artificial Sequence: Synthetic oligonucleotide
  Sense strand starting at position 1984 of SEQ ID NO: 1560440
cggcuugacuaguaaagug

SEQ ID NO: 1600148 - RNA, 19 nt, Artificial Sequence
  Description of Artificial Sequence: Synthetic oligonucleotide
  Antisense strand to SEQ ID NO: 1600147
cacuuuacuagucaagccg

SEQ ID NO: 1600149 - RNA, 19 nt, Artificial Sequence
  Description of Artificial Sequence: Synthetic oligonucleotide
  Sense strand starting at position 1992 of SEQ ID NO: 1560440
cuaguaaagugcucaacua

SEQ ID NO: 1600150 - RNA, 19 nt, Artificial Sequence
  Description of Artificial Sequence: Synthetic oligonucleotide
  Antisense strand to SEQ ID NO: 1600149
uaguugagcacuuuacuag

SEQ ID NO: 1600151 - RNA, 19 nt, Artificial Sequence
  Description of Artificial Sequence: Synthetic oligonucleotide
  Sense strand starting at position 2025 of SEQ ID NO: 1560440
uggguaucuuaggauacgu

SEQ ID NO: 1600152 - RNA, 19 nt, Artificial Sequence
  Description of Artificial Sequence: Synthetic oligonucleotide
  Antisense strand to SEQ ID NO: 1600151
acguauccuaagauaccca

SEQ ID NO: 1600153 - RNA, 19 nt, Artificial Sequence
  Description of Artificial Sequence: Synthetic oligonucleotide
  Sense strand starting at position 2046 of SEQ ID NO: 1560440
ugcccaccgucugaagaua

SEQ ID NO: 1600154 - RNA, 19 nt, Artificial Sequence
  Description of Artificial Sequence: Synthetic oligonucleotide
  Antisense strand to SEQ ID NO: 1600153
uaucuucagacggugggca

SEQ ID NO: 1600155 - RNA, 19 nt, Artificial Sequence
  Description of Artificial Sequence: Synthetic oligonucleotide
  Sense strand starting at position 2057 of SEQ ID NO: 1560440
ugaagauacucgcuuccau

SEQ ID NO: 1600156 - RNA, 19 nt, Artificial Sequence
  Description of Artificial Sequence: Synthetic oligonucleotide
  Antisense strand to SEQ ID NO: 1600155
auggaagcgaguaucuuca

SEQ ID NO: 1600157 - RNA, 19 nt, Artificial Sequence
  Description of Artificial Sequence: Synthetic oligonucleotide
  Sense strand starting at position 2114 of SEQ ID NO: 1560440
ggagguagguguagcgaaa

SEQ ID NO: 1600158 - RNA, 19 nt, Artificial Sequence
  Description of Artificial Sequence: Synthetic oligonucleotide
  Antisense strand to SEQ ID NO: 1600157
uuucgcuacaccuaccucc

SEQ ID NO: 1600159 - RNA, 19 nt, Artificial Sequence
  Description of Artificial Sequence: Synthetic oligonucleotide
  Sense strand starting at position 2118 of SEQ ID NO: 1560440
guagguguagcgaaauguu

SEQ ID NO: 1600160 - RNA, 19 nt, Artificial Sequence
  Description of Artificial Sequence: Synthetic oligonucleotide
  Antisense strand to SEQ ID NO: 1600159
aacauuucgcuacaccuac

SEQ ID NO: 1600161 - RNA, 19 nt, Artificial Sequence
  Description of Artificial Sequence: Synthetic oligonucleotide
  Sense strand starting at position 2121 of SEQ ID NO: 1560440
gguguagcgaaauguuguu

SEQ ID NO: 1600162 - RNA, 19 nt, Artificial Sequence
  Description of Artificial Sequence: Synthetic oligonucleotide
  Antisense strand to SEQ ID NO: 1600161
aacaacauuucgcuacacc

SEQ ID NO: 1600163 - RNA, 19 nt, Artificial Sequence
  Description of Artificial Sequence: Synthetic oligonucleotide
  Sense strand starting at position 2313 of SEQ ID NO: 1560440
ggaccuaugugcguucagu

SEQ ID NO: 1600164 - RNA, 19 nt, Artificial Sequence
  Description of Artificial Sequence: Synthetic oligonucleotide
  Antisense strand to SEQ ID NO: 1600163
acugaacgcacauaggucc

SEQ ID NO: 1600165 - RNA, 19 nt, Artificial Sequence
  Description of Artificial Sequence: Synthetic oligonucleotide
  Sense strand starting at position 2315 of SEQ ID NO: 1560440
accuaugugcguucaguuu

SEQ ID NO: 1600166 - RNA, 19 nt, Artificial Sequence
  Description of Artificial Sequence: Synthetic oligonucleotide
  Antisense strand to SEQ ID NO: 1600165
aaacugaacgcacauaggu

SEQ ID NO: 1600167 - RNA, 19 nt, Artificial Sequence
  Description of Artificial Sequence: Synthetic oligonucleotide
  Sense strand starting at position 2458 of SEQ ID NO: 1560440
gcccgaacuucuggaaaga

SEQ ID NO: 1600168 - RNA, 19 nt, Artificial Sequence
  Description of Artificial Sequence: Synthetic oligonucleotide
  Antisense strand to SEQ ID NO: 1600167
ucuuuccagaaguucgggc

SEQ ID NO: 1600169 - RNA, 19 nt, Artificial Sequence
  Description of Artificial Sequence: Synthetic oligonucleotide
  Sense strand starting at position 2613 of SEQ ID NO: 1560440
caggaagucuuccuggaac

SEQ ID NO: 1600170 - RNA, 19 nt, Artificial Sequence
  Description of Artificial Sequence: Synthetic oligonucleotide
  Antisense strand to SEQ ID NO: 1600169
guuccaggaagacuuccug

SEQ ID NO: 1600171 - RNA, 19 nt, Artificial Sequence
  Description of Artificial Sequence: Synthetic oligonucleotide
  Sense strand starting at position 2758 of SEQ ID NO: 1560440
ggagauugcuuucagguua

SEQ ID NO: 1600172 - RNA, 19 nt, Artificial Sequence
  Description of Artificial Sequence: Synthetic oligonucleotide
  Antisense strand to SEQ ID NO: 1600171
uaaccugaaagcaaucucc

SEQ ID NO: 1600173 - RNA, 19 nt, Artificial Sequence
  Description of Artificial Sequence: Synthetic oligonucleotide
  Sense strand starting at position 2799 of SEQ ID NO: 1560440
ggaauaaagcgcugauggu

SEQ ID NO: 1600174 - RNA, 19 nt, Artificial Sequence
  Description of Artificial Sequence: Synthetic oligonucleotide
  Antisense strand to SEQ ID NO: 1600173
accaucagcgcuuuauucc

SEQ ID NO: 1600175 - RNA, 19 nt, Artificial Sequence
  Description of Artificial Sequence: Synthetic oligonucleotide
  Sense strand starting at position 2868 of SEQ ID NO: 1560440
cggauucucugguucugga

SEQ ID NO: 1600176 - RNA, 19 nt, Artificial Sequence
  Description of Artificial Sequence: Synthetic oligonucleotide
  Antisense strand to SEQ ID NO: 1600175
uccagaaccagagaauccg

SEQ ID NO: 1600177 - RNA, 19 nt, Artificial Sequence
  Description of Artificial Sequence: Synthetic oligonucleotide
  Sense strand starting at position 2902 of SEQ ID NO: 1560440
ggcgcacuugcguguuaag

SEQ ID NO: 1600178 - RNA, 19 nt, Artificial Sequence
  Description of Artificial Sequence: Synthetic oligonucleotide
  Antisense strand to SEQ ID NO: 1600177
cuuaacacgcaagugcgcc

SEQ ID NO: 1600179 - RNA, 19 nt, Artificial Sequence
  Description of Artificial Sequence: Synthetic oligonucleotide
  Sense strand starting at position 2903 of SEQ ID NO: 1560440
gcgcacuugcguguuaaga

SEQ ID NO: 1600180 - RNA, 19 nt, Artificial Sequence
  Description of Artificial Sequence: Synthetic oligonucleotide
  Antisense strand to SEQ ID NO: 1600179
ucuuaacacgcaagugcgc

SEQ ID NO: 1600181 - RNA, 19 nt, Artificial Sequence
  Description of Artificial Sequence: Synthetic oligonucleotide
  Sense strand starting at position 2904 of SEQ ID NO: 1560440
cgcacuugcguguuaagaa

SEQ ID NO: 1600182 - RNA, 19 nt, Artificial Sequence
  Description of Artificial Sequence: Synthetic oligonucleotide
  Antisense strand to SEQ ID NO: 1600181
uucuuaacacgcaagugcg

SEQ ID NO: 1600183 - RNA, 19 nt, Artificial Sequence
  Description of Artificial Sequence: Synthetic oligonucleotide
  Sense strand starting at position 2905 of SEQ ID NO: 1560440
gcacuugcguguuaagaaa

SEQ ID NO: 1600184 - RNA, 19 nt, Artificial Sequence
  Description of Artificial Sequence: Synthetic oligonucleotide
  Antisense strand to SEQ ID NO: 1600183
uuucuuaacacgcaagugc

SEQ ID NO: 1600185 - RNA, 19 nt, Artificial Sequence
  Description of Artificial Sequence: Synthetic oligonucleotide
  Sense strand starting at position 2936 of SEQ ID NO: 1560440
agaauagaguucuaauacc

SEQ ID NO: 1600186 - RNA, 19 nt, Artificial Sequence
  Description of Artificial Sequence: Synthetic oligonucleotide
  Antisense strand to SEQ ID NO: 1600185
gguauuagaacucuauucu

SEQ ID NO: 1600187 - RNA, 19 nt, Artificial Sequence
  Description of Artificial Sequence: Synthetic oligonucleotide
  Sense strand starting at position 3594 of SEQ ID NO: 1560440
aggaacaaaugaugacaua

SEQ ID NO: 1600188 - RNA, 19 nt, Artificial Sequence
  Description of Artificial Sequence: Synthetic oligonucleotide
  Antisense strand to SEQ ID NO: 1600187
uaugucaucauuuguuccu

SEQ ID NO: 1600189 - RNA, 19 nt, Artificial Sequence
  Description of Artificial Sequence: Synthetic oligonucleotide
  Sense strand starting at position 3627 of SEQ ID NO: 1560440
gccauucucuaguuguuac

SEQ ID NO: 1600190 - RNA, 19 nt, Artificial Sequence
  Description of Artificial Sequence: Synthetic oligonucleotide
  Antisense strand to SEQ ID NO: 1600189
guaacaacuagagaauggc

SEQ ID NO: 1600191 - RNA, 19 nt, Artificial Sequence
  Description of Artificial Sequence: Synthetic oligonucleotide
  Sense strand starting at position 3638 of SEQ ID NO: 1560440
guuguuacaucuguaacaa

SEQ ID NO: 1600192 - RNA, 19 nt, Artificial Sequence
  Description of Artificial Sequence: Synthetic oligonucleotide
  Antisense strand to SEQ ID NO: 1600191
uuguuacagauguaacaac

SEQ ID NO: 1600193 - RNA, 19 nt, Artificial Sequence
  Description of Artificial Sequence: Synthetic oligonucleotide
  Sense strand starting at position 3639 of SEQ ID NO: 1560440
uuguuacaucuguaacaag

SEQ ID NO: 1600194 - RNA, 19 nt, Artificial Sequence
  Description of Artificial Sequence: Synthetic oligonucleotide
  Antisense strand to SEQ ID NO: 1600193
cuuguuacagauguaacaa

SEQ ID NO: 1600195 - RNA, 19 nt, Artificial Sequence
  Description of Artificial Sequence: Synthetic oligonucleotide
  Sense strand starting at position 3650 of SEQ ID NO: 1560440
guaacaagcuaguuauuac

SEQ ID NO: 1600196 - RNA, 19 nt, Artificial Sequence
  Description of Artificial Sequence: Synthetic oligonucleotide
  Antisense strand to SEQ ID NO: 1600195
guaauaacuagcuuguuac

SEQ ID NO: 1600197 - RNA, 19 nt, Artificial Sequence
  Description of Artificial Sequence: Synthetic oligonucleotide
  Sense strand starting at position 3661 of SEQ ID NO: 1560440
guuauuacaucuguaacaa

SEQ ID NO: 1600198 - RNA, 19 nt, Artificial Sequence
  Description of Artificial Sequence: Synthetic oligonucleotide
  Antisense strand to SEQ ID NO: 1600197
uuguuacagauguaauaac

SEQ ID NO: 1600199 - RNA, 19 nt, Artificial Sequence
  Description of Artificial Sequence: Synthetic oligonucleotide
  Sense strand starting at position 3717 of SEQ ID NO: 1560440
ccuacugugugcucgcauu

SEQ ID NO: 1600200 - RNA, 19 nt, Artificial Sequence
  Description of Artificial Sequence: Synthetic oligonucleotide
  Antisense strand to SEQ ID NO: 1600199
aaugcgagcacacaguagg

SEQ ID NO: 1600201 - RNA, 19 nt, Artificial Sequence
  Description of Artificial Sequence: Synthetic oligonucleotide
  Sense strand starting at position 3719 of SEQ ID NO: 1560440
uacugugugcucgcauuga

SEQ ID NO: 1600202 - RNA, 19 nt, Artificial Sequence
  Description of Artificial Sequence: Synthetic oligonucleotide
  Antisense strand to SEQ ID NO: 1600201
ucaaugcgagcacacagua

SEQ ID NO: 1600203 - RNA, 19 nt, Artificial Sequence
  Description of Artificial Sequence: Synthetic oligonucleotide
  Sense strand starting at position 3723 of SEQ ID NO: 1560440
gugugcucgcauugagaac

SEQ ID NO: 1600204 - RNA, 19 nt, Artificial Sequence
  Description of Artificial Sequence: Synthetic oligonucleotide
  Antisense strand to SEQ ID NO: 1600203
guucucaaugcgagcacac

SEQ ID NO: 1600205 - RNA, 19 nt, Artificial Sequence
  Description of Artificial Sequence: Synthetic oligonucleotide
  Sense strand starting at position 3844 of SEQ ID NO: 1560440
cgcccagcuaaaugugaau

SEQ ID NO: 1600206 - RNA, 19 nt, Artificial Sequence
  Description of Artificial Sequence: Synthetic oligonucleotide
  Antisense strand to SEQ ID NO: 1600205
auucacauuuagcugggcg

SEQ ID NO: 1600207 - RNA, 19 nt, Artificial Sequence
  Description of Artificial Sequence: Synthetic oligonucleotide
  Sense strand starting at position 3892 of SEQ ID NO: 1560440
acuaguaugucccauguag

SEQ ID NO: 1600208 - RNA, 19 nt, Artificial Sequence
  Description of Artificial Sequence: Synthetic oligonucleotide
  Antisense strand to SEQ ID NO: 1600207
cuacaugggacauacuagu

SEQ ID NO: 1600209 - RNA, 19 nt, Artificial Sequence
  Description of Artificial Sequence: Synthetic oligonucleotide
  Sense strand starting at position 3894 of SEQ ID NO: 1560440
uaguaugucccauguagac

SEQ ID NO: 1600210 - RNA, 19 nt, Artificial Sequence
  Description of Artificial Sequence: Synthetic oligonucleotide
  Antisense strand to SEQ ID NO: 1600209
gucuacaugggacauacua

SEQ ID NO: 1600211 - RNA, 19 nt, Artificial Sequence
  Description of Artificial Sequence: Synthetic oligonucleotide
  Sense strand starting at position 3896 of SEQ ID NO: 1560440
guaugucccauguagacau

SEQ ID NO: 1600212 - RNA, 19 nt, Artificial Sequence
  Description of Artificial Sequence: Synthetic oligonucleotide
  Antisense strand to SEQ ID NO: 1600211
augucuacaugggacauac

SEQ ID NO: 1600213 - RNA, 19 nt, Artificial Sequence
  Description of Artificial Sequence: Synthetic oligonucleotide
  Sense strand starting at position 78 of SEQ ID NO: 1560441
caggaagucuuccuggaac

SEQ ID NO: 1600214 - RNA, 19 nt, Artificial Sequence
  Description of Artificial Sequence: Synthetic oligonucleotide
  Antisense strand to SEQ ID NO: 1600213
guuccaggaagacuuccug

SEQ ID NO: 1600215 - RNA, 19 nt, Artificial Sequence
  Description of Artificial Sequence: Synthetic oligonucleotide
  Sense strand starting at position 264 of SEQ ID NO: 1560441
ggaauaaagcgcugauggu

SEQ ID NO: 1600216 - RNA, 19 nt, Artificial Sequence
  Description of Artificial Sequence: Synthetic oligonucleotide
  Antisense strand to SEQ ID NO: 1600215
accaucagcgcuuuauucc

SEQ ID NO: 1600217 - RNA, 19 nt, Artificial Sequence
  Description of Artificial Sequence: Synthetic oligonucleotide
  Sense strand starting at position 333 of SEQ ID NO: 1560441
cggauucucugguucugga

SEQ ID NO: 1600218 - RNA, 19 nt, Artificial Sequence
  Description of Artificial Sequence: Synthetic oligonucleotide
  Antisense strand to SEQ ID NO: 1600217
uccagaaccagagaauccg

SEQ ID NO: 1600219 - RNA, 19 nt, Artificial Sequence
  Description of Artificial Sequence: Synthetic oligonucleotide
  Sense strand starting at position 368 of SEQ ID NO: 1560441
gcgcacuugcguguuaaga

SEQ ID NO: 1600220 - RNA, 19 nt, Artificial Sequence
  Description of Artificial Sequence: Synthetic oligonucleotide
  Antisense strand to SEQ ID NO: 1600219
ucuuaacacgcaagugcgc

SEQ ID NO: 1600221 - RNA, 19 nt, Artificial Sequence
  Description of Artificial Sequence: Synthetic oligonucleotide
  Sense strand starting at position 369 of SEQ ID NO: 1560441
cgcacuugcguguuaagaa

SEQ ID NO: 1600222 - RNA, 19 nt, Artificial Sequence
  Description of Artificial Sequence: Synthetic oligonucleotide
  Antisense strand to SEQ ID NO: 1600221
uucuuaacacgcaagugcg

SEQ ID NO: 1600223 - RNA, 19 nt, Artificial Sequence
  Description of Artificial Sequence: Synthetic oligonucleotide
  Sense strand starting at position 401 of SEQ ID NO: 1560441
agaauagaguucuaauacc

SEQ ID NO: 1600224 - RNA, 19 nt, Artificial Sequence
  Description of Artificial Sequence: Synthetic oligonucleotide
  Antisense strand to SEQ ID NO: 1600223
gguauuagaacucuauucu

SEQ ID NO: 1600225 - RNA, 19 nt, Artificial Sequence
  Description of Artificial Sequence: Synthetic oligonucleotide
  Sense strand starting at position 1059 of SEQ ID NO: 1560441
aggaacaaaugaugacaua

SEQ ID NO: 1600226 - RNA, 19 nt, Artificial Sequence
  Description of Artificial Sequence: Synthetic oligonucleotide
  Antisense strand to SEQ ID NO: 1600225
uaugucaucauuuguuccu

SEQ ID NO: 1600227 - RNA, 19 nt, Artificial Sequence
  Description of Artificial Sequence: Synthetic oligonucleotide
  Sense strand starting at position 1092 of SEQ ID NO: 1560441
gccauucucuaguuguuac

SEQ ID NO: 1600228 - RNA, 19 nt, Artificial Sequence
  Description of Artificial Sequence: Synthetic oligonucleotide
  Antisense strand to SEQ ID NO: 1600227
guaacaacuagagaauggc

SEQ ID NO: 1600229 - RNA, 19 nt, Artificial Sequence
  Description of Artificial Sequence: Synthetic oligonucleotide
  Sense strand starting at position 1115 of SEQ ID NO: 1560441
guaacaagcuaguuauuac

SEQ ID NO: 1600230 - RNA, 19 nt, Artificial Sequence
  Description of Artificial Sequence: Synthetic oligonucleotide
  Antisense strand to SEQ ID NO: 1600229
guaauaacuagcuuguuac

SEQ ID NO: 1600231 - RNA, 19 nt, Artificial Sequence
  Description of Artificial Sequence: Synthetic oligonucleotide
  Sense strand starting at position 1126 of SEQ ID NO: 1560441
guuauuacaucuguaacaa

SEQ ID NO: 1600232 - RNA, 19 nt, Artificial Sequence
  Description of Artificial Sequence: Synthetic oligonucleotide
  Antisense strand to SEQ ID NO: 1600231
uuguuacagauguaauaac

SEQ ID NO: 1600233 - RNA, 19 nt, Artificial Sequence
  Description of Artificial Sequence: Synthetic oligonucleotide
  Sense strand starting at position 1149 of SEQ ID NO: 1560441
guuguuacaucuguaacaa

SEQ ID NO: 1600234 - RNA, 19 nt, Artificial Sequence
  Description of Artificial Sequence: Synthetic oligonucleotide
  Antisense strand to SEQ ID NO: 1600233
uuguuacagauguaacaac

SEQ ID NO: 1600235 - RNA, 19 nt, Artificial Sequence
  Description of Artificial Sequence: Synthetic oligonucleotide
  Sense strand starting at position 1150 of SEQ ID NO: 1560441
uuguuacaucuguaacaag

SEQ ID NO: 1600236 - RNA, 19 nt, Artificial Sequence
  Description of Artificial Sequence: Synthetic oligonucleotide
  Antisense strand to SEQ ID NO: 1600235
cuuguuacagauguaacaa

SEQ ID NO: 1600237 - RNA, 19 nt, Artificial Sequence
  Description of Artificial Sequence: Synthetic oligonucleotide
  Sense strand starting at position 1184 of SEQ ID NO: 1560441
uacugugugcucgcauuga

SEQ ID NO: 1600238 - RNA, 19 nt, Artificial Sequence
  Description of Artificial Sequence: Synthetic oligonucleotide
  Antisense strand to SEQ ID NO: 1600237
ucaaugcgagcacacagua

SEQ ID NO: 1600239 - RNA, 19 nt, Artificial Sequence
  Description of Artificial Sequence: Synthetic oligonucleotide
  Sense strand starting at position 1309 of SEQ ID NO: 1560441
cgcccagcuaaaugugaau

SEQ ID NO: 1600240 - RNA, 19 nt, Artificial Sequence
  Description of Artificial Sequence: Synthetic oligonucleotide
  Antisense strand to SEQ ID NO: 1600239
auucacauuuagcugggcg

SEQ ID NO: 1600241 - RNA, 19 nt, Artificial Sequence
  Description of Artificial Sequence: Synthetic oligonucleotide
  Sense strand starting at position 1359 of SEQ ID NO: 1560441
uaguaugucccauguagac

SEQ ID NO: 1600242 - RNA, 19 nt, Artificial Sequence
  Description of Artificial Sequence: Synthetic oligonucleotide
  Antisense strand to SEQ ID NO: 1600241
gucuacaugggacauacua

SEQ ID NO: 1600243 - RNA, 19 nt, Artificial Sequence
  Description of Artificial Sequence: Synthetic oligonucleotide
  Sense strand starting at position 1361 of SEQ ID NO: 1560441
guaugucccauguagacau

SEQ ID NO: 1600244 - RNA, 19 nt, Artificial Sequence
  Description of Artificial Sequence: Synthetic oligonucleotide
  Antisense strand to SEQ ID NO: 1600243
augucuacaugggacauac

SEQ ID NO: 1600245 - RNA, 19 nt, Artificial Sequence
  Description of Artificial Sequence: Synthetic oligonucleotide
  Sense strand starting at position 1630 of SEQ ID NO: 1560441
uugacaacucuaugggauc

SEQ ID NO: 1600246 - RNA, 19 nt, Artificial Sequence
  Description of Artificial Sequence: Synthetic oligonucleotide
  Antisense strand to SEQ ID NO: 1600245
gaucccauagaguugucaa

SEQ ID NO: 1600247 - RNA, 19 nt, Artificial Sequence
  Description of Artificial Sequence: Synthetic oligonucleotide
  Sense strand starting at position 1645 of SEQ ID NO: 1560441
gauccucuccgagguuaca

SEQ ID NO: 1600248 - RNA, 19 nt, Artificial Sequence
  Description of Artificial Sequence: Synthetic oligonucleotide
  Antisense strand to SEQ ID NO: 1600247
uguaaccucggagaggauc

SEQ ID NO: 1600249 - RNA, 19 nt, Artificial Sequence
  Description of Artificial Sequence: Synthetic oligonucleotide
  Sense strand starting at position 1667 of SEQ ID NO: 1560441
ugaagggagucgguguuaa

SEQ ID NO: 1600250 - RNA, 19 nt, Artificial Sequence
  Description of Artificial Sequence: Synthetic oligonucleotide
  Antisense strand to SEQ ID NO: 1600249
uuaacaccgacucccuuca

SEQ ID NO: 1600251 - RNA, 19 nt, Artificial Sequence
  Description of Artificial Sequence: Synthetic oligonucleotide
  Sense strand starting at position 1697 of SEQ ID NO: 1560441
gugcaugaggaguguucua

SEQ ID NO: 1600252 - RNA, 19 nt, Artificial Sequence
  Description of Artificial Sequence: Synthetic oligonucleotide
  Antisense strand to SEQ ID NO: 1600251
uagaacacuccucaugcac

SEQ ID NO: 1600253 - RNA, 19 nt, Artificial Sequence
  Description of Artificial Sequence: Synthetic oligonucleotide
  Sense strand starting at position 1706 of SEQ ID NO: 1560441
gaguguucuaggcagccaa

SEQ ID NO: 1600254 - RNA, 19 nt, Artificial Sequence
  Description of Artificial Sequence: Synthetic oligonucleotide
  Antisense strand to SEQ ID NO: 1600253
uuggcugccuagaacacuc

SEQ ID NO: 1600255 - RNA, 19 nt, Artificial Sequence
  Description of Artificial Sequence: Synthetic oligonucleotide
  Sense strand starting at position 1748 of SEQ ID NO: 1560441
cagggcuugcuguaauuau

SEQ ID NO: 1600256 - RNA, 19 nt, Artificial Sequence
  Description of Artificial Sequence: Synthetic oligonucleotide
  Antisense strand to SEQ ID NO: 1600255
auaauuacagcaagcccug

SEQ ID NO: 1600257 - RNA, 19 nt, Artificial Sequence
  Description of Artificial Sequence: Synthetic oligonucleotide
  Sense strand starting at position 1793 of SEQ ID NO: 1560441
aaguuauugucaccaggaa

SEQ ID NO: 1600258 - RNA, 19 nt, Artificial Sequence
  Description of Artificial Sequence: Synthetic oligonucleotide
  Antisense strand to SEQ ID NO: 1600257
uuccuggugacaauaacuu

SEQ ID NO: 1600259 - RNA, 19 nt, Artificial Sequence
  Description of Artificial Sequence: Synthetic oligonucleotide
  Sense strand starting at position 1794 of SEQ ID NO: 1560441
aguuauugucaccaggaau

SEQ ID NO: 1600260 - RNA, 19 nt, Artificial Sequence
  Description of Artificial Sequence: Synthetic oligonucleotide
  Antisense strand to SEQ ID NO: 1600259
auuccuggugacaauaacu

SEQ ID NO: 1600261 - RNA, 19 nt, Artificial Sequence
  Description of Artificial Sequence: Synthetic oligonucleotide
  Sense strand starting at position 2078 of SEQ ID NO: 1560441
ggcgaacucagcugagaac

SEQ ID NO: 1600262 - RNA, 19 nt, Artificial Sequence
  Description of Artificial Sequence: Synthetic oligonucleotide
  Antisense strand to SEQ ID NO: 1600261
guucucagcugaguucgcc

SEQ ID NO: 1600263 - RNA, 19 nt, Artificial Sequence
  Description of Artificial Sequence: Synthetic oligonucleotide
  Sense strand starting at position 2406 of SEQ ID NO: 1560441
uccggaguucuggguaugu

SEQ ID NO: 1600264 - RNA, 19 nt, Artificial Sequence
  Description of Artificial Sequence: Synthetic oligonucleotide
  Antisense strand to SEQ ID NO: 1600263
acauacccagaacuccgga

SEQ ID NO: 1600265 - RNA, 19 nt, Artificial Sequence
  Description of Artificial Sequence: Synthetic oligonucleotide
  Sense strand starting at position 2408 of SEQ ID NO: 1560441
cggaguucuggguaugugu

SEQ ID NO: 1600266 - RNA, 19 nt, Artificial Sequence
  Description of Artificial Sequence: Synthetic oligonucleotide
  Antisense strand to SEQ ID NO: 1600265
acacauacccagaacuccg

SEQ ID NO: 1600267 - RNA, 19 nt, Artificial Sequence
  Description of Artificial Sequence: Synthetic oligonucleotide
  Sense strand starting at position 2690 of SEQ ID NO: 1560441
cagggaugugcuugagaga

SEQ ID NO: 1600268 - RNA, 19 nt, Artificial Sequence
  Description of Artificial Sequence: Synthetic oligonucleotide
  Antisense strand to SEQ ID NO: 1600267
ucucucaagcacaucccug

SEQ ID NO: 1600269 - RNA, 19 nt, Artificial Sequence
  Description of Artificial Sequence: Synthetic oligonucleotide
  Sense strand starting at position 2706 of SEQ ID NO: 1560441
agagccucuccgcgaagaa

SEQ ID NO: 1600270 - RNA, 19 nt, Artificial Sequence
  Description of Artificial Sequence: Synthetic oligonucleotide
  Antisense strand to SEQ ID NO: 1600269
uucuucgcggagaggcucu

SEQ ID NO: 1600271 - RNA, 19 nt, Artificial Sequence
  Description of Artificial Sequence: Synthetic oligonucleotide
  Sense strand starting at position 2707 of SEQ ID NO: 1560441
gagccucuccgcgaagaau

SEQ ID NO: 1600272 - RNA, 19 nt, Artificial Sequence
  Description of Artificial Sequence: Synthetic oligonucleotide
  Antisense strand to SEQ ID NO: 1600271
auucuucgcggagaggcuc

SEQ ID NO: 1600273 - RNA, 19 nt, Artificial Sequence
  Description of Artificial Sequence: Synthetic oligonucleotide
  Sense strand starting at position 2871 of SEQ ID NO: 1560441
gcugucauaauguggugaa

SEQ ID NO: 1600274 - RNA, 19 nt, Artificial Sequence
  Description of Artificial Sequence: Synthetic oligonucleotide
  Antisense strand to SEQ ID NO: 1600273
uucaccacauuaugacagc

SEQ ID NO: 1600275 - RNA, 19 nt, Artificial Sequence
  Description of Artificial Sequence: Synthetic oligonucleotide
  Sense strand starting at position 2938 of SEQ ID NO: 1560441
ggagcugggccucaagaau

SEQ ID NO: 1600276 - RNA, 19 nt, Artificial Sequence
  Description of Artificial Sequence: Synthetic oligonucleotide
  Antisense strand to SEQ ID NO: 1600275
auucuugaggcccagcucc

SEQ ID NO: 1600277 - RNA, 19 nt, Artificial Sequence
  Description of Artificial Sequence: Synthetic oligonucleotide
  Sense strand starting at position 2957 of SEQ ID NO: 1560441
gaguaagauuuguaaggga

SEQ ID NO: 1600278 - RNA, 19 nt, Artificial Sequence
  Description of Artificial Sequence: Synthetic oligonucleotide
  Antisense strand to SEQ ID NO: 1600277
ucccuuacaaaucuuacuc

SEQ ID NO: 1600279 - RNA, 19 nt, Artificial Sequence
  Description of Artificial Sequence: Synthetic oligonucleotide
  Sense strand starting at position 2960 of SEQ ID NO: 1560441
uaagauuuguaagggagga

SEQ ID NO: 1600280 - RNA, 19 nt, Artificial Sequence
  Description of Artificial Sequence: Synthetic oligonucleotide
  Antisense strand to SEQ ID NO: 1600279
uccucccuuacaaaucuua

SEQ ID NO: 1600281 - RNA, 19 nt, Artificial Sequence
  Description of Artificial Sequence: Synthetic oligonucleotide
  Sense strand starting at position 2988 of SEQ ID NO: 1560441
aagggcauuucuggaggaa

SEQ ID NO: 1600282 - RNA, 19 nt, Artificial Sequence
  Description of Artificial Sequence: Synthetic oligonucleotide
  Antisense strand to SEQ ID NO: 1600281
uuccuccagaaaugcccuu

SEQ ID NO: 1600283 - RNA, 19 nt, Artificial Sequence
  Description of Artificial Sequence: Synthetic oligonucleotide
  Sense strand starting at position 3812 of SEQ ID NO: 1560441
gcggcuucuccugcgagga

SEQ ID NO: 1600284 - RNA, 19 nt, Artificial Sequence
  Description of Artificial Sequence: Synthetic oligonucleotide
  Antisense strand to SEQ ID NO: 1600283
uccucgcaggagaagccgc

SEQ ID NO: 1600285 - RNA, 19 nt, Artificial Sequence
  Description of Artificial Sequence: Synthetic oligonucleotide
  Sense strand starting at position 3909 of SEQ ID NO: 1560441
gcauccugugccuaugagu

SEQ ID NO: 1600286 - RNA, 19 nt, Artificial Sequence
  Description of Artificial Sequence: Synthetic oligonucleotide
  Antisense strand to SEQ ID NO: 1600285
acucauaggcacaggaugc

SEQ ID NO: 1600287 - RNA, 19 nt, Artificial Sequence
  Description of Artificial Sequence: Synthetic oligonucleotide
  Sense strand starting at position 3920 of SEQ ID NO: 1560441
cuaugaguucccugagcuc

SEQ ID NO: 1600288 - RNA, 19 nt, Artificial Sequence
  Description of Artificial Sequence: Synthetic oligonucleotide
  Antisense strand to SEQ ID NO: 1600287
gagcucagggaacucauag

SEQ ID NO: 1600289 - RNA, 19 nt, Artificial Sequence
  Description of Artificial Sequence: Synthetic oligonucleotide
  Sense strand starting at position 3974 of SEQ ID NO: 1560441
ccgcuucuggcugcagaau

SEQ ID NO: 1600290 - RNA, 19 nt, Artificial Sequence
  Description of Artificial Sequence: Synthetic oligonucleotide
  Antisense strand to SEQ ID NO: 1600289
auucugcagccagaagcgg

SEQ ID NO: 1600291 - RNA, 19 nt, Artificial Sequence
  Description of Artificial Sequence: Synthetic oligonucleotide
  Sense strand starting at position 3975 of SEQ ID NO: 1560441
cgcuucuggcugcagaauu

SEQ ID NO: 1600292 - RNA, 19 nt, Artificial Sequence
  Description of Artificial Sequence: Synthetic oligonucleotide
  Antisense strand to SEQ ID NO: 1600291
aauucugcagccagaagcg

SEQ ID NO: 1600293 - RNA, 19 nt, Artificial Sequence
  Description of Artificial Sequence: Synthetic oligonucleotide
  Sense strand starting at position 261 of SEQ ID NO: 1560442
gagcccauaguuuggagua

SEQ ID NO: 1600294 - RNA, 19 nt, Artificial Sequence
  Description of Artificial Sequence: Synthetic oligonucleotide
  Antisense strand to SEQ ID NO: 1600293
uacuccaaacuaugggcuc

SEQ ID NO: 1600295 - RNA, 19 nt, Artificial Sequence
  Description of Artificial Sequence: Synthetic oligonucleotide
  Sense strand starting at position 321 of SEQ ID NO: 1560442
gcaguccuccugggucuaa

SEQ ID NO: 1600296 - RNA, 19 nt, Artificial Sequence
  Description of Artificial Sequence: Synthetic oligonucleotide
  Antisense strand to SEQ ID NO: 1600295
uuagacccaggaggacugc

SEQ ID NO: 1600297 - RNA, 19 nt, Artificial Sequence
  Description of Artificial Sequence: Synthetic oligonucleotide
  Sense strand starting at position 387 of SEQ ID NO: 1560442
gcuagacuucugggucuga

SEQ ID NO: 1600298 - RNA, 19 nt, Artificial Sequence
  Description of Artificial Sequence: Synthetic oligonucleotide
  Antisense strand to SEQ ID NO: 1600297
ucagacccagaagucuagc

SEQ ID NO: 1600299 - RNA, 19 nt, Artificial Sequence
  Description of Artificial Sequence: Synthetic oligonucleotide
  Sense strand starting at position 391 of SEQ ID NO: 1560442
gacuucugggucugagaga

SEQ ID NO: 1600300 - RNA, 19 nt, Artificial Sequence
  Description of Artificial Sequence: Synthetic oligonucleotide
  Antisense strand to SEQ ID NO: 1600299
ucucucagacccagaaguc

SEQ ID NO: 1600301 - RNA, 19 nt, Artificial Sequence
  Description of Artificial Sequence: Synthetic oligonucleotide
  Sense strand starting at position 876 of SEQ ID NO: 1560442
ugcucuuugaggugugaga

SEQ ID NO: 1600302 - RNA, 19 nt, Artificial Sequence
  Description of Artificial Sequence: Synthetic oligonucleotide
  Antisense strand to SEQ ID NO: 1600301
ucucacaccucaaagagca

SEQ ID NO: 1600303 - RNA, 19 nt, Artificial Sequence
  Description of Artificial Sequence: Synthetic oligonucleotide
  Sense strand starting at position 878 of SEQ ID NO: 1560442
cucuuugaggugugagauu

SEQ ID NO: 1600304 - RNA, 19 nt, Artificial Sequence
  Description of Artificial Sequence: Synthetic oligonucleotide
  Antisense strand to SEQ ID NO: 1600303
aaucucacaccucaaagag

SEQ ID NO: 1600305 - RNA, 19 nt, Artificial Sequence
  Description of Artificial Sequence: Synthetic oligonucleotide
  Sense strand starting at position 936 of SEQ ID NO: 1560442
gccagaaccucagcuuucu

SEQ ID NO: 1600306 - RNA, 19 nt, Artificial Sequence
  Description of Artificial Sequence: Synthetic oligonucleotide
  Antisense strand to SEQ ID NO: 1600305
agaaagcugagguucuggc

SEQ ID NO: 1600307 - RNA, 19 nt, Artificial Sequence
  Description of Artificial Sequence: Synthetic oligonucleotide
  Sense strand starting at position 1271 of SEQ ID NO: 1560442
gggucauaggucugaaacc

SEQ ID NO: 1600308 - RNA, 19 nt, Artificial Sequence
  Description of Artificial Sequence: Synthetic oligonucleotide
  Antisense strand to SEQ ID NO: 1600307
gguuucagaccuaugaccc

SEQ ID NO: 1600309 - RNA, 19 nt, Artificial Sequence
  Description of Artificial Sequence: Synthetic oligonucleotide
  Sense strand starting at position 1356 of SEQ ID NO: 1560442
gguaucuagucucucggaa

SEQ ID NO: 1600310 - RNA, 19 nt, Artificial Sequence
  Description of Artificial Sequence: Synthetic oligonucleotide
  Antisense strand to SEQ ID NO: 1600309
uuccgagagacuagauacc

SEQ ID NO: 1600311 - RNA, 19 nt, Artificial Sequence
  Description of Artificial Sequence: Synthetic oligonucleotide
  Sense strand starting at position 1679 of SEQ ID NO: 1560442
ugcguucuccaggucgaau

SEQ ID NO: 1600312 - RNA, 19 nt, Artificial Sequence
  Description of Artificial Sequence: Synthetic oligonucleotide
  Antisense strand to SEQ ID NO: 1600311
auucgaccuggagaacgca

SEQ ID NO: 1600313 - RNA, 19 nt, Artificial Sequence
  Description of Artificial Sequence: Synthetic oligonucleotide
  Sense strand starting at position 1680 of SEQ ID NO: 1560442
gcguucuccaggucgaauu

SEQ ID NO: 1600314 - RNA, 19 nt, Artificial Sequence
  Description of Artificial Sequence: Synthetic oligonucleotide
  Antisense strand to SEQ ID NO: 1600313
aauucgaccuggagaacgc

SEQ ID NO: 1600315 - RNA, 19 nt, Artificial Sequence
  Description of Artificial Sequence: Synthetic oligonucleotide
  Sense strand starting at position 1804 of SEQ ID NO: 1560442
cccggaggugucuagggaa

SEQ ID NO: 1600316 - RNA, 19 nt, Artificial Sequence
  Description of Artificial Sequence: Synthetic oligonucleotide
  Antisense strand to SEQ ID NO: 1600315
uucccuagacaccuccggg

SEQ ID NO: 1600317 - RNA, 19 nt, Artificial Sequence
  Description of Artificial Sequence: Synthetic oligonucleotide
  Sense strand starting at position 2148 of SEQ ID NO: 1560442
gcgcuuuacggaaacgagu

SEQ ID NO: 1600318 - RNA, 19 nt, Artificial Sequence
  Description of Artificial Sequence: Synthetic oligonucleotide
  Antisense strand to SEQ ID NO: 1600317
acucguuuccguaaagcgc

SEQ ID NO: 1600319 - RNA, 19 nt, Artificial Sequence
  Description of Artificial Sequence: Synthetic oligonucleotide
  Sense strand starting at position 2253 of SEQ ID NO: 1560442
acgugugguuacucaaaga

SEQ ID NO: 1600320 - RNA, 19 nt, Artificial Sequence
  Description of Artificial Sequence: Synthetic oligonucleotide
  Antisense strand to SEQ ID NO: 1600319
ucuuugaguaaccacacgu

SEQ ID NO: 1600321 - RNA, 19 nt, Artificial Sequence
  Description of Artificial Sequence: Synthetic oligonucleotide
  Sense strand starting at position 2339 of SEQ ID NO: 1560442
aggagacauugggaaugga

SEQ ID NO: 1600322 - RNA, 19 nt, Artificial Sequence
  Description of Artificial Sequence: Synthetic oligonucleotide
  Antisense strand to SEQ ID NO: 1600321
uccauucccaaugucuccu

SEQ ID NO: 1600323 - RNA, 19 nt, Artificial Sequence
  Description of Artificial Sequence: Synthetic oligonucleotide
  Sense strand starting at position 2442 of SEQ ID NO: 1560442
acauauuuaugaggaacca

SEQ ID NO: 1600324 - RNA, 19 nt, Artificial Sequence
  Description of Artificial Sequence: Synthetic oligonucleotide
  Antisense strand to SEQ ID NO: 1600323
ugguuccucauaaauaugu

SEQ ID NO: 1600325 - RNA, 19 nt, Artificial Sequence
  Description of Artificial Sequence: Synthetic oligonucleotide
  Sense strand starting at position 2459 of SEQ ID NO: 1560442
caucgagaucuuugaagaa

SEQ ID NO: 1600326 - RNA, 19 nt, Artificial Sequence
  Description of Artificial Sequence: Synthetic oligonucleotide
  Antisense strand to SEQ ID NO: 1600325
uucuucaaagaucucgaug

SEQ ID NO: 1600327 - RNA, 19 nt, Artificial Sequence
  Description of Artificial Sequence: Synthetic oligonucleotide
  Sense strand starting at position 2608 of SEQ ID NO: 1560442
cagucucgaguuugagaga

SEQ ID NO: 1600328 - RNA, 19 nt, Artificial Sequence
  Description of Artificial Sequence: Synthetic oligonucleotide
  Antisense strand to SEQ ID NO: 1600327
ucucucaaacucgagacug

SEQ ID NO: 1600329 - RNA, 19 nt, Artificial Sequence
  Description of Artificial Sequence: Synthetic oligonucleotide
  Sense strand starting at position 2684 of SEQ ID NO: 1560442
gacuccugggucugaaaga

SEQ ID NO: 1600330 - RNA, 19 nt, Artificial Sequence
  Description of Artificial Sequence: Synthetic oligonucleotide
  Antisense strand to SEQ ID NO: 1600329
ucuuucagacccaggaguc

SEQ ID NO: 1600331 - RNA, 19 nt, Artificial Sequence
  Description of Artificial Sequence: Synthetic oligonucleotide
  Sense strand starting at position 2749 of SEQ ID NO: 1560442
gcuggacuucuggaucuga

SEQ ID NO: 1600332 - RNA, 19 nt, Artificial Sequence
  Description of Artificial Sequence: Synthetic oligonucleotide
  Antisense strand to SEQ ID NO: 1600331
ucagauccagaaguccagc

SEQ ID NO: 1600333 - RNA, 19 nt, Artificial Sequence
  Description of Artificial Sequence: Synthetic oligonucleotide
  Sense strand starting at position 2928 of SEQ ID NO: 1560442
ggagccuuggauuguuagu

SEQ ID NO: 1600334 - RNA, 19 nt, Artificial Sequence
  Description of Artificial Sequence: Synthetic oligonucleotide
  Antisense strand to SEQ ID NO: 1600333
acuaacaauccaaggcucc

SEQ ID NO: 1600335 - RNA, 19 nt, Artificial Sequence
  Description of Artificial Sequence: Synthetic oligonucleotide
  Sense strand starting at position 3021 of SEQ ID NO: 1560442
cgccuagugagccuuuagu

SEQ ID NO: 1600336 - RNA, 19 nt, Artificial Sequence
  Description of Artificial Sequence: Synthetic oligonucleotide
  Antisense strand to SEQ ID NO: 1600335
acuaaaggcucacuaggcg

SEQ ID NO: 1600337 - RNA, 19 nt, Artificial Sequence
  Description of Artificial Sequence: Synthetic oligonucleotide
  Sense strand starting at position 3028 of SEQ ID NO: 1560442
ugagccuuuagugggaaga

SEQ ID NO: 1600338 - RNA, 19 nt, Artificial Sequence
  Description of Artificial Sequence: Synthetic oligonucleotide
  Antisense strand to SEQ ID NO: 1600337
ucuucccacuaaaggcuca

SEQ ID NO: 1600339 - RNA, 19 nt, Artificial Sequence
  Description of Artificial Sequence: Synthetic oligonucleotide
  Sense strand starting at position 3029 of SEQ ID NO: 1560442
gagccuuuagugggaagaa

SEQ ID NO: 1600340 - RNA, 19 nt, Artificial Sequence
  Description of Artificial Sequence: Synthetic oligonucleotide
  Antisense strand to SEQ ID NO: 1600339
uucuucccacuaaaggcuc

SEQ ID NO: 1600341 - RNA, 19 nt, Artificial Sequence
  Description of Artificial Sequence: Synthetic oligonucleotide
  Sense strand starting at position 3216 of SEQ ID NO: 1560442
augaauacaugugaaugaa

SEQ ID NO: 1600342 - RNA, 19 nt, Artificial Sequence
  Description of Artificial Sequence: Synthetic oligonucleotide
  Antisense strand to SEQ ID NO: 1600341
uucauucacauguauucau

SEQ ID NO: 1600343 - RNA, 19 nt, Artificial Sequence
  Description of Artificial Sequence: Synthetic oligonucleotide
  Sense strand starting at position 3367 of SEQ ID NO: 1560442
aggaguucguggccaacau

SEQ ID NO: 1600344 - RNA, 19 nt, Artificial Sequence
  Description of Artificial Sequence: Synthetic oligonucleotide
  Antisense strand to SEQ ID NO: 1600343
auguuggccacgaacuccu

SEQ ID NO: 1600345 - RNA, 19 nt, Artificial Sequence
  Description of Artificial Sequence: Synthetic oligonucleotide
  Sense strand starting at position 3368 of SEQ ID NO: 1560442
ggaguucguggccaacauu

SEQ ID NO: 1600346 - RNA, 19 nt, Artificial Sequence
  Description of Artificial Sequence: Synthetic oligonucleotide
  Antisense strand to SEQ ID NO: 1600345
aauguuggccacgaacucc

SEQ ID NO: 1600347 - RNA, 19 nt, Artificial Sequence
  Description of Artificial Sequence: Synthetic oligonucleotide
  Sense strand starting at position 3578 of SEQ ID NO: 1560442
aagguaaugugaccugaac

SEQ ID NO: 1600348 - RNA, 19 nt, Artificial Sequence
  Description of Artificial Sequence: Synthetic oligonucleotide
  Antisense strand to SEQ ID NO: 1600347
guucaggucacauuaccuu

SEQ ID NO: 1600349 - RNA, 19 nt, Artificial Sequence
  Description of Artificial Sequence: Synthetic oligonucleotide
  Sense strand starting at position 3580 of SEQ ID NO: 1560442
gguaaugugaccugaacuu

SEQ ID NO: 1600350 - RNA, 19 nt, Artificial Sequence
  Description of Artificial Sequence: Synthetic oligonucleotide
  Antisense strand to SEQ ID NO: 1600349
aaguucaggucacauuacc

SEQ ID NO: 1600351 - RNA, 19 nt, Artificial Sequence
  Description of Artificial Sequence: Synthetic oligonucleotide
  Sense strand starting at position 3633 of SEQ ID NO: 1560442
ccaugaugagcccagucaa

SEQ ID NO: 1600352 - RNA, 19 nt, Artificial Sequence
  Description of Artificial Sequence: Synthetic oligonucleotide
  Antisense strand to SEQ ID NO: 1600351
uugacugggcucaucaugg

SEQ ID NO: 1600353 - RNA, 19 nt, Artificial Sequence
  Description of Artificial Sequence: Synthetic oligonucleotide
  Sense strand starting at position 3668 of SEQ ID NO: 1560442
gggagaaaguuguugguag

SEQ ID NO: 1600354 - RNA, 19 nt, Artificial Sequence
  Description of Artificial Sequence: Synthetic oligonucleotide
  Antisense strand to SEQ ID NO: 1600353
cuaccaacaacuuucuccc

SEQ ID NO: 1600355 - RNA, 19 nt, Artificial Sequence
  Description of Artificial Sequence: Synthetic oligonucleotide
  Sense strand starting at position 3670 of SEQ ID NO: 1560442
gagaaaguuguugguagcu

SEQ ID NO: 1600356 - RNA, 19 nt, Artificial Sequence
  Description of Artificial Sequence: Synthetic oligonucleotide
  Antisense strand to SEQ ID NO: 1600355
agcuaccaacaacuuucuc

SEQ ID NO: 1600357 - RNA, 19 nt, Artificial Sequence
  Description of Artificial Sequence: Synthetic oligonucleotide
  Sense strand starting at position 3772 of SEQ ID NO: 1560442
ccagaacuaccguggagaa

SEQ ID NO: 1600358 - RNA, 19 nt, Artificial Sequence
  Description of Artificial Sequence: Synthetic oligonucleotide
  Antisense strand to SEQ ID NO: 1600357
uucuccacgguaguucugg

SEQ ID NO: 1600359 - RNA, 19 nt, Artificial Sequence
  Description of Artificial Sequence: Synthetic oligonucleotide
  Sense strand starting at position 3773 of SEQ ID NO: 1560442
cagaacuaccguggagaaa

SEQ ID NO: 1600360 - RNA, 19 nt, Artificial Sequence
  Description of Artificial Sequence: Synthetic oligonucleotide
  Antisense strand to SEQ ID NO: 1600359
uuucuccacgguaguucug

SEQ ID NO: 1600361 - RNA, 19 nt, Artificial Sequence
  Description of Artificial Sequence: Synthetic oligonucleotide
  Sense strand starting at position 3873 of SEQ ID NO: 1560442
uggagagacuuaugaugaa

SEQ ID NO: 1600362 - RNA, 19 nt, Artificial Sequence
  Description of Artificial Sequence: Synthetic oligonucleotide
  Antisense strand to SEQ ID NO: 1600361
uucaucauaagucucucca

SEQ ID NO: 1600363 - RNA, 19 nt, Artificial Sequence
  Description of Artificial Sequence: Synthetic oligonucleotide
  Sense strand starting at position 3876 of SEQ ID NO: 1560442
agagacuuaugaugaaaga

SEQ ID NO: 1600364 - RNA, 19 nt, Artificial Sequence
  Description of Artificial Sequence: Synthetic oligonucleotide
  Antisense strand to SEQ ID NO: 1600363
ucuuucaucauaagucucu

SEQ ID NO: 1600365 - RNA, 19 nt, Artificial Sequence
  Description of Artificial Sequence: Synthetic oligonucleotide
  Sense strand starting at position 3907 of SEQ ID NO: 1560442
aggagacaguccuugguaa

SEQ ID NO: 1600366 - RNA, 19 nt, Artificial Sequence
  Description of Artificial Sequence: Synthetic oligonucleotide
  Antisense strand to SEQ ID NO: 1600365
uuaccaaggacugucuccu

SEQ ID NO: 1600367 - RNA, 19 nt, Artificial Sequence
  Description of Artificial Sequence: Synthetic oligonucleotide
  Sense strand starting at position 3908 of SEQ ID NO: 1560442
ggagacaguccuugguaag

SEQ ID NO: 1600368 - RNA, 19 nt, Artificial Sequence
  Description of Artificial Sequence: Synthetic oligonucleotide
  Antisense strand to SEQ ID NO: 1600367
cuuaccaaggacugucucc

SEQ ID NO: 1600369 - RNA, 19 nt, Artificial Sequence
  Description of Artificial Sequence: Synthetic oligonucleotide
  Sense strand starting at position 3927 of SEQ ID NO: 1560442
gggccuguuuauguugaga

SEQ ID NO: 1600370 - RNA, 19 nt, Artificial Sequence
  Description of Artificial Sequence: Synthetic oligonucleotide
  Antisense strand to SEQ ID NO: 1600369
ucucaacauaaacaggccc

SEQ ID NO: 1600371 - RNA, 19 nt, Artificial Sequence
  Description of Artificial Sequence: Synthetic oligonucleotide
  Sense strand starting at position 3930 of SEQ ID NO: 1560442
ccuguuuauguugagagag

SEQ ID NO: 1600372 - RNA, 19 nt, Artificial Sequence
  Description of Artificial Sequence: Synthetic oligonucleotide
  Antisense strand to SEQ ID NO: 1600371
cucucucaacauaaacagg

SEQ ID NO: 1600373 - RNA, 19 nt, Artificial Sequence
  Description of Artificial Sequence: Synthetic oligonucleotide
  Sense strand starting at position 741 of SEQ ID NO: 1560443
ggcuuccucccuugguuua

SEQ ID NO: 1600374 - RNA, 19 nt, Artificial Sequence
  Description of Artificial Sequence: Synthetic oligonucleotide
  Antisense strand to SEQ ID NO: 1600373
uaaaccaagggaggaagcc

SEQ ID NO: 1600375 - RNA, 19 nt, Artificial Sequence
  Description of Artificial Sequence: Synthetic oligonucleotide
  Sense strand starting at position 889 of SEQ ID NO: 1560443
gcaaauacggauggauaca

SEQ ID NO: 1600376 - RNA, 19 nt, Artificial Sequence
  Description of Artificial Sequence: Synthetic oligonucleotide
  Antisense strand to SEQ ID NO: 1600375
uguauccauccguauuugc

SEQ ID NO: 1600377 - RNA, 19 nt, Artificial Sequence
  Description of Artificial Sequence: Synthetic oligonucleotide
  Sense strand starting at position 1366 of SEQ ID NO: 1560443
gaaggaugaugaugacuga

SEQ ID NO: 1600378 - RNA, 19 nt, Artificial Sequence
  Description of Artificial Sequence: Synthetic oligonucleotide
  Antisense strand to SEQ ID NO: 1600377
ucagucaucaucauccuuc

SEQ ID NO: 1600379 - RNA, 19 nt, Artificial Sequence
  Description of Artificial Sequence: Synthetic oligonucleotide
  Sense strand starting at position 1792 of SEQ ID NO: 1560443
ggaugaaucuccgcucuua

SEQ ID NO: 1600380 - RNA, 19 nt, Artificial Sequence
  Description of Artificial Sequence: Synthetic oligonucleotide
  Antisense strand to SEQ ID NO: 1600379
uaagagcggagauucaucc

SEQ ID NO: 1600381 - RNA, 19 nt, Artificial Sequence
  Description of Artificial Sequence: Synthetic oligonucleotide
  Sense strand starting at position 2100 of SEQ ID NO: 1560443
uagaaaguguuucucaaag

SEQ ID NO: 1600382 - RNA, 19 nt, Artificial Sequence
  Description of Artificial Sequence: Synthetic oligonucleotide
  Antisense strand to SEQ ID NO: 1600381
cuuugagaaacacuuucua

SEQ ID NO: 1600383 - RNA, 19 nt, Artificial Sequence
  Description of Artificial Sequence: Synthetic oligonucleotide
  Sense strand starting at position 2102 of SEQ ID NO: 1560443
gaaaguguuucucaaagag

SEQ ID NO: 1600384 - RNA, 19 nt, Artificial Sequence
  Description of Artificial Sequence: Synthetic oligonucleotide
  Antisense strand to SEQ ID NO: 1600383
cucuuugagaaacacuuuc

SEQ ID NO: 1600385 - RNA, 19 nt, Artificial Sequence
  Description of Artificial Sequence: Synthetic oligonucleotide
  Sense strand starting at position 2106 of SEQ ID NO: 1560443
guguuucucaaagaggacu

SEQ ID NO: 1600386 - RNA, 19 nt, Artificial Sequence
  Description of Artificial Sequence: Synthetic oligonucleotide
  Antisense strand to SEQ ID NO: 1600385
aguccucuuugagaaacac

SEQ ID NO: 1600387 - RNA, 19 nt, Artificial Sequence
  Description of Artificial Sequence: Synthetic oligonucleotide
  Sense strand starting at position 2481 of SEQ ID NO: 1560443
gccucugaauuggucucua

SEQ ID NO: 1600388 - RNA, 19 nt, Artificial Sequence
  Description of Artificial Sequence: Synthetic oligonucleotide
  Antisense strand to SEQ ID NO: 1600387
uagagaccaauucagaggc

SEQ ID NO: 1600389 - RNA, 19 nt, Artificial Sequence
  Description of Artificial Sequence: Synthetic oligonucleotide
  Sense strand starting at position 2485 of SEQ ID NO: 1560443
cugaauuggucucuaggga

SEQ ID NO: 1600390 - RNA, 19 nt, Artificial Sequence
  Description of Artificial Sequence: Synthetic oligonucleotide
  Antisense strand to SEQ ID NO: 1600389
ucccuagagaccaauucag

SEQ ID NO: 1600391 - RNA, 19 nt, Artificial Sequence
  Description of Artificial Sequence: Synthetic oligonucleotide
  Sense strand starting at position 2579 of SEQ ID NO: 1560443
ggcuguggccugugucaga

SEQ ID NO: 1600392 - RNA, 19 nt, Artificial Sequence
  Description of Artificial Sequence: Synthetic oligonucleotide
  Antisense strand to SEQ ID NO: 1600391
ucugacacaggccacagcc

SEQ ID NO: 1600393 - RNA, 19 nt, Artificial Sequence
  Description of Artificial Sequence: Synthetic oligonucleotide
  Sense strand starting at position 2673 of SEQ ID NO: 1560443
gacggauauuugcgcuguu

SEQ ID NO: 1600394 - RNA, 19 nt, Artificial Sequence
  Description of Artificial Sequence: Synthetic oligonucleotide
  Antisense strand to SEQ ID NO: 1600393
aacagcgcaaauauccguc

SEQ ID NO: 1600395 - RNA, 19 nt, Artificial Sequence
  Description of Artificial Sequence: Synthetic oligonucleotide
  Sense strand starting at position 2676 of SEQ ID NO: 1560443
ggauauuugcgcuguucua

SEQ ID NO: 1600396 - RNA, 19 nt, Artificial Sequence
  Description of Artificial Sequence: Synthetic oligonucleotide
  Antisense strand to SEQ ID NO: 1600395
uagaacagcgcaaauaucc

SEQ ID NO: 1600397 - RNA, 19 nt, Artificial Sequence
  Description of Artificial Sequence: Synthetic oligonucleotide
  Sense strand starting at position 3174 of SEQ ID NO: 1560443
uauggaugauccugagacc

SEQ ID NO: 1600398 - RNA, 19 nt, Artificial Sequence
  Description of Artificial Sequence: Synthetic oligonucleotide
  Antisense strand to SEQ ID NO: 1600397
ggucucaggaucauccaua

SEQ ID NO: 1600399 - RNA, 19 nt, Artificial Sequence
  Description of Artificial Sequence: Synthetic oligonucleotide
  Sense strand starting at position 3256 of SEQ ID NO: 1560443
gggccaugguuugcugaga

SEQ ID NO: 1600400 - RNA, 19 nt, Artificial Sequence
  Description of Artificial Sequence: Synthetic oligonucleotide
  Antisense strand to SEQ ID NO: 1600399
ucucagcaaaccauggccc

SEQ ID NO: 1600401 - RNA, 19 nt, Artificial Sequence
  Description of Artificial Sequence: Synthetic oligonucleotide
  Sense strand starting at position 3294 of SEQ ID NO: 1560443
gucccaacuuggugggaaa

SEQ ID NO: 1600402 - RNA, 19 nt, Artificial Sequence
  Description of Artificial Sequence: Synthetic oligonucleotide
  Antisense strand to SEQ ID NO: 1600401
uuucccaccaaguugggac

SEQ ID NO: 1600403 - RNA, 19 nt, Artificial Sequence
  Description of Artificial Sequence: Synthetic oligonucleotide
  Sense strand starting at position 3429 of SEQ ID NO: 1560443
cgagcuuuccuccaugaca

SEQ ID NO: 1600404 - RNA, 19 nt, Artificial Sequence
  Description of Artificial Sequence: Synthetic oligonucleotide
  Antisense strand to SEQ ID NO: 1600403
ugucauggaggaaagcucg

SEQ ID NO: 1600405 - RNA, 19 nt, Artificial Sequence
  Description of Artificial Sequence: Synthetic oligonucleotide
  Sense strand starting at position 3431 of SEQ ID NO: 1560443
agcuuuccuccaugacaug

SEQ ID NO: 1600406 - RNA, 19 nt, Artificial Sequence
  Description of Artificial Sequence: Synthetic oligonucleotide
  Antisense strand to SEQ ID NO: 1600405
caugucauggaggaaagcu

SEQ ID NO: 1600407 - RNA, 19 nt, Artificial Sequence
  Description of Artificial Sequence: Synthetic oligonucleotide
  Sense strand starting at position 3640 of SEQ ID NO: 1560443
cgacgaagcuuugcuggau

SEQ ID NO: 1600408 - RNA, 19 nt, Artificial Sequence
  Description of Artificial Sequence: Synthetic oligonucleotide
  Antisense strand to SEQ ID NO: 1600407
auccagcaaagcuucgucg

SEQ ID NO: 1600409 - RNA, 19 nt, Artificial Sequence
  Description of Artificial Sequence: Synthetic oligonucleotide
  Sense strand starting at position 336 of SEQ ID NO: 1560444
gugccugacuggcagauua

SEQ ID NO: 1600410 - RNA, 19 nt, Artificial Sequence
  Description of Artificial Sequence: Synthetic oligonucleotide
  Antisense strand to SEQ ID NO: 1600409
uaaucugccagucaggcac

SEQ ID NO: 1600411 - RNA, 19 nt, Artificial Sequence
  Description of Artificial Sequence: Synthetic oligonucleotide
  Sense strand starting at position 338 of SEQ ID NO: 1560444
gccugacuggcagauuaag

SEQ ID NO: 1600412 - RNA, 19 nt, Artificial Sequence
  Description of Artificial Sequence: Synthetic oligonucleotide
  Antisense strand to SEQ ID NO: 1600411
cuuaaucugccagucaggc

SEQ ID NO: 1600413 - RNA, 19 nt, Artificial Sequence
  Description of Artificial Sequence: Synthetic oligonucleotide
  Sense strand starting at position 364 of SEQ ID NO: 1560444
aaacauggccagugagauu

SEQ ID NO: 1600414 - RNA, 19 nt, Artificial Sequence
  Description of Artificial Sequence: Synthetic oligonucleotide
  Antisense strand to SEQ ID NO: 1600413
aaucucacuggccauguuu

SEQ ID NO: 1600415 - RNA, 19 nt, Artificial Sequence
  Description of Artificial Sequence: Synthetic oligonucleotide
  Sense strand starting at position 757 of SEQ ID NO: 1560444
caugguugcccacaagacu

SEQ ID NO: 1600416 - RNA, 19 nt, Artificial Sequence
  Description of Artificial Sequence: Synthetic oligonucleotide
  Antisense strand to SEQ ID NO: 1600415
agucuugugggcaaccaug

SEQ ID NO: 1600417 - RNA, 19 nt, Artificial Sequence
  Description of Artificial Sequence: Synthetic oligonucleotide
  Sense strand starting at position 1138 of SEQ ID NO: 1560444
gacucuacuguguggcgaa

SEQ ID NO: 1600418 - RNA, 19 nt, Artificial Sequence
  Description of Artificial Sequence: Synthetic oligonucleotide
  Antisense strand to SEQ ID NO: 1600417
uucgccacacaguagaguc

SEQ ID NO: 1600419 - RNA, 19 nt, Artificial Sequence
  Description of Artificial Sequence: Synthetic oligonucleotide
  Sense strand starting at position 1139 of SEQ ID NO: 1560444
acucuacuguguggcgaau

SEQ ID NO: 1600420 - RNA, 19 nt, Artificial Sequence
  Description of Artificial Sequence: Synthetic oligonucleotide
  Antisense strand to SEQ ID NO: 1600419
auucgccacacaguagagu

SEQ ID NO: 1600421 - RNA, 19 nt, Artificial Sequence
  Description of Artificial Sequence: Synthetic oligonucleotide
  Sense strand starting at position 1172 of SEQ ID NO: 1560444
cuaccacugucuguuauga

SEQ ID NO: 1600422 - RNA, 19 nt, Artificial Sequence
  Description of Artificial Sequence: Synthetic oligonucleotide
  Antisense strand to SEQ ID NO: 1600421
ucauaacagacagugguag

SEQ ID NO: 1600423 - RNA, 19 nt, Artificial Sequence
  Description of Artificial Sequence: Synthetic oligonucleotide
  Sense strand starting at position 1174 of SEQ ID NO: 1560444
accacugucuguuaugaga

SEQ ID NO: 1600424 - RNA, 19 nt, Artificial Sequence
  Description of Artificial Sequence: Synthetic oligonucleotide
  Antisense strand to SEQ ID NO: 1600423
ucucauaacagacaguggu

SEQ ID NO: 1600425 - RNA, 19 nt, Artificial Sequence
  Description of Artificial Sequence: Synthetic oligonucleotide
  Sense strand starting at position 1176 of SEQ ID NO: 1560444
cacugucuguuaugagauu

SEQ ID NO: 1600426 - RNA, 19 nt, Artificial Sequence
  Description of Artificial Sequence: Synthetic oligonucleotide
  Antisense strand to SEQ ID NO: 1600425
aaucucauaacagacagug

SEQ ID NO: 1600427 - RNA, 19 nt, Artificial Sequence
  Description of Artificial Sequence: Synthetic oligonucleotide
  Sense strand starting at position 1194 of SEQ ID NO: 1560444
ucacgaauagaauguacua

SEQ ID NO: 1600428 - RNA, 19 nt, Artificial Sequence
  Description of Artificial Sequence: Synthetic oligonucleotide
  Antisense strand to SEQ ID NO: 1600427
uaguacauucuauucguga

SEQ ID NO: 1600429 - RNA, 19 nt, Artificial Sequence
  Description of Artificial Sequence: Synthetic oligonucleotide
  Sense strand starting at position 1269 of SEQ ID NO: 1560444
ggagaaaucuccucucuca

SEQ ID NO: 1600430 - RNA, 19 nt, Artificial Sequence
  Description of Artificial Sequence: Synthetic oligonucleotide
  Antisense strand to SEQ ID NO: 1600429
ugagagaggagauuucucc

SEQ ID NO: 1600431 - RNA, 19 nt, Artificial Sequence
  Description of Artificial Sequence: Synthetic oligonucleotide
  Sense strand starting at position 1351 of SEQ ID NO: 1560444
cguaaauacccauggaauu

SEQ ID NO: 1600432 - RNA, 19 nt, Artificial Sequence
  Description of Artificial Sequence: Synthetic oligonucleotide
  Antisense strand to SEQ ID NO: 1600431
aauuccauggguauuuacg

SEQ ID NO: 1600433 - RNA, 19 nt, Artificial Sequence
  Description of Artificial Sequence: Synthetic oligonucleotide
  Sense strand starting at position 1719 of SEQ ID NO: 1560444
gccaguacuccugagacgu

SEQ ID NO: 1600434 - RNA, 19 nt, Artificial Sequence
  Description of Artificial Sequence: Synthetic oligonucleotide
  Antisense strand to SEQ ID NO: 1600433
acgucucaggaguacuggc

SEQ ID NO: 1600435 - RNA, 19 nt, Artificial Sequence
  Description of Artificial Sequence: Synthetic oligonucleotide
  Sense strand starting at position 1835 of SEQ ID NO: 1560444
ucucaccuguugugggaaa

SEQ ID NO: 1600436 - RNA, 19 nt, Artificial Sequence
  Description of Artificial Sequence: Synthetic oligonucleotide
  Antisense strand to SEQ ID NO: 1600435
uuucccacaacaggugaga

SEQ ID NO: 1600437 - RNA, 19 nt, Artificial Sequence
  Description of Artificial Sequence: Synthetic oligonucleotide
  Sense strand starting at position 2239 of SEQ ID NO: 1560444
ucauucugcugaucgggaa

SEQ ID NO: 1600438 - RNA, 19 nt, Artificial Sequence
  Description of Artificial Sequence: Synthetic oligonucleotide
  Antisense strand to SEQ ID NO: 1600437
uucccgaucagcagaauga

SEQ ID NO: 1600439 - RNA, 19 nt, Artificial Sequence
  Description of Artificial Sequence: Synthetic oligonucleotide
  Sense strand starting at position 2240 of SEQ ID NO: 1560444
cauucugcugaucgggaaa

SEQ ID NO: 1600440 - RNA, 19 nt, Artificial Sequence
  Description of Artificial Sequence: Synthetic oligonucleotide
  Antisense strand to SEQ ID NO: 1600439
uuucccgaucagcagaaug

SEQ ID NO: 1600441 - RNA, 19 nt, Artificial Sequence
  Description of Artificial Sequence: Synthetic oligonucleotide
  Sense strand starting at position 2272 of SEQ ID NO: 1560444
uugcuucagcgguuaagca

SEQ ID NO: 1600442 - RNA, 19 nt, Artificial Sequence
  Description of Artificial Sequence: Synthetic oligonucleotide
  Antisense strand to SEQ ID NO: 1600441
ugcuuaaccgcugaagcaa

SEQ ID NO: 1600443 - RNA, 19 nt, Artificial Sequence
  Description of Artificial Sequence: Synthetic oligonucleotide
  Sense strand starting at position 2288 of SEQ ID NO: 1560444
gcaguuugaugagcagaau

SEQ ID NO: 1600444 - RNA, 19 nt, Artificial Sequence
  Description of Artificial Sequence: Synthetic oligonucleotide
  Antisense strand to SEQ ID NO: 1600443
auucugcucaucaaacugc

SEQ ID NO: 1600445 - RNA, 19 nt, Artificial Sequence
  Description of Artificial Sequence: Synthetic oligonucleotide
  Sense strand starting at position 2289 of SEQ ID NO: 1560444
caguuugaugagcagaauc

SEQ ID NO: 1600446 - RNA, 19 nt, Artificial Sequence
  Description of Artificial Sequence: Synthetic oligonucleotide
  Antisense strand to SEQ ID NO: 1600445
gauucugcucaucaaacug

SEQ ID NO: 1600447 - RNA, 19 nt, Artificial Sequence
  Description of Artificial Sequence: Synthetic oligonucleotide
  Sense strand starting at position 2406 of SEQ ID NO: 1560444
ggaagcauccauugcuuua

SEQ ID NO: 1600448 - RNA, 19 nt, Artificial Sequence
  Description of Artificial Sequence: Synthetic oligonucleotide
  Antisense strand to SEQ ID NO: 1600447
uaaagcaauggaugcuucc

SEQ ID NO: 1600449 - RNA, 19 nt, Artificial Sequence
  Description of Artificial Sequence: Synthetic oligonucleotide
  Sense strand starting at position 2525 of SEQ ID NO: 1560444
gugucagacccuugagaug

SEQ ID NO: 1600450 - RNA, 19 nt, Artificial Sequence
  Description of Artificial Sequence: Synthetic oligonucleotide
  Antisense strand to SEQ ID NO: 1600449
caucucaagggucugacac

SEQ ID NO: 1600451 - RNA, 19 nt, Artificial Sequence
  Description of Artificial Sequence: Synthetic oligonucleotide
  Sense strand starting at position 2539 of SEQ ID NO: 1560444
agauguggcucugguaacu

SEQ ID NO: 1600452 - RNA, 19 nt, Artificial Sequence
  Description of Artificial Sequence: Synthetic oligonucleotide
  Antisense strand to SEQ ID NO: 1600451
aguuaccagagccacaucu

SEQ ID NO: 1600453 - RNA, 19 nt, Artificial Sequence
  Description of Artificial Sequence: Synthetic oligonucleotide
  Sense strand starting at position 2597 of SEQ ID NO: 1560444
aguaauauggcccagcaca

SEQ ID NO: 1600454 - RNA, 19 nt, Artificial Sequence
  Description of Artificial Sequence: Synthetic oligonucleotide
  Antisense strand to SEQ ID NO: 1600453
ugugcugggccauauuacu

SEQ ID NO: 1600455 - RNA, 19 nt, Artificial Sequence
  Description of Artificial Sequence: Synthetic oligonucleotide
  Sense strand starting at position 2923 of SEQ ID NO: 1560444
caucuacaguccgaugagu

SEQ ID NO: 1600456 - RNA, 19 nt, Artificial Sequence
  Description of Artificial Sequence: Synthetic oligonucleotide
  Antisense strand to SEQ ID NO: 1600455
acucaucggacuguagaug

SEQ ID NO: 1600457 - RNA, 19 nt, Artificial Sequence
  Description of Artificial Sequence: Synthetic oligonucleotide
  Sense strand starting at position 2925 of SEQ ID NO: 1560444
ucuacaguccgaugaguac

SEQ ID NO: 1600458 - RNA, 19 nt, Artificial Sequence
  Description of Artificial Sequence: Synthetic oligonucleotide
  Antisense strand to SEQ ID NO: 1600457
guacucaucggacuguaga

SEQ ID NO: 1600459 - RNA, 19 nt, Artificial Sequence
  Description of Artificial Sequence: Synthetic oligonucleotide
  Sense strand starting at position 3130 of SEQ ID NO: 1560444
gucggacacucauuuccuu

SEQ ID NO: 1600460 - RNA, 19 nt, Artificial Sequence
  Description of Artificial Sequence: Synthetic oligonucleotide
  Antisense strand to SEQ ID NO: 1600459
aaggaaaugaguguccgac

SEQ ID NO: 1600461 - RNA, 19 nt, Artificial Sequence
  Description of Artificial Sequence: Synthetic oligonucleotide
  Sense strand starting at position 3310 of SEQ ID NO: 1560444
guaugcuagaccuggcuca

SEQ ID NO: 1600462 - RNA, 19 nt, Artificial Sequence
  Description of Artificial Sequence: Synthetic oligonucleotide
  Antisense strand to SEQ ID NO: 1600461
ugagccaggucuagcauac

SEQ ID NO: 1600463 - RNA, 19 nt, Artificial Sequence
  Description of Artificial Sequence: Synthetic oligonucleotide
  Sense strand starting at position 3315 of SEQ ID NO: 1560444
cuagaccuggcucaacaua

SEQ ID NO: 1600464 - RNA, 19 nt, Artificial Sequence
  Description of Artificial Sequence: Synthetic oligonucleotide
  Antisense strand to SEQ ID NO: 1600463
uauguugagccaggucuag

SEQ ID NO: 1600465 - RNA, 19 nt, Artificial Sequence
  Description of Artificial Sequence: Synthetic oligonucleotide
  Sense strand starting at position 3373 of SEQ ID NO: 1560444
ucaugcugguauccugaaa

SEQ ID NO: 1600466 - RNA, 19 nt, Artificial Sequence
  Description of Artificial Sequence: Synthetic oligonucleotide
  Antisense strand to SEQ ID NO: 1600465
uuucaggauaccagcauga

SEQ ID NO: 1600467 - RNA, 19 nt, Artificial Sequence
  Description of Artificial Sequence: Synthetic oligonucleotide
  Sense strand starting at position 3384 of SEQ ID NO: 1560444
uccugaaaucagcagcagu

SEQ ID NO: 1600468 - RNA, 19 nt, Artificial Sequence
  Description of Artificial Sequence: Synthetic oligonucleotide
  Antisense strand to SEQ ID NO: 1600467
acugcugcugauuucagga

SEQ ID NO: 1600469 - RNA, 19 nt, Artificial Sequence
  Description of Artificial Sequence: Synthetic oligonucleotide
  Sense strand starting at position 3669 of SEQ ID NO: 1560444
gggauguuguugucgagga

SEQ ID NO: 1600470 - RNA, 19 nt, Artificial Sequence
  Description of Artificial Sequence: Synthetic oligonucleotide
  Antisense strand to SEQ ID NO: 1600469
uccucgacaacaacauccc

SEQ ID NO: 1600471 - RNA, 19 nt, Artificial Sequence
  Description of Artificial Sequence: Synthetic oligonucleotide
  Sense strand starting at position 3670 of SEQ ID NO: 1560444
ggauguuguugucgaggaa

SEQ ID NO: 1600472 - RNA, 19 nt, Artificial Sequence
  Description of Artificial Sequence: Synthetic oligonucleotide
  Antisense strand to SEQ ID NO: 1600471
uuccucgacaacaacaucc

SEQ ID NO: 1600473 - RNA, 19 nt, Artificial Sequence
  Description of Artificial Sequence: Synthetic oligonucleotide
  Sense strand starting at position 3671 of SEQ ID NO: 1560444
gauguuguugucgaggaau

SEQ ID NO: 1600474 - RNA, 19 nt, Artificial Sequence
  Description of Artificial Sequence: Synthetic oligonucleotide
  Antisense strand to SEQ ID NO: 1600473
auuccucgacaacaacauc

SEQ ID NO: 1600475 - RNA, 19 nt, Artificial Sequence
  Description of Artificial Sequence: Synthetic oligonucleotide
  Sense strand starting at position 3673 of SEQ ID NO: 1560444
uguuguugucgaggaauga

SEQ ID NO: 1600476 - RNA, 19 nt, Artificial Sequence
  Description of Artificial Sequence: Synthetic oligonucleotide
  Antisense strand to SEQ ID NO: 1600475
ucauuccucgacaacaaca

SEQ ID NO: 1600477 - RNA, 19 nt, Artificial Sequence
  Description of Artificial Sequence: Synthetic oligonucleotide
  Sense strand starting at position 3674 of SEQ ID NO: 1560444
guuguugucgaggaaugaa

SEQ ID NO: 1600478 - RNA, 19 nt, Artificial Sequence
  Description of Artificial Sequence: Synthetic oligonucleotide
  Antisense strand to SEQ ID NO: 1600477
uucauuccucgacaacaac

SEQ ID NO: 1600479 - RNA, 19 nt, Artificial Sequence
  Description of Artificial Sequence: Synthetic oligonucleotide
  Sense strand starting at position 3785 of SEQ ID NO: 1560444
ggaggcuccucuugucaca

SEQ ID NO: 1600480 - RNA, 19 nt, Artificial Sequence
  Description of Artificial Sequence: Synthetic oligonucleotide
  Antisense strand to SEQ ID NO: 1600479
ugugacaagaggagccucc

SEQ ID NO: 1600481 - RNA, 19 nt, Artificial Sequence
  Description of Artificial Sequence: Synthetic oligonucleotide
  Sense strand starting at position 944 of SEQ ID NO: 1560445
auccuagcuucugcaagaa

SEQ ID NO: 1600482 - RNA, 19 nt, Artificial Sequence
  Description of Artificial Sequence: Synthetic oligonucleotide
  Antisense strand to SEQ ID NO: 1600481
uucuugcagaagcuaggau

SEQ ID NO: 1600483 - RNA, 19 nt, Artificial Sequence
  Description of Artificial Sequence: Synthetic oligonucleotide
  Sense strand starting at position 1119 of SEQ ID NO: 1560445
caagguuauccgugcgcca

SEQ ID NO: 1600484 - RNA, 19 nt, Artificial Sequence
  Description of Artificial Sequence: Synthetic oligonucleotide
  Antisense strand to SEQ ID NO: 1600483
uggcgcacggauaaccuug

SEQ ID NO: 1600485 - RNA, 19 nt, Artificial Sequence
  Description of Artificial Sequence: Synthetic oligonucleotide
  Sense strand starting at position 1843 of SEQ ID NO: 1560445
agaagaaacucagagggau

SEQ ID NO: 1600486 - RNA, 19 nt, Artificial Sequence
  Description of Artificial Sequence: Synthetic oligonucleotide
  Antisense strand to SEQ ID NO: 1600485
aucccucugaguuucuucu

SEQ ID NO: 1600487 - RNA, 19 nt, Artificial Sequence
  Description of Artificial Sequence: Synthetic oligonucleotide
  Sense strand starting at position 2152 of SEQ ID NO: 1560445
aaagaagcgcucuggacuu

SEQ ID NO: 1600488 - RNA, 19 nt, Artificial Sequence
  Description of Artificial Sequence: Synthetic oligonucleotide
  Antisense strand to SEQ ID NO: 1600487
aaguccagagcgcuucuuu

SEQ ID NO: 1600489 - RNA, 19 nt, Artificial Sequence
  Description of Artificial Sequence: Synthetic oligonucleotide
  Sense strand starting at position 2268 of SEQ ID NO: 1560445
ggcugagucuucuaucuug

SEQ ID NO: 1600490 - RNA, 19 nt, Artificial Sequence
  Description of Artificial Sequence: Synthetic oligonucleotide
  Antisense strand to SEQ ID NO: 1600489
caagauagaagacucagcc

SEQ ID NO: 1600491 - RNA, 19 nt, Artificial Sequence
  Description of Artificial Sequence: Synthetic oligonucleotide
  Sense strand starting at position 2271 of SEQ ID NO: 1560445
ugagucuucuaucuugguu

SEQ ID NO: 1600492 - RNA, 19 nt, Artificial Sequence
  Description of Artificial Sequence: Synthetic oligonucleotide
  Antisense strand to SEQ ID NO: 1600491
aaccaagauagaagacuca

SEQ ID NO: 1600493 - RNA, 19 nt, Artificial Sequence
  Description of Artificial Sequence: Synthetic oligonucleotide
  Sense strand starting at position 2274 of SEQ ID NO: 1560445
gucuucuaucuugguuacu

SEQ ID NO: 1600494 - RNA, 19 nt, Artificial Sequence
  Description of Artificial Sequence: Synthetic oligonucleotide
  Antisense strand to SEQ ID NO: 1600493
aguaaccaagauagaagac

SEQ ID NO: 1600495 - RNA, 19 nt, Artificial Sequence
  Description of Artificial Sequence: Synthetic oligonucleotide
  Sense strand starting at position 2355 of SEQ ID NO: 1560445
uccauuggguagucauagu

SEQ ID NO: 1600496 - RNA, 19 nt, Artificial Sequence
  Description of Artificial Sequence: Synthetic oligonucleotide
  Antisense strand to SEQ ID NO: 1600495
acuaugacuacccaaugga

SEQ ID NO: 1600497 - RNA, 19 nt, Artificial Sequence
  Description of Artificial Sequence: Synthetic oligonucleotide
  Sense strand starting at position 2532 of SEQ ID NO: 1560445
gcugcugacucuuugguga

SEQ ID NO: 1600498 - RNA, 19 nt, Artificial Sequence
  Description of Artificial Sequence: Synthetic oligonucleotide
  Antisense strand to SEQ ID NO: 1600497
ucaccaaagagucagcagc

SEQ ID NO: 1600499 - RNA, 19 nt, Artificial Sequence
  Description of Artificial Sequence: Synthetic oligonucleotide
  Sense strand starting at position 2535 of SEQ ID NO: 1560445
gcugacucuuuggugaaga

SEQ ID NO: 1600500 - RNA, 19 nt, Artificial Sequence
  Description of Artificial Sequence: Synthetic oligonucleotide
  Antisense strand to SEQ ID NO: 1600499
ucuucaccaaagagucagc

SEQ ID NO: 1600501 - RNA, 19 nt, Artificial Sequence
  Description of Artificial Sequence: Synthetic oligonucleotide
  Sense strand starting at position 2536 of SEQ ID NO: 1560445
cugacucuuuggugaagau

SEQ ID NO: 1600502 - RNA, 19 nt, Artificial Sequence
  Description of Artificial Sequence: Synthetic oligonucleotide
  Antisense strand to SEQ ID NO: 1600501
aucuucaccaaagagucag

SEQ ID NO: 1600503 - RNA, 19 nt, Artificial Sequence
  Description of Artificial Sequence: Synthetic oligonucleotide
  Sense strand starting at position 2951 of SEQ ID NO: 1560445
agggacaucuggucaaggu

SEQ ID NO: 1600504 - RNA, 19 nt, Artificial Sequence
  Description of Artificial Sequence: Synthetic oligonucleotide
  Antisense strand to SEQ ID NO: 1600503
accuugaccagaugucccu

SEQ ID NO: 1600505 - RNA, 19 nt, Artificial Sequence
  Description of Artificial Sequence: Synthetic oligonucleotide
  Sense strand starting at position 2961 of SEQ ID NO: 1560445
ggucaaggucccugacuua

SEQ ID NO: 1600506 - RNA, 19 nt, Artificial Sequence
  Description of Artificial Sequence: Synthetic oligonucleotide
  Antisense strand to SEQ ID NO: 1600505
uaagucagggaccuugacc

SEQ ID NO: 1600507 - RNA, 19 nt, Artificial Sequence
  Description of Artificial Sequence: Synthetic oligonucleotide
  Sense strand starting at position 3048 of SEQ ID NO: 1560445
gugagucuuucuccuaaca

SEQ ID NO: 1600508 - RNA, 19 nt, Artificial Sequence
  Description of Artificial Sequence: Synthetic oligonucleotide
  Antisense strand to SEQ ID NO: 1600507
uguuaggagaaagacucac

SEQ ID NO: 1600509 - RNA, 19 nt, Artificial Sequence
  Description of Artificial Sequence: Synthetic oligonucleotide
  Sense strand starting at position 3137 of SEQ ID NO: 1560445
ugugguuucugugguccaa

SEQ ID NO: 1600510 - RNA, 19 nt, Artificial Sequence
  Description of Artificial Sequence: Synthetic oligonucleotide
  Antisense strand to SEQ ID NO: 1600509
uuggaccacagaaaccaca

SEQ ID NO: 1600511 - RNA, 19 nt, Artificial Sequence
  Description of Artificial Sequence: Synthetic oligonucleotide
  Sense strand starting at position 3280 of SEQ ID NO: 1560445
gcauguagcagucaaggua

SEQ ID NO: 1600512 - RNA, 19 nt, Artificial Sequence
  Description of Artificial Sequence: Synthetic oligonucleotide
  Antisense strand to SEQ ID NO: 1600511
uaccuugacugcuacaugc

SEQ ID NO: 1600513 - RNA, 19 nt, Artificial Sequence
  Description of Artificial Sequence: Synthetic oligonucleotide
  Sense strand starting at position 3287 of SEQ ID NO: 1560445
gcagucaagguauacagua

SEQ ID NO: 1600514 - RNA, 19 nt, Artificial Sequence
  Description of Artificial Sequence: Synthetic oligonucleotide
  Antisense strand to SEQ ID NO: 1600513
uacuguauaccuugacugc

SEQ ID NO: 1600515 - RNA, 19 nt, Artificial Sequence
  Description of Artificial Sequence: Synthetic oligonucleotide
  Sense strand starting at position 3320 of SEQ ID NO: 1560445
guaucaugcuauuaguuau

SEQ ID NO: 1600516 - RNA, 19 nt, Artificial Sequence
  Description of Artificial Sequence: Synthetic oligonucleotide
  Antisense strand to SEQ ID NO: 1600515
auaacuaauagcaugauac

SEQ ID NO: 1600517 - RNA, 19 nt, Artificial Sequence
  Description of Artificial Sequence: Synthetic oligonucleotide
  Sense strand starting at position 3323 of SEQ ID NO: 1560445
ucaugcuauuaguuaugau

SEQ ID NO: 1600518 - RNA, 19 nt, Artificial Sequence
  Description of Artificial Sequence: Synthetic oligonucleotide
  Antisense strand to SEQ ID NO: 1600517
aucauaacuaauagcauga

SEQ ID NO: 1600519 - RNA, 19 nt, Artificial Sequence
  Description of Artificial Sequence: Synthetic oligonucleotide
  Sense strand starting at position 3337 of SEQ ID NO: 1560445
augauuuauugguagagca

SEQ ID NO: 1600520 - RNA, 19 nt, Artificial Sequence
  Description of Artificial Sequence: Synthetic oligonucleotide
  Antisense strand to SEQ ID NO: 1600519
ugcucuaccaauaaaucau

SEQ ID NO: 1600521 - RNA, 19 nt, Artificial Sequence
  Description of Artificial Sequence: Synthetic oligonucleotide
  Sense strand starting at position 3385 of SEQ ID NO: 1560445
gcaggucucuuguccauac

SEQ ID NO: 1600522 - RNA, 19 nt, Artificial Sequence
  Description of Artificial Sequence: Synthetic oligonucleotide
  Antisense strand to SEQ ID NO: 1600521
guauggacaagagaccugc

SEQ ID NO: 1600523 - RNA, 19 nt, Artificial Sequence
  Description of Artificial Sequence: Synthetic oligonucleotide
  Sense strand starting at position 3426 of SEQ ID NO: 1560445
gaagaugagccgugcauac

SEQ ID NO: 1600524 - RNA, 19 nt, Artificial Sequence
  Description of Artificial Sequence: Synthetic oligonucleotide
  Antisense strand to SEQ ID NO: 1600523
guaugcacggcucaucuuc

SEQ ID NO: 1600525 - RNA, 19 nt, Artificial Sequence
  Description of Artificial Sequence: Synthetic oligonucleotide
  Sense strand starting at position 3562 of SEQ ID NO: 1560445
acacuuaggcagugauauu

SEQ ID NO: 1600526 - RNA, 19 nt, Artificial Sequence
  Description of Artificial Sequence: Synthetic oligonucleotide
  Antisense strand to SEQ ID NO: 1600525
aauaucacugccuaagugu

SEQ ID NO: 1600527 - RNA, 19 nt, Artificial Sequence
  Description of Artificial Sequence: Synthetic oligonucleotide
  Sense strand starting at position 3649 of SEQ ID NO: 1560445
gaagcguuugugugggagu

SEQ ID NO: 1600528 - RNA, 19 nt, Artificial Sequence
  Description of Artificial Sequence: Synthetic oligonucleotide
  Antisense strand to SEQ ID NO: 1600527
acucccacacaaacgcuuc

SEQ ID NO: 1600529 - RNA, 19 nt, Artificial Sequence
  Description of Artificial Sequence: Synthetic oligonucleotide
  Sense strand starting at position 3650 of SEQ ID NO: 1560445
aagcguuugugugggaguu

SEQ ID NO: 1600530 - RNA, 19 nt, Artificial Sequence
  Description of Artificial Sequence: Synthetic oligonucleotide
  Antisense strand to SEQ ID NO: 1600529
aacucccacacaaacgcuu

SEQ ID NO: 1600531 - RNA, 19 nt, Artificial Sequence
  Description of Artificial Sequence: Synthetic oligonucleotide
  Sense strand starting at position 102 of SEQ ID NO: 1560446
caaggcuuacuguggguua

SEQ ID NO: 1600532 - RNA, 19 nt, Artificial Sequence
  Description of Artificial Sequence: Synthetic oligonucleotide
  Antisense strand to SEQ ID NO: 1600531
uaacccacaguaagccuug

SEQ ID NO: 1600533 - RNA, 19 nt, Artificial Sequence
  Description of Artificial Sequence: Synthetic oligonucleotide
  Sense strand starting at position 105 of SEQ ID NO: 1560446
ggcuuacuguggguuauuu

SEQ ID NO: 1600534 - RNA, 19 nt, Artificial Sequence
  Description of Artificial Sequence: Synthetic oligonucleotide
  Antisense strand to SEQ ID NO: 1600533
aaauaacccacaguaagcc

SEQ ID NO: 1600535 - RNA, 19 nt, Artificial Sequence
  Description of Artificial Sequence: Synthetic oligonucleotide
  Sense strand starting at position 118 of SEQ ID NO: 1560446
uuauuuaaaugcgucguua

SEQ ID NO: 1600536 - RNA, 19 nt, Artificial Sequence
  Description of Artificial Sequence: Synthetic oligonucleotide
  Antisense strand to SEQ ID NO: 1600535
uaacgacgcauuuaaauaa

SEQ ID NO: 1600537 - RNA, 19 nt, Artificial Sequence
  Description of Artificial Sequence: Synthetic oligonucleotide
  Sense strand starting at position 120 of SEQ ID NO: 1560446
auuuaaaugcgucguuaag

SEQ ID NO: 1600538 - RNA, 19 nt, Artificial Sequence
  Description of Artificial Sequence: Synthetic oligonucleotide
  Antisense strand to SEQ ID NO: 1600537
cuuaacgacgcauuuaaau

SEQ ID NO: 1600539 - RNA, 19 nt, Artificial Sequence
  Description of Artificial Sequence: Synthetic oligonucleotide
  Sense strand starting at position 130 of SEQ ID NO: 1560446
gucguuaagauguagaucu

SEQ ID NO: 1600540 - RNA, 19 nt, Artificial Sequence
  Description of Artificial Sequence: Synthetic oligonucleotide
  Antisense strand to SEQ ID NO: 1600539
agaucuacaucuuaacgac

SEQ ID NO: 1600541 - RNA, 19 nt, Artificial Sequence
  Description of Artificial Sequence: Synthetic oligonucleotide
  Sense strand starting at position 132 of SEQ ID NO: 1560446
cguuaagauguagaucuuu

SEQ ID NO: 1600542 - RNA, 19 nt, Artificial Sequence
  Description of Artificial Sequence: Synthetic oligonucleotide
  Antisense strand to SEQ ID NO: 1600541
aaagaucuacaucuuaacg

SEQ ID NO: 1600543 - RNA, 19 nt, Artificial Sequence
  Description of Artificial Sequence: Synthetic oligonucleotide
  Sense strand starting at position 143 of SEQ ID NO: 1560446
agaucuuuguguccaacac

SEQ ID NO: 1600544 - RNA, 19 nt, Artificial Sequence
  Description of Artificial Sequence: Synthetic oligonucleotide
  Antisense strand to SEQ ID NO: 1600543
guguuggacacaaagaucu

SEQ ID NO: 1600545 - RNA, 19 nt, Artificial Sequence
  Description of Artificial Sequence: Synthetic oligonucleotide
  Sense strand starting at position 180 of SEQ ID NO: 1560446
gugucuaccgaguacuuga

SEQ ID NO: 1600546 - RNA, 19 nt, Artificial Sequence
  Description of Artificial Sequence: Synthetic oligonucleotide
  Antisense strand to SEQ ID NO: 1600545
ucaaguacucgguagacac

SEQ ID NO: 1600547 - RNA, 19 nt, Artificial Sequence
  Description of Artificial Sequence: Synthetic oligonucleotide
  Sense strand starting at position 183 of SEQ ID NO: 1560446
ucuaccgaguacuugaaau

SEQ ID NO: 1600548 - RNA, 19 nt, Artificial Sequence
  Description of Artificial Sequence: Synthetic oligonucleotide
  Antisense strand to SEQ ID NO: 1600547
auuucaaguacucgguaga

SEQ ID NO: 1600549 - RNA, 19 nt, Artificial Sequence
  Description of Artificial Sequence: Synthetic oligonucleotide
  Sense strand starting at position 205 of SEQ ID NO: 1560446
gccaguaucaccgaggaac

SEQ ID NO: 1600550 - RNA, 19 nt, Artificial Sequence
  Description of Artificial Sequence: Synthetic oligonucleotide
  Antisense strand to SEQ ID NO: 1600549
guuccucggugauacuggc

SEQ ID NO: 1600551 - RNA, 19 nt, Artificial Sequence
  Description of Artificial Sequence: Synthetic oligonucleotide
  Sense strand starting at position 298 of SEQ ID NO: 1560446
uuuaaauaugucuggaaca

SEQ ID NO: 1600552 - RNA, 19 nt, Artificial Sequence
  Description of Artificial Sequence: Synthetic oligonucleotide
  Antisense strand to SEQ ID NO: 1600551
uguuccagacauauuuaaa

SEQ ID NO: 1600553 - RNA, 19 nt, Artificial Sequence
  Description of Artificial Sequence: Synthetic oligonucleotide
  Sense strand starting at position 394 of SEQ ID NO: 1560446
gguagcaucuaagugagaa

SEQ ID NO: 1600554 - RNA, 19 nt, Artificial Sequence
  Description of Artificial Sequence: Synthetic oligonucleotide
  Antisense strand to SEQ ID NO: 1600553
uucucacuuagaugcuacc

SEQ ID NO: 1600555 - RNA, 19 nt, Artificial Sequence
  Description of Artificial Sequence: Synthetic oligonucleotide
  Sense strand starting at position 395 of SEQ ID NO: 1560446
guagcaucuaagugagaag

SEQ ID NO: 1600556 - RNA, 19 nt, Artificial Sequence
  Description of Artificial Sequence: Synthetic oligonucleotide
  Antisense strand to SEQ ID NO: 1600555
cuucucacuuagaugcuac

SEQ ID NO: 1600557 - RNA, 19 nt, Artificial Sequence
  Description of Artificial Sequence: Synthetic oligonucleotide
  Sense strand starting at position 407 of SEQ ID NO: 1560446
ugagaagugcuaugaacac

SEQ ID NO: 1600558 - RNA, 19 nt, Artificial Sequence
  Description of Artificial Sequence: Synthetic oligonucleotide
  Antisense strand to SEQ ID NO: 1600557
guguucauagcacuucuca

SEQ ID NO: 1600559 - RNA, 19 nt, Artificial Sequence
  Description of Artificial Sequence: Synthetic oligonucleotide
  Sense strand starting at position 560 of SEQ ID NO: 1560446
aggcuaagaauuugugugu

SEQ ID NO: 1600560 - RNA, 19 nt, Artificial Sequence
  Description of Artificial Sequence: Synthetic oligonucleotide
  Antisense strand to SEQ ID NO: 1600559
acacacaaauucuuagccu

SEQ ID NO: 1600561 - RNA, 19 nt, Artificial Sequence
  Description of Artificial Sequence: Synthetic oligonucleotide
  Sense strand starting at position 611 of SEQ ID NO: 1560446
agaauaauaguuuguggag

SEQ ID NO: 1600562 - RNA, 19 nt, Artificial Sequence
  Description of Artificial Sequence: Synthetic oligonucleotide
  Antisense strand to SEQ ID NO: 1600561
cuccacaaacuauuauucu

SEQ ID NO: 1600563 - RNA, 19 nt, Artificial Sequence
  Description of Artificial Sequence: Synthetic oligonucleotide
  Sense strand starting at position 618 of SEQ ID NO: 1560446
uaguuuguggagcaugaaa

SEQ ID NO: 1600564 - RNA, 19 nt, Artificial Sequence
  Description of Artificial Sequence: Synthetic oligonucleotide
  Antisense strand to SEQ ID NO: 1600563
uuucaugcuccacaaacua

SEQ ID NO: 1600565 - RNA, 19 nt, Artificial Sequence
  Description of Artificial Sequence: Synthetic oligonucleotide
  Sense strand starting at position 710 of SEQ ID NO: 1560446
ucaucuguggcugauucua

SEQ ID NO: 1600566 - RNA, 19 nt, Artificial Sequence
  Description of Artificial Sequence: Synthetic oligonucleotide
  Antisense strand to SEQ ID NO: 1600565
uagaaucagccacagauga

SEQ ID NO: 1600567 - RNA, 19 nt, Artificial Sequence
  Description of Artificial Sequence: Synthetic oligonucleotide
  Sense strand starting at position 738 of SEQ ID NO: 1560446
caucgaaguugaguacuuu

SEQ ID NO: 1600568 - RNA, 19 nt, Artificial Sequence
  Description of Artificial Sequence: Synthetic oligonucleotide
  Antisense strand to SEQ ID NO: 1600567
aaaguacucaacuucgaug

SEQ ID NO: 1600569 - RNA, 19 nt, Artificial Sequence
  Description of Artificial Sequence: Synthetic oligonucleotide
  Sense strand starting at position 833 of SEQ ID NO: 1560446
cugacacacuggguuaaau

SEQ ID NO: 1600570 - RNA, 19 nt, Artificial Sequence
  Description of Artificial Sequence: Synthetic oligonucleotide
  Antisense strand to SEQ ID NO: 1600569
auuuaacccagugugucag

SEQ ID NO: 1600571 - RNA, 19 nt, Artificial Sequence
  Description of Artificial Sequence: Synthetic oligonucleotide
  Sense strand starting at position 942 of SEQ ID NO: 1560446
ucguuacauuucuagagga

SEQ ID NO: 1600572 - RNA, 19 nt, Artificial Sequence
  Description of Artificial Sequence: Synthetic oligonucleotide
  Antisense strand to SEQ ID NO: 1600571
uccucuagaaauguaacga

SEQ ID NO: 1600573 - RNA, 19 nt, Artificial Sequence
  Description of Artificial Sequence: Synthetic oligonucleotide
  Sense strand starting at position 1152 of SEQ ID NO: 1560446
cgugaacucacacaugaug

SEQ ID NO: 1600574 - RNA, 19 nt, Artificial Sequence
  Description of Artificial Sequence: Synthetic oligonucleotide
  Antisense strand to SEQ ID NO: 1600573
caucaugugugaguucacg

SEQ ID NO: 1600575 - RNA, 19 nt, Artificial Sequence
  Description of Artificial Sequence: Synthetic oligonucleotide
  Sense strand starting at position 1182 of SEQ ID NO: 1560446
gaaugaaauuacucguguu

SEQ ID NO: 1600576 - RNA, 19 nt, Artificial Sequence
  Description of Artificial Sequence: Synthetic oligonucleotide
  Antisense strand to SEQ ID NO: 1600575
aacacgaguaauuucauuc

SEQ ID NO: 1600577 - RNA, 19 nt, Artificial Sequence
  Description of Artificial Sequence: Synthetic oligonucleotide
  Sense strand starting at position 1401 of SEQ ID NO: 1560446
agaaauaguaggugacugu

SEQ ID NO: 1600578 - RNA, 19 nt, Artificial Sequence
  Description of Artificial Sequence: Synthetic oligonucleotide
  Antisense strand to SEQ ID NO: 1600577
acagucaccuacuauuucu

SEQ ID NO: 1600579 - RNA, 19 nt, Artificial Sequence
  Description of Artificial Sequence: Synthetic oligonucleotide
  Sense strand starting at position 1456 of SEQ ID NO: 1560446
ccaaguuuagaguggcuca

SEQ ID NO: 1600580 - RNA, 19 nt, Artificial Sequence
  Description of Artificial Sequence: Synthetic oligonucleotide
  Antisense strand to SEQ ID NO: 1600579
ugagccacucuaaacuugg

SEQ ID NO: 1600581 - RNA, 19 nt, Artificial Sequence
  Description of Artificial Sequence: Synthetic oligonucleotide
  Sense strand starting at position 1469 of SEQ ID NO: 1560446
ggcucaguaucggcgauuu

SEQ ID NO: 1600582 - RNA, 19 nt, Artificial Sequence
  Description of Artificial Sequence: Synthetic oligonucleotide
  Antisense strand to SEQ ID NO: 1600581
aaaucgccgauacugagcc

SEQ ID NO: 1600583 - RNA, 19 nt, Artificial Sequence
  Description of Artificial Sequence: Synthetic oligonucleotide
  Sense strand starting at position 1471 of SEQ ID NO: 1560446
cucaguaucggcgauuuca

SEQ ID NO: 1600584 - RNA, 19 nt, Artificial Sequence
  Description of Artificial Sequence: Synthetic oligonucleotide
  Antisense strand to SEQ ID NO: 1600583
ugaaaucgccgauacugag

SEQ ID NO: 1600585 - RNA, 19 nt, Artificial Sequence
  Description of Artificial Sequence: Synthetic oligonucleotide
  Sense strand starting at position 2651 of SEQ ID NO: 1560446
ggacaugucucagcaacug

SEQ ID NO: 1600586 - RNA, 19 nt, Artificial Sequence
  Description of Artificial Sequence: Synthetic oligonucleotide
  Antisense strand to SEQ ID NO: 1600585
caguugcugagacaugucc

SEQ ID NO: 1600587 - RNA, 19 nt, Artificial Sequence
  Description of Artificial Sequence: Synthetic oligonucleotide
  Sense strand starting at position 2751 of SEQ ID NO: 1560446
cggagcugugagugaacau

SEQ ID NO: 1600588 - RNA, 19 nt, Artificial Sequence
  Description of Artificial Sequence: Synthetic oligonucleotide
  Antisense strand to SEQ ID NO: 1600587
auguucacucacagcuccg

SEQ ID NO: 1600589 - RNA, 19 nt, Artificial Sequence
  Description of Artificial Sequence: Synthetic oligonucleotide
  Sense strand starting at position 2752 of SEQ ID NO: 1560446
ggagcugugagugaacauc

SEQ ID NO: 1600590 - RNA, 19 nt, Artificial Sequence
  Description of Artificial Sequence: Synthetic oligonucleotide
  Antisense strand to SEQ ID NO: 1600589
gauguucacucacagcucc

SEQ ID NO: 1600591 - RNA, 19 nt, Artificial Sequence
  Description of Artificial Sequence: Synthetic oligonucleotide
  Sense strand starting at position 2760 of SEQ ID NO: 1560446
gagugaacaucuguccauu

SEQ ID NO: 1600592 - RNA, 19 nt, Artificial Sequence
  Description of Artificial Sequence: Synthetic oligonucleotide
  Antisense strand to SEQ ID NO: 1600591
aauggacagauguucacuc

SEQ ID NO: 1600593 - RNA, 19 nt, Artificial Sequence
  Description of Artificial Sequence: Synthetic oligonucleotide
  Sense strand starting at position 2875 of SEQ ID NO: 1560446
cacagagaguugucgguca

SEQ ID NO: 1600594 - RNA, 19 nt, Artificial Sequence
  Description of Artificial Sequence: Synthetic oligonucleotide
  Antisense strand to SEQ ID NO: 1600593
ugaccgacaacucucugug

SEQ ID NO: 1600595 - RNA, 19 nt, Artificial Sequence
  Description of Artificial Sequence: Synthetic oligonucleotide
  Sense strand starting at position 3020 of SEQ ID NO: 1560446
ugugauaaaugucuguuua

SEQ ID NO: 1600596 - RNA, 19 nt, Artificial Sequence
  Description of Artificial Sequence: Synthetic oligonucleotide
  Antisense strand to SEQ ID NO: 1600595
uaaacagacauuuaucaca

SEQ ID NO: 1600597 - RNA, 19 nt, Artificial Sequence
  Description of Artificial Sequence: Synthetic oligonucleotide
  Sense strand starting at position 3021 of SEQ ID NO: 1560446
gugauaaaugucuguuuac

SEQ ID NO: 1600598 - RNA, 19 nt, Artificial Sequence
  Description of Artificial Sequence: Synthetic oligonucleotide
  Antisense strand to SEQ ID NO: 1600597
guaaacagacauuuaucac

SEQ ID NO: 1600599 - RNA, 19 nt, Artificial Sequence
  Description of Artificial Sequence: Synthetic oligonucleotide
  Sense strand starting at position 3022 of SEQ ID NO: 1560446
ugauaaaugucuguuuaca

SEQ ID NO: 1600600 - RNA, 19 nt, Artificial Sequence
  Description of Artificial Sequence: Synthetic oligonucleotide
  Antisense strand to SEQ ID NO: 1600599
uguaaacagacauuuauca

SEQ ID NO: 1600601 - RNA, 19 nt, Artificial Sequence
  Description of Artificial Sequence: Synthetic oligonucleotide
  Sense strand starting at position 3368 of SEQ ID NO: 1560446
cuguguauuccugucuguu

SEQ ID NO: 1600602 - RNA, 19 nt, Artificial Sequence
  Description of Artificial Sequence: Synthetic oligonucleotide
  Antisense strand to SEQ ID NO: 1600601
aacagacaggaauacacag

SEQ ID NO: 1600603 - RNA, 19 nt, Artificial Sequence
  Description of Artificial Sequence: Synthetic oligonucleotide
  Sense strand starting at position 3369 of SEQ ID NO: 1560446
uguguauuccugucuguuu

SEQ ID NO: 1600604 - RNA, 19 nt, Artificial Sequence
  Description of Artificial Sequence: Synthetic oligonucleotide
  Antisense strand to SEQ ID NO: 1600603
aaacagacaggaauacaca

SEQ ID NO: 1600605 - RNA, 19 nt, Artificial Sequence
  Description of Artificial Sequence: Synthetic oligonucleotide
  Sense strand starting at position 3438 of SEQ ID NO: 1560446
gugucugucccuuugcauu

SEQ ID NO: 1600606 - RNA, 19 nt, Artificial Sequence
  Description of Artificial Sequence: Synthetic oligonucleotide
  Antisense strand to SEQ ID NO: 1600605
aaugcaaagggacagacac

SEQ ID NO: 1600607 - RNA, 19 nt, Artificial Sequence
  Description of Artificial Sequence: Synthetic oligonucleotide
  Sense strand starting at position 3457 of SEQ ID NO: 1560446
ucugaagucucccugacuu

SEQ ID NO: 1600608 - RNA, 19 nt, Artificial Sequence
  Description of Artificial Sequence: Synthetic oligonucleotide
  Antisense strand to SEQ ID NO: 1600607
aagucagggagacuucaga

SEQ ID NO: 1600609 - RNA, 19 nt, Artificial Sequence
  Description of Artificial Sequence: Synthetic oligonucleotide
  Sense strand starting at position 3933 of SEQ ID NO: 1560446
gcaccuaucucuuuguaag

SEQ ID NO: 1600610 - RNA, 19 nt, Artificial Sequence
  Description of Artificial Sequence: Synthetic oligonucleotide
  Antisense strand to SEQ ID NO: 1600609
cuuacaaagagauaggugc

SEQ ID NO: 1600611 - RNA, 19 nt, Artificial Sequence
  Description of Artificial Sequence: Synthetic oligonucleotide
  Sense strand starting at position 396 of SEQ ID NO: 1560447
ccacaucuuugucccagua

SEQ ID NO: 1600612 - RNA, 19 nt, Artificial Sequence
  Description of Artificial Sequence: Synthetic oligonucleotide
  Antisense strand to SEQ ID NO: 1600611
uacugggacaaagaugugg

SEQ ID NO: 1600613 - RNA, 19 nt, Artificial Sequence
  Description of Artificial Sequence: Synthetic oligonucleotide
  Sense strand starting at position 439 of SEQ ID NO: 1560447
gugaucucaucaccugaga

SEQ ID NO: 1600614 - RNA, 19 nt, Artificial Sequence
  Description of Artificial Sequence: Synthetic oligonucleotide
  Antisense strand to SEQ ID NO: 1600613
ucucaggugaugagaucac

SEQ ID NO: 1600615 - RNA, 19 nt, Artificial Sequence
  Description of Artificial Sequence: Synthetic oligonucleotide
  Sense strand starting at position 527 of SEQ ID NO: 1560447
ugcuguuuccacuggacuu

SEQ ID NO: 1600616 - RNA, 19 nt, Artificial Sequence
  Description of Artificial Sequence: Synthetic oligonucleotide
  Antisense strand to SEQ ID NO: 1600615
aaguccaguggaaacagca

SEQ ID NO: 1600617 - RNA, 19 nt, Artificial Sequence
  Description of Artificial Sequence: Synthetic oligonucleotide
  Sense strand starting at position 543 of SEQ ID NO: 1560447
cuuuaagcccuaugaggau

SEQ ID NO: 1600618 - RNA, 19 nt, Artificial Sequence
  Description of Artificial Sequence: Synthetic oligonucleotide
  Antisense strand to SEQ ID NO: 1600617
auccucauagggcuuaaag

SEQ ID NO: 1600619 - RNA, 19 nt, Artificial Sequence
  Description of Artificial Sequence: Synthetic oligonucleotide
  Sense strand starting at position 549 of SEQ ID NO: 1560447
gcccuaugaggauggagau

SEQ ID NO: 1600620 - RNA, 19 nt, Artificial Sequence
  Description of Artificial Sequence: Synthetic oligonucleotide
  Antisense strand to SEQ ID NO: 1600619
aucuccauccucauagggc

SEQ ID NO: 1600621 - RNA, 19 nt, Artificial Sequence
  Description of Artificial Sequence: Synthetic oligonucleotide
  Sense strand starting at position 565 of SEQ ID NO: 1560447
gaucaaggcugucuuguga

SEQ ID NO: 1600622 - RNA, 19 nt, Artificial Sequence
  Description of Artificial Sequence: Synthetic oligonucleotide
  Antisense strand to SEQ ID NO: 1600621
ucacaagacagccuugauc

SEQ ID NO: 1600623 - RNA, 19 nt, Artificial Sequence
  Description of Artificial Sequence: Synthetic oligonucleotide
  Sense strand starting at position 761 of SEQ ID NO: 1560447
gggcaauaggugugaugcu

SEQ ID NO: 1600624 - RNA, 19 nt, Artificial Sequence
  Description of Artificial Sequence: Synthetic oligonucleotide
  Antisense strand to SEQ ID NO: 1600623
agcaucacaccuauugccc

SEQ ID NO: 1600625 - RNA, 19 nt, Artificial Sequence
  Description of Artificial Sequence: Synthetic oligonucleotide
  Sense strand starting at position 838 of SEQ ID NO: 1560447
caguuaccagaguagguuu

SEQ ID NO: 1600626 - RNA, 19 nt, Artificial Sequence
  Description of Artificial Sequence: Synthetic oligonucleotide
  Antisense strand to SEQ ID NO: 1600625
aaaccuacucugguaacug

SEQ ID NO: 1600627 - RNA, 19 nt, Artificial Sequence
  Description of Artificial Sequence: Synthetic oligonucleotide
  Sense strand starting at position 1062 of SEQ ID NO: 1560447
gugggauccucauuccuag

SEQ ID NO: 1600628 - RNA, 19 nt, Artificial Sequence
  Description of Artificial Sequence: Synthetic oligonucleotide
  Antisense strand to SEQ ID NO: 1600627
cuaggaaugaggaucccac

SEQ ID NO: 1600629 - RNA, 19 nt, Artificial Sequence
  Description of Artificial Sequence: Synthetic oligonucleotide
  Sense strand starting at position 1068 of SEQ ID NO: 1560447
uccucauuccuagggugau

SEQ ID NO: 1600630 - RNA, 19 nt, Artificial Sequence
  Description of Artificial Sequence: Synthetic oligonucleotide
  Antisense strand to SEQ ID NO: 1600629
aucacccuaggaaugagga

SEQ ID NO: 1600631 - RNA, 19 nt, Artificial Sequence
  Description of Artificial Sequence: Synthetic oligonucleotide
  Sense strand starting at position 1111 of SEQ ID NO: 1560447
aguucucacuucuugagga

SEQ ID NO: 1600632 - RNA, 19 nt, Artificial Sequence
  Description of Artificial Sequence: Synthetic oligonucleotide
  Antisense strand to SEQ ID NO: 1600631
uccucaagaagugagaacu

SEQ ID NO: 1600633 - RNA, 19 nt, Artificial Sequence
  Description of Artificial Sequence: Synthetic oligonucleotide
  Sense strand starting at position 1186 of SEQ ID NO: 1560447
ucgcucugucgcaguggua

SEQ ID NO: 1600634 - RNA, 19 nt, Artificial Sequence
  Description of Artificial Sequence: Synthetic oligonucleotide
  Antisense strand to SEQ ID NO: 1600633
uaccacugcgacagagcga

SEQ ID NO: 1600635 - RNA, 19 nt, Artificial Sequence
  Description of Artificial Sequence: Synthetic oligonucleotide
  Sense strand starting at position 1338 of SEQ ID NO: 1560447
ggauguuugcacuaagugu

SEQ ID NO: 1600636 - RNA, 19 nt, Artificial Sequence
  Description of Artificial Sequence: Synthetic oligonucleotide
  Antisense strand to SEQ ID NO: 1600635
acacuuagugcaaacaucc

SEQ ID NO: 1600637 - RNA, 19 nt, Artificial Sequence
  Description of Artificial Sequence: Synthetic oligonucleotide
  Sense strand starting at position 1358 of SEQ ID NO: 1560447
guguuauucucauucccug

SEQ ID NO: 1600638 - RNA, 19 nt, Artificial Sequence
  Description of Artificial Sequence: Synthetic oligonucleotide
  Antisense strand to SEQ ID NO: 1600637
cagggaaugagaauaacac

SEQ ID NO: 1600639 - RNA, 19 nt, Artificial Sequence
  Description of Artificial Sequence: Synthetic oligonucleotide
  Sense strand starting at position 1428 of SEQ ID NO: 1560447
gggaguggguuaucccagu

SEQ ID NO: 1600640 - RNA, 19 nt, Artificial Sequence
  Description of Artificial Sequence: Synthetic oligonucleotide
  Antisense strand to SEQ ID NO: 1600639
acugggauaacccacuccc

SEQ ID NO: 1600641 - RNA, 19 nt, Artificial Sequence
  Description of Artificial Sequence: Synthetic oligonucleotide
  Sense strand starting at position 1486 of SEQ ID NO: 1560447
gugccaucucaugaccaga

SEQ ID NO: 1600642 - RNA, 19 nt, Artificial Sequence
  Description of Artificial Sequence: Synthetic oligonucleotide
  Antisense strand to SEQ ID NO: 1600641
ucuggucaugagauggcac

SEQ ID NO: 1600643 - RNA, 19 nt, Artificial Sequence
  Description of Artificial Sequence: Synthetic oligonucleotide
  Sense strand starting at position 1566 of SEQ ID NO: 1560447
guccuucuugguuagguua

SEQ ID NO: 1600644 - RNA, 19 nt, Artificial Sequence
  Description of Artificial Sequence: Synthetic oligonucleotide
  Antisense strand to SEQ ID NO: 1600643
uaaccuaaccaagaaggac

SEQ ID NO: 1600645 - RNA, 19 nt, Artificial Sequence
  Description of Artificial Sequence: Synthetic oligonucleotide
  Sense strand starting at position 1655 of SEQ ID NO: 1560447
uagcuaacucguggaggau

SEQ ID NO: 1600646 - RNA, 19 nt, Artificial Sequence
  Description of Artificial Sequence: Synthetic oligonucleotide
  Antisense strand to SEQ ID NO: 1600645
auccuccacgaguuagcua

SEQ ID NO: 1600647 - RNA, 19 nt, Artificial Sequence
  Description of Artificial Sequence: Synthetic oligonucleotide
  Sense strand starting at position 1763 of SEQ ID NO: 1560447
ggagucgaguccucaauga

SEQ ID NO: 1600648 - RNA, 19 nt, Artificial Sequence
  Description of Artificial Sequence: Synthetic oligonucleotide
  Antisense strand to SEQ ID NO: 1600647
ucauugaggacucgacucc

SEQ ID NO: 1600649 - RNA, 19 nt, Artificial Sequence
  Description of Artificial Sequence: Synthetic oligonucleotide
  Sense strand starting at position 2128 of SEQ ID NO: 1560447
guaggucuccuugagugga

SEQ ID NO: 1600650 - RNA, 19 nt, Artificial Sequence
  Description of Artificial Sequence: Synthetic oligonucleotide
  Antisense strand to SEQ ID NO: 1600649
uccacucaaggagaccuac

SEQ ID NO: 1600651 - RNA, 19 nt, Artificial Sequence
  Description of Artificial Sequence: Synthetic oligonucleotide
  Sense strand starting at position 2130 of SEQ ID NO: 1560447
aggucuccuugaguggaaa

SEQ ID NO: 1600652 - RNA, 19 nt, Artificial Sequence
  Description of Artificial Sequence: Synthetic oligonucleotide
  Antisense strand to SEQ ID NO: 1600651
uuuccacucaaggagaccu

SEQ ID NO: 1600653 - RNA, 19 nt, Artificial Sequence
  Description of Artificial Sequence: Synthetic oligonucleotide
  Sense strand starting at position 2131 of SEQ ID NO: 1560447
ggucuccuugaguggaaau

SEQ ID NO: 1600654 - RNA, 19 nt, Artificial Sequence
  Description of Artificial Sequence: Synthetic oligonucleotide
  Antisense strand to SEQ ID NO: 1600653
auuuccacucaaggagacc

SEQ ID NO: 1600655 - RNA, 19 nt, Artificial Sequence
  Description of Artificial Sequence: Synthetic oligonucleotide
  Sense strand starting at position 2132 of SEQ ID NO: 1560447
gucuccuugaguggaaaug

SEQ ID NO: 1600656 - RNA, 19 nt, Artificial Sequence
  Description of Artificial Sequence: Synthetic oligonucleotide
  Antisense strand to SEQ ID NO: 1600655
cauuuccacucaaggagac

SEQ ID NO: 1600657 - RNA, 19 nt, Artificial Sequence
  Description of Artificial Sequence: Synthetic oligonucleotide
  Sense strand starting at position 2489 of SEQ ID NO: 1560447
uggacuuacugcucuuuga

SEQ ID NO: 1600658 - RNA, 19 nt, Artificial Sequence
  Description of Artificial Sequence: Synthetic oligonucleotide
  Antisense strand to SEQ ID NO: 1600657
ucaaagagcaguaagucca

SEQ ID NO: 1600659 - RNA, 19 nt, Artificial Sequence
  Description of Artificial Sequence: Synthetic oligonucleotide
  Sense strand starting at position 2673 of SEQ ID NO: 1560447
agcccuggucccuauugua

SEQ ID NO: 1600660 - RNA, 19 nt, Artificial Sequence
  Description of Artificial Sequence: Synthetic oligonucleotide
  Antisense strand to SEQ ID NO: 1600659
uacaauagggaccagggcu

SEQ ID NO: 1600661 - RNA, 19 nt, Artificial Sequence
  Description of Artificial Sequence: Synthetic oligonucleotide
  Sense strand starting at position 2923 of SEQ ID NO: 1560447
caggucgugaggcauuaua

SEQ ID NO: 1600662 - RNA, 19 nt, Artificial Sequence
  Description of Artificial Sequence: Synthetic oligonucleotide
  Antisense strand to SEQ ID NO: 1600661
uauaaugccucacgaccug

SEQ ID NO: 1600663 - RNA, 19 nt, Artificial Sequence
  Description of Artificial Sequence: Synthetic oligonucleotide
  Sense strand starting at position 2931 of SEQ ID NO: 1560447
gaggcauuauauucucugu

SEQ ID NO: 1600664 - RNA, 19 nt, Artificial Sequence
  Description of Artificial Sequence: Synthetic oligonucleotide
  Antisense strand to SEQ ID NO: 1600663
acagagaauauaaugccuc

SEQ ID NO: 1600665 - RNA, 19 nt, Artificial Sequence
  Description of Artificial Sequence: Synthetic oligonucleotide
  Sense strand starting at position 2933 of SEQ ID NO: 1560447
ggcauuauauucucugucu

SEQ ID NO: 1600666 - RNA, 19 nt, Artificial Sequence
  Description of Artificial Sequence: Synthetic oligonucleotide
  Antisense strand to SEQ ID NO: 1600665
agacagagaauauaaugcc

SEQ ID NO: 1600667 - RNA, 19 nt, Artificial Sequence
  Description of Artificial Sequence: Synthetic oligonucleotide
  Sense strand starting at position 2934 of SEQ ID NO: 1560447
gcauuauauucucugucuc

SEQ ID NO: 1600668 - RNA, 19 nt, Artificial Sequence
  Description of Artificial Sequence: Synthetic oligonucleotide
  Antisense strand to SEQ ID NO: 1600667
gagacagagaauauaaugc

SEQ ID NO: 1600669 - RNA, 19 nt, Artificial Sequence
  Description of Artificial Sequence: Synthetic oligonucleotide
  Sense strand starting at position 2993 of SEQ ID NO: 1560447
ggugaagucucccucuuuc

SEQ ID NO: 1600670 - RNA, 19 nt, Artificial Sequence
  Description of Artificial Sequence: Synthetic oligonucleotide
  Antisense strand to SEQ ID NO: 1600669
gaaagagggagacuucacc

SEQ ID NO: 1600671 - RNA, 19 nt, Artificial Sequence
  Description of Artificial Sequence: Synthetic oligonucleotide
  Sense strand starting at position 3296 of SEQ ID NO: 1560447
gugcgcaaucuagauccuu

SEQ ID NO: 1600672 - RNA, 19 nt, Artificial Sequence
  Description of Artificial Sequence: Synthetic oligonucleotide
  Antisense strand to SEQ ID NO: 1600671
aaggaucuagauugcgcac

SEQ ID NO: 1600673 - RNA, 19 nt, Artificial Sequence
  Description of Artificial Sequence: Synthetic oligonucleotide
  Sense strand starting at position 3304 of SEQ ID NO: 1560447
ucuagauccuucguaugca

SEQ ID NO: 1600674 - RNA, 19 nt, Artificial Sequence
  Description of Artificial Sequence: Synthetic oligonucleotide
  Antisense strand to SEQ ID NO: 1600673
ugcauacgaaggaucuaga

SEQ ID NO: 1600675 - RNA, 19 nt, Artificial Sequence
  Description of Artificial Sequence: Synthetic oligonucleotide
  Sense strand starting at position 3333 of SEQ ID NO: 1560447
uaggguuugcgcuccugua

SEQ ID NO: 1600676 - RNA, 19 nt, Artificial Sequence
  Description of Artificial Sequence: Synthetic oligonucleotide
  Antisense strand to SEQ ID NO: 1600675
uacaggagcgcaaacccua

SEQ ID NO: 1600677 - RNA, 19 nt, Artificial Sequence
  Description of Artificial Sequence: Synthetic oligonucleotide
  Sense strand starting at position 3334 of SEQ ID NO: 1560447
aggguuugcgcuccuguaa

SEQ ID NO: 1600678 - RNA, 19 nt, Artificial Sequence
  Description of Artificial Sequence: Synthetic oligonucleotide
  Antisense strand to SEQ ID NO: 1600677
uuacaggagcgcaaacccu

SEQ ID NO: 1600679 - RNA, 19 nt, Artificial Sequence
  Description of Artificial Sequence: Synthetic oligonucleotide
  Sense strand starting at position 3337 of SEQ ID NO: 1560447
guuugcgcuccuguaagaa

SEQ ID NO: 1600680 - RNA, 19 nt, Artificial Sequence
  Description of Artificial Sequence: Synthetic oligonucleotide
  Antisense strand to SEQ ID NO: 1600679
uucuuacaggagcgcaaac

SEQ ID NO: 1600681 - RNA, 19 nt, Artificial Sequence
  Description of Artificial Sequence: Synthetic oligonucleotide
  Sense strand starting at position 3394 of SEQ ID NO: 1560447
ggcagugaugcucacccau

SEQ ID NO: 1600682 - RNA, 19 nt, Artificial Sequence
  Description of Artificial Sequence: Synthetic oligonucleotide
  Antisense strand to SEQ ID NO: 1600681
augggugagcaucacugcc

SEQ ID NO: 1600683 - RNA, 19 nt, Artificial Sequence
  Description of Artificial Sequence: Synthetic oligonucleotide
  Sense strand starting at position 3559 of SEQ ID NO: 1560447
gcccgaaaggaucaagcua

SEQ ID NO: 1600684 - RNA, 19 nt, Artificial Sequence
  Description of Artificial Sequence: Synthetic oligonucleotide
  Antisense strand to SEQ ID NO: 1600683
uagcuugauccuuucgggc

SEQ ID NO: 1600685 - RNA, 19 nt, Artificial Sequence
  Description of Artificial Sequence: Synthetic oligonucleotide
  Sense strand starting at position 3567 of SEQ ID NO: 1560447
ggaucaagcuauuauuuag

SEQ ID NO: 1600686 - RNA, 19 nt, Artificial Sequence
  Description of Artificial Sequence: Synthetic oligonucleotide
  Antisense strand to SEQ ID NO: 1600685
cuaaauaauagcuugaucc

SEQ ID NO: 1600687 - RNA, 19 nt, Artificial Sequence
  Description of Artificial Sequence: Synthetic oligonucleotide
  Sense strand starting at position 3574 of SEQ ID NO: 1560447
gcuauuauuuagcugcauu

SEQ ID NO: 1600688 - RNA, 19 nt, Artificial Sequence
  Description of Artificial Sequence: Synthetic oligonucleotide
  Antisense strand to SEQ ID NO: 1600687
aaugcagcuaaauaauagc

SEQ ID NO: 1600689 - RNA, 19 nt, Artificial Sequence
  Description of Artificial Sequence: Synthetic oligonucleotide
  Sense strand starting at position 3954 of SEQ ID NO: 1560447
gggugacccugucucaaag

SEQ ID NO: 1600690 - RNA, 19 nt, Artificial Sequence
  Description of Artificial Sequence: Synthetic oligonucleotide
  Antisense strand to SEQ ID NO: 1600689
cuuugagacagggucaccc

SEQ ID NO: 1600691 - RNA, 19 nt, Artificial Sequence
  Description of Artificial Sequence: Synthetic oligonucleotide
  Sense strand starting at position 34 of SEQ ID NO: 1560448
uaaugagagcucuguggaa

SEQ ID NO: 1600692 - RNA, 19 nt, Artificial Sequence
  Description of Artificial Sequence: Synthetic oligonucleotide
  Antisense strand to SEQ ID NO: 1600691
uuccacagagcucucauua

SEQ ID NO: 1600693 - RNA, 19 nt, Artificial Sequence
  Description of Artificial Sequence: Synthetic oligonucleotide
  Sense strand starting at position 36 of SEQ ID NO: 1560448
augagagcucuguggaaga

SEQ ID NO: 1600694 - RNA, 19 nt, Artificial Sequence
  Description of Artificial Sequence: Synthetic oligonucleotide
  Antisense strand to SEQ ID NO: 1600693
ucuuccacagagcucucau

SEQ ID NO: 1600695 - RNA, 19 nt, Artificial Sequence
  Description of Artificial Sequence: Synthetic oligonucleotide
  Sense strand starting at position 68 of SEQ ID NO: 1560448
cucaaauuaucccuggguu

SEQ ID NO: 1600696 - RNA, 19 nt, Artificial Sequence
  Description of Artificial Sequence: Synthetic oligonucleotide
  Antisense strand to SEQ ID NO: 1600695
aacccagggauaauuugag

SEQ ID NO: 1600697 - RNA, 19 nt, Artificial Sequence
  Description of Artificial Sequence: Synthetic oligonucleotide
  Sense strand starting at position 69 of SEQ ID NO: 1560448
ucaaauuaucccuggguuc

SEQ ID NO: 1600698 - RNA, 19 nt, Artificial Sequence
  Description of Artificial Sequence: Synthetic oligonucleotide
  Antisense strand to SEQ ID NO: 1600697
gaacccagggauaauuuga

SEQ ID NO: 1600699 - RNA, 19 nt, Artificial Sequence
  Description of Artificial Sequence: Synthetic oligonucleotide
  Sense strand starting at position 112 of SEQ ID NO: 1560448
ccuacuauauuccaguaga

SEQ ID NO: 1600700 - RNA, 19 nt, Artificial Sequence
  Description of Artificial Sequence: Synthetic oligonucleotide
  Antisense strand to SEQ ID NO: 1600699
ucuacuggaauauaguagg

SEQ ID NO: 1600701 - RNA, 19 nt, Artificial Sequence
  Description of Artificial Sequence: Synthetic oligonucleotide
  Sense strand starting at position 129 of SEQ ID NO: 1560448
gagacacagugguaacaaa

SEQ ID NO: 1600702 - RNA, 19 nt, Artificial Sequence
  Description of Artificial Sequence: Synthetic oligonucleotide
  Antisense strand to SEQ ID NO: 1600701
uuuguuaccacugugucuc

SEQ ID NO: 1600703 - RNA, 19 nt, Artificial Sequence
  Description of Artificial Sequence: Synthetic oligonucleotide
  Sense strand starting at position 505 of SEQ ID NO: 1560448
uagaaugaagccugaugua

SEQ ID NO: 1600704 - RNA, 19 nt, Artificial Sequence
  Description of Artificial Sequence: Synthetic oligonucleotide
  Antisense strand to SEQ ID NO: 1600703
uacaucaggcuucauucua

SEQ ID NO: 1600705 - RNA, 19 nt, Artificial Sequence
  Description of Artificial Sequence: Synthetic oligonucleotide
  Sense strand starting at position 546 of SEQ ID NO: 1560448
auaggaaucgcugacucau

SEQ ID NO: 1600706 - RNA, 19 nt, Artificial Sequence
  Description of Artificial Sequence: Synthetic oligonucleotide
  Antisense strand to SEQ ID NO: 1600705
augagucagcgauuccuau

SEQ ID NO: 1600707 - RNA, 19 nt, Artificial Sequence
  Description of Artificial Sequence: Synthetic oligonucleotide
  Sense strand starting at position 586 of SEQ ID NO: 1560448
gggagaaucugggaugacu

SEQ ID NO: 1600708 - RNA, 19 nt, Artificial Sequence
  Description of Artificial Sequence: Synthetic oligonucleotide
  Antisense strand to SEQ ID NO: 1600707
agucaucccagauucuccc

SEQ ID NO: 1600709 - RNA, 19 nt, Artificial Sequence
  Description of Artificial Sequence: Synthetic oligonucleotide
  Sense strand starting at position 1160 of SEQ ID NO: 1560448
aggugcuacugucaaucua

SEQ ID NO: 1600710 - RNA, 19 nt, Artificial Sequence
  Description of Artificial Sequence: Synthetic oligonucleotide
  Antisense strand to SEQ ID NO: 1600709
uagauugacaguagcaccu

SEQ ID NO: 1600711 - RNA, 19 nt, Artificial Sequence
  Description of Artificial Sequence: Synthetic oligonucleotide
  Sense strand starting at position 1172 of SEQ ID NO: 1560448
caaucuaucgguuacggca

SEQ ID NO: 1600712 - RNA, 19 nt, Artificial Sequence
  Description of Artificial Sequence: Synthetic oligonucleotide
  Antisense strand to SEQ ID NO: 1600711
ugccguaaccgauagauug

SEQ ID NO: 1600713 - RNA, 19 nt, Artificial Sequence
  Description of Artificial Sequence: Synthetic oligonucleotide
  Sense strand starting at position 1199 of SEQ ID NO: 1560448
uggagugauuccucuugcu

SEQ ID NO: 1600714 - RNA, 19 nt, Artificial Sequence
  Description of Artificial Sequence: Synthetic oligonucleotide
  Antisense strand to SEQ ID NO: 1600713
agcaagaggaaucacucca

SEQ ID NO: 1600715 - RNA, 19 nt, Artificial Sequence
  Description of Artificial Sequence: Synthetic oligonucleotide
  Sense strand starting at position 1307 of SEQ ID NO: 1560448
cuagcucucggucaguauu

SEQ ID NO: 1600716 - RNA, 19 nt, Artificial Sequence
  Description of Artificial Sequence: Synthetic oligonucleotide
  Antisense strand to SEQ ID NO: 1600715
aauacugaccgagagcuag

SEQ ID NO: 1600717 - RNA, 19 nt, Artificial Sequence
  Description of Artificial Sequence: Synthetic oligonucleotide
  Sense strand starting at position 1422 of SEQ ID NO: 1560448
agcgcgugggaggauuaaa

SEQ ID NO: 1600718 - RNA, 19 nt, Artificial Sequence
  Description of Artificial Sequence: Synthetic oligonucleotide
  Antisense strand to SEQ ID NO: 1600717
uuuaauccucccacgcgcu

SEQ ID NO: 1600719 - RNA, 19 nt, Artificial Sequence
  Description of Artificial Sequence: Synthetic oligonucleotide
  Sense strand starting at position 1445 of SEQ ID NO: 1560448
acacuuuggucgcccaaca

SEQ ID NO: 1600720 - RNA, 19 nt, Artificial Sequence
  Description of Artificial Sequence: Synthetic oligonucleotide
  Antisense strand to SEQ ID NO: 1600719
uguugggcgaccaaagugu

SEQ ID NO: 1600721 - RNA, 19 nt, Artificial Sequence
  Description of Artificial Sequence: Synthetic oligonucleotide
  Sense strand starting at position 1480 of SEQ ID NO: 1560448
cgauaauuccaagagcgac

SEQ ID NO: 1600722 - RNA, 19 nt, Artificial Sequence
  Description of Artificial Sequence: Synthetic oligonucleotide
  Antisense strand to SEQ ID NO: 1600721
gucgcucuuggaauuaucg

SEQ ID NO: 1600723 - RNA, 19 nt, Artificial Sequence
  Description of Artificial Sequence: Synthetic oligonucleotide
  Sense strand starting at position 1494 of SEQ ID NO: 1560448
gcgacaucacaguaaagac

SEQ ID NO: 1600724 - RNA, 19 nt, Artificial Sequence
  Description of Artificial Sequence: Synthetic oligonucleotide
  Antisense strand to SEQ ID NO: 1600723
gucuuuacugugaugucgc

SEQ ID NO: 1600725 - RNA, 19 nt, Artificial Sequence
  Description of Artificial Sequence: Synthetic oligonucleotide
  Sense strand starting at position 1580 of SEQ ID NO: 1560448
ccauuucguagcggaggaa

SEQ ID NO: 1600726 - RNA, 19 nt, Artificial Sequence
  Description of Artificial Sequence: Synthetic oligonucleotide
  Antisense strand to SEQ ID NO: 1600725
uuccuccgcuacgaaaugg

SEQ ID NO: 1600727 - RNA, 19 nt, Artificial Sequence
  Description of Artificial Sequence: Synthetic oligonucleotide
  Sense strand starting at position 1816 of SEQ ID NO: 1560448
cccuauggcgucuacaaau

SEQ ID NO: 1600728 - RNA, 19 nt, Artificial Sequence
  Description of Artificial Sequence: Synthetic oligonucleotide
  Antisense strand to SEQ ID NO: 1600727
auuuguagacgccauaggg

SEQ ID NO: 1600729 - RNA, 19 nt, Artificial Sequence
  Description of Artificial Sequence: Synthetic oligonucleotide
  Sense strand starting at position 2118 of SEQ ID NO: 1560448
accugaucugucggacagu

SEQ ID NO: 1600730 - RNA, 19 nt, Artificial Sequence
  Description of Artificial Sequence: Synthetic oligonucleotide
  Antisense strand to SEQ ID NO: 1600729
acuguccgacagaucaggu

SEQ ID NO: 1600731 - RNA, 19 nt, Artificial Sequence
  Description of Artificial Sequence: Synthetic oligonucleotide
  Sense strand starting at position 2119 of SEQ ID NO: 1560448
ccugaucugucggacagua

SEQ ID NO: 1600732 - RNA, 19 nt, Artificial Sequence
  Description of Artificial Sequence: Synthetic oligonucleotide
  Antisense strand to SEQ ID NO: 1600731
uacuguccgacagaucagg

SEQ ID NO: 1600733 - RNA, 19 nt, Artificial Sequence
  Description of Artificial Sequence: Synthetic oligonucleotide
  Sense strand starting at position 2591 of SEQ ID NO: 1560448
ugagcagcuucucugaaga

SEQ ID NO: 1600734 - RNA, 19 nt, Artificial Sequence
  Description of Artificial Sequence: Synthetic oligonucleotide
  Antisense strand to SEQ ID NO: 1600733
ucuucagagaagcugcuca

SEQ ID NO: 1600735 - RNA, 19 nt, Artificial Sequence
  Description of Artificial Sequence: Synthetic oligonucleotide
  Sense strand starting at position 2610 of SEQ ID NO: 1560448
ggacguggcuuaaguggua

SEQ ID NO: 1600736 - RNA, 19 nt, Artificial Sequence
  Description of Artificial Sequence: Synthetic oligonucleotide
  Antisense strand to SEQ ID NO: 1600735
uaccacuuaagccacgucc

SEQ ID NO: 1600737 - RNA, 19 nt, Artificial Sequence
  Description of Artificial Sequence: Synthetic oligonucleotide
  Sense strand starting at position 2613 of SEQ ID NO: 1560448
cguggcuuaagugguaauu

SEQ ID NO: 1600738 - RNA, 19 nt, Artificial Sequence
  Description of Artificial Sequence: Synthetic oligonucleotide
  Antisense strand to SEQ ID NO: 1600737
aauuaccacuuaagccacg

SEQ ID NO: 1600739 - RNA, 19 nt, Artificial Sequence
  Description of Artificial Sequence: Synthetic oligonucleotide
  Sense strand starting at position 2919 of SEQ ID NO: 1560448
cggaguagaagucacggua

SEQ ID NO: 1600740 - RNA, 19 nt, Artificial Sequence
  Description of Artificial Sequence: Synthetic oligonucleotide
  Antisense strand to SEQ ID NO: 1600739
uaccgugacuucuacuccg

SEQ ID NO: 1600741 - RNA, 19 nt, Artificial Sequence
  Description of Artificial Sequence: Synthetic oligonucleotide
  Sense strand starting at position 2922 of SEQ ID NO: 1560448
aguagaagucacgguaaga

SEQ ID NO: 1600742 - RNA, 19 nt, Artificial Sequence
  Description of Artificial Sequence: Synthetic oligonucleotide
  Antisense strand to SEQ ID NO: 1600741
ucuuaccgugacuucuacu

SEQ ID NO: 1600743 - RNA, 19 nt, Artificial Sequence
  Description of Artificial Sequence: Synthetic oligonucleotide
  Sense strand starting at position 3012 of SEQ ID NO: 1560448
gcagauagauguugagaug

SEQ ID NO: 1600744 - RNA, 19 nt, Artificial Sequence
  Description of Artificial Sequence: Synthetic oligonucleotide
  Antisense strand to SEQ ID NO: 1600743
caucucaacaucuaucugc

SEQ ID NO: 1600745 - RNA, 19 nt, Artificial Sequence
  Description of Artificial Sequence: Synthetic oligonucleotide
  Sense strand starting at position 3015 of SEQ ID NO: 1560448
gauagauguugagaugcag

SEQ ID NO: 1600746 - RNA, 19 nt, Artificial Sequence
  Description of Artificial Sequence: Synthetic oligonucleotide
  Antisense strand to SEQ ID NO: 1600745
cugcaucucaacaucuauc

SEQ ID NO: 1600747 - RNA, 19 nt, Artificial Sequence
  Description of Artificial Sequence: Synthetic oligonucleotide
  Sense strand starting at position 3142 of SEQ ID NO: 1560448
uguccucgucuuggaaacu

SEQ ID NO: 1600748 - RNA, 19 nt, Artificial Sequence
  Description of Artificial Sequence: Synthetic oligonucleotide
  Antisense strand to SEQ ID NO: 1600747
aguuuccaagacgaggaca

SEQ ID NO: 1600749 - RNA, 19 nt, Artificial Sequence
  Description of Artificial Sequence: Synthetic oligonucleotide
  Sense strand starting at position 3186 of SEQ ID NO: 1560448
cuagcaggauucugggauu

SEQ ID NO: 1600750 - RNA, 19 nt, Artificial Sequence
  Description of Artificial Sequence: Synthetic oligonucleotide
  Antisense strand to SEQ ID NO: 1600749
aaucccagaauccugcuag

SEQ ID NO: 1600751 - RNA, 19 nt, Artificial Sequence
  Description of Artificial Sequence: Synthetic oligonucleotide
  Sense strand starting at position 3312 of SEQ ID NO: 1560448
agcugcauccuuggacuua

SEQ ID NO: 1600752 - RNA, 19 nt, Artificial Sequence
  Description of Artificial Sequence: Synthetic oligonucleotide
  Antisense strand to SEQ ID NO: 1600751
uaaguccaaggaugcagcu

SEQ ID NO: 1600753 - RNA, 19 nt, Artificial Sequence
  Description of Artificial Sequence: Synthetic oligonucleotide
  Sense strand starting at position 3313 of SEQ ID NO: 1560448
gcugcauccuuggacuuaa

SEQ ID NO: 1600754 - RNA, 19 nt, Artificial Sequence
  Description of Artificial Sequence: Synthetic oligonucleotide
  Antisense strand to SEQ ID NO: 1600753
uuaaguccaaggaugcagc

SEQ ID NO: 1600755 - RNA, 19 nt, Artificial Sequence
  Description of Artificial Sequence: Synthetic oligonucleotide
  Sense strand starting at position 3321 of SEQ ID NO: 1560448
cuuggacuuaaauggguaa

SEQ ID NO: 1600756 - RNA, 19 nt, Artificial Sequence
  Description of Artificial Sequence: Synthetic oligonucleotide
  Antisense strand to SEQ ID NO: 1600755
uuacccauuuaaguccaag

SEQ ID NO: 1600757 - RNA, 19 nt, Artificial Sequence
  Description of Artificial Sequence: Synthetic oligonucleotide
  Sense strand starting at position 3702 of SEQ ID NO: 1560448
gggaucuuuaucugggauc

SEQ ID NO: 1600758 - RNA, 19 nt, Artificial Sequence
  Description of Artificial Sequence: Synthetic oligonucleotide
  Antisense strand to SEQ ID NO: 1600757
gaucccagauaaagauccc

SEQ ID NO: 1600759 - RNA, 19 nt, Artificial Sequence
  Description of Artificial Sequence: Synthetic oligonucleotide
  Sense strand starting at position 3703 of SEQ ID NO: 1560448
ggaucuuuaucugggaucu

SEQ ID NO: 1600760 - RNA, 19 nt, Artificial Sequence
  Description of Artificial Sequence: Synthetic oligonucleotide
  Antisense strand to SEQ ID NO: 1600759
agaucccagauaaagaucc

SEQ ID NO: 1600761 - RNA, 19 nt, Artificial Sequence
  Description of Artificial Sequence: Synthetic oligonucleotide
  Sense strand starting at position 3704 of SEQ ID NO: 1560448
gaucuuuaucugggaucug

SEQ ID NO: 1600762 - RNA, 19 nt, Artificial Sequence
  Description of Artificial Sequence: Synthetic oligonucleotide
  Antisense strand to SEQ ID NO: 1600761
cagaucccagauaaagauc

SEQ ID NO: 1600763 - RNA, 19 nt, Artificial Sequence
  Description of Artificial Sequence: Synthetic oligonucleotide
  Sense strand starting at position 3742 of SEQ ID NO: 1560448
ccagcuuauguuuaguuua

SEQ ID NO: 1600764 - RNA, 19 nt, Artificial Sequence
  Description of Artificial Sequence: Synthetic oligonucleotide
  Antisense strand to SEQ ID NO: 1600763
uaaacuaaacauaagcugg

SEQ ID NO: 1600765 - RNA, 19 nt, Artificial Sequence
  Description of Artificial Sequence: Synthetic oligonucleotide
  Sense strand starting at position 3781 of SEQ ID NO: 1560448
cccggauagcuggaauaua

SEQ ID NO: 1600766 - RNA, 19 nt, Artificial Sequence
  Description of Artificial Sequence: Synthetic oligonucleotide
  Antisense strand to SEQ ID NO: 1600765
uauauuccagcuauccggg

SEQ ID NO: 1600767 - RNA, 19 nt, Artificial Sequence
  Description of Artificial Sequence: Synthetic oligonucleotide
  Sense strand starting at position 3835 of SEQ ID NO: 1560448
uccagaauauccuggccuu

SEQ ID NO: 1600768 - RNA, 19 nt, Artificial Sequence
  Description of Artificial Sequence: Synthetic oligonucleotide
  Antisense strand to SEQ ID NO: 1600767
aaggccaggauauucugga

SEQ ID NO: 1600769 - RNA, 19 nt, Artificial Sequence
  Description of Artificial Sequence: Synthetic oligonucleotide
  Sense strand starting at position 3836 of SEQ ID NO: 1560448
ccagaauauccuggccuuu

SEQ ID NO: 1600770 - RNA, 19 nt, Artificial Sequence
  Description of Artificial Sequence: Synthetic oligonucleotide
  Antisense strand to SEQ ID NO: 1600769
aaaggccaggauauucugg

SEQ ID NO: 1600771 - RNA, 19 nt, Artificial Sequence
  Description of Artificial Sequence: Synthetic oligonucleotide
  Sense strand starting at position 704 of SEQ ID NO: 1560449
ccgagccuuccacgcauua

SEQ ID NO: 1600772 - RNA, 19 nt, Artificial Sequence
  Description of Artificial Sequence: Synthetic oligonucleotide
  Antisense strand to SEQ ID NO: 1600771
uaaugcguggaaggcucgg

SEQ ID NO: 1600773 - RNA, 19 nt, Artificial Sequence
  Description of Artificial Sequence: Synthetic oligonucleotide
  Sense strand starting at position 2407 of SEQ ID NO: 1560449
ccuugcuuucugugagguu

SEQ ID NO: 1600774 - RNA, 19 nt, Artificial Sequence
  Description of Artificial Sequence: Synthetic oligonucleotide
  Antisense strand to SEQ ID NO: 1600773
aaccucacagaaagcaagg

SEQ ID NO: 1600775 - RNA, 19 nt, Artificial Sequence
  Description of Artificial Sequence: Synthetic oligonucleotide
  Sense strand starting at position 2408 of SEQ ID NO: 1560449
cuugcuuucugugagguuu

SEQ ID NO: 1600776 - RNA, 19 nt, Artificial Sequence
  Description of Artificial Sequence: Synthetic oligonucleotide
  Antisense strand to SEQ ID NO: 1600775
aaaccucacagaaagcaag

SEQ ID NO: 1600777 - RNA, 19 nt, Artificial Sequence
  Description of Artificial Sequence: Synthetic oligonucleotide
  Sense strand starting at position 2410 of SEQ ID NO: 1560449
ugcuuucugugagguuuga

SEQ ID NO: 1600778 - RNA, 19 nt, Artificial Sequence
  Description of Artificial Sequence: Synthetic oligonucleotide
  Antisense strand to SEQ ID NO: 1600777
ucaaaccucacagaaagca

SEQ ID NO: 1600779 - RNA, 19 nt, Artificial Sequence
  Description of Artificial Sequence: Synthetic oligonucleotide
  Sense strand starting at position 2414 of SEQ ID NO: 1560449
uucugugagguuugaagac

SEQ ID NO: 1600780 - RNA, 19 nt, Artificial Sequence
  Description of Artificial Sequence: Synthetic oligonucleotide
  Antisense strand to SEQ ID NO: 1600779
gucuucaaaccucacagaa

SEQ ID NO: 1600781 - RNA, 19 nt, Artificial Sequence
  Description of Artificial Sequence: Synthetic oligonucleotide
  Sense strand starting at position 2426 of SEQ ID NO: 1560449
ugaagacuuccacgacgaa

SEQ ID NO: 1600782 - RNA, 19 nt, Artificial Sequence
  Description of Artificial Sequence: Synthetic oligonucleotide
  Antisense strand to SEQ ID NO: 1600781
uucgucguggaagucuuca

SEQ ID NO: 1600783 - RNA, 19 nt, Artificial Sequence
  Description of Artificial Sequence: Synthetic oligonucleotide
  Sense strand starting at position 2440 of SEQ ID NO: 1560449
acgaaaggguguuucuaaa

SEQ ID NO: 1600784 - RNA, 19 nt, Artificial Sequence
  Description of Artificial Sequence: Synthetic oligonucleotide
  Antisense strand to SEQ ID NO: 1600783
uuuagaaacacccuuucgu

SEQ ID NO: 1600785 - RNA, 19 nt, Artificial Sequence
  Description of Artificial Sequence: Synthetic oligonucleotide
  Sense strand starting at position 2447 of SEQ ID NO: 1560449
gguguuucuaaaggucaca

SEQ ID NO: 1600786 - RNA, 19 nt, Artificial Sequence
  Description of Artificial Sequence: Synthetic oligonucleotide
  Antisense strand to SEQ ID NO: 1600785
ugugaccuuuagaaacacc

SEQ ID NO: 1600787 - RNA, 19 nt, Artificial Sequence
  Description of Artificial Sequence: Synthetic oligonucleotide
  Sense strand starting at position 2541 of SEQ ID NO: 1560449
cgccguucugggagacuca

SEQ ID NO: 1600788 - RNA, 19 nt, Artificial Sequence
  Description of Artificial Sequence: Synthetic oligonucleotide
  Antisense strand to SEQ ID NO: 1600787
ugagucucccagaacggcg

SEQ ID NO: 1600789 - RNA, 19 nt, Artificial Sequence
  Description of Artificial Sequence: Synthetic oligonucleotide
  Sense strand starting at position 2574 of SEQ ID NO: 1560449
uggucugcauuugaggaaa

SEQ ID NO: 1600790 - RNA, 19 nt, Artificial Sequence
  Description of Artificial Sequence: Synthetic oligonucleotide
  Antisense strand to SEQ ID NO: 1600789
uuuccucaaaugcagacca

SEQ ID NO: 1600791 - RNA, 19 nt, Artificial Sequence
  Description of Artificial Sequence: Synthetic oligonucleotide
  Sense strand starting at position 2576 of SEQ ID NO: 1560449
gucugcauuugaggaaacu

SEQ ID NO: 1600792 - RNA, 19 nt, Artificial Sequence
  Description of Artificial Sequence: Synthetic oligonucleotide
  Antisense strand to SEQ ID NO: 1600791
aguuuccucaaaugcagac

SEQ ID NO: 1600793 - RNA, 19 nt, Artificial Sequence
  Description of Artificial Sequence: Synthetic oligonucleotide
  Sense strand starting at position 3207 of SEQ ID NO: 1560449
gaggcacucagugguacuu

SEQ ID NO: 1600794 - RNA, 19 nt, Artificial Sequence
  Description of Artificial Sequence: Synthetic oligonucleotide
  Antisense strand to SEQ ID NO: 1600793
aaguaccacugagugccuc

SEQ ID NO: 1600795 - RNA, 19 nt, Artificial Sequence
  Description of Artificial Sequence: Synthetic oligonucleotide
  Sense strand starting at position 3213 of SEQ ID NO: 1560449
cucagugguacuugaggga

SEQ ID NO: 1600796 - RNA, 19 nt, Artificial Sequence
  Description of Artificial Sequence: Synthetic oligonucleotide
  Antisense strand to SEQ ID NO: 1600795
ucccucaaguaccacugag

SEQ ID NO: 1600797 - RNA, 19 nt, Artificial Sequence
  Description of Artificial Sequence: Synthetic oligonucleotide
  Sense strand starting at position 3793 of SEQ ID NO: 1560449
gccggaguacucuguauuu

SEQ ID NO: 1600798 - RNA, 19 nt, Artificial Sequence
  Description of Artificial Sequence: Synthetic oligonucleotide
  Antisense strand to SEQ ID NO: 1600797
aaauacagaguacuccggc

SEQ ID NO: 1600799 - RNA, 19 nt, Artificial Sequence
  Description of Artificial Sequence: Synthetic oligonucleotide
  Sense strand starting at position 12 of SEQ ID NO: 1560450
gagugccaucccugagaga

SEQ ID NO: 1600800 - RNA, 19 nt, Artificial Sequence
  Description of Artificial Sequence: Synthetic oligonucleotide
  Antisense strand to SEQ ID NO: 1600799
ucucucagggauggcacuc

SEQ ID NO: 1600801 - RNA, 19 nt, Artificial Sequence
  Description of Artificial Sequence: Synthetic oligonucleotide
  Sense strand starting at position 85 of SEQ ID NO: 1560450
gccagauccuugggcugau

SEQ ID NO: 1600802 - RNA, 19 nt, Artificial Sequence
  Description of Artificial Sequence: Synthetic oligonucleotide
  Antisense strand to SEQ ID NO: 1600801
aucagcccaaggaucuggc

SEQ ID NO: 1600803 - RNA, 19 nt, Artificial Sequence
  Description of Artificial Sequence: Synthetic oligonucleotide
  Sense strand starting at position 941 of SEQ ID NO: 1560450
gauucugggacucggagaa

SEQ ID NO: 1600804 - RNA, 19 nt, Artificial Sequence
  Description of Artificial Sequence: Synthetic oligonucleotide
  Antisense strand to SEQ ID NO: 1600803
uucuccgagucccagaauc

SEQ ID NO: 1600805 - RNA, 19 nt, Artificial Sequence
  Description of Artificial Sequence: Synthetic oligonucleotide
  Sense strand starting at position 960 of SEQ ID NO: 1560450
ggacacggauccucugauu

SEQ ID NO: 1600806 - RNA, 19 nt, Artificial Sequence
  Description of Artificial Sequence: Synthetic oligonucleotide
  Antisense strand to SEQ ID NO: 1600805
aaucagaggauccgugucc

SEQ ID NO: 1600807 - RNA, 19 nt, Artificial Sequence
  Description of Artificial Sequence: Synthetic oligonucleotide
  Sense strand starting at position 1054 of SEQ ID NO: 1560450
ggaagugauaccugaagug

SEQ ID NO: 1600808 - RNA, 19 nt, Artificial Sequence
  Description of Artificial Sequence: Synthetic oligonucleotide
  Antisense strand to SEQ ID NO: 1600807
cacuucagguaucacuucc

SEQ ID NO: 1600809 - RNA, 19 nt, Artificial Sequence
  Description of Artificial Sequence: Synthetic oligonucleotide
  Sense strand starting at position 1328 of SEQ ID NO: 1560450
cuggaaguguugguucaca

SEQ ID NO: 1600810 - RNA, 19 nt, Artificial Sequence
  Description of Artificial Sequence: Synthetic oligonucleotide
  Antisense strand to SEQ ID NO: 1600809
ugugaaccaacacuuccag

SEQ ID NO: 1600811 - RNA, 19 nt, Artificial Sequence
  Description of Artificial Sequence: Synthetic oligonucleotide
  Sense strand starting at position 1510 of SEQ ID NO: 1560450
aagguaguguccugagaag

SEQ ID NO: 1600812 - RNA, 19 nt, Artificial Sequence
  Description of Artificial Sequence: Synthetic oligonucleotide
  Antisense strand to SEQ ID NO: 1600811
cuucucaggacacuaccuu

SEQ ID NO: 1600813 - RNA, 19 nt, Artificial Sequence
  Description of Artificial Sequence: Synthetic oligonucleotide
  Sense strand starting at position 2038 of SEQ ID NO: 1560450
cguuacugccuuuggugaa

SEQ ID NO: 1600814 - RNA, 19 nt, Artificial Sequence
  Description of Artificial Sequence: Synthetic oligonucleotide
  Antisense strand to SEQ ID NO: 1600813
uucaccaaaggcaguaacg

SEQ ID NO: 1600815 - RNA, 19 nt, Artificial Sequence
  Description of Artificial Sequence: Synthetic oligonucleotide
  Sense strand starting at position 2187 of SEQ ID NO: 1560450
ugauuaaaugaaugugggu

SEQ ID NO: 1600816 - RNA, 19 nt, Artificial Sequence
  Description of Artificial Sequence: Synthetic oligonucleotide
  Antisense strand to SEQ ID NO: 1600815
acccacauucauuuaauca

SEQ ID NO: 1600817 - RNA, 19 nt, Artificial Sequence
  Description of Artificial Sequence: Synthetic oligonucleotide
  Sense strand starting at position 2192 of SEQ ID NO: 1560450
aaaugaauguggguguguu

SEQ ID NO: 1600818 - RNA, 19 nt, Artificial Sequence
  Description of Artificial Sequence: Synthetic oligonucleotide
  Antisense strand to SEQ ID NO: 1600817
aacacacccacauucauuu

SEQ ID NO: 1600819 - RNA, 19 nt, Artificial Sequence
  Description of Artificial Sequence: Synthetic oligonucleotide
  Sense strand starting at position 2193 of SEQ ID NO: 1560450
aaugaauguggguguguuu

SEQ ID NO: 1600820 - RNA, 19 nt, Artificial Sequence
  Description of Artificial Sequence: Synthetic oligonucleotide
  Antisense strand to SEQ ID NO: 1600819
aaacacacccacauucauu

SEQ ID NO: 1600821 - RNA, 19 nt, Artificial Sequence
  Description of Artificial Sequence: Synthetic oligonucleotide
  Sense strand starting at position 2202 of SEQ ID NO: 1560450
ggguguguuugagagggau

SEQ ID NO: 1600822 - RNA, 19 nt, Artificial Sequence
  Description of Artificial Sequence: Synthetic oligonucleotide
  Antisense strand to SEQ ID NO: 1600821
aucccucucaaacacaccc

SEQ ID NO: 1600823 - RNA, 19 nt, Artificial Sequence
  Description of Artificial Sequence: Synthetic oligonucleotide
  Sense strand starting at position 2206 of SEQ ID NO: 1560450
guguuugagagggauccua

SEQ ID NO: 1600824 - RNA, 19 nt, Artificial Sequence
  Description of Artificial Sequence: Synthetic oligonucleotide
  Antisense strand to SEQ ID NO: 1600823
uaggaucccucucaaacac

SEQ ID NO: 1600825 - RNA, 19 nt, Artificial Sequence
  Description of Artificial Sequence: Synthetic oligonucleotide
  Sense strand starting at position 2242 of SEQ ID NO: 1560450
gcaugaaacgcugagaaga

SEQ ID NO: 1600826 - RNA, 19 nt, Artificial Sequence
  Description of Artificial Sequence: Synthetic oligonucleotide
  Antisense strand to SEQ ID NO: 1600825
ucuucucagcguuucaugc

SEQ ID NO: 1600827 - RNA, 19 nt, Artificial Sequence
  Description of Artificial Sequence: Synthetic oligonucleotide
  Sense strand starting at position 2262 of SEQ ID NO: 1560450
gggagugucugcuggcaga

SEQ ID NO: 1600828 - RNA, 19 nt, Artificial Sequence
  Description of Artificial Sequence: Synthetic oligonucleotide
  Antisense strand to SEQ ID NO: 1600827
ucugccagcagacacuccc

SEQ ID NO: 1600829 - RNA, 19 nt, Artificial Sequence
  Description of Artificial Sequence: Synthetic oligonucleotide
  Sense strand starting at position 2266 of SEQ ID NO: 1560450
gugucugcuggcagagaug

SEQ ID NO: 1600830 - RNA, 19 nt, Artificial Sequence
  Description of Artificial Sequence: Synthetic oligonucleotide
  Antisense strand to SEQ ID NO: 1600829
caucucugccagcagacac

SEQ ID NO: 1600831 - RNA, 19 nt, Artificial Sequence
  Description of Artificial Sequence: Synthetic oligonucleotide
  Sense strand starting at position 2269 of SEQ ID NO: 1560450
ucugcuggcagagaugaaa

SEQ ID NO: 1600832 - RNA, 19 nt, Artificial Sequence
  Description of Artificial Sequence: Synthetic oligonucleotide
  Antisense strand to SEQ ID NO: 1600831
uuucaucucugccagcaga

SEQ ID NO: 1600833 - RNA, 19 nt, Artificial Sequence
  Description of Artificial Sequence: Synthetic oligonucleotide
  Sense strand starting at position 2327 of SEQ ID NO: 1560450
ggcauacaggguuggaaau

SEQ ID NO: 1600834 - RNA, 19 nt, Artificial Sequence
  Description of Artificial Sequence: Synthetic oligonucleotide
  Antisense strand to SEQ ID NO: 1600833
auuuccaacccuguaugcc

SEQ ID NO: 1600835 - RNA, 19 nt, Artificial Sequence
  Description of Artificial Sequence: Synthetic oligonucleotide
  Sense strand starting at position 2337 of SEQ ID NO: 1560450
guuggaaaugccugacaau

SEQ ID NO: 1600836 - RNA, 19 nt, Artificial Sequence
  Description of Artificial Sequence: Synthetic oligonucleotide
  Antisense strand to SEQ ID NO: 1600835
auugucaggcauuuccaac

SEQ ID NO: 1600837 - RNA, 19 nt, Artificial Sequence
  Description of Artificial Sequence: Synthetic oligonucleotide
  Sense strand starting at position 2351 of SEQ ID NO: 1560450
acaaucucccuguggagau

SEQ ID NO: 1600838 - RNA, 19 nt, Artificial Sequence
  Description of Artificial Sequence: Synthetic oligonucleotide
  Antisense strand to SEQ ID NO: 1600837
aucuccacagggagauugu

SEQ ID NO: 1600839 - RNA, 19 nt, Artificial Sequence
  Description of Artificial Sequence: Synthetic oligonucleotide
  Sense strand starting at position 2411 of SEQ ID NO: 1560450
cuggucuggagauguaaau

SEQ ID NO: 1600840 - RNA, 19 nt, Artificial Sequence
  Description of Artificial Sequence: Synthetic oligonucleotide
  Antisense strand to SEQ ID NO: 1600839
auuuacaucuccagaccag

SEQ ID NO: 1600841 - RNA, 19 nt, Artificial Sequence
  Description of Artificial Sequence: Synthetic oligonucleotide
  Sense strand starting at position 2443 of SEQ ID NO: 1560450
gcuuauggaugguacuuaa

SEQ ID NO: 1600842 - RNA, 19 nt, Artificial Sequence
  Description of Artificial Sequence: Synthetic oligonucleotide
  Antisense strand to SEQ ID NO: 1600841
uuaaguaccauccauaagc

SEQ ID NO: 1600843 - RNA, 19 nt, Artificial Sequence
  Description of Artificial Sequence: Synthetic oligonucleotide
  Sense strand starting at position 2548 of SEQ ID NO: 1560450
gaggaacuuugccagggaa

SEQ ID NO: 1600844 - RNA, 19 nt, Artificial Sequence
  Description of Artificial Sequence: Synthetic oligonucleotide
  Antisense strand to SEQ ID NO: 1600843
uucccuggcaaaguuccuc

SEQ ID NO: 1600845 - RNA, 19 nt, Artificial Sequence
  Description of Artificial Sequence: Synthetic oligonucleotide
  Sense strand starting at position 2550 of SEQ ID NO: 1560450
ggaacuuugccagggaaau

SEQ ID NO: 1600846 - RNA, 19 nt, Artificial Sequence
  Description of Artificial Sequence: Synthetic oligonucleotide
  Antisense strand to SEQ ID NO: 1600845
auuucccuggcaaaguucc

SEQ ID NO: 1600847 - RNA, 19 nt, Artificial Sequence
  Description of Artificial Sequence: Synthetic oligonucleotide
  Sense strand starting at position 2551 of SEQ ID NO: 1560450
gaacuuugccagggaaaug

SEQ ID NO: 1600848 - RNA, 19 nt, Artificial Sequence
  Description of Artificial Sequence: Synthetic oligonucleotide
  Antisense strand to SEQ ID NO: 1600847
cauuucccuggcaaaguuc

SEQ ID NO: 1600849 - RNA, 19 nt, Artificial Sequence
  Description of Artificial Sequence: Synthetic oligonucleotide
  Sense strand starting at position 2944 of SEQ ID NO: 1560450
cauggucagugcugugaaa

SEQ ID NO: 1600850 - RNA, 19 nt, Artificial Sequence
  Description of Artificial Sequence: Synthetic oligonucleotide
  Antisense strand to SEQ ID NO: 1600849
uuucacagcacugaccaug

SEQ ID NO: 1600851 - RNA, 19 nt, Artificial Sequence
  Description of Artificial Sequence: Synthetic oligonucleotide
  Sense strand starting at position 2957 of SEQ ID NO: 1560450
gugaaaggucaccaaguga

SEQ ID NO: 1600852 - RNA, 19 nt, Artificial Sequence
  Description of Artificial Sequence: Synthetic oligonucleotide
  Antisense strand to SEQ ID NO: 1600851
ucacuuggugaccuuucac

SEQ ID NO: 1600853 - RNA, 19 nt, Artificial Sequence
  Description of Artificial Sequence: Synthetic oligonucleotide
  Sense strand starting at position 3017 of SEQ ID NO: 1560450
gggaauuccugccugcuua

SEQ ID NO: 1600854 - RNA, 19 nt, Artificial Sequence
  Description of Artificial Sequence: Synthetic oligonucleotide
  Antisense strand to SEQ ID NO: 1600853
uaagcaggcaggaauuccc

SEQ ID NO: 1600855 - RNA, 19 nt, Artificial Sequence
  Description of Artificial Sequence: Synthetic oligonucleotide
  Sense strand starting at position 3560 of SEQ ID NO: 1560450
ggcggaguuugcagagauc

SEQ ID NO: 1600856 - RNA, 19 nt, Artificial Sequence
  Description of Artificial Sequence: Synthetic oligonucleotide
  Antisense strand to SEQ ID NO: 1600855
gaucucugcaaacuccgcc

SEQ ID NO: 1600857 - RNA, 19 nt, Artificial Sequence
  Description of Artificial Sequence: Synthetic oligonucleotide
  Sense strand starting at position 3563 of SEQ ID NO: 1560450
ggaguuugcagagaucgca

SEQ ID NO: 1600858 - RNA, 19 nt, Artificial Sequence
  Description of Artificial Sequence: Synthetic oligonucleotide
  Antisense strand to SEQ ID NO: 1600857
ugcgaucucugcaaacucc

SEQ ID NO: 1600859 - RNA, 19 nt, Artificial Sequence
  Description of Artificial Sequence: Synthetic oligonucleotide
  Sense strand starting at position 24 of SEQ ID NO: 1560451
cucaguccugcccggcaaa

SEQ ID NO: 1600860 - RNA, 19 nt, Artificial Sequence
  Description of Artificial Sequence: Synthetic oligonucleotide
  Antisense strand to SEQ ID NO: 1600859
uuugccgggcaggacugag

SEQ ID NO: 1600861 - RNA, 19 nt, Artificial Sequence
  Description of Artificial Sequence: Synthetic oligonucleotide
  Sense strand starting at position 689 of SEQ ID NO: 1560451
uuccgcaguucugcucaaa

SEQ ID NO: 1600862 - RNA, 19 nt, Artificial Sequence
  Description of Artificial Sequence: Synthetic oligonucleotide
  Antisense strand to SEQ ID NO: 1600861
uuugagcagaacugcggaa

SEQ ID NO: 1600863 - RNA, 19 nt, Artificial Sequence
  Description of Artificial Sequence: Synthetic oligonucleotide
  Sense strand starting at position 692 of SEQ ID NO: 1560451
cgcaguucugcucaaacuu

SEQ ID NO: 1600864 - RNA, 19 nt, Artificial Sequence
  Description of Artificial Sequence: Synthetic oligonucleotide
  Antisense strand to SEQ ID NO: 1600863
aaguuugagcagaacugcg

SEQ ID NO: 1600865 - RNA, 19 nt, Artificial Sequence
  Description of Artificial Sequence: Synthetic oligonucleotide
  Sense strand starting at position 2125 of SEQ ID NO: 1560451
agcaguuaacgggauugga

SEQ ID NO: 1600866 - RNA, 19 nt, Artificial Sequence
  Description of Artificial Sequence: Synthetic oligonucleotide
  Antisense strand to SEQ ID NO: 1600865
uccaaucccguuaacugcu

SEQ ID NO: 1600867 - RNA, 19 nt, Artificial Sequence
  Description of Artificial Sequence: Synthetic oligonucleotide
  Sense strand starting at position 2128 of SEQ ID NO: 1560451
aguuaacgggauuggauaa

SEQ ID NO: 1600868 - RNA, 19 nt, Artificial Sequence
  Description of Artificial Sequence: Synthetic oligonucleotide
  Antisense strand to SEQ ID NO: 1600867
uuauccaaucccguuaacu

SEQ ID NO: 1600869 - RNA, 19 nt, Artificial Sequence
  Description of Artificial Sequence: Synthetic oligonucleotide
  Sense strand starting at position 2176 of SEQ ID NO: 1560451
acucuaaugggagguuaug

SEQ ID NO: 1600870 - RNA, 19 nt, Artificial Sequence
  Description of Artificial Sequence: Synthetic oligonucleotide
  Antisense strand to SEQ ID NO: 1600869
cauaaccucccauuagagu

SEQ ID NO: 1600871 - RNA, 19 nt, Artificial Sequence
  Description of Artificial Sequence: Synthetic oligonucleotide
  Sense strand starting at position 2353 of SEQ ID NO: 1560451
acgcaaugggcgggucauu

SEQ ID NO: 1600872 - RNA, 19 nt, Artificial Sequence
  Description of Artificial Sequence: Synthetic oligonucleotide
  Antisense strand to SEQ ID NO: 1600871
aaugacccgcccauugcgu

SEQ ID NO: 1600873 - RNA, 19 nt, Artificial Sequence
  Description of Artificial Sequence: Synthetic oligonucleotide
  Sense strand starting at position 2460 of SEQ ID NO: 1560451
ggcauuggccaucacaaga

SEQ ID NO: 1600874 - RNA, 19 nt, Artificial Sequence
  Description of Artificial Sequence: Synthetic oligonucleotide
  Antisense strand to SEQ ID NO: 1600873
ucuugugauggccaaugcc

SEQ ID NO: 1600875 - RNA, 19 nt, Artificial Sequence
  Description of Artificial Sequence: Synthetic oligonucleotide
  Sense strand starting at position 2503 of SEQ ID NO: 1560451
gccauuggcuaucgaaaga

SEQ ID NO: 1600876 - RNA, 19 nt, Artificial Sequence
  Description of Artificial Sequence: Synthetic oligonucleotide
  Antisense strand to SEQ ID NO: 1600875
ucuuucgauagccaauggc

SEQ ID NO: 1600877 - RNA, 19 nt, Artificial Sequence
  Description of Artificial Sequence: Synthetic oligonucleotide
  Sense strand starting at position 2600 of SEQ ID NO: 1560451
gggagcucuuaguauaaac

SEQ ID NO: 1600878 - RNA, 19 nt, Artificial Sequence
  Description of Artificial Sequence: Synthetic oligonucleotide
  Antisense strand to SEQ ID NO: 1600877
guuuauacuaagagcuccc

SEQ ID NO: 1600879 - RNA, 19 nt, Artificial Sequence
  Description of Artificial Sequence: Synthetic oligonucleotide
  Sense strand starting at position 2752 of SEQ ID NO: 1560451
ggccgagucacuugauugu

SEQ ID NO: 1600880 - RNA, 19 nt, Artificial Sequence
  Description of Artificial Sequence: Synthetic oligonucleotide
  Antisense strand to SEQ ID NO: 1600879
acaaucaagugacucggcc

SEQ ID NO: 1600881 - RNA, 19 nt, Artificial Sequence
  Description of Artificial Sequence: Synthetic oligonucleotide
  Sense strand starting at position 2761 of SEQ ID NO: 1560451
acuugauuguccugggcuu

SEQ ID NO: 1600882 - RNA, 19 nt, Artificial Sequence
  Description of Artificial Sequence: Synthetic oligonucleotide
  Antisense strand to SEQ ID NO: 1600881
aagcccaggacaaucaagu

SEQ ID NO: 1600883 - RNA, 19 nt, Artificial Sequence
  Description of Artificial Sequence: Synthetic oligonucleotide
  Sense strand starting at position 2781 of SEQ ID NO: 1560451
gcucucugcacuuggaaga

SEQ ID NO: 1600884 - RNA, 19 nt, Artificial Sequence
  Description of Artificial Sequence: Synthetic oligonucleotide
  Antisense strand to SEQ ID NO: 1600883
ucuuccaagugcagagagc

SEQ ID NO: 1600885 - RNA, 19 nt, Artificial Sequence
  Description of Artificial Sequence: Synthetic oligonucleotide
  Sense strand starting at position 2806 of SEQ ID NO: 1560451
ccauaaugauugugaggac

SEQ ID NO: 1600886 - RNA, 19 nt, Artificial Sequence
  Description of Artificial Sequence: Synthetic oligonucleotide
  Antisense strand to SEQ ID NO: 1600885
guccucacaaucauuaugg

SEQ ID NO: 1600887 - RNA, 19 nt, Artificial Sequence
  Description of Artificial Sequence: Synthetic oligonucleotide
  Sense strand starting at position 2809 of SEQ ID NO: 1560451
uaaugauugugaggacccu

SEQ ID NO: 1600888 - RNA, 19 nt, Artificial Sequence
  Description of Artificial Sequence: Synthetic oligonucleotide
  Antisense strand to SEQ ID NO: 1600887
aggguccucacaaucauua

SEQ ID NO: 1600889 - RNA, 19 nt, Artificial Sequence
  Description of Artificial Sequence: Synthetic oligonucleotide
  Sense strand starting at position 2815 of SEQ ID NO: 1560451
uugugaggacccugcucua

SEQ ID NO: 1600890 - RNA, 19 nt, Artificial Sequence
  Description of Artificial Sequence: Synthetic oligonucleotide
  Antisense strand to SEQ ID NO: 1600889
uagagcaggguccucacaa

SEQ ID NO: 1600891 - RNA, 19 nt, Artificial Sequence
  Description of Artificial Sequence: Synthetic oligonucleotide
  Sense strand starting at position 2858 of SEQ ID NO: 1560451
caggaaguauuagaagcua

SEQ ID NO: 1600892 - RNA, 19 nt, Artificial Sequence
  Description of Artificial Sequence: Synthetic oligonucleotide
  Antisense strand to SEQ ID NO: 1600891
uagcuucuaauacuuccug

SEQ ID NO: 1600893 - RNA, 19 nt, Artificial Sequence
  Description of Artificial Sequence: Synthetic oligonucleotide
  Sense strand starting at position 2915 of SEQ ID NO: 1560451
ggcacuuugagaggacgaa

SEQ ID NO: 1600894 - RNA, 19 nt, Artificial Sequence
  Description of Artificial Sequence: Synthetic oligonucleotide
  Antisense strand to SEQ ID NO: 1600893
uucguccucucaaagugcc

SEQ ID NO: 1600895 - RNA, 19 nt, Artificial Sequence
  Description of Artificial Sequence: Synthetic oligonucleotide
  Sense strand starting at position 3688 of SEQ ID NO: 1560451
aagugaguuuaaccagaca

SEQ ID NO: 1600896 - RNA, 19 nt, Artificial Sequence
  Description of Artificial Sequence: Synthetic oligonucleotide
  Antisense strand to SEQ ID NO: 1600895
ugucugguuaaacucacuu

SEQ ID NO: 1600897 - RNA, 19 nt, Artificial Sequence
  Description of Artificial Sequence: Synthetic oligonucleotide
  Sense strand starting at position 3721 of SEQ ID NO: 1560451
agaaguuggacaugauagu

SEQ ID NO: 1600898 - RNA, 19 nt, Artificial Sequence
  Description of Artificial Sequence: Synthetic oligonucleotide
  Antisense strand to SEQ ID NO: 1600897
acuaucauguccaacuucu

SEQ ID NO: 1600899 - RNA, 19 nt, Artificial Sequence
  Description of Artificial Sequence: Synthetic oligonucleotide
  Sense strand starting at position 3788 of SEQ ID NO: 1560451
agcgucugauccucacuua

SEQ ID NO: 1600900 - RNA, 19 nt, Artificial Sequence
  Description of Artificial Sequence: Synthetic oligonucleotide
  Antisense strand to SEQ ID NO: 1600899
uaagugaggaucagacgcu

SEQ ID NO: 1600901 - RNA, 19 nt, Artificial Sequence
  Description of Artificial Sequence: Synthetic oligonucleotide
  Sense strand starting at position 3789 of SEQ ID NO: 1560451
gcgucugauccucacuuaa

SEQ ID NO: 1600902 - RNA, 19 nt, Artificial Sequence
  Description of Artificial Sequence: Synthetic oligonucleotide
  Antisense strand to SEQ ID NO: 1600901
uuaagugaggaucagacgc

SEQ ID NO: 1600903 - RNA, 19 nt, Artificial Sequence
  Description of Artificial Sequence: Synthetic oligonucleotide
  Sense strand starting at position 3893 of SEQ ID NO: 1560451
gcgccuauacuccuagcua

SEQ ID NO: 1600904 - RNA, 19 nt, Artificial Sequence
  Description of Artificial Sequence: Synthetic oligonucleotide
  Antisense strand to SEQ ID NO: 1600903
uagcuaggaguauaggcgc

SEQ ID NO: 1600905 - RNA, 19 nt, Artificial Sequence
  Description of Artificial Sequence: Synthetic oligonucleotide
  Sense strand starting at position 18 of SEQ ID NO: 1560452
ucccucugugcguaucaga

SEQ ID NO: 1600906 - RNA, 19 nt, Artificial Sequence
  Description of Artificial Sequence: Synthetic oligonucleotide
  Antisense strand to SEQ ID NO: 1600905
ucugauacgcacagaggga

SEQ ID NO: 1600907 - RNA, 19 nt, Artificial Sequence
  Description of Artificial Sequence: Synthetic oligonucleotide
  Sense strand starting at position 25 of SEQ ID NO: 1560452
gugcguaucagagauggaa

SEQ ID NO: 1600908 - RNA, 19 nt, Artificial Sequence
  Description of Artificial Sequence: Synthetic oligonucleotide
  Antisense strand to SEQ ID NO: 1600907
uuccaucucugauacgcac

SEQ ID NO: 1600909 - RNA, 19 nt, Artificial Sequence
  Description of Artificial Sequence: Synthetic oligonucleotide
  Sense strand starting at position 27 of SEQ ID NO: 1560452
gcguaucagagauggaaag

SEQ ID NO: 1600910 - RNA, 19 nt, Artificial Sequence
  Description of Artificial Sequence: Synthetic oligonucleotide
  Antisense strand to SEQ ID NO: 1600909
cuuuccaucucugauacgc

SEQ ID NO: 1600911 - RNA, 19 nt, Artificial Sequence
  Description of Artificial Sequence: Synthetic oligonucleotide
  Sense strand starting at position 37 of SEQ ID NO: 1560452
gauggaaagcaugggcuua

SEQ ID NO: 1600912 - RNA, 19 nt, Artificial Sequence
  Description of Artificial Sequence: Synthetic oligonucleotide
  Antisense strand to SEQ ID NO: 1600911
uaagcccaugcuuuccauc

SEQ ID NO: 1600913 - RNA, 19 nt, Artificial Sequence
  Description of Artificial Sequence: Synthetic oligonucleotide
  Sense strand starting at position 72 of SEQ ID NO: 1560452
uacaguaaccuguggauua

SEQ ID NO: 1600914 - RNA, 19 nt, Artificial Sequence
  Description of Artificial Sequence: Synthetic oligonucleotide
  Antisense strand to SEQ ID NO: 1600913
uaauccacagguuacugua

SEQ ID NO: 1600915 - RNA, 19 nt, Artificial Sequence
  Description of Artificial Sequence: Synthetic oligonucleotide
  Sense strand starting at position 73 of SEQ ID NO: 1560452
acaguaaccuguggauuac

SEQ ID NO: 1600916 - RNA, 19 nt, Artificial Sequence
  Description of Artificial Sequence: Synthetic oligonucleotide
  Antisense strand to SEQ ID NO: 1600915
guaauccacagguuacugu

SEQ ID NO: 1600917 - RNA, 19 nt, Artificial Sequence
  Description of Artificial Sequence: Synthetic oligonucleotide
  Sense strand starting at position 74 of SEQ ID NO: 1560452
caguaaccuguggauuacu

SEQ ID NO: 1600918 - RNA, 19 nt, Artificial Sequence
  Description of Artificial Sequence: Synthetic oligonucleotide
  Antisense strand to SEQ ID NO: 1600917
aguaauccacagguuacug

SEQ ID NO: 1600919 - RNA, 19 nt, Artificial Sequence
  Description of Artificial Sequence: Synthetic oligonucleotide
  Sense strand starting at position 107 of SEQ ID NO: 1560452
guguggugugugcaugcaa

SEQ ID NO: 1600920 - RNA, 19 nt, Artificial Sequence
  Description of Artificial Sequence: Synthetic oligonucleotide
  Antisense strand to SEQ ID NO: 1600919
uugcaugcacacaccacac

SEQ ID NO: 1600921 - RNA, 19 nt, Artificial Sequence
  Description of Artificial Sequence: Synthetic oligonucleotide
  Sense strand starting at position 108 of SEQ ID NO: 1560452
uguggugugugcaugcaau

SEQ ID NO: 1600922 - RNA, 19 nt, Artificial Sequence
  Description of Artificial Sequence: Synthetic oligonucleotide
  Antisense strand to SEQ ID NO: 1600921
auugcaugcacacaccaca

SEQ ID NO: 1600923 - RNA, 19 nt, Artificial Sequence
  Description of Artificial Sequence: Synthetic oligonucleotide
  Sense strand starting at position 162 of SEQ ID NO: 1560452
aggauuaaauaacagugau

SEQ ID NO: 1600924 - RNA, 19 nt, Artificial Sequence
  Description of Artificial Sequence: Synthetic oligonucleotide
  Antisense strand to SEQ ID NO: 1600923
aucacuguuauuuaauccu

SEQ ID NO: 1600925 - RNA, 19 nt, Artificial Sequence
  Description of Artificial Sequence: Synthetic oligonucleotide
  Sense strand starting at position 176 of SEQ ID NO: 1560452
gugauacuguaauaaugau

SEQ ID NO: 1600926 - RNA, 19 nt, Artificial Sequence
  Description of Artificial Sequence: Synthetic oligonucleotide
  Antisense strand to SEQ ID NO: 1600925
aucauuauuacaguaucac

SEQ ID NO: 1600927 - RNA, 19 nt, Artificial Sequence
  Description of Artificial Sequence: Synthetic oligonucleotide
  Sense strand starting at position 182 of SEQ ID NO: 1560452
cuguaauaaugauagcauu

SEQ ID NO: 1600928 - RNA, 19 nt, Artificial Sequence
  Description of Artificial Sequence: Synthetic oligonucleotide
  Antisense strand to SEQ ID NO: 1600927
aaugcuaucauuauuacag

SEQ ID NO: 1600929 - RNA, 19 nt, Artificial Sequence
  Description of Artificial Sequence: Synthetic oligonucleotide
  Sense strand starting at position 193 of SEQ ID NO: 1560452
auagcauugguguguugaa

SEQ ID NO: 1600930 - RNA, 19 nt, Artificial Sequence
  Description of Artificial Sequence: Synthetic oligonucleotide
  Antisense strand to SEQ ID NO: 1600929
uucaacacaccaaugcuau

SEQ ID NO: 1600931 - RNA, 19 nt, Artificial Sequence
  Description of Artificial Sequence: Synthetic oligonucleotide
  Sense strand starting at position 194 of SEQ ID NO: 1560452
uagcauugguguguugaac

SEQ ID NO: 1600932 - RNA, 19 nt, Artificial Sequence
  Description of Artificial Sequence: Synthetic oligonucleotide
  Antisense strand to SEQ ID NO: 1600931
guucaacacaccaaugcua

SEQ ID NO: 1600933 - RNA, 19 nt, Artificial Sequence
  Description of Artificial Sequence: Synthetic oligonucleotide
  Sense strand starting at position 296 of SEQ ID NO: 1560452
aacugagauuuggagcaau

SEQ ID NO: 1600934 - RNA, 19 nt, Artificial Sequence
  Description of Artificial Sequence: Synthetic oligonucleotide
  Antisense strand to SEQ ID NO: 1600933
auugcuccaaaucucaguu

SEQ ID NO: 1600935 - RNA, 19 nt, Artificial Sequence
  Description of Artificial Sequence: Synthetic oligonucleotide
  Sense strand starting at position 435 of SEQ ID NO: 1560452
ggcccaaagaggugaugaa

SEQ ID NO: 1600936 - RNA, 19 nt, Artificial Sequence
  Description of Artificial Sequence: Synthetic oligonucleotide
  Antisense strand to SEQ ID NO: 1600935
uucaucaccucuuugggcc

SEQ ID NO: 1600937 - RNA, 19 nt, Artificial Sequence
  Description of Artificial Sequence: Synthetic oligonucleotide
  Sense strand starting at position 604 of SEQ ID NO: 1560452
guggaaagggagugugaua

SEQ ID NO: 1600938 - RNA, 19 nt, Artificial Sequence
  Description of Artificial Sequence: Synthetic oligonucleotide
  Antisense strand to SEQ ID NO: 1600937
uaucacacucccuuuccac

SEQ ID NO: 1600939 - RNA, 19 nt, Artificial Sequence
  Description of Artificial Sequence: Synthetic oligonucleotide
  Sense strand starting at position 709 of SEQ ID NO: 1560452
gccugaucuuggcucauua

SEQ ID NO: 1600940 - RNA, 19 nt, Artificial Sequence
  Description of Artificial Sequence: Synthetic oligonucleotide
  Antisense strand to SEQ ID NO: 1600939
uaaugagccaagaucaggc

SEQ ID NO: 1600941 - RNA, 19 nt, Artificial Sequence
  Description of Artificial Sequence: Synthetic oligonucleotide
  Sense strand starting at position 711 of SEQ ID NO: 1560452
cugaucuuggcucauuaca

SEQ ID NO: 1600942 - RNA, 19 nt, Artificial Sequence
  Description of Artificial Sequence: Synthetic oligonucleotide
  Antisense strand to SEQ ID NO: 1600941
uguaaugagccaagaucag

SEQ ID NO: 1600943 - RNA, 19 nt, Artificial Sequence
  Description of Artificial Sequence: Synthetic oligonucleotide
  Sense strand starting at position 818 of SEQ ID NO: 1560452
gcuuacuucuaguauagau

SEQ ID NO: 1600944 - RNA, 19 nt, Artificial Sequence
  Description of Artificial Sequence: Synthetic oligonucleotide
  Antisense strand to SEQ ID NO: 1600943
aucuauacuagaaguaagc

SEQ ID NO: 1600945 - RNA, 19 nt, Artificial Sequence
  Description of Artificial Sequence: Synthetic oligonucleotide
  Sense strand starting at position 978 of SEQ ID NO: 1560452
ggcagucacugacacaauu

SEQ ID NO: 1600946 - RNA, 19 nt, Artificial Sequence
  Description of Artificial Sequence: Synthetic oligonucleotide
  Antisense strand to SEQ ID NO: 1600945
aauugugucagugacugcc

SEQ ID NO: 1600947 - RNA, 19 nt, Artificial Sequence
  Description of Artificial Sequence: Synthetic oligonucleotide
  Sense strand starting at position 1364 of SEQ ID NO: 1560452
cuucccugcccugaagaau

SEQ ID NO: 1600948 - RNA, 19 nt, Artificial Sequence
  Description of Artificial Sequence: Synthetic oligonucleotide
  Antisense strand to SEQ ID NO: 1600947
auucuucagggcagggaag

SEQ ID NO: 1600949 - RNA, 19 nt, Artificial Sequence
  Description of Artificial Sequence: Synthetic oligonucleotide
  Sense strand starting at position 1375 of SEQ ID NO: 1560452
ugaagaauuugccacccau

SEQ ID NO: 1600950 - RNA, 19 nt, Artificial Sequence
  Description of Artificial Sequence: Synthetic oligonucleotide
  Antisense strand to SEQ ID NO: 1600949
auggguggcaaauucuuca

SEQ ID NO: 1600951 - RNA, 19 nt, Artificial Sequence
  Description of Artificial Sequence: Synthetic oligonucleotide
  Sense strand starting at position 1658 of SEQ ID NO: 1560452
gccuguucucaaggacaug

SEQ ID NO: 1600952 - RNA, 19 nt, Artificial Sequence
  Description of Artificial Sequence: Synthetic oligonucleotide
  Antisense strand to SEQ ID NO: 1600951
cauguccuugagaacaggc

SEQ ID NO: 1600953 - RNA, 19 nt, Artificial Sequence
  Description of Artificial Sequence: Synthetic oligonucleotide
  Sense strand starting at position 1669 of SEQ ID NO: 1560452
aggacaugguaaucuggua

SEQ ID NO: 1600954 - RNA, 19 nt, Artificial Sequence
  Description of Artificial Sequence: Synthetic oligonucleotide
  Antisense strand to SEQ ID NO: 1600953
uaccagauuaccauguccu

SEQ ID NO: 1600955 - RNA, 19 nt, Artificial Sequence
  Description of Artificial Sequence: Synthetic oligonucleotide
  Sense strand starting at position 1705 of SEQ ID NO: 1560452
auccuaucuucuccgggaa

SEQ ID NO: 1600956 - RNA, 19 nt, Artificial Sequence
  Description of Artificial Sequence: Synthetic oligonucleotide
  Antisense strand to SEQ ID NO: 1600955
uucccggagaagauaggau

SEQ ID NO: 1600957 - RNA, 19 nt, Artificial Sequence
  Description of Artificial Sequence: Synthetic oligonucleotide
  Sense strand starting at position 1706 of SEQ ID NO: 1560452
uccuaucuucuccgggaau

SEQ ID NO: 1600958 - RNA, 19 nt, Artificial Sequence
  Description of Artificial Sequence: Synthetic oligonucleotide
  Antisense strand to SEQ ID NO: 1600957
auucccggagaagauagga

SEQ ID NO: 1600959 - RNA, 19 nt, Artificial Sequence
  Description of Artificial Sequence: Synthetic oligonucleotide
  Sense strand starting at position 1708 of SEQ ID NO: 1560452
cuaucuucuccgggaauac

SEQ ID NO: 1600960 - RNA, 19 nt, Artificial Sequence
  Description of Artificial Sequence: Synthetic oligonucleotide
  Antisense strand to SEQ ID NO: 1600959
guauucccggagaagauag

SEQ ID NO: 1600961 - RNA, 19 nt, Artificial Sequence
  Description of Artificial Sequence: Synthetic oligonucleotide
  Sense strand starting at position 2098 of SEQ ID NO: 1560452
gggauagaguuccuuguua

SEQ ID NO: 1600962 - RNA, 19 nt, Artificial Sequence
  Description of Artificial Sequence: Synthetic oligonucleotide
  Antisense strand to SEQ ID NO: 1600961
uaacaaggaacucuauccc

SEQ ID NO: 1600963 - RNA, 19 nt, Artificial Sequence
  Description of Artificial Sequence: Synthetic oligonucleotide
  Sense strand starting at position 2100 of SEQ ID NO: 1560452
gauagaguuccuuguuagg

SEQ ID NO: 1600964 - RNA, 19 nt, Artificial Sequence
  Description of Artificial Sequence: Synthetic oligonucleotide
  Antisense strand to SEQ ID NO: 1600963
ccuaacaaggaacucuauc

SEQ ID NO: 1600965 - RNA, 19 nt, Artificial Sequence
  Description of Artificial Sequence: Synthetic oligonucleotide
  Sense strand starting at position 2585 of SEQ ID NO: 1560452
ccagcuuguuucccuguua

SEQ ID NO: 1600966 - RNA, 19 nt, Artificial Sequence
  Description of Artificial Sequence: Synthetic oligonucleotide
  Antisense strand to SEQ ID NO: 1600965
uaacagggaaacaagcugg

SEQ ID NO: 1600967 - RNA, 19 nt, Artificial Sequence
  Description of Artificial Sequence: Synthetic oligonucleotide
  Sense strand starting at position 2590 of SEQ ID NO: 1560452
uuguuucccuguuauuuaa

SEQ ID NO: 1600968 - RNA, 19 nt, Artificial Sequence
  Description of Artificial Sequence: Synthetic oligonucleotide
  Antisense strand to SEQ ID NO: 1600967
uuaaauaacagggaaacaa

SEQ ID NO: 1600969 - RNA, 19 nt, Artificial Sequence
  Description of Artificial Sequence: Synthetic oligonucleotide
  Sense strand starting at position 2706 of SEQ ID NO: 1560452
acccaauguuuaggagacu

SEQ ID NO: 1600970 - RNA, 19 nt, Artificial Sequence
  Description of Artificial Sequence: Synthetic oligonucleotide
  Antisense strand to SEQ ID NO: 1600969
agucuccuaaacauugggu

SEQ ID NO: 1600971 - RNA, 19 nt, Artificial Sequence
  Description of Artificial Sequence: Synthetic oligonucleotide
  Sense strand starting at position 2732 of SEQ ID NO: 1560452
gaagcauacuauuagagga

SEQ ID NO: 1600972 - RNA, 19 nt, Artificial Sequence
  Description of Artificial Sequence: Synthetic oligonucleotide
  Antisense strand to SEQ ID NO: 1600971
uccucuaauaguaugcuuc

SEQ ID NO: 1600973 - RNA, 19 nt, Artificial Sequence
  Description of Artificial Sequence: Synthetic oligonucleotide
  Sense strand starting at position 2748 of SEQ ID NO: 1560452
ggagaucucuccucucuug

SEQ ID NO: 1600974 - RNA, 19 nt, Artificial Sequence
  Description of Artificial Sequence: Synthetic oligonucleotide
  Antisense strand to SEQ ID NO: 1600973
caagagaggagagaucucc

SEQ ID NO: 1600975 - RNA, 19 nt, Artificial Sequence
  Description of Artificial Sequence: Synthetic oligonucleotide
  Sense strand starting at position 2863 of SEQ ID NO: 1560452
ggcaaagaauacccucaau

SEQ ID NO: 1600976 - RNA, 19 nt, Artificial Sequence
  Description of Artificial Sequence: Synthetic oligonucleotide
  Antisense strand to SEQ ID NO: 1600975
auugaggguauucuuugcc

SEQ ID NO: 1600977 - RNA, 19 nt, Artificial Sequence
  Description of Artificial Sequence: Synthetic oligonucleotide
  Sense strand starting at position 2909 of SEQ ID NO: 1560452
caauauguggagggcgaau

SEQ ID NO: 1600978 - RNA, 19 nt, Artificial Sequence
  Description of Artificial Sequence: Synthetic oligonucleotide
  Antisense strand to SEQ ID NO: 1600977
auucgcccuccacauauug

SEQ ID NO: 1600979 - RNA, 19 nt, Artificial Sequence
  Description of Artificial Sequence: Synthetic oligonucleotide
  Sense strand starting at position 3012 of SEQ ID NO: 1560452
guaaaugagccuuggguag

SEQ ID NO: 1600980 - RNA, 19 nt, Artificial Sequence
  Description of Artificial Sequence: Synthetic oligonucleotide
  Antisense strand to SEQ ID NO: 1600979
cuacccaaggcucauuuac

SEQ ID NO: 1600981 - RNA, 19 nt, Artificial Sequence
  Description of Artificial Sequence: Synthetic oligonucleotide
  Sense strand starting at position 3433 of SEQ ID NO: 1560452
aacgguaugucacuccuga

SEQ ID NO: 1600982 - RNA, 19 nt, Artificial Sequence
  Description of Artificial Sequence: Synthetic oligonucleotide
  Antisense strand to SEQ ID NO: 1600981
ucaggagugacauaccguu

SEQ ID NO: 1600983 - RNA, 19 nt, Artificial Sequence
  Description of Artificial Sequence: Synthetic oligonucleotide
  Sense strand starting at position 3539 of SEQ ID NO: 1560452
ggacuuccucggcagugua

SEQ ID NO: 1600984 - RNA, 19 nt, Artificial Sequence
  Description of Artificial Sequence: Synthetic oligonucleotide
  Antisense strand to SEQ ID NO: 1600983
uacacugccgaggaagucc

SEQ ID NO: 1600985 - RNA, 19 nt, Artificial Sequence
  Description of Artificial Sequence: Synthetic oligonucleotide
  Sense strand starting at position 69 of SEQ ID NO: 1560453
gggucuuccugucuaguga

SEQ ID NO: 1600986 - RNA, 19 nt, Artificial Sequence
  Description of Artificial Sequence: Synthetic oligonucleotide
  Antisense strand to SEQ ID NO: 1600985
ucacuagacaggaagaccc

SEQ ID NO: 1600987 - RNA, 19 nt, Artificial Sequence
  Description of Artificial Sequence: Synthetic oligonucleotide
  Sense strand starting at position 103 of SEQ ID NO: 1560453
uuuguauugugagucccau

SEQ ID NO: 1600988 - RNA, 19 nt, Artificial Sequence
  Description of Artificial Sequence: Synthetic oligonucleotide
  Antisense strand to SEQ ID NO: 1600987
augggacucacaauacaaa

SEQ ID NO: 1600989 - RNA, 19 nt, Artificial Sequence
  Description of Artificial Sequence: Synthetic oligonucleotide
  Sense strand starting at position 109 of SEQ ID NO: 1560453
uugugagucccauaaaggu

SEQ ID NO: 1600990 - RNA, 19 nt, Artificial Sequence
  Description of Artificial Sequence: Synthetic oligonucleotide
  Antisense strand to SEQ ID NO: 1600989
accuuuaugggacucacaa

SEQ ID NO: 1600991 - RNA, 19 nt, Artificial Sequence
  Description of Artificial Sequence: Synthetic oligonucleotide
  Sense strand starting at position 380 of SEQ ID NO: 1560453
gggcaucucuagucaguua

SEQ ID NO: 1600992 - RNA, 19 nt, Artificial Sequence
  Description of Artificial Sequence: Synthetic oligonucleotide
  Antisense strand to SEQ ID NO: 1600991
uaacugacuagagaugccc

SEQ ID NO: 1600993 - RNA, 19 nt, Artificial Sequence
  Description of Artificial Sequence: Synthetic oligonucleotide
  Sense strand starting at position 392 of SEQ ID NO: 1560453
ucaguuauggucugaauua

SEQ ID NO: 1600994 - RNA, 19 nt, Artificial Sequence
  Description of Artificial Sequence: Synthetic oligonucleotide
  Antisense strand to SEQ ID NO: 1600993
uaauucagaccauaacuga

SEQ ID NO: 1600995 - RNA, 19 nt, Artificial Sequence
  Description of Artificial Sequence: Synthetic oligonucleotide
  Sense strand starting at position 565 of SEQ ID NO: 1560453
guggcagaauucuaaggaa

SEQ ID NO: 1600996 - RNA, 19 nt, Artificial Sequence
  Description of Artificial Sequence: Synthetic oligonucleotide
  Antisense strand to SEQ ID NO: 1600995
uuccuuagaauucugccac

SEQ ID NO: 1600997 - RNA, 19 nt, Artificial Sequence
  Description of Artificial Sequence: Synthetic oligonucleotide
  Sense strand starting at position 584 of SEQ ID NO: 1560453
guaggagucucccaaggga

SEQ ID NO: 1600998 - RNA, 19 nt, Artificial Sequence
  Description of Artificial Sequence: Synthetic oligonucleotide
  Antisense strand to SEQ ID NO: 1600997
ucccuugggagacuccuac

SEQ ID NO: 1600999 - RNA, 19 nt, Artificial Sequence
  Description of Artificial Sequence: Synthetic oligonucleotide
  Sense strand starting at position 873 of SEQ ID NO: 1560453
gacagagccucccagagaa

SEQ ID NO: 1601000 - RNA, 19 nt, Artificial Sequence
  Description of Artificial Sequence: Synthetic oligonucleotide
  Antisense strand to SEQ ID NO: 1600999
uucucugggaggcucuguc

SEQ ID NO: 1601001 - RNA, 19 nt, Artificial Sequence
  Description of Artificial Sequence: Synthetic oligonucleotide
  Sense strand starting at position 1003 of SEQ ID NO: 1560453
augcaauucuaacugggua

SEQ ID NO: 1601002 - RNA, 19 nt, Artificial Sequence
  Description of Artificial Sequence: Synthetic oligonucleotide
  Antisense strand to SEQ ID NO: 1601001
uacccaguuagaauugcau

SEQ ID NO: 1601003 - RNA, 19 nt, Artificial Sequence
  Description of Artificial Sequence: Synthetic oligonucleotide
  Sense strand starting at position 1005 of SEQ ID NO: 1560453
gcaauucuaacuggguaga

SEQ ID NO: 1601004 - RNA, 19 nt, Artificial Sequence
  Description of Artificial Sequence: Synthetic oligonucleotide
  Antisense strand to SEQ ID NO: 1601003
ucuacccaguuagaauugc

SEQ ID NO: 1601005 - RNA, 19 nt, Artificial Sequence
  Description of Artificial Sequence: Synthetic oligonucleotide
  Sense strand starting at position 1031 of SEQ ID NO: 1560453
ggagaugccuacuaagaga

SEQ ID NO: 1601006 - RNA, 19 nt, Artificial Sequence
  Description of Artificial Sequence: Synthetic oligonucleotide
  Antisense strand to SEQ ID NO: 1601005
ucucuuaguaggcaucucc

SEQ ID NO: 1601007 - RNA, 19 nt, Artificial Sequence
  Description of Artificial Sequence: Synthetic oligonucleotide
  Sense strand starting at position 1046 of SEQ ID NO: 1560453
gagaacaagugauguagaa

SEQ ID NO: 1601008 - RNA, 19 nt, Artificial Sequence
  Description of Artificial Sequence: Synthetic oligonucleotide
  Antisense strand to SEQ ID NO: 1601007
uucuacaucacuuguucuc

SEQ ID NO: 1601009 - RNA, 19 nt, Artificial Sequence
  Description of Artificial Sequence: Synthetic oligonucleotide
  Sense strand starting at position 1124 of SEQ ID NO: 1560453
gcagccucccaguggauau

SEQ ID NO: 1601010 - RNA, 19 nt, Artificial Sequence
  Description of Artificial Sequence: Synthetic oligonucleotide
  Antisense strand to SEQ ID NO: 1601009
auauccacugggaggcugc

SEQ ID NO: 1601011 - RNA, 19 nt, Artificial Sequence
  Description of Artificial Sequence: Synthetic oligonucleotide
  Sense strand starting at position 1128 of SEQ ID NO: 1560453
ccucccaguggauauauua

SEQ ID NO: 1601012 - RNA, 19 nt, Artificial Sequence
  Description of Artificial Sequence: Synthetic oligonucleotide
  Antisense strand to SEQ ID NO: 1601011
uaauauauccacugggagg

SEQ ID NO: 1601013 - RNA, 19 nt, Artificial Sequence
  Description of Artificial Sequence: Synthetic oligonucleotide
  Sense strand starting at position 1135 of SEQ ID NO: 1560453
guggauauauuaugagaga

SEQ ID NO: 1601014 - RNA, 19 nt, Artificial Sequence
  Description of Artificial Sequence: Synthetic oligonucleotide
  Antisense strand to SEQ ID NO: 1601013
ucucucauaauauauccac

SEQ ID NO: 1601015 - RNA, 19 nt, Artificial Sequence
  Description of Artificial Sequence: Synthetic oligonucleotide
  Sense strand starting at position 1136 of SEQ ID NO: 1560453
uggauauauuaugagagac

SEQ ID NO: 1601016 - RNA, 19 nt, Artificial Sequence
  Description of Artificial Sequence: Synthetic oligonucleotide
  Antisense strand to SEQ ID NO: 1601015
gucucucauaauauaucca

SEQ ID NO: 1601017 - RNA, 19 nt, Artificial Sequence
  Description of Artificial Sequence: Synthetic oligonucleotide
  Sense strand starting at position 1138 of SEQ ID NO: 1560453
gauauauuaugagagacca

SEQ ID NO: 1601018 - RNA, 19 nt, Artificial Sequence
  Description of Artificial Sequence: Synthetic oligonucleotide
  Antisense strand to SEQ ID NO: 1601017
uggucucucauaauauauc

SEQ ID NO: 1601019 - RNA, 19 nt, Artificial Sequence
  Description of Artificial Sequence: Synthetic oligonucleotide
  Sense strand starting at position 1158 of SEQ ID NO: 1560453
ggccuauccaucugggaga

SEQ ID NO: 1601020 - RNA, 19 nt, Artificial Sequence
  Description of Artificial Sequence: Synthetic oligonucleotide
  Antisense strand to SEQ ID NO: 1601019
ucucccagauggauaggcc

SEQ ID NO: 1601021 - RNA, 19 nt, Artificial Sequence
  Description of Artificial Sequence: Synthetic oligonucleotide
  Sense strand starting at position 1171 of SEQ ID NO: 1560453
gggagagucuccuagagga

SEQ ID NO: 1601022 - RNA, 19 nt, Artificial Sequence
  Description of Artificial Sequence: Synthetic oligonucleotide
  Antisense strand to SEQ ID NO: 1601021
uccucuaggagacucuccc

SEQ ID NO: 1601023 - RNA, 19 nt, Artificial Sequence
  Description of Artificial Sequence: Synthetic oligonucleotide
  Sense strand starting at position 1195 of SEQ ID NO: 1560453
ucguaagaguugaaggguu

SEQ ID NO: 1601024 - RNA, 19 nt, Artificial Sequence
  Description of Artificial Sequence: Synthetic oligonucleotide
  Antisense strand to SEQ ID NO: 1601023
aacccuucaacucuuacga

SEQ ID NO: 1601025 - RNA, 19 nt, Artificial Sequence
  Description of Artificial Sequence: Synthetic oligonucleotide
  Sense strand starting at position 1271 of SEQ ID NO: 1560453
gggccucacaagugauaga

SEQ ID NO: 1601026 - RNA, 19 nt, Artificial Sequence
  Description of Artificial Sequence: Synthetic oligonucleotide
  Antisense strand to SEQ ID NO: 1601025
ucuaucacuugugaggccc

SEQ ID NO: 1601027 - RNA, 19 nt, Artificial Sequence
  Description of Artificial Sequence: Synthetic oligonucleotide
  Sense strand starting at position 1274 of SEQ ID NO: 1560453
ccucacaagugauagacuu

SEQ ID NO: 1601028 - RNA, 19 nt, Artificial Sequence
  Description of Artificial Sequence: Synthetic oligonucleotide
  Antisense strand to SEQ ID NO: 1601027
aagucuaucacuugugagg

SEQ ID NO: 1601029 - RNA, 19 nt, Artificial Sequence
  Description of Artificial Sequence: Synthetic oligonucleotide
  Sense strand starting at position 1990 of SEQ ID NO: 1560453
ccugacuuaucugcaguuu

SEQ ID NO: 1601030 - RNA, 19 nt, Artificial Sequence
  Description of Artificial Sequence: Synthetic oligonucleotide
  Antisense strand to SEQ ID NO: 1601029
aaacugcagauaagucagg

SEQ ID NO: 1601031 - RNA, 19 nt, Artificial Sequence
  Description of Artificial Sequence: Synthetic oligonucleotide
  Sense strand starting at position 1991 of SEQ ID NO: 1560453
cugacuuaucugcaguuua

SEQ ID NO: 1601032 - RNA, 19 nt, Artificial Sequence
  Description of Artificial Sequence: Synthetic oligonucleotide
  Antisense strand to SEQ ID NO: 1601031
uaaacugcagauaagucag

SEQ ID NO: 1601033 - RNA, 19 nt, Artificial Sequence
  Description of Artificial Sequence: Synthetic oligonucleotide
  Sense strand starting at position 2136 of SEQ ID NO: 1560453
cccugcaguuucccagaau

SEQ ID NO: 1601034 - RNA, 19 nt, Artificial Sequence
  Description of Artificial Sequence: Synthetic oligonucleotide
  Antisense strand to SEQ ID NO: 1601033
auucugggaaacugcaggg

SEQ ID NO: 1601035 - RNA, 19 nt, Artificial Sequence
  Description of Artificial Sequence: Synthetic oligonucleotide
  Sense strand starting at position 2139 of SEQ ID NO: 1560453
ugcaguuucccagaaucac

SEQ ID NO: 1601036 - RNA, 19 nt, Artificial Sequence
  Description of Artificial Sequence: Synthetic oligonucleotide
  Antisense strand to SEQ ID NO: 1601035
gugauucugggaaacugca

SEQ ID NO: 1601037 - RNA, 19 nt, Artificial Sequence
  Description of Artificial Sequence: Synthetic oligonucleotide
  Sense strand starting at position 2181 of SEQ ID NO: 1560453
ugagccguccugugaaucu

SEQ ID NO: 1601038 - RNA, 19 nt, Artificial Sequence
  Description of Artificial Sequence: Synthetic oligonucleotide
  Antisense strand to SEQ ID NO: 1601037
agauucacaggacggcuca

SEQ ID NO: 1601039 - RNA, 19 nt, Artificial Sequence
  Description of Artificial Sequence: Synthetic oligonucleotide
  Sense strand starting at position 2190 of SEQ ID NO: 1560453
cugugaaucuuggaacaua

SEQ ID NO: 1601040 - RNA, 19 nt, Artificial Sequence
  Description of Artificial Sequence: Synthetic oligonucleotide
  Antisense strand to SEQ ID NO: 1601039
uauguuccaagauucacag

SEQ ID NO: 1601041 - RNA, 19 nt, Artificial Sequence
  Description of Artificial Sequence: Synthetic oligonucleotide
  Sense strand starting at position 2209 of SEQ ID NO: 1560453
gaucucaaagucuaacgau

SEQ ID NO: 1601042 - RNA, 19 nt, Artificial Sequence
  Description of Artificial Sequence: Synthetic oligonucleotide
  Antisense strand to SEQ ID NO: 1601041
aucguuagacuuugagauc

SEQ ID NO: 1601043 - RNA, 19 nt, Artificial Sequence
  Description of Artificial Sequence: Synthetic oligonucleotide
  Sense strand starting at position 2549 of SEQ ID NO: 1560453
agggaagccugccuuuaaa

SEQ ID NO: 1601044 - RNA, 19 nt, Artificial Sequence
  Description of Artificial Sequence: Synthetic oligonucleotide
  Antisense strand to SEQ ID NO: 1601043
uuuaaaggcaggcuucccu

SEQ ID NO: 1601045 - RNA, 19 nt, Artificial Sequence
  Description of Artificial Sequence: Synthetic oligonucleotide
  Sense strand starting at position 2559 of SEQ ID NO: 1560453
gccuuuaaacaauggucua

SEQ ID NO: 1601046 - RNA, 19 nt, Artificial Sequence
  Description of Artificial Sequence: Synthetic oligonucleotide
  Antisense strand to SEQ ID NO: 1601045
uagaccauuguuuaaaggc

SEQ ID NO: 1601047 - RNA, 19 nt, Artificial Sequence
  Description of Artificial Sequence: Synthetic oligonucleotide
  Sense strand starting at position 2772 of SEQ ID NO: 1560453
gaauauggcucacugcaga

SEQ ID NO: 1601048 - RNA, 19 nt, Artificial Sequence
  Description of Artificial Sequence: Synthetic oligonucleotide
  Antisense strand to SEQ ID NO: 1601047
ucugcagugagccauauuc

SEQ ID NO: 1601049 - RNA, 19 nt, Artificial Sequence
  Description of Artificial Sequence: Synthetic oligonucleotide
  Sense strand starting at position 2791 of SEQ ID NO: 1560453
cucaguauccuaggcuaaa

SEQ ID NO: 1601050 - RNA, 19 nt, Artificial Sequence
  Description of Artificial Sequence: Synthetic oligonucleotide
  Antisense strand to SEQ ID NO: 1601049
uuuagccuaggauacugag

SEQ ID NO: 1601051 - RNA, 19 nt, Artificial Sequence
  Description of Artificial Sequence: Synthetic oligonucleotide
  Sense strand starting at position 2792 of SEQ ID NO: 1560453
ucaguauccuaggcuaaag

SEQ ID NO: 1601052 - RNA, 19 nt, Artificial Sequence
  Description of Artificial Sequence: Synthetic oligonucleotide
  Antisense strand to SEQ ID NO: 1601051
cuuuagccuaggauacuga

SEQ ID NO: 1601053 - RNA, 19 nt, Artificial Sequence
  Description of Artificial Sequence: Synthetic oligonucleotide
  Sense strand starting at position 3028 of SEQ ID NO: 1560453
gccggaagcggcuauaauu

SEQ ID NO: 1601054 - RNA, 19 nt, Artificial Sequence
  Description of Artificial Sequence: Synthetic oligonucleotide
  Antisense strand to SEQ ID NO: 1601053
aauuauagccgcuuccggc

SEQ ID NO: 1601055 - RNA, 19 nt, Artificial Sequence
  Description of Artificial Sequence: Synthetic oligonucleotide
  Sense strand starting at position 3037 of SEQ ID NO: 1560453
ggcuauaauuugggagggu

SEQ ID NO: 1601056 - RNA, 19 nt, Artificial Sequence
  Description of Artificial Sequence: Synthetic oligonucleotide
  Antisense strand to SEQ ID NO: 1601055
acccucccaaauuauagcc

SEQ ID NO: 1601057 - RNA, 19 nt, Artificial Sequence
  Description of Artificial Sequence: Synthetic oligonucleotide
  Sense strand starting at position 3561 of SEQ ID NO: 1560453
ucuaguguaguauauggua

SEQ ID NO: 1601058 - RNA, 19 nt, Artificial Sequence
  Description of Artificial Sequence: Synthetic oligonucleotide
  Antisense strand to SEQ ID NO: 1601057
uaccauauacuacacuaga

SEQ ID NO: 1601059 - RNA, 19 nt, Artificial Sequence
  Description of Artificial Sequence: Synthetic oligonucleotide
  Sense strand starting at position 3623 of SEQ ID NO: 1560453
guaauaggcagcugucauu

SEQ ID NO: 1601060 - RNA, 19 nt, Artificial Sequence
  Description of Artificial Sequence: Synthetic oligonucleotide
  Antisense strand to SEQ ID NO: 1601059
aaugacagcugccuauuac

SEQ ID NO: 1601061 - RNA, 19 nt, Artificial Sequence
  Description of Artificial Sequence: Synthetic oligonucleotide
  Sense strand starting at position 3630 of SEQ ID NO: 1560453
gcagcugucauuugcuaag

SEQ ID NO: 1601062 - RNA, 19 nt, Artificial Sequence
  Description of Artificial Sequence: Synthetic oligonucleotide
  Antisense strand to SEQ ID NO: 1601061
cuuagcaaaugacagcugc

SEQ ID NO: 1601063 - RNA, 19 nt, Artificial Sequence
  Description of Artificial Sequence: Synthetic oligonucleotide
  Sense strand starting at position 3632 of SEQ ID NO: 1560453
agcugucauuugcuaagca

SEQ ID NO: 1601064 - RNA, 19 nt, Artificial Sequence
  Description of Artificial Sequence: Synthetic oligonucleotide
  Antisense strand to SEQ ID NO: 1601063
ugcuuagcaaaugacagcu

SEQ ID NO: 1601065 - RNA, 19 nt, Artificial Sequence
  Description of Artificial Sequence: Synthetic oligonucleotide
  Sense strand starting at position 34 of SEQ ID NO: 1560454
cuucccugcccugaagaau

SEQ ID NO: 1601066 - RNA, 19 nt, Artificial Sequence
  Description of Artificial Sequence: Synthetic oligonucleotide
  Antisense strand to SEQ ID NO: 1601065
auucuucagggcagggaag

SEQ ID NO: 1601067 - RNA, 19 nt, Artificial Sequence
  Description of Artificial Sequence: Synthetic oligonucleotide
  Sense strand starting at position 45 of SEQ ID NO: 1560454
ugaagaauuugccacccau

SEQ ID NO: 1601068 - RNA, 19 nt, Artificial Sequence
  Description of Artificial Sequence: Synthetic oligonucleotide
  Antisense strand to SEQ ID NO: 1601067
auggguggcaaauucuuca

SEQ ID NO: 1601069 - RNA, 19 nt, Artificial Sequence
  Description of Artificial Sequence: Synthetic oligonucleotide
  Sense strand starting at position 328 of SEQ ID NO: 1560454
gccuguucucaaggacaug

SEQ ID NO: 1601070 - RNA, 19 nt, Artificial Sequence
  Description of Artificial Sequence: Synthetic oligonucleotide
  Antisense strand to SEQ ID NO: 1601069
cauguccuugagaacaggc

SEQ ID NO: 1601071 - RNA, 19 nt, Artificial Sequence
  Description of Artificial Sequence: Synthetic oligonucleotide
  Sense strand starting at position 339 of SEQ ID NO: 1560454
aggacaugguaaucuggua

SEQ ID NO: 1601072 - RNA, 19 nt, Artificial Sequence
  Description of Artificial Sequence: Synthetic oligonucleotide
  Antisense strand to SEQ ID NO: 1601071
uaccagauuaccauguccu

SEQ ID NO: 1601073 - RNA, 19 nt, Artificial Sequence
  Description of Artificial Sequence: Synthetic oligonucleotide
  Sense strand starting at position 375 of SEQ ID NO: 1560454
auccuaucuucuccgggaa

SEQ ID NO: 1601074 - RNA, 19 nt, Artificial Sequence
  Description of Artificial Sequence: Synthetic oligonucleotide
  Antisense strand to SEQ ID NO: 1601073
uucccggagaagauaggau

SEQ ID NO: 1601075 - RNA, 19 nt, Artificial Sequence
  Description of Artificial Sequence: Synthetic oligonucleotide
  Sense strand starting at position 376 of SEQ ID NO: 1560454
uccuaucuucuccgggaau

SEQ ID NO: 1601076 - RNA, 19 nt, Artificial Sequence
  Description of Artificial Sequence: Synthetic oligonucleotide
  Antisense strand to SEQ ID NO: 1601075
auucccggagaagauagga

SEQ ID NO: 1601077 - RNA, 19 nt, Artificial Sequence
  Description of Artificial Sequence: Synthetic oligonucleotide
  Sense strand starting at position 378 of SEQ ID NO: 1560454
cuaucuucuccgggaauac

SEQ ID NO: 1601078 - RNA, 19 nt, Artificial Sequence
  Description of Artificial Sequence: Synthetic oligonucleotide
  Antisense strand to SEQ ID NO: 1601077
guauucccggagaagauag

SEQ ID NO: 1601079 - RNA, 19 nt, Artificial Sequence
  Description of Artificial Sequence: Synthetic oligonucleotide
  Sense strand starting at position 768 of SEQ ID NO: 1560454
gggauagaguuccuuguua

SEQ ID NO: 1601080 - RNA, 19 nt, Artificial Sequence
  Description of Artificial Sequence: Synthetic oligonucleotide
  Antisense strand to SEQ ID NO: 1601079
uaacaaggaacucuauccc

SEQ ID NO: 1601081 - RNA, 19 nt, Artificial Sequence
  Description of Artificial Sequence: Synthetic oligonucleotide
  Sense strand starting at position 770 of SEQ ID NO: 1560454
gauagaguuccuuguuagg

SEQ ID NO: 1601082 - RNA, 19 nt, Artificial Sequence
  Description of Artificial Sequence: Synthetic oligonucleotide
  Antisense strand to SEQ ID NO: 1601081
ccuaacaaggaacucuauc

SEQ ID NO: 1601083 - RNA, 19 nt, Artificial Sequence
  Description of Artificial Sequence: Synthetic oligonucleotide
  Sense strand starting at position 1255 of SEQ ID NO: 1560454
ccagcuuguuucccuguua

SEQ ID NO: 1601084 - RNA, 19 nt, Artificial Sequence
  Description of Artificial Sequence: Synthetic oligonucleotide
  Antisense strand to SEQ ID NO: 1601083
uaacagggaaacaagcugg

SEQ ID NO: 1601085 - RNA, 19 nt, Artificial Sequence
  Description of Artificial Sequence: Synthetic oligonucleotide
  Sense strand starting at position 1260 of SEQ ID NO: 1560454
uuguuucccuguuauuuaa

SEQ ID NO: 1601086 - RNA, 19 nt, Artificial Sequence
  Description of Artificial Sequence: Synthetic oligonucleotide
  Antisense strand to SEQ ID NO: 1601085
uuaaauaacagggaaacaa

SEQ ID NO: 1601087 - RNA, 19 nt, Artificial Sequence
  Description of Artificial Sequence: Synthetic oligonucleotide
  Sense strand starting at position 1376 of SEQ ID NO: 1560454
acccaauguuuaggagacu

SEQ ID NO: 1601088 - RNA, 19 nt, Artificial Sequence
  Description of Artificial Sequence: Synthetic oligonucleotide
  Antisense strand to SEQ ID NO: 1601087
agucuccuaaacauugggu

SEQ ID NO: 1601089 - RNA, 19 nt, Artificial Sequence
  Description of Artificial Sequence: Synthetic oligonucleotide
  Sense strand starting at position 1402 of SEQ ID NO: 1560454
gaagcauacuauuagagga

SEQ ID NO: 1601090 - RNA, 19 nt, Artificial Sequence
  Description of Artificial Sequence: Synthetic oligonucleotide
  Antisense strand to SEQ ID NO: 1601089
uccucuaauaguaugcuuc

SEQ ID NO: 1601091 - RNA, 19 nt, Artificial Sequence
  Description of Artificial Sequence: Synthetic oligonucleotide
  Sense strand starting at position 1418 of SEQ ID NO: 1560454
ggagaucucuccucucuug

SEQ ID NO: 1601092 - RNA, 19 nt, Artificial Sequence
  Description of Artificial Sequence: Synthetic oligonucleotide
  Antisense strand to SEQ ID NO: 1601091
caagagaggagagaucucc

SEQ ID NO: 1601093 - RNA, 19 nt, Artificial Sequence
  Description of Artificial Sequence: Synthetic oligonucleotide
  Sense strand starting at position 1533 of SEQ ID NO: 1560454
ggcaaagaauacccucaau

SEQ ID NO: 1601094 - RNA, 19 nt, Artificial Sequence
  Description of Artificial Sequence: Synthetic oligonucleotide
  Antisense strand to SEQ ID NO: 1601093
auugaggguauucuuugcc

SEQ ID NO: 1601095 - RNA, 19 nt, Artificial Sequence
  Description of Artificial Sequence: Synthetic oligonucleotide
  Sense strand starting at position 1579 of SEQ ID NO: 1560454
caauauguggagggcgaau

SEQ ID NO: 1601096 - RNA, 19 nt, Artificial Sequence
  Description of Artificial Sequence: Synthetic oligonucleotide
  Antisense strand to SEQ ID NO: 1601095
auucgcccuccacauauug

SEQ ID NO: 1601097 - RNA, 19 nt, Artificial Sequence
  Description of Artificial Sequence: Synthetic oligonucleotide
  Sense strand starting at position 1682 of SEQ ID NO: 1560454
guaaaugagccuuggguag

SEQ ID NO: 1601098 - RNA, 19 nt, Artificial Sequence
  Description of Artificial Sequence: Synthetic oligonucleotide
  Antisense strand to SEQ ID NO: 1601097
cuacccaaggcucauuuac

SEQ ID NO: 1601099 - RNA, 19 nt, Artificial Sequence
  Description of Artificial Sequence: Synthetic oligonucleotide
  Sense strand starting at position 2103 of SEQ ID NO: 1560454
aacgguaugucacuccuga

SEQ ID NO: 1601100 - RNA, 19 nt, Artificial Sequence
  Description of Artificial Sequence: Synthetic oligonucleotide
  Antisense strand to SEQ ID NO: 1601099
ucaggagugacauaccguu

SEQ ID NO: 1601101 - RNA, 19 nt, Artificial Sequence
  Description of Artificial Sequence: Synthetic oligonucleotide
  Sense strand starting at position 2209 of SEQ ID NO: 1560454
ggacuuccucggcagugua

SEQ ID NO: 1601102 - RNA, 19 nt, Artificial Sequence
  Description of Artificial Sequence: Synthetic oligonucleotide
  Antisense strand to SEQ ID NO: 1601101
uacacugccgaggaagucc

SEQ ID NO: 1601103 - RNA, 19 nt, Artificial Sequence
  Description of Artificial Sequence: Synthetic oligonucleotide
  Sense strand starting at position 2691 of SEQ ID NO: 1560454
ucagguucccauugaugaa

SEQ ID NO: 1601104 - RNA, 19 nt, Artificial Sequence
  Description of Artificial Sequence: Synthetic oligonucleotide
  Antisense strand to SEQ ID NO: 1601103
uucaucaaugggaaccuga

SEQ ID NO: 1601105 - RNA, 19 nt, Artificial Sequence
  Description of Artificial Sequence: Synthetic oligonucleotide
  Sense strand starting at position 2834 of SEQ ID NO: 1560454
gggugaaagcauuacaguu

SEQ ID NO: 1601106 - RNA, 19 nt, Artificial Sequence
  Description of Artificial Sequence: Synthetic oligonucleotide
  Antisense strand to SEQ ID NO: 1601105
aacuguaaugcuuucaccc

SEQ ID NO: 1601107 - RNA, 19 nt, Artificial Sequence
  Description of Artificial Sequence: Synthetic oligonucleotide
  Sense strand starting at position 2913 of SEQ ID NO: 1560454
ggauuugguuggcagggaa

SEQ ID NO: 1601108 - RNA, 19 nt, Artificial Sequence
  Description of Artificial Sequence: Synthetic oligonucleotide
  Antisense strand to SEQ ID NO: 1601107
uucccugccaaccaaaucc

SEQ ID NO: 1601109 - RNA, 19 nt, Artificial Sequence
  Description of Artificial Sequence: Synthetic oligonucleotide
  Sense strand starting at position 2955 of SEQ ID NO: 1560454
cuuguugaaccuugaacuu

SEQ ID NO: 1601110 - RNA, 19 nt, Artificial Sequence
  Description of Artificial Sequence: Synthetic oligonucleotide
  Antisense strand to SEQ ID NO: 1601109
aaguucaagguucaacaag

SEQ ID NO: 1601111 - RNA, 19 nt, Artificial Sequence
  Description of Artificial Sequence: Synthetic oligonucleotide
  Sense strand starting at position 2977 of SEQ ID NO: 1560454
aggcaaguugcucaccuua

SEQ ID NO: 1601112 - RNA, 19 nt, Artificial Sequence
  Description of Artificial Sequence: Synthetic oligonucleotide
  Antisense strand to SEQ ID NO: 1601111
uaaggugagcaacuugccu

SEQ ID NO: 1601113 - RNA, 19 nt, Artificial Sequence
  Description of Artificial Sequence: Synthetic oligonucleotide
  Sense strand starting at position 3195 of SEQ ID NO: 1560454
uggcuaaucaguugagucu

SEQ ID NO: 1601114 - RNA, 19 nt, Artificial Sequence
  Description of Artificial Sequence: Synthetic oligonucleotide
  Antisense strand to SEQ ID NO: 1601113
agacucaacugauuagcca

SEQ ID NO: 1601115 - RNA, 19 nt, Artificial Sequence
  Description of Artificial Sequence: Synthetic oligonucleotide
  Sense strand starting at position 3243 of SEQ ID NO: 1560454
gaaggcauguuaccuaauu

SEQ ID NO: 1601116 - RNA, 19 nt, Artificial Sequence
  Description of Artificial Sequence: Synthetic oligonucleotide
  Antisense strand to SEQ ID NO: 1601115
aauuagguaacaugccuuc

SEQ ID NO: 1601117 - RNA, 19 nt, Artificial Sequence
  Description of Artificial Sequence: Synthetic oligonucleotide
  Sense strand starting at position 3328 of SEQ ID NO: 1560454
gcuggaauugcugggcaga

SEQ ID NO: 1601118 - RNA, 19 nt, Artificial Sequence
  Description of Artificial Sequence: Synthetic oligonucleotide
  Antisense strand to SEQ ID NO: 1601117
ucugcccagcaauuccagc

SEQ ID NO: 1601119 - RNA, 19 nt, Artificial Sequence
  Description of Artificial Sequence: Synthetic oligonucleotide
  Sense strand starting at position 3329 of SEQ ID NO: 1560454
cuggaauugcugggcagau

SEQ ID NO: 1601120 - RNA, 19 nt, Artificial Sequence
  Description of Artificial Sequence: Synthetic oligonucleotide
  Antisense strand to SEQ ID NO: 1601119
aucugcccagcaauuccag

SEQ ID NO: 1601121 - RNA, 19 nt, Artificial Sequence
  Description of Artificial Sequence: Synthetic oligonucleotide
  Sense strand starting at position 3386 of SEQ ID NO: 1560454
ggcuuuaugagaugagguu

SEQ ID NO: 1601122 - RNA, 19 nt, Artificial Sequence
  Description of Artificial Sequence: Synthetic oligonucleotide
  Antisense strand to SEQ ID NO: 1601121
aaccucaucucauaaagcc

SEQ ID NO: 1601123 - RNA, 19 nt, Artificial Sequence
  Description of Artificial Sequence: Synthetic oligonucleotide
  Sense strand starting at position 3395 of SEQ ID NO: 1560454
agaugagguucagugcaaa

SEQ ID NO: 1601124 - RNA, 19 nt, Artificial Sequence
  Description of Artificial Sequence: Synthetic oligonucleotide
  Antisense strand to SEQ ID NO: 1601123
uuugcacugaaccucaucu

SEQ ID NO: 1601125 - RNA, 19 nt, Artificial Sequence
  Description of Artificial Sequence: Synthetic oligonucleotide
  Sense strand starting at position 3422 of SEQ ID NO: 1560454
ugcagaaaugaacgauugu

SEQ ID NO: 1601126 - RNA, 19 nt, Artificial Sequence
  Description of Artificial Sequence: Synthetic oligonucleotide
  Antisense strand to SEQ ID NO: 1601125
acaaucguucauuucugca

SEQ ID NO: 1601127 - RNA, 19 nt, Artificial Sequence
  Description of Artificial Sequence: Synthetic oligonucleotide
  Sense strand starting at position 3496 of SEQ ID NO: 1560454
ccaguuuaauucuuggauu

SEQ ID NO: 1601128 - RNA, 19 nt, Artificial Sequence
  Description of Artificial Sequence: Synthetic oligonucleotide
  Antisense strand to SEQ ID NO: 1601127
aauccaagaauuaaacugg

SEQ ID NO: 1601129 - RNA, 19 nt, Artificial Sequence
  Description of Artificial Sequence: Synthetic oligonucleotide
  Sense strand starting at position 3604 of SEQ ID NO: 1560454
cuuauuugcuuugugcuua

SEQ ID NO: 1601130 - RNA, 19 nt, Artificial Sequence
  Description of Artificial Sequence: Synthetic oligonucleotide
  Antisense strand to SEQ ID NO: 1601129
uaagcacaaagcaaauaag

SEQ ID NO: 1601131 - RNA, 19 nt, Artificial Sequence
  Description of Artificial Sequence: Synthetic oligonucleotide
  Sense strand starting at position 3608 of SEQ ID NO: 1560454
uuugcuuugugcuuagauu

SEQ ID NO: 1601132 - RNA, 19 nt, Artificial Sequence
  Description of Artificial Sequence: Synthetic oligonucleotide
  Antisense strand to SEQ ID NO: 1601131
aaucuaagcacaaagcaaa

SEQ ID NO: 1601133 - RNA, 19 nt, Artificial Sequence
  Description of Artificial Sequence: Synthetic oligonucleotide
  Sense strand starting at position 3615 of SEQ ID NO: 1560454
ugugcuuagauucguuuga

SEQ ID NO: 1601134 - RNA, 19 nt, Artificial Sequence
  Description of Artificial Sequence: Synthetic oligonucleotide
  Antisense strand to SEQ ID NO: 1601133
ucaaacgaaucuaagcaca

SEQ ID NO: 1601135 - RNA, 19 nt, Artificial Sequence
  Description of Artificial Sequence: Synthetic oligonucleotide
  Sense strand starting at position 3616 of SEQ ID NO: 1560454
gugcuuagauucguuugaa

SEQ ID NO: 1601136 - RNA, 19 nt, Artificial Sequence
  Description of Artificial Sequence: Synthetic oligonucleotide
  Antisense strand to SEQ ID NO: 1601135
uucaaacgaaucuaagcac

SEQ ID NO: 1601137 - RNA, 19 nt, Artificial Sequence
  Description of Artificial Sequence: Synthetic oligonucleotide
  Sense strand starting at position 3617 of SEQ ID NO: 1560454
ugcuuagauucguuugaau

SEQ ID NO: 1601138 - RNA, 19 nt, Artificial Sequence
  Description of Artificial Sequence: Synthetic oligonucleotide
  Antisense strand to SEQ ID NO: 1601137
auucaaacgaaucuaagca

SEQ ID NO: 1601139 - RNA, 19 nt, Artificial Sequence
  Description of Artificial Sequence: Synthetic oligonucleotide
  Sense strand starting at position 3619 of SEQ ID NO: 1560454
cuuagauucguuugaaugg

SEQ ID NO: 1601140 - RNA, 19 nt, Artificial Sequence
  Description of Artificial Sequence: Synthetic oligonucleotide
  Antisense strand to SEQ ID NO: 1601139
ccauucaaacgaaucuaag

SEQ ID NO: 1601141 - RNA, 19 nt, Artificial Sequence
  Description of Artificial Sequence: Synthetic oligonucleotide
  Sense strand starting at position 3620 of SEQ ID NO: 1560454
uuagauucguuugaaugga

SEQ ID NO: 1601142 - RNA, 19 nt, Artificial Sequence
  Description of Artificial Sequence: Synthetic oligonucleotide
  Antisense strand to SEQ ID NO: 1601141
uccauucaaacgaaucuaa

SEQ ID NO: 1601143 - RNA, 19 nt, Artificial Sequence
  Description of Artificial Sequence: Synthetic oligonucleotide
  Sense strand starting at position 3720 of SEQ ID NO: 1560454
aaaggagcagucugaauua

SEQ ID NO: 1601144 - RNA, 19 nt, Artificial Sequence
  Description of Artificial Sequence: Synthetic oligonucleotide
  Antisense strand to SEQ ID NO: 1601143
uaauucagacugcuccuuu

SEQ ID NO: 1601145 - RNA, 19 nt, Artificial Sequence
  Description of Artificial Sequence: Synthetic oligonucleotide
  Sense strand starting at position 119 of SEQ ID NO: 1560455
aaagcaguaucaugaaaug

SEQ ID NO: 1601146 - RNA, 19 nt, Artificial Sequence
  Description of Artificial Sequence: Synthetic oligonucleotide
  Antisense strand to SEQ ID NO: 1601145
cauuucaugauacugcuuu

SEQ ID NO: 1601147 - RNA, 19 nt, Artificial Sequence
  Description of Artificial Sequence: Synthetic oligonucleotide
  Sense strand starting at position 137 of SEQ ID NO: 1560455
gguuauuaauugcuauucu

SEQ ID NO: 1601148 - RNA, 19 nt, Artificial Sequence
  Description of Artificial Sequence: Synthetic oligonucleotide
  Antisense strand to SEQ ID NO: 1601147
agaauagcaauuaauaacc

SEQ ID NO: 1601149 - RNA, 19 nt, Artificial Sequence
  Description of Artificial Sequence: Synthetic oligonucleotide
  Sense strand starting at position 146 of SEQ ID NO: 1560455
uugcuauucugaucccaga

SEQ ID NO: 1601150 - RNA, 19 nt, Artificial Sequence
  Description of Artificial Sequence: Synthetic oligonucleotide
  Antisense strand to SEQ ID NO: 1601149
ucugggaucagaauagcaa

SEQ ID NO: 1601151 - RNA, 19 nt, Artificial Sequence
  Description of Artificial Sequence: Synthetic oligonucleotide
  Sense strand starting at position 203 of SEQ ID NO: 1560455
gggcacuuagucuauguuu

SEQ ID NO: 1601152 - RNA, 19 nt, Artificial Sequence
  Description of Artificial Sequence: Synthetic oligonucleotide
  Antisense strand to SEQ ID NO: 1601151
aaacauagacuaagugccc

SEQ ID NO: 1601153 - RNA, 19 nt, Artificial Sequence
  Description of Artificial Sequence: Synthetic oligonucleotide
  Sense strand starting at position 205 of SEQ ID NO: 1560455
gcacuuagucuauguuugu

SEQ ID NO: 1601154 - RNA, 19 nt, Artificial Sequence
  Description of Artificial Sequence: Synthetic oligonucleotide
  Antisense strand to SEQ ID NO: 1601153
acaaacauagacuaagugc

SEQ ID NO: 1601155 - RNA, 19 nt, Artificial Sequence
  Description of Artificial Sequence: Synthetic oligonucleotide
  Sense strand starting at position 209 of SEQ ID NO: 1560455
uuagucuauguuuguggaa

SEQ ID NO: 1601156 - RNA, 19 nt, Artificial Sequence
  Description of Artificial Sequence: Synthetic oligonucleotide
  Antisense strand to SEQ ID NO: 1601155
uuccacaaacauagacuaa

SEQ ID NO: 1601157 - RNA, 19 nt, Artificial Sequence
  Description of Artificial Sequence: Synthetic oligonucleotide
  Sense strand starting at position 210 of SEQ ID NO: 1560455
uagucuauguuuguggaau

SEQ ID NO: 1601158 - RNA, 19 nt, Artificial Sequence
  Description of Artificial Sequence: Synthetic oligonucleotide
  Antisense strand to SEQ ID NO: 1601157
auuccacaaacauagacua

SEQ ID NO: 1601159 - RNA, 19 nt, Artificial Sequence
  Description of Artificial Sequence: Synthetic oligonucleotide
  Sense strand starting at position 301 of SEQ ID NO: 1560455
cccugcuguguuuguggaa

SEQ ID NO: 1601160 - RNA, 19 nt, Artificial Sequence
  Description of Artificial Sequence: Synthetic oligonucleotide
  Antisense strand to SEQ ID NO: 1601159
uuccacaaacacagcaggg

SEQ ID NO: 1601161 - RNA, 19 nt, Artificial Sequence
  Description of Artificial Sequence: Synthetic oligonucleotide
  Sense strand starting at position 448 of SEQ ID NO: 1560455
gggacacagcgaugauuaa

SEQ ID NO: 1601162 - RNA, 19 nt, Artificial Sequence
  Description of Artificial Sequence: Synthetic oligonucleotide
  Antisense strand to SEQ ID NO: 1601161
uuaaucaucgcuguguccc

SEQ ID NO: 1601163 - RNA, 19 nt, Artificial Sequence
  Description of Artificial Sequence: Synthetic oligonucleotide
  Sense strand starting at position 508 of SEQ ID NO: 1560455
gcauccagacaguaucaaa

SEQ ID NO: 1601164 - RNA, 19 nt, Artificial Sequence
  Description of Artificial Sequence: Synthetic oligonucleotide
  Antisense strand to SEQ ID NO: 1601163
uuugauacugucuggaugc

SEQ ID NO: 1601165 - RNA, 19 nt, Artificial Sequence
  Description of Artificial Sequence: Synthetic oligonucleotide
  Sense strand starting at position 929 of SEQ ID NO: 1560455
cgucucugauaaguacaaa

SEQ ID NO: 1601166 - RNA, 19 nt, Artificial Sequence
  Description of Artificial Sequence: Synthetic oligonucleotide
  Antisense strand to SEQ ID NO: 1601165
uuuguacuuaucagagacg

SEQ ID NO: 1601167 - RNA, 19 nt, Artificial Sequence
  Description of Artificial Sequence: Synthetic oligonucleotide
  Sense strand starting at position 1258 of SEQ ID NO: 1560455
uguucucaggcuugagauc

SEQ ID NO: 1601168 - RNA, 19 nt, Artificial Sequence
  Description of Artificial Sequence: Synthetic oligonucleotide
  Antisense strand to SEQ ID NO: 1601167
gaucucaagccugagaaca

SEQ ID NO: 1601169 - RNA, 19 nt, Artificial Sequence
  Description of Artificial Sequence: Synthetic oligonucleotide
  Sense strand starting at position 1259 of SEQ ID NO: 1560455
guucucaggcuugagauca

SEQ ID NO: 1601170 - RNA, 19 nt, Artificial Sequence
  Description of Artificial Sequence: Synthetic oligonucleotide
  Antisense strand to SEQ ID NO: 1601169
ugaucucaagccugagaac

SEQ ID NO: 1601171 - RNA, 19 nt, Artificial Sequence
  Description of Artificial Sequence: Synthetic oligonucleotide
  Sense strand starting at position 1267 of SEQ ID NO: 1560455
gcuugagaucagcguggau

SEQ ID NO: 1601172 - RNA, 19 nt, Artificial Sequence
  Description of Artificial Sequence: Synthetic oligonucleotide
  Antisense strand to SEQ ID NO: 1601171
auccacgcugaucucaagc

SEQ ID NO: 1601173 - RNA, 19 nt, Artificial Sequence
  Description of Artificial Sequence: Synthetic oligonucleotide
  Sense strand starting at position 1269 of SEQ ID NO: 1560455
uugagaucagcguggauga

SEQ ID NO: 1601174 - RNA, 19 nt, Artificial Sequence
  Description of Artificial Sequence: Synthetic oligonucleotide
  Antisense strand to SEQ ID NO: 1601173
ucauccacgcugaucucaa

SEQ ID NO: 1601175 - RNA, 19 nt, Artificial Sequence
  Description of Artificial Sequence: Synthetic oligonucleotide
  Sense strand starting at position 1270 of SEQ ID NO: 1560455
ugagaucagcguggaugau

SEQ ID NO: 1601176 - RNA, 19 nt, Artificial Sequence
  Description of Artificial Sequence: Synthetic oligonucleotide
  Antisense strand to SEQ ID NO: 1601175
aucauccacgcugaucuca

SEQ ID NO: 1601177 - RNA, 19 nt, Artificial Sequence
  Description of Artificial Sequence: Synthetic oligonucleotide
  Sense strand starting at position 1271 of SEQ ID NO: 1560455
gagaucagcguggaugaua

SEQ ID NO: 1601178 - RNA, 19 nt, Artificial Sequence
  Description of Artificial Sequence: Synthetic oligonucleotide
  Antisense strand to SEQ ID NO: 1601177
uaucauccacgcugaucuc

SEQ ID NO: 1601179 - RNA, 19 nt, Artificial Sequence
  Description of Artificial Sequence: Synthetic oligonucleotide
  Sense strand starting at position 1363 of SEQ ID NO: 1560455
gcgcgaaguuguucuccuu

SEQ ID NO: 1601180 - RNA, 19 nt, Artificial Sequence
  Description of Artificial Sequence: Synthetic oligonucleotide
  Antisense strand to SEQ ID NO: 1601179
aaggagaacaacuucgcgc

SEQ ID NO: 1601181 - RNA, 19 nt, Artificial Sequence
  Description of Artificial Sequence: Synthetic oligonucleotide
  Sense strand starting at position 1429 of SEQ ID NO: 1560455
acuugagggcgucauggaa

SEQ ID NO: 1601182 - RNA, 19 nt, Artificial Sequence
  Description of Artificial Sequence: Synthetic oligonucleotide
  Antisense strand to SEQ ID NO: 1601181
uuccaugacgcccucaagu

SEQ ID NO: 1601183 - RNA, 19 nt, Artificial Sequence
  Description of Artificial Sequence: Synthetic oligonucleotide
  Sense strand starting at position 1544 of SEQ ID NO: 1560455
ggcgucauucuugaggauc

SEQ ID NO: 1601184 - RNA, 19 nt, Artificial Sequence
  Description of Artificial Sequence: Synthetic oligonucleotide
  Antisense strand to SEQ ID NO: 1601183
gauccucaagaaugacgcc

SEQ ID NO: 1601185 - RNA, 19 nt, Artificial Sequence
  Description of Artificial Sequence: Synthetic oligonucleotide
  Sense strand starting at position 1627 of SEQ ID NO: 1560455
ugcccaagaccucgaugau

SEQ ID NO: 1601186 - RNA, 19 nt, Artificial Sequence
  Description of Artificial Sequence: Synthetic oligonucleotide
  Antisense strand to SEQ ID NO: 1601185
aucaucgaggucuugggca

SEQ ID NO: 1601187 - RNA, 19 nt, Artificial Sequence
  Description of Artificial Sequence: Synthetic oligonucleotide
  Sense strand starting at position 1639 of SEQ ID NO: 1560455
cgaugaugucguagcaguc

SEQ ID NO: 1601188 - RNA, 19 nt, Artificial Sequence
  Description of Artificial Sequence: Synthetic oligonucleotide
  Antisense strand to SEQ ID NO: 1601187
gacugcuacgacaucaucg

SEQ ID NO: 1601189 - RNA, 19 nt, Artificial Sequence
  Description of Artificial Sequence: Synthetic oligonucleotide
  Sense strand starting at position 2043 of SEQ ID NO: 1560455
ggcggaaucuugcaaagac

SEQ ID NO: 1601190 - RNA, 19 nt, Artificial Sequence
  Description of Artificial Sequence: Synthetic oligonucleotide
  Antisense strand to SEQ ID NO: 1601189
gucuuugcaagauuccgcc

SEQ ID NO: 1601191 - RNA, 19 nt, Artificial Sequence
  Description of Artificial Sequence: Synthetic oligonucleotide
  Sense strand starting at position 2088 of SEQ ID NO: 1560455
gggucuaaucgugggccuu

SEQ ID NO: 1601192 - RNA, 19 nt, Artificial Sequence
  Description of Artificial Sequence: Synthetic oligonucleotide
  Antisense strand to SEQ ID NO: 1601191
aaggcccacgauuagaccc

SEQ ID NO: 1601193 - RNA, 19 nt, Artificial Sequence
  Description of Artificial Sequence: Synthetic oligonucleotide
  Sense strand starting at position 2150 of SEQ ID NO: 1560455
gcuucuugagcuugggaga

SEQ ID NO: 1601194 - RNA, 19 nt, Artificial Sequence
  Description of Artificial Sequence: Synthetic oligonucleotide
  Antisense strand to SEQ ID NO: 1601193
ucucccaagcucaagaagc

SEQ ID NO: 1601195 - RNA, 19 nt, Artificial Sequence
  Description of Artificial Sequence: Synthetic oligonucleotide
  Sense strand starting at position 2151 of SEQ ID NO: 1560455
cuucuugagcuugggagau

SEQ ID NO: 1601196 - RNA, 19 nt, Artificial Sequence
  Description of Artificial Sequence: Synthetic oligonucleotide
  Antisense strand to SEQ ID NO: 1601195
aucucccaagcucaagaag

SEQ ID NO: 1601197 - RNA, 19 nt, Artificial Sequence
  Description of Artificial Sequence: Synthetic oligonucleotide
  Sense strand starting at position 2157 of SEQ ID NO: 1560455
gagcuugggagaugugaug

SEQ ID NO: 1601198 - RNA, 19 nt, Artificial Sequence
  Description of Artificial Sequence: Synthetic oligonucleotide
  Antisense strand to SEQ ID NO: 1601197
caucacaucucccaagcuc

SEQ ID NO: 1601199 - RNA, 19 nt, Artificial Sequence
  Description of Artificial Sequence: Synthetic oligonucleotide
  Sense strand starting at position 2179 of SEQ ID NO: 1560455
gugugucuguguucagaaa

SEQ ID NO: 1601200 - RNA, 19 nt, Artificial Sequence
  Description of Artificial Sequence: Synthetic oligonucleotide
  Antisense strand to SEQ ID NO: 1601199
uuucugaacacagacacac

SEQ ID NO: 1601201 - RNA, 19 nt, Artificial Sequence
  Description of Artificial Sequence: Synthetic oligonucleotide
  Sense strand starting at position 2269 of SEQ ID NO: 1560455
ggauucuguucugagggca

SEQ ID NO: 1601202 - RNA, 19 nt, Artificial Sequence
  Description of Artificial Sequence: Synthetic oligonucleotide
  Antisense strand to SEQ ID NO: 1601201
ugcccucagaacagaaucc

SEQ ID NO: 1601203 - RNA, 19 nt, Artificial Sequence
  Description of Artificial Sequence: Synthetic oligonucleotide
  Sense strand starting at position 2328 of SEQ ID NO: 1560455
gucagauaugagugucaga

SEQ ID NO: 1601204 - RNA, 19 nt, Artificial Sequence
  Description of Artificial Sequence: Synthetic oligonucleotide
  Antisense strand to SEQ ID NO: 1601203
ucugacacucauaucugac

SEQ ID NO: 1601205 - RNA, 19 nt, Artificial Sequence
  Description of Artificial Sequence: Synthetic oligonucleotide
  Sense strand starting at position 2331 of SEQ ID NO: 1560455
agauaugagugucagaaag

SEQ ID NO: 1601206 - RNA, 19 nt, Artificial Sequence
  Description of Artificial Sequence: Synthetic oligonucleotide
  Antisense strand to SEQ ID NO: 1601205
cuuucugacacucauaucu

SEQ ID NO: 1601207 - RNA, 19 nt, Artificial Sequence
  Description of Artificial Sequence: Synthetic oligonucleotide
  Sense strand starting at position 2333 of SEQ ID NO: 1560455
auaugagugucagaaaguu

SEQ ID NO: 1601208 - RNA, 19 nt, Artificial Sequence
  Description of Artificial Sequence: Synthetic oligonucleotide
  Antisense strand to SEQ ID NO: 1601207
aacuuucugacacucauau

SEQ ID NO: 1601209 - RNA, 19 nt, Artificial Sequence
  Description of Artificial Sequence: Synthetic oligonucleotide
  Sense strand starting at position 2339 of SEQ ID NO: 1560455
gugucagaaaguuacugua

SEQ ID NO: 1601210 - RNA, 19 nt, Artificial Sequence
  Description of Artificial Sequence: Synthetic oligonucleotide
  Antisense strand to SEQ ID NO: 1601209
uacaguaacuuucugacac

SEQ ID NO: 1601211 - RNA, 19 nt, Artificial Sequence
  Description of Artificial Sequence: Synthetic oligonucleotide
  Sense strand starting at position 2341 of SEQ ID NO: 1560455
gucagaaaguuacuguaug

SEQ ID NO: 1601212 - RNA, 19 nt, Artificial Sequence
  Description of Artificial Sequence: Synthetic oligonucleotide
  Antisense strand to SEQ ID NO: 1601211
cauacaguaacuuucugac

SEQ ID NO: 1601213 - RNA, 19 nt, Artificial Sequence
  Description of Artificial Sequence: Synthetic oligonucleotide
  Sense strand starting at position 2342 of SEQ ID NO: 1560455
ucagaaaguuacuguauga

SEQ ID NO: 1601214 - RNA, 19 nt, Artificial Sequence
  Description of Artificial Sequence: Synthetic oligonucleotide
  Antisense strand to SEQ ID NO: 1601213
ucauacaguaacuuucuga

SEQ ID NO: 1601215 - RNA, 19 nt, Artificial Sequence
  Description of Artificial Sequence: Synthetic oligonucleotide
  Sense strand starting at position 2524 of SEQ ID NO: 1560455
gcgggagcugucuaagaac

SEQ ID NO: 1601216 - RNA, 19 nt, Artificial Sequence
  Description of Artificial Sequence: Synthetic oligonucleotide
  Antisense strand to SEQ ID NO: 1601215
guucuuagacagcucccgc

SEQ ID NO: 1601217 - RNA, 19 nt, Artificial Sequence
  Description of Artificial Sequence: Synthetic oligonucleotide
  Sense strand starting at position 2608 of SEQ ID NO: 1560455
gggagauguugaggccaaa

SEQ ID NO: 1601218 - RNA, 19 nt, Artificial Sequence
  Description of Artificial Sequence: Synthetic oligonucleotide
  Antisense strand to SEQ ID NO: 1601217
uuuggccucaacaucuccc

SEQ ID NO: 1601219 - RNA, 19 nt, Artificial Sequence
  Description of Artificial Sequence: Synthetic oligonucleotide
  Sense strand starting at position 3469 of SEQ ID NO: 1560455
ugaaguucuuuagaagucu

SEQ ID NO: 1601220 - RNA, 19 nt, Artificial Sequence
  Description of Artificial Sequence: Synthetic oligonucleotide
  Antisense strand to SEQ ID NO: 1601219
agacuucuaaagaacuuca

SEQ ID NO: 1601221 - RNA, 19 nt, Artificial Sequence
  Description of Artificial Sequence: Synthetic oligonucleotide
  Sense strand starting at position 3478 of SEQ ID NO: 1560455
uuagaagucuuaucugauc

SEQ ID NO: 1601222 - RNA, 19 nt, Artificial Sequence
  Description of Artificial Sequence: Synthetic oligonucleotide
  Antisense strand to SEQ ID NO: 1601221
gaucagauaagacuucuaa

SEQ ID NO: 1601223 - RNA, 19 nt, Artificial Sequence
  Description of Artificial Sequence: Synthetic oligonucleotide
  Sense strand starting at position 3483 of SEQ ID NO: 1560455
agucuuaucugauccuuac

SEQ ID NO: 1601224 - RNA, 19 nt, Artificial Sequence
  Description of Artificial Sequence: Synthetic oligonucleotide
  Antisense strand to SEQ ID NO: 1601223
guaaggaucagauaagacu

SEQ ID NO: 1601225 - RNA, 19 nt, Artificial Sequence
  Description of Artificial Sequence: Synthetic oligonucleotide
  Sense strand starting at position 429 of SEQ ID NO: 1560456
gaguccagccucugaaacu

SEQ ID NO: 1601226 - RNA, 19 nt, Artificial Sequence
  Description of Artificial Sequence: Synthetic oligonucleotide
  Antisense strand to SEQ ID NO: 1601225
aguuucagaggcuggacuc

SEQ ID NO: 1601227 - RNA, 19 nt, Artificial Sequence
  Description of Artificial Sequence: Synthetic oligonucleotide
  Sense strand starting at position 685 of SEQ ID NO: 1560456
gagugacugcgguaaggau

SEQ ID NO: 1601228 - RNA, 19 nt, Artificial Sequence
  Description of Artificial Sequence: Synthetic oligonucleotide
  Antisense strand to SEQ ID NO: 1601227
auccuuaccgcagucacuc

SEQ ID NO: 1601229 - RNA, 19 nt, Artificial Sequence
  Description of Artificial Sequence: Synthetic oligonucleotide
  Sense strand starting at position 851 of SEQ ID NO: 1560456
gagguuauaugauuaaacg

SEQ ID NO: 1601230 - RNA, 19 nt, Artificial Sequence
  Description of Artificial Sequence: Synthetic oligonucleotide
  Antisense strand to SEQ ID NO: 1601229
cguuuaaucauauaaccuc

SEQ ID NO: 1601231 - RNA, 19 nt, Artificial Sequence
  Description of Artificial Sequence: Synthetic oligonucleotide
  Sense strand starting at position 868 of SEQ ID NO: 1560456
cgguaaacuguuuaucaug

SEQ ID NO: 1601232 - RNA, 19 nt, Artificial Sequence
  Description of Artificial Sequence: Synthetic oligonucleotide
  Antisense strand to SEQ ID NO: 1601231
caugauaaacaguuuaccg

SEQ ID NO: 1601233 - RNA, 19 nt, Artificial Sequence
  Description of Artificial Sequence: Synthetic oligonucleotide
  Sense strand starting at position 956 of SEQ ID NO: 1560456
ggcuccuugaagugaucua

SEQ ID NO: 1601234 - RNA, 19 nt, Artificial Sequence
  Description of Artificial Sequence: Synthetic oligonucleotide
  Antisense strand to SEQ ID NO: 1601233
uagaucacuucaaggagcc

SEQ ID NO: 1601235 - RNA, 19 nt, Artificial Sequence
  Description of Artificial Sequence: Synthetic oligonucleotide
  Sense strand starting at position 966 of SEQ ID NO: 1560456
agugaucuaccaggaaauc

SEQ ID NO: 1601236 - RNA, 19 nt, Artificial Sequence
  Description of Artificial Sequence: Synthetic oligonucleotide
  Antisense strand to SEQ ID NO: 1601235
gauuuccugguagaucacu

SEQ ID NO: 1601237 - RNA, 19 nt, Artificial Sequence
  Description of Artificial Sequence: Synthetic oligonucleotide
  Sense strand starting at position 1007 of SEQ ID NO: 1560456
gcagucuugcaauugcgaa

SEQ ID NO: 1601238 - RNA, 19 nt, Artificial Sequence
  Description of Artificial Sequence: Synthetic oligonucleotide
  Antisense strand to SEQ ID NO: 1601237
uucgcaauugcaagacugc

SEQ ID NO: 1601239 - RNA, 19 nt, Artificial Sequence
  Description of Artificial Sequence: Synthetic oligonucleotide
  Sense strand starting at position 1097 of SEQ ID NO: 1560456
gggaggguuguguaaagcu

SEQ ID NO: 1601240 - RNA, 19 nt, Artificial Sequence
  Description of Artificial Sequence: Synthetic oligonucleotide
  Antisense strand to SEQ ID NO: 1601239
agcuuuacacaacccuccc

SEQ ID NO: 1601241 - RNA, 19 nt, Artificial Sequence
  Description of Artificial Sequence: Synthetic oligonucleotide
  Sense strand starting at position 1248 of SEQ ID NO: 1560456
gacagaaucggacgcucua

SEQ ID NO: 1601242 - RNA, 19 nt, Artificial Sequence
  Description of Artificial Sequence: Synthetic oligonucleotide
  Antisense strand to SEQ ID NO: 1601241
uagagcguccgauucuguc

SEQ ID NO: 1601243 - RNA, 19 nt, Artificial Sequence
  Description of Artificial Sequence: Synthetic oligonucleotide
  Sense strand starting at position 1285 of SEQ ID NO: 1560456
cuccuuguucuauggacua

SEQ ID NO: 1601244 - RNA, 19 nt, Artificial Sequence
  Description of Artificial Sequence: Synthetic oligonucleotide
  Antisense strand to SEQ ID NO: 1601243
uaguccauagaacaaggag

SEQ ID NO: 1601245 - RNA, 19 nt, Artificial Sequence
  Description of Artificial Sequence: Synthetic oligonucleotide
  Sense strand starting at position 1319 of SEQ ID NO: 1560456
aggaaugacuuugcccaau

SEQ ID NO: 1601246 - RNA, 19 nt, Artificial Sequence
  Description of Artificial Sequence: Synthetic oligonucleotide
  Antisense strand to SEQ ID NO: 1601245
auugggcaaagucauuccu

SEQ ID NO: 1601247 - RNA, 19 nt, Artificial Sequence
  Description of Artificial Sequence: Synthetic oligonucleotide
  Sense strand starting at position 1374 of SEQ ID NO: 1560456
gggacccauucuguugaca

SEQ ID NO: 1601248 - RNA, 19 nt, Artificial Sequence
  Description of Artificial Sequence: Synthetic oligonucleotide
  Antisense strand to SEQ ID NO: 1601247
ugucaacagaauggguccc

SEQ ID NO: 1601249 - RNA, 19 nt, Artificial Sequence
  Description of Artificial Sequence: Synthetic oligonucleotide
  Sense strand starting at position 1524 of SEQ ID NO: 1560456
gagaaauaagaguggccua

SEQ ID NO: 1601250 - RNA, 19 nt, Artificial Sequence
  Description of Artificial Sequence: Synthetic oligonucleotide
  Antisense strand to SEQ ID NO: 1601249
uaggccacucuuauuucuc

SEQ ID NO: 1601251 - RNA, 19 nt, Artificial Sequence
  Description of Artificial Sequence: Synthetic oligonucleotide
  Sense strand starting at position 1735 of SEQ ID NO: 1560456
aggguuuaucucuaacccu

SEQ ID NO: 1601252 - RNA, 19 nt, Artificial Sequence
  Description of Artificial Sequence: Synthetic oligonucleotide
  Antisense strand to SEQ ID NO: 1601251
aggguuagagauaaacccu

SEQ ID NO: 1601253 - RNA, 19 nt, Artificial Sequence
  Description of Artificial Sequence: Synthetic oligonucleotide
  Sense strand starting at position 1750 of SEQ ID NO: 1560456
cccugugggcucgaaugaa

SEQ ID NO: 1601254 - RNA, 19 nt, Artificial Sequence
  Description of Artificial Sequence: Synthetic oligonucleotide
  Antisense strand to SEQ ID NO: 1601253
uucauucgagcccacaggg

SEQ ID NO: 1601255 - RNA, 19 nt, Artificial Sequence
  Description of Artificial Sequence: Synthetic oligonucleotide
  Sense strand starting at position 2201 of SEQ ID NO: 1560456
ucuuaagaugcccaaguga

SEQ ID NO: 1601256 - RNA, 19 nt, Artificial Sequence
  Description of Artificial Sequence: Synthetic oligonucleotide
  Antisense strand to SEQ ID NO: 1601255
ucacuugggcaucuuaaga

SEQ ID NO: 1601257 - RNA, 19 nt, Artificial Sequence
  Description of Artificial Sequence: Synthetic oligonucleotide
  Sense strand starting at position 2212 of SEQ ID NO: 1560456
ccaagugacguugacaagu

SEQ ID NO: 1601258 - RNA, 19 nt, Artificial Sequence
  Description of Artificial Sequence: Synthetic oligonucleotide
  Antisense strand to SEQ ID NO: 1601257
acuugucaacgucacuugg

SEQ ID NO: 1601259 - RNA, 19 nt, Artificial Sequence
  Description of Artificial Sequence: Synthetic oligonucleotide
  Sense strand starting at position 2222 of SEQ ID NO: 1560456
uugacaaguuucucuguaa

SEQ ID NO: 1601260 - RNA, 19 nt, Artificial Sequence
  Description of Artificial Sequence: Synthetic oligonucleotide
  Antisense strand to SEQ ID NO: 1601259
uuacagagaaacuugucaa

SEQ ID NO: 1601261 - RNA, 19 nt, Artificial Sequence
  Description of Artificial Sequence: Synthetic oligonucleotide
  Sense strand starting at position 2223 of SEQ ID NO: 1560456
ugacaaguuucucuguaaa

SEQ ID NO: 1601262 - RNA, 19 nt, Artificial Sequence
  Description of Artificial Sequence: Synthetic oligonucleotide
  Antisense strand to SEQ ID NO: 1601261
uuuacagagaaacuuguca

SEQ ID NO: 1601263 - RNA, 19 nt, Artificial Sequence
  Description of Artificial Sequence: Synthetic oligonucleotide
  Sense strand starting at position 2225 of SEQ ID NO: 1560456
acaaguuucucuguaaacc

SEQ ID NO: 1601264 - RNA, 19 nt, Artificial Sequence
  Description of Artificial Sequence: Synthetic oligonucleotide
  Antisense strand to SEQ ID NO: 1601263
gguuuacagagaaacuugu

SEQ ID NO: 1601265 - RNA, 19 nt, Artificial Sequence
  Description of Artificial Sequence: Synthetic oligonucleotide
  Sense strand starting at position 2234 of SEQ ID NO: 1560456
ucuguaaaccaaugagauc

SEQ ID NO: 1601266 - RNA, 19 nt, Artificial Sequence
  Description of Artificial Sequence: Synthetic oligonucleotide
  Antisense strand to SEQ ID NO: 1601265
gaucucauugguuuacaga

SEQ ID NO: 1601267 - RNA, 19 nt, Artificial Sequence
  Description of Artificial Sequence: Synthetic oligonucleotide
  Sense strand starting at position 2673 of SEQ ID NO: 1560456
uccgaagcuugaucaggaa

SEQ ID NO: 1601268 - RNA, 19 nt, Artificial Sequence
  Description of Artificial Sequence: Synthetic oligonucleotide
  Antisense strand to SEQ ID NO: 1601267
uuccugaucaagcuucgga

SEQ ID NO: 1601269 - RNA, 19 nt, Artificial Sequence
  Description of Artificial Sequence: Synthetic oligonucleotide
  Sense strand starting at position 2686 of SEQ ID NO: 1560456
caggaaauucccgagguuu

SEQ ID NO: 1601270 - RNA, 19 nt, Artificial Sequence
  Description of Artificial Sequence: Synthetic oligonucleotide
  Antisense strand to SEQ ID NO: 1601269
aaaccucgggaauuuccug

SEQ ID NO: 1601271 - RNA, 19 nt, Artificial Sequence
  Description of Artificial Sequence: Synthetic oligonucleotide
  Sense strand starting at position 2991 of SEQ ID NO: 1560456
auuguugaauugucaguga

SEQ ID NO: 1601272 - RNA, 19 nt, Artificial Sequence
  Description of Artificial Sequence: Synthetic oligonucleotide
  Antisense strand to SEQ ID NO: 1601271
ucacugacaauucaacaau

SEQ ID NO: 1601273 - RNA, 19 nt, Artificial Sequence
  Description of Artificial Sequence: Synthetic oligonucleotide
  Sense strand starting at position 2995 of SEQ ID NO: 1560456
uugaauugucagugaguca

SEQ ID NO: 1601274 - RNA, 19 nt, Artificial Sequence
  Description of Artificial Sequence: Synthetic oligonucleotide
  Antisense strand to SEQ ID NO: 1601273
ugacucacugacaauucaa

SEQ ID NO: 1601275 - RNA, 19 nt, Artificial Sequence
  Description of Artificial Sequence: Synthetic oligonucleotide
  Sense strand starting at position 2996 of SEQ ID NO: 1560456
ugaauugucagugagucau

SEQ ID NO: 1601276 - RNA, 19 nt, Artificial Sequence
  Description of Artificial Sequence: Synthetic oligonucleotide
  Antisense strand to SEQ ID NO: 1601275
augacucacugacaauuca

SEQ ID NO: 1601277 - RNA, 19 nt, Artificial Sequence
  Description of Artificial Sequence: Synthetic oligonucleotide
  Sense strand starting at position 3000 of SEQ ID NO: 1560456
uugucagugagucaucuuu

SEQ ID NO: 1601278 - RNA, 19 nt, Artificial Sequence
  Description of Artificial Sequence: Synthetic oligonucleotide
  Antisense strand to SEQ ID NO: 1601277
aaagaugacucacugacaa

SEQ ID NO: 1601279 - RNA, 19 nt, Artificial Sequence
  Description of Artificial Sequence: Synthetic oligonucleotide
  Sense strand starting at position 3172 of SEQ ID NO: 1560456
ucccuuugccuggagaagu

SEQ ID NO: 1601280 - RNA, 19 nt, Artificial Sequence
  Description of Artificial Sequence: Synthetic oligonucleotide
  Antisense strand to SEQ ID NO: 1601279
acuucuccaggcaaaggga

SEQ ID NO: 1601281 - RNA, 19 nt, Artificial Sequence
  Description of Artificial Sequence: Synthetic oligonucleotide
  Sense strand starting at position 3230 of SEQ ID NO: 1560456
uugagaggguguuuaggaa

SEQ ID NO: 1601282 - RNA, 19 nt, Artificial Sequence
  Description of Artificial Sequence: Synthetic oligonucleotide
  Antisense strand to SEQ ID NO: 1601281
uuccuaaacacccucucaa

SEQ ID NO: 1601283 - RNA, 19 nt, Artificial Sequence
  Description of Artificial Sequence: Synthetic oligonucleotide
  Sense strand starting at position 3281 of SEQ ID NO: 1560456
gguaaaugacccggccaaa

SEQ ID NO: 1601284 - RNA, 19 nt, Artificial Sequence
  Description of Artificial Sequence: Synthetic oligonucleotide
  Antisense strand to SEQ ID NO: 1601283
uuuggccgggucauuuacc

SEQ ID NO: 1601285 - RNA, 19 nt, Artificial Sequence
  Description of Artificial Sequence: Synthetic oligonucleotide
  Sense strand starting at position 3318 of SEQ ID NO: 1560456
guagaaugcuugucacaga

SEQ ID NO: 1601286 - RNA, 19 nt, Artificial Sequence
  Description of Artificial Sequence: Synthetic oligonucleotide
  Antisense strand to SEQ ID NO: 1601285
ucugugacaagcauucuac

SEQ ID NO: 1601287 - RNA, 19 nt, Artificial Sequence
  Description of Artificial Sequence: Synthetic oligonucleotide
  Sense strand starting at position 3486 of SEQ ID NO: 1560456
uuuagauguagguguacaa

SEQ ID NO: 1601288 - RNA, 19 nt, Artificial Sequence
  Description of Artificial Sequence: Synthetic oligonucleotide
  Antisense strand to SEQ ID NO: 1601287
uuguacaccuacaucuaaa

SEQ ID NO: 1601289 - RNA, 19 nt, Artificial Sequence
  Description of Artificial Sequence: Synthetic oligonucleotide
  Sense strand starting at position 3533 of SEQ ID NO: 1560456
ggguauuuguaauaaauca

SEQ ID NO: 1601290 - RNA, 19 nt, Artificial Sequence
  Description of Artificial Sequence: Synthetic oligonucleotide
  Antisense strand to SEQ ID NO: 1601289
ugauuuauuacaaauaccc

SEQ ID NO: 1601291 - RNA, 19 nt, Artificial Sequence
  Description of Artificial Sequence: Synthetic oligonucleotide
  Sense strand starting at position 3699 of SEQ ID NO: 1560456
uuaaaugaaaggugauagu

SEQ ID NO: 1601292 - RNA, 19 nt, Artificial Sequence
  Description of Artificial Sequence: Synthetic oligonucleotide
  Antisense strand to SEQ ID NO: 1601291
acuaucaccuuucauuuaa

SEQ ID NO: 1601293 - RNA, 19 nt, Artificial Sequence
  Description of Artificial Sequence: Synthetic oligonucleotide
  Sense strand starting at position 3732 of SEQ ID NO: 1560456
ugccaaguacaaugauaca

SEQ ID NO: 1601294 - RNA, 19 nt, Artificial Sequence
  Description of Artificial Sequence: Synthetic oligonucleotide
  Antisense strand to SEQ ID NO: 1601293
uguaucauuguacuuggca

SEQ ID NO: 1601295 - RNA, 19 nt, Artificial Sequence
  Description of Artificial Sequence: Synthetic oligonucleotide
  Sense strand starting at position 3758 of SEQ ID NO: 1560456
cugaguuacccuuguaaau

SEQ ID NO: 1601296 - RNA, 19 nt, Artificial Sequence
  Description of Artificial Sequence: Synthetic oligonucleotide
  Antisense strand to SEQ ID NO: 1601295
auuuacaaggguaacucag

SEQ ID NO: 1601297 - RNA, 19 nt, Artificial Sequence
  Description of Artificial Sequence: Synthetic oligonucleotide
  Sense strand starting at position 3792 of SEQ ID NO: 1560456
uuaucugugcuuuaaggag

SEQ ID NO: 1601298 - RNA, 19 nt, Artificial Sequence
  Description of Artificial Sequence: Synthetic oligonucleotide
  Antisense strand to SEQ ID NO: 1601297
cuccuuaaagcacagauaa

SEQ ID NO: 1601299 - RNA, 19 nt, Artificial Sequence
  Description of Artificial Sequence: Synthetic oligonucleotide
  Sense strand starting at position 3824 of SEQ ID NO: 1560456
acucuuaacuggcuugaga

SEQ ID NO: 1601300 - RNA, 19 nt, Artificial Sequence
  Description of Artificial Sequence: Synthetic oligonucleotide
  Antisense strand to SEQ ID NO: 1601299
ucucaagccaguuaagagu

SEQ ID NO: 1601301 - RNA, 19 nt, Artificial Sequence
  Description of Artificial Sequence: Synthetic oligonucleotide
  Sense strand starting at position 3831 of SEQ ID NO: 1560456
acuggcuugagaugugaaa

SEQ ID NO: 1601302 - RNA, 19 nt, Artificial Sequence
  Description of Artificial Sequence: Synthetic oligonucleotide
  Antisense strand to SEQ ID NO: 1601301
uuucacaucucaagccagu

SEQ ID NO: 1601303 - RNA, 19 nt, Artificial Sequence
  Description of Artificial Sequence: Synthetic oligonucleotide
  Sense strand starting at position 3903 of SEQ ID NO: 1560456
aagggaacaugucuaguua

SEQ ID NO: 1601304 - RNA, 19 nt, Artificial Sequence
  Description of Artificial Sequence: Synthetic oligonucleotide
  Antisense strand to SEQ ID NO: 1601303
uaacuagacauguucccuu

SEQ ID NO: 1601305 - RNA, 19 nt, Artificial Sequence
  Description of Artificial Sequence: Synthetic oligonucleotide
  Sense strand starting at position 233 of SEQ ID NO: 1560457
ugguuaugggugggcauuu

SEQ ID NO: 1601306 - RNA, 19 nt, Artificial Sequence
  Description of Artificial Sequence: Synthetic oligonucleotide
  Antisense strand to SEQ ID NO: 1601305
aaaugcccacccauaacca

SEQ ID NO: 1601307 - RNA, 19 nt, Artificial Sequence
  Description of Artificial Sequence: Synthetic oligonucleotide
  Sense strand starting at position 773 of SEQ ID NO: 1560457
ggaacuaugggccgagguu

SEQ ID NO: 1601308 - RNA, 19 nt, Artificial Sequence
  Description of Artificial Sequence: Synthetic oligonucleotide
  Antisense strand to SEQ ID NO: 1601307
aaccucggcccauaguucc

SEQ ID NO: 1601309 - RNA, 19 nt, Artificial Sequence
  Description of Artificial Sequence: Synthetic oligonucleotide
  Sense strand starting at position 774 of SEQ ID NO: 1560457
gaacuaugggccgagguuu

SEQ ID NO: 1601310 - RNA, 19 nt, Artificial Sequence
  Description of Artificial Sequence: Synthetic oligonucleotide
  Antisense strand to SEQ ID NO: 1601309
aaaccucggcccauaguuc

SEQ ID NO: 1601311 - RNA, 19 nt, Artificial Sequence
  Description of Artificial Sequence: Synthetic oligonucleotide
  Sense strand starting at position 1816 of SEQ ID NO: 1560457
aauccuuuguugggcgauu

SEQ ID NO: 1601312 - RNA, 19 nt, Artificial Sequence
  Description of Artificial Sequence: Synthetic oligonucleotide
  Antisense strand to SEQ ID NO: 1601311
aaucgcccaacaaaggauu

SEQ ID NO: 1601313 - RNA, 19 nt, Artificial Sequence
  Description of Artificial Sequence: Synthetic oligonucleotide
  Sense strand starting at position 2169 of SEQ ID NO: 1560457
gugggagguugguaaggaa

SEQ ID NO: 1601314 - RNA, 19 nt, Artificial Sequence
  Description of Artificial Sequence: Synthetic oligonucleotide
  Antisense strand to SEQ ID NO: 1601313
uuccuuaccaaccucccac

SEQ ID NO: 1601315 - RNA, 19 nt, Artificial Sequence
  Description of Artificial Sequence: Synthetic oligonucleotide
  Sense strand starting at position 2401 of SEQ ID NO: 1560457
gguggguugcuaggguuaa

SEQ ID NO: 1601316 - RNA, 19 nt, Artificial Sequence
  Description of Artificial Sequence: Synthetic oligonucleotide
  Antisense strand to SEQ ID NO: 1601315
uuaacccuagcaacccacc

SEQ ID NO: 1601317 - RNA, 19 nt, Artificial Sequence
  Description of Artificial Sequence: Synthetic oligonucleotide
  Sense strand starting at position 2454 of SEQ ID NO: 1560457
ugggaccuguucuuaacau

SEQ ID NO: 1601318 - RNA, 19 nt, Artificial Sequence
  Description of Artificial Sequence: Synthetic oligonucleotide
  Antisense strand to SEQ ID NO: 1601317
auguuaagaacagguccca

SEQ ID NO: 1601319 - RNA, 19 nt, Artificial Sequence
  Description of Artificial Sequence: Synthetic oligonucleotide
  Sense strand starting at position 2455 of SEQ ID NO: 1560457
gggaccuguucuuaacauc

SEQ ID NO: 1601320 - RNA, 19 nt, Artificial Sequence
  Description of Artificial Sequence: Synthetic oligonucleotide
  Antisense strand to SEQ ID NO: 1601319
gauguuaagaacagguccc

SEQ ID NO: 1601321 - RNA, 19 nt, Artificial Sequence
  Description of Artificial Sequence: Synthetic oligonucleotide
  Sense strand starting at position 2487 of SEQ ID NO: 1560457
cggagaaguuuccuaugua

SEQ ID NO: 1601322 - RNA, 19 nt, Artificial Sequence
  Description of Artificial Sequence: Synthetic oligonucleotide
  Antisense strand to SEQ ID NO: 1601321
uacauaggaaacuucuccg

SEQ ID NO: 1601323 - RNA, 19 nt, Artificial Sequence
  Description of Artificial Sequence: Synthetic oligonucleotide
  Sense strand starting at position 2488 of SEQ ID NO: 1560457
ggagaaguuuccuauguau

SEQ ID NO: 1601324 - RNA, 19 nt, Artificial Sequence
  Description of Artificial Sequence: Synthetic oligonucleotide
  Antisense strand to SEQ ID NO: 1601323
auacauaggaaacuucucc

SEQ ID NO: 1601325 - RNA, 19 nt, Artificial Sequence
  Description of Artificial Sequence: Synthetic oligonucleotide
  Sense strand starting at position 3139 of SEQ ID NO: 1560457
uuccucaaguccgcuuaaa

SEQ ID NO: 1601326 - RNA, 19 nt, Artificial Sequence
  Description of Artificial Sequence: Synthetic oligonucleotide
  Antisense strand to SEQ ID NO: 1601325
uuuaagcggacuugaggaa

SEQ ID NO: 1601327 - RNA, 19 nt, Artificial Sequence
  Description of Artificial Sequence: Synthetic oligonucleotide
  Sense strand starting at position 3256 of SEQ ID NO: 1560457
guggaugcucaauacacau

SEQ ID NO: 1601328 - RNA, 19 nt, Artificial Sequence
  Description of Artificial Sequence: Synthetic oligonucleotide
  Antisense strand to SEQ ID NO: 1601327
auguguauugagcauccac

SEQ ID NO: 1601329 - RNA, 19 nt, Artificial Sequence
  Description of Artificial Sequence: Synthetic oligonucleotide
  Sense strand starting at position 3286 of SEQ ID NO: 1560457
uucagaugucuaggaggca

SEQ ID NO: 1601330 - RNA, 19 nt, Artificial Sequence
  Description of Artificial Sequence: Synthetic oligonucleotide
  Antisense strand to SEQ ID NO: 1601329
ugccuccuagacaucugaa

SEQ ID NO: 1601331 - RNA, 19 nt, Artificial Sequence
  Description of Artificial Sequence: Synthetic oligonucleotide
  Sense strand starting at position 3289 of SEQ ID NO: 1560457
agaugucuaggaggcagau

SEQ ID NO: 1601332 - RNA, 19 nt, Artificial Sequence
  Description of Artificial Sequence: Synthetic oligonucleotide
  Antisense strand to SEQ ID NO: 1601331
aucugccuccuagacaucu

SEQ ID NO: 1601333 - RNA, 19 nt, Artificial Sequence
  Description of Artificial Sequence: Synthetic oligonucleotide
  Sense strand starting at position 3358 of SEQ ID NO: 1560457
guggaaucaccaugcaauu

SEQ ID NO: 1601334 - RNA, 19 nt, Artificial Sequence
  Description of Artificial Sequence: Synthetic oligonucleotide
  Antisense strand to SEQ ID NO: 1601333
aauugcauggugauuccac

SEQ ID NO: 1601335 - RNA, 19 nt, Artificial Sequence
  Description of Artificial Sequence: Synthetic oligonucleotide
  Sense strand starting at position 3453 of SEQ ID NO: 1560457
guagcagcgugauucauaa

SEQ ID NO: 1601336 - RNA, 19 nt, Artificial Sequence
  Description of Artificial Sequence: Synthetic oligonucleotide
  Antisense strand to SEQ ID NO: 1601335
uuaugaaucacgcugcuac

SEQ ID NO: 1601337 - RNA, 19 nt, Artificial Sequence
  Description of Artificial Sequence: Synthetic oligonucleotide
  Sense strand starting at position 3491 of SEQ ID NO: 1560457
acucaaacgucugcuaaug

SEQ ID NO: 1601338 - RNA, 19 nt, Artificial Sequence
  Description of Artificial Sequence: Synthetic oligonucleotide
  Antisense strand to SEQ ID NO: 1601337
cauuagcagacguuugagu

SEQ ID NO: 1601339 - RNA, 19 nt, Artificial Sequence
  Description of Artificial Sequence: Synthetic oligonucleotide
  Sense strand starting at position 3493 of SEQ ID NO: 1560457
ucaaacgucugcuaaugau

SEQ ID NO: 1601340 - RNA, 19 nt, Artificial Sequence
  Description of Artificial Sequence: Synthetic oligonucleotide
  Antisense strand to SEQ ID NO: 1601339
aucauuagcagacguuuga

SEQ ID NO: 1601341 - RNA, 19 nt, Artificial Sequence
  Description of Artificial Sequence: Synthetic oligonucleotide
  Sense strand starting at position 3501 of SEQ ID NO: 1560457
cugcuaaugaugcauggau

SEQ ID NO: 1601342 - RNA, 19 nt, Artificial Sequence
  Description of Artificial Sequence: Synthetic oligonucleotide
  Antisense strand to SEQ ID NO: 1601341
auccaugcaucauuagcag

SEQ ID NO: 1601343 - RNA, 19 nt, Artificial Sequence
  Description of Artificial Sequence: Synthetic oligonucleotide
  Sense strand starting at position 3526 of SEQ ID NO: 1560457
cgggauauauccuuacaac

SEQ ID NO: 1601344 - RNA, 19 nt, Artificial Sequence
  Description of Artificial Sequence: Synthetic oligonucleotide
  Antisense strand to SEQ ID NO: 1601343
guuguaaggauauaucccg

SEQ ID NO: 1601345 - RNA, 19 nt, Artificial Sequence
  Description of Artificial Sequence: Synthetic oligonucleotide
  Sense strand starting at position 3543 of SEQ ID NO: 1560457
acagaauauuauccgccau

SEQ ID NO: 1601346 - RNA, 19 nt, Artificial Sequence
  Description of Artificial Sequence: Synthetic oligonucleotide
  Antisense strand to SEQ ID NO: 1601345
auggcggauaauauucugu

SEQ ID NO: 1601347 - RNA, 19 nt, Artificial Sequence
  Description of Artificial Sequence: Synthetic oligonucleotide
  Sense strand starting at position 3878 of SEQ ID NO: 1560457
gagcgagucucugacacaa

SEQ ID NO: 1601348 - RNA, 19 nt, Artificial Sequence
  Description of Artificial Sequence: Synthetic oligonucleotide
  Antisense strand to SEQ ID NO: 1601347
uugugucagagacucgcuc

SEQ ID NO: 1601349 - RNA, 19 nt, Artificial Sequence
  Description of Artificial Sequence: Synthetic oligonucleotide
  Sense strand starting at position 3880 of SEQ ID NO: 1560457
gcgagucucugacacaagu

SEQ ID NO: 1601350 - RNA, 19 nt, Artificial Sequence
  Description of Artificial Sequence: Synthetic oligonucleotide
  Antisense strand to SEQ ID NO: 1601349
acuugugucagagacucgc

SEQ ID NO: 1601351 - RNA, 19 nt, Artificial Sequence
  Description of Artificial Sequence: Synthetic oligonucleotide
  Sense strand starting at position 3958 of SEQ ID NO: 1560457
cacacagugugugaucaga

SEQ ID NO: 1601352 - RNA, 19 nt, Artificial Sequence
  Description of Artificial Sequence: Synthetic oligonucleotide
  Antisense strand to SEQ ID NO: 1601351
ucugaucacacacugugug

SEQ ID NO: 1601353 - RNA, 19 nt, Artificial Sequence
  Description of Artificial Sequence: Synthetic oligonucleotide
  Sense strand starting at position 3960 of SEQ ID NO: 1560457
cacagugugugaucagaau

SEQ ID NO: 1601354 - RNA, 19 nt, Artificial Sequence
  Description of Artificial Sequence: Synthetic oligonucleotide
  Antisense strand to SEQ ID NO: 1601353
auucugaucacacacugug

SEQ ID NO: 1601355 - RNA, 19 nt, Artificial Sequence
  Description of Artificial Sequence: Synthetic oligonucleotide
  Sense strand starting at position 3966 of SEQ ID NO: 1560457
gugugaucagaauguucag

SEQ ID NO: 1601356 - RNA, 19 nt, Artificial Sequence
  Description of Artificial Sequence: Synthetic oligonucleotide
  Antisense strand to SEQ ID NO: 1601355
cugaacauucugaucacac

SEQ ID NO: 1601357 - RNA, 19 nt, Artificial Sequence
  Description of Artificial Sequence: Synthetic oligonucleotide
  Sense strand starting at position 16 of SEQ ID NO: 1560458
ccugguggaucccauuaga

SEQ ID NO: 1601358 - RNA, 19 nt, Artificial Sequence
  Description of Artificial Sequence: Synthetic oligonucleotide
  Antisense strand to SEQ ID NO: 1601357
ucuaaugggauccaccagg

SEQ ID NO: 1601359 - RNA, 19 nt, Artificial Sequence
  Description of Artificial Sequence: Synthetic oligonucleotide
  Sense strand starting at position 1494 of SEQ ID NO: 1560458
gcugcauuccagugacucu

SEQ ID NO: 1601360 - RNA, 19 nt, Artificial Sequence
  Description of Artificial Sequence: Synthetic oligonucleotide
  Antisense strand to SEQ ID NO: 1601359
agagucacuggaaugcagc

SEQ ID NO: 1601361 - RNA, 19 nt, Artificial Sequence
  Description of Artificial Sequence: Synthetic oligonucleotide
  Sense strand starting at position 1992 of SEQ ID NO: 1560458
cuguaagcuucccaggaca

SEQ ID NO: 1601362 - RNA, 19 nt, Artificial Sequence
  Description of Artificial Sequence: Synthetic oligonucleotide
  Antisense strand to SEQ ID NO: 1601361
uguccugggaagcuuacag

SEQ ID NO: 1601363 - RNA, 19 nt, Artificial Sequence
  Description of Artificial Sequence: Synthetic oligonucleotide
  Sense strand starting at position 1994 of SEQ ID NO: 1560458
guaagcuucccaggacauu

SEQ ID NO: 1601364 - RNA, 19 nt, Artificial Sequence
  Description of Artificial Sequence: Synthetic oligonucleotide
  Antisense strand to SEQ ID NO: 1601363
aauguccugggaagcuuac

SEQ ID NO: 1601365 - RNA, 19 nt, Artificial Sequence
  Description of Artificial Sequence: Synthetic oligonucleotide
  Sense strand starting at position 2006 of SEQ ID NO: 1560458
ggacauuccugaguccuga

SEQ ID NO: 1601366 - RNA, 19 nt, Artificial Sequence
  Description of Artificial Sequence: Synthetic oligonucleotide
  Antisense strand to SEQ ID NO: 1601365
ucaggacucaggaaugucc

SEQ ID NO: 1601367 - RNA, 19 nt, Artificial Sequence
  Description of Artificial Sequence: Synthetic oligonucleotide
  Sense strand starting at position 2215 of SEQ ID NO: 1560458
acaccuguguccuaugaau

SEQ ID NO: 1601368 - RNA, 19 nt, Artificial Sequence
  Description of Artificial Sequence: Synthetic oligonucleotide
  Antisense strand to SEQ ID NO: 1601367
auucauaggacacaggugu

SEQ ID NO: 1601369 - RNA, 19 nt, Artificial Sequence
  Description of Artificial Sequence: Synthetic oligonucleotide
  Sense strand starting at position 2277 of SEQ ID NO: 1560458
gccauauccagacgcaugu

SEQ ID NO: 1601370 - RNA, 19 nt, Artificial Sequence
  Description of Artificial Sequence: Synthetic oligonucleotide
  Antisense strand to SEQ ID NO: 1601369
acaugcgucuggauauggc

SEQ ID NO: 1601371 - RNA, 19 nt, Artificial Sequence
  Description of Artificial Sequence: Synthetic oligonucleotide
  Sense strand starting at position 2986 of SEQ ID NO: 1560458
ccgcgaaucugcagugagu

SEQ ID NO: 1601372 - RNA, 19 nt, Artificial Sequence
  Description of Artificial Sequence: Synthetic oligonucleotide
  Antisense strand to SEQ ID NO: 1601371
acucacugcagauucgcgg

SEQ ID NO: 1601373 - RNA, 19 nt, Artificial Sequence
  Description of Artificial Sequence: Synthetic oligonucleotide
  Sense strand starting at position 3091 of SEQ ID NO: 1560458
cuuguacuacccuagcgau

SEQ ID NO: 1601374 - RNA, 19 nt, Artificial Sequence
  Description of Artificial Sequence: Synthetic oligonucleotide
  Antisense strand to SEQ ID NO: 1601373
aucgcuaggguaguacaag

SEQ ID NO: 1601375 - RNA, 19 nt, Artificial Sequence
  Description of Artificial Sequence: Synthetic oligonucleotide
  Sense strand starting at position 3094 of SEQ ID NO: 1560458
guacuacccuagcgaucaa

SEQ ID NO: 1601376 - RNA, 19 nt, Artificial Sequence
  Description of Artificial Sequence: Synthetic oligonucleotide
  Antisense strand to SEQ ID NO: 1601375
uugaucgcuaggguaguac

SEQ ID NO: 1601377 - RNA, 19 nt, Artificial Sequence
  Description of Artificial Sequence: Synthetic oligonucleotide
  Sense strand starting at position 3234 of SEQ ID NO: 1560458
cagguugcucucgaagcua

SEQ ID NO: 1601378 - RNA, 19 nt, Artificial Sequence
  Description of Artificial Sequence: Synthetic oligonucleotide
  Antisense strand to SEQ ID NO: 1601377
uagcuucgagagcaaccug

SEQ ID NO: 1601379 - RNA, 19 nt, Artificial Sequence
  Description of Artificial Sequence: Synthetic oligonucleotide
  Sense strand starting at position 3430 of SEQ ID NO: 1560458
accugauugugucuucuaa

SEQ ID NO: 1601380 - RNA, 19 nt, Artificial Sequence
  Description of Artificial Sequence: Synthetic oligonucleotide
  Antisense strand to SEQ ID NO: 1601379
uuagaagacacaaucaggu

SEQ ID NO: 1601381 - RNA, 19 nt, Artificial Sequence
  Description of Artificial Sequence: Synthetic oligonucleotide
  Sense strand starting at position 502 of SEQ ID NO: 1560459
aaacaaaggucuggaggua

SEQ ID NO: 1601382 - RNA, 19 nt, Artificial Sequence
  Description of Artificial Sequence: Synthetic oligonucleotide
  Antisense strand to SEQ ID NO: 1601381
uaccuccagaccuuuguuu

SEQ ID NO: 1601383 - RNA, 19 nt, Artificial Sequence
  Description of Artificial Sequence: Synthetic oligonucleotide
  Sense strand starting at position 514 of SEQ ID NO: 1560459
ggagguaguaaaugucaca

SEQ ID NO: 1601384 - RNA, 19 nt, Artificial Sequence
  Description of Artificial Sequence: Synthetic oligonucleotide
  Antisense strand to SEQ ID NO: 1601383
ugugacauuuacuaccucc

SEQ ID NO: 1601385 - RNA, 19 nt, Artificial Sequence
  Description of Artificial Sequence: Synthetic oligonucleotide
  Sense strand starting at position 517 of SEQ ID NO: 1560459
gguaguaaaugucacacca

SEQ ID NO: 1601386 - RNA, 19 nt, Artificial Sequence
  Description of Artificial Sequence: Synthetic oligonucleotide
  Antisense strand to SEQ ID NO: 1601385
uggugugacauuuacuacc

SEQ ID NO: 1601387 - RNA, 19 nt, Artificial Sequence
  Description of Artificial Sequence: Synthetic oligonucleotide
  Sense strand starting at position 2169 of SEQ ID NO: 1560459
acagguuucuaccuggcaa

SEQ ID NO: 1601388 - RNA, 19 nt, Artificial Sequence
  Description of Artificial Sequence: Synthetic oligonucleotide
  Antisense strand to SEQ ID NO: 1601387
uugccagguagaaaccugu

SEQ ID NO: 1601389 - RNA, 19 nt, Artificial Sequence
  Description of Artificial Sequence: Synthetic oligonucleotide
  Sense strand starting at position 2268 of SEQ ID NO: 1560459
aggccuaaguucucuaaua

SEQ ID NO: 1601390 - RNA, 19 nt, Artificial Sequence
  Description of Artificial Sequence: Synthetic oligonucleotide
  Antisense strand to SEQ ID NO: 1601389
uauuagagaacuuaggccu

SEQ ID NO: 1601391 - RNA, 19 nt, Artificial Sequence
  Description of Artificial Sequence: Synthetic oligonucleotide
  Sense strand starting at position 2269 of SEQ ID NO: 1560459
ggccuaaguucucuaauau

SEQ ID NO: 1601392 - RNA, 19 nt, Artificial Sequence
  Description of Artificial Sequence: Synthetic oligonucleotide
  Antisense strand to SEQ ID NO: 1601391
auauuagagaacuuaggcc

SEQ ID NO: 1601393 - RNA, 19 nt, Artificial Sequence
  Description of Artificial Sequence: Synthetic oligonucleotide
  Sense strand starting at position 2270 of SEQ ID NO: 1560459
gccuaaguucucuaauaug

SEQ ID NO: 1601394 - RNA, 19 nt, Artificial Sequence
  Description of Artificial Sequence: Synthetic oligonucleotide
  Antisense strand to SEQ ID NO: 1601393
cauauuagagaacuuaggc

SEQ ID NO: 1601395 - RNA, 19 nt, Artificial Sequence
  Description of Artificial Sequence: Synthetic oligonucleotide
  Sense strand starting at position 2492 of SEQ ID NO: 1560459
gcacaagcuugucauagca

SEQ ID NO: 1601396 - RNA, 19 nt, Artificial Sequence
  Description of Artificial Sequence: Synthetic oligonucleotide
  Antisense strand to SEQ ID NO: 1601395
ugcuaugacaagcuugugc

SEQ ID NO: 1601397 - RNA, 19 nt, Artificial Sequence
  Description of Artificial Sequence: Synthetic oligonucleotide
  Sense strand starting at position 2494 of SEQ ID NO: 1560459
acaagcuugucauagcaau

SEQ ID NO: 1601398 - RNA, 19 nt, Artificial Sequence
  Description of Artificial Sequence: Synthetic oligonucleotide
  Antisense strand to SEQ ID NO: 1601397
auugcuaugacaagcuugu

SEQ ID NO: 1601399 - RNA, 19 nt, Artificial Sequence
  Description of Artificial Sequence: Synthetic oligonucleotide
  Sense strand starting at position 2500 of SEQ ID NO: 1560459
uugucauagcaaugguguu

SEQ ID NO: 1601400 - RNA, 19 nt, Artificial Sequence
  Description of Artificial Sequence: Synthetic oligonucleotide
  Antisense strand to SEQ ID NO: 1601399
aacaccauugcuaugacaa

SEQ ID NO: 1601401 - RNA, 19 nt, Artificial Sequence
  Description of Artificial Sequence: Synthetic oligonucleotide
  Sense strand starting at position 2506 of SEQ ID NO: 1560459
uagcaaugguguucguaac

SEQ ID NO: 1601402 - RNA, 19 nt, Artificial Sequence
  Description of Artificial Sequence: Synthetic oligonucleotide
  Antisense strand to SEQ ID NO: 1601401
guuacgaacaccauugcua

SEQ ID NO: 1601403 - RNA, 19 nt, Artificial Sequence
  Description of Artificial Sequence: Synthetic oligonucleotide
  Sense strand starting at position 2507 of SEQ ID NO: 1560459
agcaaugguguucguaaca

SEQ ID NO: 1601404 - RNA, 19 nt, Artificial Sequence
  Description of Artificial Sequence: Synthetic oligonucleotide
  Antisense strand to SEQ ID NO: 1601403
uguuacgaacaccauugcu

SEQ ID NO: 1601405 - RNA, 19 nt, Artificial Sequence
  Description of Artificial Sequence: Synthetic oligonucleotide
  Sense strand starting at position 2542 of SEQ ID NO: 1560459
ucccaagacguccaugaaa

SEQ ID NO: 1601406 - RNA, 19 nt, Artificial Sequence
  Description of Artificial Sequence: Synthetic oligonucleotide
  Antisense strand to SEQ ID NO: 1601405
uuucauggacgucuuggga

SEQ ID NO: 1601407 - RNA, 19 nt, Artificial Sequence
  Description of Artificial Sequence: Synthetic oligonucleotide
  Sense strand starting at position 2544 of SEQ ID NO: 1560459
ccaagacguccaugaaaua

SEQ ID NO: 1601408 - RNA, 19 nt, Artificial Sequence
  Description of Artificial Sequence: Synthetic oligonucleotide
  Antisense strand to SEQ ID NO: 1601407
uauuucauggacgucuugg

SEQ ID NO: 1601409 - RNA, 19 nt, Artificial Sequence
  Description of Artificial Sequence: Synthetic oligonucleotide
  Sense strand starting at position 2629 of SEQ ID NO: 1560459
acugauaucgggugagccu

SEQ ID NO: 1601410 - RNA, 19 nt, Artificial Sequence
  Description of Artificial Sequence: Synthetic oligonucleotide
  Antisense strand to SEQ ID NO: 1601409
aggcucacccgauaucagu

SEQ ID NO: 1601411 - RNA, 19 nt, Artificial Sequence
  Description of Artificial Sequence: Synthetic oligonucleotide
  Sense strand starting at position 2638 of SEQ ID NO: 1560459
gggugagccucucuauaug

SEQ ID NO: 1601412 - RNA, 19 nt, Artificial Sequence
  Description of Artificial Sequence: Synthetic oligonucleotide
  Antisense strand to SEQ ID NO: 1601411
cauauagagaggcucaccc

SEQ ID NO: 1601413 - RNA, 19 nt, Artificial Sequence
  Description of Artificial Sequence: Synthetic oligonucleotide
  Sense strand starting at position 2649 of SEQ ID NO: 1560459
ucuauauggaggugaggau

SEQ ID NO: 1601414 - RNA, 19 nt, Artificial Sequence
  Description of Artificial Sequence: Synthetic oligonucleotide
  Antisense strand to SEQ ID NO: 1601413
auccucaccuccauauaga

SEQ ID NO: 1601415 - RNA, 19 nt, Artificial Sequence
  Description of Artificial Sequence: Synthetic oligonucleotide
  Sense strand starting at position 2696 of SEQ ID NO: 1560459
gugagcuguccucgugugu

SEQ ID NO: 1601416 - RNA, 19 nt, Artificial Sequence
  Description of Artificial Sequence: Synthetic oligonucleotide
  Antisense strand to SEQ ID NO: 1601415
acacacgaggacagcucac

SEQ ID NO: 1601417 - RNA, 19 nt, Artificial Sequence
  Description of Artificial Sequence: Synthetic oligonucleotide
  Sense strand starting at position 2697 of SEQ ID NO: 1560459
ugagcuguccucgugugua

SEQ ID NO: 1601418 - RNA, 19 nt, Artificial Sequence
  Description of Artificial Sequence: Synthetic oligonucleotide
  Antisense strand to SEQ ID NO: 1601417
uacacacgaggacagcuca

SEQ ID NO: 1601419 - RNA, 19 nt, Artificial Sequence
  Description of Artificial Sequence: Synthetic oligonucleotide
  Sense strand starting at position 2699 of SEQ ID NO: 1560459
agcuguccucguguguaca

SEQ ID NO: 1601420 - RNA, 19 nt, Artificial Sequence
  Description of Artificial Sequence: Synthetic oligonucleotide
  Antisense strand to SEQ ID NO: 1601419
uguacacacgaggacagcu

SEQ ID NO: 1601421 - RNA, 19 nt, Artificial Sequence
  Description of Artificial Sequence: Synthetic oligonucleotide
  Sense strand starting at position 2700 of SEQ ID NO: 1560459
gcuguccucguguguacaa

SEQ ID NO: 1601422 - RNA, 19 nt, Artificial Sequence
  Description of Artificial Sequence: Synthetic oligonucleotide
  Antisense strand to SEQ ID NO: 1601421
uuguacacacgaggacagc

SEQ ID NO: 1601423 - RNA, 19 nt, Artificial Sequence
  Description of Artificial Sequence: Synthetic oligonucleotide
  Sense strand starting at position 2701 of SEQ ID NO: 1560459
cuguccucguguguacaaa

SEQ ID NO: 1601424 - RNA, 19 nt, Artificial Sequence
  Description of Artificial Sequence: Synthetic oligonucleotide
  Antisense strand to SEQ ID NO: 1601423
uuuguacacacgaggacag

SEQ ID NO: 1601425 - RNA, 19 nt, Artificial Sequence
  Description of Artificial Sequence: Synthetic oligonucleotide
  Sense strand starting at position 2726 of SEQ ID NO: 1560459
cagauauguguuugccggu

SEQ ID NO: 1601426 - RNA, 19 nt, Artificial Sequence
  Description of Artificial Sequence: Synthetic oligonucleotide
  Antisense strand to SEQ ID NO: 1601425
accggcaaacacauaucug

SEQ ID NO: 1601427 - RNA, 19 nt, Artificial Sequence
  Description of Artificial Sequence: Synthetic oligonucleotide
  Sense strand starting at position 2727 of SEQ ID NO: 1560459
agauauguguuugccggua

SEQ ID NO: 1601428 - RNA, 19 nt, Artificial Sequence
  Description of Artificial Sequence: Synthetic oligonucleotide
  Antisense strand to SEQ ID NO: 1601427
uaccggcaaacacauaucu

SEQ ID NO: 1601429 - RNA, 19 nt, Artificial Sequence
  Description of Artificial Sequence: Synthetic oligonucleotide
  Sense strand starting at position 2740 of SEQ ID NO: 1560459
ccgguaugugcuggaagga

SEQ ID NO: 1601430 - RNA, 19 nt, Artificial Sequence
  Description of Artificial Sequence: Synthetic oligonucleotide
  Antisense strand to SEQ ID NO: 1601429
uccuuccagcacauaccgg

SEQ ID NO: 1601431 - RNA, 19 nt, Artificial Sequence
  Description of Artificial Sequence: Synthetic oligonucleotide
  Sense strand starting at position 2766 of SEQ ID NO: 1560459
gggugcguuucacugcaga

SEQ ID NO: 1601432 - RNA, 19 nt, Artificial Sequence
  Description of Artificial Sequence: Synthetic oligonucleotide
  Antisense strand to SEQ ID NO: 1601431
ucugcagugaaacgcaccc

SEQ ID NO: 1601433 - RNA, 19 nt, Artificial Sequence
  Description of Artificial Sequence: Synthetic oligonucleotide
  Sense strand starting at position 2819 of SEQ ID NO: 1560459
gggcaacauagugaguaua

SEQ ID NO: 1601434 - RNA, 19 nt, Artificial Sequence
  Description of Artificial Sequence: Synthetic oligonucleotide
  Antisense strand to SEQ ID NO: 1601433
uauacucacuauguugccc

SEQ ID NO: 1601435 - RNA, 19 nt, Artificial Sequence
  Description of Artificial Sequence: Synthetic oligonucleotide
  Sense strand starting at position 2821 of SEQ ID NO: 1560459
gcaacauagugaguauaca

SEQ ID NO: 1601436 - RNA, 19 nt, Artificial Sequence
  Description of Artificial Sequence: Synthetic oligonucleotide
  Antisense strand to SEQ ID NO: 1601435
uguauacucacuauguugc

SEQ ID NO: 1601437 - RNA, 19 nt, Artificial Sequence
  Description of Artificial Sequence: Synthetic oligonucleotide
  Sense strand starting at position 2935 of SEQ ID NO: 1560459
gcaagucugcagugaggua

SEQ ID NO: 1601438 - RNA, 19 nt, Artificial Sequence
  Description of Artificial Sequence: Synthetic oligonucleotide
  Antisense strand to SEQ ID NO: 1601437
uaccucacugcagacuugc

SEQ ID NO: 1601439 - RNA, 19 nt, Artificial Sequence
  Description of Artificial Sequence: Synthetic oligonucleotide
  Sense strand starting at position 2948 of SEQ ID NO: 1560459
gagguaugauugcgucacu

SEQ ID NO: 1601440 - RNA, 19 nt, Artificial Sequence
  Description of Artificial Sequence: Synthetic oligonucleotide
  Antisense strand to SEQ ID NO: 1601439
agugacgcaaucauaccuc

SEQ ID NO: 1601441 - RNA, 19 nt, Artificial Sequence
  Description of Artificial Sequence: Synthetic oligonucleotide
  Sense strand starting at position 2951 of SEQ ID NO: 1560459
guaugauugcgucacugca

SEQ ID NO: 1601442 - RNA, 19 nt, Artificial Sequence
  Description of Artificial Sequence: Synthetic oligonucleotide
  Antisense strand to SEQ ID NO: 1601441
ugcagugacgcaaucauac

SEQ ID NO: 1601443 - RNA, 19 nt, Artificial Sequence
  Description of Artificial Sequence: Synthetic oligonucleotide
  Sense strand starting at position 3030 of SEQ ID NO: 1560459
ggcgccggcgucuuugaaa

SEQ ID NO: 1601444 - RNA, 19 nt, Artificial Sequence
  Description of Artificial Sequence: Synthetic oligonucleotide
  Antisense strand to SEQ ID NO: 1601443
uuucaaagacgccggcgcc

SEQ ID NO: 1601445 - RNA, 19 nt, Artificial Sequence
  Description of Artificial Sequence: Synthetic oligonucleotide
  Sense strand starting at position 3033 of SEQ ID NO: 1560459
gccggcgucuuugaaauaa

SEQ ID NO: 1601446 - RNA, 19 nt, Artificial Sequence
  Description of Artificial Sequence: Synthetic oligonucleotide
  Antisense strand to SEQ ID NO: 1601445
uuauuucaaagacgccggc

SEQ ID NO: 1601447 - RNA, 19 nt, Artificial Sequence
  Description of Artificial Sequence: Synthetic oligonucleotide
  Sense strand starting at position 3417 of SEQ ID NO: 1560459
ggcgcuuucccaguccuga

SEQ ID NO: 1601448 - RNA, 19 nt, Artificial Sequence
  Description of Artificial Sequence: Synthetic oligonucleotide
  Antisense strand to SEQ ID NO: 1601447
ucaggacugggaaagcgcc

SEQ ID NO: 1601449 - RNA, 19 nt, Artificial Sequence
  Description of Artificial Sequence: Synthetic oligonucleotide
  Sense strand starting at position 3421 of SEQ ID NO: 1560459
cuuucccaguccugagaga

SEQ ID NO: 1601450 - RNA, 19 nt, Artificial Sequence
  Description of Artificial Sequence: Synthetic oligonucleotide
  Antisense strand to SEQ ID NO: 1601449
ucucucaggacugggaaag

SEQ ID NO: 1601451 - RNA, 19 nt, Artificial Sequence
  Description of Artificial Sequence: Synthetic oligonucleotide
  Sense strand starting at position 406 of SEQ ID NO: 1560460
gcccuaacuccucaggacu

SEQ ID NO: 1601452 - RNA, 19 nt, Artificial Sequence
  Description of Artificial Sequence: Synthetic oligonucleotide
  Antisense strand to SEQ ID NO: 1601451
aguccugaggaguuagggc

SEQ ID NO: 1601453 - RNA, 19 nt, Artificial Sequence
  Description of Artificial Sequence: Synthetic oligonucleotide
  Sense strand starting at position 453 of SEQ ID NO: 1560460
gcccuuccuaagugaggaa

SEQ ID NO: 1601454 - RNA, 19 nt, Artificial Sequence
  Description of Artificial Sequence: Synthetic oligonucleotide
  Antisense strand to SEQ ID NO: 1601453
uuccucacuuaggaagggc

SEQ ID NO: 1601455 - RNA, 19 nt, Artificial Sequence
  Description of Artificial Sequence: Synthetic oligonucleotide
  Sense strand starting at position 560 of SEQ ID NO: 1560460
gagggauccugccuggcuu

SEQ ID NO: 1601456 - RNA, 19 nt, Artificial Sequence
  Description of Artificial Sequence: Synthetic oligonucleotide
  Antisense strand to SEQ ID NO: 1601455
aagccaggcaggaucccuc

SEQ ID NO: 1601457 - RNA, 19 nt, Artificial Sequence
  Description of Artificial Sequence: Synthetic oligonucleotide
  Sense strand starting at position 573 of SEQ ID NO: 1560460
uggcuuuaucuccagggca

SEQ ID NO: 1601458 - RNA, 19 nt, Artificial Sequence
  Description of Artificial Sequence: Synthetic oligonucleotide
  Antisense strand to SEQ ID NO: 1601457
ugcccuggagauaaagcca

SEQ ID NO: 1601459 - RNA, 19 nt, Artificial Sequence
  Description of Artificial Sequence: Synthetic oligonucleotide
  Sense strand starting at position 575 of SEQ ID NO: 1560460
gcuuuaucuccagggcaau

SEQ ID NO: 1601460 - RNA, 19 nt, Artificial Sequence
  Description of Artificial Sequence: Synthetic oligonucleotide
  Antisense strand to SEQ ID NO: 1601459
auugcccuggagauaaagc

SEQ ID NO: 1601461 - RNA, 19 nt, Artificial Sequence
  Description of Artificial Sequence: Synthetic oligonucleotide
  Sense strand starting at position 576 of SEQ ID NO: 1560460
cuuuaucuccagggcaaua

SEQ ID NO: 1601462 - RNA, 19 nt, Artificial Sequence
  Description of Artificial Sequence: Synthetic oligonucleotide
  Antisense strand to SEQ ID NO: 1601461
uauugcccuggagauaaag

SEQ ID NO: 1601463 - RNA, 19 nt, Artificial Sequence
  Description of Artificial Sequence: Synthetic oligonucleotide
  Sense strand starting at position 596 of SEQ ID NO: 1560460
ggagccauagaagguguua

SEQ ID NO: 1601464 - RNA, 19 nt, Artificial Sequence
  Description of Artificial Sequence: Synthetic oligonucleotide
  Antisense strand to SEQ ID NO: 1601463
uaacaccuucuauggcucc

SEQ ID NO: 1601465 - RNA, 19 nt, Artificial Sequence
  Description of Artificial Sequence: Synthetic oligonucleotide
  Sense strand starting at position 598 of SEQ ID NO: 1560460
agccauagaagguguuaga

SEQ ID NO: 1601466 - RNA, 19 nt, Artificial Sequence
  Description of Artificial Sequence: Synthetic oligonucleotide
  Antisense strand to SEQ ID NO: 1601465
ucuaacaccuucuauggcu

SEQ ID NO: 1601467 - RNA, 19 nt, Artificial Sequence
  Description of Artificial Sequence: Synthetic oligonucleotide
  Sense strand starting at position 601 of SEQ ID NO: 1560460
cauagaagguguuagaaca

SEQ ID NO: 1601468 - RNA, 19 nt, Artificial Sequence
  Description of Artificial Sequence: Synthetic oligonucleotide
  Antisense strand to SEQ ID NO: 1601467
uguucuaacaccuucuaug

SEQ ID NO: 1601469 - RNA, 19 nt, Artificial Sequence
  Description of Artificial Sequence: Synthetic oligonucleotide
  Sense strand starting at position 622 of SEQ ID NO: 1560460
ggaggucagaucugacugu

SEQ ID NO: 1601470 - RNA, 19 nt, Artificial Sequence
  Description of Artificial Sequence: Synthetic oligonucleotide
  Antisense strand to SEQ ID NO: 1601469
acagucagaucugaccucc

SEQ ID NO: 1601471 - RNA, 19 nt, Artificial Sequence
  Description of Artificial Sequence: Synthetic oligonucleotide
  Sense strand starting at position 623 of SEQ ID NO: 1560460
gaggucagaucugacuguu

SEQ ID NO: 1601472 - RNA, 19 nt, Artificial Sequence
  Description of Artificial Sequence: Synthetic oligonucleotide
  Antisense strand to SEQ ID NO: 1601471
aacagucagaucugaccuc

SEQ ID NO: 1601473 - RNA, 19 nt, Artificial Sequence
  Description of Artificial Sequence: Synthetic oligonucleotide
  Sense strand starting at position 626 of SEQ ID NO: 1560460
gucagaucugacuguugga

SEQ ID NO: 1601474 - RNA, 19 nt, Artificial Sequence
  Description of Artificial Sequence: Synthetic oligonucleotide
  Antisense strand to SEQ ID NO: 1601473
uccaacagucagaucugac

SEQ ID NO: 1601475 - RNA, 19 nt, Artificial Sequence
  Description of Artificial Sequence: Synthetic oligonucleotide
  Sense strand starting at position 727 of SEQ ID NO: 1560460
acggguugagcccaggaau

SEQ ID NO: 1601476 - RNA, 19 nt, Artificial Sequence
  Description of Artificial Sequence: Synthetic oligonucleotide
  Antisense strand to SEQ ID NO: 1601475
auuccugggcucaacccgu

SEQ ID NO: 1601477 - RNA, 19 nt, Artificial Sequence
  Description of Artificial Sequence: Synthetic oligonucleotide
  Sense strand starting at position 811 of SEQ ID NO: 1560460
gcuaaaugcccucaucgaa

SEQ ID NO: 1601478 - RNA, 19 nt, Artificial Sequence
  Description of Artificial Sequence: Synthetic oligonucleotide
  Antisense strand to SEQ ID NO: 1601477
uucgaugagggcauuuagc

SEQ ID NO: 1601479 - RNA, 19 nt, Artificial Sequence
  Description of Artificial Sequence: Synthetic oligonucleotide
  Sense strand starting at position 823 of SEQ ID NO: 1560460
caucgaacguucucaauug

SEQ ID NO: 1601480 - RNA, 19 nt, Artificial Sequence
  Description of Artificial Sequence: Synthetic oligonucleotide
  Antisense strand to SEQ ID NO: 1601479
caauugagaacguucgaug

SEQ ID NO: 1601481 - RNA, 19 nt, Artificial Sequence
  Description of Artificial Sequence: Synthetic oligonucleotide
  Sense strand starting at position 829 of SEQ ID NO: 1560460
acguucucaauuggaagaa

SEQ ID NO: 1601482 - RNA, 19 nt, Artificial Sequence
  Description of Artificial Sequence: Synthetic oligonucleotide
  Antisense strand to SEQ ID NO: 1601481
uucuuccaauugagaacgu

SEQ ID NO: 1601483 - RNA, 19 nt, Artificial Sequence
  Description of Artificial Sequence: Synthetic oligonucleotide
  Sense strand starting at position 1007 of SEQ ID NO: 1560460
guggcacuccucuguaaug

SEQ ID NO: 1601484 - RNA, 19 nt, Artificial Sequence
  Description of Artificial Sequence: Synthetic oligonucleotide
  Antisense strand to SEQ ID NO: 1601483
cauuacagaggagugccac

SEQ ID NO: 1601485 - RNA, 19 nt, Artificial Sequence
  Description of Artificial Sequence: Synthetic oligonucleotide
  Sense strand starting at position 1326 of SEQ ID NO: 1560460
gcagcuuugacgccugacu

SEQ ID NO: 1601486 - RNA, 19 nt, Artificial Sequence
  Description of Artificial Sequence: Synthetic oligonucleotide
  Antisense strand to SEQ ID NO: 1601485
agucaggcgucaaagcugc

SEQ ID NO: 1601487 - RNA, 19 nt, Artificial Sequence
  Description of Artificial Sequence: Synthetic oligonucleotide
  Sense strand starting at position 1341 of SEQ ID NO: 1560460
gacuguaccgcucagagga

SEQ ID NO: 1601488 - RNA, 19 nt, Artificial Sequence
  Description of Artificial Sequence: Synthetic oligonucleotide
  Antisense strand to SEQ ID NO: 1601487
uccucugagcgguacaguc

SEQ ID NO: 1601489 - RNA, 19 nt, Artificial Sequence
  Description of Artificial Sequence: Synthetic oligonucleotide
  Sense strand starting at position 1456 of SEQ ID NO: 1560460
cgagucacccgccagagau

SEQ ID NO: 1601490 - RNA, 19 nt, Artificial Sequence
  Description of Artificial Sequence: Synthetic oligonucleotide
  Antisense strand to SEQ ID NO: 1601489
aucucuggcgggugacucg

SEQ ID NO: 1601491 - RNA, 19 nt, Artificial Sequence
  Description of Artificial Sequence: Synthetic oligonucleotide
  Sense strand starting at position 1515 of SEQ ID NO: 1560460
acaugucuucgcugcugga

SEQ ID NO: 1601492 - RNA, 19 nt, Artificial Sequence
  Description of Artificial Sequence: Synthetic oligonucleotide
  Antisense strand to SEQ ID NO: 1601491
uccagcagcgaagacaugu

SEQ ID NO: 1601493 - RNA, 19 nt, Artificial Sequence
  Description of Artificial Sequence: Synthetic oligonucleotide
  Sense strand starting at position 2339 of SEQ ID NO: 1560460
ggucucagcagcugagaaa

SEQ ID NO: 1601494 - RNA, 19 nt, Artificial Sequence
  Description of Artificial Sequence: Synthetic oligonucleotide
  Antisense strand to SEQ ID NO: 1601493
uuucucagcugcugagacc

SEQ ID NO: 1601495 - RNA, 19 nt, Artificial Sequence
  Description of Artificial Sequence: Synthetic oligonucleotide
  Sense strand starting at position 2450 of SEQ ID NO: 1560460
guggaucaggccuguuauc

SEQ ID NO: 1601496 - RNA, 19 nt, Artificial Sequence
  Description of Artificial Sequence: Synthetic oligonucleotide
  Antisense strand to SEQ ID NO: 1601495
gauaacaggccugauccac

SEQ ID NO: 1601497 - RNA, 19 nt, Artificial Sequence
  Description of Artificial Sequence: Synthetic oligonucleotide
  Sense strand starting at position 3607 of SEQ ID NO: 1560460
caacuagugcccugaaggu

SEQ ID NO: 1601498 - RNA, 19 nt, Artificial Sequence
  Description of Artificial Sequence: Synthetic oligonucleotide
  Antisense strand to SEQ ID NO: 1601497
accuucagggcacuaguug

SEQ ID NO: 1601499 - RNA, 19 nt, Artificial Sequence
  Description of Artificial Sequence: Synthetic oligonucleotide
  Sense strand starting at position 3708 of SEQ ID NO: 1560460
gagacuuaguuucgucauc

SEQ ID NO: 1601500 - RNA, 19 nt, Artificial Sequence
  Description of Artificial Sequence: Synthetic oligonucleotide
  Antisense strand to SEQ ID NO: 1601499
gaugacgaaacuaagucuc

SEQ ID NO: 1601501 - RNA, 19 nt, Artificial Sequence
  Description of Artificial Sequence: Synthetic oligonucleotide
  Sense strand starting at position 3709 of SEQ ID NO: 1560460
agacuuaguuucgucaucu

SEQ ID NO: 1601502 - RNA, 19 nt, Artificial Sequence
  Description of Artificial Sequence: Synthetic oligonucleotide
  Antisense strand to SEQ ID NO: 1601501
agaugacgaaacuaagucu

SEQ ID NO: 1601503 - RNA, 19 nt, Artificial Sequence
  Description of Artificial Sequence: Synthetic oligonucleotide
  Sense strand starting at position 3710 of SEQ ID NO: 1560460
gacuuaguuucgucaucug

SEQ ID NO: 1601504 - RNA, 19 nt, Artificial Sequence
  Description of Artificial Sequence: Synthetic oligonucleotide
  Antisense strand to SEQ ID NO: 1601503
cagaugacgaaacuaaguc

SEQ ID NO: 1601505 - RNA, 19 nt, Artificial Sequence
  Description of Artificial Sequence: Synthetic oligonucleotide
  Sense strand starting at position 8 of SEQ ID NO: 1560461
ccaucuguccugugcucua

SEQ ID NO: 1601506 - RNA, 19 nt, Artificial Sequence
  Description of Artificial Sequence: Synthetic oligonucleotide
  Antisense strand to SEQ ID NO: 1601505
uagagcacaggacagaugg

SEQ ID NO: 1601507 - RNA, 19 nt, Artificial Sequence
  Description of Artificial Sequence: Synthetic oligonucleotide
  Sense strand starting at position 123 of SEQ ID NO: 1560461
ucuguuuccguguuucuga

SEQ ID NO: 1601508 - RNA, 19 nt, Artificial Sequence
  Description of Artificial Sequence: Synthetic oligonucleotide
  Antisense strand to SEQ ID NO: 1601507
ucagaaacacggaaacaga

SEQ ID NO: 1601509 - RNA, 19 nt, Artificial Sequence
  Description of Artificial Sequence: Synthetic oligonucleotide
  Sense strand starting at position 153 of SEQ ID NO: 1560461
ggacauuuccucugccuuu

SEQ ID NO: 1601510 - RNA, 19 nt, Artificial Sequence
  Description of Artificial Sequence: Synthetic oligonucleotide
  Antisense strand to SEQ ID NO: 1601509
aaaggcagaggaaaugucc

SEQ ID NO: 1601511 - RNA, 19 nt, Artificial Sequence
  Description of Artificial Sequence: Synthetic oligonucleotide
  Sense strand starting at position 770 of SEQ ID NO: 1560461
gggagcucguuaaagggau

SEQ ID NO: 1601512 - RNA, 19 nt, Artificial Sequence
  Description of Artificial Sequence: Synthetic oligonucleotide
  Antisense strand to SEQ ID NO: 1601511
aucccuuuaacgagcuccc

SEQ ID NO: 1601513 - RNA, 19 nt, Artificial Sequence
  Description of Artificial Sequence: Synthetic oligonucleotide
  Sense strand starting at position 771 of SEQ ID NO: 1560461
ggagcucguuaaagggauu

SEQ ID NO: 1601514 - RNA, 19 nt, Artificial Sequence
  Description of Artificial Sequence: Synthetic oligonucleotide
  Antisense strand to SEQ ID NO: 1601513
aaucccuuuaacgagcucc

SEQ ID NO: 1601515 - RNA, 19 nt, Artificial Sequence
  Description of Artificial Sequence: Synthetic oligonucleotide
  Sense strand starting at position 891 of SEQ ID NO: 1560461
ggccgagauuugguagugu

SEQ ID NO: 1601516 - RNA, 19 nt, Artificial Sequence
  Description of Artificial Sequence: Synthetic oligonucleotide
  Antisense strand to SEQ ID NO: 1601515
acacuaccaaaucucggcc

SEQ ID NO: 1601517 - RNA, 19 nt, Artificial Sequence
  Description of Artificial Sequence: Synthetic oligonucleotide
  Sense strand starting at position 1087 of SEQ ID NO: 1560461
ggugcuuuaagugaacaca

SEQ ID NO: 1601518 - RNA, 19 nt, Artificial Sequence
  Description of Artificial Sequence: Synthetic oligonucleotide
  Antisense strand to SEQ ID NO: 1601517
uguguucacuuaaagcacc

SEQ ID NO: 1601519 - RNA, 19 nt, Artificial Sequence
  Description of Artificial Sequence: Synthetic oligonucleotide
  Sense strand starting at position 1090 of SEQ ID NO: 1560461
gcuuuaagugaacacacuu

SEQ ID NO: 1601520 - RNA, 19 nt, Artificial Sequence
  Description of Artificial Sequence: Synthetic oligonucleotide
  Antisense strand to SEQ ID NO: 1601519
aaguguguucacuuaaagc

SEQ ID NO: 1601521 - RNA, 19 nt, Artificial Sequence
  Description of Artificial Sequence: Synthetic oligonucleotide
  Sense strand starting at position 1259 of SEQ ID NO: 1560461
ccugguggaucccauuaga

SEQ ID NO: 1601522 - RNA, 19 nt, Artificial Sequence
  Description of Artificial Sequence: Synthetic oligonucleotide
  Antisense strand to SEQ ID NO: 1601521
ucuaaugggauccaccagg

SEQ ID NO: 1601523 - RNA, 19 nt, Artificial Sequence
  Description of Artificial Sequence: Synthetic oligonucleotide
  Sense strand starting at position 2737 of SEQ ID NO: 1560461
gcugcauuccagugacucu

SEQ ID NO: 1601524 - RNA, 19 nt, Artificial Sequence
  Description of Artificial Sequence: Synthetic oligonucleotide
  Antisense strand to SEQ ID NO: 1601523
agagucacuggaaugcagc

SEQ ID NO: 1601525 - RNA, 19 nt, Artificial Sequence
  Description of Artificial Sequence: Synthetic oligonucleotide
  Sense strand starting at position 3235 of SEQ ID NO: 1560461
cuguaagcuucccaggaca

SEQ ID NO: 1601526 - RNA, 19 nt, Artificial Sequence
  Description of Artificial Sequence: Synthetic oligonucleotide
  Antisense strand to SEQ ID NO: 1601525
uguccugggaagcuuacag

SEQ ID NO: 1601527 - RNA, 19 nt, Artificial Sequence
  Description of Artificial Sequence: Synthetic oligonucleotide
  Sense strand starting at position 3237 of SEQ ID NO: 1560461
guaagcuucccaggacauu

SEQ ID NO: 1601528 - RNA, 19 nt, Artificial Sequence
  Description of Artificial Sequence: Synthetic oligonucleotide
  Antisense strand to SEQ ID NO: 1601527
aauguccugggaagcuuac

SEQ ID NO: 1601529 - RNA, 19 nt, Artificial Sequence
  Description of Artificial Sequence: Synthetic oligonucleotide
  Sense strand starting at position 3249 of SEQ ID NO: 1560461
ggacauuccugaguccuga

SEQ ID NO: 1601530 - RNA, 19 nt, Artificial Sequence
  Description of Artificial Sequence: Synthetic oligonucleotide
  Antisense strand to SEQ ID NO: 1601529
ucaggacucaggaaugucc

SEQ ID NO: 1601531 - RNA, 19 nt, Artificial Sequence
  Description of Artificial Sequence: Synthetic oligonucleotide
  Sense strand starting at position 3458 of SEQ ID NO: 1560461
acaccuguguccuaugaau

SEQ ID NO: 1601532 - RNA, 19 nt, Artificial Sequence
  Description of Artificial Sequence: Synthetic oligonucleotide
  Antisense strand to SEQ ID NO: 1601531
auucauaggacacaggugu

SEQ ID NO: 1601533 - RNA, 19 nt, Artificial Sequence
  Description of Artificial Sequence: Synthetic oligonucleotide
  Sense strand starting at position 3520 of SEQ ID NO: 1560461
gccauauccagacgcaugu

SEQ ID NO: 1601534 - RNA, 19 nt, Artificial Sequence
  Description of Artificial Sequence: Synthetic oligonucleotide
  Antisense strand to SEQ ID NO: 1601533
acaugcgucuggauauggc

SEQ ID NO: 1601535 - RNA, 19 nt, Artificial Sequence
  Description of Artificial Sequence: Synthetic oligonucleotide
  Sense strand starting at position 37 of SEQ ID NO: 1560462
gccacuucgcaaggagaca

SEQ ID NO: 1601536 - RNA, 19 nt, Artificial Sequence
  Description of Artificial Sequence: Synthetic oligonucleotide
  Antisense strand to SEQ ID NO: 1601535
ugucuccuugcgaaguggc

SEQ ID NO: 1601537 - RNA, 19 nt, Artificial Sequence
  Description of Artificial Sequence: Synthetic oligonucleotide
  Sense strand starting at position 84 of SEQ ID NO: 1560462
uccaguggugguuacagau

SEQ ID NO: 1601538 - RNA, 19 nt, Artificial Sequence
  Description of Artificial Sequence: Synthetic oligonucleotide
  Antisense strand to SEQ ID NO: 1601537
aucuguaaccaccacugga

SEQ ID NO: 1601539 - RNA, 19 nt, Artificial Sequence
  Description of Artificial Sequence: Synthetic oligonucleotide
  Sense strand starting at position 94 of SEQ ID NO: 1560462
guuacagaugcccauucuu

SEQ ID NO: 1601540 - RNA, 19 nt, Artificial Sequence
  Description of Artificial Sequence: Synthetic oligonucleotide
  Antisense strand to SEQ ID NO: 1601539
aagaaugggcaucuguaac

SEQ ID NO: 1601541 - RNA, 19 nt, Artificial Sequence
  Description of Artificial Sequence: Synthetic oligonucleotide
  Sense strand starting at position 117 of SEQ ID NO: 1560462
gucuccacugauuggucaa

SEQ ID NO: 1601542 - RNA, 19 nt, Artificial Sequence
  Description of Artificial Sequence: Synthetic oligonucleotide
  Antisense strand to SEQ ID NO: 1601541
uugaccaaucaguggagac

SEQ ID NO: 1601543 - RNA, 19 nt, Artificial Sequence
  Description of Artificial Sequence: Synthetic oligonucleotide
  Sense strand starting at position 124 of SEQ ID NO: 1560462
cugauuggucaauggagag

SEQ ID NO: 1601544 - RNA, 19 nt, Artificial Sequence
  Description of Artificial Sequence: Synthetic oligonucleotide
  Antisense strand to SEQ ID NO: 1601543
cucuccauugaccaaucag

SEQ ID NO: 1601545 - RNA, 19 nt, Artificial Sequence
  Description of Artificial Sequence: Synthetic oligonucleotide
  Sense strand starting at position 171 of SEQ ID NO: 1560462
gacuguugauacgcucuga

SEQ ID NO: 1601546 - RNA, 19 nt, Artificial Sequence
  Description of Artificial Sequence: Synthetic oligonucleotide
  Antisense strand to SEQ ID NO: 1601545
ucagagcguaucaacaguc

SEQ ID NO: 1601547 - RNA, 19 nt, Artificial Sequence
  Description of Artificial Sequence: Synthetic oligonucleotide
  Sense strand starting at position 181 of SEQ ID NO: 1560462
acgcucugauuggaugaaa

SEQ ID NO: 1601548 - RNA, 19 nt, Artificial Sequence
  Description of Artificial Sequence: Synthetic oligonucleotide
  Antisense strand to SEQ ID NO: 1601547
uuucauccaaucagagcgu

SEQ ID NO: 1601549 - RNA, 19 nt, Artificial Sequence
  Description of Artificial Sequence: Synthetic oligonucleotide
  Sense strand starting at position 224 of SEQ ID NO: 1560462
cgcucuuuggugcaguaua

SEQ ID NO: 1601550 - RNA, 19 nt, Artificial Sequence
  Description of Artificial Sequence: Synthetic oligonucleotide
  Antisense strand to SEQ ID NO: 1601549
uauacugcaccaaagagcg

SEQ ID NO: 1601551 - RNA, 19 nt, Artificial Sequence
  Description of Artificial Sequence: Synthetic oligonucleotide
  Sense strand starting at position 377 of SEQ ID NO: 1560462
cucugucgccaucacuaua

SEQ ID NO: 1601552 - RNA, 19 nt, Artificial Sequence
  Description of Artificial Sequence: Synthetic oligonucleotide
  Antisense strand to SEQ ID NO: 1601551
uauagugauggcgacagag

SEQ ID NO: 1601553 - RNA, 19 nt, Artificial Sequence
  Description of Artificial Sequence: Synthetic oligonucleotide
  Sense strand starting at position 527 of SEQ ID NO: 1560462
ucaguuucccuugggagaa

SEQ ID NO: 1601554 - RNA, 19 nt, Artificial Sequence
  Description of Artificial Sequence: Synthetic oligonucleotide
  Antisense strand to SEQ ID NO: 1601553
uucucccaagggaaacuga

SEQ ID NO: 1601555 - RNA, 19 nt, Artificial Sequence
  Description of Artificial Sequence: Synthetic oligonucleotide
  Sense strand starting at position 635 of SEQ ID NO: 1560462
ucaucuuguccgugcgauc

SEQ ID NO: 1601556 - RNA, 19 nt, Artificial Sequence
  Description of Artificial Sequence: Synthetic oligonucleotide
  Antisense strand to SEQ ID NO: 1601555
gaucgcacggacaagauga

SEQ ID NO: 1601557 - RNA, 19 nt, Artificial Sequence
  Description of Artificial Sequence: Synthetic oligonucleotide
  Sense strand starting at position 640 of SEQ ID NO: 1560462
uuguccgugcgaucuaaau

SEQ ID NO: 1601558 - RNA, 19 nt, Artificial Sequence
  Description of Artificial Sequence: Synthetic oligonucleotide
  Antisense strand to SEQ ID NO: 1601557
auuuagaucgcacggacaa

SEQ ID NO: 1601559 - RNA, 19 nt, Artificial Sequence
  Description of Artificial Sequence: Synthetic oligonucleotide
  Sense strand starting at position 642 of SEQ ID NO: 1560462
guccgugcgaucuaaauua

SEQ ID NO: 1601560 - RNA, 19 nt, Artificial Sequence
  Description of Artificial Sequence: Synthetic oligonucleotide
  Antisense strand to SEQ ID NO: 1601559
uaauuuagaucgcacggac

SEQ ID NO: 1601561 - RNA, 19 nt, Artificial Sequence
  Description of Artificial Sequence: Synthetic oligonucleotide
  Sense strand starting at position 921 of SEQ ID NO: 1560462
aagagaaugucggagggua

SEQ ID NO: 1601562 - RNA, 19 nt, Artificial Sequence
  Description of Artificial Sequence: Synthetic oligonucleotide
  Antisense strand to SEQ ID NO: 1601561
uacccuccgacauucucuu

SEQ ID NO: 1601563 - RNA, 19 nt, Artificial Sequence
  Description of Artificial Sequence: Synthetic oligonucleotide
  Sense strand starting at position 1114 of SEQ ID NO: 1560462
gcuauuggcaagugacgau

SEQ ID NO: 1601564 - RNA, 19 nt, Artificial Sequence
  Description of Artificial Sequence: Synthetic oligonucleotide
  Antisense strand to SEQ ID NO: 1601563
aucgucacuugccaauagc

SEQ ID NO: 1601565 - RNA, 19 nt, Artificial Sequence
  Description of Artificial Sequence: Synthetic oligonucleotide
  Sense strand starting at position 1162 of SEQ ID NO: 1560462
cgaagcuagcgucgugaga

SEQ ID NO: 1601566 - RNA, 19 nt, Artificial Sequence
  Description of Artificial Sequence: Synthetic oligonucleotide
  Antisense strand to SEQ ID NO: 1601565
ucucacgacgcuagcuucg

SEQ ID NO: 1601567 - RNA, 19 nt, Artificial Sequence
  Description of Artificial Sequence: Synthetic oligonucleotide
  Sense strand starting at position 1242 of SEQ ID NO: 1560462
aguugagguccggguggaa

SEQ ID NO: 1601568 - RNA, 19 nt, Artificial Sequence
  Description of Artificial Sequence: Synthetic oligonucleotide
  Antisense strand to SEQ ID NO: 1601567
uuccacccggaccucaacu

SEQ ID NO: 1601569 - RNA, 19 nt, Artificial Sequence
  Description of Artificial Sequence: Synthetic oligonucleotide
  Sense strand starting at position 1254 of SEQ ID NO: 1560462
gguggaaacuaaguuugaa

SEQ ID NO: 1601570 - RNA, 19 nt, Artificial Sequence
  Description of Artificial Sequence: Synthetic oligonucleotide
  Antisense strand to SEQ ID NO: 1601569
uucaaacuuaguuuccacc

SEQ ID NO: 1601571 - RNA, 19 nt, Artificial Sequence
  Description of Artificial Sequence: Synthetic oligonucleotide
  Sense strand starting at position 1348 of SEQ ID NO: 1560462
cccggauuucgagguugca

SEQ ID NO: 1601572 - RNA, 19 nt, Artificial Sequence
  Description of Artificial Sequence: Synthetic oligonucleotide
  Antisense strand to SEQ ID NO: 1601571
ugcaaccucgaaauccggg

SEQ ID NO: 1601573 - RNA, 19 nt, Artificial Sequence
  Description of Artificial Sequence: Synthetic oligonucleotide
  Sense strand starting at position 1658 of SEQ ID NO: 1560462
gucccaacgucagaggaau

SEQ ID NO: 1601574 - RNA, 19 nt, Artificial Sequence
  Description of Artificial Sequence: Synthetic oligonucleotide
  Antisense strand to SEQ ID NO: 1601573
auuccucugacguugggac

SEQ ID NO: 1601575 - RNA, 19 nt, Artificial Sequence
  Description of Artificial Sequence: Synthetic oligonucleotide
  Sense strand starting at position 2256 of SEQ ID NO: 1560462
cacgcaguuguuugagacu

SEQ ID NO: 1601576 - RNA, 19 nt, Artificial Sequence
  Description of Artificial Sequence: Synthetic oligonucleotide
  Antisense strand to SEQ ID NO: 1601575
agucucaaacaacugcgug

SEQ ID NO: 1601577 - RNA, 19 nt, Artificial Sequence
  Description of Artificial Sequence: Synthetic oligonucleotide
  Sense strand starting at position 2267 of SEQ ID NO: 1560462
uugagacucgcgcaucuuu

SEQ ID NO: 1601578 - RNA, 19 nt, Artificial Sequence
  Description of Artificial Sequence: Synthetic oligonucleotide
  Antisense strand to SEQ ID NO: 1601577
aaagaugcgcgagucucaa

SEQ ID NO: 1601579 - RNA, 19 nt, Artificial Sequence
  Description of Artificial Sequence: Synthetic oligonucleotide
  Sense strand starting at position 2300 of SEQ ID NO: 1560462
aagugucuuggcugaggca

SEQ ID NO: 1601580 - RNA, 19 nt, Artificial Sequence
  Description of Artificial Sequence: Synthetic oligonucleotide
  Antisense strand to SEQ ID NO: 1601579
ugccucagccaagacacuu

SEQ ID NO: 1601581 - RNA, 19 nt, Artificial Sequence
  Description of Artificial Sequence: Synthetic oligonucleotide
  Sense strand starting at position 2301 of SEQ ID NO: 1560462
agugucuuggcugaggcaa

SEQ ID NO: 1601582 - RNA, 19 nt, Artificial Sequence
  Description of Artificial Sequence: Synthetic oligonucleotide
  Antisense strand to SEQ ID NO: 1601581
uugccucagccaagacacu

SEQ ID NO: 1601583 - RNA, 19 nt, Artificial Sequence
  Description of Artificial Sequence: Synthetic oligonucleotide
  Sense strand starting at position 2327 of SEQ ID NO: 1560462
ggguguacauugcucacau

SEQ ID NO: 1601584 - RNA, 19 nt, Artificial Sequence
  Description of Artificial Sequence: Synthetic oligonucleotide
  Antisense strand to SEQ ID NO: 1601583
augugagcaauguacaccc

SEQ ID NO: 1601585 - RNA, 19 nt, Artificial Sequence
  Description of Artificial Sequence: Synthetic oligonucleotide
  Sense strand starting at position 2328 of SEQ ID NO: 1560462
gguguacauugcucacaua

SEQ ID NO: 1601586 - RNA, 19 nt, Artificial Sequence
  Description of Artificial Sequence: Synthetic oligonucleotide
  Antisense strand to SEQ ID NO: 1601585
uaugugagcaauguacacc

SEQ ID NO: 1601587 - RNA, 19 nt, Artificial Sequence
  Description of Artificial Sequence: Synthetic oligonucleotide
  Sense strand starting at position 2329 of SEQ ID NO: 1560462
guguacauugcucacauaa

SEQ ID NO: 1601588 - RNA, 19 nt, Artificial Sequence
  Description of Artificial Sequence: Synthetic oligonucleotide
  Antisense strand to SEQ ID NO: 1601587
uuaugugagcaauguacac

SEQ ID NO: 1601589 - RNA, 19 nt, Artificial Sequence
  Description of Artificial Sequence: Synthetic oligonucleotide
  Sense strand starting at position 2556 of SEQ ID NO: 1560462
ugucucuggccuuaggaaa

SEQ ID NO: 1601590 - RNA, 19 nt, Artificial Sequence
  Description of Artificial Sequence: Synthetic oligonucleotide
  Antisense strand to SEQ ID NO: 1601589
uuuccuaaggccagagaca

SEQ ID NO: 1601591 - RNA, 19 nt, Artificial Sequence
  Description of Artificial Sequence: Synthetic oligonucleotide
  Sense strand starting at position 2624 of SEQ ID NO: 1560462
cugggucgucaugaggaau

SEQ ID NO: 1601592 - RNA, 19 nt, Artificial Sequence
  Description of Artificial Sequence: Synthetic oligonucleotide
  Antisense strand to SEQ ID NO: 1601591
auuccucaugacgacccag

SEQ ID NO: 1601593 - RNA, 19 nt, Artificial Sequence
  Description of Artificial Sequence: Synthetic oligonucleotide
  Sense strand starting at position 2627 of SEQ ID NO: 1560462
ggucgucaugaggaaugca

SEQ ID NO: 1601594 - RNA, 19 nt, Artificial Sequence
  Description of Artificial Sequence: Synthetic oligonucleotide
  Antisense strand to SEQ ID NO: 1601593
ugcauuccucaugacgacc

SEQ ID NO: 1601595 - RNA, 19 nt, Artificial Sequence
  Description of Artificial Sequence: Synthetic oligonucleotide
  Sense strand starting at position 2762 of SEQ ID NO: 1560462
ggucgcucccguucuuaau

SEQ ID NO: 1601596 - RNA, 19 nt, Artificial Sequence
  Description of Artificial Sequence: Synthetic oligonucleotide
  Antisense strand to SEQ ID NO: 1601595
auuaagaacgggagcgacc

SEQ ID NO: 1601597 - RNA, 19 nt, Artificial Sequence
  Description of Artificial Sequence: Synthetic oligonucleotide
  Sense strand starting at position 2802 of SEQ ID NO: 1560462
ccuugcagauccuuguaaa

SEQ ID NO: 1601598 - RNA, 19 nt, Artificial Sequence
  Description of Artificial Sequence: Synthetic oligonucleotide
  Antisense strand to SEQ ID NO: 1601597
uuuacaaggaucugcaagg

SEQ ID NO: 1601599 - RNA, 19 nt, Artificial Sequence
  Description of Artificial Sequence: Synthetic oligonucleotide
  Sense strand starting at position 2803 of SEQ ID NO: 1560462
cuugcagauccuuguaaac

SEQ ID NO: 1601600 - RNA, 19 nt, Artificial Sequence
  Description of Artificial Sequence: Synthetic oligonucleotide
  Antisense strand to SEQ ID NO: 1601599
guuuacaaggaucugcaag

SEQ ID NO: 1601601 - RNA, 19 nt, Artificial Sequence
  Description of Artificial Sequence: Synthetic oligonucleotide
  Sense strand starting at position 3779 of SEQ ID NO: 1560462
agugauaucuucuuguguc

SEQ ID NO: 1601602 - RNA, 19 nt, Artificial Sequence
  Description of Artificial Sequence: Synthetic oligonucleotide
  Antisense strand to SEQ ID NO: 1601601
gacacaagaagauaucacu

SEQ ID NO: 1601603 - RNA, 19 nt, Artificial Sequence
  Description of Artificial Sequence: Synthetic oligonucleotide
  Sense strand starting at position 3835 of SEQ ID NO: 1560462
ggauugcugggucguguaa

SEQ ID NO: 1601604 - RNA, 19 nt, Artificial Sequence
  Description of Artificial Sequence: Synthetic oligonucleotide
  Antisense strand to SEQ ID NO: 1601603
uuacacgacccagcaaucc

SEQ ID NO: 1601605 - RNA, 19 nt, Artificial Sequence
  Description of Artificial Sequence: Synthetic oligonucleotide
  Sense strand starting at position 3842 of SEQ ID NO: 1560462
ugggucguguaacauauuu

SEQ ID NO: 1601606 - RNA, 19 nt, Artificial Sequence
  Description of Artificial Sequence: Synthetic oligonucleotide
  Antisense strand to SEQ ID NO: 1601605
aaauauguuacacgaccca

SEQ ID NO: 1601607 - RNA, 19 nt, Artificial Sequence
  Description of Artificial Sequence: Synthetic oligonucleotide
  Sense strand starting at position 3861 of SEQ ID NO: 1560462
ugacauuauuggguaguaa

SEQ ID NO: 1601608 - RNA, 19 nt, Artificial Sequence
  Description of Artificial Sequence: Synthetic oligonucleotide
  Antisense strand to SEQ ID NO: 1601607
uuacuacccaauaauguca

SEQ ID NO: 1601609 - RNA, 19 nt, Artificial Sequence
  Description of Artificial Sequence: Synthetic oligonucleotide
  Sense strand starting at position 3865 of SEQ ID NO: 1560462
auuauuggguaguaacaaa

SEQ ID NO: 1601610 - RNA, 19 nt, Artificial Sequence
  Description of Artificial Sequence: Synthetic oligonucleotide
  Antisense strand to SEQ ID NO: 1601609
uuuguuacuacccaauaau

SEQ ID NO: 1601611 - RNA, 19 nt, Artificial Sequence
  Description of Artificial Sequence: Synthetic oligonucleotide
  Sense strand starting at position 3923 of SEQ ID NO: 1560462
aguauaugagaaggucuca

SEQ ID NO: 1601612 - RNA, 19 nt, Artificial Sequence
  Description of Artificial Sequence: Synthetic oligonucleotide
  Antisense strand to SEQ ID NO: 1601611
ugagaccuucucauauacu

SEQ ID NO: 1601613 - RNA, 19 nt, Artificial Sequence
  Description of Artificial Sequence: Synthetic oligonucleotide
  Sense strand starting at position 3928 of SEQ ID NO: 1560462
augagaaggucucauucuu

SEQ ID NO: 1601614 - RNA, 19 nt, Artificial Sequence
  Description of Artificial Sequence: Synthetic oligonucleotide
  Antisense strand to SEQ ID NO: 1601613
aagaaugagaccuucucau

SEQ ID NO: 1601615 - RNA, 19 nt, Artificial Sequence
  Description of Artificial Sequence: Synthetic oligonucleotide
  Sense strand starting at position 69 of SEQ ID NO: 1560463
ggaaauuacugccuagguc

SEQ ID NO: 1601616 - RNA, 19 nt, Artificial Sequence
  Description of Artificial Sequence: Synthetic oligonucleotide
  Antisense strand to SEQ ID NO: 1601615
gaccuaggcaguaauuucc

SEQ ID NO: 1601617 - RNA, 19 nt, Artificial Sequence
  Description of Artificial Sequence: Synthetic oligonucleotide
  Sense strand starting at position 70 of SEQ ID NO: 1560463
gaaauuacugccuagguca

SEQ ID NO: 1601618 - RNA, 19 nt, Artificial Sequence
  Description of Artificial Sequence: Synthetic oligonucleotide
  Antisense strand to SEQ ID NO: 1601617
ugaccuaggcaguaauuuc

SEQ ID NO: 1601619 - RNA, 19 nt, Artificial Sequence
  Description of Artificial Sequence: Synthetic oligonucleotide
  Sense strand starting at position 72 of SEQ ID NO: 1560463
aauuacugccuaggucaga

SEQ ID NO: 1601620 - RNA, 19 nt, Artificial Sequence
  Description of Artificial Sequence: Synthetic oligonucleotide
  Antisense strand to SEQ ID NO: 1601619
ucugaccuaggcaguaauu

SEQ ID NO: 1601621 - RNA, 19 nt, Artificial Sequence
  Description of Artificial Sequence: Synthetic oligonucleotide
  Sense strand starting at position 173 of SEQ ID NO: 1560463
gcgugaucuuaguccacug

SEQ ID NO: 1601622 - RNA, 19 nt, Artificial Sequence
  Description of Artificial Sequence: Synthetic oligonucleotide
  Antisense strand to SEQ ID NO: 1601621
caguggacuaagaucacgc

SEQ ID NO: 1601623 - RNA, 19 nt, Artificial Sequence
  Description of Artificial Sequence: Synthetic oligonucleotide
  Sense strand starting at position 463 of SEQ ID NO: 1560463
accgacugcuccuuccuaa

SEQ ID NO: 1601624 - RNA, 19 nt, Artificial Sequence
  Description of Artificial Sequence: Synthetic oligonucleotide
  Antisense strand to SEQ ID NO: 1601623
uuaggaaggagcagucggu

SEQ ID NO: 1601625 - RNA, 19 nt, Artificial Sequence
  Description of Artificial Sequence: Synthetic oligonucleotide
  Sense strand starting at position 467 of SEQ ID NO: 1560463
acugcuccuuccuaagaga

SEQ ID NO: 1601626 - RNA, 19 nt, Artificial Sequence
  Description of Artificial Sequence: Synthetic oligonucleotide
  Antisense strand to SEQ ID NO: 1601625
ucucuuaggaaggagcagu

SEQ ID NO: 1601627 - RNA, 19 nt, Artificial Sequence
  Description of Artificial Sequence: Synthetic oligonucleotide
  Sense strand starting at position 510 of SEQ ID NO: 1560463
gccucuggucaucaggaga

SEQ ID NO: 1601628 - RNA, 19 nt, Artificial Sequence
  Description of Artificial Sequence: Synthetic oligonucleotide
  Antisense strand to SEQ ID NO: 1601627
ucuccugaugaccagaggc

SEQ ID NO: 1601629 - RNA, 19 nt, Artificial Sequence
  Description of Artificial Sequence: Synthetic oligonucleotide
  Sense strand starting at position 578 of SEQ ID NO: 1560463
cugagaaucacugggcaga

SEQ ID NO: 1601630 - RNA, 19 nt, Artificial Sequence
  Description of Artificial Sequence: Synthetic oligonucleotide
  Antisense strand to SEQ ID NO: 1601629
ucugcccagugauucucag

SEQ ID NO: 1601631 - RNA, 19 nt, Artificial Sequence
  Description of Artificial Sequence: Synthetic oligonucleotide
  Sense strand starting at position 602 of SEQ ID NO: 1560463
guggaagguggguagaauu

SEQ ID NO: 1601632 - RNA, 19 nt, Artificial Sequence
  Description of Artificial Sequence: Synthetic oligonucleotide
  Antisense strand to SEQ ID NO: 1601631
aauucuacccaccuuccac

SEQ ID NO: 1601633 - RNA, 19 nt, Artificial Sequence
  Description of Artificial Sequence: Synthetic oligonucleotide
  Sense strand starting at position 610 of SEQ ID NO: 1560463
uggguagaauuggauucua

SEQ ID NO: 1601634 - RNA, 19 nt, Artificial Sequence
  Description of Artificial Sequence: Synthetic oligonucleotide
  Antisense strand to SEQ ID NO: 1601633
uagaauccaauucuaccca

SEQ ID NO: 1601635 - RNA, 19 nt, Artificial Sequence
  Description of Artificial Sequence: Synthetic oligonucleotide
  Sense strand starting at position 781 of SEQ ID NO: 1560463
uccuuuguaaaucgggaau

SEQ ID NO: 1601636 - RNA, 19 nt, Artificial Sequence
  Description of Artificial Sequence: Synthetic oligonucleotide
  Antisense strand to SEQ ID NO: 1601635
auucccgauuuacaaagga

SEQ ID NO: 1601637 - RNA, 19 nt, Artificial Sequence
  Description of Artificial Sequence: Synthetic oligonucleotide
  Sense strand starting at position 1029 of SEQ ID NO: 1560463
ucgaaaugcuuccaacaug

SEQ ID NO: 1601638 - RNA, 19 nt, Artificial Sequence
  Description of Artificial Sequence: Synthetic oligonucleotide
  Antisense strand to SEQ ID NO: 1601637
cauguuggaagcauuucga

SEQ ID NO: 1601639 - RNA, 19 nt, Artificial Sequence
  Description of Artificial Sequence: Synthetic oligonucleotide
  Sense strand starting at position 1040 of SEQ ID NO: 1560463
ccaacauggccaggaaaua

SEQ ID NO: 1601640 - RNA, 19 nt, Artificial Sequence
  Description of Artificial Sequence: Synthetic oligonucleotide
  Antisense strand to SEQ ID NO: 1601639
uauuuccuggccauguugg

SEQ ID NO: 1601641 - RNA, 19 nt, Artificial Sequence
  Description of Artificial Sequence: Synthetic oligonucleotide
  Sense strand starting at position 1050 of SEQ ID NO: 1560463
caggaaauaguuugguuua

SEQ ID NO: 1601642 - RNA, 19 nt, Artificial Sequence
  Description of Artificial Sequence: Synthetic oligonucleotide
  Antisense strand to SEQ ID NO: 1601641
uaaaccaaacuauuuccug

SEQ ID NO: 1601643 - RNA, 19 nt, Artificial Sequence
  Description of Artificial Sequence: Synthetic oligonucleotide
  Sense strand starting at position 1053 of SEQ ID NO: 1560463
gaaauaguuugguuuauca

SEQ ID NO: 1601644 - RNA, 19 nt, Artificial Sequence
  Description of Artificial Sequence: Synthetic oligonucleotide
  Antisense strand to SEQ ID NO: 1601643
ugauaaaccaaacuauuuc

SEQ ID NO: 1601645 - RNA, 19 nt, Artificial Sequence
  Description of Artificial Sequence: Synthetic oligonucleotide
  Sense strand starting at position 1203 of SEQ ID NO: 1560463
gagagcaucuaggcucaaa

SEQ ID NO: 1601646 - RNA, 19 nt, Artificial Sequence
  Description of Artificial Sequence: Synthetic oligonucleotide
  Antisense strand to SEQ ID NO: 1601645
uuugagccuagaugcucuc

SEQ ID NO: 1601647 - RNA, 19 nt, Artificial Sequence
  Description of Artificial Sequence: Synthetic oligonucleotide
  Sense strand starting at position 1245 of SEQ ID NO: 1560463
aaggcugggccuuagagau

SEQ ID NO: 1601648 - RNA, 19 nt, Artificial Sequence
  Description of Artificial Sequence: Synthetic oligonucleotide
  Antisense strand to SEQ ID NO: 1601647
aucucuaaggcccagccuu

SEQ ID NO: 1601649 - RNA, 19 nt, Artificial Sequence
  Description of Artificial Sequence: Synthetic oligonucleotide
  Sense strand starting at position 1260 of SEQ ID NO: 1560463
agauuaagcugccaucaga

SEQ ID NO: 1601650 - RNA, 19 nt, Artificial Sequence
  Description of Artificial Sequence: Synthetic oligonucleotide
  Antisense strand to SEQ ID NO: 1601649
ucugauggcagcuuaaucu

SEQ ID NO: 1601651 - RNA, 19 nt, Artificial Sequence
  Description of Artificial Sequence: Synthetic oligonucleotide
  Sense strand starting at position 1267 of SEQ ID NO: 1560463
gcugccaucagacggaauu

SEQ ID NO: 1601652 - RNA, 19 nt, Artificial Sequence
  Description of Artificial Sequence: Synthetic oligonucleotide
  Antisense strand to SEQ ID NO: 1601651
aauuccgucugauggcagc

SEQ ID NO: 1601653 - RNA, 19 nt, Artificial Sequence
  Description of Artificial Sequence: Synthetic oligonucleotide
  Sense strand starting at position 1545 of SEQ ID NO: 1560463
gcgccuguccucgcgcaaa

SEQ ID NO: 1601654 - RNA, 19 nt, Artificial Sequence
  Description of Artificial Sequence: Synthetic oligonucleotide
  Antisense strand to SEQ ID NO: 1601653
uuugcgcgaggacaggcgc

SEQ ID NO: 1601655 - RNA, 19 nt, Artificial Sequence
  Description of Artificial Sequence: Synthetic oligonucleotide
  Sense strand starting at position 1658 of SEQ ID NO: 1560463
gcccucaagcugggaaauu

SEQ ID NO: 1601656 - RNA, 19 nt, Artificial Sequence
  Description of Artificial Sequence: Synthetic oligonucleotide
  Antisense strand to SEQ ID NO: 1601655
aauuucccagcuugagggc

SEQ ID NO: 1601657 - RNA, 19 nt, Artificial Sequence
  Description of Artificial Sequence: Synthetic oligonucleotide
  Sense strand starting at position 2160 of SEQ ID NO: 1560463
cgcccuuguuugucugaga

SEQ ID NO: 1601658 - RNA, 19 nt, Artificial Sequence
  Description of Artificial Sequence: Synthetic oligonucleotide
  Antisense strand to SEQ ID NO: 1601657
ucucagacaaacaagggcg

SEQ ID NO: 1601659 - RNA, 19 nt, Artificial Sequence
  Description of Artificial Sequence: Synthetic oligonucleotide
  Sense strand starting at position 2247 of SEQ ID NO: 1560463
uuugauaggucggauuucu

SEQ ID NO: 1601660 - RNA, 19 nt, Artificial Sequence
  Description of Artificial Sequence: Synthetic oligonucleotide
  Antisense strand to SEQ ID NO: 1601659
agaaauccgaccuaucaaa

SEQ ID NO: 1601661 - RNA, 19 nt, Artificial Sequence
  Description of Artificial Sequence: Synthetic oligonucleotide
  Sense strand starting at position 2399 of SEQ ID NO: 1560463
gccacuucgcaaggagaca

SEQ ID NO: 1601662 - RNA, 19 nt, Artificial Sequence
  Description of Artificial Sequence: Synthetic oligonucleotide
  Antisense strand to SEQ ID NO: 1601661
ugucuccuugcgaaguggc

SEQ ID NO: 1601663 - RNA, 19 nt, Artificial Sequence
  Description of Artificial Sequence: Synthetic oligonucleotide
  Sense strand starting at position 2446 of SEQ ID NO: 1560463
uccaguggugguuacagau

SEQ ID NO: 1601664 - RNA, 19 nt, Artificial Sequence
  Description of Artificial Sequence: Synthetic oligonucleotide
  Antisense strand to SEQ ID NO: 1601663
aucuguaaccaccacugga

SEQ ID NO: 1601665 - RNA, 19 nt, Artificial Sequence
  Description of Artificial Sequence: Synthetic oligonucleotide
  Sense strand starting at position 2456 of SEQ ID NO: 1560463
guuacagaugcccauucuu

SEQ ID NO: 1601666 - RNA, 19 nt, Artificial Sequence
  Description of Artificial Sequence: Synthetic oligonucleotide
  Antisense strand to SEQ ID NO: 1601665
aagaaugggcaucuguaac

SEQ ID NO: 1601667 - RNA, 19 nt, Artificial Sequence
  Description of Artificial Sequence: Synthetic oligonucleotide
  Sense strand starting at position 2479 of SEQ ID NO: 1560463
gucuccacugauuggucaa

SEQ ID NO: 1601668 - RNA, 19 nt, Artificial Sequence
  Description of Artificial Sequence: Synthetic oligonucleotide
  Antisense strand to SEQ ID NO: 1601667
uugaccaaucaguggagac

SEQ ID NO: 1601669 - RNA, 19 nt, Artificial Sequence
  Description of Artificial Sequence: Synthetic oligonucleotide
  Sense strand starting at position 2486 of SEQ ID NO: 1560463
cugauuggucaauggagag

SEQ ID NO: 1601670 - RNA, 19 nt, Artificial Sequence
  Description of Artificial Sequence: Synthetic oligonucleotide
  Antisense strand to SEQ ID NO: 1601669
cucuccauugaccaaucag

SEQ ID NO: 1601671 - RNA, 19 nt, Artificial Sequence
  Description of Artificial Sequence: Synthetic oligonucleotide
  Sense strand starting at position 2533 of SEQ ID NO: 1560463
gacuguugauacgcucuga

SEQ ID NO: 1601672 - RNA, 19 nt, Artificial Sequence
  Description of Artificial Sequence: Synthetic oligonucleotide
  Antisense strand to SEQ ID NO: 1601671
ucagagcguaucaacaguc

SEQ ID NO: 1601673 - RNA, 19 nt, Artificial Sequence
  Description of Artificial Sequence: Synthetic oligonucleotide
  Sense strand starting at position 2543 of SEQ ID NO: 1560463
acgcucugauuggaugaaa

SEQ ID NO: 1601674 - RNA, 19 nt, Artificial Sequence
  Description of Artificial Sequence: Synthetic oligonucleotide
  Antisense strand to SEQ ID NO: 1601673
uuucauccaaucagagcgu

SEQ ID NO: 1601675 - RNA, 19 nt, Artificial Sequence
  Description of Artificial Sequence: Synthetic oligonucleotide
  Sense strand starting at position 2586 of SEQ ID NO: 1560463
cgcucuuuggugcaguaua

SEQ ID NO: 1601676 - RNA, 19 nt, Artificial Sequence
  Description of Artificial Sequence: Synthetic oligonucleotide
  Antisense strand to SEQ ID NO: 1601675
uauacugcaccaaagagcg

SEQ ID NO: 1601677 - RNA, 19 nt, Artificial Sequence
  Description of Artificial Sequence: Synthetic oligonucleotide
  Sense strand starting at position 2739 of SEQ ID NO: 1560463
cucugucgccaucacuaua

SEQ ID NO: 1601678 - RNA, 19 nt, Artificial Sequence
  Description of Artificial Sequence: Synthetic oligonucleotide
  Antisense strand to SEQ ID NO: 1601677
uauagugauggcgacagag

SEQ ID NO: 1601679 - RNA, 19 nt, Artificial Sequence
  Description of Artificial Sequence: Synthetic oligonucleotide
  Sense strand starting at position 2889 of SEQ ID NO: 1560463
ucaguuucccuugggagaa

SEQ ID NO: 1601680 - RNA, 19 nt, Artificial Sequence
  Description of Artificial Sequence: Synthetic oligonucleotide
  Antisense strand to SEQ ID NO: 1601679
uucucccaagggaaacuga

SEQ ID NO: 1601681 - RNA, 19 nt, Artificial Sequence
  Description of Artificial Sequence: Synthetic oligonucleotide
  Sense strand starting at position 3002 of SEQ ID NO: 1560463
uuguccgugcgaucuaaau

SEQ ID NO: 1601682 - RNA, 19 nt, Artificial Sequence
  Description of Artificial Sequence: Synthetic oligonucleotide
  Antisense strand to SEQ ID NO: 1601681
auuuagaucgcacggacaa

SEQ ID NO: 1601683 - RNA, 19 nt, Artificial Sequence
  Description of Artificial Sequence: Synthetic oligonucleotide
  Sense strand starting at position 3004 of SEQ ID NO: 1560463
guccgugcgaucuaaauua

SEQ ID NO: 1601684 - RNA, 19 nt, Artificial Sequence
  Description of Artificial Sequence: Synthetic oligonucleotide
  Antisense strand to SEQ ID NO: 1601683
uaauuuagaucgcacggac

SEQ ID NO: 1601685 - RNA, 19 nt, Artificial Sequence
  Description of Artificial Sequence: Synthetic oligonucleotide
  Sense strand starting at position 3283 of SEQ ID NO: 1560463
aagagaaugucggagggua

SEQ ID NO: 1601686 - RNA, 19 nt, Artificial Sequence
  Description of Artificial Sequence: Synthetic oligonucleotide
  Antisense strand to SEQ ID NO: 1601685
uacccuccgacauucucuu

SEQ ID NO: 1601687 - RNA, 19 nt, Artificial Sequence
  Description of Artificial Sequence: Synthetic oligonucleotide
  Sense strand starting at position 3476 of SEQ ID NO: 1560463
gcuauuggcaagugacgau

SEQ ID NO: 1601688 - RNA, 19 nt, Artificial Sequence
  Description of Artificial Sequence: Synthetic oligonucleotide
  Antisense strand to SEQ ID NO: 1601687
aucgucacuugccaauagc

SEQ ID NO: 1601689 - RNA, 19 nt, Artificial Sequence
  Description of Artificial Sequence: Synthetic oligonucleotide
  Sense strand starting at position 3604 of SEQ ID NO: 1560463
aguugagguccggguggaa

SEQ ID NO: 1601690 - RNA, 19 nt, Artificial Sequence
  Description of Artificial Sequence: Synthetic oligonucleotide
  Antisense strand to SEQ ID NO: 1601689
uuccacccggaccucaacu

SEQ ID NO: 1601691 - RNA, 19 nt, Artificial Sequence
  Description of Artificial Sequence: Synthetic oligonucleotide
  Sense strand starting at position 3616 of SEQ ID NO: 1560463
gguggaaacuaaguuugaa

SEQ ID NO: 1601692 - RNA, 19 nt, Artificial Sequence
  Description of Artificial Sequence: Synthetic oligonucleotide
  Antisense strand to SEQ ID NO: 1601691
uucaaacuuaguuuccacc

SEQ ID NO: 1601693 - RNA, 19 nt, Artificial Sequence
  Description of Artificial Sequence: Synthetic oligonucleotide
  Sense strand starting at position 3710 of SEQ ID NO: 1560463
cccggauuucgagguugca

SEQ ID NO: 1601694 - RNA, 19 nt, Artificial Sequence
  Description of Artificial Sequence: Synthetic oligonucleotide
  Antisense strand to SEQ ID NO: 1601693
ugcaaccucgaaauccggg

SEQ ID NO: 1601695 - RNA, 19 nt, Artificial Sequence
  Description of Artificial Sequence: Synthetic oligonucleotide
  Sense strand starting at position 1 of SEQ ID NO: 1560464
gccaguaaccaugguauuu

SEQ ID NO: 1601696 - RNA, 19 nt, Artificial Sequence
  Description of Artificial Sequence: Synthetic oligonucleotide
  Antisense strand to SEQ ID NO: 1601695
aaauaccaugguuacuggc

SEQ ID NO: 1601697 - RNA, 19 nt, Artificial Sequence
  Description of Artificial Sequence: Synthetic oligonucleotide
  Sense strand starting at position 83 of SEQ ID NO: 1560464
auagcuagcacuuagggaa

SEQ ID NO: 1601698 - RNA, 19 nt, Artificial Sequence
  Description of Artificial Sequence: Synthetic oligonucleotide
  Antisense strand to SEQ ID NO: 1601697
uucccuaagugcuagcuau

SEQ ID NO: 1601699 - RNA, 19 nt, Artificial Sequence
  Description of Artificial Sequence: Synthetic oligonucleotide
  Sense strand starting at position 95 of SEQ ID NO: 1560464
uagggaacguucuuaaccu

SEQ ID NO: 1601700 - RNA, 19 nt, Artificial Sequence
  Description of Artificial Sequence: Synthetic oligonucleotide
  Antisense strand to SEQ ID NO: 1601699
agguuaagaacguucccua

SEQ ID NO: 1601701 - RNA, 19 nt, Artificial Sequence
  Description of Artificial Sequence: Synthetic oligonucleotide
  Sense strand starting at position 516 of SEQ ID NO: 1560464
aacggagggaguuaguauu

SEQ ID NO: 1601702 - RNA, 19 nt, Artificial Sequence
  Description of Artificial Sequence: Synthetic oligonucleotide
  Antisense strand to SEQ ID NO: 1601701
aauacuaacucccuccguu

SEQ ID NO: 1601703 - RNA, 19 nt, Artificial Sequence
  Description of Artificial Sequence: Synthetic oligonucleotide
  Sense strand starting at position 548 of SEQ ID NO: 1560464
uucuguuuccgaugaugaa

SEQ ID NO: 1601704 - RNA, 19 nt, Artificial Sequence
  Description of Artificial Sequence: Synthetic oligonucleotide
  Antisense strand to SEQ ID NO: 1601703
uucaucaucggaaacagaa

SEQ ID NO: 1601705 - RNA, 19 nt, Artificial Sequence
  Description of Artificial Sequence: Synthetic oligonucleotide
  Sense strand starting at position 549 of SEQ ID NO: 1560464
ucuguuuccgaugaugaaa

SEQ ID NO: 1601706 - RNA, 19 nt, Artificial Sequence
  Description of Artificial Sequence: Synthetic oligonucleotide
  Antisense strand to SEQ ID NO: 1601705
uuucaucaucggaaacaga

SEQ ID NO: 1601707 - RNA, 19 nt, Artificial Sequence
  Description of Artificial Sequence: Synthetic oligonucleotide
  Sense strand starting at position 777 of SEQ ID NO: 1560464
ucucuuaagugucuguaau

SEQ ID NO: 1601708 - RNA, 19 nt, Artificial Sequence
  Description of Artificial Sequence: Synthetic oligonucleotide
  Antisense strand to SEQ ID NO: 1601707
auuacagacacuuaagaga

SEQ ID NO: 1601709 - RNA, 19 nt, Artificial Sequence
  Description of Artificial Sequence: Synthetic oligonucleotide
  Sense strand starting at position 778 of SEQ ID NO: 1560464
cucuuaagugucuguaauc

SEQ ID NO: 1601710 - RNA, 19 nt, Artificial Sequence
  Description of Artificial Sequence: Synthetic oligonucleotide
  Antisense strand to SEQ ID NO: 1601709
gauuacagacacuuaagag

SEQ ID NO: 1601711 - RNA, 19 nt, Artificial Sequence
  Description of Artificial Sequence: Synthetic oligonucleotide
  Sense strand starting at position 779 of SEQ ID NO: 1560464
ucuuaagugucuguaauca

SEQ ID NO: 1601712 - RNA, 19 nt, Artificial Sequence
  Description of Artificial Sequence: Synthetic oligonucleotide
  Antisense strand to SEQ ID NO: 1601711
ugauuacagacacuuaaga

SEQ ID NO: 1601713 - RNA, 19 nt, Artificial Sequence
  Description of Artificial Sequence: Synthetic oligonucleotide
  Sense strand starting at position 783 of SEQ ID NO: 1560464
aagugucuguaaucagaau

SEQ ID NO: 1601714 - RNA, 19 nt, Artificial Sequence
  Description of Artificial Sequence: Synthetic oligonucleotide
  Antisense strand to SEQ ID NO: 1601713
auucugauuacagacacuu

SEQ ID NO: 1601715 - RNA, 19 nt, Artificial Sequence
  Description of Artificial Sequence: Synthetic oligonucleotide
  Sense strand starting at position 784 of SEQ ID NO: 1560464
agugucuguaaucagaaug

SEQ ID NO: 1601716 - RNA, 19 nt, Artificial Sequence
  Description of Artificial Sequence: Synthetic oligonucleotide
  Antisense strand to SEQ ID NO: 1601715
cauucugauuacagacacu

SEQ ID NO: 1601717 - RNA, 19 nt, Artificial Sequence
  Description of Artificial Sequence: Synthetic oligonucleotide
  Sense strand starting at position 896 of SEQ ID NO: 1560464
gcugaugaagucuggaagu

SEQ ID NO: 1601718 - RNA, 19 nt, Artificial Sequence
  Description of Artificial Sequence: Synthetic oligonucleotide
  Antisense strand to SEQ ID NO: 1601717
acuuccagacuucaucagc

SEQ ID NO: 1601719 - RNA, 19 nt, Artificial Sequence
  Description of Artificial Sequence: Synthetic oligonucleotide
  Sense strand starting at position 1681 of SEQ ID NO: 1560464
aacccuuacccguggcaaa

SEQ ID NO: 1601720 - RNA, 19 nt, Artificial Sequence
  Description of Artificial Sequence: Synthetic oligonucleotide
  Antisense strand to SEQ ID NO: 1601719
uuugccacggguaaggguu

SEQ ID NO: 1601721 - RNA, 19 nt, Artificial Sequence
  Description of Artificial Sequence: Synthetic oligonucleotide
  Sense strand starting at position 1694 of SEQ ID NO: 1560464
ggcaaaggaccgugggaua

SEQ ID NO: 1601722 - RNA, 19 nt, Artificial Sequence
  Description of Artificial Sequence: Synthetic oligonucleotide
  Antisense strand to SEQ ID NO: 1601721
uaucccacgguccuuugcc

SEQ ID NO: 1601723 - RNA, 19 nt, Artificial Sequence
  Description of Artificial Sequence: Synthetic oligonucleotide
  Sense strand starting at position 2062 of SEQ ID NO: 1560464
gcguccucugaguccgaua

SEQ ID NO: 1601724 - RNA, 19 nt, Artificial Sequence
  Description of Artificial Sequence: Synthetic oligonucleotide
  Antisense strand to SEQ ID NO: 1601723
uaucggacucagaggacgc

SEQ ID NO: 1601725 - RNA, 19 nt, Artificial Sequence
  Description of Artificial Sequence: Synthetic oligonucleotide
  Sense strand starting at position 2064 of SEQ ID NO: 1560464
guccucugaguccgauaga

SEQ ID NO: 1601726 - RNA, 19 nt, Artificial Sequence
  Description of Artificial Sequence: Synthetic oligonucleotide
  Antisense strand to SEQ ID NO: 1601725
ucuaucggacucagaggac

SEQ ID NO: 1601727 - RNA, 19 nt, Artificial Sequence
  Description of Artificial Sequence: Synthetic oligonucleotide
  Sense strand starting at position 2067 of SEQ ID NO: 1560464
cucugaguccgauagagga

SEQ ID NO: 1601728 - RNA, 19 nt, Artificial Sequence
  Description of Artificial Sequence: Synthetic oligonucleotide
  Antisense strand to SEQ ID NO: 1601727
uccucuaucggacucagag

SEQ ID NO: 1601729 - RNA, 19 nt, Artificial Sequence
  Description of Artificial Sequence: Synthetic oligonucleotide
  Sense strand starting at position 2170 of SEQ ID NO: 1560464
caaugauccugucuagaga

SEQ ID NO: 1601730 - RNA, 19 nt, Artificial Sequence
  Description of Artificial Sequence: Synthetic oligonucleotide
  Antisense strand to SEQ ID NO: 1601729
ucucuagacaggaucauug

SEQ ID NO: 1601731 - RNA, 19 nt, Artificial Sequence
  Description of Artificial Sequence: Synthetic oligonucleotide
  Sense strand starting at position 2230 of SEQ ID NO: 1560464
ggcacacgauucguaaacu

SEQ ID NO: 1601732 - RNA, 19 nt, Artificial Sequence
  Description of Artificial Sequence: Synthetic oligonucleotide
  Antisense strand to SEQ ID NO: 1601731
aguuuacgaaucgugugcc

SEQ ID NO: 1601733 - RNA, 19 nt, Artificial Sequence
  Description of Artificial Sequence: Synthetic oligonucleotide
  Sense strand starting at position 2317 of SEQ ID NO: 1560464
gcgaacuuuguaggcaaca

SEQ ID NO: 1601734 - RNA, 19 nt, Artificial Sequence
  Description of Artificial Sequence: Synthetic oligonucleotide
  Antisense strand to SEQ ID NO: 1601733
uguugccuacaaaguucgc

SEQ ID NO: 1601735 - RNA, 19 nt, Artificial Sequence
  Description of Artificial Sequence: Synthetic oligonucleotide
  Sense strand starting at position 2318 of SEQ ID NO: 1560464
cgaacuuuguaggcaacaa

SEQ ID NO: 1601736 - RNA, 19 nt, Artificial Sequence
  Description of Artificial Sequence: Synthetic oligonucleotide
  Antisense strand to SEQ ID NO: 1601735
uuguugccuacaaaguucg

SEQ ID NO: 1601737 - RNA, 19 nt, Artificial Sequence
  Description of Artificial Sequence: Synthetic oligonucleotide
  Sense strand starting at position 2346 of SEQ ID NO: 1560464
auggaauaauaucagagua

SEQ ID NO: 1601738 - RNA, 19 nt, Artificial Sequence
  Description of Artificial Sequence: Synthetic oligonucleotide
  Antisense strand to SEQ ID NO: 1601737
uacucugauauuauuccau

SEQ ID NO: 1601739 - RNA, 19 nt, Artificial Sequence
  Description of Artificial Sequence: Synthetic oligonucleotide
  Sense strand starting at position 2348 of SEQ ID NO: 1560464
ggaauaauaucagaguauu

SEQ ID NO: 1601740 - RNA, 19 nt, Artificial Sequence
  Description of Artificial Sequence: Synthetic oligonucleotide
  Antisense strand to SEQ ID NO: 1601739
aauacucugauauuauucc

SEQ ID NO: 1601741 - RNA, 19 nt, Artificial Sequence
  Description of Artificial Sequence: Synthetic oligonucleotide
  Sense strand starting at position 2356 of SEQ ID NO: 1560464
aucagaguauuauccguaa

SEQ ID NO: 1601742 - RNA, 19 nt, Artificial Sequence
  Description of Artificial Sequence: Synthetic oligonucleotide
  Antisense strand to SEQ ID NO: 1601741
uuacggauaauacucugau

SEQ ID NO: 1601743 - RNA, 19 nt, Artificial Sequence
  Description of Artificial Sequence: Synthetic oligonucleotide
  Sense strand starting at position 2359 of SEQ ID NO: 1560464
agaguauuauccguaauuc

SEQ ID NO: 1601744 - RNA, 19 nt, Artificial Sequence
  Description of Artificial Sequence: Synthetic oligonucleotide
  Antisense strand to SEQ ID NO: 1601743
gaauuacggauaauacucu

SEQ ID NO: 1601745 - RNA, 19 nt, Artificial Sequence
  Description of Artificial Sequence: Synthetic oligonucleotide
  Sense strand starting at position 2360 of SEQ ID NO: 1560464
gaguauuauccguaauucg

SEQ ID NO: 1601746 - RNA, 19 nt, Artificial Sequence
  Description of Artificial Sequence: Synthetic oligonucleotide
  Antisense strand to SEQ ID NO: 1601745
cgaauuacggauaauacuc

SEQ ID NO: 1601747 - RNA, 19 nt, Artificial Sequence
  Description of Artificial Sequence: Synthetic oligonucleotide
  Sense strand starting at position 2370 of SEQ ID NO: 1560464
cguaauucgcauuauaauu

SEQ ID NO: 1601748 - RNA, 19 nt, Artificial Sequence
  Description of Artificial Sequence: Synthetic oligonucleotide
  Antisense strand to SEQ ID NO: 1601747
aauuauaaugcgaauuacg

SEQ ID NO: 1601749 - RNA, 19 nt, Artificial Sequence
  Description of Artificial Sequence: Synthetic oligonucleotide
  Sense strand starting at position 2375 of SEQ ID NO: 1560464
uucgcauuauaauugcaaa

SEQ ID NO: 1601750 - RNA, 19 nt, Artificial Sequence
  Description of Artificial Sequence: Synthetic oligonucleotide
  Antisense strand to SEQ ID NO: 1601749
uuugcaauuauaaugcgaa

SEQ ID NO: 1601751 - RNA, 19 nt, Artificial Sequence
  Description of Artificial Sequence: Synthetic oligonucleotide
  Sense strand starting at position 2389 of SEQ ID NO: 1560464
gcaaacaguucguccagaa

SEQ ID NO: 1601752 - RNA, 19 nt, Artificial Sequence
  Description of Artificial Sequence: Synthetic oligonucleotide
  Antisense strand to SEQ ID NO: 1601751
uucuggacgaacuguuugc

SEQ ID NO: 1601753 - RNA, 19 nt, Artificial Sequence
  Description of Artificial Sequence: Synthetic oligonucleotide
  Sense strand starting at position 2393 of SEQ ID NO: 1560464
acaguucguccagaagaaa

SEQ ID NO: 1601754 - RNA, 19 nt, Artificial Sequence
  Description of Artificial Sequence: Synthetic oligonucleotide
  Antisense strand to SEQ ID NO: 1601753
uuucuucuggacgaacugu

SEQ ID NO: 1601755 - RNA, 19 nt, Artificial Sequence
  Description of Artificial Sequence: Synthetic oligonucleotide
  Sense strand starting at position 2803 of SEQ ID NO: 1560464
augacaaguguuuaccuau

SEQ ID NO: 1601756 - RNA, 19 nt, Artificial Sequence
  Description of Artificial Sequence: Synthetic oligonucleotide
  Antisense strand to SEQ ID NO: 1601755
auagguaaacacuugucau

SEQ ID NO: 1601757 - RNA, 19 nt, Artificial Sequence
  Description of Artificial Sequence: Synthetic oligonucleotide
  Sense strand starting at position 3204 of SEQ ID NO: 1560464
ugcaauguugcauaaagug

SEQ ID NO: 1601758 - RNA, 19 nt, Artificial Sequence
  Description of Artificial Sequence: Synthetic oligonucleotide
  Antisense strand to SEQ ID NO: 1601757
cacuuuaugcaacauugca

SEQ ID NO: 1601759 - RNA, 19 nt, Artificial Sequence
  Description of Artificial Sequence: Synthetic oligonucleotide
  Sense strand starting at position 3216 of SEQ ID NO: 1560464
uaaagugaacugugacaga

SEQ ID NO: 1601760 - RNA, 19 nt, Artificial Sequence
  Description of Artificial Sequence: Synthetic oligonucleotide
  Antisense strand to SEQ ID NO: 1601759
ucugucacaguucacuuua

SEQ ID NO: 1601761 - RNA, 19 nt, Artificial Sequence
  Description of Artificial Sequence: Synthetic oligonucleotide
  Sense strand starting at position 3257 of SEQ ID NO: 1560464
ggcauaaugcuguaugguc

SEQ ID NO: 1601762 - RNA, 19 nt, Artificial Sequence
  Description of Artificial Sequence: Synthetic oligonucleotide
  Antisense strand to SEQ ID NO: 1601761
gaccauacagcauuaugcc

SEQ ID NO: 1601763 - RNA, 19 nt, Artificial Sequence
  Description of Artificial Sequence: Synthetic oligonucleotide
  Sense strand starting at position 3262 of SEQ ID NO: 1560464
aaugcuguauggucuuauu

SEQ ID NO: 1601764 - RNA, 19 nt, Artificial Sequence
  Description of Artificial Sequence: Synthetic oligonucleotide
  Antisense strand to SEQ ID NO: 1601763
aauaagaccauacagcauu

SEQ ID NO: 1601765 - RNA, 19 nt, Artificial Sequence
  Description of Artificial Sequence: Synthetic oligonucleotide
  Sense strand starting at position 3288 of SEQ ID NO: 1560464
gcauucguggcaucaguuu

SEQ ID NO: 1601766 - RNA, 19 nt, Artificial Sequence
  Description of Artificial Sequence: Synthetic oligonucleotide
  Antisense strand to SEQ ID NO: 1601765
aaacugaugccacgaaugc

SEQ ID NO: 1601767 - RNA, 19 nt, Artificial Sequence
  Description of Artificial Sequence: Synthetic oligonucleotide
  Sense strand starting at position 3354 of SEQ ID NO: 1560464
ucgaauuggcaccaucaga

SEQ ID NO: 1601768 - RNA, 19 nt, Artificial Sequence
  Description of Artificial Sequence: Synthetic oligonucleotide
  Antisense strand to SEQ ID NO: 1601767
ucugauggugccaauucga

SEQ ID NO: 1601769 - RNA, 19 nt, Artificial Sequence
  Description of Artificial Sequence: Synthetic oligonucleotide
  Sense strand starting at position 3375 of SEQ ID NO: 1560464
uuacgugugcuuguggcaa

SEQ ID NO: 1601770 - RNA, 19 nt, Artificial Sequence
  Description of Artificial Sequence: Synthetic oligonucleotide
  Antisense strand to SEQ ID NO: 1601769
uugccacaagcacacguaa

SEQ ID NO: 1601771 - RNA, 19 nt, Artificial Sequence
  Description of Artificial Sequence: Synthetic oligonucleotide
  Sense strand starting at position 3402 of SEQ ID NO: 1560464
guaagaugcagcgauuauc

SEQ ID NO: 1601772 - RNA, 19 nt, Artificial Sequence
  Description of Artificial Sequence: Synthetic oligonucleotide
  Antisense strand to SEQ ID NO: 1601771
gauaaucgcugcaucuuac

SEQ ID NO: 1601773 - RNA, 19 nt, Artificial Sequence
  Description of Artificial Sequence: Synthetic oligonucleotide
  Sense strand starting at position 3405 of SEQ ID NO: 1560464
agaugcagcgauuaucuuu

SEQ ID NO: 1601774 - RNA, 19 nt, Artificial Sequence
  Description of Artificial Sequence: Synthetic oligonucleotide
  Antisense strand to SEQ ID NO: 1601773
aaagauaaucgcugcaucu

SEQ ID NO: 1601775 - RNA, 19 nt, Artificial Sequence
  Description of Artificial Sequence: Synthetic oligonucleotide
  Sense strand starting at position 23 of SEQ ID NO: 1560465
acacauuccuucccagagu

SEQ ID NO: 1601776 - RNA, 19 nt, Artificial Sequence
  Description of Artificial Sequence: Synthetic oligonucleotide
  Antisense strand to SEQ ID NO: 1601775
acucugggaaggaaugugu

SEQ ID NO: 1601777 - RNA, 19 nt, Artificial Sequence
  Description of Artificial Sequence: Synthetic oligonucleotide
  Sense strand starting at position 92 of SEQ ID NO: 1560465
gccaguaaccaugguauuu

SEQ ID NO: 1601778 - RNA, 19 nt, Artificial Sequence
  Description of Artificial Sequence: Synthetic oligonucleotide
  Antisense strand to SEQ ID NO: 1601777
aaauaccaugguuacuggc

SEQ ID NO: 1601779 - RNA, 19 nt, Artificial Sequence
  Description of Artificial Sequence: Synthetic oligonucleotide
  Sense strand starting at position 174 of SEQ ID NO: 1560465
auagcuagcacuuagggaa

SEQ ID NO: 1601780 - RNA, 19 nt, Artificial Sequence
  Description of Artificial Sequence: Synthetic oligonucleotide
  Antisense strand to SEQ ID NO: 1601779
uucccuaagugcuagcuau

SEQ ID NO: 1601781 - RNA, 19 nt, Artificial Sequence
  Description of Artificial Sequence: Synthetic oligonucleotide
  Sense strand starting at position 186 of SEQ ID NO: 1560465
uagggaacguucuuaaccu

SEQ ID NO: 1601782 - RNA, 19 nt, Artificial Sequence
  Description of Artificial Sequence: Synthetic oligonucleotide
  Antisense strand to SEQ ID NO: 1601781
agguuaagaacguucccua

SEQ ID NO: 1601783 - RNA, 19 nt, Artificial Sequence
  Description of Artificial Sequence: Synthetic oligonucleotide
  Sense strand starting at position 607 of SEQ ID NO: 1560465
aacggagggaguuaguauu

SEQ ID NO: 1601784 - RNA, 19 nt, Artificial Sequence
  Description of Artificial Sequence: Synthetic oligonucleotide
  Antisense strand to SEQ ID NO: 1601783
aauacuaacucccuccguu

SEQ ID NO: 1601785 - RNA, 19 nt, Artificial Sequence
  Description of Artificial Sequence: Synthetic oligonucleotide
  Sense strand starting at position 639 of SEQ ID NO: 1560465
uucuguuuccgaugaugaa

SEQ ID NO: 1601786 - RNA, 19 nt, Artificial Sequence
  Description of Artificial Sequence: Synthetic oligonucleotide
  Antisense strand to SEQ ID NO: 1601785
uucaucaucggaaacagaa

SEQ ID NO: 1601787 - RNA, 19 nt, Artificial Sequence
  Description of Artificial Sequence: Synthetic oligonucleotide
  Sense strand starting at position 640 of SEQ ID NO: 1560465
ucuguuuccgaugaugaaa

SEQ ID NO: 1601788 - RNA, 19 nt, Artificial Sequence
  Description of Artificial Sequence: Synthetic oligonucleotide
  Antisense strand to SEQ ID NO: 1601787
uuucaucaucggaaacaga

SEQ ID NO: 1601789 - RNA, 19 nt, Artificial Sequence
  Description of Artificial Sequence: Synthetic oligonucleotide
  Sense strand starting at position 868 of SEQ ID NO: 1560465
ucucuuaagugucuguaau

SEQ ID NO: 1601790 - RNA, 19 nt, Artificial Sequence
  Description of Artificial Sequence: Synthetic oligonucleotide
  Antisense strand to SEQ ID NO: 1601789
auuacagacacuuaagaga

SEQ ID NO: 1601791 - RNA, 19 nt, Artificial Sequence
  Description of Artificial Sequence: Synthetic oligonucleotide
  Sense strand starting at position 869 of SEQ ID NO: 1560465
cucuuaagugucuguaauc

SEQ ID NO: 1601792 - RNA, 19 nt, Artificial Sequence
  Description of Artificial Sequence: Synthetic oligonucleotide
  Antisense strand to SEQ ID NO: 1601791
gauuacagacacuuaagag

SEQ ID NO: 1601793 - RNA, 19 nt, Artificial Sequence
  Description of Artificial Sequence: Synthetic oligonucleotide
  Sense strand starting at position 870 of SEQ ID NO: 1560465
ucuuaagugucuguaauca

SEQ ID NO: 1601794 - RNA, 19 nt, Artificial Sequence
  Description of Artificial Sequence: Synthetic oligonucleotide
  Antisense strand to SEQ ID NO: 1601793
ugauuacagacacuuaaga

SEQ ID NO: 1601795 - RNA, 19 nt, Artificial Sequence
  Description of Artificial Sequence: Synthetic oligonucleotide
  Sense strand starting at position 874 of SEQ ID NO: 1560465
aagugucuguaaucagaau

SEQ ID NO: 1601796 - RNA, 19 nt, Artificial Sequence
  Description of Artificial Sequence: Synthetic oligonucleotide
  Antisense strand to SEQ ID NO: 1601795
auucugauuacagacacuu

SEQ ID NO: 1601797 - RNA, 19 nt, Artificial Sequence
  Description of Artificial Sequence: Synthetic oligonucleotide
  Sense strand starting at position 875 of SEQ ID NO: 1560465
agugucuguaaucagaaug

SEQ ID NO: 1601798 - RNA, 19 nt, Artificial Sequence
  Description of Artificial Sequence: Synthetic oligonucleotide
  Antisense strand to SEQ ID NO: 1601797
cauucugauuacagacacu

SEQ ID NO: 1601799 - RNA, 19 nt, Artificial Sequence
  Description of Artificial Sequence: Synthetic oligonucleotide
  Sense strand starting at position 987 of SEQ ID NO: 1560465
gcugaugaagucuggaagu

SEQ ID NO: 1601800 - RNA, 19 nt, Artificial Sequence
  Description of Artificial Sequence: Synthetic oligonucleotide
  Antisense strand to SEQ ID NO: 1601799
acuuccagacuucaucagc

SEQ ID NO: 1601801 - RNA, 19 nt, Artificial Sequence
  Description of Artificial Sequence: Synthetic oligonucleotide
  Sense strand starting at position 1772 of SEQ ID NO: 1560465
aacccuuacccguggcaaa

SEQ ID NO: 1601802 - RNA, 19 nt, Artificial Sequence
  Description of Artificial Sequence: Synthetic oligonucleotide
  Antisense strand to SEQ ID NO: 1601801
uuugccacggguaaggguu

SEQ ID NO: 1601803 - RNA, 19 nt, Artificial Sequence
  Description of Artificial Sequence: Synthetic oligonucleotide
  Sense strand starting at position 1785 of SEQ ID NO: 1560465
ggcaaaggaccgugggaua

SEQ ID NO: 1601804 - RNA, 19 nt, Artificial Sequence
  Description of Artificial Sequence: Synthetic oligonucleotide
  Antisense strand to SEQ ID NO: 1601803
uaucccacgguccuuugcc

SEQ ID NO: 1601805 - RNA, 19 nt, Artificial Sequence
  Description of Artificial Sequence: Synthetic oligonucleotide
  Sense strand starting at position 2153 of SEQ ID NO: 1560465
gcguccucugaguccgaua

SEQ ID NO: 1601806 - RNA, 19 nt, Artificial Sequence
  Description of Artificial Sequence: Synthetic oligonucleotide
  Antisense strand to SEQ ID NO: 1601805
uaucggacucagaggacgc

SEQ ID NO: 1601807 - RNA, 19 nt, Artificial Sequence
  Description of Artificial Sequence: Synthetic oligonucleotide
  Sense strand starting at position 2155 of SEQ ID NO: 1560465
guccucugaguccgauaga

SEQ ID NO: 1601808 - RNA, 19 nt, Artificial Sequence
  Description of Artificial Sequence: Synthetic oligonucleotide
  Antisense strand to SEQ ID NO: 1601807
ucuaucggacucagaggac

SEQ ID NO: 1601809 - RNA, 19 nt, Artificial Sequence
  Description of Artificial Sequence: Synthetic oligonucleotide
  Sense strand starting at position 2158 of SEQ ID NO: 1560465
cucugaguccgauagagga

SEQ ID NO: 1601810 - RNA, 19 nt, Artificial Sequence
  Description of Artificial Sequence: Synthetic oligonucleotide
  Antisense strand to SEQ ID NO: 1601809
uccucuaucggacucagag

SEQ ID NO: 1601811 - RNA, 19 nt, Artificial Sequence
  Description of Artificial Sequence: Synthetic oligonucleotide
  Sense strand starting at position 2261 of SEQ ID NO: 1560465
caaugauccugucuagaga

SEQ ID NO: 1601812 - RNA, 19 nt, Artificial Sequence
  Description of Artificial Sequence: Synthetic oligonucleotide
  Antisense strand to SEQ ID NO: 1601811
ucucuagacaggaucauug

SEQ ID NO: 1601813 - RNA, 19 nt, Artificial Sequence
  Description of Artificial Sequence: Synthetic oligonucleotide
  Sense strand starting at position 2321 of SEQ ID NO: 1560465
ggcacacgauucguaaacu

SEQ ID NO: 1601814 - RNA, 19 nt, Artificial Sequence
  Description of Artificial Sequence: Synthetic oligonucleotide
  Antisense strand to SEQ ID NO: 1601813
aguuuacgaaucgugugcc

SEQ ID NO: 1601815 - RNA, 19 nt, Artificial Sequence
  Description of Artificial Sequence: Synthetic oligonucleotide
  Sense strand starting at position 2409 of SEQ ID NO: 1560465
cgaacuuuguaggcaacaa

SEQ ID NO: 1601816 - RNA, 19 nt, Artificial Sequence
  Description of Artificial Sequence: Synthetic oligonucleotide
  Antisense strand to SEQ ID NO: 1601815
uuguugccuacaaaguucg

SEQ ID NO: 1601817 - RNA, 19 nt, Artificial Sequence
  Description of Artificial Sequence: Synthetic oligonucleotide
  Sense strand starting at position 2437 of SEQ ID NO: 1560465
auggaauaauaucagagua

SEQ ID NO: 1601818 - RNA, 19 nt, Artificial Sequence
  Description of Artificial Sequence: Synthetic oligonucleotide
  Antisense strand to SEQ ID NO: 1601817
uacucugauauuauuccau

SEQ ID NO: 1601819 - RNA, 19 nt, Artificial Sequence
  Description of Artificial Sequence: Synthetic oligonucleotide
  Sense strand starting at position 2439 of SEQ ID NO: 1560465
ggaauaauaucagaguauu

SEQ ID NO: 1601820 - RNA, 19 nt, Artificial Sequence
  Description of Artificial Sequence: Synthetic oligonucleotide
  Antisense strand to SEQ ID NO: 1601819
aauacucugauauuauucc

SEQ ID NO: 1601821 - RNA, 19 nt, Artificial Sequence
  Description of Artificial Sequence: Synthetic oligonucleotide
  Sense strand starting at position 2447 of SEQ ID NO: 1560465
aucagaguauuauccguaa

SEQ ID NO: 1601822 - RNA, 19 nt, Artificial Sequence
  Description of Artificial Sequence: Synthetic oligonucleotide
  Antisense strand to SEQ ID NO: 1601821
uuacggauaauacucugau

SEQ ID NO: 1601823 - RNA, 19 nt, Artificial Sequence
  Description of Artificial Sequence: Synthetic oligonucleotide
  Sense strand starting at position 2450 of SEQ ID NO: 1560465
agaguauuauccguaauuc

SEQ ID NO: 1601824 - RNA, 19 nt, Artificial Sequence
  Description of Artificial Sequence: Synthetic oligonucleotide
  Antisense strand to SEQ ID NO: 1601823
gaauuacggauaauacucu

SEQ ID NO: 1601825 - RNA, 19 nt, Artificial Sequence
  Description of Artificial Sequence: Synthetic oligonucleotide
  Sense strand starting at position 2451 of SEQ ID NO: 1560465
gaguauuauccguaauucg

SEQ ID NO: 1601826 - RNA, 19 nt, Artificial Sequence
  Description of Artificial Sequence: Synthetic oligonucleotide
  Antisense strand to SEQ ID NO: 1601825
cgaauuacggauaauacuc

SEQ ID NO: 1601827 - RNA, 19 nt, Artificial Sequence
  Description of Artificial Sequence: Synthetic oligonucleotide
  Sense strand starting at position 2461 of SEQ ID NO: 1560465
cguaauucgcauuauaauu

SEQ ID NO: 1601828 - RNA, 19 nt, Artificial Sequence
  Description of Artificial Sequence: Synthetic oligonucleotide
  Antisense strand to SEQ ID NO: 1601827
aauuauaaugcgaauuacg

SEQ ID NO: 1601829 - RNA, 19 nt, Artificial Sequence
  Description of Artificial Sequence: Synthetic oligonucleotide
  Sense strand starting at position 2466 of SEQ ID NO: 1560465
uucgcauuauaauugcaaa

SEQ ID NO: 1601830 - RNA, 19 nt, Artificial Sequence
  Description of Artificial Sequence: Synthetic oligonucleotide
  Antisense strand to SEQ ID NO: 1601829
uuugcaauuauaaugcgaa

SEQ ID NO: 1601831 - RNA, 19 nt, Artificial Sequence
  Description of Artificial Sequence: Synthetic oligonucleotide
  Sense strand starting at position 2480 of SEQ ID NO: 1560465
gcaaacaguucguccagaa

SEQ ID NO: 1601832 - RNA, 19 nt, Artificial Sequence
  Description of Artificial Sequence: Synthetic oligonucleotide
  Antisense strand to SEQ ID NO: 1601831
uucuggacgaacuguuugc

SEQ ID NO: 1601833 - RNA, 19 nt, Artificial Sequence
  Description of Artificial Sequence: Synthetic oligonucleotide
  Sense strand starting at position 2484 of SEQ ID NO: 1560465
acaguucguccagaagaaa

SEQ ID NO: 1601834 - RNA, 19 nt, Artificial Sequence
  Description of Artificial Sequence: Synthetic oligonucleotide
  Antisense strand to SEQ ID NO: 1601833
uuucuucuggacgaacugu

SEQ ID NO: 1601835 - RNA, 19 nt, Artificial Sequence
  Description of Artificial Sequence: Synthetic oligonucleotide
  Sense strand starting at position 2894 of SEQ ID NO: 1560465
augacaaguguuuaccuau

SEQ ID NO: 1601836 - RNA, 19 nt, Artificial Sequence
  Description of Artificial Sequence: Synthetic oligonucleotide
  Antisense strand to SEQ ID NO: 1601835
auagguaaacacuugucau

SEQ ID NO: 1601837 - RNA, 19 nt, Artificial Sequence
  Description of Artificial Sequence: Synthetic oligonucleotide
  Sense strand starting at position 3295 of SEQ ID NO: 1560465
ugcaauguugcauaaagug

SEQ ID NO: 1601838 - RNA, 19 nt, Artificial Sequence
  Description of Artificial Sequence: Synthetic oligonucleotide
  Antisense strand to SEQ ID NO: 1601837
cacuuuaugcaacauugca

SEQ ID NO: 1601839 - RNA, 19 nt, Artificial Sequence
  Description of Artificial Sequence: Synthetic oligonucleotide
  Sense strand starting at position 3307 of SEQ ID NO: 1560465
uaaagugaacugugacaga

SEQ ID NO: 1601840 - RNA, 19 nt, Artificial Sequence
  Description of Artificial Sequence: Synthetic oligonucleotide
  Antisense strand to SEQ ID NO: 1601839
ucugucacaguucacuuua

SEQ ID NO: 1601841 - RNA, 19 nt, Artificial Sequence
  Description of Artificial Sequence: Synthetic oligonucleotide
  Sense strand starting at position 3348 of SEQ ID NO: 1560465
ggcauaaugcuguaugguc

SEQ ID NO: 1601842 - RNA, 19 nt, Artificial Sequence
  Description of Artificial Sequence: Synthetic oligonucleotide
  Antisense strand to SEQ ID NO: 1601841
gaccauacagcauuaugcc

SEQ ID NO: 1601843 - RNA, 19 nt, Artificial Sequence
  Description of Artificial Sequence: Synthetic oligonucleotide
  Sense strand starting at position 3353 of SEQ ID NO: 1560465
aaugcuguauggucuuauu

SEQ ID NO: 1601844 - RNA, 19 nt, Artificial Sequence
  Description of Artificial Sequence: Synthetic oligonucleotide
  Antisense strand to SEQ ID NO: 1601843
aauaagaccauacagcauu

SEQ ID NO: 1601845 - RNA, 19 nt, Artificial Sequence
  Description of Artificial Sequence: Synthetic oligonucleotide
  Sense strand starting at position 3379 of SEQ ID NO: 1560465
gcauucguggcaucaguuu

SEQ ID NO: 1601846 - RNA, 19 nt, Artificial Sequence
  Description of Artificial Sequence: Synthetic oligonucleotide
  Antisense strand to SEQ ID NO: 1601845
aaacugaugccacgaaugc

SEQ ID NO: 1601847 - RNA, 19 nt, Artificial Sequence
  Description of Artificial Sequence: Synthetic oligonucleotide
  Sense strand starting at position 3445 of SEQ ID NO: 1560465
ucgaauuggcaccaucaga

SEQ ID NO: 1601848 - RNA, 19 nt, Artificial Sequence
  Description of Artificial Sequence: Synthetic oligonucleotide
  Antisense strand to SEQ ID NO: 1601847
ucugauggugccaauucga

SEQ ID NO: 1601849 - RNA, 19 nt, Artificial Sequence
  Description of Artificial Sequence: Synthetic oligonucleotide
  Sense strand starting at position 3466 of SEQ ID NO: 1560465
uuacgugugcuuguggcaa

SEQ ID NO: 1601850 - RNA, 19 nt, Artificial Sequence
  Description of Artificial Sequence: Synthetic oligonucleotide
  Antisense strand to SEQ ID NO: 1601849
uugccacaagcacacguaa

SEQ ID NO: 1601851 - RNA, 19 nt, Artificial Sequence
  Description of Artificial Sequence: Synthetic oligonucleotide
  Sense strand starting at position 3493 of SEQ ID NO: 1560465
guaagaugcagcgauuauc

SEQ ID NO: 1601852 - RNA, 19 nt, Artificial Sequence
  Description of Artificial Sequence: Synthetic oligonucleotide
  Antisense strand to SEQ ID NO: 1601851
gauaaucgcugcaucuuac

SEQ ID NO: 1601853 - RNA, 19 nt, Artificial Sequence
  Description of Artificial Sequence: Synthetic oligonucleotide
  Sense strand starting at position 3496 of SEQ ID NO: 1560465
agaugcagcgauuaucuuu

SEQ ID NO: 1601854 - RNA, 19 nt, Artificial Sequence
  Description of Artificial Sequence: Synthetic oligonucleotide
  Antisense strand to SEQ ID NO: 1601853
aaagauaaucgcugcaucu

SEQ ID NO: 1601855 - RNA, 19 nt, Artificial Sequence
  Description of Artificial Sequence: Synthetic oligonucleotide
  Sense strand starting at position 25 of SEQ ID NO: 1560466
accagauccgguuaauauu

SEQ ID NO: 1601856 - RNA, 19 nt, Artificial Sequence
  Description of Artificial Sequence: Synthetic oligonucleotide
  Antisense strand to SEQ ID NO: 1601855
aauauuaaccggaucuggu

SEQ ID NO: 1601857 - RNA, 19 nt, Artificial Sequence
  Description of Artificial Sequence: Synthetic oligonucleotide
  Sense strand starting at position 31 of SEQ ID NO: 1560466
uccgguuaauauuuguauu

SEQ ID NO: 1601858 - RNA, 19 nt, Artificial Sequence
  Description of Artificial Sequence: Synthetic oligonucleotide
  Antisense strand to SEQ ID NO: 1601857
aauacaaauauuaaccgga

SEQ ID NO: 1601859 - RNA, 19 nt, Artificial Sequence
  Description of Artificial Sequence: Synthetic oligonucleotide
  Sense strand starting at position 347 of SEQ ID NO: 1560466
ugggaaccgucgagauuuc

SEQ ID NO: 1601860 - RNA, 19 nt, Artificial Sequence
  Description of Artificial Sequence: Synthetic oligonucleotide
  Antisense strand to SEQ ID NO: 1601859
gaaaucucgacgguuccca

SEQ ID NO: 1601861 - RNA, 19 nt, Artificial Sequence
  Description of Artificial Sequence: Synthetic oligonucleotide
  Sense strand starting at position 354 of SEQ ID NO: 1560466
cgucgagauuucuccugga

SEQ ID NO: 1601862 - RNA, 19 nt, Artificial Sequence
  Description of Artificial Sequence: Synthetic oligonucleotide
  Antisense strand to SEQ ID NO: 1601861
uccaggagaaaucucgacg

SEQ ID NO: 1601863 - RNA, 19 nt, Artificial Sequence
  Description of Artificial Sequence: Synthetic oligonucleotide
  Sense strand starting at position 375 of SEQ ID NO: 1560466
cgcucagguccagaaacau

SEQ ID NO: 1601864 - RNA, 19 nt, Artificial Sequence
  Description of Artificial Sequence: Synthetic oligonucleotide
  Antisense strand to SEQ ID NO: 1601863
auguuucuggaccugagcg

SEQ ID NO: 1601865 - RNA, 19 nt, Artificial Sequence
  Description of Artificial Sequence: Synthetic oligonucleotide
  Sense strand starting at position 407 of SEQ ID NO: 1560466
cucugaggccuccagugaa

SEQ ID NO: 1601866 - RNA, 19 nt, Artificial Sequence
  Description of Artificial Sequence: Synthetic oligonucleotide
  Antisense strand to SEQ ID NO: 1601865
uucacuggaggccucagag

SEQ ID NO: 1601867 - RNA, 19 nt, Artificial Sequence
  Description of Artificial Sequence: Synthetic oligonucleotide
  Sense strand starting at position 419 of SEQ ID NO: 1560466
cagugaagucaacagguuu

SEQ ID NO: 1601868 - RNA, 19 nt, Artificial Sequence
  Description of Artificial Sequence: Synthetic oligonucleotide
  Antisense strand to SEQ ID NO: 1601867
aaaccuguugacuucacug

SEQ ID NO: 1601869 - RNA, 19 nt, Artificial Sequence
  Description of Artificial Sequence: Synthetic oligonucleotide
  Sense strand starting at position 614 of SEQ ID NO: 1560466
caguuagcuccagaccagu

SEQ ID NO: 1601870 - RNA, 19 nt, Artificial Sequence
  Description of Artificial Sequence: Synthetic oligonucleotide
  Antisense strand to SEQ ID NO: 1601869
acuggucuggagcuaacug

SEQ ID NO: 1601871 - RNA, 19 nt, Artificial Sequence
  Description of Artificial Sequence: Synthetic oligonucleotide
  Sense strand starting at position 647 of SEQ ID NO: 1560466
agaguuauuugcccucagu

SEQ ID NO: 1601872 - RNA, 19 nt, Artificial Sequence
  Description of Artificial Sequence: Synthetic oligonucleotide
  Antisense strand to SEQ ID NO: 1601871
acugagggcaaauaacucu

SEQ ID NO: 1601873 - RNA, 19 nt, Artificial Sequence
  Description of Artificial Sequence: Synthetic oligonucleotide
  Sense strand starting at position 685 of SEQ ID NO: 1560466
cagauccuuuguccaggaa

SEQ ID NO: 1601874 - RNA, 19 nt, Artificial Sequence
  Description of Artificial Sequence: Synthetic oligonucleotide
  Antisense strand to SEQ ID NO: 1601873
uuccuggacaaaggaucug

SEQ ID NO: 1601875 - RNA, 19 nt, Artificial Sequence
  Description of Artificial Sequence: Synthetic oligonucleotide
  Sense strand starting at position 688 of SEQ ID NO: 1560466
auccuuuguccaggaaagc

SEQ ID NO: 1601876 - RNA, 19 nt, Artificial Sequence
  Description of Artificial Sequence: Synthetic oligonucleotide
  Antisense strand to SEQ ID NO: 1601875
gcuuuccuggacaaaggau

SEQ ID NO: 1601877 - RNA, 19 nt, Artificial Sequence
  Description of Artificial Sequence: Synthetic oligonucleotide
  Sense strand starting at position 689 of SEQ ID NO: 1560466
uccuuuguccaggaaagca

SEQ ID NO: 1601878 - RNA, 19 nt, Artificial Sequence
  Description of Artificial Sequence: Synthetic oligonucleotide
  Antisense strand to SEQ ID NO: 1601877
ugcuuuccuggacaaagga

SEQ ID NO: 1601879 - RNA, 19 nt, Artificial Sequence
  Description of Artificial Sequence: Synthetic oligonucleotide
  Sense strand starting at position 1012 of SEQ ID NO: 1560466
cggcauauuccaggauccu

SEQ ID NO: 1601880 - RNA, 19 nt, Artificial Sequence
  Description of Artificial Sequence: Synthetic oligonucleotide
  Antisense strand to SEQ ID NO: 1601879
aggauccuggaauaugccg

SEQ ID NO: 1601881 - RNA, 19 nt, Artificial Sequence
  Description of Artificial Sequence: Synthetic oligonucleotide
  Sense strand starting at position 1024 of SEQ ID NO: 1560466
ggauccuccuuccucagaa

SEQ ID NO: 1601882 - RNA, 19 nt, Artificial Sequence
  Description of Artificial Sequence: Synthetic oligonucleotide
  Antisense strand to SEQ ID NO: 1601881
uucugaggaaggaggaucc

SEQ ID NO: 1601883 - RNA, 19 nt, Artificial Sequence
  Description of Artificial Sequence: Synthetic oligonucleotide
  Sense strand starting at position 1235 of SEQ ID NO: 1560466
agcaguuuccggucuccga

SEQ ID NO: 1601884 - RNA, 19 nt, Artificial Sequence
  Description of Artificial Sequence: Synthetic oligonucleotide
  Antisense strand to SEQ ID NO: 1601883
ucggagaccggaaacugcu

SEQ ID NO: 1601885 - RNA, 19 nt, Artificial Sequence
  Description of Artificial Sequence: Synthetic oligonucleotide
  Sense strand starting at position 1992 of SEQ ID NO: 1560466
gauguuacaugagugccaa

SEQ ID NO: 1601886 - RNA, 19 nt, Artificial Sequence
  Description of Artificial Sequence: Synthetic oligonucleotide
  Antisense strand to SEQ ID NO: 1601885
uuggcacucauguaacauc

SEQ ID NO: 1601887 - RNA, 19 nt, Artificial Sequence
  Description of Artificial Sequence: Synthetic oligonucleotide
  Sense strand starting at position 1993 of SEQ ID NO: 1560466
auguuacaugagugccaau

SEQ ID NO: 1601888 - RNA, 19 nt, Artificial Sequence
  Description of Artificial Sequence: Synthetic oligonucleotide
  Antisense strand to SEQ ID NO: 1601887
auuggcacucauguaacau

SEQ ID NO: 1601889 - RNA, 19 nt, Artificial Sequence
  Description of Artificial Sequence: Synthetic oligonucleotide
  Sense strand starting at position 2170 of SEQ ID NO: 1560466
ggcggagcgcuugcugauu

SEQ ID NO: 1601890 - RNA, 19 nt, Artificial Sequence
  Description of Artificial Sequence: Synthetic oligonucleotide
  Antisense strand to SEQ ID NO: 1601889
aaucagcaagcgcuccgcc

SEQ ID NO: 1601891 - RNA, 19 nt, Artificial Sequence
  Description of Artificial Sequence: Synthetic oligonucleotide
  Sense strand starting at position 2210 of SEQ ID NO: 1560466
ugccguaagguccaaugaa

SEQ ID NO: 1601892 - RNA, 19 nt, Artificial Sequence
  Description of Artificial Sequence: Synthetic oligonucleotide
  Antisense strand to SEQ ID NO: 1601891
uucauuggaccuuacggca

SEQ ID NO: 1601893 - RNA, 19 nt, Artificial Sequence
  Description of Artificial Sequence: Synthetic oligonucleotide
  Sense strand starting at position 2248 of SEQ ID NO: 1560466
gguccaaucaacgguaaga

SEQ ID NO: 1601894 - RNA, 19 nt, Artificial Sequence
  Description of Artificial Sequence: Synthetic oligonucleotide
  Antisense strand to SEQ ID NO: 1601893
ucuuaccguugauuggacc

SEQ ID NO: 1601895 - RNA, 19 nt, Artificial Sequence
  Description of Artificial Sequence: Synthetic oligonucleotide
  Sense strand starting at position 2250 of SEQ ID NO: 1560466
uccaaucaacgguaagauc

SEQ ID NO: 1601896 - RNA, 19 nt, Artificial Sequence
  Description of Artificial Sequence: Synthetic oligonucleotide
  Antisense strand to SEQ ID NO: 1601895
gaucuuaccguugauugga

SEQ ID NO: 1601897 - RNA, 19 nt, Artificial Sequence
  Description of Artificial Sequence: Synthetic oligonucleotide
  Sense strand starting at position 2263 of SEQ ID NO: 1560466
aagaucucagaaugagugu

SEQ ID NO: 1601898 - RNA, 19 nt, Artificial Sequence
  Description of Artificial Sequence: Synthetic oligonucleotide
  Antisense strand to SEQ ID NO: 1601897
acacucauucugagaucuu

SEQ ID NO: 1601899 - RNA, 19 nt, Artificial Sequence
  Description of Artificial Sequence: Synthetic oligonucleotide
  Sense strand starting at position 2316 of SEQ ID NO: 1560466
cuaagugucucuguaacac

SEQ ID NO: 1601900 - RNA, 19 nt, Artificial Sequence
  Description of Artificial Sequence: Synthetic oligonucleotide
  Antisense strand to SEQ ID NO: 1601899
guguuacagagacacuuag

SEQ ID NO: 1601901 - RNA, 19 nt, Artificial Sequence
  Description of Artificial Sequence: Synthetic oligonucleotide
  Sense strand starting at position 2333 of SEQ ID NO: 1560466
acacauuccgauuggugua

SEQ ID NO: 1601902 - RNA, 19 nt, Artificial Sequence
  Description of Artificial Sequence: Synthetic oligonucleotide
  Antisense strand to SEQ ID NO: 1601901
uacaccaaucggaaugugu

SEQ ID NO: 1601903 - RNA, 19 nt, Artificial Sequence
  Description of Artificial Sequence: Synthetic oligonucleotide
  Sense strand starting at position 2338 of SEQ ID NO: 1560466
uuccgauugguguacaucu

SEQ ID NO: 1601904 - RNA, 19 nt, Artificial Sequence
  Description of Artificial Sequence: Synthetic oligonucleotide
  Antisense strand to SEQ ID NO: 1601903
agauguacaccaaucggaa

SEQ ID NO: 1601905 - RNA, 19 nt, Artificial Sequence
  Description of Artificial Sequence: Synthetic oligonucleotide
  Sense strand starting at position 2431 of SEQ ID NO: 1560466
uccuguugccuuuaagaaa

SEQ ID NO: 1601906 - RNA, 19 nt, Artificial Sequence
  Description of Artificial Sequence: Synthetic oligonucleotide
  Antisense strand to SEQ ID NO: 1601905
uuucuuaaaggcaacagga

SEQ ID NO: 1601907 - RNA, 19 nt, Artificial Sequence
  Description of Artificial Sequence: Synthetic oligonucleotide
  Sense strand starting at position 2486 of SEQ ID NO: 1560466
gccguuagggcgguuucaa

SEQ ID NO: 1601908 - RNA, 19 nt, Artificial Sequence
  Description of Artificial Sequence: Synthetic oligonucleotide
  Antisense strand to SEQ ID NO: 1601907
uugaaaccgcccuaacggc

SEQ ID NO: 1601909 - RNA, 19 nt, Artificial Sequence
  Description of Artificial Sequence: Synthetic oligonucleotide
  Sense strand starting at position 2524 of SEQ ID NO: 1560466
gcaguuauugucuuagcuc

SEQ ID NO: 1601910 - RNA, 19 nt, Artificial Sequence
  Description of Artificial Sequence: Synthetic oligonucleotide
  Antisense strand to SEQ ID NO: 1601909
gagcuaagacaauaacugc

SEQ ID NO: 1601911 - RNA, 19 nt, Artificial Sequence
  Description of Artificial Sequence: Synthetic oligonucleotide
  Sense strand starting at position 2533 of SEQ ID NO: 1560466
gucuuagcucacuaaagcu

SEQ ID NO: 1601912 - RNA, 19 nt, Artificial Sequence
  Description of Artificial Sequence: Synthetic oligonucleotide
  Antisense strand to SEQ ID NO: 1601911
agcuuuagugagcuaagac

SEQ ID NO: 1601913 - RNA, 19 nt, Artificial Sequence
  Description of Artificial Sequence: Synthetic oligonucleotide
  Sense strand starting at position 2603 of SEQ ID NO: 1560466
aggacugccucacaaauuu

SEQ ID NO: 1601914 - RNA, 19 nt, Artificial Sequence
  Description of Artificial Sequence: Synthetic oligonucleotide
  Antisense strand to SEQ ID NO: 1601913
aaauuugugaggcaguccu

SEQ ID NO: 1601915 - RNA, 19 nt, Artificial Sequence
  Description of Artificial Sequence: Synthetic oligonucleotide
  Sense strand starting at position 2659 of SEQ ID NO: 1560466
gauacacaguucguaaucu

SEQ ID NO: 1601916 - RNA, 19 nt, Artificial Sequence
  Description of Artificial Sequence: Synthetic oligonucleotide
  Antisense strand to SEQ ID NO: 1601915
agauuacgaacuguguauc

SEQ ID NO: 1601917 - RNA, 19 nt, Artificial Sequence
  Description of Artificial Sequence: Synthetic oligonucleotide
  Sense strand starting at position 2663 of SEQ ID NO: 1560466
cacaguucguaaucuggaa

SEQ ID NO: 1601918 - RNA, 19 nt, Artificial Sequence
  Description of Artificial Sequence: Synthetic oligonucleotide
  Antisense strand to SEQ ID NO: 1601917
uuccagauuacgaacugug

SEQ ID NO: 1601919 - RNA, 19 nt, Artificial Sequence
  Description of Artificial Sequence: Synthetic oligonucleotide
  Sense strand starting at position 2667 of SEQ ID NO: 1560466
guucguaaucuggaaggaa

SEQ ID NO: 1601920 - RNA, 19 nt, Artificial Sequence
  Description of Artificial Sequence: Synthetic oligonucleotide
  Antisense strand to SEQ ID NO: 1601919
uuccuuccagauuacgaac

SEQ ID NO: 1601921 - RNA, 19 nt, Artificial Sequence
  Description of Artificial Sequence: Synthetic oligonucleotide
  Sense strand starting at position 2686 of SEQ ID NO: 1560466
cccaguugccuuuaggaaa

SEQ ID NO: 1601922 - RNA, 19 nt, Artificial Sequence
  Description of Artificial Sequence: Synthetic oligonucleotide
  Antisense strand to SEQ ID NO: 1601921
uuuccuaaaggcaacuggg

SEQ ID NO: 1601923 - RNA, 19 nt, Artificial Sequence
  Description of Artificial Sequence: Synthetic oligonucleotide
  Sense strand starting at position 2934 of SEQ ID NO: 1560466
ucggcuguucccguaaauc

SEQ ID NO: 1601924 - RNA, 19 nt, Artificial Sequence
  Description of Artificial Sequence: Synthetic oligonucleotide
  Antisense strand to SEQ ID NO: 1601923
gauuuacgggaacagccga

SEQ ID NO: 1601925 - RNA, 19 nt, Artificial Sequence
  Description of Artificial Sequence: Synthetic oligonucleotide
  Sense strand starting at position 3093 of SEQ ID NO: 1560466
guaagacgcaaucgggaua

SEQ ID NO: 1601926 - RNA, 19 nt, Artificial Sequence
  Description of Artificial Sequence: Synthetic oligonucleotide
  Antisense strand to SEQ ID NO: 1601925
uaucccgauugcgucuuac

SEQ ID NO: 1601927 - RNA, 19 nt, Artificial Sequence
  Description of Artificial Sequence: Synthetic oligonucleotide
  Sense strand starting at position 3096 of SEQ ID NO: 1560466
agacgcaaucgggauacau

SEQ ID NO: 1601928 - RNA, 19 nt, Artificial Sequence
  Description of Artificial Sequence: Synthetic oligonucleotide
  Antisense strand to SEQ ID NO: 1601927
auguaucccgauugcgucu

SEQ ID NO: 1601929 - RNA, 19 nt, Artificial Sequence
  Description of Artificial Sequence: Synthetic oligonucleotide
  Sense strand starting at position 3098 of SEQ ID NO: 1560466
acgcaaucgggauacauga

SEQ ID NO: 1601930 - RNA, 19 nt, Artificial Sequence
  Description of Artificial Sequence: Synthetic oligonucleotide
  Antisense strand to SEQ ID NO: 1601929
ucauguaucccgauugcgu

SEQ ID NO: 1601931 - RNA, 19 nt, Artificial Sequence
  Description of Artificial Sequence: Synthetic oligonucleotide
  Sense strand starting at position 3637 of SEQ ID NO: 1560466
ggcggcaucgaauaauaaa

SEQ ID NO: 1601932 - RNA, 19 nt, Artificial Sequence
  Description of Artificial Sequence: Synthetic oligonucleotide
  Antisense strand to SEQ ID NO: 1601931
uuuauuauucgaugccgcc

SEQ ID NO: 1601933 - RNA, 19 nt, Artificial Sequence
  Description of Artificial Sequence: Synthetic oligonucleotide
  Sense strand starting at position 3844 of SEQ ID NO: 1560466
guuuguggcccggauugaa

SEQ ID NO: 1601934 - RNA, 19 nt, Artificial Sequence
  Description of Artificial Sequence: Synthetic oligonucleotide
  Antisense strand to SEQ ID NO: 1601933
uucaauccgggccacaaac

SEQ ID NO: 1601935 - RNA, 19 nt, Artificial Sequence
  Description of Artificial Sequence: Synthetic oligonucleotide
  Sense strand starting at position 146 of SEQ ID NO: 1560467
gauguuacaugagugccaa

SEQ ID NO: 1601936 - RNA, 19 nt, Artificial Sequence
  Description of Artificial Sequence: Synthetic oligonucleotide
  Antisense strand to SEQ ID NO: 1601935
uuggcacucauguaacauc

SEQ ID NO: 1601937 - RNA, 19 nt, Artificial Sequence
  Description of Artificial Sequence: Synthetic oligonucleotide
  Sense strand starting at position 147 of SEQ ID NO: 1560467
auguuacaugagugccaau

SEQ ID NO: 1601938 - RNA, 19 nt, Artificial Sequence
  Description of Artificial Sequence: Synthetic oligonucleotide
  Antisense strand to SEQ ID NO: 1601937
auuggcacucauguaacau

SEQ ID NO: 1601939 - RNA, 19 nt, Artificial Sequence
  Description of Artificial Sequence: Synthetic oligonucleotide
  Sense strand starting at position 324 of SEQ ID NO: 1560467
ggcggagcgcuugcugauu

SEQ ID NO: 1601940 - RNA, 19 nt, Artificial Sequence
  Description of Artificial Sequence: Synthetic oligonucleotide
  Antisense strand to SEQ ID NO: 1601939
aaucagcaagcgcuccgcc

SEQ ID NO: 1601941 - RNA, 19 nt, Artificial Sequence
  Description of Artificial Sequence: Synthetic oligonucleotide
  Sense strand starting at position 364 of SEQ ID NO: 1560467
ugccguaagguccaaugaa

SEQ ID NO: 1601942 - RNA, 19 nt, Artificial Sequence
  Description of Artificial Sequence: Synthetic oligonucleotide
  Antisense strand to SEQ ID NO: 1601941
uucauuggaccuuacggca

SEQ ID NO: 1601943 - RNA, 19 nt, Artificial Sequence
  Description of Artificial Sequence: Synthetic oligonucleotide
  Sense strand starting at position 390 of SEQ ID NO: 1560467
gaguaacaauuugguccaa

SEQ ID NO: 1601944 - RNA, 19 nt, Artificial Sequence
  Description of Artificial Sequence: Synthetic oligonucleotide
  Antisense strand to SEQ ID NO: 1601943
uuggaccaaauuguuacuc

SEQ ID NO: 1601945 - RNA, 19 nt, Artificial Sequence
  Description of Artificial Sequence: Synthetic oligonucleotide
  Sense strand starting at position 402 of SEQ ID NO: 1560467
gguccaaucaacgguaaga

SEQ ID NO: 1601946 - RNA, 19 nt, Artificial Sequence
  Description of Artificial Sequence: Synthetic oligonucleotide
  Antisense strand to SEQ ID NO: 1601945
ucuuaccguugauuggacc

SEQ ID NO: 1601947 - RNA, 19 nt, Artificial Sequence
  Description of Artificial Sequence: Synthetic oligonucleotide
  Sense strand starting at position 404 of SEQ ID NO: 1560467
uccaaucaacgguaagauc

SEQ ID NO: 1601948 - RNA, 19 nt, Artificial Sequence
  Description of Artificial Sequence: Synthetic oligonucleotide
  Antisense strand to SEQ ID NO: 1601947
gaucuuaccguugauugga

SEQ ID NO: 1601949 - RNA, 19 nt, Artificial Sequence
  Description of Artificial Sequence: Synthetic oligonucleotide
  Sense strand starting at position 417 of SEQ ID NO: 1560467
aagaucucagaaugagugu

SEQ ID NO: 1601950 - RNA, 19 nt, Artificial Sequence
  Description of Artificial Sequence: Synthetic oligonucleotide
  Antisense strand to SEQ ID NO: 1601949
acacucauucugagaucuu

SEQ ID NO: 1601951 - RNA, 19 nt, Artificial Sequence
  Description of Artificial Sequence: Synthetic oligonucleotide
  Sense strand starting at position 470 of SEQ ID NO: 1560467
cuaagugucucuguaacac

SEQ ID NO: 1601952 - RNA, 19 nt, Artificial Sequence
  Description of Artificial Sequence: Synthetic oligonucleotide
  Antisense strand to SEQ ID NO: 1601951
guguuacagagacacuuag

SEQ ID NO: 1601953 - RNA, 19 nt, Artificial Sequence
  Description of Artificial Sequence: Synthetic oligonucleotide
  Sense strand starting at position 487 of SEQ ID NO: 1560467
acacauuccgauuggugua

SEQ ID NO: 1601954 - RNA, 19 nt, Artificial Sequence
  Description of Artificial Sequence: Synthetic oligonucleotide
  Antisense strand to SEQ ID NO: 1601953
uacaccaaucggaaugugu

SEQ ID NO: 1601955 - RNA, 19 nt, Artificial Sequence
  Description of Artificial Sequence: Synthetic oligonucleotide
  Sense strand starting at position 492 of SEQ ID NO: 1560467
uuccgauugguguacaucu

SEQ ID NO: 1601956 - RNA, 19 nt, Artificial Sequence
  Description of Artificial Sequence: Synthetic oligonucleotide
  Antisense strand to SEQ ID NO: 1601955
agauguacaccaaucggaa

SEQ ID NO: 1601957 - RNA, 19 nt, Artificial Sequence
  Description of Artificial Sequence: Synthetic oligonucleotide
  Sense strand starting at position 585 of SEQ ID NO: 1560467
uccuguugccuuuaagaaa

SEQ ID NO: 1601958 - RNA, 19 nt, Artificial Sequence
  Description of Artificial Sequence: Synthetic oligonucleotide
  Antisense strand to SEQ ID NO: 1601957
uuucuuaaaggcaacagga

SEQ ID NO: 1601959 - RNA, 19 nt, Artificial Sequence
  Description of Artificial Sequence: Synthetic oligonucleotide
  Sense strand starting at position 640 of SEQ ID NO: 1560467
gccguuagggcgguuucaa

SEQ ID NO: 1601960 - RNA, 19 nt, Artificial Sequence
  Description of Artificial Sequence: Synthetic oligonucleotide
  Antisense strand to SEQ ID NO: 1601959
uugaaaccgcccuaacggc

SEQ ID NO: 1601961 - RNA, 19 nt, Artificial Sequence
  Description of Artificial Sequence: Synthetic oligonucleotide
  Sense strand starting at position 678 of SEQ ID NO: 1560467
gcaguuauugucuuagcuc

SEQ ID NO: 1601962 - RNA, 19 nt, Artificial Sequence
  Description of Artificial Sequence: Synthetic oligonucleotide
  Antisense strand to SEQ ID NO: 1601961
gagcuaagacaauaacugc

SEQ ID NO: 1601963 - RNA, 19 nt, Artificial Sequence
  Description of Artificial Sequence: Synthetic oligonucleotide
  Sense strand starting at position 687 of SEQ ID NO: 1560467
gucuuagcucacuaaagcu

SEQ ID NO: 1601964 - RNA, 19 nt, Artificial Sequence
  Description of Artificial Sequence: Synthetic oligonucleotide
  Antisense strand to SEQ ID NO: 1601963
agcuuuagugagcuaagac

SEQ ID NO: 1601965 - RNA, 19 nt, Artificial Sequence
  Description of Artificial Sequence: Synthetic oligonucleotide
  Sense strand starting at position 757 of SEQ ID NO: 1560467
aggacugccucacaaauuu

SEQ ID NO: 1601966 - RNA, 19 nt, Artificial Sequence
  Description of Artificial Sequence: Synthetic oligonucleotide
  Antisense strand to SEQ ID NO: 1601965
aaauuugugaggcaguccu

SEQ ID NO: 1601967 - RNA, 19 nt, Artificial Sequence
  Description of Artificial Sequence: Synthetic oligonucleotide
  Sense strand starting at position 813 of SEQ ID NO: 1560467
gauacacaguucguaaucu

SEQ ID NO: 1601968 - RNA, 19 nt, Artificial Sequence
  Description of Artificial Sequence: Synthetic oligonucleotide
  Antisense strand to SEQ ID NO: 1601967
agauuacgaacuguguauc

SEQ ID NO: 1601969 - RNA, 19 nt, Artificial Sequence
  Description of Artificial Sequence: Synthetic oligonucleotide
  Sense strand starting at position 817 of SEQ ID NO: 1560467
cacaguucguaaucuggaa

SEQ ID NO: 1601970 - RNA, 19 nt, Artificial Sequence
  Description of Artificial Sequence: Synthetic oligonucleotide
  Antisense strand to SEQ ID NO: 1601969
uuccagauuacgaacugug

SEQ ID NO: 1601971 - RNA, 19 nt, Artificial Sequence
  Description of Artificial Sequence: Synthetic oligonucleotide
  Sense strand starting at position 821 of SEQ ID NO: 1560467
guucguaaucuggaaggaa

SEQ ID NO: 1601972 - RNA, 19 nt, Artificial Sequence
  Description of Artificial Sequence: Synthetic oligonucleotide
  Antisense strand to SEQ ID NO: 1601971
uuccuuccagauuacgaac

SEQ ID NO: 1601973 - RNA, 19 nt, Artificial Sequence
  Description of Artificial Sequence: Synthetic oligonucleotide
  Sense strand starting at position 840 of SEQ ID NO: 1560467
cccaguugccuuuaggaaa

SEQ ID NO: 1601974 - RNA, 19 nt, Artificial Sequence
  Description of Artificial Sequence: Synthetic oligonucleotide
  Antisense strand to SEQ ID NO: 1601973
uuuccuaaaggcaacuggg

SEQ ID NO: 1601975 - RNA, 19 nt, Artificial Sequence
  Description of Artificial Sequence: Synthetic oligonucleotide
  Sense strand starting at position 1088 of SEQ ID NO: 1560467
ucggcuguucccguaaauc

SEQ ID NO: 1601976 - RNA, 19 nt, Artificial Sequence
  Description of Artificial Sequence: Synthetic oligonucleotide
  Antisense strand to SEQ ID NO: 1601975
gauuuacgggaacagccga

SEQ ID NO: 1601977 - RNA, 19 nt, Artificial Sequence
  Description of Artificial Sequence: Synthetic oligonucleotide
  Sense strand starting at position 1143 of SEQ ID NO: 1560467
acggauccgucauuaaccu

SEQ ID NO: 1601978 - RNA, 19 nt, Artificial Sequence
  Description of Artificial Sequence: Synthetic oligonucleotide
  Antisense strand to SEQ ID NO: 1601977
agguuaaugacggauccgu

SEQ ID NO: 1601979 - RNA, 19 nt, Artificial Sequence
  Description of Artificial Sequence: Synthetic oligonucleotide
  Sense strand starting at position 1157 of SEQ ID NO: 1560467
aaccuucgcgcucaggaau

SEQ ID NO: 1601980 - RNA, 19 nt, Artificial Sequence
  Description of Artificial Sequence: Synthetic oligonucleotide
  Antisense strand to SEQ ID NO: 1601979
auuccugagcgcgaagguu

SEQ ID NO: 1601981 - RNA, 19 nt, Artificial Sequence
  Description of Artificial Sequence: Synthetic oligonucleotide
  Sense strand starting at position 1187 of SEQ ID NO: 1560467
agagcuucccagugucuaa

SEQ ID NO: 1601982 - RNA, 19 nt, Artificial Sequence
  Description of Artificial Sequence: Synthetic oligonucleotide
  Antisense strand to SEQ ID NO: 1601981
uuagacacugggaagcucu

SEQ ID NO: 1601983 - RNA, 19 nt, Artificial Sequence
  Description of Artificial Sequence: Synthetic oligonucleotide
  Sense strand starting at position 1247 of SEQ ID NO: 1560467
guaagacgcaaucgggaua

SEQ ID NO: 1601984 - RNA, 19 nt, Artificial Sequence
  Description of Artificial Sequence: Synthetic oligonucleotide
  Antisense strand to SEQ ID NO: 1601983
uaucccgauugcgucuuac

SEQ ID NO: 1601985 - RNA, 19 nt, Artificial Sequence
  Description of Artificial Sequence: Synthetic oligonucleotide
  Sense strand starting at position 1250 of SEQ ID NO: 1560467
agacgcaaucgggauacau

SEQ ID NO: 1601986 - RNA, 19 nt, Artificial Sequence
  Description of Artificial Sequence: Synthetic oligonucleotide
  Antisense strand to SEQ ID NO: 1601985
auguaucccgauugcgucu

SEQ ID NO: 1601987 - RNA, 19 nt, Artificial Sequence
  Description of Artificial Sequence: Synthetic oligonucleotide
  Sense strand starting at position 1252 of SEQ ID NO: 1560467
acgcaaucgggauacauga

SEQ ID NO: 1601988 - RNA, 19 nt, Artificial Sequence
  Description of Artificial Sequence: Synthetic oligonucleotide
  Antisense strand to SEQ ID NO: 1601987
ucauguaucccgauugcgu

SEQ ID NO: 1601989 - RNA, 19 nt, Artificial Sequence
  Description of Artificial Sequence: Synthetic oligonucleotide
  Sense strand starting at position 1791 of SEQ ID NO: 1560467
ggcggcaucgaauaauaaa

SEQ ID NO: 1601990 - RNA, 19 nt, Artificial Sequence
  Description of Artificial Sequence: Synthetic oligonucleotide
  Antisense strand to SEQ ID NO: 1601989
uuuauuauucgaugccgcc

SEQ ID NO: 1601991 - RNA, 19 nt, Artificial Sequence
  Description of Artificial Sequence: Synthetic oligonucleotide
  Sense strand starting at position 1998 of SEQ ID NO: 1560467
guuuguggcccggauugaa

SEQ ID NO: 1601992 - RNA, 19 nt, Artificial Sequence
  Description of Artificial Sequence: Synthetic oligonucleotide
  Antisense strand to SEQ ID NO: 1601991
uucaauccgggccacaaac

SEQ ID NO: 1601993 - RNA, 19 nt, Artificial Sequence
  Description of Artificial Sequence: Synthetic oligonucleotide
  Sense strand starting at position 2167 of SEQ ID NO: 1560467
cgugaugaucggagguguu

SEQ ID NO: 1601994 - RNA, 19 nt, Artificial Sequence
  Description of Artificial Sequence: Synthetic oligonucleotide
  Antisense strand to SEQ ID NO: 1601993
aacaccuccgaucaucacg

SEQ ID NO: 1601995 - RNA, 19 nt, Artificial Sequence
  Description of Artificial Sequence: Synthetic oligonucleotide
  Sense strand starting at position 2196 of SEQ ID NO: 1560467
guuucuaugucagucugaa

SEQ ID NO: 1601996 - RNA, 19 nt, Artificial Sequence
  Description of Artificial Sequence: Synthetic oligonucleotide
  Antisense strand to SEQ ID NO: 1601995
uucagacugacauagaaac

SEQ ID NO: 1601997 - RNA, 19 nt, Artificial Sequence
  Description of Artificial Sequence: Synthetic oligonucleotide
  Sense strand starting at position 2242 of SEQ ID NO: 1560467
cucuacaugucucuugagu

SEQ ID NO: 1601998 - RNA, 19 nt, Artificial Sequence
  Description of Artificial Sequence: Synthetic oligonucleotide
  Antisense strand to SEQ ID NO: 1601997
acucaagagacauguagag

SEQ ID NO: 1601999 - RNA, 19 nt, Artificial Sequence
  Description of Artificial Sequence: Synthetic oligonucleotide
  Sense strand starting at position 2259 of SEQ ID NO: 1560467
guauuugugucacuugacu

SEQ ID NO: 1602000 - RNA, 19 nt, Artificial Sequence
  Description of Artificial Sequence: Synthetic oligonucleotide
  Antisense strand to SEQ ID NO: 1601999
agucaagugacacaaauac

SEQ ID NO: 1602001 - RNA, 19 nt, Artificial Sequence
  Description of Artificial Sequence: Synthetic oligonucleotide
  Sense strand starting at position 2293 of SEQ ID NO: 1560467
uuccuauucguggcgggua

SEQ ID NO: 1602002 - RNA, 19 nt, Artificial Sequence
  Description of Artificial Sequence: Synthetic oligonucleotide
  Antisense strand to SEQ ID NO: 1602001
uacccgccacgaauaggaa

SEQ ID NO: 1602003 - RNA, 19 nt, Artificial Sequence
  Description of Artificial Sequence: Synthetic oligonucleotide
  Sense strand starting at position 2317 of SEQ ID NO: 1560467
cugagcauguuuguaaaua

SEQ ID NO: 1602004 - RNA, 19 nt, Artificial Sequence
  Description of Artificial Sequence: Synthetic oligonucleotide
  Antisense strand to SEQ ID NO: 1602003
uauuuacaaacaugcucag

SEQ ID NO: 1602005 - RNA, 19 nt, Artificial Sequence
  Description of Artificial Sequence: Synthetic oligonucleotide
  Sense strand starting at position 2485 of SEQ ID NO: 1560467
gucugugauccuggaucug

SEQ ID NO: 1602006 - RNA, 19 nt, Artificial Sequence
  Description of Artificial Sequence: Synthetic oligonucleotide
  Antisense strand to SEQ ID NO: 1602005
cagauccaggaucacagac

SEQ ID NO: 1602007 - RNA, 19 nt, Artificial Sequence
  Description of Artificial Sequence: Synthetic oligonucleotide
  Sense strand starting at position 2650 of SEQ ID NO: 1560467
acugaauugccagggaaug

SEQ ID NO: 1602008 - RNA, 19 nt, Artificial Sequence
  Description of Artificial Sequence: Synthetic oligonucleotide
  Antisense strand to SEQ ID NO: 1602007
cauucccuggcaauucagu

SEQ ID NO: 1602009 - RNA, 19 nt, Artificial Sequence
  Description of Artificial Sequence: Synthetic oligonucleotide
  Sense strand starting at position 2700 of SEQ ID NO: 1560467
gagacagaagcucguugau

SEQ ID NO: 1602010 - RNA, 19 nt, Artificial Sequence
  Description of Artificial Sequence: Synthetic oligonucleotide
  Antisense strand to SEQ ID NO: 1602009
aucaacgagcuucugucuc

SEQ ID NO: 1602011 - RNA, 19 nt, Artificial Sequence
  Description of Artificial Sequence: Synthetic oligonucleotide
  Sense strand starting at position 2702 of SEQ ID NO: 1560467
gacagaagcucguugauau

SEQ ID NO: 1602012 - RNA, 19 nt, Artificial Sequence
  Description of Artificial Sequence: Synthetic oligonucleotide
  Antisense strand to SEQ ID NO: 1602011
auaucaacgagcuucuguc

SEQ ID NO: 1602013 - RNA, 19 nt, Artificial Sequence
  Description of Artificial Sequence: Synthetic oligonucleotide
  Sense strand starting at position 2703 of SEQ ID NO: 1560467
acagaagcucguugauaua

SEQ ID NO: 1602014 - RNA, 19 nt, Artificial Sequence
  Description of Artificial Sequence: Synthetic oligonucleotide
  Antisense strand to SEQ ID NO: 1602013
uauaucaacgagcuucugu

SEQ ID NO: 1602015 - RNA, 19 nt, Artificial Sequence
  Description of Artificial Sequence: Synthetic oligonucleotide
  Sense strand starting at position 69 of SEQ ID NO: 1560468
gcccgaacuucugggaagu

SEQ ID NO: 1602016 - RNA, 19 nt, Artificial Sequence
  Description of Artificial Sequence: Synthetic oligonucleotide
  Antisense strand to SEQ ID NO: 1602015
acuucccagaaguucgggc

SEQ ID NO: 1602017 - RNA, 19 nt, Artificial Sequence
  Description of Artificial Sequence: Synthetic oligonucleotide
  Sense strand starting at position 70 of SEQ ID NO: 1560468
cccgaacuucugggaaguu

SEQ ID NO: 1602018 - RNA, 19 nt, Artificial Sequence
  Description of Artificial Sequence: Synthetic oligonucleotide
  Antisense strand to SEQ ID NO: 1602017
aacuucccagaaguucggg

SEQ ID NO: 1602019 - RNA, 19 nt, Artificial Sequence
  Description of Artificial Sequence: Synthetic oligonucleotide
  Sense strand starting at position 71 of SEQ ID NO: 1560468
ccgaacuucugggaaguuu

SEQ ID NO: 1602020 - RNA, 19 nt, Artificial Sequence
  Description of Artificial Sequence: Synthetic oligonucleotide
  Antisense strand to SEQ ID NO: 1602019
aaacuucccagaaguucgg

SEQ ID NO: 1602021 - RNA, 19 nt, Artificial Sequence
  Description of Artificial Sequence: Synthetic oligonucleotide
  Sense strand starting at position 99 of SEQ ID NO: 1560468
ucauguugggagugacagu

SEQ ID NO: 1602022 - RNA, 19 nt, Artificial Sequence
  Description of Artificial Sequence: Synthetic oligonucleotide
  Antisense strand to SEQ ID NO: 1602021
acugucacucccaacauga

SEQ ID NO: 1602023 - RNA, 19 nt, Artificial Sequence
  Description of Artificial Sequence: Synthetic oligonucleotide
  Sense strand starting at position 108 of SEQ ID NO: 1560468
gagugacagugcuguugau

SEQ ID NO: 1602024 - RNA, 19 nt, Artificial Sequence
  Description of Artificial Sequence: Synthetic oligonucleotide
  Antisense strand to SEQ ID NO: 1602023
aucaacagcacugucacuc

SEQ ID NO: 1602025 - RNA, 19 nt, Artificial Sequence
  Description of Artificial Sequence: Synthetic oligonucleotide
  Sense strand starting at position 163 of SEQ ID NO: 1560468
ugggacagauacuaacaaa

SEQ ID NO: 1602026 - RNA, 19 nt, Artificial Sequence
  Description of Artificial Sequence: Synthetic oligonucleotide
  Antisense strand to SEQ ID NO: 1602025
uuuguuaguaucuguccca

SEQ ID NO: 1602027 - RNA, 19 nt, Artificial Sequence
  Description of Artificial Sequence: Synthetic oligonucleotide
  Sense strand starting at position 207 of SEQ ID NO: 1560468
guauuagggucuugaaggu

SEQ ID NO: 1602028 - RNA, 19 nt, Artificial Sequence
  Description of Artificial Sequence: Synthetic oligonucleotide
  Antisense strand to SEQ ID NO: 1602027
accuucaagacccuaauac

SEQ ID NO: 1602029 - RNA, 19 nt, Artificial Sequence
  Description of Artificial Sequence: Synthetic oligonucleotide
  Sense strand starting at position 216 of SEQ ID NO: 1560468
ucuugaaggucuuuacucu

SEQ ID NO: 1602030 - RNA, 19 nt, Artificial Sequence
  Description of Artificial Sequence: Synthetic oligonucleotide
  Antisense strand to SEQ ID NO: 1602029
agaguaaagaccuucaaga

SEQ ID NO: 1602031 - RNA, 19 nt, Artificial Sequence
  Description of Artificial Sequence: Synthetic oligonucleotide
  Sense strand starting at position 220 of SEQ ID NO: 1560468
gaaggucuuuacucugaac

SEQ ID NO: 1602032 - RNA, 19 nt, Artificial Sequence
  Description of Artificial Sequence: Synthetic oligonucleotide
  Antisense strand to SEQ ID NO: 1602031
guucagaguaaagaccuuc

SEQ ID NO: 1602033 - RNA, 19 nt, Artificial Sequence
  Description of Artificial Sequence: Synthetic oligonucleotide
  Sense strand starting at position 413 of SEQ ID NO: 1560468
cggguggcaucguagaaau

SEQ ID NO: 1602034 - RNA, 19 nt, Artificial Sequence
  Description of Artificial Sequence: Synthetic oligonucleotide
  Antisense strand to SEQ ID NO: 1602033
auuucuacgaugccacccg

SEQ ID NO: 1602035 - RNA, 19 nt, Artificial Sequence
  Description of Artificial Sequence: Synthetic oligonucleotide
  Sense strand starting at position 415 of SEQ ID NO: 1560468
gguggcaucguagaaauag

SEQ ID NO: 1602036 - RNA, 19 nt, Artificial Sequence
  Description of Artificial Sequence: Synthetic oligonucleotide
  Antisense strand to SEQ ID NO: 1602035
cuauuucuacgaugccacc

SEQ ID NO: 1602037 - RNA, 19 nt, Artificial Sequence
  Description of Artificial Sequence: Synthetic oligonucleotide
  Sense strand starting at position 506 of SEQ ID NO: 1560468
gcccgugugcugaagauug

SEQ ID NO: 1602038 - RNA, 19 nt, Artificial Sequence
  Description of Artificial Sequence: Synthetic oligonucleotide
  Antisense strand to SEQ ID NO: 1602037
caaucuucagcacacgggc

SEQ ID NO: 1602039 - RNA, 19 nt, Artificial Sequence
  Description of Artificial Sequence: Synthetic oligonucleotide
  Sense strand starting at position 780 of SEQ ID NO: 1560468
aggugugcccgucauggaa

SEQ ID NO: 1602040 - RNA, 19 nt, Artificial Sequence
  Description of Artificial Sequence: Synthetic oligonucleotide
  Antisense strand to SEQ ID NO: 1602039
uuccaugacgggcacaccu

SEQ ID NO: 1602041 - RNA, 19 nt, Artificial Sequence
  Description of Artificial Sequence: Synthetic oligonucleotide
  Sense strand starting at position 1142 of SEQ ID NO: 1560468
auagauaacucagagcaag

SEQ ID NO: 1602042 - RNA, 19 nt, Artificial Sequence
  Description of Artificial Sequence: Synthetic oligonucleotide
  Antisense strand to SEQ ID NO: 1602041
cuugcucugaguuaucuau

SEQ ID NO: 1602043 - RNA, 19 nt, Artificial Sequence
  Description of Artificial Sequence: Synthetic oligonucleotide
  Sense strand starting at position 1242 of SEQ ID NO: 1560468
cgcugacauccagauguaa

SEQ ID NO: 1602044 - RNA, 19 nt, Artificial Sequence
  Description of Artificial Sequence: Synthetic oligonucleotide
  Antisense strand to SEQ ID NO: 1602043
uuacaucuggaugucagcg

SEQ ID NO: 1602045 - RNA, 19 nt, Artificial Sequence
  Description of Artificial Sequence: Synthetic oligonucleotide
  Sense strand starting at position 1325 of SEQ ID NO: 1560468
ggccaaaucucugcugagu

SEQ ID NO: 1602046 - RNA, 19 nt, Artificial Sequence
  Description of Artificial Sequence: Synthetic oligonucleotide
  Antisense strand to SEQ ID NO: 1602045
acucagcagagauuuggcc

SEQ ID NO: 1602047 - RNA, 19 nt, Artificial Sequence
  Description of Artificial Sequence: Synthetic oligonucleotide
  Sense strand starting at position 1327 of SEQ ID NO: 1560468
ccaaaucucugcugaguuc

SEQ ID NO: 1602048 - RNA, 19 nt, Artificial Sequence
  Description of Artificial Sequence: Synthetic oligonucleotide
  Antisense strand to SEQ ID NO: 1602047
gaacucagcagagauuugg

SEQ ID NO: 1602049 - RNA, 19 nt, Artificial Sequence
  Description of Artificial Sequence: Synthetic oligonucleotide
  Sense strand starting at position 1338 of SEQ ID NO: 1560468
cugaguucuuuccaccaca

SEQ ID NO: 1602050 - RNA, 19 nt, Artificial Sequence
  Description of Artificial Sequence: Synthetic oligonucleotide
  Antisense strand to SEQ ID NO: 1602049
ugugguggaaagaacucag

SEQ ID NO: 1602051 - RNA, 19 nt, Artificial Sequence
  Description of Artificial Sequence: Synthetic oligonucleotide
  Sense strand starting at position 1403 of SEQ ID NO: 1560468
cguugagagguguguagua

SEQ ID NO: 1602052 - RNA, 19 nt, Artificial Sequence
  Description of Artificial Sequence: Synthetic oligonucleotide
  Antisense strand to SEQ ID NO: 1602051
uacuacacaccucucaacg

SEQ ID NO: 1602053 - RNA, 19 nt, Artificial Sequence
  Description of Artificial Sequence: Synthetic oligonucleotide
  Sense strand starting at position 2294 of SEQ ID NO: 1560468
cuucgugacuccuccucua

SEQ ID NO: 1602054 - RNA, 19 nt, Artificial Sequence
  Description of Artificial Sequence: Synthetic oligonucleotide
  Antisense strand to SEQ ID NO: 1602053
uagaggaggagucacgaag

SEQ ID NO: 1602055 - RNA, 19 nt, Artificial Sequence
  Description of Artificial Sequence: Synthetic oligonucleotide
  Sense strand starting at position 2297 of SEQ ID NO: 1560468
cgugacuccuccucuaacu

SEQ ID NO: 1602056 - RNA, 19 nt, Artificial Sequence
  Description of Artificial Sequence: Synthetic oligonucleotide
  Antisense strand to SEQ ID NO: 1602055
aguuagaggaggagucacg

SEQ ID NO: 1602057 - RNA, 19 nt, Artificial Sequence
  Description of Artificial Sequence: Synthetic oligonucleotide
  Sense strand starting at position 3137 of SEQ ID NO: 1560468
agggacaucugggaugaga

SEQ ID NO: 1602058 - RNA, 19 nt, Artificial Sequence
  Description of Artificial Sequence: Synthetic oligonucleotide
  Antisense strand to SEQ ID NO: 1602057
ucucaucccagaugucccu

SEQ ID NO: 1602059 - RNA, 19 nt, Artificial Sequence
  Description of Artificial Sequence: Synthetic oligonucleotide
  Sense strand starting at position 3251 of SEQ ID NO: 1560468
gucaccuucucaggagaca

SEQ ID NO: 1602060 - RNA, 19 nt, Artificial Sequence
  Description of Artificial Sequence: Synthetic oligonucleotide
  Antisense strand to SEQ ID NO: 1602059
ugucuccugagaaggugac

SEQ ID NO: 1602061 - RNA, 19 nt, Artificial Sequence
  Description of Artificial Sequence: Synthetic oligonucleotide
  Sense strand starting at position 3282 of SEQ ID NO: 1560468
cccacuaccugaggucaua

SEQ ID NO: 1602062 - RNA, 19 nt, Artificial Sequence
  Description of Artificial Sequence: Synthetic oligonucleotide
  Antisense strand to SEQ ID NO: 1602061
uaugaccucagguaguggg

SEQ ID NO: 1602063 - RNA, 19 nt, Artificial Sequence
  Description of Artificial Sequence: Synthetic oligonucleotide
  Sense strand starting at position 3398 of SEQ ID NO: 1560468
guaagugcucaaugggugu

SEQ ID NO: 1602064 - RNA, 19 nt, Artificial Sequence
  Description of Artificial Sequence: Synthetic oligonucleotide
  Antisense strand to SEQ ID NO: 1602063
acacccauugagcacuuac

SEQ ID NO: 1602065 - RNA, 19 nt, Artificial Sequence
  Description of Artificial Sequence: Synthetic oligonucleotide
  Sense strand starting at position 3557 of SEQ ID NO: 1560468
gcccacaaugguuggauua

SEQ ID NO: 1602066 - RNA, 19 nt, Artificial Sequence
  Description of Artificial Sequence: Synthetic oligonucleotide
  Antisense strand to SEQ ID NO: 1602065
uaauccaaccauugugggc

SEQ ID NO: 1602067 - RNA, 19 nt, Artificial Sequence
  Description of Artificial Sequence: Synthetic oligonucleotide
  Sense strand starting at position 3558 of SEQ ID NO: 1560468
cccacaaugguuggauuaa

SEQ ID NO: 1602068 - RNA, 19 nt, Artificial Sequence
  Description of Artificial Sequence: Synthetic oligonucleotide
  Antisense strand to SEQ ID NO: 1602067
uuaauccaaccauuguggg

SEQ ID NO: 1602069 - RNA, 19 nt, Artificial Sequence
  Description of Artificial Sequence: Synthetic oligonucleotide
  Sense strand starting at position 3559 of SEQ ID NO: 1560468
ccacaaugguuggauuaag

SEQ ID NO: 1602070 - RNA, 19 nt, Artificial Sequence
  Description of Artificial Sequence: Synthetic oligonucleotide
  Antisense strand to SEQ ID NO: 1602069
cuuaauccaaccauugugg

SEQ ID NO: 1602071 - RNA, 19 nt, Artificial Sequence
  Description of Artificial Sequence: Synthetic oligonucleotide
  Sense strand starting at position 3568 of SEQ ID NO: 1560468
uuggauuaagguuaucuuu

SEQ ID NO: 1602072 - RNA, 19 nt, Artificial Sequence
  Description of Artificial Sequence: Synthetic oligonucleotide
  Antisense strand to SEQ ID NO: 1602071
aaagauaaccuuaauccaa

SEQ ID NO: 1602073 - RNA, 19 nt, Artificial Sequence
  Description of Artificial Sequence: Synthetic oligonucleotide
  Sense strand starting at position 3574 of SEQ ID NO: 1560468
uaagguuaucuuugcuguu

SEQ ID NO: 1602074 - RNA, 19 nt, Artificial Sequence
  Description of Artificial Sequence: Synthetic oligonucleotide
  Antisense strand to SEQ ID NO: 1602073
aacagcaaagauaaccuua

SEQ ID NO: 1602075 - RNA, 19 nt, Artificial Sequence
  Description of Artificial Sequence: Synthetic oligonucleotide
  Sense strand starting at position 3580 of SEQ ID NO: 1560468
uaucuuugcuguuguuuga

SEQ ID NO: 1602076 - RNA, 19 nt, Artificial Sequence
  Description of Artificial Sequence: Synthetic oligonucleotide
  Antisense strand to SEQ ID NO: 1602075
ucaaacaacagcaaagaua

SEQ ID NO: 1602077 - RNA, 19 nt, Artificial Sequence
  Description of Artificial Sequence: Synthetic oligonucleotide
  Sense strand starting at position 3621 of SEQ ID NO: 1560468
aggaaaugucuccaacgca

SEQ ID NO: 1602078 - RNA, 19 nt, Artificial Sequence
  Description of Artificial Sequence: Synthetic oligonucleotide
  Antisense strand to SEQ ID NO: 1602077
ugcguuggagacauuuccu

SEQ ID NO: 1602079 - RNA, 19 nt, Artificial Sequence
  Description of Artificial Sequence: Synthetic oligonucleotide
  Sense strand starting at position 3721 of SEQ ID NO: 1560468
agagcauccuuccggaguu

SEQ ID NO: 1602080 - RNA, 19 nt, Artificial Sequence
  Description of Artificial Sequence: Synthetic oligonucleotide
  Antisense strand to SEQ ID NO: 1602079
aacuccggaaggaugcucu

SEQ ID NO: 1602081 - RNA, 19 nt, Artificial Sequence
  Description of Artificial Sequence: Synthetic oligonucleotide
  Sense strand starting at position 3844 of SEQ ID NO: 1560468
guugguucguuuguggaca

SEQ ID NO: 1602082 - RNA, 19 nt, Artificial Sequence
  Description of Artificial Sequence: Synthetic oligonucleotide
  Antisense strand to SEQ ID NO: 1602081
uguccacaaacgaaccaac

SEQ ID NO: 1602083 - RNA, 19 nt, Artificial Sequence
  Description of Artificial Sequence: Synthetic oligonucleotide
  Sense strand starting at position 3846 of SEQ ID NO: 1560468
ugguucguuuguggacaga

SEQ ID NO: 1602084 - RNA, 19 nt, Artificial Sequence
  Description of Artificial Sequence: Synthetic oligonucleotide
  Antisense strand to SEQ ID NO: 1602083
ucuguccacaaacgaacca

SEQ ID NO: 1602085 - RNA, 19 nt, Artificial Sequence
  Description of Artificial Sequence: Synthetic oligonucleotide
  Sense strand starting at position 3899 of SEQ ID NO: 1560468
gcccuaaagcucugaucuu

SEQ ID NO: 1602086 - RNA, 19 nt, Artificial Sequence
  Description of Artificial Sequence: Synthetic oligonucleotide
  Antisense strand to SEQ ID NO: 1602085
aagaucagagcuuuagggc

SEQ ID NO: 1602087 - RNA, 19 nt, Artificial Sequence
  Description of Artificial Sequence: Synthetic oligonucleotide
  Sense strand starting at position 117 of SEQ ID NO: 1560469
gcccgaacuucugggaagu

SEQ ID NO: 1602088 - RNA, 19 nt, Artificial Sequence
  Description of Artificial Sequence: Synthetic oligonucleotide
  Antisense strand to SEQ ID NO: 1602087
acuucccagaaguucgggc

SEQ ID NO: 1602089 - RNA, 19 nt, Artificial Sequence
  Description of Artificial Sequence: Synthetic oligonucleotide
  Sense strand starting at position 118 of SEQ ID NO: 1560469
cccgaacuucugggaaguu

SEQ ID NO: 1602090 - RNA, 19 nt, Artificial Sequence
  Description of Artificial Sequence: Synthetic oligonucleotide
  Antisense strand to SEQ ID NO: 1602089
aacuucccagaaguucggg

SEQ ID NO: 1602091 - RNA, 19 nt, Artificial Sequence
  Description of Artificial Sequence: Synthetic oligonucleotide
  Sense strand starting at position 119 of SEQ ID NO: 1560469
ccgaacuucugggaaguuu

SEQ ID NO: 1602092 - RNA, 19 nt, Artificial Sequence
  Description of Artificial Sequence: Synthetic oligonucleotide
  Antisense strand to SEQ ID NO: 1602091
aaacuucccagaaguucgg

SEQ ID NO: 1602093 - RNA, 19 nt, Artificial Sequence
  Description of Artificial Sequence: Synthetic oligonucleotide
  Sense strand starting at position 147 of SEQ ID NO: 1560469
ucauguugggagugacagu

SEQ ID NO: 1602094 - RNA, 19 nt, Artificial Sequence
  Description of Artificial Sequence: Synthetic oligonucleotide
  Antisense strand to SEQ ID NO: 1602093
acugucacucccaacauga

SEQ ID NO: 1602095 - RNA, 19 nt, Artificial Sequence
  Description of Artificial Sequence: Synthetic oligonucleotide
  Sense strand starting at position 156 of SEQ ID NO: 1560469
gagugacagugcuguugau

SEQ ID NO: 1602096 - RNA, 19 nt, Artificial Sequence
  Description of Artificial Sequence: Synthetic oligonucleotide
  Antisense strand to SEQ ID NO: 1602095
aucaacagcacugucacuc

SEQ ID NO: 1602097 - RNA, 19 nt, Artificial Sequence
  Description of Artificial Sequence: Synthetic oligonucleotide
  Sense strand starting at position 211 of SEQ ID NO: 1560469
ugggacagauacuaacaaa

SEQ ID NO: 1602098 - RNA, 19 nt, Artificial Sequence
  Description of Artificial Sequence: Synthetic oligonucleotide
  Antisense strand to SEQ ID NO: 1602097
uuuguuaguaucuguccca

SEQ ID NO: 1602099 - RNA, 19 nt, Artificial Sequence
  Description of Artificial Sequence: Synthetic oligonucleotide
  Sense strand starting at position 255 of SEQ ID NO: 1560469
guauuagggucuugaaggu

SEQ ID NO: 1602100 - RNA, 19 nt, Artificial Sequence
  Description of Artificial Sequence: Synthetic oligonucleotide
  Antisense strand to SEQ ID NO: 1602099
accuucaagacccuaauac

SEQ ID NO: 1602101 - RNA, 19 nt, Artificial Sequence
  Description of Artificial Sequence: Synthetic oligonucleotide
  Sense strand starting at position 264 of SEQ ID NO: 1560469
ucuugaaggucuuuacucu

SEQ ID NO: 1602102 - RNA, 19 nt, Artificial Sequence
  Description of Artificial Sequence: Synthetic oligonucleotide
  Antisense strand to SEQ ID NO: 1602101
agaguaaagaccuucaaga

SEQ ID NO: 1602103 - RNA, 19 nt, Artificial Sequence
  Description of Artificial Sequence: Synthetic oligonucleotide
  Sense strand starting at position 268 of SEQ ID NO: 1560469
gaaggucuuuacucugaac

SEQ ID NO: 1602104 - RNA, 19 nt, Artificial Sequence
  Description of Artificial Sequence: Synthetic oligonucleotide
  Antisense strand to SEQ ID NO: 1602103
guucagaguaaagaccuuc

SEQ ID NO: 1602105 - RNA, 19 nt, Artificial Sequence
  Description of Artificial Sequence: Synthetic oligonucleotide
  Sense strand starting at position 461 of SEQ ID NO: 1560469
cggguggcaucguagaaau

SEQ ID NO: 1602106 - RNA, 19 nt, Artificial Sequence
  Description of Artificial Sequence: Synthetic oligonucleotide
  Antisense strand to SEQ ID NO: 1602105
auuucuacgaugccacccg

SEQ ID NO: 1602107 - RNA, 19 nt, Artificial Sequence
  Description of Artificial Sequence: Synthetic oligonucleotide
  Sense strand starting at position 463 of SEQ ID NO: 1560469
gguggcaucguagaaauag

SEQ ID NO: 1602108 - RNA, 19 nt, Artificial Sequence
  Description of Artificial Sequence: Synthetic oligonucleotide
  Antisense strand to SEQ ID NO: 1602107
cuauuucuacgaugccacc

SEQ ID NO: 1602109 - RNA, 19 nt, Artificial Sequence
  Description of Artificial Sequence: Synthetic oligonucleotide
  Sense strand starting at position 554 of SEQ ID NO: 1560469
gcccgugugcugaagauug

SEQ ID NO: 1602110 - RNA, 19 nt, Artificial Sequence
  Description of Artificial Sequence: Synthetic oligonucleotide
  Antisense strand to SEQ ID NO: 1602109
caaucuucagcacacgggc

SEQ ID NO: 1602111 - RNA, 19 nt, Artificial Sequence
  Description of Artificial Sequence: Synthetic oligonucleotide
  Sense strand starting at position 828 of SEQ ID NO: 1560469
aggugugcccgucauggaa

SEQ ID NO: 1602112 - RNA, 19 nt, Artificial Sequence
  Description of Artificial Sequence: Synthetic oligonucleotide
  Antisense strand to SEQ ID NO: 1602111
uuccaugacgggcacaccu

SEQ ID NO: 1602113 - RNA, 19 nt, Artificial Sequence
  Description of Artificial Sequence: Synthetic oligonucleotide
  Sense strand starting at position 1190 of SEQ ID NO: 1560469
auagauaacucagagcaag

SEQ ID NO: 1602114 - RNA, 19 nt, Artificial Sequence
  Description of Artificial Sequence: Synthetic oligonucleotide
  Antisense strand to SEQ ID NO: 1602113
cuugcucugaguuaucuau

SEQ ID NO: 1602115 - RNA, 19 nt, Artificial Sequence
  Description of Artificial Sequence: Synthetic oligonucleotide
  Sense strand starting at position 1290 of SEQ ID NO: 1560469
cgcugacauccagauguaa

SEQ ID NO: 1602116 - RNA, 19 nt, Artificial Sequence
  Description of Artificial Sequence: Synthetic oligonucleotide
  Antisense strand to SEQ ID NO: 1602115
uuacaucuggaugucagcg

SEQ ID NO: 1602117 - RNA, 19 nt, Artificial Sequence
  Description of Artificial Sequence: Synthetic oligonucleotide
  Sense strand starting at position 1373 of SEQ ID NO: 1560469
ggccaaaucucugcugagu

SEQ ID NO: 1602118 - RNA, 19 nt, Artificial Sequence
  Description of Artificial Sequence: Synthetic oligonucleotide
  Antisense strand to SEQ ID NO: 1602117
acucagcagagauuuggcc

SEQ ID NO: 1602119 - RNA, 19 nt, Artificial Sequence
  Description of Artificial Sequence: Synthetic oligonucleotide
  Sense strand starting at position 1375 of SEQ ID NO: 1560469
ccaaaucucugcugaguuc

SEQ ID NO: 1602120 - RNA, 19 nt, Artificial Sequence
  Description of Artificial Sequence: Synthetic oligonucleotide
  Antisense strand to SEQ ID NO: 1602119
gaacucagcagagauuugg

SEQ ID NO: 1602121 - RNA, 19 nt, Artificial Sequence
  Description of Artificial Sequence: Synthetic oligonucleotide
  Sense strand starting at position 1386 of SEQ ID NO: 1560469
cugaguucuuuccaccaca

SEQ ID NO: 1602122 - RNA, 19 nt, Artificial Sequence
  Description of Artificial Sequence: Synthetic oligonucleotide
  Antisense strand to SEQ ID NO: 1602121
ugugguggaaagaacucag

SEQ ID NO: 1602123 - RNA, 19 nt, Artificial Sequence
  Description of Artificial Sequence: Synthetic oligonucleotide
  Sense strand starting at position 1451 of SEQ ID NO: 1560469
cguugagagguguguagua

SEQ ID NO: 1602124 - RNA, 19 nt, Artificial Sequence
  Description of Artificial Sequence: Synthetic oligonucleotide
  Antisense strand to SEQ ID NO: 1602123
uacuacacaccucucaacg

SEQ ID NO: 1602125 - RNA, 19 nt, Artificial Sequence
  Description of Artificial Sequence: Synthetic oligonucleotide
  Sense strand starting at position 2342 of SEQ ID NO: 1560469
cuucgugacuccuccucua

SEQ ID NO: 1602126 - RNA, 19 nt, Artificial Sequence
  Description of Artificial Sequence: Synthetic oligonucleotide
  Antisense strand to SEQ ID NO: 1602125
uagaggaggagucacgaag

SEQ ID NO: 1602127 - RNA, 19 nt, Artificial Sequence
  Description of Artificial Sequence: Synthetic oligonucleotide
  Sense strand starting at position 2345 of SEQ ID NO: 1560469
cgugacuccuccucuaacu

SEQ ID NO: 1602128 - RNA, 19 nt, Artificial Sequence
  Description of Artificial Sequence: Synthetic oligonucleotide
  Antisense strand to SEQ ID NO: 1602127
aguuagaggaggagucacg

SEQ ID NO: 1602129 - RNA, 19 nt, Artificial Sequence
  Description of Artificial Sequence: Synthetic oligonucleotide
  Sense strand starting at position 3185 of SEQ ID NO: 1560469
agggacaucugggaugaga

SEQ ID NO: 1602130 - RNA, 19 nt, Artificial Sequence
  Description of Artificial Sequence: Synthetic oligonucleotide
  Antisense strand to SEQ ID NO: 1602129
ucucaucccagaugucccu

SEQ ID NO: 1602131 - RNA, 19 nt, Artificial Sequence
  Description of Artificial Sequence: Synthetic oligonucleotide
  Sense strand starting at position 3299 of SEQ ID NO: 1560469
gucaccuucucaggagaca

SEQ ID NO: 1602132 - RNA, 19 nt, Artificial Sequence
  Description of Artificial Sequence: Synthetic oligonucleotide
  Antisense strand to SEQ ID NO: 1602131
ugucuccugagaaggugac

SEQ ID NO: 1602133 - RNA, 19 nt, Artificial Sequence
  Description of Artificial Sequence: Synthetic oligonucleotide
  Sense strand starting at position 3330 of SEQ ID NO: 1560469
cccacuaccugaggucaua

SEQ ID NO: 1602134 - RNA, 19 nt, Artificial Sequence
  Description of Artificial Sequence: Synthetic oligonucleotide
  Antisense strand to SEQ ID NO: 1602133
uaugaccucagguaguggg

SEQ ID NO: 1602135 - RNA, 19 nt, Artificial Sequence
  Description of Artificial Sequence: Synthetic oligonucleotide
  Sense strand starting at position 3446 of SEQ ID NO: 1560469
guaagugcucaaugggugu

SEQ ID NO: 1602136 - RNA, 19 nt, Artificial Sequence
  Description of Artificial Sequence: Synthetic oligonucleotide
  Antisense strand to SEQ ID NO: 1602135
acacccauugagcacuuac

SEQ ID NO: 1602137 - RNA, 19 nt, Artificial Sequence
  Description of Artificial Sequence: Synthetic oligonucleotide
  Sense strand starting at position 3605 of SEQ ID NO: 1560469
gcccacaaugguuggauua

SEQ ID NO: 1602138 - RNA, 19 nt, Artificial Sequence
  Description of Artificial Sequence: Synthetic oligonucleotide
  Antisense strand to SEQ ID NO: 1602137
uaauccaaccauugugggc

SEQ ID NO: 1602139 - RNA, 19 nt, Artificial Sequence
  Description of Artificial Sequence: Synthetic oligonucleotide
  Sense strand starting at position 3606 of SEQ ID NO: 1560469
cccacaaugguuggauuaa

SEQ ID NO: 1602140 - RNA, 19 nt, Artificial Sequence
  Description of Artificial Sequence: Synthetic oligonucleotide
  Antisense strand to SEQ ID NO: 1602139
uuaauccaaccauuguggg

SEQ ID NO: 1602141 - RNA, 19 nt, Artificial Sequence
  Description of Artificial Sequence: Synthetic oligonucleotide
  Sense strand starting at position 3607 of SEQ ID NO: 1560469
ccacaaugguuggauuaag

SEQ ID NO: 1602142 - RNA, 19 nt, Artificial Sequence
  Description of Artificial Sequence: Synthetic oligonucleotide
  Antisense strand to SEQ ID NO: 1602141
cuuaauccaaccauugugg

SEQ ID NO: 1602143 - RNA, 19 nt, Artificial Sequence
  Description of Artificial Sequence: Synthetic oligonucleotide
  Sense strand starting at position 3616 of SEQ ID NO: 1560469
uuggauuaagguuaucuuu

SEQ ID NO: 1602144 - RNA, 19 nt, Artificial Sequence
  Description of Artificial Sequence: Synthetic oligonucleotide
  Antisense strand to SEQ ID NO: 1602143
aaagauaaccuuaauccaa

SEQ ID NO: 1602145 - RNA, 19 nt, Artificial Sequence
  Description of Artificial Sequence: Synthetic oligonucleotide
  Sense strand starting at position 3622 of SEQ ID NO: 1560469
uaagguuaucuuugcuguu

SEQ ID NO: 1602146 - RNA, 19 nt, Artificial Sequence
  Description of Artificial Sequence: Synthetic oligonucleotide
  Antisense strand to SEQ ID NO: 1602145
aacagcaaagauaaccuua

SEQ ID NO: 1602147 - RNA, 19 nt, Artificial Sequence
  Description of Artificial Sequence: Synthetic oligonucleotide
  Sense strand starting at position 3628 of SEQ ID NO: 1560469
uaucuuugcuguuguuuga

SEQ ID NO: 1602148 - RNA, 19 nt, Artificial Sequence
  Description of Artificial Sequence: Synthetic oligonucleotide
  Antisense strand to SEQ ID NO: 1602147
ucaaacaacagcaaagaua

SEQ ID NO: 1602149 - RNA, 19 nt, Artificial Sequence
  Description of Artificial Sequence: Synthetic oligonucleotide
  Sense strand starting at position 3669 of SEQ ID NO: 1560469
aggaaaugucuccaacgca

SEQ ID NO: 1602150 - RNA, 19 nt, Artificial Sequence
  Description of Artificial Sequence: Synthetic oligonucleotide
  Antisense strand to SEQ ID NO: 1602149
ugcguuggagacauuuccu

SEQ ID NO: 1602151 - RNA, 19 nt, Artificial Sequence
  Description of Artificial Sequence: Synthetic oligonucleotide
  Sense strand starting at position 3769 of SEQ ID NO: 1560469
agagcauccuuccggaguu

SEQ ID NO: 1602152 - RNA, 19 nt, Artificial Sequence
  Description of Artificial Sequence: Synthetic oligonucleotide
  Antisense strand to SEQ ID NO: 1602151
aacuccggaaggaugcucu

SEQ ID NO: 1602153 - RNA, 19 nt, Artificial Sequence
  Description of Artificial Sequence: Synthetic oligonucleotide
  Sense strand starting at position 3892 of SEQ ID NO: 1560469
guugguucguuuguggaca

SEQ ID NO: 1602154 - RNA, 19 nt, Artificial Sequence
  Description of Artificial Sequence: Synthetic oligonucleotide
  Antisense strand to SEQ ID NO: 1602153
uguccacaaacgaaccaac

SEQ ID NO: 1602155 - RNA, 19 nt, Artificial Sequence
  Description of Artificial Sequence: Synthetic oligonucleotide
  Sense strand starting at position 3894 of SEQ ID NO: 1560469
ugguucguuuguggacaga

SEQ ID NO: 1602156 - RNA, 19 nt, Artificial Sequence
  Description of Artificial Sequence: Synthetic oligonucleotide
  Antisense strand to SEQ ID NO: 1602155
ucuguccacaaacgaacca

SEQ ID NO: 1602157 - RNA, 19 nt, Artificial Sequence
  Description of Artificial Sequence: Synthetic oligonucleotide
  Sense strand starting at position 3947 of SEQ ID NO: 1560469
gcccuaaagcucugaucuu

SEQ ID NO: 1602158 - RNA, 19 nt, Artificial Sequence
  Description of Artificial Sequence: Synthetic oligonucleotide
  Antisense strand to SEQ ID NO: 1602157
aagaucagagcuuuagggc

SEQ ID NO: 1602159 - RNA, 19 nt, Artificial Sequence
  Description of Artificial Sequence: Synthetic oligonucleotide
  Sense strand starting at position 244 of SEQ ID NO: 1560470
agagcaagaucuuguuaaa

SEQ ID NO: 1602160 - RNA, 19 nt, Artificial Sequence
  Description of Artificial Sequence: Synthetic oligonucleotide
  Antisense strand to SEQ ID NO: 1602159
uuuaacaagaucuugcucu

SEQ ID NO: 1602161 - RNA, 19 nt, Artificial Sequence
  Description of Artificial Sequence: Synthetic oligonucleotide
  Sense strand starting at position 341 of SEQ ID NO: 1560470
aagaaagccugguguggua

SEQ ID NO: 1602162 - RNA, 19 nt, Artificial Sequence
  Description of Artificial Sequence: Synthetic oligonucleotide
  Antisense strand to SEQ ID NO: 1602161
uaccacaccaggcuuucuu

SEQ ID NO: 1602163 - RNA, 19 nt, Artificial Sequence
  Description of Artificial Sequence: Synthetic oligonucleotide
  Sense strand starting at position 642 of SEQ ID NO: 1560470
agaagaagaucuucgugaa

SEQ ID NO: 1602164 - RNA, 19 nt, Artificial Sequence
  Description of Artificial Sequence: Synthetic oligonucleotide
  Antisense strand to SEQ ID NO: 1602163
uucacgaagaucuucuucu

SEQ ID NO: 1602165 - RNA, 19 nt, Artificial Sequence
  Description of Artificial Sequence: Synthetic oligonucleotide
  Sense strand starting at position 643 of SEQ ID NO: 1560470
gaagaagaucuucgugaaa

SEQ ID NO: 1602166 - RNA, 19 nt, Artificial Sequence
  Description of Artificial Sequence: Synthetic oligonucleotide
  Antisense strand to SEQ ID NO: 1602165
uuucacgaagaucuucuuc

SEQ ID NO: 1602167 - RNA, 19 nt, Artificial Sequence
  Description of Artificial Sequence: Synthetic oligonucleotide
  Sense strand starting at position 645 of SEQ ID NO: 1560470
agaagaucuucgugaaagc

SEQ ID NO: 1602168 - RNA, 19 nt, Artificial Sequence
  Description of Artificial Sequence: Synthetic oligonucleotide
  Antisense strand to SEQ ID NO: 1602167
gcuuucacgaagaucuucu

SEQ ID NO: 1602169 - RNA, 19 nt, Artificial Sequence
  Description of Artificial Sequence: Synthetic oligonucleotide
  Sense strand starting at position 646 of SEQ ID NO: 1560470
gaagaucuucgugaaagca

SEQ ID NO: 1602170 - RNA, 19 nt, Artificial Sequence
  Description of Artificial Sequence: Synthetic oligonucleotide
  Antisense strand to SEQ ID NO: 1602169
ugcuuucacgaagaucuuc

SEQ ID NO: 1602171 - RNA, 19 nt, Artificial Sequence
  Description of Artificial Sequence: Synthetic oligonucleotide
  Sense strand starting at position 685 of SEQ ID NO: 1560470
ggauaaagauaauaaugga

SEQ ID NO: 1602172 - RNA, 19 nt, Artificial Sequence
  Description of Artificial Sequence: Synthetic oligonucleotide
  Antisense strand to SEQ ID NO: 1602171
uccauuauuaucuuuaucc

SEQ ID NO: 1602173 - RNA, 19 nt, Artificial Sequence
  Description of Artificial Sequence: Synthetic oligonucleotide
  Sense strand starting at position 731 of SEQ ID NO: 1560470
aggugaggaugaagguauu

SEQ ID NO: 1602174 - RNA, 19 nt, Artificial Sequence
  Description of Artificial Sequence: Synthetic oligonucleotide
  Antisense strand to SEQ ID NO: 1602173
aauaccuucauccucaccu

SEQ ID NO: 1602175 - RNA, 19 nt, Artificial Sequence
  Description of Artificial Sequence: Synthetic oligonucleotide
  Sense strand starting at position 1372 of SEQ ID NO: 1560470
gcccgaacuucugggaagu

SEQ ID NO: 1602176 - RNA, 19 nt, Artificial Sequence
  Description of Artificial Sequence: Synthetic oligonucleotide
  Antisense strand to SEQ ID NO: 1602175
acuucccagaaguucgggc

SEQ ID NO: 1602177 - RNA, 19 nt, Artificial Sequence
  Description of Artificial Sequence: Synthetic oligonucleotide
  Sense strand starting at position 1373 of SEQ ID NO: 1560470
cccgaacuucugggaaguu

SEQ ID NO: 1602178 - RNA, 19 nt, Artificial Sequence
  Description of Artificial Sequence: Synthetic oligonucleotide
  Antisense strand to SEQ ID NO: 1602177
aacuucccagaaguucggg

SEQ ID NO: 1602179 - RNA, 19 nt, Artificial Sequence
  Description of Artificial Sequence: Synthetic oligonucleotide
  Sense strand starting at position 1374 of SEQ ID NO: 1560470
ccgaacuucugggaaguuu

SEQ ID NO: 1602180 - RNA, 19 nt, Artificial Sequence
  Description of Artificial Sequence: Synthetic oligonucleotide
  Antisense strand to SEQ ID NO: 1602179
aaacuucccagaaguucgg

SEQ ID NO: 1602181 - RNA, 19 nt, Artificial Sequence
  Description of Artificial Sequence: Synthetic oligonucleotide
  Sense strand starting at position 1402 of SEQ ID NO: 1560470
ucauguugggagugacagu

SEQ ID NO: 1602182 - RNA, 19 nt, Artificial Sequence
  Description of Artificial Sequence: Synthetic oligonucleotide
  Antisense strand to SEQ ID NO: 1602181
acugucacucccaacauga

SEQ ID NO: 1602183 - RNA, 19 nt, Artificial Sequence
  Description of Artificial Sequence: Synthetic oligonucleotide
  Sense strand starting at position 1411 of SEQ ID NO: 1560470
gagugacagugcuguugau

SEQ ID NO: 1602184 - RNA, 19 nt, Artificial Sequence
  Description of Artificial Sequence: Synthetic oligonucleotide
  Antisense strand to SEQ ID NO: 1602183
aucaacagcacugucacuc

SEQ ID NO: 1602185 - RNA, 19 nt, Artificial Sequence
  Description of Artificial Sequence: Synthetic oligonucleotide
  Sense strand starting at position 1466 of SEQ ID NO: 1560470
ugggacagauacuaacaaa

SEQ ID NO: 1602186 - RNA, 19 nt, Artificial Sequence
  Description of Artificial Sequence: Synthetic oligonucleotide
  Antisense strand to SEQ ID NO: 1602185
uuuguuaguaucuguccca

SEQ ID NO: 1602187 - RNA, 19 nt, Artificial Sequence
  Description of Artificial Sequence: Synthetic oligonucleotide
  Sense strand starting at position 1510 of SEQ ID NO: 1560470
guauuagggucuugaaggu

SEQ ID NO: 1602188 - RNA, 19 nt, Artificial Sequence
  Description of Artificial Sequence: Synthetic oligonucleotide
  Antisense strand to SEQ ID NO: 1602187
accuucaagacccuaauac

SEQ ID NO: 1602189 - RNA, 19 nt, Artificial Sequence
  Description of Artificial Sequence: Synthetic oligonucleotide
  Sense strand starting at position 1519 of SEQ ID NO: 1560470
ucuugaaggucuuuacucu

SEQ ID NO: 1602190 - RNA, 19 nt, Artificial Sequence
  Description of Artificial Sequence: Synthetic oligonucleotide
  Antisense strand to SEQ ID NO: 1602189
agaguaaagaccuucaaga

SEQ ID NO: 1602191 - RNA, 19 nt, Artificial Sequence
  Description of Artificial Sequence: Synthetic oligonucleotide
  Sense strand starting at position 1523 of SEQ ID NO: 1560470
gaaggucuuuacucugaac

SEQ ID NO: 1602192 - RNA, 19 nt, Artificial Sequence
  Description of Artificial Sequence: Synthetic oligonucleotide
  Antisense strand to SEQ ID NO: 1602191
guucagaguaaagaccuuc

SEQ ID NO: 1602193 - RNA, 19 nt, Artificial Sequence
  Description of Artificial Sequence: Synthetic oligonucleotide
  Sense strand starting at position 1716 of SEQ ID NO: 1560470
cggguggcaucguagaaau

SEQ ID NO: 1602194 - RNA, 19 nt, Artificial Sequence
  Description of Artificial Sequence: Synthetic oligonucleotide
  Antisense strand to SEQ ID NO: 1602193
auuucuacgaugccacccg

SEQ ID NO: 1602195 - RNA, 19 nt, Artificial Sequence
  Description of Artificial Sequence: Synthetic oligonucleotide
  Sense strand starting at position 1718 of SEQ ID NO: 1560470
gguggcaucguagaaauag

SEQ ID NO: 1602196 - RNA, 19 nt, Artificial Sequence
  Description of Artificial Sequence: Synthetic oligonucleotide
  Antisense strand to SEQ ID NO: 1602195
cuauuucuacgaugccacc

SEQ ID NO: 1602197 - RNA, 19 nt, Artificial Sequence
  Description of Artificial Sequence: Synthetic oligonucleotide
  Sense strand starting at position 1809 of SEQ ID NO: 1560470
gcccgugugcugaagauug

SEQ ID NO: 1602198 - RNA, 19 nt, Artificial Sequence
  Description of Artificial Sequence: Synthetic oligonucleotide
  Antisense strand to SEQ ID NO: 1602197
caaucuucagcacacgggc

SEQ ID NO: 1602199 - RNA, 19 nt, Artificial Sequence
  Description of Artificial Sequence: Synthetic oligonucleotide
  Sense strand starting at position 2083 of SEQ ID NO: 1560470
aggugugcccgucauggaa

SEQ ID NO: 1602200 - RNA, 19 nt, Artificial Sequence
  Description of Artificial Sequence: Synthetic oligonucleotide
  Antisense strand to SEQ ID NO: 1602199
uuccaugacgggcacaccu

SEQ ID NO: 1602201 - RNA, 19 nt, Artificial Sequence
  Description of Artificial Sequence: Synthetic oligonucleotide
  Sense strand starting at position 2445 of SEQ ID NO: 1560470
auagauaacucagagcaag

SEQ ID NO: 1602202 - RNA, 19 nt, Artificial Sequence
  Description of Artificial Sequence: Synthetic oligonucleotide
  Antisense strand to SEQ ID NO: 1602201
cuugcucugaguuaucuau

SEQ ID NO: 1602203 - RNA, 19 nt, Artificial Sequence
  Description of Artificial Sequence: Synthetic oligonucleotide
  Sense strand starting at position 2545 of SEQ ID NO: 1560470
cgcugacauccagauguaa

SEQ ID NO: 1602204 - RNA, 19 nt, Artificial Sequence
  Description of Artificial Sequence: Synthetic oligonucleotide
  Antisense strand to SEQ ID NO: 1602203
uuacaucuggaugucagcg

SEQ ID NO: 1602205 - RNA, 19 nt, Artificial Sequence
  Description of Artificial Sequence: Synthetic oligonucleotide
  Sense strand starting at position 2628 of SEQ ID NO: 1560470
ggccaaaucucugcugagu

SEQ ID NO: 1602206 - RNA, 19 nt, Artificial Sequence
  Description of Artificial Sequence: Synthetic oligonucleotide
  Antisense strand to SEQ ID NO: 1602205
acucagcagagauuuggcc

SEQ ID NO: 1602207 - RNA, 19 nt, Artificial Sequence
  Description of Artificial Sequence: Synthetic oligonucleotide
  Sense strand starting at position 2630 of SEQ ID NO: 1560470
ccaaaucucugcugaguuc

SEQ ID NO: 1602208 - RNA, 19 nt, Artificial Sequence
  Description of Artificial Sequence: Synthetic oligonucleotide
  Antisense strand to SEQ ID NO: 1602207
gaacucagcagagauuugg

SEQ ID NO: 1602209 - RNA, 19 nt, Artificial Sequence
  Description of Artificial Sequence: Synthetic oligonucleotide
  Sense strand starting at position 2641 of SEQ ID NO: 1560470
cugaguucuuuccaccaca

SEQ ID NO: 1602210 - RNA, 19 nt, Artificial Sequence
  Description of Artificial Sequence: Synthetic oligonucleotide
  Antisense strand to SEQ ID NO: 1602209
ugugguggaaagaacucag

SEQ ID NO: 1602211 - RNA, 19 nt, Artificial Sequence
  Description of Artificial Sequence: Synthetic oligonucleotide
  Sense strand starting at position 2706 of SEQ ID NO: 1560470
cguugagagguguguagua

SEQ ID NO: 1602212 - RNA, 19 nt, Artificial Sequence
  Description of Artificial Sequence: Synthetic oligonucleotide
  Antisense strand to SEQ ID NO: 1602211
uacuacacaccucucaacg

SEQ ID NO: 1602213 - RNA, 19 nt, Artificial Sequence
  Description of Artificial Sequence: Synthetic oligonucleotide
  Sense strand starting at position 3597 of SEQ ID NO: 1560470
cuucgugacuccuccucua

SEQ ID NO: 1602214 - RNA, 19 nt, Artificial Sequence
  Description of Artificial Sequence: Synthetic oligonucleotide
  Antisense strand to SEQ ID NO: 1602213
uagaggaggagucacgaag

SEQ ID NO: 1602215 - RNA, 19 nt, Artificial Sequence
  Description of Artificial Sequence: Synthetic oligonucleotide
  Sense strand starting at position 3600 of SEQ ID NO: 1560470
cgugacuccuccucuaacu

SEQ ID NO: 1602216 - RNA, 19 nt, Artificial Sequence
  Description of Artificial Sequence: Synthetic oligonucleotide
  Antisense strand to SEQ ID NO: 1602215
aguuagaggaggagucacg

SEQ ID NO: 1602217 - RNA, 19 nt, Artificial Sequence
  Description of Artificial Sequence: Synthetic oligonucleotide
  Sense strand starting at position 262 of SEQ ID NO: 1560471
auagauaacucagagcaag

SEQ ID NO: 1602218 - RNA, 19 nt, Artificial Sequence
  Description of Artificial Sequence: Synthetic oligonucleotide
  Antisense strand to SEQ ID NO: 1602217
cuugcucugaguuaucuau

SEQ ID NO: 1602219 - RNA, 19 nt, Artificial Sequence
  Description of Artificial Sequence: Synthetic oligonucleotide
  Sense strand starting at position 362 of SEQ ID NO: 1560471
cgcugacauccagauguaa

SEQ ID NO: 1602220 - RNA, 19 nt, Artificial Sequence
  Description of Artificial Sequence: Synthetic oligonucleotide
  Antisense strand to SEQ ID NO: 1602219
uuacaucuggaugucagcg

SEQ ID NO: 1602221 - RNA, 19 nt, Artificial Sequence
  Description of Artificial Sequence: Synthetic oligonucleotide
  Sense strand starting at position 445 of SEQ ID NO: 1560471
ggccaaaucucugcugagu

SEQ ID NO: 1602222 - RNA, 19 nt, Artificial Sequence
  Description of Artificial Sequence: Synthetic oligonucleotide
  Antisense strand to SEQ ID NO: 1602221
acucagcagagauuuggcc

SEQ ID NO: 1602223 - RNA, 19 nt, Artificial Sequence
  Description of Artificial Sequence: Synthetic oligonucleotide
  Sense strand starting at position 447 of SEQ ID NO: 1560471
ccaaaucucugcugaguuc

SEQ ID NO: 1602224 - RNA, 19 nt, Artificial Sequence
  Description of Artificial Sequence: Synthetic oligonucleotide
  Antisense strand to SEQ ID NO: 1602223
gaacucagcagagauuugg

SEQ ID NO: 1602225 - RNA, 19 nt, Artificial Sequence
  Description of Artificial Sequence: Synthetic oligonucleotide
  Sense strand starting at position 458 of SEQ ID NO: 1560471
cugaguucuuuccaccaca

SEQ ID NO: 1602226 - RNA, 19 nt, Artificial Sequence
  Description of Artificial Sequence: Synthetic oligonucleotide
  Antisense strand to SEQ ID NO: 1602225
ugugguggaaagaacucag

SEQ ID NO: 1602227 - RNA, 19 nt, Artificial Sequence
  Description of Artificial Sequence: Synthetic oligonucleotide
  Sense strand starting at position 523 of SEQ ID NO: 1560471
cguugagagguguguagua

SEQ ID NO: 1602228 - RNA, 19 nt, Artificial Sequence
  Description of Artificial Sequence: Synthetic oligonucleotide
  Antisense strand to SEQ ID NO: 1602227
uacuacacaccucucaacg

SEQ ID NO: 1602229 - RNA, 19 nt, Artificial Sequence
  Description of Artificial Sequence: Synthetic oligonucleotide
  Sense strand starting at position 1414 of SEQ ID NO: 1560471
cuucgugacuccuccucua

SEQ ID NO: 1602230 - RNA, 19 nt, Artificial Sequence
  Description of Artificial Sequence: Synthetic oligonucleotide
  Antisense strand to SEQ ID NO: 1602229
uagaggaggagucacgaag

SEQ ID NO: 1602231 - RNA, 19 nt, Artificial Sequence
  Description of Artificial Sequence: Synthetic oligonucleotide
  Sense strand starting at position 1417 of SEQ ID NO: 1560471
cgugacuccuccucuaacu

SEQ ID NO: 1602232 - RNA, 19 nt, Artificial Sequence
  Description of Artificial Sequence: Synthetic oligonucleotide
  Antisense strand to SEQ ID NO: 1602231
aguuagaggaggagucacg

SEQ ID NO: 1602233 - RNA, 19 nt, Artificial Sequence
  Description of Artificial Sequence: Synthetic oligonucleotide
  Sense strand starting at position 2257 of SEQ ID NO: 1560471
agggacaucugggaugaga

SEQ ID NO: 1602234 - RNA, 19 nt, Artificial Sequence
  Description of Artificial Sequence: Synthetic oligonucleotide
  Antisense strand to SEQ ID NO: 1602233
ucucaucccagaugucccu

SEQ ID NO: 1602235 - RNA, 19 nt, Artificial Sequence
  Description of Artificial Sequence: Synthetic oligonucleotide
  Sense strand starting at position 2371 of SEQ ID NO: 1560471
gucaccuucucaggagaca

SEQ ID NO: 1602236 - RNA, 19 nt, Artificial Sequence
  Description of Artificial Sequence: Synthetic oligonucleotide
  Antisense strand to SEQ ID NO: 1602235
ugucuccugagaaggugac

SEQ ID NO: 1602237 - RNA, 19 nt, Artificial Sequence
  Description of Artificial Sequence: Synthetic oligonucleotide
  Sense strand starting at position 2402 of SEQ ID NO: 1560471
cccacuaccugaggucaua

SEQ ID NO: 1602238 - RNA, 19 nt, Artificial Sequence
  Description of Artificial Sequence: Synthetic oligonucleotide
  Antisense strand to SEQ ID NO: 1602237
uaugaccucagguaguggg

SEQ ID NO: 1602239 - RNA, 19 nt, Artificial Sequence
  Description of Artificial Sequence: Synthetic oligonucleotide
  Sense strand starting at position 2518 of SEQ ID NO: 1560471
guaagugcucaaugggugu

SEQ ID NO: 1602240 - RNA, 19 nt, Artificial Sequence
  Description of Artificial Sequence: Synthetic oligonucleotide
  Antisense strand to SEQ ID NO: 1602239
acacccauugagcacuuac

SEQ ID NO: 1602241 - RNA, 19 nt, Artificial Sequence
  Description of Artificial Sequence: Synthetic oligonucleotide
  Sense strand starting at position 2677 of SEQ ID NO: 1560471
gcccacaaugguuggauua

SEQ ID NO: 1602242 - RNA, 19 nt, Artificial Sequence
  Description of Artificial Sequence: Synthetic oligonucleotide
  Antisense strand to SEQ ID NO: 1602241
uaauccaaccauugugggc

SEQ ID NO: 1602243 - RNA, 19 nt, Artificial Sequence
  Description of Artificial Sequence: Synthetic oligonucleotide
  Sense strand starting at position 2678 of SEQ ID NO: 1560471
cccacaaugguuggauuaa

SEQ ID NO: 1602244 - RNA, 19 nt, Artificial Sequence
  Description of Artificial Sequence: Synthetic oligonucleotide
  Antisense strand to SEQ ID NO: 1602243
uuaauccaaccauuguggg

SEQ ID NO: 1602245 - RNA, 19 nt, Artificial Sequence
  Description of Artificial Sequence: Synthetic oligonucleotide
  Sense strand starting at position 2679 of SEQ ID NO: 1560471
ccacaaugguuggauuaag

SEQ ID NO: 1602246 - RNA, 19 nt, Artificial Sequence
  Description of Artificial Sequence: Synthetic oligonucleotide
  Antisense strand to SEQ ID NO: 1602245
cuuaauccaaccauugugg

SEQ ID NO: 1602247 - RNA, 19 nt, Artificial Sequence
  Description of Artificial Sequence: Synthetic oligonucleotide
  Sense strand starting at position 2688 of SEQ ID NO: 1560471
uuggauuaagguuaucuuu

SEQ ID NO: 1602248 - RNA, 19 nt, Artificial Sequence
  Description of Artificial Sequence: Synthetic oligonucleotide
  Antisense strand to SEQ ID NO: 1602247
aaagauaaccuuaauccaa

SEQ ID NO: 1602249 - RNA, 19 nt, Artificial Sequence
  Description of Artificial Sequence: Synthetic oligonucleotide
  Sense strand starting at position 2694 of SEQ ID NO: 1560471
uaagguuaucuuugcuguu

SEQ ID NO: 1602250 - RNA, 19 nt, Artificial Sequence
  Description of Artificial Sequence: Synthetic oligonucleotide
  Antisense strand to SEQ ID NO: 1602249
aacagcaaagauaaccuua

SEQ ID NO: 1602251 - RNA, 19 nt, Artificial Sequence
  Description of Artificial Sequence: Synthetic oligonucleotide
  Sense strand starting at position 2700 of SEQ ID NO: 1560471
uaucuuugcuguuguuuga

SEQ ID NO: 1602252 - RNA, 19 nt, Artificial Sequence
  Description of Artificial Sequence: Synthetic oligonucleotide
  Antisense strand to SEQ ID NO: 1602251
ucaaacaacagcaaagaua

SEQ ID NO: 1602253 - RNA, 19 nt, Artificial Sequence
  Description of Artificial Sequence: Synthetic oligonucleotide
  Sense strand starting at position 2741 of SEQ ID NO: 1560471
aggaaaugucuccaacgca

SEQ ID NO: 1602254 - RNA, 19 nt, Artificial Sequence
  Description of Artificial Sequence: Synthetic oligonucleotide
  Antisense strand to SEQ ID NO: 1602253
ugcguuggagacauuuccu

SEQ ID NO: 1602255 - RNA, 19 nt, Artificial Sequence
  Description of Artificial Sequence: Synthetic oligonucleotide
  Sense strand starting at position 2841 of SEQ ID NO: 1560471
agagcauccuuccggaguu

SEQ ID NO: 1602256 - RNA, 19 nt, Artificial Sequence
  Description of Artificial Sequence: Synthetic oligonucleotide
  Antisense strand to SEQ ID NO: 1602255
aacuccggaaggaugcucu

SEQ ID NO: 1602257 - RNA, 19 nt, Artificial Sequence
  Description of Artificial Sequence: Synthetic oligonucleotide
  Sense strand starting at position 2964 of SEQ ID NO: 1560471
guugguucguuuguggaca

SEQ ID NO: 1602258 - RNA, 19 nt, Artificial Sequence
  Description of Artificial Sequence: Synthetic oligonucleotide
  Antisense strand to SEQ ID NO: 1602257
uguccacaaacgaaccaac

SEQ ID NO: 1602259 - RNA, 19 nt, Artificial Sequence
  Description of Artificial Sequence: Synthetic oligonucleotide
  Sense strand starting at position 2966 of SEQ ID NO: 1560471
ugguucguuuguggacaga

SEQ ID NO: 1602260 - RNA, 19 nt, Artificial Sequence
  Description of Artificial Sequence: Synthetic oligonucleotide
  Antisense strand to SEQ ID NO: 1602259
ucuguccacaaacgaacca

SEQ ID NO: 1602261 - RNA, 19 nt, Artificial Sequence
  Description of Artificial Sequence: Synthetic oligonucleotide
  Sense strand starting at position 3019 of SEQ ID NO: 1560471
gcccuaaagcucugaucuu

SEQ ID NO: 1602262 - RNA, 19 nt, Artificial Sequence
  Description of Artificial Sequence: Synthetic oligonucleotide
  Antisense strand to SEQ ID NO: 1602261
aagaucagagcuuuagggc

SEQ ID NO: 1602263 - RNA, 19 nt, Artificial Sequence
  Description of Artificial Sequence: Synthetic oligonucleotide
  Sense strand starting at position 3447 of SEQ ID NO: 1560471
ucuguuuccuucuaagaag

SEQ ID NO: 1602264 - RNA, 19 nt, Artificial Sequence
  Description of Artificial Sequence: Synthetic oligonucleotide
  Antisense strand to SEQ ID NO: 1602263
cuucuuagaaggaaacaga

SEQ ID NO: 1602265 - RNA, 19 nt, Artificial Sequence
  Description of Artificial Sequence: Synthetic oligonucleotide
  Sense strand starting at position 3450 of SEQ ID NO: 1560471
guuuccuucuaagaagaau

SEQ ID NO: 1602266 - RNA, 19 nt, Artificial Sequence
  Description of Artificial Sequence: Synthetic oligonucleotide
  Antisense strand to SEQ ID NO: 1602265
auucuucuuagaaggaaac

SEQ ID NO: 1602267 - RNA, 19 nt, Artificial Sequence
  Description of Artificial Sequence: Synthetic oligonucleotide
  Sense strand starting at position 3464 of SEQ ID NO: 1560471
agaauaguauaucugagcu

SEQ ID NO: 1602268 - RNA, 19 nt, Artificial Sequence
  Description of Artificial Sequence: Synthetic oligonucleotide
  Antisense strand to SEQ ID NO: 1602267
agcucagauauacuauucu

SEQ ID NO: 1602269 - RNA, 19 nt, Artificial Sequence
  Description of Artificial Sequence: Synthetic oligonucleotide
  Sense strand starting at position 3477 of SEQ ID NO: 1560471
ugagcuggcgguuacauua

SEQ ID NO: 1602270 - RNA, 19 nt, Artificial Sequence
  Description of Artificial Sequence: Synthetic oligonucleotide
  Antisense strand to SEQ ID NO: 1602269
uaauguaaccgccagcuca

SEQ ID NO: 1602271 - RNA, 19 nt, Artificial Sequence
  Description of Artificial Sequence: Synthetic oligonucleotide
  Sense strand starting at position 3540 of SEQ ID NO: 1560471
gagauugacuccugcgcca

SEQ ID NO: 1602272 - RNA, 19 nt, Artificial Sequence
  Description of Artificial Sequence: Synthetic oligonucleotide
  Antisense strand to SEQ ID NO: 1602271
uggcgcaggagucaaucuc

SEQ ID NO: 1602273 - RNA, 19 nt, Artificial Sequence
  Description of Artificial Sequence: Synthetic oligonucleotide
  Sense strand starting at position 3553 of SEQ ID NO: 1560471
gcgccaagaucugagucuu

SEQ ID NO: 1602274 - RNA, 19 nt, Artificial Sequence
  Description of Artificial Sequence: Synthetic oligonucleotide
  Antisense strand to SEQ ID NO: 1602273
aagacucagaucuuggcgc

SEQ ID NO: 1602275 - RNA, 19 nt, Artificial Sequence
  Description of Artificial Sequence: Synthetic oligonucleotide
  Sense strand starting at position 3892 of SEQ ID NO: 1560471
cccuuucugugacucuuau

SEQ ID NO: 1602276 - RNA, 19 nt, Artificial Sequence
  Description of Artificial Sequence: Synthetic oligonucleotide
  Antisense strand to SEQ ID NO: 1602275
auaagagucacagaaaggg

SEQ ID NO: 1602277 - RNA, 19 nt, Artificial Sequence
  Description of Artificial Sequence: Synthetic oligonucleotide
  Sense strand starting at position 3896 of SEQ ID NO: 1560471
uucugugacucuuauguua

SEQ ID NO: 1602278 - RNA, 19 nt, Artificial Sequence
  Description of Artificial Sequence: Synthetic oligonucleotide
  Antisense strand to SEQ ID NO: 1602277
uaacauaagagucacagaa

SEQ ID NO: 1602279 - RNA, 19 nt, Artificial Sequence
  Description of Artificial Sequence: Synthetic oligonucleotide
  Sense strand starting at position 3904 of SEQ ID NO: 1560471
cucuuauguuaccuguuua

SEQ ID NO: 1602280 - RNA, 19 nt, Artificial Sequence
  Description of Artificial Sequence: Synthetic oligonucleotide
  Antisense strand to SEQ ID NO: 1602279
uaaacagguaacauaagag

SEQ ID NO: 1602281 - RNA, 19 nt, Artificial Sequence
  Description of Artificial Sequence: Synthetic oligonucleotide
  Sense strand starting at position 3909 of SEQ ID NO: 1560471
auguuaccuguuuauuaca

SEQ ID NO: 1602282 - RNA, 19 nt, Artificial Sequence
  Description of Artificial Sequence: Synthetic oligonucleotide
  Antisense strand to SEQ ID NO: 1602281
uguaauaaacagguaacau

SEQ ID NO: 1602283 - RNA, 19 nt, Artificial Sequence
  Description of Artificial Sequence: Synthetic oligonucleotide
  Sense strand starting at position 3912 of SEQ ID NO: 1560471
uuaccuguuuauuacauga

SEQ ID NO: 1602284 - RNA, 19 nt, Artificial Sequence
  Description of Artificial Sequence: Synthetic oligonucleotide
  Antisense strand to SEQ ID NO: 1602283
ucauguaauaaacagguaa

SEQ ID NO: 1602285 - RNA, 19 nt, Artificial Sequence
  Description of Artificial Sequence: Synthetic oligonucleotide
  Sense strand starting at position 125 of SEQ ID NO: 1560472
uugcaucuuugcucugcua

SEQ ID NO: 1602286 - RNA, 19 nt, Artificial Sequence
  Description of Artificial Sequence: Synthetic oligonucleotide
  Antisense strand to SEQ ID NO: 1602285
uagcagagcaaagaugcaa

SEQ ID NO: 1602287 - RNA, 19 nt, Artificial Sequence
  Description of Artificial Sequence: Synthetic oligonucleotide
  Sense strand starting at position 127 of SEQ ID NO: 1560472
gcaucuuugcucugcuaaa

SEQ ID NO: 1602288 - RNA, 19 nt, Artificial Sequence
  Description of Artificial Sequence: Synthetic oligonucleotide
  Antisense strand to SEQ ID NO: 1602287
uuuagcagagcaaagaugc

SEQ ID NO: 1602289 - RNA, 19 nt, Artificial Sequence
  Description of Artificial Sequence: Synthetic oligonucleotide
  Sense strand starting at position 493 of SEQ ID NO: 1560472
ucuucuucuugagacaaga

SEQ ID NO: 1602290 - RNA, 19 nt, Artificial Sequence
  Description of Artificial Sequence: Synthetic oligonucleotide
  Antisense strand to SEQ ID NO: 1602289
ucuugucucaagaagaaga

SEQ ID NO: 1602291 - RNA, 19 nt, Artificial Sequence
  Description of Artificial Sequence: Synthetic oligonucleotide
  Sense strand starting at position 807 of SEQ ID NO: 1560472
guguauguguugcuuguca

SEQ ID NO: 1602292 - RNA, 19 nt, Artificial Sequence
  Description of Artificial Sequence: Synthetic oligonucleotide
  Antisense strand to SEQ ID NO: 1602291
ugacaagcaacacauacac

SEQ ID NO: 1602293 - RNA, 19 nt, Artificial Sequence
  Description of Artificial Sequence: Synthetic oligonucleotide
  Sense strand starting at position 809 of SEQ ID NO: 1560472
guauguguugcuugucacu

SEQ ID NO: 1602294 - RNA, 19 nt, Artificial Sequence
  Description of Artificial Sequence: Synthetic oligonucleotide
  Antisense strand to SEQ ID NO: 1602293
agugacaagcaacacauac

SEQ ID NO: 1602295 - RNA, 19 nt, Artificial Sequence
  Description of Artificial Sequence: Synthetic oligonucleotide
  Sense strand starting at position 811 of SEQ ID NO: 1560472
auguguugcuugucacuag

SEQ ID NO: 1602296 - RNA, 19 nt, Artificial Sequence
  Description of Artificial Sequence: Synthetic oligonucleotide
  Antisense strand to SEQ ID NO: 1602295
cuagugacaagcaacacau

SEQ ID NO: 1602297 - RNA, 19 nt, Artificial Sequence
  Description of Artificial Sequence: Synthetic oligonucleotide
  Sense strand starting at position 812 of SEQ ID NO: 1560472
uguguugcuugucacuaga

SEQ ID NO: 1602298 - RNA, 19 nt, Artificial Sequence
  Description of Artificial Sequence: Synthetic oligonucleotide
  Antisense strand to SEQ ID NO: 1602297
ucuagugacaagcaacaca

SEQ ID NO: 1602299 - RNA, 19 nt, Artificial Sequence
  Description of Artificial Sequence: Synthetic oligonucleotide
  Sense strand starting at position 814 of SEQ ID NO: 1560472
uguugcuugucacuagaau

SEQ ID NO: 1602300 - RNA, 19 nt, Artificial Sequence
  Description of Artificial Sequence: Synthetic oligonucleotide
  Antisense strand to SEQ ID NO: 1602299
auucuagugacaagcaaca

SEQ ID NO: 1602301 - RNA, 19 nt, Artificial Sequence
  Description of Artificial Sequence: Synthetic oligonucleotide
  Sense strand starting at position 815 of SEQ ID NO: 1560472
guugcuugucacuagaaug

SEQ ID NO: 1602302 - RNA, 19 nt, Artificial Sequence
  Description of Artificial Sequence: Synthetic oligonucleotide
  Antisense strand to SEQ ID NO: 1602301
cauucuagugacaagcaac

SEQ ID NO: 1602303 - RNA, 19 nt, Artificial Sequence
  Description of Artificial Sequence: Synthetic oligonucleotide
  Sense strand starting at position 859 of SEQ ID NO: 1560472
cuguguuauuccuugcuga

SEQ ID NO: 1602304 - RNA, 19 nt, Artificial Sequence
  Description of Artificial Sequence: Synthetic oligonucleotide
  Antisense strand to SEQ ID NO: 1602303
ucagcaaggaauaacacag

SEQ ID NO: 1602305 - RNA, 19 nt, Artificial Sequence
  Description of Artificial Sequence: Synthetic oligonucleotide
  Sense strand starting at position 862 of SEQ ID NO: 1560472
uguuauuccuugcugaaug

SEQ ID NO: 1602306 - RNA, 19 nt, Artificial Sequence
  Description of Artificial Sequence: Synthetic oligonucleotide
  Antisense strand to SEQ ID NO: 1602305
cauucagcaaggaauaaca

SEQ ID NO: 1602307 - RNA, 19 nt, Artificial Sequence
  Description of Artificial Sequence: Synthetic oligonucleotide
  Sense strand starting at position 896 of SEQ ID NO: 1560472
gggugaguacuccauagau

SEQ ID NO: 1602308 - RNA, 19 nt, Artificial Sequence
  Description of Artificial Sequence: Synthetic oligonucleotide
  Antisense strand to SEQ ID NO: 1602307
aucuauggaguacucaccc

SEQ ID NO: 1602309 - RNA, 19 nt, Artificial Sequence
  Description of Artificial Sequence: Synthetic oligonucleotide
  Sense strand starting at position 928 of SEQ ID NO: 1560472
aaugguugaucaccagaca

SEQ ID NO: 1602310 - RNA, 19 nt, Artificial Sequence
  Description of Artificial Sequence: Synthetic oligonucleotide
  Antisense strand to SEQ ID NO: 1602309
ugucuggugaucaaccauu

SEQ ID NO: 1602311 - RNA, 19 nt, Artificial Sequence
  Description of Artificial Sequence: Synthetic oligonucleotide
  Sense strand starting at position 1011 of SEQ ID NO: 1560472
ucaccagucuguccucuaa

SEQ ID NO: 1602312 - RNA, 19 nt, Artificial Sequence
  Description of Artificial Sequence: Synthetic oligonucleotide
  Antisense strand to SEQ ID NO: 1602311
uuagaggacagacugguga

SEQ ID NO: 1602313 - RNA, 19 nt, Artificial Sequence
  Description of Artificial Sequence: Synthetic oligonucleotide
  Sense strand starting at position 1013 of SEQ ID NO: 1560472
accagucuguccucuaauc

SEQ ID NO: 1602314 - RNA, 19 nt, Artificial Sequence
  Description of Artificial Sequence: Synthetic oligonucleotide
  Antisense strand to SEQ ID NO: 1602313
gauuagaggacagacuggu

SEQ ID NO: 1602315 - RNA, 19 nt, Artificial Sequence
  Description of Artificial Sequence: Synthetic oligonucleotide
  Sense strand starting at position 1065 of SEQ ID NO: 1560472
ggaccuggaucuuccgaga

SEQ ID NO: 1602316 - RNA, 19 nt, Artificial Sequence
  Description of Artificial Sequence: Synthetic oligonucleotide
  Antisense strand to SEQ ID NO: 1602315
ucucggaagauccaggucc

SEQ ID NO: 1602317 - RNA, 19 nt, Artificial Sequence
  Description of Artificial Sequence: Synthetic oligonucleotide
  Sense strand starting at position 1090 of SEQ ID NO: 1560472
ggagccaugccucguugaa

SEQ ID NO: 1602318 - RNA, 19 nt, Artificial Sequence
  Description of Artificial Sequence: Synthetic oligonucleotide
  Antisense strand to SEQ ID NO: 1602317
uucaacgaggcauggcucc

SEQ ID NO: 1602319 - RNA, 19 nt, Artificial Sequence
  Description of Artificial Sequence: Synthetic oligonucleotide
  Sense strand starting at position 1263 of SEQ ID NO: 1560472
guggaacgucuguaacuga

SEQ ID NO: 1602320 - RNA, 19 nt, Artificial Sequence
  Description of Artificial Sequence: Synthetic oligonucleotide
  Antisense strand to SEQ ID NO: 1602319
ucaguuacagacguuccac

SEQ ID NO: 1602321 - RNA, 19 nt, Artificial Sequence
  Description of Artificial Sequence: Synthetic oligonucleotide
  Sense strand starting at position 1417 of SEQ ID NO: 1560472
ggcuucugcucaccugaga

SEQ ID NO: 1602322 - RNA, 19 nt, Artificial Sequence
  Description of Artificial Sequence: Synthetic oligonucleotide
  Antisense strand to SEQ ID NO: 1602321
ucucaggugagcagaagcc

SEQ ID NO: 1602323 - RNA, 19 nt, Artificial Sequence
  Description of Artificial Sequence: Synthetic oligonucleotide
  Sense strand starting at position 1496 of SEQ ID NO: 1560472
gugguaucgcgagucaccu

SEQ ID NO: 1602324 - RNA, 19 nt, Artificial Sequence
  Description of Artificial Sequence: Synthetic oligonucleotide
  Antisense strand to SEQ ID NO: 1602323
aggugacucgcgauaccac

SEQ ID NO: 1602325 - RNA, 19 nt, Artificial Sequence
  Description of Artificial Sequence: Synthetic oligonucleotide
  Sense strand starting at position 1811 of SEQ ID NO: 1560472
cagcuuuguccacgcucau

SEQ ID NO: 1602326 - RNA, 19 nt, Artificial Sequence
  Description of Artificial Sequence: Synthetic oligonucleotide
  Antisense strand to SEQ ID NO: 1602325
augagcguggacaaagcug

SEQ ID NO: 1602327 - RNA, 19 nt, Artificial Sequence
  Description of Artificial Sequence: Synthetic oligonucleotide
  Sense strand starting at position 2162 of SEQ ID NO: 1560472
gugggagguccucaagauc

SEQ ID NO: 1602328 - RNA, 19 nt, Artificial Sequence
  Description of Artificial Sequence: Synthetic oligonucleotide
  Antisense strand to SEQ ID NO: 1602327
gaucuugaggaccucccac

SEQ ID NO: 1602329 - RNA, 19 nt, Artificial Sequence
  Description of Artificial Sequence: Synthetic oligonucleotide
  Sense strand starting at position 2560 of SEQ ID NO: 1560472
aguaaauucuugugucuaa

SEQ ID NO: 1602330 - RNA, 19 nt, Artificial Sequence
  Description of Artificial Sequence: Synthetic oligonucleotide
  Antisense strand to SEQ ID NO: 1602329
uuagacacaagaauuuacu

SEQ ID NO: 1602331 - RNA, 19 nt, Artificial Sequence
  Description of Artificial Sequence: Synthetic oligonucleotide
  Sense strand starting at position 2561 of SEQ ID NO: 1560472
guaaauucuugugucuaac

SEQ ID NO: 1602332 - RNA, 19 nt, Artificial Sequence
  Description of Artificial Sequence: Synthetic oligonucleotide
  Antisense strand to SEQ ID NO: 1602331
guuagacacaagaauuuac

SEQ ID NO: 1602333 - RNA, 19 nt, Artificial Sequence
  Description of Artificial Sequence: Synthetic oligonucleotide
  Sense strand starting at position 2567 of SEQ ID NO: 1560472
ucuugugucuaaccacuuu

SEQ ID NO: 1602334 - RNA, 19 nt, Artificial Sequence
  Description of Artificial Sequence: Synthetic oligonucleotide
  Antisense strand to SEQ ID NO: 1602333
aaagugguuagacacaaga

SEQ ID NO: 1602335 - RNA, 19 nt, Artificial Sequence
  Description of Artificial Sequence: Synthetic oligonucleotide
  Sense strand starting at position 2722 of SEQ ID NO: 1560472
gagaauuaauuuggauaga

SEQ ID NO: 1602336 - RNA, 19 nt, Artificial Sequence
  Description of Artificial Sequence: Synthetic oligonucleotide
  Antisense strand to SEQ ID NO: 1602335
ucuauccaaauuaauucuc

SEQ ID NO: 1602337 - RNA, 19 nt, Artificial Sequence
  Description of Artificial Sequence: Synthetic oligonucleotide
  Sense strand starting at position 3078 of SEQ ID NO: 1560472
cagacauguuggcguguuu

SEQ ID NO: 1602338 - RNA, 19 nt, Artificial Sequence
  Description of Artificial Sequence: Synthetic oligonucleotide
  Antisense strand to SEQ ID NO: 1602337
aaacacgccaacaugucug

SEQ ID NO: 1602339 - RNA, 19 nt, Artificial Sequence
  Description of Artificial Sequence: Synthetic oligonucleotide
  Sense strand starting at position 3089 of SEQ ID NO: 1560472
gcguguuucugugguccua

SEQ ID NO: 1602340 - RNA, 19 nt, Artificial Sequence
  Description of Artificial Sequence: Synthetic oligonucleotide
  Antisense strand to SEQ ID NO: 1602339
uaggaccacagaaacacgc

SEQ ID NO: 1602341 - RNA, 19 nt, Artificial Sequence
  Description of Artificial Sequence: Synthetic oligonucleotide
  Sense strand starting at position 3175 of SEQ ID NO: 1560472
ccgugauagggccacuaca

SEQ ID NO: 1602342 - RNA, 19 nt, Artificial Sequence
  Description of Artificial Sequence: Synthetic oligonucleotide
  Antisense strand to SEQ ID NO: 1602341
uguaguggcccuaucacgg

SEQ ID NO: 1602343 - RNA, 19 nt, Artificial Sequence
  Description of Artificial Sequence: Synthetic oligonucleotide
  Sense strand starting at position 3846 of SEQ ID NO: 1560472
gggagacccuguuucaaga

SEQ ID NO: 1602344 - RNA, 19 nt, Artificial Sequence
  Description of Artificial Sequence: Synthetic oligonucleotide
  Antisense strand to SEQ ID NO: 1602343
ucuugaaacagggucuccc

SEQ ID NO: 1602345 - RNA, 19 nt, Artificial Sequence
  Description of Artificial Sequence: Synthetic oligonucleotide
  Sense strand starting at position 3878 of SEQ ID NO: 1560472
auggauccucccugcauua

SEQ ID NO: 1602346 - RNA, 19 nt, Artificial Sequence
  Description of Artificial Sequence: Synthetic oligonucleotide
  Antisense strand to SEQ ID NO: 1602345
uaaugcagggaggauccau

SEQ ID NO: 1602347 - RNA, 19 nt, Artificial Sequence
  Description of Artificial Sequence: Synthetic oligonucleotide
  Sense strand starting at position 3880 of SEQ ID NO: 1560472
ggauccucccugcauuauu

SEQ ID NO: 1602348 - RNA, 19 nt, Artificial Sequence
  Description of Artificial Sequence: Synthetic oligonucleotide
  Antisense strand to SEQ ID NO: 1602347
aauaaugcagggaggaucc

SEQ ID NO: 1602349 - RNA, 19 nt, Artificial Sequence
  Description of Artificial Sequence: Synthetic oligonucleotide
  Sense strand starting at position 3895 of SEQ ID NO: 1560472
uauugacuccagcaguaga

SEQ ID NO: 1602350 - RNA, 19 nt, Artificial Sequence
  Description of Artificial Sequence: Synthetic oligonucleotide
  Antisense strand to SEQ ID NO: 1602349
ucuacugcuggagucaaua

SEQ ID NO: 1602351 - RNA, 19 nt, Artificial Sequence
  Description of Artificial Sequence: Synthetic oligonucleotide
  Sense strand starting at position 3898 of SEQ ID NO: 1560472
ugacuccagcaguagauaa

SEQ ID NO: 1602352 - RNA, 19 nt, Artificial Sequence
  Description of Artificial Sequence: Synthetic oligonucleotide
  Antisense strand to SEQ ID NO: 1602351
uuaucuacugcuggaguca

SEQ ID NO: 1602353 - RNA, 19 nt, Artificial Sequence
  Description of Artificial Sequence: Synthetic oligonucleotide
  Sense strand starting at position 3931 of SEQ ID NO: 1560472
gguccuaggucgagaagag

SEQ ID NO: 1602354 - RNA, 19 nt, Artificial Sequence
  Description of Artificial Sequence: Synthetic oligonucleotide
  Antisense strand to SEQ ID NO: 1602353
cucuucucgaccuaggacc

SEQ ID NO: 1602355 - RNA, 19 nt, Artificial Sequence
  Description of Artificial Sequence: Synthetic oligonucleotide
  Sense strand starting at position 3950 of SEQ ID NO: 1560472
gucaguuagacacacaugu

SEQ ID NO: 1602356 - RNA, 19 nt, Artificial Sequence
  Description of Artificial Sequence: Synthetic oligonucleotide
  Antisense strand to SEQ ID NO: 1602355
acaugugugucuaacugac

SEQ ID NO: 1602357 - RNA, 19 nt, Artificial Sequence
  Description of Artificial Sequence: Synthetic oligonucleotide
  Sense strand starting at position 3960 of SEQ ID NO: 1560472
cacacauguccuggcugau

SEQ ID NO: 1602358 - RNA, 19 nt, Artificial Sequence
  Description of Artificial Sequence: Synthetic oligonucleotide
  Antisense strand to SEQ ID NO: 1602357
aucagccaggacaugugug

SEQ ID NO: 1602359 - RNA, 19 nt, Artificial Sequence
  Description of Artificial Sequence: Synthetic oligonucleotide
  Sense strand starting at position 1264 of SEQ ID NO: 1560473
gcuggcuuccuacaaguca

SEQ ID NO: 1602360 - RNA, 19 nt, Artificial Sequence
  Description of Artificial Sequence: Synthetic oligonucleotide
  Antisense strand to SEQ ID NO: 1602359
ugacuuguaggaagccagc

SEQ ID NO: 1602361 - RNA, 19 nt, Artificial Sequence
  Description of Artificial Sequence: Synthetic oligonucleotide
  Sense strand starting at position 1333 of SEQ ID NO: 1560473
gccagaaaguccuagcacu

SEQ ID NO: 1602362 - RNA, 19 nt, Artificial Sequence
  Description of Artificial Sequence: Synthetic oligonucleotide
  Antisense strand to SEQ ID NO: 1602361
agugcuaggacuuucuggc

SEQ ID NO: 1602363 - RNA, 19 nt, Artificial Sequence
  Description of Artificial Sequence: Synthetic oligonucleotide
  Sense strand starting at position 1988 of SEQ ID NO: 1560473
gaaagcgggcucgaagauu

SEQ ID NO: 1602364 - RNA, 19 nt, Artificial Sequence
  Description of Artificial Sequence: Synthetic oligonucleotide
  Antisense strand to SEQ ID NO: 1602363
aaucuucgagcccgcuuuc

SEQ ID NO: 1602365 - RNA, 19 nt, Artificial Sequence
  Description of Artificial Sequence: Synthetic oligonucleotide
  Sense strand starting at position 2969 of SEQ ID NO: 1560473
agggcuccuuaguuagaga

SEQ ID NO: 1602366 - RNA, 19 nt, Artificial Sequence
  Description of Artificial Sequence: Synthetic oligonucleotide
  Antisense strand to SEQ ID NO: 1602365
ucucuaacuaaggagcccu

SEQ ID NO: 1602367 - RNA, 19 nt, Artificial Sequence
  Description of Artificial Sequence: Synthetic oligonucleotide
  Sense strand starting at position 3014 of SEQ ID NO: 1560473
cagggucuuugaggaaucu

SEQ ID NO: 1602368 - RNA, 19 nt, Artificial Sequence
  Description of Artificial Sequence: Synthetic oligonucleotide
  Antisense strand to SEQ ID NO: 1602367
agauuccucaaagacccug

SEQ ID NO: 1602369 - RNA, 19 nt, Artificial Sequence
  Description of Artificial Sequence: Synthetic oligonucleotide
  Sense strand starting at position 3181 of SEQ ID NO: 1560473
cggaguuccucucuggcaa

SEQ ID NO: 1602370 - RNA, 19 nt, Artificial Sequence
  Description of Artificial Sequence: Synthetic oligonucleotide
  Antisense strand to SEQ ID NO: 1602369
uugccagagaggaacuccg

SEQ ID NO: 1602371 - RNA, 19 nt, Artificial Sequence
  Description of Artificial Sequence: Synthetic oligonucleotide
  Sense strand starting at position 3182 of SEQ ID NO: 1560473
ggaguuccucucuggcaag

SEQ ID NO: 1602372 - RNA, 19 nt, Artificial Sequence
  Description of Artificial Sequence: Synthetic oligonucleotide
  Antisense strand to SEQ ID NO: 1602371
cuugccagagaggaacucc

SEQ ID NO: 1602373 - RNA, 19 nt, Artificial Sequence
  Description of Artificial Sequence: Synthetic oligonucleotide
  Sense strand starting at position 3440 of SEQ ID NO: 1560473
cugagugugcugugagcuu

SEQ ID NO: 1602374 - RNA, 19 nt, Artificial Sequence
  Description of Artificial Sequence: Synthetic oligonucleotide
  Antisense strand to SEQ ID NO: 1602373
aagcucacagcacacucag

SEQ ID NO: 1602375 - RNA, 19 nt, Artificial Sequence
  Description of Artificial Sequence: Synthetic oligonucleotide
  Sense strand starting at position 3449 of SEQ ID NO: 1560473
cugugagcuugcuguguga

SEQ ID NO: 1602376 - RNA, 19 nt, Artificial Sequence
  Description of Artificial Sequence: Synthetic oligonucleotide
  Antisense strand to SEQ ID NO: 1602375
ucacacagcaagcucacag

SEQ ID NO: 1602377 - RNA, 19 nt, Artificial Sequence
  Description of Artificial Sequence: Synthetic oligonucleotide
  Sense strand starting at position 3499 of SEQ ID NO: 1560473
ugguguaugcacugugauu

SEQ ID NO: 1602378 - RNA, 19 nt, Artificial Sequence
  Description of Artificial Sequence: Synthetic oligonucleotide
  Antisense strand to SEQ ID NO: 1602377
aaucacagugcauacacca

SEQ ID NO: 1602379 - RNA, 19 nt, Artificial Sequence
  Description of Artificial Sequence: Synthetic oligonucleotide
  Sense strand starting at position 3501 of SEQ ID NO: 1560473
guguaugcacugugauuau

SEQ ID NO: 1602380 - RNA, 19 nt, Artificial Sequence
  Description of Artificial Sequence: Synthetic oligonucleotide
  Antisense strand to SEQ ID NO: 1602379
auaaucacagugcauacac

SEQ ID NO: 1602381 - RNA, 19 nt, Artificial Sequence
  Description of Artificial Sequence: Synthetic oligonucleotide
  Sense strand starting at position 3505 of SEQ ID NO: 1560473
augcacugugauuauuaau

SEQ ID NO: 1602382 - RNA, 19 nt, Artificial Sequence
  Description of Artificial Sequence: Synthetic oligonucleotide
  Antisense strand to SEQ ID NO: 1602381
auuaauaaucacagugcau

SEQ ID NO: 1602383 - RNA, 19 nt, Artificial Sequence
  Description of Artificial Sequence: Synthetic oligonucleotide
  Sense strand starting at position 3583 of SEQ ID NO: 1560473
aggccacaucugugucauu

SEQ ID NO: 1602384 - RNA, 19 nt, Artificial Sequence
  Description of Artificial Sequence: Synthetic oligonucleotide
  Antisense strand to SEQ ID NO: 1602383
aaugacacagauguggccu

SEQ ID NO: 1602385 - RNA, 19 nt, Artificial Sequence
  Description of Artificial Sequence: Synthetic oligonucleotide
  Sense strand starting at position 3759 of SEQ ID NO: 1560473
ucaucagagugcugugaga

SEQ ID NO: 1602386 - RNA, 19 nt, Artificial Sequence
  Description of Artificial Sequence: Synthetic oligonucleotide
  Antisense strand to SEQ ID NO: 1602385
ucucacagcacucugauga

SEQ ID NO: 1602387 - RNA, 19 nt, Artificial Sequence
  Description of Artificial Sequence: Synthetic oligonucleotide
  Sense strand starting at position 3761 of SEQ ID NO: 1560473
aucagagugcugugagaau

SEQ ID NO: 1602388 - RNA, 19 nt, Artificial Sequence
  Description of Artificial Sequence: Synthetic oligonucleotide
  Antisense strand to SEQ ID NO: 1602387
auucucacagcacucugau

SEQ ID NO: 1602389 - RNA, 19 nt, Artificial Sequence
  Description of Artificial Sequence: Synthetic oligonucleotide
  Sense strand starting at position 3796 of SEQ ID NO: 1560473
uccuuagaauagugcuuga

SEQ ID NO: 1602390 - RNA, 19 nt, Artificial Sequence
  Description of Artificial Sequence: Synthetic oligonucleotide
  Antisense strand to SEQ ID NO: 1602389
ucaagcacuauucuaagga

SEQ ID NO: 1602391 - RNA, 19 nt, Artificial Sequence
  Description of Artificial Sequence: Synthetic oligonucleotide
  Sense strand starting at position 3799 of SEQ ID NO: 1560473
uuagaauagugcuugaucu

SEQ ID NO: 1602392 - RNA, 19 nt, Artificial Sequence
  Description of Artificial Sequence: Synthetic oligonucleotide
  Antisense strand to SEQ ID NO: 1602391
agaucaagcacuauucuaa

SEQ ID NO: 1602393 - RNA, 19 nt, Artificial Sequence
  Description of Artificial Sequence: Synthetic oligonucleotide
  Sense strand starting at position 3800 of SEQ ID NO: 1560473
uagaauagugcuugaucua

SEQ ID NO: 1602394 - RNA, 19 nt, Artificial Sequence
  Description of Artificial Sequence: Synthetic oligonucleotide
  Antisense strand to SEQ ID NO: 1602393
uagaucaagcacuauucua

SEQ ID NO: 1602395 - RNA, 19 nt, Artificial Sequence
  Description of Artificial Sequence: Synthetic oligonucleotide
  Sense strand starting at position 3807 of SEQ ID NO: 1560473
gugcuugaucuauaaaugg

SEQ ID NO: 1602396 - RNA, 19 nt, Artificial Sequence
  Description of Artificial Sequence: Synthetic oligonucleotide
  Antisense strand to SEQ ID NO: 1602395
ccauuuauagaucaagcac

SEQ ID NO: 1602397 - RNA, 19 nt, Artificial Sequence
  Description of Artificial Sequence: Synthetic oligonucleotide
  Sense strand starting at position 3877 of SEQ ID NO: 1560473
ggcuauaaagccuaauggu

SEQ ID NO: 1602398 - RNA, 19 nt, Artificial Sequence
  Description of Artificial Sequence: Synthetic oligonucleotide
  Antisense strand to SEQ ID NO: 1602397
accauuaggcuuuauagcc

SEQ ID NO: 1602399 - RNA, 19 nt, Artificial Sequence
  Description of Artificial Sequence: Synthetic oligonucleotide
  Sense strand starting at position 316 of SEQ ID NO: 1560474
caucgucuuccucauggga

SEQ ID NO: 1602400 - RNA, 19 nt, Artificial Sequence
  Description of Artificial Sequence: Synthetic oligonucleotide
  Antisense strand to SEQ ID NO: 1602399
ucccaugaggaagacgaug

SEQ ID NO: 1602401 - RNA, 19 nt, Artificial Sequence
  Description of Artificial Sequence: Synthetic oligonucleotide
  Sense strand starting at position 387 of SEQ ID NO: 1560474
uggcuucuauccuugacca

SEQ ID NO: 1602402 - RNA, 19 nt, Artificial Sequence
  Description of Artificial Sequence: Synthetic oligonucleotide
  Antisense strand to SEQ ID NO: 1602401
uggucaaggauagaagcca

SEQ ID NO: 1602403 - RNA, 19 nt, Artificial Sequence
  Description of Artificial Sequence: Synthetic oligonucleotide
  Sense strand starting at position 421 of SEQ ID NO: 1560474
ggugauggcucaucucuuu

SEQ ID NO: 1602404 - RNA, 19 nt, Artificial Sequence
  Description of Artificial Sequence: Synthetic oligonucleotide
  Antisense strand to SEQ ID NO: 1602403
aaagagaugagccaucacc

SEQ ID NO: 1602405 - RNA, 19 nt, Artificial Sequence
  Description of Artificial Sequence: Synthetic oligonucleotide
  Sense strand starting at position 424 of SEQ ID NO: 1560474
gauggcucaucucuuugau

SEQ ID NO: 1602406 - RNA, 19 nt, Artificial Sequence
  Description of Artificial Sequence: Synthetic oligonucleotide
  Antisense strand to SEQ ID NO: 1602405
aucaaagagaugagccauc

SEQ ID NO: 1602407 - RNA, 19 nt, Artificial Sequence
  Description of Artificial Sequence: Synthetic oligonucleotide
  Sense strand starting at position 427 of SEQ ID NO: 1560474
ggcucaucucuuugaugga

SEQ ID NO: 1602408 - RNA, 19 nt, Artificial Sequence
  Description of Artificial Sequence: Synthetic oligonucleotide
  Antisense strand to SEQ ID NO: 1602407
uccaucaaagagaugagcc

SEQ ID NO: 1602409 - RNA, 19 nt, Artificial Sequence
  Description of Artificial Sequence: Synthetic oligonucleotide
  Sense strand starting at position 804 of SEQ ID NO: 1560474
ugguguucaccugagacag

SEQ ID NO: 1602410 - RNA, 19 nt, Artificial Sequence
  Description of Artificial Sequence: Synthetic oligonucleotide
  Antisense strand to SEQ ID NO: 1602409
cugucucaggugaacacca

SEQ ID NO: 1602411 - RNA, 19 nt, Artificial Sequence
  Description of Artificial Sequence: Synthetic oligonucleotide
  Sense strand starting at position 867 of SEQ ID NO: 1560474
uguccauacucaguggaga

SEQ ID NO: 1602412 - RNA, 19 nt, Artificial Sequence
  Description of Artificial Sequence: Synthetic oligonucleotide
  Antisense strand to SEQ ID NO: 1602411
ucuccacugaguauggaca

SEQ ID NO: 1602413 - RNA, 19 nt, Artificial Sequence
  Description of Artificial Sequence: Synthetic oligonucleotide
  Sense strand starting at position 950 of SEQ ID NO: 1560474
guguccaucugagacaucu

SEQ ID NO: 1602414 - RNA, 19 nt, Artificial Sequence
  Description of Artificial Sequence: Synthetic oligonucleotide
  Antisense strand to SEQ ID NO: 1602413
agaugucucagauggacac

SEQ ID NO: 1602415 - RNA, 19 nt, Artificial Sequence
  Description of Artificial Sequence: Synthetic oligonucleotide
  Sense strand starting at position 1114 of SEQ ID NO: 1560474
gaugaugguguccaucuga

SEQ ID NO: 1602416 - RNA, 19 nt, Artificial Sequence
  Description of Artificial Sequence: Synthetic oligonucleotide
  Antisense strand to SEQ ID NO: 1602415
ucagauggacaccaucauc

SEQ ID NO: 1602417 - RNA, 19 nt, Artificial Sequence
  Description of Artificial Sequence: Synthetic oligonucleotide
  Sense strand starting at position 1119 of SEQ ID NO: 1560474
ugguguccaucugagacau

SEQ ID NO: 1602418 - RNA, 19 nt, Artificial Sequence
  Description of Artificial Sequence: Synthetic oligonucleotide
  Antisense strand to SEQ ID NO: 1602417
augucucagauggacacca

SEQ ID NO: 1602419 - RNA, 19 nt, Artificial Sequence
  Description of Artificial Sequence: Synthetic oligonucleotide
  Sense strand starting at position 1267 of SEQ ID NO: 1560474
gguguccaugccugaggau

SEQ ID NO: 1602420 - RNA, 19 nt, Artificial Sequence
  Description of Artificial Sequence: Synthetic oligonucleotide
  Antisense strand to SEQ ID NO: 1602419
auccucaggcauggacacc

SEQ ID NO: 1602421 - RNA, 19 nt, Artificial Sequence
  Description of Artificial Sequence: Synthetic oligonucleotide
  Sense strand starting at position 1290 of SEQ ID NO: 1560474
uggugaugcucacuggaca

SEQ ID NO: 1602422 - RNA, 19 nt, Artificial Sequence
  Description of Artificial Sequence: Synthetic oligonucleotide
  Antisense strand to SEQ ID NO: 1602421
uguccagugagcaucacca

SEQ ID NO: 1602423 - RNA, 19 nt, Artificial Sequence
  Description of Artificial Sequence: Synthetic oligonucleotide
  Sense strand starting at position 1317 of SEQ ID NO: 1560474
uccucauccucgucuugau

SEQ ID NO: 1602424 - RNA, 19 nt, Artificial Sequence
  Description of Artificial Sequence: Synthetic oligonucleotide
  Antisense strand to SEQ ID NO: 1602423
aucaagacgaggaugagga

SEQ ID NO: 1602425 - RNA, 19 nt, Artificial Sequence
  Description of Artificial Sequence: Synthetic oligonucleotide
  Sense strand starting at position 1428 of SEQ ID NO: 1560474
ccaccaugcucugcaaaga

SEQ ID NO: 1602426 - RNA, 19 nt, Artificial Sequence
  Description of Artificial Sequence: Synthetic oligonucleotide
  Antisense strand to SEQ ID NO: 1602425
ucuuugcagagcauggugg

SEQ ID NO: 1602427 - RNA, 19 nt, Artificial Sequence
  Description of Artificial Sequence: Synthetic oligonucleotide
  Sense strand starting at position 1503 of SEQ ID NO: 1560474
gggaguaggugcccauauu

SEQ ID NO: 1602428 - RNA, 19 nt, Artificial Sequence
  Description of Artificial Sequence: Synthetic oligonucleotide
  Antisense strand to SEQ ID NO: 1602427
aauaugggcaccuacuccc

SEQ ID NO: 1602429 - RNA, 19 nt, Artificial Sequence
  Description of Artificial Sequence: Synthetic oligonucleotide
  Sense strand starting at position 1512 of SEQ ID NO: 1560474
ugcccauauuccuuggaga

SEQ ID NO: 1602430 - RNA, 19 nt, Artificial Sequence
  Description of Artificial Sequence: Synthetic oligonucleotide
  Antisense strand to SEQ ID NO: 1602429
ucuccaaggaauaugggca

SEQ ID NO: 1602431 - RNA, 19 nt, Artificial Sequence
  Description of Artificial Sequence: Synthetic oligonucleotide
  Sense strand starting at position 1513 of SEQ ID NO: 1560474
gcccauauuccuuggagac

SEQ ID NO: 1602432 - RNA, 19 nt, Artificial Sequence
  Description of Artificial Sequence: Synthetic oligonucleotide
  Antisense strand to SEQ ID NO: 1602431
gucuccaaggaauaugggc

SEQ ID NO: 1602433 - RNA, 19 nt, Artificial Sequence
  Description of Artificial Sequence: Synthetic oligonucleotide
  Sense strand starting at position 1514 of SEQ ID NO: 1560474
cccauauuccuuggagaca

SEQ ID NO: 1602434 - RNA, 19 nt, Artificial Sequence
  Description of Artificial Sequence: Synthetic oligonucleotide
  Antisense strand to SEQ ID NO: 1602433
ugucuccaaggaauauggg

SEQ ID NO: 1602435 - RNA, 19 nt, Artificial Sequence
  Description of Artificial Sequence: Synthetic oligonucleotide
  Sense strand starting at position 1515 of SEQ ID NO: 1560474
ccauauuccuuggagacau

SEQ ID NO: 1602436 - RNA, 19 nt, Artificial Sequence
  Description of Artificial Sequence: Synthetic oligonucleotide
  Antisense strand to SEQ ID NO: 1602435
augucuccaaggaauaugg

SEQ ID NO: 1602437 - RNA, 19 nt, Artificial Sequence
  Description of Artificial Sequence: Synthetic oligonucleotide
  Sense strand starting at position 1574 of SEQ ID NO: 1560474
augcccauucucuguggaa

SEQ ID NO: 1602438 - RNA, 19 nt, Artificial Sequence
  Description of Artificial Sequence: Synthetic oligonucleotide
  Antisense strand to SEQ ID NO: 1602437
uuccacagagaaugggcau

SEQ ID NO: 1602439 - RNA, 19 nt, Artificial Sequence
  Description of Artificial Sequence: Synthetic oligonucleotide
  Sense strand starting at position 1575 of SEQ ID NO: 1560474
ugcccauucucuguggaaa

SEQ ID NO: 1602440 - RNA, 19 nt, Artificial Sequence
  Description of Artificial Sequence: Synthetic oligonucleotide
  Antisense strand to SEQ ID NO: 1602439
uuuccacagagaaugggca

SEQ ID NO: 1602441 - RNA, 19 nt, Artificial Sequence
  Description of Artificial Sequence: Synthetic oligonucleotide
  Sense strand starting at position 1576 of SEQ ID NO: 1560474
gcccauucucuguggaaac

SEQ ID NO: 1602442 - RNA, 19 nt, Artificial Sequence
  Description of Artificial Sequence: Synthetic oligonucleotide
  Antisense strand to SEQ ID NO: 1602441
guuuccacagagaaugggc

SEQ ID NO: 1602443 - RNA, 19 nt, Artificial Sequence
  Description of Artificial Sequence: Synthetic oligonucleotide
  Sense strand starting at position 1578 of SEQ ID NO: 1560474
ccauucucuguggaaacau

SEQ ID NO: 1602444 - RNA, 19 nt, Artificial Sequence
  Description of Artificial Sequence: Synthetic oligonucleotide
  Antisense strand to SEQ ID NO: 1602443
auguuuccacagagaaugg

SEQ ID NO: 1602445 - RNA, 19 nt, Artificial Sequence
  Description of Artificial Sequence: Synthetic oligonucleotide
  Sense strand starting at position 1587 of SEQ ID NO: 1560474
guggaaacauccuuguucu

SEQ ID NO: 1602446 - RNA, 19 nt, Artificial Sequence
  Description of Artificial Sequence: Synthetic oligonucleotide
  Antisense strand to SEQ ID NO: 1602445
agaacaaggauguuuccac

SEQ ID NO: 1602447 - RNA, 19 nt, Artificial Sequence
  Description of Artificial Sequence: Synthetic oligonucleotide
  Sense strand starting at position 1588 of SEQ ID NO: 1560474
uggaaacauccuuguucuc

SEQ ID NO: 1602448 - RNA, 19 nt, Artificial Sequence
  Description of Artificial Sequence: Synthetic oligonucleotide
  Antisense strand to SEQ ID NO: 1602447
gagaacaaggauguuucca

SEQ ID NO: 1602449 - RNA, 19 nt, Artificial Sequence
  Description of Artificial Sequence: Synthetic oligonucleotide
  Sense strand starting at position 1650 of SEQ ID NO: 1560474
gcugaugccuccucggaga

SEQ ID NO: 1602450 - RNA, 19 nt, Artificial Sequence
  Description of Artificial Sequence: Synthetic oligonucleotide
  Antisense strand to SEQ ID NO: 1602449
ucuccgaggaggcaucagc

SEQ ID NO: 1602451 - RNA, 19 nt, Artificial Sequence
  Description of Artificial Sequence: Synthetic oligonucleotide
  Sense strand starting at position 2083 of SEQ ID NO: 1560474
acucucagcccugaguuau

SEQ ID NO: 1602452 - RNA, 19 nt, Artificial Sequence
  Description of Artificial Sequence: Synthetic oligonucleotide
  Antisense strand to SEQ ID NO: 1602451
auaacucagggcugagagu

SEQ ID NO: 1602453 - RNA, 19 nt, Artificial Sequence
  Description of Artificial Sequence: Synthetic oligonucleotide
  Sense strand starting at position 2094 of SEQ ID NO: 1560474
ugaguuauucugggucagu

SEQ ID NO: 1602454 - RNA, 19 nt, Artificial Sequence
  Description of Artificial Sequence: Synthetic oligonucleotide
  Antisense strand to SEQ ID NO: 1602453
acugacccagaauaacuca

SEQ ID NO: 1602455 - RNA, 19 nt, Artificial Sequence
  Description of Artificial Sequence: Synthetic oligonucleotide
  Sense strand starting at position 2095 of SEQ ID NO: 1560474
gaguuauucugggucaguc

SEQ ID NO: 1602456 - RNA, 19 nt, Artificial Sequence
  Description of Artificial Sequence: Synthetic oligonucleotide
  Antisense strand to SEQ ID NO: 1602455
gacugacccagaauaacuc

SEQ ID NO: 1602457 - RNA, 19 nt, Artificial Sequence
  Description of Artificial Sequence: Synthetic oligonucleotide
  Sense strand starting at position 2195 of SEQ ID NO: 1560474
ggccaagggacuugacuuu

SEQ ID NO: 1602458 - RNA, 19 nt, Artificial Sequence
  Description of Artificial Sequence: Synthetic oligonucleotide
  Antisense strand to SEQ ID NO: 1602457
aaagucaagucccuuggcc

SEQ ID NO: 1602459 - RNA, 19 nt, Artificial Sequence
  Description of Artificial Sequence: Synthetic oligonucleotide
  Sense strand starting at position 2367 of SEQ ID NO: 1560474
gguguuuccagcuggaaug

SEQ ID NO: 1602460 - RNA, 19 nt, Artificial Sequence
  Description of Artificial Sequence: Synthetic oligonucleotide
  Antisense strand to SEQ ID NO: 1602459
cauuccagcuggaaacacc

SEQ ID NO: 1602461 - RNA, 19 nt, Artificial Sequence
  Description of Artificial Sequence: Synthetic oligonucleotide
  Sense strand starting at position 2368 of SEQ ID NO: 1560474
guguuuccagcuggaauga

SEQ ID NO: 1602462 - RNA, 19 nt, Artificial Sequence
  Description of Artificial Sequence: Synthetic oligonucleotide
  Antisense strand to SEQ ID NO: 1602461
ucauuccagcuggaaacac

SEQ ID NO: 1602463 - RNA, 19 nt, Artificial Sequence
  Description of Artificial Sequence: Synthetic oligonucleotide
  Sense strand starting at position 2369 of SEQ ID NO: 1560474
uguuuccagcuggaaugau

SEQ ID NO: 1602464 - RNA, 19 nt, Artificial Sequence
  Description of Artificial Sequence: Synthetic oligonucleotide
  Antisense strand to SEQ ID NO: 1602463
aucauuccagcuggaaaca

SEQ ID NO: 1602465 - RNA, 19 nt, Artificial Sequence
  Description of Artificial Sequence: Synthetic oligonucleotide
  Sense strand starting at position 2383 of SEQ ID NO: 1560474
augauacgugcuggugaga

SEQ ID NO: 1602466 - RNA, 19 nt, Artificial Sequence
  Description of Artificial Sequence: Synthetic oligonucleotide
  Antisense strand to SEQ ID NO: 1602465
ucucaccagcacguaucau

SEQ ID NO: 1602467 - RNA, 19 nt, Artificial Sequence
  Description of Artificial Sequence: Synthetic oligonucleotide
  Sense strand starting at position 2402 of SEQ ID NO: 1560474
gagugaugucaguauugag

SEQ ID NO: 1602468 - RNA, 19 nt, Artificial Sequence
  Description of Artificial Sequence: Synthetic oligonucleotide
  Antisense strand to SEQ ID NO: 1602467
cucaauacugacaucacuc

SEQ ID NO: 1602469 - RNA, 19 nt, Artificial Sequence
  Description of Artificial Sequence: Synthetic oligonucleotide
  Sense strand starting at position 2512 of SEQ ID NO: 1560474
cuaggccagggcuauaaau

SEQ ID NO: 1602470 - RNA, 19 nt, Artificial Sequence
  Description of Artificial Sequence: Synthetic oligonucleotide
  Antisense strand to SEQ ID NO: 1602469
auuuauagcccuggccuag

SEQ ID NO: 1602471 - RNA, 19 nt, Artificial Sequence
  Description of Artificial Sequence: Synthetic oligonucleotide
  Sense strand starting at position 2618 of SEQ ID NO: 1560474
cgucucugugugucaguau

SEQ ID NO: 1602472 - RNA, 19 nt, Artificial Sequence
  Description of Artificial Sequence: Synthetic oligonucleotide
  Antisense strand to SEQ ID NO: 1602471
auacugacacacagagacg

SEQ ID NO: 1602473 - RNA, 19 nt, Artificial Sequence
  Description of Artificial Sequence: Synthetic oligonucleotide
  Sense strand starting at position 2629 of SEQ ID NO: 1560474
gucaguauuuccuacuccu

SEQ ID NO: 1602474 - RNA, 19 nt, Artificial Sequence
  Description of Artificial Sequence: Synthetic oligonucleotide
  Antisense strand to SEQ ID NO: 1602473
aggaguaggaaauacugac

SEQ ID NO: 1602475 - RNA, 19 nt, Artificial Sequence
  Description of Artificial Sequence: Synthetic oligonucleotide
  Sense strand starting at position 2740 of SEQ ID NO: 1560474
gucccuccuccaugggauu

SEQ ID NO: 1602476 - RNA, 19 nt, Artificial Sequence
  Description of Artificial Sequence: Synthetic oligonucleotide
  Antisense strand to SEQ ID NO: 1602475
aaucccauggaggagggac

SEQ ID NO: 1602477 - RNA, 19 nt, Artificial Sequence
  Description of Artificial Sequence: Synthetic oligonucleotide
  Sense strand starting at position 2785 of SEQ ID NO: 1560474
gucccacucuuaucuuagu

SEQ ID NO: 1602478 - RNA, 19 nt, Artificial Sequence
  Description of Artificial Sequence: Synthetic oligonucleotide
  Antisense strand to SEQ ID NO: 1602477
acuaagauaagagugggac

SEQ ID NO: 1602479 - RNA, 19 nt, Artificial Sequence
  Description of Artificial Sequence: Synthetic oligonucleotide
  Sense strand starting at position 7 of SEQ ID NO: 1560475
ccagauggagcggaucauu

SEQ ID NO: 1602480 - RNA, 19 nt, Artificial Sequence
  Description of Artificial Sequence: Synthetic oligonucleotide
  Antisense strand to SEQ ID NO: 1602479
aaugauccgcuccaucugg

SEQ ID NO: 1602481 - RNA, 19 nt, Artificial Sequence
  Description of Artificial Sequence: Synthetic oligonucleotide
  Sense strand starting at position 90 of SEQ ID NO: 1560475
ggugucuccuccugacaac

SEQ ID NO: 1602482 - RNA, 19 nt, Artificial Sequence
  Description of Artificial Sequence: Synthetic oligonucleotide
  Antisense strand to SEQ ID NO: 1602481
guugucaggaggagacacc

SEQ ID NO: 1602483 - RNA, 19 nt, Artificial Sequence
  Description of Artificial Sequence: Synthetic oligonucleotide
  Sense strand starting at position 1006 of SEQ ID NO: 1560475
gagagauguauggguggau

SEQ ID NO: 1602484 - RNA, 19 nt, Artificial Sequence
  Description of Artificial Sequence: Synthetic oligonucleotide
  Antisense strand to SEQ ID NO: 1602483
auccacccauacaucucuc

SEQ ID NO: 1602485 - RNA, 19 nt, Artificial Sequence
  Description of Artificial Sequence: Synthetic oligonucleotide
  Sense strand starting at position 1007 of SEQ ID NO: 1560475
agagauguauggguggaua

SEQ ID NO: 1602486 - RNA, 19 nt, Artificial Sequence
  Description of Artificial Sequence: Synthetic oligonucleotide
  Antisense strand to SEQ ID NO: 1602485
uauccacccauacaucucu

SEQ ID NO: 1602487 - RNA, 19 nt, Artificial Sequence
  Description of Artificial Sequence: Synthetic oligonucleotide
  Sense strand starting at position 1009 of SEQ ID NO: 1560475
agauguauggguggauaga

SEQ ID NO: 1602488 - RNA, 19 nt, Artificial Sequence
  Description of Artificial Sequence: Synthetic oligonucleotide
  Antisense strand to SEQ ID NO: 1602487
ucuauccacccauacaucu

SEQ ID NO: 1602489 - RNA, 19 nt, Artificial Sequence
  Description of Artificial Sequence: Synthetic oligonucleotide
  Sense strand starting at position 1029 of SEQ ID NO: 1560475
ggaugaguggauggaugua

SEQ ID NO: 1602490 - RNA, 19 nt, Artificial Sequence
  Description of Artificial Sequence: Synthetic oligonucleotide
  Antisense strand to SEQ ID NO: 1602489
uacauccauccacucaucc

SEQ ID NO: 1602491 - RNA, 19 nt, Artificial Sequence
  Description of Artificial Sequence: Synthetic oligonucleotide
  Sense strand starting at position 1153 of SEQ ID NO: 1560475
augaguggguggccagaua

SEQ ID NO: 1602492 - RNA, 19 nt, Artificial Sequence
  Description of Artificial Sequence: Synthetic oligonucleotide
  Antisense strand to SEQ ID NO: 1602491
uaucuggccacccacucau

SEQ ID NO: 1602493 - RNA, 19 nt, Artificial Sequence
  Description of Artificial Sequence: Synthetic oligonucleotide
  Sense strand starting at position 1361 of SEQ ID NO: 1560475
ggccgaaaugcgggagaaa

SEQ ID NO: 1602494 - RNA, 19 nt, Artificial Sequence
  Description of Artificial Sequence: Synthetic oligonucleotide
  Antisense strand to SEQ ID NO: 1602493
uuucucccgcauuucggcc

SEQ ID NO: 1602495 - RNA, 19 nt, Artificial Sequence
  Description of Artificial Sequence: Synthetic oligonucleotide
  Sense strand starting at position 1362 of SEQ ID NO: 1560475
gccgaaaugcgggagaaau

SEQ ID NO: 1602496 - RNA, 19 nt, Artificial Sequence
  Description of Artificial Sequence: Synthetic oligonucleotide
  Antisense strand to SEQ ID NO: 1602495
auuucucccgcauuucggc

SEQ ID NO: 1602497 - RNA, 19 nt, Artificial Sequence
  Description of Artificial Sequence: Synthetic oligonucleotide
  Sense strand starting at position 2176 of SEQ ID NO: 1560475
ccuugcgucgggcaagaaa

SEQ ID NO: 1602498 - RNA, 19 nt, Artificial Sequence
  Description of Artificial Sequence: Synthetic oligonucleotide
  Antisense strand to SEQ ID NO: 1602497
uuucuugcccgacgcaagg

SEQ ID NO: 1602499 - RNA, 19 nt, Artificial Sequence
  Description of Artificial Sequence: Synthetic oligonucleotide
  Sense strand starting at position 2289 of SEQ ID NO: 1560475
cggguguggucgcugauga

SEQ ID NO: 1602500 - RNA, 19 nt, Artificial Sequence
  Description of Artificial Sequence: Synthetic oligonucleotide
  Antisense strand to SEQ ID NO: 1602499
ucaucagcgaccacacccg

SEQ ID NO: 1602501 - RNA, 19 nt, Artificial Sequence
  Description of Artificial Sequence: Synthetic oligonucleotide
  Sense strand starting at position 2290 of SEQ ID NO: 1560475
ggguguggucgcugaugag

SEQ ID NO: 1602502 - RNA, 19 nt, Artificial Sequence
  Description of Artificial Sequence: Synthetic oligonucleotide
  Antisense strand to SEQ ID NO: 1602501
cucaucagcgaccacaccc

SEQ ID NO: 1602503 - RNA, 19 nt, Artificial Sequence
  Description of Artificial Sequence: Synthetic oligonucleotide
  Sense strand starting at position 2563 of SEQ ID NO: 1560475
ucaguugucuucucuguga

SEQ ID NO: 1602504 - RNA, 19 nt, Artificial Sequence
  Description of Artificial Sequence: Synthetic oligonucleotide
  Antisense strand to SEQ ID NO: 1602503
ucacagagaagacaacuga

SEQ ID NO: 1602505 - RNA, 19 nt, Artificial Sequence
  Description of Artificial Sequence: Synthetic oligonucleotide
  Sense strand starting at position 2566 of SEQ ID NO: 1560475
guugucuucucugugaggu

SEQ ID NO: 1602506 - RNA, 19 nt, Artificial Sequence
  Description of Artificial Sequence: Synthetic oligonucleotide
  Antisense strand to SEQ ID NO: 1602505
accucacagagaagacaac

SEQ ID NO: 1602507 - RNA, 19 nt, Artificial Sequence
  Description of Artificial Sequence: Synthetic oligonucleotide
  Sense strand starting at position 2572 of SEQ ID NO: 1560475
uucucugugaggugggaau

SEQ ID NO: 1602508 - RNA, 19 nt, Artificial Sequence
  Description of Artificial Sequence: Synthetic oligonucleotide
  Antisense strand to SEQ ID NO: 1602507
auucccaccucacagagaa

SEQ ID NO: 1602509 - RNA, 19 nt, Artificial Sequence
  Description of Artificial Sequence: Synthetic oligonucleotide
  Sense strand starting at position 2582 of SEQ ID NO: 1560475
ggugggaaugccggugaau

SEQ ID NO: 1602510 - RNA, 19 nt, Artificial Sequence
  Description of Artificial Sequence: Synthetic oligonucleotide
  Antisense strand to SEQ ID NO: 1602509
auucaccggcauucccacc

SEQ ID NO: 1602511 - RNA, 19 nt, Artificial Sequence
  Description of Artificial Sequence: Synthetic oligonucleotide
  Sense strand starting at position 2817 of SEQ ID NO: 1560475
cugccuugcacguuguaaa

SEQ ID NO: 1602512 - RNA, 19 nt, Artificial Sequence
  Description of Artificial Sequence: Synthetic oligonucleotide
  Antisense strand to SEQ ID NO: 1602511
uuuacaacgugcaaggcag

SEQ ID NO: 1602513 - RNA, 19 nt, Artificial Sequence
  Description of Artificial Sequence: Synthetic oligonucleotide
  Sense strand starting at position 2834 of SEQ ID NO: 1560475
aaacgagugcuguauauaa

SEQ ID NO: 1602514 - RNA, 19 nt, Artificial Sequence
  Description of Artificial Sequence: Synthetic oligonucleotide
  Antisense strand to SEQ ID NO: 1602513
uuauauacagcacucguuu

SEQ ID NO: 1602515 - RNA, 19 nt, Artificial Sequence
  Description of Artificial Sequence: Synthetic oligonucleotide
  Sense strand starting at position 2836 of SEQ ID NO: 1560475
acgagugcuguauauaaua

SEQ ID NO: 1602516 - RNA, 19 nt, Artificial Sequence
  Description of Artificial Sequence: Synthetic oligonucleotide
  Antisense strand to SEQ ID NO: 1602515
uauuauauacagcacucgu

SEQ ID NO: 1602517 - RNA, 19 nt, Artificial Sequence
  Description of Artificial Sequence: Synthetic oligonucleotide
  Sense strand starting at position 2959 of SEQ ID NO: 1560475
gucaguguccgcugagcuu

SEQ ID NO: 1602518 - RNA, 19 nt, Artificial Sequence
  Description of Artificial Sequence: Synthetic oligonucleotide
  Antisense strand to SEQ ID NO: 1602517
aagcucagcggacacugac

SEQ ID NO: 1602519 - RNA, 19 nt, Artificial Sequence
  Description of Artificial Sequence: Synthetic oligonucleotide
  Sense strand starting at position 3144 of SEQ ID NO: 1560475
guacgugugucagcagaca

SEQ ID NO: 1602520 - RNA, 19 nt, Artificial Sequence
  Description of Artificial Sequence: Synthetic oligonucleotide
  Antisense strand to SEQ ID NO: 1602519
ugucugcugacacacguac

SEQ ID NO: 1602521 - RNA, 19 nt, Artificial Sequence
  Description of Artificial Sequence: Synthetic oligonucleotide
  Sense strand starting at position 3248 of SEQ ID NO: 1560475
gcacgauguuguccuccau

SEQ ID NO: 1602522 - RNA, 19 nt, Artificial Sequence
  Description of Artificial Sequence: Synthetic oligonucleotide
  Antisense strand to SEQ ID NO: 1602521
auggaggacaacaucgugc

SEQ ID NO: 1602523 - RNA, 19 nt, Artificial Sequence
  Description of Artificial Sequence: Synthetic oligonucleotide
  Sense strand starting at position 3252 of SEQ ID NO: 1560475
gauguuguccuccauauug

SEQ ID NO: 1602524 - RNA, 19 nt, Artificial Sequence
  Description of Artificial Sequence: Synthetic oligonucleotide
  Antisense strand to SEQ ID NO: 1602523
caauauggaggacaacauc

SEQ ID NO: 1602525 - RNA, 19 nt, Artificial Sequence
  Description of Artificial Sequence: Synthetic oligonucleotide
  Sense strand starting at position 3254 of SEQ ID NO: 1560475
uguuguccuccauauugau

SEQ ID NO: 1602526 - RNA, 19 nt, Artificial Sequence
  Description of Artificial Sequence: Synthetic oligonucleotide
  Antisense strand to SEQ ID NO: 1602525
aucaauauggaggacaaca

SEQ ID NO: 1602527 - RNA, 19 nt, Artificial Sequence
  Description of Artificial Sequence: Synthetic oligonucleotide
  Sense strand starting at position 3266 of SEQ ID NO: 1560475
uauugaugcugaccugauu

SEQ ID NO: 1602528 - RNA, 19 nt, Artificial Sequence
  Description of Artificial Sequence: Synthetic oligonucleotide
  Antisense strand to SEQ ID NO: 1602527
aaucaggucagcaucaaua

SEQ ID NO: 1602529 - RNA, 19 nt, Artificial Sequence
  Description of Artificial Sequence: Synthetic oligonucleotide
  Sense strand starting at position 3400 of SEQ ID NO: 1560475
auccgugacuccuggaaug

SEQ ID NO: 1602530 - RNA, 19 nt, Artificial Sequence
  Description of Artificial Sequence: Synthetic oligonucleotide
  Antisense strand to SEQ ID NO: 1602529
cauuccaggagucacggau

SEQ ID NO: 1602531 - RNA, 19 nt, Artificial Sequence
  Description of Artificial Sequence: Synthetic oligonucleotide
  Sense strand starting at position 3402 of SEQ ID NO: 1560475
ccgugacuccuggaaugca

SEQ ID NO: 1602532 - RNA, 19 nt, Artificial Sequence
  Description of Artificial Sequence: Synthetic oligonucleotide
  Antisense strand to SEQ ID NO: 1602531
ugcauuccaggagucacgg

SEQ ID NO: 1602533 - RNA, 19 nt, Artificial Sequence
  Description of Artificial Sequence: Synthetic oligonucleotide
  Sense strand starting at position 3434 of SEQ ID NO: 1560475
guuucuuugcuuggaggga

SEQ ID NO: 1602534 - RNA, 19 nt, Artificial Sequence
  Description of Artificial Sequence: Synthetic oligonucleotide
  Antisense strand to SEQ ID NO: 1602533
ucccuccaagcaaagaaac

SEQ ID NO: 1602535 - RNA, 19 nt, Artificial Sequence
  Description of Artificial Sequence: Synthetic oligonucleotide
  Sense strand starting at position 3521 of SEQ ID NO: 1560475
acacgugucucuuagggau

SEQ ID NO: 1602536 - RNA, 19 nt, Artificial Sequence
  Description of Artificial Sequence: Synthetic oligonucleotide
  Antisense strand to SEQ ID NO: 1602535
aucccuaagagacacgugu

SEQ ID NO: 1602537 - RNA, 19 nt, Artificial Sequence
  Description of Artificial Sequence: Synthetic oligonucleotide
  Sense strand starting at position 3524 of SEQ ID NO: 1560475
cgugucucuuagggaucua

SEQ ID NO: 1602538 - RNA, 19 nt, Artificial Sequence
  Description of Artificial Sequence: Synthetic oligonucleotide
  Antisense strand to SEQ ID NO: 1602537
uagaucccuaagagacacg

SEQ ID NO: 1602539 - RNA, 19 nt, Artificial Sequence
  Description of Artificial Sequence: Synthetic oligonucleotide
  Sense strand starting at position 3525 of SEQ ID NO: 1560475
gugucucuuagggaucuaa

SEQ ID NO: 1602540 - RNA, 19 nt, Artificial Sequence
  Description of Artificial Sequence: Synthetic oligonucleotide
  Antisense strand to SEQ ID NO: 1602539
uuagaucccuaagagacac

SEQ ID NO: 1602541 - RNA, 19 nt, Artificial Sequence
  Description of Artificial Sequence: Synthetic oligonucleotide
  Sense strand starting at position 847 of SEQ ID NO: 1560476
cuuggauuccugggucuga

SEQ ID NO: 1602542 - RNA, 19 nt, Artificial Sequence
  Description of Artificial Sequence: Synthetic oligonucleotide
  Antisense strand to SEQ ID NO: 1602541
ucagacccaggaauccaag

SEQ ID NO: 1602543 - RNA, 19 nt, Artificial Sequence
  Description of Artificial Sequence: Synthetic oligonucleotide
  Sense strand starting at position 1124 of SEQ ID NO: 1560476
ucaccauccuugucgcaga

SEQ ID NO: 1602544 - RNA, 19 nt, Artificial Sequence
  Description of Artificial Sequence: Synthetic oligonucleotide
  Antisense strand to SEQ ID NO: 1602543
ucugcgacaaggaugguga

SEQ ID NO: 1602545 - RNA, 19 nt, Artificial Sequence
  Description of Artificial Sequence: Synthetic oligonucleotide
  Sense strand starting at position 1127 of SEQ ID NO: 1560476
ccauccuugucgcagauaa

SEQ ID NO: 1602546 - RNA, 19 nt, Artificial Sequence
  Description of Artificial Sequence: Synthetic oligonucleotide
  Antisense strand to SEQ ID NO: 1602545
uuaucugcgacaaggaugg

SEQ ID NO: 1602547 - RNA, 19 nt, Artificial Sequence
  Description of Artificial Sequence: Synthetic oligonucleotide
  Sense strand starting at position 1192 of SEQ ID NO: 1560476
cucuccgagccuugguuaa

SEQ ID NO: 1602548 - RNA, 19 nt, Artificial Sequence
  Description of Artificial Sequence: Synthetic oligonucleotide
  Antisense strand to SEQ ID NO: 1602547
uuaaccaaggcucggagag

SEQ ID NO: 1602549 - RNA, 19 nt, Artificial Sequence
  Description of Artificial Sequence: Synthetic oligonucleotide
  Sense strand starting at position 1302 of SEQ ID NO: 1560476
ggcagacgccuugacacau

SEQ ID NO: 1602550 - RNA, 19 nt, Artificial Sequence
  Description of Artificial Sequence: Synthetic oligonucleotide
  Antisense strand to SEQ ID NO: 1602549
augugucaaggcgucugcc

SEQ ID NO: 1602551 - RNA, 19 nt, Artificial Sequence
  Description of Artificial Sequence: Synthetic oligonucleotide
  Sense strand starting at position 1375 of SEQ ID NO: 1560476
gagcaaacuccacgacuga

SEQ ID NO: 1602552 - RNA, 19 nt, Artificial Sequence
  Description of Artificial Sequence: Synthetic oligonucleotide
  Antisense strand to SEQ ID NO: 1602551
ucagucguggaguuugcuc

SEQ ID NO: 1602553 - RNA, 19 nt, Artificial Sequence
  Description of Artificial Sequence: Synthetic oligonucleotide
  Sense strand starting at position 1539 of SEQ ID NO: 1560476
ucagaauccuggcugcagu

SEQ ID NO: 1602554 - RNA, 19 nt, Artificial Sequence
  Description of Artificial Sequence: Synthetic oligonucleotide
  Antisense strand to SEQ ID NO: 1602553
acugcagccaggauucuga

SEQ ID NO: 1602555 - RNA, 19 nt, Artificial Sequence
  Description of Artificial Sequence: Synthetic oligonucleotide
  Sense strand starting at position 1540 of SEQ ID NO: 1560476
cagaauccuggcugcagua

SEQ ID NO: 1602556 - RNA, 19 nt, Artificial Sequence
  Description of Artificial Sequence: Synthetic oligonucleotide
  Antisense strand to SEQ ID NO: 1602555
uacugcagccaggauucug

SEQ ID NO: 1602557 - RNA, 19 nt, Artificial Sequence
  Description of Artificial Sequence: Synthetic oligonucleotide
  Sense strand starting at position 1866 of SEQ ID NO: 1560476
aggcuagagaccuggaagu

SEQ ID NO: 1602558 - RNA, 19 nt, Artificial Sequence
  Description of Artificial Sequence: Synthetic oligonucleotide
  Antisense strand to SEQ ID NO: 1602557
acuuccaggucucuagccu

SEQ ID NO: 1602559 - RNA, 19 nt, Artificial Sequence
  Description of Artificial Sequence: Synthetic oligonucleotide
  Sense strand starting at position 1868 of SEQ ID NO: 1560476
gcuagagaccuggaaguuu

SEQ ID NO: 1602560 - RNA, 19 nt, Artificial Sequence
  Description of Artificial Sequence: Synthetic oligonucleotide
  Antisense strand to SEQ ID NO: 1602559
aaacuuccaggucucuagc

SEQ ID NO: 1602561 - RNA, 19 nt, Artificial Sequence
  Description of Artificial Sequence: Synthetic oligonucleotide
  Sense strand starting at position 2445 of SEQ ID NO: 1560476
uuuagacaguguugagaaa

SEQ ID NO: 1602562 - RNA, 19 nt, Artificial Sequence
  Description of Artificial Sequence: Synthetic oligonucleotide
  Antisense strand to SEQ ID NO: 1602561
uuucucaacacugucuaaa

SEQ ID NO: 1602563 - RNA, 19 nt, Artificial Sequence
  Description of Artificial Sequence: Synthetic oligonucleotide
  Sense strand starting at position 2464 of SEQ ID NO: 1560476
accaaacuuuggccauaga

SEQ ID NO: 1602564 - RNA, 19 nt, Artificial Sequence
  Description of Artificial Sequence: Synthetic oligonucleotide
  Antisense strand to SEQ ID NO: 1602563
ucuauggccaaaguuuggu

SEQ ID NO: 1602565 - RNA, 19 nt, Artificial Sequence
  Description of Artificial Sequence: Synthetic oligonucleotide
  Sense strand starting at position 2609 of SEQ ID NO: 1560476
ggauuagaagcuggauugu

SEQ ID NO: 1602566 - RNA, 19 nt, Artificial Sequence
  Description of Artificial Sequence: Synthetic oligonucleotide
  Antisense strand to SEQ ID NO: 1602565
acaauccagcuucuaaucc

SEQ ID NO: 1602567 - RNA, 19 nt, Artificial Sequence
  Description of Artificial Sequence: Synthetic oligonucleotide
  Sense strand starting at position 3086 of SEQ ID NO: 1560476
uccaguccucuuugagacu

SEQ ID NO: 1602568 - RNA, 19 nt, Artificial Sequence
  Description of Artificial Sequence: Synthetic oligonucleotide
  Antisense strand to SEQ ID NO: 1602567
agucucaaagaggacugga

SEQ ID NO: 1602569 - RNA, 19 nt, Artificial Sequence
  Description of Artificial Sequence: Synthetic oligonucleotide
  Sense strand starting at position 3175 of SEQ ID NO: 1560476
ccucuugccugagaccuaa

SEQ ID NO: 1602570 - RNA, 19 nt, Artificial Sequence
  Description of Artificial Sequence: Synthetic oligonucleotide
  Antisense strand to SEQ ID NO: 1602569
uuaggucucaggcaagagg

SEQ ID NO: 1602571 - RNA, 19 nt, Artificial Sequence
  Description of Artificial Sequence: Synthetic oligonucleotide
  Sense strand starting at position 3332 of SEQ ID NO: 1560476
ccagucaccugucaucauu

SEQ ID NO: 1602572 - RNA, 19 nt, Artificial Sequence
  Description of Artificial Sequence: Synthetic oligonucleotide
  Antisense strand to SEQ ID NO: 1602571
aaugaugacaggugacugg

SEQ ID NO: 1602573 - RNA, 19 nt, Artificial Sequence
  Description of Artificial Sequence: Synthetic oligonucleotide
  Sense strand starting at position 3342 of SEQ ID NO: 1560476
gucaucauucugugccacu

SEQ ID NO: 1602574 - RNA, 19 nt, Artificial Sequence
  Description of Artificial Sequence: Synthetic oligonucleotide
  Antisense strand to SEQ ID NO: 1602573
aguggcacagaaugaugac

SEQ ID NO: 1602575 - RNA, 19 nt, Artificial Sequence
  Description of Artificial Sequence: Synthetic oligonucleotide
  Sense strand starting at position 3416 of SEQ ID NO: 1560476
uucggaagucggcaaguaa

SEQ ID NO: 1602576 - RNA, 19 nt, Artificial Sequence
  Description of Artificial Sequence: Synthetic oligonucleotide
  Antisense strand to SEQ ID NO: 1602575
uuacuugccgacuuccgaa

SEQ ID NO: 1602577 - RNA, 19 nt, Artificial Sequence
  Description of Artificial Sequence: Synthetic oligonucleotide
  Sense strand starting at position 3437 of SEQ ID NO: 1560476
ggugguguuccuuggacua

SEQ ID NO: 1602578 - RNA, 19 nt, Artificial Sequence
  Description of Artificial Sequence: Synthetic oligonucleotide
  Antisense strand to SEQ ID NO: 1602577
uaguccaaggaacaccacc

SEQ ID NO: 1602579 - RNA, 19 nt, Artificial Sequence
  Description of Artificial Sequence: Synthetic oligonucleotide
  Sense strand starting at position 3439 of SEQ ID NO: 1560476
ugguguuccuuggacuaga

SEQ ID NO: 1602580 - RNA, 19 nt, Artificial Sequence
  Description of Artificial Sequence: Synthetic oligonucleotide
  Antisense strand to SEQ ID NO: 1602579
ucuaguccaaggaacacca

SEQ ID NO: 1602581 - RNA, 19 nt, Artificial Sequence
  Description of Artificial Sequence: Synthetic oligonucleotide
  Sense strand starting at position 3610 of SEQ ID NO: 1560476
uaaauuaaaggguguaacu

SEQ ID NO: 1602582 - RNA, 19 nt, Artificial Sequence
  Description of Artificial Sequence: Synthetic oligonucleotide
  Antisense strand to SEQ ID NO: 1602581
aguuacacccuuuaauuua

SEQ ID NO: 1602583 - RNA, 19 nt, Artificial Sequence
  Description of Artificial Sequence: Synthetic oligonucleotide
  Sense strand starting at position 3623 of SEQ ID NO: 1560476
guaacuagauuguuuauac

SEQ ID NO: 1602584 - RNA, 19 nt, Artificial Sequence
  Description of Artificial Sequence: Synthetic oligonucleotide
  Antisense strand to SEQ ID NO: 1602583
guauaaacaaucuaguuac

SEQ ID NO: 1602585 - RNA, 19 nt, Artificial Sequence
  Description of Artificial Sequence: Synthetic oligonucleotide
  Sense strand starting at position 3627 of SEQ ID NO: 1560476
cuagauuguuuauacauca

SEQ ID NO: 1602586 - RNA, 19 nt, Artificial Sequence
  Description of Artificial Sequence: Synthetic oligonucleotide
  Antisense strand to SEQ ID NO: 1602585
ugauguauaaacaaucuag

SEQ ID NO: 1602587 - RNA, 19 nt, Artificial Sequence
  Description of Artificial Sequence: Synthetic oligonucleotide
  Sense strand starting at position 3672 of SEQ ID NO: 1560476
auacccuauucccgaugau

SEQ ID NO: 1602588 - RNA, 19 nt, Artificial Sequence
  Description of Artificial Sequence: Synthetic oligonucleotide
  Antisense strand to SEQ ID NO: 1602587
aucaucgggaauaggguau

SEQ ID NO: 1602589 - RNA, 19 nt, Artificial Sequence
  Description of Artificial Sequence: Synthetic oligonucleotide
  Sense strand starting at position 3673 of SEQ ID NO: 1560476
uacccuauucccgaugaug

SEQ ID NO: 1602590 - RNA, 19 nt, Artificial Sequence
  Description of Artificial Sequence: Synthetic oligonucleotide
  Antisense strand to SEQ ID NO: 1602589
caucaucgggaauagggua

SEQ ID NO: 1602591 - RNA, 19 nt, Artificial Sequence
  Description of Artificial Sequence: Synthetic oligonucleotide
  Sense strand starting at position 3675 of SEQ ID NO: 1560476
cccuauucccgaugaugug

SEQ ID NO: 1602592 - RNA, 19 nt, Artificial Sequence
  Description of Artificial Sequence: Synthetic oligonucleotide
  Antisense strand to SEQ ID NO: 1602591
cacaucaucgggaauaggg

SEQ ID NO: 1602593 - RNA, 19 nt, Artificial Sequence
  Description of Artificial Sequence: Synthetic oligonucleotide
  Sense strand starting at position 3681 of SEQ ID NO: 1560476
ucccgaugaugugcuuauu

SEQ ID NO: 1602594 - RNA, 19 nt, Artificial Sequence
  Description of Artificial Sequence: Synthetic oligonucleotide
  Antisense strand to SEQ ID NO: 1602593
aauaagcacaucaucggga

SEQ ID NO: 1602595 - RNA, 19 nt, Artificial Sequence
  Description of Artificial Sequence: Synthetic oligonucleotide
  Sense strand starting at position 3813 of SEQ ID NO: 1560476
gcgacagcuuaucccugua

SEQ ID NO: 1602596 - RNA, 19 nt, Artificial Sequence
  Description of Artificial Sequence: Synthetic oligonucleotide
  Antisense strand to SEQ ID NO: 1602595
uacagggauaagcugucgc

SEQ ID NO: 1602597 - RNA, 19 nt, Artificial Sequence
  Description of Artificial Sequence: Synthetic oligonucleotide
  Sense strand starting at position 61 of SEQ ID NO: 1560477
gcugguuucuuugagggaa

SEQ ID NO: 1602598 - RNA, 19 nt, Artificial Sequence
  Description of Artificial Sequence: Synthetic oligonucleotide
  Antisense strand to SEQ ID NO: 1602597
uucccucaaagaaaccagc

SEQ ID NO: 1602599 - RNA, 19 nt, Artificial Sequence
  Description of Artificial Sequence: Synthetic oligonucleotide
  Sense strand starting at position 240 of SEQ ID NO: 1560477
ucauaaaugcuaugaagau

SEQ ID NO: 1602600 - RNA, 19 nt, Artificial Sequence
  Description of Artificial Sequence: Synthetic oligonucleotide
  Antisense strand to SEQ ID NO: 1602599
aucuucauagcauuuauga

SEQ ID NO: 1602601 - RNA, 19 nt, Artificial Sequence
  Description of Artificial Sequence: Synthetic oligonucleotide
  Sense strand starting at position 246 of SEQ ID NO: 1560477
augcuaugaagaugagcua

SEQ ID NO: 1602602 - RNA, 19 nt, Artificial Sequence
  Description of Artificial Sequence: Synthetic oligonucleotide
  Antisense strand to SEQ ID NO: 1602601
uagcucaucuucauagcau

SEQ ID NO: 1602603 - RNA, 19 nt, Artificial Sequence
  Description of Artificial Sequence: Synthetic oligonucleotide
  Sense strand starting at position 301 of SEQ ID NO: 1560477
agagguagcccuggauaac

SEQ ID NO: 1602604 - RNA, 19 nt, Artificial Sequence
  Description of Artificial Sequence: Synthetic oligonucleotide
  Antisense strand to SEQ ID NO: 1602603
guuauccagggcuaccucu

SEQ ID NO: 1602605 - RNA, 19 nt, Artificial Sequence
  Description of Artificial Sequence: Synthetic oligonucleotide
  Sense strand starting at position 313 of SEQ ID NO: 1560477
ggauaaccaugaugugaug

SEQ ID NO: 1602606 - RNA, 19 nt, Artificial Sequence
  Description of Artificial Sequence: Synthetic oligonucleotide
  Antisense strand to SEQ ID NO: 1602605
caucacaucaugguuaucc

SEQ ID NO: 1602607 - RNA, 19 nt, Artificial Sequence
  Description of Artificial Sequence: Synthetic oligonucleotide
  Sense strand starting at position 319 of SEQ ID NO: 1560477
ccaugaugugauggacagu

SEQ ID NO: 1602608 - RNA, 19 nt, Artificial Sequence
  Description of Artificial Sequence: Synthetic oligonucleotide
  Antisense strand to SEQ ID NO: 1602607
acuguccaucacaucaugg

SEQ ID NO: 1602609 - RNA, 19 nt, Artificial Sequence
  Description of Artificial Sequence: Synthetic oligonucleotide
  Sense strand starting at position 396 of SEQ ID NO: 1560477
gggccuucucagugaugag

SEQ ID NO: 1602610 - RNA, 19 nt, Artificial Sequence
  Description of Artificial Sequence: Synthetic oligonucleotide
  Antisense strand to SEQ ID NO: 1602609
cucaucacugagaaggccc

SEQ ID NO: 1602611 - RNA, 19 nt, Artificial Sequence
  Description of Artificial Sequence: Synthetic oligonucleotide
  Sense strand starting at position 397 of SEQ ID NO: 1560477
ggccuucucagugaugagu

SEQ ID NO: 1602612 - RNA, 19 nt, Artificial Sequence
  Description of Artificial Sequence: Synthetic oligonucleotide
  Antisense strand to SEQ ID NO: 1602611
acucaucacugagaaggcc

SEQ ID NO: 1602613 - RNA, 19 nt, Artificial Sequence
  Description of Artificial Sequence: Synthetic oligonucleotide
  Sense strand starting at position 407 of SEQ ID NO: 1560477
gugaugaguguggagugaa

SEQ ID NO: 1602614 - RNA, 19 nt, Artificial Sequence
  Description of Artificial Sequence: Synthetic oligonucleotide
  Antisense strand to SEQ ID NO: 1602613
uucacuccacacucaucac

SEQ ID NO: 1602615 - RNA, 19 nt, Artificial Sequence
  Description of Artificial Sequence: Synthetic oligonucleotide
  Sense strand starting at position 408 of SEQ ID NO: 1560477
ugaugaguguggagugaag

SEQ ID NO: 1602616 - RNA, 19 nt, Artificial Sequence
  Description of Artificial Sequence: Synthetic oligonucleotide
  Antisense strand to SEQ ID NO: 1602615
cuucacuccacacucauca

SEQ ID NO: 1602617 - RNA, 19 nt, Artificial Sequence
  Description of Artificial Sequence: Synthetic oligonucleotide
  Sense strand starting at position 1091 of SEQ ID NO: 1560477
uguccaggauggucuuuaa

SEQ ID NO: 1602618 - RNA, 19 nt, Artificial Sequence
  Description of Artificial Sequence: Synthetic oligonucleotide
  Antisense strand to SEQ ID NO: 1602617
uuaaagaccauccuggaca

SEQ ID NO: 1602619 - RNA, 19 nt, Artificial Sequence
  Description of Artificial Sequence: Synthetic oligonucleotide
  Sense strand starting at position 1094 of SEQ ID NO: 1560477
ccaggauggucuuuaacuu

SEQ ID NO: 1602620 - RNA, 19 nt, Artificial Sequence
  Description of Artificial Sequence: Synthetic oligonucleotide
  Antisense strand to SEQ ID NO: 1602619
aaguuaaagaccauccugg

SEQ ID NO: 1602621 - RNA, 19 nt, Artificial Sequence
  Description of Artificial Sequence: Synthetic oligonucleotide
  Sense strand starting at position 1227 of SEQ ID NO: 1560477
ucaguuucguaaggacacu

SEQ ID NO: 1602622 - RNA, 19 nt, Artificial Sequence
  Description of Artificial Sequence: Synthetic oligonucleotide
  Antisense strand to SEQ ID NO: 1602621
aguguccuuacgaaacuga

SEQ ID NO: 1602623 - RNA, 19 nt, Artificial Sequence
  Description of Artificial Sequence: Synthetic oligonucleotide
  Sense strand starting at position 1378 of SEQ ID NO: 1560477
cagggucagggcuguguua

SEQ ID NO: 1602624 - RNA, 19 nt, Artificial Sequence
  Description of Artificial Sequence: Synthetic oligonucleotide
  Antisense strand to SEQ ID NO: 1602623
uaacacagcccugacccug

SEQ ID NO: 1602625 - RNA, 19 nt, Artificial Sequence
  Description of Artificial Sequence: Synthetic oligonucleotide
  Sense strand starting at position 1380 of SEQ ID NO: 1560477
gggucagggcuguguuaug

SEQ ID NO: 1602626 - RNA, 19 nt, Artificial Sequence
  Description of Artificial Sequence: Synthetic oligonucleotide
  Antisense strand to SEQ ID NO: 1602625
cauaacacagcccugaccc

SEQ ID NO: 1602627 - RNA, 19 nt, Artificial Sequence
  Description of Artificial Sequence: Synthetic oligonucleotide
  Sense strand starting at position 1502 of SEQ ID NO: 1560477
aagcauagugugugcagaa

SEQ ID NO: 1602628 - RNA, 19 nt, Artificial Sequence
  Description of Artificial Sequence: Synthetic oligonucleotide
  Antisense strand to SEQ ID NO: 1602627
uucugcacacacuaugcuu

SEQ ID NO: 1602629 - RNA, 19 nt, Artificial Sequence
  Description of Artificial Sequence: Synthetic oligonucleotide
  Sense strand starting at position 1503 of SEQ ID NO: 1560477
agcauagugugugcagaaa

SEQ ID NO: 1602630 - RNA, 19 nt, Artificial Sequence
  Description of Artificial Sequence: Synthetic oligonucleotide
  Antisense strand to SEQ ID NO: 1602629
uuucugcacacacuaugcu

SEQ ID NO: 1602631 - RNA, 19 nt, Artificial Sequence
  Description of Artificial Sequence: Synthetic oligonucleotide
  Sense strand starting at position 1536 of SEQ ID NO: 1560477
ugaggcugcuuccugagaa

SEQ ID NO: 1602632 - RNA, 19 nt, Artificial Sequence
  Description of Artificial Sequence: Synthetic oligonucleotide
  Antisense strand to SEQ ID NO: 1602631
uucucaggaagcagccuca

SEQ ID NO: 1602633 - RNA, 19 nt, Artificial Sequence
  Description of Artificial Sequence: Synthetic oligonucleotide
  Sense strand starting at position 1537 of SEQ ID NO: 1560477
gaggcugcuuccugagaaa

SEQ ID NO: 1602634 - RNA, 19 nt, Artificial Sequence
  Description of Artificial Sequence: Synthetic oligonucleotide
  Antisense strand to SEQ ID NO: 1602633
uuucucaggaagcagccuc

SEQ ID NO: 1602635 - RNA, 19 nt, Artificial Sequence
  Description of Artificial Sequence: Synthetic oligonucleotide
  Sense strand starting at position 1574 of SEQ ID NO: 1560477
gccugcaguugguaaaguu

SEQ ID NO: 1602636 - RNA, 19 nt, Artificial Sequence
  Description of Artificial Sequence: Synthetic oligonucleotide
  Antisense strand to SEQ ID NO: 1602635
aacuuuaccaacugcaggc

SEQ ID NO: 1602637 - RNA, 19 nt, Artificial Sequence
  Description of Artificial Sequence: Synthetic oligonucleotide
  Sense strand starting at position 1583 of SEQ ID NO: 1560477
ugguaaaguucccuacgga

SEQ ID NO: 1602638 - RNA, 19 nt, Artificial Sequence
  Description of Artificial Sequence: Synthetic oligonucleotide
  Antisense strand to SEQ ID NO: 1602637
uccguagggaacuuuacca

SEQ ID NO: 1602639 - RNA, 19 nt, Artificial Sequence
  Description of Artificial Sequence: Synthetic oligonucleotide
  Sense strand starting at position 1584 of SEQ ID NO: 1560477
gguaaaguucccuacggau

SEQ ID NO: 1602640 - RNA, 19 nt, Artificial Sequence
  Description of Artificial Sequence: Synthetic oligonucleotide
  Antisense strand to SEQ ID NO: 1602639
auccguagggaacuuuacc

SEQ ID NO: 1602641 - RNA, 19 nt, Artificial Sequence
  Description of Artificial Sequence: Synthetic oligonucleotide
  Sense strand starting at position 1586 of SEQ ID NO: 1560477
uaaaguucccuacggauau

SEQ ID NO: 1602642 - RNA, 19 nt, Artificial Sequence
  Description of Artificial Sequence: Synthetic oligonucleotide
  Antisense strand to SEQ ID NO: 1602641
auauccguagggaacuuua

SEQ ID NO: 1602643 - RNA, 19 nt, Artificial Sequence
  Description of Artificial Sequence: Synthetic oligonucleotide
  Sense strand starting at position 1587 of SEQ ID NO: 1560477
aaaguucccuacggauauu

SEQ ID NO: 1602644 - RNA, 19 nt, Artificial Sequence
  Description of Artificial Sequence: Synthetic oligonucleotide
  Antisense strand to SEQ ID NO: 1602643
aauauccguagggaacuuu

SEQ ID NO: 1602645 - RNA, 19 nt, Artificial Sequence
  Description of Artificial Sequence: Synthetic oligonucleotide
  Sense strand starting at position 1590 of SEQ ID NO: 1560477
guucccuacggauauuaaa

SEQ ID NO: 1602646 - RNA, 19 nt, Artificial Sequence
  Description of Artificial Sequence: Synthetic oligonucleotide
  Antisense strand to SEQ ID NO: 1602645
uuuaauauccguagggaac

SEQ ID NO: 1602647 - RNA, 19 nt, Artificial Sequence
  Description of Artificial Sequence: Synthetic oligonucleotide
  Sense strand starting at position 1630 of SEQ ID NO: 1560477
auacacuuucuguacaagu

SEQ ID NO: 1602648 - RNA, 19 nt, Artificial Sequence
  Description of Artificial Sequence: Synthetic oligonucleotide
  Antisense strand to SEQ ID NO: 1602647
acuuguacagaaaguguau

SEQ ID NO: 1602649 - RNA, 19 nt, Artificial Sequence
  Description of Artificial Sequence: Synthetic oligonucleotide
  Sense strand starting at position 1632 of SEQ ID NO: 1560477
acacuuucuguacaaguga

SEQ ID NO: 1602650 - RNA, 19 nt, Artificial Sequence
  Description of Artificial Sequence: Synthetic oligonucleotide
  Antisense strand to SEQ ID NO: 1602649
ucacuuguacagaaagugu

SEQ ID NO: 1602651 - RNA, 19 nt, Artificial Sequence
  Description of Artificial Sequence: Synthetic oligonucleotide
  Sense strand starting at position 1641 of SEQ ID NO: 1560477
guacaagugaugcgguuua

SEQ ID NO: 1602652 - RNA, 19 nt, Artificial Sequence
  Description of Artificial Sequence: Synthetic oligonucleotide
  Antisense strand to SEQ ID NO: 1602651
uaaaccgcaucacuuguac

SEQ ID NO: 1602653 - RNA, 19 nt, Artificial Sequence
  Description of Artificial Sequence: Synthetic oligonucleotide
  Sense strand starting at position 1646 of SEQ ID NO: 1560477
agugaugcgguuuaugcua

SEQ ID NO: 1602654 - RNA, 19 nt, Artificial Sequence
  Description of Artificial Sequence: Synthetic oligonucleotide
  Antisense strand to SEQ ID NO: 1602653
uagcauaaaccgcaucacu

SEQ ID NO: 1602655 - RNA, 19 nt, Artificial Sequence
  Description of Artificial Sequence: Synthetic oligonucleotide
  Sense strand starting at position 1648 of SEQ ID NO: 1560477
ugaugcgguuuaugcuaaa

SEQ ID NO: 1602656 - RNA, 19 nt, Artificial Sequence
  Description of Artificial Sequence: Synthetic oligonucleotide
  Antisense strand to SEQ ID NO: 1602655
uuuagcauaaaccgcauca

SEQ ID NO: 1602657 - RNA, 19 nt, Artificial Sequence
  Description of Artificial Sequence: Synthetic oligonucleotide
  Sense strand starting at position 1668 of SEQ ID NO: 1560477
cccugcuuucuuuguagga

SEQ ID NO: 1602658 - RNA, 19 nt, Artificial Sequence
  Description of Artificial Sequence: Synthetic oligonucleotide
  Antisense strand to SEQ ID NO: 1602657
uccuacaaagaaagcaggg

SEQ ID NO: 1602659 - RNA, 19 nt, Artificial Sequence
  Description of Artificial Sequence: Synthetic oligonucleotide
  Sense strand starting at position 1670 of SEQ ID NO: 1560477
cugcuuucuuuguaggagu

SEQ ID NO: 1602660 - RNA, 19 nt, Artificial Sequence
  Description of Artificial Sequence: Synthetic oligonucleotide
  Antisense strand to SEQ ID NO: 1602659
acuccuacaaagaaagcag

SEQ ID NO: 1602661 - RNA, 19 nt, Artificial Sequence
  Description of Artificial Sequence: Synthetic oligonucleotide
  Sense strand starting at position 1672 of SEQ ID NO: 1560477
gcuuucuuuguaggagucu

SEQ ID NO: 1602662 - RNA, 19 nt, Artificial Sequence
  Description of Artificial Sequence: Synthetic oligonucleotide
  Antisense strand to SEQ ID NO: 1602661
agacuccuacaaagaaagc

SEQ ID NO: 1602663 - RNA, 19 nt, Artificial Sequence
  Description of Artificial Sequence: Synthetic oligonucleotide
  Sense strand starting at position 1698 of SEQ ID NO: 1560477
ugauaagugccagguagag

SEQ ID NO: 1602664 - RNA, 19 nt, Artificial Sequence
  Description of Artificial Sequence: Synthetic oligonucleotide
  Antisense strand to SEQ ID NO: 1602663
cucuaccuggcacuuauca

SEQ ID NO: 1602665 - RNA, 19 nt, Artificial Sequence
  Description of Artificial Sequence: Synthetic oligonucleotide
  Sense strand starting at position 1722 of SEQ ID NO: 1560477
cuaugugacuggcuccaua

SEQ ID NO: 1602666 - RNA, 19 nt, Artificial Sequence
  Description of Artificial Sequence: Synthetic oligonucleotide
  Antisense strand to SEQ ID NO: 1602665
uauggagccagucacauag

SEQ ID NO: 1602667 - RNA, 19 nt, Artificial Sequence
  Description of Artificial Sequence: Synthetic oligonucleotide
  Sense strand starting at position 2299 of SEQ ID NO: 1560477
ggguaauccaugggcucua

SEQ ID NO: 1602668 - RNA, 19 nt, Artificial Sequence
  Description of Artificial Sequence: Synthetic oligonucleotide
  Antisense strand to SEQ ID NO: 1602667
uagagcccauggauuaccc

SEQ ID NO: 1602669 - RNA, 19 nt, Artificial Sequence
  Description of Artificial Sequence: Synthetic oligonucleotide
  Sense strand starting at position 3808 of SEQ ID NO: 1560477
uguugccuuccugaaauca

SEQ ID NO: 1602670 - RNA, 19 nt, Artificial Sequence
  Description of Artificial Sequence: Synthetic oligonucleotide
  Antisense strand to SEQ ID NO: 1602669
ugauuucaggaaggcaaca

SEQ ID NO: 1602671 - RNA, 19 nt, Artificial Sequence
  Description of Artificial Sequence: Synthetic oligonucleotide
  Sense strand starting at position 3839 of SEQ ID NO: 1560477
ugagguuaucacugagaau

SEQ ID NO: 1602672 - RNA, 19 nt, Artificial Sequence
  Description of Artificial Sequence: Synthetic oligonucleotide
  Antisense strand to SEQ ID NO: 1602671
auucucagugauaaccuca

SEQ ID NO: 1602673 - RNA, 19 nt, Artificial Sequence
  Description of Artificial Sequence: Synthetic oligonucleotide
  Sense strand starting at position 3842 of SEQ ID NO: 1560477
gguuaucacugagaaucag

SEQ ID NO: 1602674 - RNA, 19 nt, Artificial Sequence
  Description of Artificial Sequence: Synthetic oligonucleotide
  Antisense strand to SEQ ID NO: 1602673
cugauucucagugauaacc

SEQ ID NO: 1602675 - RNA, 19 nt, Artificial Sequence
  Description of Artificial Sequence: Synthetic oligonucleotide
  Sense strand starting at position 67 of SEQ ID NO: 1560478
gagggcugucuacaccaua

SEQ ID NO: 1602676 - RNA, 19 nt, Artificial Sequence
  Description of Artificial Sequence: Synthetic oligonucleotide
  Antisense strand to SEQ ID NO: 1602675
uaugguguagacagcccuc

SEQ ID NO: 1602677 - RNA, 19 nt, Artificial Sequence
  Description of Artificial Sequence: Synthetic oligonucleotide
  Sense strand starting at position 70 of SEQ ID NO: 1560478
ggcugucuacaccauaauu

SEQ ID NO: 1602678 - RNA, 19 nt, Artificial Sequence
  Description of Artificial Sequence: Synthetic oligonucleotide
  Antisense strand to SEQ ID NO: 1602677
aauuaugguguagacagcc

SEQ ID NO: 1602679 - RNA, 19 nt, Artificial Sequence
  Description of Artificial Sequence: Synthetic oligonucleotide
  Sense strand starting at position 80 of SEQ ID NO: 1560478
accauaauuuggugucaaa

SEQ ID NO: 1602680 - RNA, 19 nt, Artificial Sequence
  Description of Artificial Sequence: Synthetic oligonucleotide
  Antisense strand to SEQ ID NO: 1602679
uuugacaccaaauuauggu

SEQ ID NO: 1602681 - RNA, 19 nt, Artificial Sequence
  Description of Artificial Sequence: Synthetic oligonucleotide
  Sense strand starting at position 118 of SEQ ID NO: 1560478
guaguacccggaugucuuu

SEQ ID NO: 1602682 - RNA, 19 nt, Artificial Sequence
  Description of Artificial Sequence: Synthetic oligonucleotide
  Antisense strand to SEQ ID NO: 1602681
aaagacauccggguacuac

SEQ ID NO: 1602683 - RNA, 19 nt, Artificial Sequence
  Description of Artificial Sequence: Synthetic oligonucleotide
  Sense strand starting at position 124 of SEQ ID NO: 1560478
cccggaugucuuuguagag

SEQ ID NO: 1602684 - RNA, 19 nt, Artificial Sequence
  Description of Artificial Sequence: Synthetic oligonucleotide
  Antisense strand to SEQ ID NO: 1602683
cucuacaaagacauccggg

SEQ ID NO: 1602685 - RNA, 19 nt, Artificial Sequence
  Description of Artificial Sequence: Synthetic oligonucleotide
  Sense strand starting at position 128 of SEQ ID NO: 1560478
gaugucuuuguagaggacu

SEQ ID NO: 1602686 - RNA, 19 nt, Artificial Sequence
  Description of Artificial Sequence: Synthetic oligonucleotide
  Antisense strand to SEQ ID NO: 1602685
aguccucuacaaagacauc

SEQ ID NO: 1602687 - RNA, 19 nt, Artificial Sequence
  Description of Artificial Sequence: Synthetic oligonucleotide
  Sense strand starting at position 130 of SEQ ID NO: 1560478
ugucuuuguagaggacuca

SEQ ID NO: 1602688 - RNA, 19 nt, Artificial Sequence
  Description of Artificial Sequence: Synthetic oligonucleotide
  Antisense strand to SEQ ID NO: 1602687
ugaguccucuacaaagaca

SEQ ID NO: 1602689 - RNA, 19 nt, Artificial Sequence
  Description of Artificial Sequence: Synthetic oligonucleotide
  Sense strand starting at position 179 of SEQ ID NO: 1560478
gcuauaugccaagaaagug

SEQ ID NO: 1602690 - RNA, 19 nt, Artificial Sequence
  Description of Artificial Sequence: Synthetic oligonucleotide
  Antisense strand to SEQ ID NO: 1602689
cacuuucuuggcauauagc

SEQ ID NO: 1602691 - RNA, 19 nt, Artificial Sequence
  Description of Artificial Sequence: Synthetic oligonucleotide
  Sense strand starting at position 315 of SEQ ID NO: 1560478
aguggaagggucuauguua

SEQ ID NO: 1602692 - RNA, 19 nt, Artificial Sequence
  Description of Artificial Sequence: Synthetic oligonucleotide
  Antisense strand to SEQ ID NO: 1602691
uaacauagacccuuccacu

SEQ ID NO: 1602693 - RNA, 19 nt, Artificial Sequence
  Description of Artificial Sequence: Synthetic oligonucleotide
  Sense strand starting at position 320 of SEQ ID NO: 1560478
aagggucuauguuaucaag

SEQ ID NO: 1602694 - RNA, 19 nt, Artificial Sequence
  Description of Artificial Sequence: Synthetic oligonucleotide
  Antisense strand to SEQ ID NO: 1602693
cuugauaacauagacccuu

SEQ ID NO: 1602695 - RNA, 19 nt, Artificial Sequence
  Description of Artificial Sequence: Synthetic oligonucleotide
  Sense strand starting at position 422 of SEQ ID NO: 1560478
cggagucagaucggcuuua

SEQ ID NO: 1602696 - RNA, 19 nt, Artificial Sequence
  Description of Artificial Sequence: Synthetic oligonucleotide
  Antisense strand to SEQ ID NO: 1602695
uaaagccgaucugacuccg

SEQ ID NO: 1602697 - RNA, 19 nt, Artificial Sequence
  Description of Artificial Sequence: Synthetic oligonucleotide
  Sense strand starting at position 423 of SEQ ID NO: 1560478
ggagucagaucggcuuuaa

SEQ ID NO: 1602698 - RNA, 19 nt, Artificial Sequence
  Description of Artificial Sequence: Synthetic oligonucleotide
  Antisense strand to SEQ ID NO: 1602697
uuaaagccgaucugacucc

SEQ ID NO: 1602699 - RNA, 19 nt, Artificial Sequence
  Description of Artificial Sequence: Synthetic oligonucleotide
  Sense strand starting at position 427 of SEQ ID NO: 1560478
ucagaucggcuuuaauaga

SEQ ID NO: 1602700 - RNA, 19 nt, Artificial Sequence
  Description of Artificial Sequence: Synthetic oligonucleotide
  Antisense strand to SEQ ID NO: 1602699
ucuauuaaagccgaucuga

SEQ ID NO: 1602701 - RNA, 19 nt, Artificial Sequence
  Description of Artificial Sequence: Synthetic oligonucleotide
  Sense strand starting at position 636 of SEQ ID NO: 1560478
cgacgaauccgugcucauc

SEQ ID NO: 1602702 - RNA, 19 nt, Artificial Sequence
  Description of Artificial Sequence: Synthetic oligonucleotide
  Antisense strand to SEQ ID NO: 1602701
gaugagcacggauucgucg

SEQ ID NO: 1602703 - RNA, 19 nt, Artificial Sequence
  Description of Artificial Sequence: Synthetic oligonucleotide
  Sense strand starting at position 811 of SEQ ID NO: 1560478
gcgagaagugcuucacguc

SEQ ID NO: 1602704 - RNA, 19 nt, Artificial Sequence
  Description of Artificial Sequence: Synthetic oligonucleotide
  Antisense strand to SEQ ID NO: 1602703
gacgugaagcacuucucgc

SEQ ID NO: 1602705 - RNA, 19 nt, Artificial Sequence
  Description of Artificial Sequence: Synthetic oligonucleotide
  Sense strand starting at position 812 of SEQ ID NO: 1560478
cgagaagugcuucacgucu

SEQ ID NO: 1602706 - RNA, 19 nt, Artificial Sequence
  Description of Artificial Sequence: Synthetic oligonucleotide
  Antisense strand to SEQ ID NO: 1602705
agacgugaagcacuucucg

SEQ ID NO: 1602707 - RNA, 19 nt, Artificial Sequence
  Description of Artificial Sequence: Synthetic oligonucleotide
  Sense strand starting at position 1053 of SEQ ID NO: 1560478
ccuguaauaucugggauug

SEQ ID NO: 1602708 - RNA, 19 nt, Artificial Sequence
  Description of Artificial Sequence: Synthetic oligonucleotide
  Antisense strand to SEQ ID NO: 1602707
caaucccagauauuacagg

SEQ ID NO: 1602709 - RNA, 19 nt, Artificial Sequence
  Description of Artificial Sequence: Synthetic oligonucleotide
  Sense strand starting at position 1372 of SEQ ID NO: 1560478
cccuccucuucuggagaua

SEQ ID NO: 1602710 - RNA, 19 nt, Artificial Sequence
  Description of Artificial Sequence: Synthetic oligonucleotide
  Antisense strand to SEQ ID NO: 1602709
uaucuccagaagaggaggg

SEQ ID NO: 1602711 - RNA, 19 nt, Artificial Sequence
  Description of Artificial Sequence: Synthetic oligonucleotide
  Sense strand starting at position 1373 of SEQ ID NO: 1560478
ccuccucuucuggagauau

SEQ ID NO: 1602712 - RNA, 19 nt, Artificial Sequence
  Description of Artificial Sequence: Synthetic oligonucleotide
  Antisense strand to SEQ ID NO: 1602711
auaucuccagaagaggagg

SEQ ID NO: 1602713 - RNA, 19 nt, Artificial Sequence
  Description of Artificial Sequence: Synthetic oligonucleotide
  Sense strand starting at position 1693 of SEQ ID NO: 1560478
cgaacauucucucacaugu

SEQ ID NO: 1602714 - RNA, 19 nt, Artificial Sequence
  Description of Artificial Sequence: Synthetic oligonucleotide
  Antisense strand to SEQ ID NO: 1602713
acaugugagagaauguucg

SEQ ID NO: 1602715 - RNA, 19 nt, Artificial Sequence
  Description of Artificial Sequence: Synthetic oligonucleotide
  Sense strand starting at position 2009 of SEQ ID NO: 1560478
gugcgcagccgcucauuua

SEQ ID NO: 1602716 - RNA, 19 nt, Artificial Sequence
  Description of Artificial Sequence: Synthetic oligonucleotide
  Antisense strand to SEQ ID NO: 1602715
uaaaugagcggcugcgcac

SEQ ID NO: 1602717 - RNA, 19 nt, Artificial Sequence
  Description of Artificial Sequence: Synthetic oligonucleotide
  Sense strand starting at position 2301 of SEQ ID NO: 1560478
aguuuccagucccuuuaau

SEQ ID NO: 1602718 - RNA, 19 nt, Artificial Sequence
  Description of Artificial Sequence: Synthetic oligonucleotide
  Antisense strand to SEQ ID NO: 1602717
auuaaagggacuggaaacu

SEQ ID NO: 1602719 - RNA, 19 nt, Artificial Sequence
  Description of Artificial Sequence: Synthetic oligonucleotide
  Sense strand starting at position 2360 of SEQ ID NO: 1560478
ggaggucuuuaggagcaga

SEQ ID NO: 1602720 - RNA, 19 nt, Artificial Sequence
  Description of Artificial Sequence: Synthetic oligonucleotide
  Antisense strand to SEQ ID NO: 1602719
ucugcuccuaaagaccucc

SEQ ID NO: 1602721 - RNA, 19 nt, Artificial Sequence
  Description of Artificial Sequence: Synthetic oligonucleotide
  Sense strand starting at position 2371 of SEQ ID NO: 1560478
ggagcagauuccuggagaa

SEQ ID NO: 1602722 - RNA, 19 nt, Artificial Sequence
  Description of Artificial Sequence: Synthetic oligonucleotide
  Antisense strand to SEQ ID NO: 1602721
uucuccaggaaucugcucc

SEQ ID NO: 1602723 - RNA, 19 nt, Artificial Sequence
  Description of Artificial Sequence: Synthetic oligonucleotide
  Sense strand starting at position 2485 of SEQ ID NO: 1560478
ggccuaauucugugccucu

SEQ ID NO: 1602724 - RNA, 19 nt, Artificial Sequence
  Description of Artificial Sequence: Synthetic oligonucleotide
  Antisense strand to SEQ ID NO: 1602723
agaggcacagaauuaggcc

SEQ ID NO: 1602725 - RNA, 19 nt, Artificial Sequence
  Description of Artificial Sequence: Synthetic oligonucleotide
  Sense strand starting at position 2816 of SEQ ID NO: 1560478
ggacuucugcagcaagaag

SEQ ID NO: 1602726 - RNA, 19 nt, Artificial Sequence
  Description of Artificial Sequence: Synthetic oligonucleotide
  Antisense strand to SEQ ID NO: 1602725
cuucuugcugcagaagucc

SEQ ID NO: 1602727 - RNA, 19 nt, Artificial Sequence
  Description of Artificial Sequence: Synthetic oligonucleotide
  Sense strand starting at position 2857 of SEQ ID NO: 1560478
aagcgaggguacuuuagau

SEQ ID NO: 1602728 - RNA, 19 nt, Artificial Sequence
  Description of Artificial Sequence: Synthetic oligonucleotide
  Antisense strand to SEQ ID NO: 1602727
aucuaaaguacccucgcuu

SEQ ID NO: 1602729 - RNA, 19 nt, Artificial Sequence
  Description of Artificial Sequence: Synthetic oligonucleotide
  Sense strand starting at position 3096 of SEQ ID NO: 1560478
ggcugauagggcguugcua

SEQ ID NO: 1602730 - RNA, 19 nt, Artificial Sequence
  Description of Artificial Sequence: Synthetic oligonucleotide
  Antisense strand to SEQ ID NO: 1602729
uagcaacgcccuaucagcc

SEQ ID NO: 1602731 - RNA, 19 nt, Artificial Sequence
  Description of Artificial Sequence: Synthetic oligonucleotide
  Sense strand starting at position 3207 of SEQ ID NO: 1560478
aucgcucuuccagggacua

SEQ ID NO: 1602732 - RNA, 19 nt, Artificial Sequence
  Description of Artificial Sequence: Synthetic oligonucleotide
  Antisense strand to SEQ ID NO: 1602731
uagucccuggaagagcgau

SEQ ID NO: 1602733 - RNA, 19 nt, Artificial Sequence
  Description of Artificial Sequence: Synthetic oligonucleotide
  Sense strand starting at position 3392 of SEQ ID NO: 1560478
gucuuauguuccucucuga

SEQ ID NO: 1602734 - RNA, 19 nt, Artificial Sequence
  Description of Artificial Sequence: Synthetic oligonucleotide
  Antisense strand to SEQ ID NO: 1602733
ucagagaggaacauaagac

SEQ ID NO: 1602735 - RNA, 19 nt, Artificial Sequence
  Description of Artificial Sequence: Synthetic oligonucleotide
  Sense strand starting at position 3421 of SEQ ID NO: 1560478
aggaauuauugccucuaaa

SEQ ID NO: 1602736 - RNA, 19 nt, Artificial Sequence
  Description of Artificial Sequence: Synthetic oligonucleotide
  Antisense strand to SEQ ID NO: 1602735
uuuagaggcaauaauuccu

SEQ ID NO: 1602737 - RNA, 19 nt, Artificial Sequence
  Description of Artificial Sequence: Synthetic oligonucleotide
  Sense strand starting at position 3433 of SEQ ID NO: 1560478
cucuaaagguguccaagaa

SEQ ID NO: 1602738 - RNA, 19 nt, Artificial Sequence
  Description of Artificial Sequence: Synthetic oligonucleotide
  Antisense strand to SEQ ID NO: 1602737
uucuuggacaccuuuagag

SEQ ID NO: 1602739 - RNA, 19 nt, Artificial Sequence
  Description of Artificial Sequence: Synthetic oligonucleotide
  Sense strand starting at position 3445 of SEQ ID NO: 1560478
ccaagaaaggcuugagauc

SEQ ID NO: 1602740 - RNA, 19 nt, Artificial Sequence
  Description of Artificial Sequence: Synthetic oligonucleotide
  Antisense strand to SEQ ID NO: 1602739
gaucucaagccuuucuugg

SEQ ID NO: 1602741 - RNA, 19 nt, Artificial Sequence
  Description of Artificial Sequence: Synthetic oligonucleotide
  Sense strand starting at position 3502 of SEQ ID NO: 1560478
gggcguugucuuugaacuu

SEQ ID NO: 1602742 - RNA, 19 nt, Artificial Sequence
  Description of Artificial Sequence: Synthetic oligonucleotide
  Antisense strand to SEQ ID NO: 1602741
aaguucaaagacaacgccc

SEQ ID NO: 1602743 - RNA, 19 nt, Artificial Sequence
  Description of Artificial Sequence: Synthetic oligonucleotide
  Sense strand starting at position 3588 of SEQ ID NO: 1560478
ccaggaauguaugggaaau

SEQ ID NO: 1602744 - RNA, 19 nt, Artificial Sequence
  Description of Artificial Sequence: Synthetic oligonucleotide
  Antisense strand to SEQ ID NO: 1602743
auuucccauacauuccugg

SEQ ID NO: 1602745 - RNA, 19 nt, Artificial Sequence
  Description of Artificial Sequence: Synthetic oligonucleotide
  Sense strand starting at position 3598 of SEQ ID NO: 1560478
augggaaaugcucggugau

SEQ ID NO: 1602746 - RNA, 19 nt, Artificial Sequence
  Description of Artificial Sequence: Synthetic oligonucleotide
  Antisense strand to SEQ ID NO: 1602745
aucaccgagcauuucccau

SEQ ID NO: 1602747 - RNA, 19 nt, Artificial Sequence
  Description of Artificial Sequence: Synthetic oligonucleotide
  Sense strand starting at position 3599 of SEQ ID NO: 1560478
ugggaaaugcucggugaua

SEQ ID NO: 1602748 - RNA, 19 nt, Artificial Sequence
  Description of Artificial Sequence: Synthetic oligonucleotide
  Antisense strand to SEQ ID NO: 1602747
uaucaccgagcauuuccca

SEQ ID NO: 1602749 - RNA, 19 nt, Artificial Sequence
  Description of Artificial Sequence: Synthetic oligonucleotide
  Sense strand starting at position 3600 of SEQ ID NO: 1560478
gggaaaugcucggugauau

SEQ ID NO: 1602750 - RNA, 19 nt, Artificial Sequence
  Description of Artificial Sequence: Synthetic oligonucleotide
  Antisense strand to SEQ ID NO: 1602749
auaucaccgagcauuuccc

SEQ ID NO: 1602751 - RNA, 19 nt, Artificial Sequence
  Description of Artificial Sequence: Synthetic oligonucleotide
  Sense strand starting at position 3601 of SEQ ID NO: 1560478
ggaaaugcucggugauaua

SEQ ID NO: 1602752 - RNA, 19 nt, Artificial Sequence
  Description of Artificial Sequence: Synthetic oligonucleotide
  Antisense strand to SEQ ID NO: 1602751
uauaucaccgagcauuucc

SEQ ID NO: 1602753 - RNA, 19 nt, Artificial Sequence
  Description of Artificial Sequence: Synthetic oligonucleotide
  Sense strand starting at position 3946 of SEQ ID NO: 1560478
cgcgauucuuaaccugaac

SEQ ID NO: 1602754 - RNA, 19 nt, Artificial Sequence
  Description of Artificial Sequence: Synthetic oligonucleotide
  Antisense strand to SEQ ID NO: 1602753
guucagguuaagaaucgcg

SEQ ID NO: 1602755 - RNA, 19 nt, Artificial Sequence
  Description of Artificial Sequence: Synthetic oligonucleotide
  Sense strand starting at position 30 of SEQ ID NO: 1560479
auguaaguggguuagcaua

SEQ ID NO: 1602756 - RNA, 19 nt, Artificial Sequence
  Description of Artificial Sequence: Synthetic oligonucleotide
  Antisense strand to SEQ ID NO: 1602755
uaugcuaacccacuuacau

SEQ ID NO: 1602757 - RNA, 19 nt, Artificial Sequence
  Description of Artificial Sequence: Synthetic oligonucleotide
  Sense strand starting at position 32 of SEQ ID NO: 1560479
guaaguggguuagcauaau

SEQ ID NO: 1602758 - RNA, 19 nt, Artificial Sequence
  Description of Artificial Sequence: Synthetic oligonucleotide
  Antisense strand to SEQ ID NO: 1602757
auuaugcuaacccacuuac

SEQ ID NO: 1602759 - RNA, 19 nt, Artificial Sequence
  Description of Artificial Sequence: Synthetic oligonucleotide
  Sense strand starting at position 52 of SEQ ID NO: 1560479
cucuguauacaguaauugu

SEQ ID NO: 1602760 - RNA, 19 nt, Artificial Sequence
  Description of Artificial Sequence: Synthetic oligonucleotide
  Antisense strand to SEQ ID NO: 1602759
acaauuacuguauacagag

SEQ ID NO: 1602761 - RNA, 19 nt, Artificial Sequence
  Description of Artificial Sequence: Synthetic oligonucleotide
  Sense strand starting at position 60 of SEQ ID NO: 1560479
acaguaauugucgauuaaa

SEQ ID NO: 1602762 - RNA, 19 nt, Artificial Sequence
  Description of Artificial Sequence: Synthetic oligonucleotide
  Antisense strand to SEQ ID NO: 1602761
uuuaaucgacaauuacugu

SEQ ID NO: 1602763 - RNA, 19 nt, Artificial Sequence
  Description of Artificial Sequence: Synthetic oligonucleotide
  Sense strand starting at position 63 of SEQ ID NO: 1560479
guaauugucgauuaaacau

SEQ ID NO: 1602764 - RNA, 19 nt, Artificial Sequence
  Description of Artificial Sequence: Synthetic oligonucleotide
  Antisense strand to SEQ ID NO: 1602763
auguuuaaucgacaauuac

SEQ ID NO: 1602765 - RNA, 19 nt, Artificial Sequence
  Description of Artificial Sequence: Synthetic oligonucleotide
  Sense strand starting at position 127 of SEQ ID NO: 1560479
gguauauaucauuguuauc

SEQ ID NO: 1602766 - RNA, 19 nt, Artificial Sequence
  Description of Artificial Sequence: Synthetic oligonucleotide
  Antisense strand to SEQ ID NO: 1602765
gauaacaaugauauauacc

SEQ ID NO: 1602767 - RNA, 19 nt, Artificial Sequence
  Description of Artificial Sequence: Synthetic oligonucleotide
  Sense strand starting at position 147 of SEQ ID NO: 1560479
ccacuucgcagaugagaaa

SEQ ID NO: 1602768 - RNA, 19 nt, Artificial Sequence
  Description of Artificial Sequence: Synthetic oligonucleotide
  Antisense strand to SEQ ID NO: 1602767
uuucucaucugcgaagugg

SEQ ID NO: 1602769 - RNA, 19 nt, Artificial Sequence
  Description of Artificial Sequence: Synthetic oligonucleotide
  Sense strand starting at position 215 of SEQ ID NO: 1560479
uuggcaaagccugaaauca

SEQ ID NO: 1602770 - RNA, 19 nt, Artificial Sequence
  Description of Artificial Sequence: Synthetic oligonucleotide
  Antisense strand to SEQ ID NO: 1602769
ugauuucaggcuuugccaa

SEQ ID NO: 1602771 - RNA, 19 nt, Artificial Sequence
  Description of Artificial Sequence: Synthetic oligonucleotide
  Sense strand starting at position 558 of SEQ ID NO: 1560479
acagcagucugacuacaga

SEQ ID NO: 1602772 - RNA, 19 nt, Artificial Sequence
  Description of Artificial Sequence: Synthetic oligonucleotide
  Antisense strand to SEQ ID NO: 1602771
ucuguagucagacugcugu

SEQ ID NO: 1602773 - RNA, 19 nt, Artificial Sequence
  Description of Artificial Sequence: Synthetic oligonucleotide
  Sense strand starting at position 673 of SEQ ID NO: 1560479
uacccuauacgguaguuau

SEQ ID NO: 1602774 - RNA, 19 nt, Artificial Sequence
  Description of Artificial Sequence: Synthetic oligonucleotide
  Antisense strand to SEQ ID NO: 1602773
auaacuaccguauagggua

SEQ ID NO: 1602775 - RNA, 19 nt, Artificial Sequence
  Description of Artificial Sequence: Synthetic oligonucleotide
  Sense strand starting at position 737 of SEQ ID NO: 1560479
gaaguaauauacccaaggu

SEQ ID NO: 1602776 - RNA, 19 nt, Artificial Sequence
  Description of Artificial Sequence: Synthetic oligonucleotide
  Antisense strand to SEQ ID NO: 1602775
accuuggguauauuacuuc

SEQ ID NO: 1602777 - RNA, 19 nt, Artificial Sequence
  Description of Artificial Sequence: Synthetic oligonucleotide
  Sense strand starting at position 762 of SEQ ID NO: 1560479
gcuggaaaugcugaaucca

SEQ ID NO: 1602778 - RNA, 19 nt, Artificial Sequence
  Description of Artificial Sequence: Synthetic oligonucleotide
  Antisense strand to SEQ ID NO: 1602777
uggauucagcauuuccagc

SEQ ID NO: 1602779 - RNA, 19 nt, Artificial Sequence
  Description of Artificial Sequence: Synthetic oligonucleotide
  Sense strand starting at position 810 of SEQ ID NO: 1560479
cccucagacucucuugaga

SEQ ID NO: 1602780 - RNA, 19 nt, Artificial Sequence
  Description of Artificial Sequence: Synthetic oligonucleotide
  Antisense strand to SEQ ID NO: 1602779
ucucaagagagucugaggg

SEQ ID NO: 1602781 - RNA, 19 nt, Artificial Sequence
  Description of Artificial Sequence: Synthetic oligonucleotide
  Sense strand starting at position 913 of SEQ ID NO: 1560479
agaagacccuagucuucuu

SEQ ID NO: 1602782 - RNA, 19 nt, Artificial Sequence
  Description of Artificial Sequence: Synthetic oligonucleotide
  Antisense strand to SEQ ID NO: 1602781
aagaagacuagggucuucu

SEQ ID NO: 1602783 - RNA, 19 nt, Artificial Sequence
  Description of Artificial Sequence: Synthetic oligonucleotide
  Sense strand starting at position 1228 of SEQ ID NO: 1560479
gccguuugugaagaaggga

SEQ ID NO: 1602784 - RNA, 19 nt, Artificial Sequence
  Description of Artificial Sequence: Synthetic oligonucleotide
  Antisense strand to SEQ ID NO: 1602783
ucccuucuucacaaacggc

SEQ ID NO: 1602785 - RNA, 19 nt, Artificial Sequence
  Description of Artificial Sequence: Synthetic oligonucleotide
  Sense strand starting at position 1295 of SEQ ID NO: 1560479
uccugaugggucgauucuu

SEQ ID NO: 1602786 - RNA, 19 nt, Artificial Sequence
  Description of Artificial Sequence: Synthetic oligonucleotide
  Antisense strand to SEQ ID NO: 1602785
aagaaucgacccaucagga

SEQ ID NO: 1602787 - RNA, 19 nt, Artificial Sequence
  Description of Artificial Sequence: Synthetic oligonucleotide
  Sense strand starting at position 1310 of SEQ ID NO: 1560479
ucuugagggucugcugaga

SEQ ID NO: 1602788 - RNA, 19 nt, Artificial Sequence
  Description of Artificial Sequence: Synthetic oligonucleotide
  Antisense strand to SEQ ID NO: 1602787
ucucagcagacccucaaga

SEQ ID NO: 1602789 - RNA, 19 nt, Artificial Sequence
  Description of Artificial Sequence: Synthetic oligonucleotide
  Sense strand starting at position 1719 of SEQ ID NO: 1560479
ccgccaucuuaaccggaaa

SEQ ID NO: 1602790 - RNA, 19 nt, Artificial Sequence
  Description of Artificial Sequence: Synthetic oligonucleotide
  Antisense strand to SEQ ID NO: 1602789
uuuccgguuaagauggcgg

SEQ ID NO: 1602791 - RNA, 19 nt, Artificial Sequence
  Description of Artificial Sequence: Synthetic oligonucleotide
  Sense strand starting at position 2140 of SEQ ID NO: 1560479
gucagucauccuuagaagg

SEQ ID NO: 1602792 - RNA, 19 nt, Artificial Sequence
  Description of Artificial Sequence: Synthetic oligonucleotide
  Antisense strand to SEQ ID NO: 1602791
ccuucuaaggaugacugac

SEQ ID NO: 1602793 - RNA, 19 nt, Artificial Sequence
  Description of Artificial Sequence: Synthetic oligonucleotide
  Sense strand starting at position 2430 of SEQ ID NO: 1560479
cccagagcccagcaagauu

SEQ ID NO: 1602794 - RNA, 19 nt, Artificial Sequence
  Description of Artificial Sequence: Synthetic oligonucleotide
  Antisense strand to SEQ ID NO: 1602793
aaucuugcugggcucuggg

SEQ ID NO: 1602795 - RNA, 19 nt, Artificial Sequence
  Description of Artificial Sequence: Synthetic oligonucleotide
  Sense strand starting at position 2538 of SEQ ID NO: 1560479
gccgaucugcagagguguu

SEQ ID NO: 1602796 - RNA, 19 nt, Artificial Sequence
  Description of Artificial Sequence: Synthetic oligonucleotide
  Antisense strand to SEQ ID NO: 1602795
aacaccucugcagaucggc

SEQ ID NO: 1602797 - RNA, 19 nt, Artificial Sequence
  Description of Artificial Sequence: Synthetic oligonucleotide
  Sense strand starting at position 2561 of SEQ ID NO: 1560479
cugggcugggcuuaaagaa

SEQ ID NO: 1602798 - RNA, 19 nt, Artificial Sequence
  Description of Artificial Sequence: Synthetic oligonucleotide
  Antisense strand to SEQ ID NO: 1602797
uucuuuaagcccagcccag

SEQ ID NO: 1602799 - RNA, 19 nt, Artificial Sequence
  Description of Artificial Sequence: Synthetic oligonucleotide
  Sense strand starting at position 2575 of SEQ ID NO: 1560479
aagaaacucccguguugau

SEQ ID NO: 1602800 - RNA, 19 nt, Artificial Sequence
  Description of Artificial Sequence: Synthetic oligonucleotide
  Antisense strand to SEQ ID NO: 1602799
aucaacacgggaguuucuu

SEQ ID NO: 1602801 - RNA, 19 nt, Artificial Sequence
  Description of Artificial Sequence: Synthetic oligonucleotide
  Sense strand starting at position 2774 of SEQ ID NO: 1560479
gugugugguguuucuagca

SEQ ID NO: 1602802 - RNA, 19 nt, Artificial Sequence
  Description of Artificial Sequence: Synthetic oligonucleotide
  Antisense strand to SEQ ID NO: 1602801
ugcuagaaacaccacacac

SEQ ID NO: 1602803 - RNA, 19 nt, Artificial Sequence
  Description of Artificial Sequence: Synthetic oligonucleotide
  Sense strand starting at position 2868 of SEQ ID NO: 1560479
uaagaaugugguggcuuaa

SEQ ID NO: 1602804 - RNA, 19 nt, Artificial Sequence
  Description of Artificial Sequence: Synthetic oligonucleotide
  Antisense strand to SEQ ID NO: 1602803
uuaagccaccacauucuua

SEQ ID NO: 1602805 - RNA, 19 nt, Artificial Sequence
  Description of Artificial Sequence: Synthetic oligonucleotide
  Sense strand starting at position 2908 of SEQ ID NO: 1560479
ugcaguuauggagggcaga

SEQ ID NO: 1602806 - RNA, 19 nt, Artificial Sequence
  Description of Artificial Sequence: Synthetic oligonucleotide
  Antisense strand to SEQ ID NO: 1602805
ucugcccuccauaacugca

SEQ ID NO: 1602807 - RNA, 19 nt, Artificial Sequence
  Description of Artificial Sequence: Synthetic oligonucleotide
  Sense strand starting at position 2909 of SEQ ID NO: 1560479
gcaguuauggagggcagaa

SEQ ID NO: 1602808 - RNA, 19 nt, Artificial Sequence
  Description of Artificial Sequence: Synthetic oligonucleotide
  Antisense strand to SEQ ID NO: 1602807
uucugcccuccauaacugc

SEQ ID NO: 1602809 - RNA, 19 nt, Artificial Sequence
  Description of Artificial Sequence: Synthetic oligonucleotide
  Sense strand starting at position 2955 of SEQ ID NO: 1560479
aucaaacugucagcaggau

SEQ ID NO: 1602810 - RNA, 19 nt, Artificial Sequence
  Description of Artificial Sequence: Synthetic oligonucleotide
  Antisense strand to SEQ ID NO: 1602809
auccugcugacaguuugau

SEQ ID NO: 1602811 - RNA, 19 nt, Artificial Sequence
  Description of Artificial Sequence: Synthetic oligonucleotide
  Sense strand starting at position 2956 of SEQ ID NO: 1560479
ucaaacugucagcaggauu

SEQ ID NO: 1602812 - RNA, 19 nt, Artificial Sequence
  Description of Artificial Sequence: Synthetic oligonucleotide
  Antisense strand to SEQ ID NO: 1602811
aauccugcugacaguuuga

SEQ ID NO: 1602813 - RNA, 19 nt, Artificial Sequence
  Description of Artificial Sequence: Synthetic oligonucleotide
  Sense strand starting at position 2967 of SEQ ID NO: 1560479
gcaggauugcaucacuucu

SEQ ID NO: 1602814 - RNA, 19 nt, Artificial Sequence
  Description of Artificial Sequence: Synthetic oligonucleotide
  Antisense strand to SEQ ID NO: 1602813
agaagugaugcaauccugc

SEQ ID NO: 1602815 - RNA, 19 nt, Artificial Sequence
  Description of Artificial Sequence: Synthetic oligonucleotide
  Sense strand starting at position 3139 of SEQ ID NO: 1560479
ugugauuccaucgagcuca

SEQ ID NO: 1602816 - RNA, 19 nt, Artificial Sequence
  Description of Artificial Sequence: Synthetic oligonucleotide
  Antisense strand to SEQ ID NO: 1602815
ugagcucgauggaaucaca

SEQ ID NO: 1602817 - RNA, 19 nt, Artificial Sequence
  Description of Artificial Sequence: Synthetic oligonucleotide
  Sense strand starting at position 3159 of SEQ ID NO: 1560479
ccaaauaacugggauaauc

SEQ ID NO: 1602818 - RNA, 19 nt, Artificial Sequence
  Description of Artificial Sequence: Synthetic oligonucleotide
  Antisense strand to SEQ ID NO: 1602817
gauuaucccaguuauuugg

SEQ ID NO: 1602819 - RNA, 19 nt, Artificial Sequence
  Description of Artificial Sequence: Synthetic oligonucleotide
  Sense strand starting at position 3169 of SEQ ID NO: 1560479
gggauaaucucccuaucuc

SEQ ID NO: 1602820 - RNA, 19 nt, Artificial Sequence
  Description of Artificial Sequence: Synthetic oligonucleotide
  Antisense strand to SEQ ID NO: 1602819
gagauagggagauuauccc

SEQ ID NO: 1602821 - RNA, 19 nt, Artificial Sequence
  Description of Artificial Sequence: Synthetic oligonucleotide
  Sense strand starting at position 3230 of SEQ ID NO: 1560479
ugcacagauccugggaauu

SEQ ID NO: 1602822 - RNA, 19 nt, Artificial Sequence
  Description of Artificial Sequence: Synthetic oligonucleotide
  Antisense strand to SEQ ID NO: 1602821
aauucccaggaucugugca

SEQ ID NO: 1602823 - RNA, 19 nt, Artificial Sequence
  Description of Artificial Sequence: Synthetic oligonucleotide
  Sense strand starting at position 3253 of SEQ ID NO: 1560479
cacggacaucuauguacaa

SEQ ID NO: 1602824 - RNA, 19 nt, Artificial Sequence
  Description of Artificial Sequence: Synthetic oligonucleotide
  Antisense strand to SEQ ID NO: 1602823
uuguacauagauguccgug

SEQ ID NO: 1602825 - RNA, 19 nt, Artificial Sequence
  Description of Artificial Sequence: Synthetic oligonucleotide
  Sense strand starting at position 3255 of SEQ ID NO: 1560479
cggacaucuauguacaagu

SEQ ID NO: 1602826 - RNA, 19 nt, Artificial Sequence
  Description of Artificial Sequence: Synthetic oligonucleotide
  Antisense strand to SEQ ID NO: 1602825
acuuguacauagauguccg

SEQ ID NO: 1602827 - RNA, 19 nt, Artificial Sequence
  Description of Artificial Sequence: Synthetic oligonucleotide
  Sense strand starting at position 3268 of SEQ ID NO: 1560479
acaagucuaucaguuuaua

SEQ ID NO: 1602828 - RNA, 19 nt, Artificial Sequence
  Description of Artificial Sequence: Synthetic oligonucleotide
  Antisense strand to SEQ ID NO: 1602827
uauaaacugauagacuugu

SEQ ID NO: 1602829 - RNA, 19 nt, Artificial Sequence
  Description of Artificial Sequence: Synthetic oligonucleotide
  Sense strand starting at position 3439 of SEQ ID NO: 1560479
gauggcaucugcuuauauc

SEQ ID NO: 1602830 - RNA, 19 nt, Artificial Sequence
  Description of Artificial Sequence: Synthetic oligonucleotide
  Antisense strand to SEQ ID NO: 1602829
gauauaagcagaugccauc

SEQ ID NO: 1602831 - RNA, 19 nt, Artificial Sequence
  Description of Artificial Sequence: Synthetic oligonucleotide
  Sense strand starting at position 3440 of SEQ ID NO: 1560479
auggcaucugcuuauauca

SEQ ID NO: 1602832 - RNA, 19 nt, Artificial Sequence
  Description of Artificial Sequence: Synthetic oligonucleotide
  Antisense strand to SEQ ID NO: 1602831
ugauauaagcagaugccau

SEQ ID NO: 1602833 - RNA, 19 nt, Artificial Sequence
  Description of Artificial Sequence: Synthetic oligonucleotide
  Sense strand starting at position 3517 of SEQ ID NO: 1560479
gggaacuaugacugcccua

SEQ ID NO: 1602834 - RNA, 19 nt, Artificial Sequence
  Description of Artificial Sequence: Synthetic oligonucleotide
  Antisense strand to SEQ ID NO: 1602833
uagggcagucauaguuccc

SEQ ID NO: 1602835 - RNA, 19 nt, Artificial Sequence
  Description of Artificial Sequence: Synthetic oligonucleotide
  Sense strand starting at position 17 of SEQ ID NO: 1560480
ggagauccaucagucauuc

SEQ ID NO: 1602836 - RNA, 19 nt, Artificial Sequence
  Description of Artificial Sequence: Synthetic oligonucleotide
  Antisense strand to SEQ ID NO: 1602835
gaaugacugauggaucucc

SEQ ID NO: 1602837 - RNA, 19 nt, Artificial Sequence
  Description of Artificial Sequence: Synthetic oligonucleotide
  Sense strand starting at position 556 of SEQ ID NO: 1560480
auguaaguggguuagcaua

SEQ ID NO: 1602838 - RNA, 19 nt, Artificial Sequence
  Description of Artificial Sequence: Synthetic oligonucleotide
  Antisense strand to SEQ ID NO: 1602837
uaugcuaacccacuuacau

SEQ ID NO: 1602839 - RNA, 19 nt, Artificial Sequence
  Description of Artificial Sequence: Synthetic oligonucleotide
  Sense strand starting at position 558 of SEQ ID NO: 1560480
guaaguggguuagcauaau

SEQ ID NO: 1602840 - RNA, 19 nt, Artificial Sequence
  Description of Artificial Sequence: Synthetic oligonucleotide
  Antisense strand to SEQ ID NO: 1602839
auuaugcuaacccacuuac

SEQ ID NO: 1602841 - RNA, 19 nt, Artificial Sequence
  Description of Artificial Sequence: Synthetic oligonucleotide
  Sense strand starting at position 578 of SEQ ID NO: 1560480
cucuguauacaguaauugu

SEQ ID NO: 1602842 - RNA, 19 nt, Artificial Sequence
  Description of Artificial Sequence: Synthetic oligonucleotide
  Antisense strand to SEQ ID NO: 1602841
acaauuacuguauacagag

SEQ ID NO: 1602843 - RNA, 19 nt, Artificial Sequence
  Description of Artificial Sequence: Synthetic oligonucleotide
  Sense strand starting at position 586 of SEQ ID NO: 1560480
acaguaauugucgauuaaa

SEQ ID NO: 1602844 - RNA, 19 nt, Artificial Sequence
  Description of Artificial Sequence: Synthetic oligonucleotide
  Antisense strand to SEQ ID NO: 1602843
uuuaaucgacaauuacugu

SEQ ID NO: 1602845 - RNA, 19 nt, Artificial Sequence
  Description of Artificial Sequence: Synthetic oligonucleotide
  Sense strand starting at position 589 of SEQ ID NO: 1560480
guaauugucgauuaaacau

SEQ ID NO: 1602846 - RNA, 19 nt, Artificial Sequence
  Description of Artificial Sequence: Synthetic oligonucleotide
  Antisense strand to SEQ ID NO: 1602845
auguuuaaucgacaauuac

SEQ ID NO: 1602847 - RNA, 19 nt, Artificial Sequence
  Description of Artificial Sequence: Synthetic oligonucleotide
  Sense strand starting at position 653 of SEQ ID NO: 1560480
gguauauaucauuguuauc

SEQ ID NO: 1602848 - RNA, 19 nt, Artificial Sequence
  Description of Artificial Sequence: Synthetic oligonucleotide
  Antisense strand to SEQ ID NO: 1602847
gauaacaaugauauauacc

SEQ ID NO: 1602849 - RNA, 19 nt, Artificial Sequence
  Description of Artificial Sequence: Synthetic oligonucleotide
  Sense strand starting at position 673 of SEQ ID NO: 1560480
ccacuucgcagaugagaaa

SEQ ID NO: 1602850 - RNA, 19 nt, Artificial Sequence
  Description of Artificial Sequence: Synthetic oligonucleotide
  Antisense strand to SEQ ID NO: 1602849
uuucucaucugcgaagugg

SEQ ID NO: 1602851 - RNA, 19 nt, Artificial Sequence
  Description of Artificial Sequence: Synthetic oligonucleotide
  Sense strand starting at position 741 of SEQ ID NO: 1560480
uuggcaaagccugaaauca

SEQ ID NO: 1602852 - RNA, 19 nt, Artificial Sequence
  Description of Artificial Sequence: Synthetic oligonucleotide
  Antisense strand to SEQ ID NO: 1602851
ugauuucaggcuuugccaa

SEQ ID NO: 1602853 - RNA, 19 nt, Artificial Sequence
  Description of Artificial Sequence: Synthetic oligonucleotide
  Sense strand starting at position 1084 of SEQ ID NO: 1560480
acagcagucugacuacaga

SEQ ID NO: 1602854 - RNA, 19 nt, Artificial Sequence
  Description of Artificial Sequence: Synthetic oligonucleotide
  Antisense strand to SEQ ID NO: 1602853
ucuguagucagacugcugu

SEQ ID NO: 1602855 - RNA, 19 nt, Artificial Sequence
  Description of Artificial Sequence: Synthetic oligonucleotide
  Sense strand starting at position 1199 of SEQ ID NO: 1560480
uacccuauacgguaguuau

SEQ ID NO: 1602856 - RNA, 19 nt, Artificial Sequence
  Description of Artificial Sequence: Synthetic oligonucleotide
  Antisense strand to SEQ ID NO: 1602855
auaacuaccguauagggua

SEQ ID NO: 1602857 - RNA, 19 nt, Artificial Sequence
  Description of Artificial Sequence: Synthetic oligonucleotide
  Sense strand starting at position 1263 of SEQ ID NO: 1560480
gaaguaauauacccaaggu

SEQ ID NO: 1602858 - RNA, 19 nt, Artificial Sequence
  Description of Artificial Sequence: Synthetic oligonucleotide
  Antisense strand to SEQ ID NO: 1602857
accuuggguauauuacuuc

SEQ ID NO: 1602859 - RNA, 19 nt, Artificial Sequence
  Description of Artificial Sequence: Synthetic oligonucleotide
  Sense strand starting at position 1288 of SEQ ID NO: 1560480
gcuggaaaugcugaaucca

SEQ ID NO: 1602860 - RNA, 19 nt, Artificial Sequence
  Description of Artificial Sequence: Synthetic oligonucleotide
  Antisense strand to SEQ ID NO: 1602859
uggauucagcauuuccagc

SEQ ID NO: 1602861 - RNA, 19 nt, Artificial Sequence
  Description of Artificial Sequence: Synthetic oligonucleotide
  Sense strand starting at position 1336 of SEQ ID NO: 1560480
cccucagacucucuugaga

SEQ ID NO: 1602862 - RNA, 19 nt, Artificial Sequence
  Description of Artificial Sequence: Synthetic oligonucleotide
  Antisense strand to SEQ ID NO: 1602861
ucucaagagagucugaggg

SEQ ID NO: 1602863 - RNA, 19 nt, Artificial Sequence
  Description of Artificial Sequence: Synthetic oligonucleotide
  Sense strand starting at position 1439 of SEQ ID NO: 1560480
agaagacccuagucuucuu

SEQ ID NO: 1602864 - RNA, 19 nt, Artificial Sequence
  Description of Artificial Sequence: Synthetic oligonucleotide
  Antisense strand to SEQ ID NO: 1602863
aagaagacuagggucuucu

SEQ ID NO: 1602865 - RNA, 19 nt, Artificial Sequence
  Description of Artificial Sequence: Synthetic oligonucleotide
  Sense strand starting at position 1754 of SEQ ID NO: 1560480
gccguuugugaagaaggga

SEQ ID NO: 1602866 - RNA, 19 nt, Artificial Sequence
  Description of Artificial Sequence: Synthetic oligonucleotide
  Antisense strand to SEQ ID NO: 1602865
ucccuucuucacaaacggc

SEQ ID NO: 1602867 - RNA, 19 nt, Artificial Sequence
  Description of Artificial Sequence: Synthetic oligonucleotide
  Sense strand starting at position 1821 of SEQ ID NO: 1560480
uccugaugggucgauucuu

SEQ ID NO: 1602868 - RNA, 19 nt, Artificial Sequence
  Description of Artificial Sequence: Synthetic oligonucleotide
  Antisense strand to SEQ ID NO: 1602867
aagaaucgacccaucagga

SEQ ID NO: 1602869 - RNA, 19 nt, Artificial Sequence
  Description of Artificial Sequence: Synthetic oligonucleotide
  Sense strand starting at position 1836 of SEQ ID NO: 1560480
ucuugagggucugcugaga

SEQ ID NO: 1602870 - RNA, 19 nt, Artificial Sequence
  Description of Artificial Sequence: Synthetic oligonucleotide
  Antisense strand to SEQ ID NO: 1602869
ucucagcagacccucaaga

SEQ ID NO: 1602871 - RNA, 19 nt, Artificial Sequence
  Description of Artificial Sequence: Synthetic oligonucleotide
  Sense strand starting at position 2245 of SEQ ID NO: 1560480
ccgccaucuuaaccggaaa

SEQ ID NO: 1602872 - RNA, 19 nt, Artificial Sequence
  Description of Artificial Sequence: Synthetic oligonucleotide
  Antisense strand to SEQ ID NO: 1602871
uuuccgguuaagauggcgg

SEQ ID NO: 1602873 - RNA, 19 nt, Artificial Sequence
  Description of Artificial Sequence: Synthetic oligonucleotide
  Sense strand starting at position 2666 of SEQ ID NO: 1560480
gucagucauccuuagaagg

SEQ ID NO: 1602874 - RNA, 19 nt, Artificial Sequence
  Description of Artificial Sequence: Synthetic oligonucleotide
  Antisense strand to SEQ ID NO: 1602873
ccuucuaaggaugacugac

SEQ ID NO: 1602875 - RNA, 19 nt, Artificial Sequence
  Description of Artificial Sequence: Synthetic oligonucleotide
  Sense strand starting at position 2956 of SEQ ID NO: 1560480
cccagagcccagcaagauu

SEQ ID NO: 1602876 - RNA, 19 nt, Artificial Sequence
  Description of Artificial Sequence: Synthetic oligonucleotide
  Antisense strand to SEQ ID NO: 1602875
aaucuugcugggcucuggg

SEQ ID NO: 1602877 - RNA, 19 nt, Artificial Sequence
  Description of Artificial Sequence: Synthetic oligonucleotide
  Sense strand starting at position 3064 of SEQ ID NO: 1560480
gccgaucugcagagguguu

SEQ ID NO: 1602878 - RNA, 19 nt, Artificial Sequence
  Description of Artificial Sequence: Synthetic oligonucleotide
  Antisense strand to SEQ ID NO: 1602877
aacaccucugcagaucggc

SEQ ID NO: 1602879 - RNA, 19 nt, Artificial Sequence
  Description of Artificial Sequence: Synthetic oligonucleotide
  Sense strand starting at position 3087 of SEQ ID NO: 1560480
cugggcugggcuuaaagaa

SEQ ID NO: 1602880 - RNA, 19 nt, Artificial Sequence
  Description of Artificial Sequence: Synthetic oligonucleotide
  Antisense strand to SEQ ID NO: 1602879
uucuuuaagcccagcccag

SEQ ID NO: 1602881 - RNA, 19 nt, Artificial Sequence
  Description of Artificial Sequence: Synthetic oligonucleotide
  Sense strand starting at position 3101 of SEQ ID NO: 1560480
aagaaacucccguguugau

SEQ ID NO: 1602882 - RNA, 19 nt, Artificial Sequence
  Description of Artificial Sequence: Synthetic oligonucleotide
  Antisense strand to SEQ ID NO: 1602881
aucaacacgggaguuucuu

SEQ ID NO: 1602883 - RNA, 19 nt, Artificial Sequence
  Description of Artificial Sequence: Synthetic oligonucleotide
  Sense strand starting at position 3300 of SEQ ID NO: 1560480
gugugugguguuucuagca

SEQ ID NO: 1602884 - RNA, 19 nt, Artificial Sequence
  Description of Artificial Sequence: Synthetic oligonucleotide
  Antisense strand to SEQ ID NO: 1602883
ugcuagaaacaccacacac

SEQ ID NO: 1602885 - RNA, 19 nt, Artificial Sequence
  Description of Artificial Sequence: Synthetic oligonucleotide
  Sense strand starting at position 3394 of SEQ ID NO: 1560480
uaagaaugugguggcuuaa

SEQ ID NO: 1602886 - RNA, 19 nt, Artificial Sequence
  Description of Artificial Sequence: Synthetic oligonucleotide
  Antisense strand to SEQ ID NO: 1602885
uuaagccaccacauucuua

SEQ ID NO: 1602887 - RNA, 19 nt, Artificial Sequence
  Description of Artificial Sequence: Synthetic oligonucleotide
  Sense strand starting at position 3434 of SEQ ID NO: 1560480
ugcaguuauggagggcaga

SEQ ID NO: 1602888 - RNA, 19 nt, Artificial Sequence
  Description of Artificial Sequence: Synthetic oligonucleotide
  Antisense strand to SEQ ID NO: 1602887
ucugcccuccauaacugca

SEQ ID NO: 1602889 - RNA, 19 nt, Artificial Sequence
  Description of Artificial Sequence: Synthetic oligonucleotide
  Sense strand starting at position 3435 of SEQ ID NO: 1560480
gcaguuauggagggcagaa

SEQ ID NO: 1602890 - RNA, 19 nt, Artificial Sequence
  Description of Artificial Sequence: Synthetic oligonucleotide
  Antisense strand to SEQ ID NO: 1602889
uucugcccuccauaacugc

SEQ ID NO: 1602891 - RNA, 19 nt, Artificial Sequence
  Description of Artificial Sequence: Synthetic oligonucleotide
  Sense strand starting at position 3481 of SEQ ID NO: 1560480
aucaaacugucagcaggau

SEQ ID NO: 1602892 - RNA, 19 nt, Artificial Sequence
  Description of Artificial Sequence: Synthetic oligonucleotide
  Antisense strand to SEQ ID NO: 1602891
auccugcugacaguuugau

SEQ ID NO: 1602893 - RNA, 19 nt, Artificial Sequence
  Description of Artificial Sequence: Synthetic oligonucleotide
  Sense strand starting at position 3482 of SEQ ID NO: 1560480
ucaaacugucagcaggauu

SEQ ID NO: 1602894 - RNA, 19 nt, Artificial Sequence
  Description of Artificial Sequence: Synthetic oligonucleotide
  Antisense strand to SEQ ID NO: 1602893
aauccugcugacaguuuga

SEQ ID NO: 1602895 - RNA, 19 nt, Artificial Sequence
  Description of Artificial Sequence: Synthetic oligonucleotide
  Sense strand starting at position 3493 of SEQ ID NO: 1560480
gcaggauugcaucacuucu

SEQ ID NO: 1602896 - RNA, 19 nt, Artificial Sequence
  Description of Artificial Sequence: Synthetic oligonucleotide
  Antisense strand to SEQ ID NO: 1602895
agaagugaugcaauccugc

SEQ ID NO: 1602897 - RNA, 19 nt, Artificial Sequence
  Description of Artificial Sequence: Synthetic oligonucleotide
  Sense strand starting at position 3665 of SEQ ID NO: 1560480
ugugauuccaucgagcuca

SEQ ID NO: 1602898 - RNA, 19 nt, Artificial Sequence
  Description of Artificial Sequence: Synthetic oligonucleotide
  Antisense strand to SEQ ID NO: 1602897
ugagcucgauggaaucaca

SEQ ID NO: 1602899 - RNA, 19 nt, Artificial Sequence
  Description of Artificial Sequence: Synthetic oligonucleotide
  Sense strand starting at position 3685 of SEQ ID NO: 1560480
ccaaauaacugggauaauc

SEQ ID NO: 1602900 - RNA, 19 nt, Artificial Sequence
  Description of Artificial Sequence: Synthetic oligonucleotide
  Antisense strand to SEQ ID NO: 1602899
gauuaucccaguuauuugg

SEQ ID NO: 1602901 - RNA, 19 nt, Artificial Sequence
  Description of Artificial Sequence: Synthetic oligonucleotide
  Sense strand starting at position 3695 of SEQ ID NO: 1560480
gggauaaucucccuaucuc

SEQ ID NO: 1602902 - RNA, 19 nt, Artificial Sequence
  Description of Artificial Sequence: Synthetic oligonucleotide
  Antisense strand to SEQ ID NO: 1602901
gagauagggagauuauccc

SEQ ID NO: 1602903 - RNA, 19 nt, Artificial Sequence
  Description of Artificial Sequence: Synthetic oligonucleotide
  Sense strand starting at position 3756 of SEQ ID NO: 1560480
ugcacagauccugggaauu

SEQ ID NO: 1602904 - RNA, 19 nt, Artificial Sequence
  Description of Artificial Sequence: Synthetic oligonucleotide
  Antisense strand to SEQ ID NO: 1602903
aauucccaggaucugugca

SEQ ID NO: 1602905 - RNA, 19 nt, Artificial Sequence
  Description of Artificial Sequence: Synthetic oligonucleotide
  Sense strand starting at position 3779 of SEQ ID NO: 1560480
cacggacaucuauguacaa

SEQ ID NO: 1602906 - RNA, 19 nt, Artificial Sequence
  Description of Artificial Sequence: Synthetic oligonucleotide
  Antisense strand to SEQ ID NO: 1602905
uuguacauagauguccgug

SEQ ID NO: 1602907 - RNA, 19 nt, Artificial Sequence
  Description of Artificial Sequence: Synthetic oligonucleotide
  Sense strand starting at position 3781 of SEQ ID NO: 1560480
cggacaucuauguacaagu

SEQ ID NO: 1602908 - RNA, 19 nt, Artificial Sequence
  Description of Artificial Sequence: Synthetic oligonucleotide
  Antisense strand to SEQ ID NO: 1602907
acuuguacauagauguccg

SEQ ID NO: 1602909 - RNA, 19 nt, Artificial Sequence
  Description of Artificial Sequence: Synthetic oligonucleotide
  Sense strand starting at position 3794 of SEQ ID NO: 1560480
acaagucuaucaguuuaua

SEQ ID NO: 1602910 - RNA, 19 nt, Artificial Sequence
  Description of Artificial Sequence: Synthetic oligonucleotide
  Antisense strand to SEQ ID NO: 1602909
uauaaacugauagacuugu

SEQ ID NO: 1602911 - RNA, 19 nt, Artificial Sequence
  Description of Artificial Sequence: Synthetic oligonucleotide
  Sense strand starting at position 3965 of SEQ ID NO: 1560480
gauggcaucugcuuauauc

SEQ ID NO: 1602912 - RNA, 19 nt, Artificial Sequence
  Description of Artificial Sequence: Synthetic oligonucleotide
  Antisense strand to SEQ ID NO: 1602911
gauauaagcagaugccauc

SEQ ID NO: 1602913 - RNA, 19 nt, Artificial Sequence
  Description of Artificial Sequence: Synthetic oligonucleotide
  Sense strand starting at position 3966 of SEQ ID NO: 1560480
auggcaucugcuuauauca

SEQ ID NO: 1602914 - RNA, 19 nt, Artificial Sequence
  Description of Artificial Sequence: Synthetic oligonucleotide
  Antisense strand to SEQ ID NO: 1602913
ugauauaagcagaugccau

SEQ ID NO: 1602915 - RNA, 19 nt, Artificial Sequence
  Description of Artificial Sequence: Synthetic oligonucleotide
  Sense strand starting at position 95 of SEQ ID NO: 1560481
uggcuaacacagugauuag

SEQ ID NO: 1602916 - RNA, 19 nt, Artificial Sequence
  Description of Artificial Sequence: Synthetic oligonucleotide
  Antisense strand to SEQ ID NO: 1602915
cuaaucacuguguuagcca

SEQ ID NO: 1602917 - RNA, 19 nt, Artificial Sequence
  Description of Artificial Sequence: Synthetic oligonucleotide
  Sense strand starting at position 105 of SEQ ID NO: 1560481
agugauuagccggguguga

SEQ ID NO: 1602918 - RNA, 19 nt, Artificial Sequence
  Description of Artificial Sequence: Synthetic oligonucleotide
  Antisense strand to SEQ ID NO: 1602917
ucacacccggcuaaucacu

SEQ ID NO: 1602919 - RNA, 19 nt, Artificial Sequence
  Description of Artificial Sequence: Synthetic oligonucleotide
  Sense strand starting at position 107 of SEQ ID NO: 1560481
ugauuagccgggugugaug

SEQ ID NO: 1602920 - RNA, 19 nt, Artificial Sequence
  Description of Artificial Sequence: Synthetic oligonucleotide
  Antisense strand to SEQ ID NO: 1602919
caucacacccggcuaauca

SEQ ID NO: 1602921 - RNA, 19 nt, Artificial Sequence
  Description of Artificial Sequence: Synthetic oligonucleotide
  Sense strand starting at position 313 of SEQ ID NO: 1560481
uggaucaggucccucagau

SEQ ID NO: 1602922 - RNA, 19 nt, Artificial Sequence
  Description of Artificial Sequence: Synthetic oligonucleotide
  Antisense strand to SEQ ID NO: 1602921
aucugagggaccugaucca

SEQ ID NO: 1602923 - RNA, 19 nt, Artificial Sequence
  Description of Artificial Sequence: Synthetic oligonucleotide
  Sense strand starting at position 387 of SEQ ID NO: 1560481
agauuccugucucagauuu

SEQ ID NO: 1602924 - RNA, 19 nt, Artificial Sequence
  Description of Artificial Sequence: Synthetic oligonucleotide
  Antisense strand to SEQ ID NO: 1602923
aaaucugagacaggaaucu

SEQ ID NO: 1602925 - RNA, 19 nt, Artificial Sequence
  Description of Artificial Sequence: Synthetic oligonucleotide
  Sense strand starting at position 389 of SEQ ID NO: 1560481
auuccugucucagauuugu

SEQ ID NO: 1602926 - RNA, 19 nt, Artificial Sequence
  Description of Artificial Sequence: Synthetic oligonucleotide
  Antisense strand to SEQ ID NO: 1602925
acaaaucugagacaggaau

SEQ ID NO: 1602927 - RNA, 19 nt, Artificial Sequence
  Description of Artificial Sequence: Synthetic oligonucleotide
  Sense strand starting at position 394 of SEQ ID NO: 1560481
ugucucagauuuguucuau

SEQ ID NO: 1602928 - RNA, 19 nt, Artificial Sequence
  Description of Artificial Sequence: Synthetic oligonucleotide
  Antisense strand to SEQ ID NO: 1602927
auagaacaaaucugagaca

SEQ ID NO: 1602929 - RNA, 19 nt, Artificial Sequence
  Description of Artificial Sequence: Synthetic oligonucleotide
  Sense strand starting at position 395 of SEQ ID NO: 1560481
gucucagauuuguucuauc

SEQ ID NO: 1602930 - RNA, 19 nt, Artificial Sequence
  Description of Artificial Sequence: Synthetic oligonucleotide
  Antisense strand to SEQ ID NO: 1602929
gauagaacaaaucugagac

SEQ ID NO: 1602931 - RNA, 19 nt, Artificial Sequence
  Description of Artificial Sequence: Synthetic oligonucleotide
  Sense strand starting at position 398 of SEQ ID NO: 1560481
ucagauuuguucuaucuug

SEQ ID NO: 1602932 - RNA, 19 nt, Artificial Sequence
  Description of Artificial Sequence: Synthetic oligonucleotide
  Antisense strand to SEQ ID NO: 1602931
caagauagaacaaaucuga

SEQ ID NO: 1602933 - RNA, 19 nt, Artificial Sequence
  Description of Artificial Sequence: Synthetic oligonucleotide
  Sense strand starting at position 430 of SEQ ID NO: 1560481
ggacacuggcuccauacau

SEQ ID NO: 1602934 - RNA, 19 nt, Artificial Sequence
  Description of Artificial Sequence: Synthetic oligonucleotide
  Antisense strand to SEQ ID NO: 1602933
auguauggagccagugucc

SEQ ID NO: 1602935 - RNA, 19 nt, Artificial Sequence
  Description of Artificial Sequence: Synthetic oligonucleotide
  Sense strand starting at position 456 of SEQ ID NO: 1560481
gggagauucugggaccauu

SEQ ID NO: 1602936 - RNA, 19 nt, Artificial Sequence
  Description of Artificial Sequence: Synthetic oligonucleotide
  Antisense strand to SEQ ID NO: 1602935
aauggucccagaaucuccc

SEQ ID NO: 1602937 - RNA, 19 nt, Artificial Sequence
  Description of Artificial Sequence: Synthetic oligonucleotide
  Sense strand starting at position 488 of SEQ ID NO: 1560481
gagaaaugguuacucagcu

SEQ ID NO: 1602938 - RNA, 19 nt, Artificial Sequence
  Description of Artificial Sequence: Synthetic oligonucleotide
  Antisense strand to SEQ ID NO: 1602937
agcugaguaaccauuucuc

SEQ ID NO: 1602939 - RNA, 19 nt, Artificial Sequence
  Description of Artificial Sequence: Synthetic oligonucleotide
  Sense strand starting at position 489 of SEQ ID NO: 1560481
agaaaugguuacucagcua

SEQ ID NO: 1602940 - RNA, 19 nt, Artificial Sequence
  Description of Artificial Sequence: Synthetic oligonucleotide
  Antisense strand to SEQ ID NO: 1602939
uagcugaguaaccauuucu

SEQ ID NO: 1602941 - RNA, 19 nt, Artificial Sequence
  Description of Artificial Sequence: Synthetic oligonucleotide
  Sense strand starting at position 496 of SEQ ID NO: 1560481
guuacucagcuagaaagca

SEQ ID NO: 1602942 - RNA, 19 nt, Artificial Sequence
  Description of Artificial Sequence: Synthetic oligonucleotide
  Antisense strand to SEQ ID NO: 1602941
ugcuuucuagcugaguaac

SEQ ID NO: 1602943 - RNA, 19 nt, Artificial Sequence
  Description of Artificial Sequence: Synthetic oligonucleotide
  Sense strand starting at position 846 of SEQ ID NO: 1560481
aggcuuuguugagcuguua

SEQ ID NO: 1602944 - RNA, 19 nt, Artificial Sequence
  Description of Artificial Sequence: Synthetic oligonucleotide
  Antisense strand to SEQ ID NO: 1602943
uaacagcucaacaaagccu

SEQ ID NO: 1602945 - RNA, 19 nt, Artificial Sequence
  Description of Artificial Sequence: Synthetic oligonucleotide
  Sense strand starting at position 994 of SEQ ID NO: 1560481
agcuuugggccacggauaa

SEQ ID NO: 1602946 - RNA, 19 nt, Artificial Sequence
  Description of Artificial Sequence: Synthetic oligonucleotide
  Antisense strand to SEQ ID NO: 1602945
uuauccguggcccaaagcu

SEQ ID NO: 1602947 - RNA, 19 nt, Artificial Sequence
  Description of Artificial Sequence: Synthetic oligonucleotide
  Sense strand starting at position 1009 of SEQ ID NO: 1560481
auaagucagcucuggaauu

SEQ ID NO: 1602948 - RNA, 19 nt, Artificial Sequence
  Description of Artificial Sequence: Synthetic oligonucleotide
  Antisense strand to SEQ ID NO: 1602947
aauuccagagcugacuuau

SEQ ID NO: 1602949 - RNA, 19 nt, Artificial Sequence
  Description of Artificial Sequence: Synthetic oligonucleotide
  Sense strand starting at position 1246 of SEQ ID NO: 1560481
cuguaagagacgcaaucua

SEQ ID NO: 1602950 - RNA, 19 nt, Artificial Sequence
  Description of Artificial Sequence: Synthetic oligonucleotide
  Antisense strand to SEQ ID NO: 1602949
uagauugcgucucuuacag

SEQ ID NO: 1602951 - RNA, 19 nt, Artificial Sequence
  Description of Artificial Sequence: Synthetic oligonucleotide
  Sense strand starting at position 1988 of SEQ ID NO: 1560481
ccaggcuaagcuugaauca

SEQ ID NO: 1602952 - RNA, 19 nt, Artificial Sequence
  Description of Artificial Sequence: Synthetic oligonucleotide
  Antisense strand to SEQ ID NO: 1602951
ugauucaagcuuagccugg

SEQ ID NO: 1602953 - RNA, 19 nt, Artificial Sequence
  Description of Artificial Sequence: Synthetic oligonucleotide
  Sense strand starting at position 2016 of SEQ ID NO: 1560481
ccgcgcuaagcgguuuauu

SEQ ID NO: 1602954 - RNA, 19 nt, Artificial Sequence
  Description of Artificial Sequence: Synthetic oligonucleotide
  Antisense strand to SEQ ID NO: 1602953
aauaaaccgcuuagcgcgg

SEQ ID NO: 1602955 - RNA, 19 nt, Artificial Sequence
  Description of Artificial Sequence: Synthetic oligonucleotide
  Sense strand starting at position 2017 of SEQ ID NO: 1560481
cgcgcuaagcgguuuauua

SEQ ID NO: 1602956 - RNA, 19 nt, Artificial Sequence
  Description of Artificial Sequence: Synthetic oligonucleotide
  Antisense strand to SEQ ID NO: 1602955
uaauaaaccgcuuagcgcg

SEQ ID NO: 1602957 - RNA, 19 nt, Artificial Sequence
  Description of Artificial Sequence: Synthetic oligonucleotide
  Sense strand starting at position 2018 of SEQ ID NO: 1560481
gcgcuaagcgguuuauuaa

SEQ ID NO: 1602958 - RNA, 19 nt, Artificial Sequence
  Description of Artificial Sequence: Synthetic oligonucleotide
  Antisense strand to SEQ ID NO: 1602957
uuaauaaaccgcuuagcgc

SEQ ID NO: 1602959 - RNA, 19 nt, Artificial Sequence
  Description of Artificial Sequence: Synthetic oligonucleotide
  Sense strand starting at position 2019 of SEQ ID NO: 1560481
cgcuaagcgguuuauuaag

SEQ ID NO: 1602960 - RNA, 19 nt, Artificial Sequence
  Description of Artificial Sequence: Synthetic oligonucleotide
  Antisense strand to SEQ ID NO: 1602959
cuuaauaaaccgcuuagcg

SEQ ID NO: 1602961 - RNA, 19 nt, Artificial Sequence
  Description of Artificial Sequence: Synthetic oligonucleotide
  Sense strand starting at position 2021 of SEQ ID NO: 1560481
cuaagcgguuuauuaagua

SEQ ID NO: 1602962 - RNA, 19 nt, Artificial Sequence
  Description of Artificial Sequence: Synthetic oligonucleotide
  Antisense strand to SEQ ID NO: 1602961
uacuuaauaaaccgcuuag

SEQ ID NO: 1602963 - RNA, 19 nt, Artificial Sequence
  Description of Artificial Sequence: Synthetic oligonucleotide
  Sense strand starting at position 2025 of SEQ ID NO: 1560481
gcgguuuauuaaguacuuu

SEQ ID NO: 1602964 - RNA, 19 nt, Artificial Sequence
  Description of Artificial Sequence: Synthetic oligonucleotide
  Antisense strand to SEQ ID NO: 1602963
aaaguacuuaauaaaccgc

SEQ ID NO: 1602965 - RNA, 19 nt, Artificial Sequence
  Description of Artificial Sequence: Synthetic oligonucleotide
  Sense strand starting at position 2065 of SEQ ID NO: 1560481
gagaguggagacuguuauu

SEQ ID NO: 1602966 - RNA, 19 nt, Artificial Sequence
  Description of Artificial Sequence: Synthetic oligonucleotide
  Antisense strand to SEQ ID NO: 1602965
aauaacagucuccacucuc

SEQ ID NO: 1602967 - RNA, 19 nt, Artificial Sequence
  Description of Artificial Sequence: Synthetic oligonucleotide
  Sense strand starting at position 2074 of SEQ ID NO: 1560481
gacuguuauuguguccauu

SEQ ID NO: 1602968 - RNA, 19 nt, Artificial Sequence
  Description of Artificial Sequence: Synthetic oligonucleotide
  Antisense strand to SEQ ID NO: 1602967
aauggacacaauaacaguc

SEQ ID NO: 1602969 - RNA, 19 nt, Artificial Sequence
  Description of Artificial Sequence: Synthetic oligonucleotide
  Sense strand starting at position 2076 of SEQ ID NO: 1560481
cuguuauuguguccauuuc

SEQ ID NO: 1602970 - RNA, 19 nt, Artificial Sequence
  Description of Artificial Sequence: Synthetic oligonucleotide
  Antisense strand to SEQ ID NO: 1602969
gaaauggacacaauaacag

SEQ ID NO: 1602971 - RNA, 19 nt, Artificial Sequence
  Description of Artificial Sequence: Synthetic oligonucleotide
  Sense strand starting at position 2167 of SEQ ID NO: 1560481
gccucuuuaaucgagugga

SEQ ID NO: 1602972 - RNA, 19 nt, Artificial Sequence
  Description of Artificial Sequence: Synthetic oligonucleotide
  Antisense strand to SEQ ID NO: 1602971
uccacucgauuaaagaggc

SEQ ID NO: 1602973 - RNA, 19 nt, Artificial Sequence
  Description of Artificial Sequence: Synthetic oligonucleotide
  Sense strand starting at position 2170 of SEQ ID NO: 1560481
ucuuuaaucgaguggauga

SEQ ID NO: 1602974 - RNA, 19 nt, Artificial Sequence
  Description of Artificial Sequence: Synthetic oligonucleotide
  Antisense strand to SEQ ID NO: 1602973
ucauccacucgauuaaaga

SEQ ID NO: 1602975 - RNA, 19 nt, Artificial Sequence
  Description of Artificial Sequence: Synthetic oligonucleotide
  Sense strand starting at position 2282 of SEQ ID NO: 1560481
acgggcauuucucgagaag

SEQ ID NO: 1602976 - RNA, 19 nt, Artificial Sequence
  Description of Artificial Sequence: Synthetic oligonucleotide
  Antisense strand to SEQ ID NO: 1602975
cuucucgagaaaugcccgu

SEQ ID NO: 1602977 - RNA, 19 nt, Artificial Sequence
  Description of Artificial Sequence: Synthetic oligonucleotide
  Sense strand starting at position 2283 of SEQ ID NO: 1560481
cgggcauuucucgagaagc

SEQ ID NO: 1602978 - RNA, 19 nt, Artificial Sequence
  Description of Artificial Sequence: Synthetic oligonucleotide
  Antisense strand to SEQ ID NO: 1602977
gcuucucgagaaaugcccg

SEQ ID NO: 1602979 - RNA, 19 nt, Artificial Sequence
  Description of Artificial Sequence: Synthetic oligonucleotide
  Sense strand starting at position 2284 of SEQ ID NO: 1560481
gggcauuucucgagaagcg

SEQ ID NO: 1602980 - RNA, 19 nt, Artificial Sequence
  Description of Artificial Sequence: Synthetic oligonucleotide
  Antisense strand to SEQ ID NO: 1602979
cgcuucucgagaaaugccc

SEQ ID NO: 1602981 - RNA, 19 nt, Artificial Sequence
  Description of Artificial Sequence: Synthetic oligonucleotide
  Sense strand starting at position 2593 of SEQ ID NO: 1560481
gcucgaaaucccugccugu

SEQ ID NO: 1602982 - RNA, 19 nt, Artificial Sequence
  Description of Artificial Sequence: Synthetic oligonucleotide
  Antisense strand to SEQ ID NO: 1602981
acaggcagggauuucgagc

SEQ ID NO: 1602983 - RNA, 19 nt, Artificial Sequence
  Description of Artificial Sequence: Synthetic oligonucleotide
  Sense strand starting at position 2603 of SEQ ID NO: 1560481
ccugccugucgcugggaaa

SEQ ID NO: 1602984 - RNA, 19 nt, Artificial Sequence
  Description of Artificial Sequence: Synthetic oligonucleotide
  Antisense strand to SEQ ID NO: 1602983
uuucccagcgacaggcagg

SEQ ID NO: 1602985 - RNA, 19 nt, Artificial Sequence
  Description of Artificial Sequence: Synthetic oligonucleotide
  Sense strand starting at position 2714 of SEQ ID NO: 1560481
aggcucaugcacuaaauau

SEQ ID NO: 1602986 - RNA, 19 nt, Artificial Sequence
  Description of Artificial Sequence: Synthetic oligonucleotide
  Antisense strand to SEQ ID NO: 1602985
auauuuagugcaugagccu

SEQ ID NO: 1602987 - RNA, 19 nt, Artificial Sequence
  Description of Artificial Sequence: Synthetic oligonucleotide
  Sense strand starting at position 2726 of SEQ ID NO: 1560481
uaaauaugagcggguguuu

SEQ ID NO: 1602988 - RNA, 19 nt, Artificial Sequence
  Description of Artificial Sequence: Synthetic oligonucleotide
  Antisense strand to SEQ ID NO: 1602987
aaacacccgcucauauuua

SEQ ID NO: 1602989 - RNA, 19 nt, Artificial Sequence
  Description of Artificial Sequence: Synthetic oligonucleotide
  Sense strand starting at position 2806 of SEQ ID NO: 1560481
acucuuaagucuccgagca

SEQ ID NO: 1602990 - RNA, 19 nt, Artificial Sequence
  Description of Artificial Sequence: Synthetic oligonucleotide
  Antisense strand to SEQ ID NO: 1602989
ugcucggagacuuaagagu

SEQ ID NO: 1602991 - RNA, 19 nt, Artificial Sequence
  Description of Artificial Sequence: Synthetic oligonucleotide
  Sense strand starting at position 3273 of SEQ ID NO: 1560481
caacauguggcucaauguu

SEQ ID NO: 1602992 - RNA, 19 nt, Artificial Sequence
  Description of Artificial Sequence: Synthetic oligonucleotide
  Antisense strand to SEQ ID NO: 1602991
aacauugagccacauguug

SEQ ID NO: 1602993 - RNA, 19 nt, Artificial Sequence
  Description of Artificial Sequence: Synthetic oligonucleotide
  Sense strand starting at position 3777 of SEQ ID NO: 1560481
ugaggaggacuuuguuguu

SEQ ID NO: 1602994 - RNA, 19 nt, Artificial Sequence
  Description of Artificial Sequence: Synthetic oligonucleotide
  Antisense strand to SEQ ID NO: 1602993
aacaacaaaguccuccuca

SEQ ID NO: 1602995 - RNA, 19 nt, Artificial Sequence
  Description of Artificial Sequence: Synthetic oligonucleotide
  Sense strand starting at position 161 of SEQ ID NO: 1560482
auugcucugccuggucuua

SEQ ID NO: 1602996 - RNA, 19 nt, Artificial Sequence
  Description of Artificial Sequence: Synthetic oligonucleotide
  Antisense strand to SEQ ID NO: 1602995
uaagaccaggcagagcaau

SEQ ID NO: 1602997 - RNA, 19 nt, Artificial Sequence
  Description of Artificial Sequence: Synthetic oligonucleotide
  Sense strand starting at position 163 of SEQ ID NO: 1560482
ugcucugccuggucuuaaa

SEQ ID NO: 1602998 - RNA, 19 nt, Artificial Sequence
  Description of Artificial Sequence: Synthetic oligonucleotide
  Antisense strand to SEQ ID NO: 1602997
uuuaagaccaggcagagca

SEQ ID NO: 1602999 - RNA, 19 nt, Artificial Sequence
  Description of Artificial Sequence: Synthetic oligonucleotide
  Sense strand starting at position 166 of SEQ ID NO: 1560482
ucugccuggucuuaaauuu

SEQ ID NO: 1603000 - RNA, 19 nt, Artificial Sequence
  Description of Artificial Sequence: Synthetic oligonucleotide
  Antisense strand to SEQ ID NO: 1602999
aaauuuaagaccaggcaga

SEQ ID NO: 1603001 - RNA, 19 nt, Artificial Sequence
  Description of Artificial Sequence: Synthetic oligonucleotide
  Sense strand starting at position 175 of SEQ ID NO: 1560482
ucuuaaauuuccggacuca

SEQ ID NO: 1603002 - RNA, 19 nt, Artificial Sequence
  Description of Artificial Sequence: Synthetic oligonucleotide
  Antisense strand to SEQ ID NO: 1603001
ugaguccggaaauuuaaga

SEQ ID NO: 1603003 - RNA, 19 nt, Artificial Sequence
  Description of Artificial Sequence: Synthetic oligonucleotide
  Sense strand starting at position 608 of SEQ ID NO: 1560482
uguguaaucucagccacuc

SEQ ID NO: 1603004 - RNA, 19 nt, Artificial Sequence
  Description of Artificial Sequence: Synthetic oligonucleotide
  Antisense strand to SEQ ID NO: 1603003
gaguggcugagauuacaca

SEQ ID NO: 1603005 - RNA, 19 nt, Artificial Sequence
  Description of Artificial Sequence: Synthetic oligonucleotide
  Sense strand starting at position 787 of SEQ ID NO: 1560482
gcugccuuggcaugagauu

SEQ ID NO: 1603006 - RNA, 19 nt, Artificial Sequence
  Description of Artificial Sequence: Synthetic oligonucleotide
  Antisense strand to SEQ ID NO: 1603005
aaucucaugccaaggcagc

SEQ ID NO: 1603007 - RNA, 19 nt, Artificial Sequence
  Description of Artificial Sequence: Synthetic oligonucleotide
  Sense strand starting at position 793 of SEQ ID NO: 1560482
uuggcaugagauugagaug

SEQ ID NO: 1603008 - RNA, 19 nt, Artificial Sequence
  Description of Artificial Sequence: Synthetic oligonucleotide
  Antisense strand to SEQ ID NO: 1603007
caucucaaucucaugccaa

SEQ ID NO: 1603009 - RNA, 19 nt, Artificial Sequence
  Description of Artificial Sequence: Synthetic oligonucleotide
  Sense strand starting at position 798 of SEQ ID NO: 1560482
augagauugagaugcgucu

SEQ ID NO: 1603010 - RNA, 19 nt, Artificial Sequence
  Description of Artificial Sequence: Synthetic oligonucleotide
  Antisense strand to SEQ ID NO: 1603009
agacgcaucucaaucucau

SEQ ID NO: 1603011 - RNA, 19 nt, Artificial Sequence
  Description of Artificial Sequence: Synthetic oligonucleotide
  Sense strand starting at position 805 of SEQ ID NO: 1560482
ugagaugcgucucuauauc

SEQ ID NO: 1603012 - RNA, 19 nt, Artificial Sequence
  Description of Artificial Sequence: Synthetic oligonucleotide
  Antisense strand to SEQ ID NO: 1603011
gauauagagacgcaucuca

SEQ ID NO: 1603013 - RNA, 19 nt, Artificial Sequence
  Description of Artificial Sequence: Synthetic oligonucleotide
  Sense strand starting at position 847 of SEQ ID NO: 1560482
gucucugucuaucuuugua

SEQ ID NO: 1603014 - RNA, 19 nt, Artificial Sequence
  Description of Artificial Sequence: Synthetic oligonucleotide
  Antisense strand to SEQ ID NO: 1603013
uacaaagauagacagagac

SEQ ID NO: 1603015 - RNA, 19 nt, Artificial Sequence
  Description of Artificial Sequence: Synthetic oligonucleotide
  Sense strand starting at position 873 of SEQ ID NO: 1560482
cacaaauguccaggucuga

SEQ ID NO: 1603016 - RNA, 19 nt, Artificial Sequence
  Description of Artificial Sequence: Synthetic oligonucleotide
  Antisense strand to SEQ ID NO: 1603015
ucagaccuggacauuugug

SEQ ID NO: 1603017 - RNA, 19 nt, Artificial Sequence
  Description of Artificial Sequence: Synthetic oligonucleotide
  Sense strand starting at position 886 of SEQ ID NO: 1560482
gucugagcucugggucaga

SEQ ID NO: 1603018 - RNA, 19 nt, Artificial Sequence
  Description of Artificial Sequence: Synthetic oligonucleotide
  Antisense strand to SEQ ID NO: 1603017
ucugacccagagcucagac

SEQ ID NO: 1603019 - RNA, 19 nt, Artificial Sequence
  Description of Artificial Sequence: Synthetic oligonucleotide
  Sense strand starting at position 907 of SEQ ID NO: 1560482
ugugguccauucuuugcaa

SEQ ID NO: 1603020 - RNA, 19 nt, Artificial Sequence
  Description of Artificial Sequence: Synthetic oligonucleotide
  Antisense strand to SEQ ID NO: 1603019
uugcaaagaauggaccaca

SEQ ID NO: 1603021 - RNA, 19 nt, Artificial Sequence
  Description of Artificial Sequence: Synthetic oligonucleotide
  Sense strand starting at position 908 of SEQ ID NO: 1560482
gugguccauucuuugcaaa

SEQ ID NO: 1603022 - RNA, 19 nt, Artificial Sequence
  Description of Artificial Sequence: Synthetic oligonucleotide
  Antisense strand to SEQ ID NO: 1603021
uuugcaaagaauggaccac

SEQ ID NO: 1603023 - RNA, 19 nt, Artificial Sequence
  Description of Artificial Sequence: Synthetic oligonucleotide
  Sense strand starting at position 910 of SEQ ID NO: 1560482
gguccauucuuugcaaacu

SEQ ID NO: 1603024 - RNA, 19 nt, Artificial Sequence
  Description of Artificial Sequence: Synthetic oligonucleotide
  Antisense strand to SEQ ID NO: 1603023
aguuugcaaagaauggacc

SEQ ID NO: 1603025 - RNA, 19 nt, Artificial Sequence
  Description of Artificial Sequence: Synthetic oligonucleotide
  Sense strand starting at position 1026 of SEQ ID NO: 1560482
guuagaggagccuguuauc

SEQ ID NO: 1603026 - RNA, 19 nt, Artificial Sequence
  Description of Artificial Sequence: Synthetic oligonucleotide
  Antisense strand to SEQ ID NO: 1603025
gauaacaggcuccucuaac

SEQ ID NO: 1603027 - RNA, 19 nt, Artificial Sequence
  Description of Artificial Sequence: Synthetic oligonucleotide
  Sense strand starting at position 1029 of SEQ ID NO: 1560482
agaggagccuguuaucuga

SEQ ID NO: 1603028 - RNA, 19 nt, Artificial Sequence
  Description of Artificial Sequence: Synthetic oligonucleotide
  Antisense strand to SEQ ID NO: 1603027
ucagauaacaggcuccucu

SEQ ID NO: 1603029 - RNA, 19 nt, Artificial Sequence
  Description of Artificial Sequence: Synthetic oligonucleotide
  Sense strand starting at position 1031 of SEQ ID NO: 1560482
aggagccuguuaucugaga

SEQ ID NO: 1603030 - RNA, 19 nt, Artificial Sequence
  Description of Artificial Sequence: Synthetic oligonucleotide
  Antisense strand to SEQ ID NO: 1603029
ucucagauaacaggcuccu

SEQ ID NO: 1603031 - RNA, 19 nt, Artificial Sequence
  Description of Artificial Sequence: Synthetic oligonucleotide
  Sense strand starting at position 1036 of SEQ ID NO: 1560482
ccuguuaucugagagccau

SEQ ID NO: 1603032 - RNA, 19 nt, Artificial Sequence
  Description of Artificial Sequence: Synthetic oligonucleotide
  Antisense strand to SEQ ID NO: 1603031
auggcucucagauaacagg

SEQ ID NO: 1603033 - RNA, 19 nt, Artificial Sequence
  Description of Artificial Sequence: Synthetic oligonucleotide
  Sense strand starting at position 1079 of SEQ ID NO: 1560482
gacuguugccagucacguu

SEQ ID NO: 1603034 - RNA, 19 nt, Artificial Sequence
  Description of Artificial Sequence: Synthetic oligonucleotide
  Antisense strand to SEQ ID NO: 1603033
aacgugacuggcaacaguc

SEQ ID NO: 1603035 - RNA, 19 nt, Artificial Sequence
  Description of Artificial Sequence: Synthetic oligonucleotide
  Sense strand starting at position 1087 of SEQ ID NO: 1560482
ccagucacguugcugagau

SEQ ID NO: 1603036 - RNA, 19 nt, Artificial Sequence
  Description of Artificial Sequence: Synthetic oligonucleotide
  Antisense strand to SEQ ID NO: 1603035
aucucagcaacgugacugg

SEQ ID NO: 1603037 - RNA, 19 nt, Artificial Sequence
  Description of Artificial Sequence: Synthetic oligonucleotide
  Sense strand starting at position 1132 of SEQ ID NO: 1560482
gccaccagcuccuuugaua

SEQ ID NO: 1603038 - RNA, 19 nt, Artificial Sequence
  Description of Artificial Sequence: Synthetic oligonucleotide
  Antisense strand to SEQ ID NO: 1603037
uaucaaaggagcugguggc

SEQ ID NO: 1603039 - RNA, 19 nt, Artificial Sequence
  Description of Artificial Sequence: Synthetic oligonucleotide
  Sense strand starting at position 1152 of SEQ ID NO: 1560482
ggacgucuccaaggcgauu

SEQ ID NO: 1603040 - RNA, 19 nt, Artificial Sequence
  Description of Artificial Sequence: Synthetic oligonucleotide
  Antisense strand to SEQ ID NO: 1603039
aaucgccuuggagacgucc

SEQ ID NO: 1603041 - RNA, 19 nt, Artificial Sequence
  Description of Artificial Sequence: Synthetic oligonucleotide
  Sense strand starting at position 1171 of SEQ ID NO: 1560482
uucucagagcugggacaau

SEQ ID NO: 1603042 - RNA, 19 nt, Artificial Sequence
  Description of Artificial Sequence: Synthetic oligonucleotide
  Antisense strand to SEQ ID NO: 1603041
auugucccagcucugagaa

SEQ ID NO: 1603043 - RNA, 19 nt, Artificial Sequence
  Description of Artificial Sequence: Synthetic oligonucleotide
  Sense strand starting at position 1603 of SEQ ID NO: 1560482
gggcaaauuucaggaguuc

SEQ ID NO: 1603044 - RNA, 19 nt, Artificial Sequence
  Description of Artificial Sequence: Synthetic oligonucleotide
  Antisense strand to SEQ ID NO: 1603043
gaacuccugaaauuugccc

SEQ ID NO: 1603045 - RNA, 19 nt, Artificial Sequence
  Description of Artificial Sequence: Synthetic oligonucleotide
  Sense strand starting at position 1728 of SEQ ID NO: 1560482
agaacuuucucccgaggau

SEQ ID NO: 1603046 - RNA, 19 nt, Artificial Sequence
  Description of Artificial Sequence: Synthetic oligonucleotide
  Antisense strand to SEQ ID NO: 1603045
auccucgggagaaaguucu

SEQ ID NO: 1603047 - RNA, 19 nt, Artificial Sequence
  Description of Artificial Sequence: Synthetic oligonucleotide
  Sense strand starting at position 1731 of SEQ ID NO: 1560482
acuuucucccgaggauaca

SEQ ID NO: 1603048 - RNA, 19 nt, Artificial Sequence
  Description of Artificial Sequence: Synthetic oligonucleotide
  Antisense strand to SEQ ID NO: 1603047
uguauccucgggagaaagu

SEQ ID NO: 1603049 - RNA, 19 nt, Artificial Sequence
  Description of Artificial Sequence: Synthetic oligonucleotide
  Sense strand starting at position 1785 of SEQ ID NO: 1560482
aacagcguugcguucuauu

SEQ ID NO: 1603050 - RNA, 19 nt, Artificial Sequence
  Description of Artificial Sequence: Synthetic oligonucleotide
  Antisense strand to SEQ ID NO: 1603049
aauagaacgcaacgcuguu

SEQ ID NO: 1603051 - RNA, 19 nt, Artificial Sequence
  Description of Artificial Sequence: Synthetic oligonucleotide
  Sense strand starting at position 1939 of SEQ ID NO: 1560482
uggccauucugacagagga

SEQ ID NO: 1603052 - RNA, 19 nt, Artificial Sequence
  Description of Artificial Sequence: Synthetic oligonucleotide
  Antisense strand to SEQ ID NO: 1603051
uccucugucagaauggcca

SEQ ID NO: 1603053 - RNA, 19 nt, Artificial Sequence
  Description of Artificial Sequence: Synthetic oligonucleotide
  Sense strand starting at position 2022 of SEQ ID NO: 1560482
aagcacagcgguuaagauu

SEQ ID NO: 1603054 - RNA, 19 nt, Artificial Sequence
  Description of Artificial Sequence: Synthetic oligonucleotide
  Antisense strand to SEQ ID NO: 1603053
aaucuuaaccgcugugcuu

SEQ ID NO: 1603055 - RNA, 19 nt, Artificial Sequence
  Description of Artificial Sequence: Synthetic oligonucleotide
  Sense strand starting at position 2028 of SEQ ID NO: 1560482
agcgguuaagauugcagaa

SEQ ID NO: 1603056 - RNA, 19 nt, Artificial Sequence
  Description of Artificial Sequence: Synthetic oligonucleotide
  Antisense strand to SEQ ID NO: 1603055
uucugcaaucuuaaccgcu

SEQ ID NO: 1603057 - RNA, 19 nt, Artificial Sequence
  Description of Artificial Sequence: Synthetic oligonucleotide
  Sense strand starting at position 2361 of SEQ ID NO: 1560482
caccauuguguagauguua

SEQ ID NO: 1603058 - RNA, 19 nt, Artificial Sequence
  Description of Artificial Sequence: Synthetic oligonucleotide
  Antisense strand to SEQ ID NO: 1603057
uaacaucuacacaauggug

SEQ ID NO: 1603059 - RNA, 19 nt, Artificial Sequence
  Description of Artificial Sequence: Synthetic oligonucleotide
  Sense strand starting at position 2550 of SEQ ID NO: 1560482
cuuugaagaucuugaggau

SEQ ID NO: 1603060 - RNA, 19 nt, Artificial Sequence
  Description of Artificial Sequence: Synthetic oligonucleotide
  Antisense strand to SEQ ID NO: 1603059
auccucaagaucuucaaag

SEQ ID NO: 1603061 - RNA, 19 nt, Artificial Sequence
  Description of Artificial Sequence: Synthetic oligonucleotide
  Sense strand starting at position 2616 of SEQ ID NO: 1560482
agagcuaagguaggugauu

SEQ ID NO: 1603062 - RNA, 19 nt, Artificial Sequence
  Description of Artificial Sequence: Synthetic oligonucleotide
  Antisense strand to SEQ ID NO: 1603061
aaucaccuaccuuagcucu

SEQ ID NO: 1603063 - RNA, 19 nt, Artificial Sequence
  Description of Artificial Sequence: Synthetic oligonucleotide
  Sense strand starting at position 2659 of SEQ ID NO: 1560482
acugucuauccaggauucu

SEQ ID NO: 1603064 - RNA, 19 nt, Artificial Sequence
  Description of Artificial Sequence: Synthetic oligonucleotide
  Antisense strand to SEQ ID NO: 1603063
agaauccuggauagacagu

SEQ ID NO: 1603065 - RNA, 19 nt, Artificial Sequence
  Description of Artificial Sequence: Synthetic oligonucleotide
  Sense strand starting at position 2660 of SEQ ID NO: 1560482
cugucuauccaggauucua

SEQ ID NO: 1603066 - RNA, 19 nt, Artificial Sequence
  Description of Artificial Sequence: Synthetic oligonucleotide
  Antisense strand to SEQ ID NO: 1603065
uagaauccuggauagacag

SEQ ID NO: 1603067 - RNA, 19 nt, Artificial Sequence
  Description of Artificial Sequence: Synthetic oligonucleotide
  Sense strand starting at position 2668 of SEQ ID NO: 1560482
ccaggauucuacuugguuu

SEQ ID NO: 1603068 - RNA, 19 nt, Artificial Sequence
  Description of Artificial Sequence: Synthetic oligonucleotide
  Antisense strand to SEQ ID NO: 1603067
aaaccaaguagaauccugg

SEQ ID NO: 1603069 - RNA, 19 nt, Artificial Sequence
  Description of Artificial Sequence: Synthetic oligonucleotide
  Sense strand starting at position 2987 of SEQ ID NO: 1560482
ccaggauucuacuuguaac

SEQ ID NO: 1603070 - RNA, 19 nt, Artificial Sequence
  Description of Artificial Sequence: Synthetic oligonucleotide
  Antisense strand to SEQ ID NO: 1603069
guuacaaguagaauccugg

SEQ ID NO: 1603071 - RNA, 19 nt, Artificial Sequence
  Description of Artificial Sequence: Synthetic oligonucleotide
  Sense strand starting at position 3350 of SEQ ID NO: 1560482
acccaagucuaguguauuu

SEQ ID NO: 1603072 - RNA, 19 nt, Artificial Sequence
  Description of Artificial Sequence: Synthetic oligonucleotide
  Antisense strand to SEQ ID NO: 1603071
aaauacacuagacuugggu

SEQ ID NO: 1603073 - RNA, 19 nt, Artificial Sequence
  Description of Artificial Sequence: Synthetic oligonucleotide
  Sense strand starting at position 3355 of SEQ ID NO: 1560482
agucuaguguauuuguaaa

SEQ ID NO: 1603074 - RNA, 19 nt, Artificial Sequence
  Description of Artificial Sequence: Synthetic oligonucleotide
  Antisense strand to SEQ ID NO: 1603073
uuuacaaauacacuagacu

SEQ ID NO: 1603075 - RNA, 19 nt, Artificial Sequence
  Description of Artificial Sequence: Synthetic oligonucleotide
  Sense strand starting at position 5 of SEQ ID NO: 1560483
gucucacuccagcguggua

SEQ ID NO: 1603076 - RNA, 19 nt, Artificial Sequence
  Description of Artificial Sequence: Synthetic oligonucleotide
  Antisense strand to SEQ ID NO: 1603075
uaccacgcuggagugagac

SEQ ID NO: 1603077 - RNA, 19 nt, Artificial Sequence
  Description of Artificial Sequence: Synthetic oligonucleotide
  Sense strand starting at position 10 of SEQ ID NO: 1560483
acuccagcgugguaaguua

SEQ ID NO: 1603078 - RNA, 19 nt, Artificial Sequence
  Description of Artificial Sequence: Synthetic oligonucleotide
  Antisense strand to SEQ ID NO: 1603077
uaacuuaccacgcuggagu

SEQ ID NO: 1603079 - RNA, 19 nt, Artificial Sequence
  Description of Artificial Sequence: Synthetic oligonucleotide
  Sense strand starting at position 39 of SEQ ID NO: 1560483
gaguucucgcuccacaguu

SEQ ID NO: 1603080 - RNA, 19 nt, Artificial Sequence
  Description of Artificial Sequence: Synthetic oligonucleotide
  Antisense strand to SEQ ID NO: 1603079
aacuguggagcgagaacuc

SEQ ID NO: 1603081 - RNA, 19 nt, Artificial Sequence
  Description of Artificial Sequence: Synthetic oligonucleotide
  Sense strand starting at position 56 of SEQ ID NO: 1560483
uuguuuggccuccaggaaa

SEQ ID NO: 1603082 - RNA, 19 nt, Artificial Sequence
  Description of Artificial Sequence: Synthetic oligonucleotide
  Antisense strand to SEQ ID NO: 1603081
uuuccuggaggccaaacaa

SEQ ID NO: 1603083 - RNA, 19 nt, Artificial Sequence
  Description of Artificial Sequence: Synthetic oligonucleotide
  Sense strand starting at position 212 of SEQ ID NO: 1560483
gcugaucccacucgauaag

SEQ ID NO: 1603084 - RNA, 19 nt, Artificial Sequence
  Description of Artificial Sequence: Synthetic oligonucleotide
  Antisense strand to SEQ ID NO: 1603083
cuuaucgagugggaucagc

SEQ ID NO: 1603085 - RNA, 19 nt, Artificial Sequence
  Description of Artificial Sequence: Synthetic oligonucleotide
  Sense strand starting at position 240 of SEQ ID NO: 1560483
aggagagguuucugugaca

SEQ ID NO: 1603086 - RNA, 19 nt, Artificial Sequence
  Description of Artificial Sequence: Synthetic oligonucleotide
  Antisense strand to SEQ ID NO: 1603085
ugucacagaaaccucuccu

SEQ ID NO: 1603087 - RNA, 19 nt, Artificial Sequence
  Description of Artificial Sequence: Synthetic oligonucleotide
  Sense strand starting at position 350 of SEQ ID NO: 1560483
uggagaaagugaucgcaaa

SEQ ID NO: 1603088 - RNA, 19 nt, Artificial Sequence
  Description of Artificial Sequence: Synthetic oligonucleotide
  Antisense strand to SEQ ID NO: 1603087
uuugcgaucacuuucucca

SEQ ID NO: 1603089 - RNA, 19 nt, Artificial Sequence
  Description of Artificial Sequence: Synthetic oligonucleotide
  Sense strand starting at position 2127 of SEQ ID NO: 1560483
gauuccaggccucauuaga

SEQ ID NO: 1603090 - RNA, 19 nt, Artificial Sequence
  Description of Artificial Sequence: Synthetic oligonucleotide
  Antisense strand to SEQ ID NO: 1603089
ucuaaugaggccuggaauc

SEQ ID NO: 1603091 - RNA, 19 nt, Artificial Sequence
  Description of Artificial Sequence: Synthetic oligonucleotide
  Sense strand starting at position 2193 of SEQ ID NO: 1560483
cccagaaggucauagaaag

SEQ ID NO: 1603092 - RNA, 19 nt, Artificial Sequence
  Description of Artificial Sequence: Synthetic oligonucleotide
  Antisense strand to SEQ ID NO: 1603091
cuuucuaugaccuucuggg

SEQ ID NO: 1603093 - RNA, 19 nt, Artificial Sequence
  Description of Artificial Sequence: Synthetic oligonucleotide
  Sense strand starting at position 2287 of SEQ ID NO: 1560483
ggcuguggcugcuuagaaa

SEQ ID NO: 1603094 - RNA, 19 nt, Artificial Sequence
  Description of Artificial Sequence: Synthetic oligonucleotide
  Antisense strand to SEQ ID NO: 1603093
uuucuaagcagccacagcc

SEQ ID NO: 1603095 - RNA, 19 nt, Artificial Sequence
  Description of Artificial Sequence: Synthetic oligonucleotide
  Sense strand starting at position 3873 of SEQ ID NO: 1560483
ggcggugaggauugcauua

SEQ ID NO: 1603096 - RNA, 19 nt, Artificial Sequence
  Description of Artificial Sequence: Synthetic oligonucleotide
  Antisense strand to SEQ ID NO: 1603095
uaaugcaauccucaccgcc

SEQ ID NO: 1603097 - RNA, 19 nt, Artificial Sequence
  Description of Artificial Sequence: Synthetic oligonucleotide
  Sense strand starting at position 10 of SEQ ID NO: 1560484
ugcacuaucuuaucguauu

SEQ ID NO: 1603098 - RNA, 19 nt, Artificial Sequence
  Description of Artificial Sequence: Synthetic oligonucleotide
  Antisense strand to SEQ ID NO: 1603097
aauacgauaagauagugca

SEQ ID NO: 1603099 - RNA, 19 nt, Artificial Sequence
  Description of Artificial Sequence: Synthetic oligonucleotide
  Sense strand starting at position 11 of SEQ ID NO: 1560484
gcacuaucuuaucguauua

SEQ ID NO: 1603100 - RNA, 19 nt, Artificial Sequence
  Description of Artificial Sequence: Synthetic oligonucleotide
  Antisense strand to SEQ ID NO: 1603099
uaauacgauaagauagugc

SEQ ID NO: 1603101 - RNA, 19 nt, Artificial Sequence
  Description of Artificial Sequence: Synthetic oligonucleotide
  Sense strand starting at position 13 of SEQ ID NO: 1560484
acuaucuuaucguauuauc

SEQ ID NO: 1603102 - RNA, 19 nt, Artificial Sequence
  Description of Artificial Sequence: Synthetic oligonucleotide
  Antisense strand to SEQ ID NO: 1603101
gauaauacgauaagauagu

SEQ ID NO: 1603103 - RNA, 19 nt, Artificial Sequence
  Description of Artificial Sequence: Synthetic oligonucleotide
  Sense strand starting at position 16 of SEQ ID NO: 1560484
aucuuaucguauuaucauc

SEQ ID NO: 1603104 - RNA, 19 nt, Artificial Sequence
  Description of Artificial Sequence: Synthetic oligonucleotide
  Antisense strand to SEQ ID NO: 1603103
gaugauaauacgauaagau

SEQ ID NO: 1603105 - RNA, 19 nt, Artificial Sequence
  Description of Artificial Sequence: Synthetic oligonucleotide
  Sense strand starting at position 479 of SEQ ID NO: 1560484
cgaucuggucgcucugcaa

SEQ ID NO: 1603106 - RNA, 19 nt, Artificial Sequence
  Description of Artificial Sequence: Synthetic oligonucleotide
  Antisense strand to SEQ ID NO: 1603105
uugcagagcgaccagaucg

SEQ ID NO: 1603107 - RNA, 19 nt, Artificial Sequence
  Description of Artificial Sequence: Synthetic oligonucleotide
  Sense strand starting at position 507 of SEQ ID NO: 1560484
guccgcagcucuuugaaca

SEQ ID NO: 1603108 - RNA, 19 nt, Artificial Sequence
  Description of Artificial Sequence: Synthetic oligonucleotide
  Antisense strand to SEQ ID NO: 1603107
uguucaaagagcugcggac

SEQ ID NO: 1603109 - RNA, 19 nt, Artificial Sequence
  Description of Artificial Sequence: Synthetic oligonucleotide
  Sense strand starting at position 627 of SEQ ID NO: 1560484
cccagaacucacggaaagu

SEQ ID NO: 1603110 - RNA, 19 nt, Artificial Sequence
  Description of Artificial Sequence: Synthetic oligonucleotide
  Antisense strand to SEQ ID NO: 1603109
acuuuccgugaguucuggg

SEQ ID NO: 1603111 - RNA, 19 nt, Artificial Sequence
  Description of Artificial Sequence: Synthetic oligonucleotide
  Sense strand starting at position 1083 of SEQ ID NO: 1560484
gagucuaaaccucgagggu

SEQ ID NO: 1603112 - RNA, 19 nt, Artificial Sequence
  Description of Artificial Sequence: Synthetic oligonucleotide
  Antisense strand to SEQ ID NO: 1603111
acccucgagguuuagacuc

SEQ ID NO: 1603113 - RNA, 19 nt, Artificial Sequence
  Description of Artificial Sequence: Synthetic oligonucleotide
  Sense strand starting at position 1185 of SEQ ID NO: 1560484
agaggaaagguggguucuu

SEQ ID NO: 1603114 - RNA, 19 nt, Artificial Sequence
  Description of Artificial Sequence: Synthetic oligonucleotide
  Antisense strand to SEQ ID NO: 1603113
aagaacccaccuuuccucu

SEQ ID NO: 1603115 - RNA, 19 nt, Artificial Sequence
  Description of Artificial Sequence: Synthetic oligonucleotide
  Sense strand starting at position 1278 of SEQ ID NO: 1560484
gcagaaugccgggauacga

SEQ ID NO: 1603116 - RNA, 19 nt, Artificial Sequence
  Description of Artificial Sequence: Synthetic oligonucleotide
  Antisense strand to SEQ ID NO: 1603115
ucguaucccggcauucugc

SEQ ID NO: 1603117 - RNA, 19 nt, Artificial Sequence
  Description of Artificial Sequence: Synthetic oligonucleotide
  Sense strand starting at position 2055 of SEQ ID NO: 1560484
uugguuuaacguugguaac

SEQ ID NO: 1603118 - RNA, 19 nt, Artificial Sequence
  Description of Artificial Sequence: Synthetic oligonucleotide
  Antisense strand to SEQ ID NO: 1603117
guuaccaacguuaaaccaa

SEQ ID NO: 1603119 - RNA, 19 nt, Artificial Sequence
  Description of Artificial Sequence: Synthetic oligonucleotide
  Sense strand starting at position 2065 of SEQ ID NO: 1560484
guugguaacuugguuucca

SEQ ID NO: 1603120 - RNA, 19 nt, Artificial Sequence
  Description of Artificial Sequence: Synthetic oligonucleotide
  Antisense strand to SEQ ID NO: 1603119
uggaaaccaaguuaccaac

SEQ ID NO: 1603121 - RNA, 19 nt, Artificial Sequence
  Description of Artificial Sequence: Synthetic oligonucleotide
  Sense strand starting at position 2066 of SEQ ID NO: 1560484
uugguaacuugguuuccaa

SEQ ID NO: 1603122 - RNA, 19 nt, Artificial Sequence
  Description of Artificial Sequence: Synthetic oligonucleotide
  Antisense strand to SEQ ID NO: 1603121
uuggaaaccaaguuaccaa

SEQ ID NO: 1603123 - RNA, 19 nt, Artificial Sequence
  Description of Artificial Sequence: Synthetic oligonucleotide
  Sense strand starting at position 2069 of SEQ ID NO: 1560484
guaacuugguuuccaagga

SEQ ID NO: 1603124 - RNA, 19 nt, Artificial Sequence
  Description of Artificial Sequence: Synthetic oligonucleotide
  Antisense strand to SEQ ID NO: 1603123
uccuuggaaaccaaguuac

SEQ ID NO: 1603125 - RNA, 19 nt, Artificial Sequence
  Description of Artificial Sequence: Synthetic oligonucleotide
  Sense strand starting at position 2470 of SEQ ID NO: 1560484
ggaugccucucucacugau

SEQ ID NO: 1603126 - RNA, 19 nt, Artificial Sequence
  Description of Artificial Sequence: Synthetic oligonucleotide
  Antisense strand to SEQ ID NO: 1603125
aucagugagagaggcaucc

SEQ ID NO: 1603127 - RNA, 19 nt, Artificial Sequence
  Description of Artificial Sequence: Synthetic oligonucleotide
  Sense strand starting at position 2612 of SEQ ID NO: 1560484
guucgcgggcgucuaaauu

SEQ ID NO: 1603128 - RNA, 19 nt, Artificial Sequence
  Description of Artificial Sequence: Synthetic oligonucleotide
  Antisense strand to SEQ ID NO: 1603127
aauuuagacgcccgcgaac

SEQ ID NO: 1603129 - RNA, 19 nt, Artificial Sequence
  Description of Artificial Sequence: Synthetic oligonucleotide
  Sense strand starting at position 2618 of SEQ ID NO: 1560484
gggcgucuaaauuagaauc

SEQ ID NO: 1603130 - RNA, 19 nt, Artificial Sequence
  Description of Artificial Sequence: Synthetic oligonucleotide
  Antisense strand to SEQ ID NO: 1603129
gauucuaauuuagacgccc

SEQ ID NO: 1603131 - RNA, 19 nt, Artificial Sequence
  Description of Artificial Sequence: Synthetic oligonucleotide
  Sense strand starting at position 2871 of SEQ ID NO: 1560484
accagaacaucgucagaau

SEQ ID NO: 1603132 - RNA, 19 nt, Artificial Sequence
  Description of Artificial Sequence: Synthetic oligonucleotide
  Antisense strand to SEQ ID NO: 1603131
auucugacgauguucuggu

SEQ ID NO: 1603133 - RNA, 19 nt, Artificial Sequence
  Description of Artificial Sequence: Synthetic oligonucleotide
  Sense strand starting at position 2872 of SEQ ID NO: 1560484
ccagaacaucgucagaauu

SEQ ID NO: 1603134 - RNA, 19 nt, Artificial Sequence
  Description of Artificial Sequence: Synthetic oligonucleotide
  Antisense strand to SEQ ID NO: 1603133
aauucugacgauguucugg

SEQ ID NO: 1603135 - RNA, 19 nt, Artificial Sequence
  Description of Artificial Sequence: Synthetic oligonucleotide
  Sense strand starting at position 2879 of SEQ ID NO: 1560484
aucgucagaauucgaguuu

SEQ ID NO: 1603136 - RNA, 19 nt, Artificial Sequence
  Description of Artificial Sequence: Synthetic oligonucleotide
  Antisense strand to SEQ ID NO: 1603135
aaacucgaauucugacgau

SEQ ID NO: 1603137 - RNA, 19 nt, Artificial Sequence
  Description of Artificial Sequence: Synthetic oligonucleotide
  Sense strand starting at position 2885 of SEQ ID NO: 1560484
agaauucgaguuugugaua

SEQ ID NO: 1603138 - RNA, 19 nt, Artificial Sequence
  Description of Artificial Sequence: Synthetic oligonucleotide
  Antisense strand to SEQ ID NO: 1603137
uaucacaaacucgaauucu

SEQ ID NO: 1603139 - RNA, 19 nt, Artificial Sequence
  Description of Artificial Sequence: Synthetic oligonucleotide
  Sense strand starting at position 2886 of SEQ ID NO: 1560484
gaauucgaguuugugauau

SEQ ID NO: 1603140 - RNA, 19 nt, Artificial Sequence
  Description of Artificial Sequence: Synthetic oligonucleotide
  Antisense strand to SEQ ID NO: 1603139
auaucacaaacucgaauuc

SEQ ID NO: 1603141 - RNA, 19 nt, Artificial Sequence
  Description of Artificial Sequence: Synthetic oligonucleotide
  Sense strand starting at position 2888 of SEQ ID NO: 1560484
auucgaguuugugauauuc

SEQ ID NO: 1603142 - RNA, 19 nt, Artificial Sequence
  Description of Artificial Sequence: Synthetic oligonucleotide
  Antisense strand to SEQ ID NO: 1603141
gaauaucacaaacucgaau

SEQ ID NO: 1603143 - RNA, 19 nt, Artificial Sequence
  Description of Artificial Sequence: Synthetic oligonucleotide
  Sense strand starting at position 2896 of SEQ ID NO: 1560484
uugugauauucccugugga

SEQ ID NO: 1603144 - RNA, 19 nt, Artificial Sequence
  Description of Artificial Sequence: Synthetic oligonucleotide
  Antisense strand to SEQ ID NO: 1603143
uccacagggaauaucacaa

SEQ ID NO: 1603145 - RNA, 19 nt, Artificial Sequence
  Description of Artificial Sequence: Synthetic oligonucleotide
  Sense strand starting at position 2897 of SEQ ID NO: 1560484
ugugauauucccuguggac

SEQ ID NO: 1603146 - RNA, 19 nt, Artificial Sequence
  Description of Artificial Sequence: Synthetic oligonucleotide
  Antisense strand to SEQ ID NO: 1603145
guccacagggaauaucaca

SEQ ID NO: 1603147 - RNA, 19 nt, Artificial Sequence
  Description of Artificial Sequence: Synthetic oligonucleotide
  Sense strand starting at position 2899 of SEQ ID NO: 1560484
ugauauucccuguggacca

SEQ ID NO: 1603148 - RNA, 19 nt, Artificial Sequence
  Description of Artificial Sequence: Synthetic oligonucleotide
  Antisense strand to SEQ ID NO: 1603147
ugguccacagggaauauca

SEQ ID NO: 1603149 - RNA, 19 nt, Artificial Sequence
  Description of Artificial Sequence: Synthetic oligonucleotide
  Sense strand starting at position 2900 of SEQ ID NO: 1560484
gauauucccuguggaccau

SEQ ID NO: 1603150 - RNA, 19 nt, Artificial Sequence
  Description of Artificial Sequence: Synthetic oligonucleotide
  Antisense strand to SEQ ID NO: 1603149
augguccacagggaauauc

SEQ ID NO: 1603151 - RNA, 19 nt, Artificial Sequence
  Description of Artificial Sequence: Synthetic oligonucleotide
  Sense strand starting at position 2949 of SEQ ID NO: 1560484
ggauaccucuucugcguau

SEQ ID NO: 1603152 - RNA, 19 nt, Artificial Sequence
  Description of Artificial Sequence: Synthetic oligonucleotide
  Antisense strand to SEQ ID NO: 1603151
auacgcagaagagguaucc

SEQ ID NO: 1603153 - RNA, 19 nt, Artificial Sequence
  Description of Artificial Sequence: Synthetic oligonucleotide
  Sense strand starting at position 2975 of SEQ ID NO: 1560484
ccucaauauguccguggga

SEQ ID NO: 1603154 - RNA, 19 nt, Artificial Sequence
  Description of Artificial Sequence: Synthetic oligonucleotide
  Antisense strand to SEQ ID NO: 1603153
ucccacggacauauugagg

SEQ ID NO: 1603155 - RNA, 19 nt, Artificial Sequence
  Description of Artificial Sequence: Synthetic oligonucleotide
  Sense strand starting at position 3017 of SEQ ID NO: 1560484
gucucacuccagcguggua

SEQ ID NO: 1603156 - RNA, 19 nt, Artificial Sequence
  Description of Artificial Sequence: Synthetic oligonucleotide
  Antisense strand to SEQ ID NO: 1603155
uaccacgcuggagugagac

SEQ ID NO: 1603157 - RNA, 19 nt, Artificial Sequence
  Description of Artificial Sequence: Synthetic oligonucleotide
  Sense strand starting at position 3022 of SEQ ID NO: 1560484
acuccagcgugguaaguua

SEQ ID NO: 1603158 - RNA, 19 nt, Artificial Sequence
  Description of Artificial Sequence: Synthetic oligonucleotide
  Antisense strand to SEQ ID NO: 1603157
uaacuuaccacgcuggagu

SEQ ID NO: 1603159 - RNA, 19 nt, Artificial Sequence
  Description of Artificial Sequence: Synthetic oligonucleotide
  Sense strand starting at position 3051 of SEQ ID NO: 1560484
gaguucucgcuccacaguu

SEQ ID NO: 1603160 - RNA, 19 nt, Artificial Sequence
  Description of Artificial Sequence: Synthetic oligonucleotide
  Antisense strand to SEQ ID NO: 1603159
aacuguggagcgagaacuc

SEQ ID NO: 1603161 - RNA, 19 nt, Artificial Sequence
  Description of Artificial Sequence: Synthetic oligonucleotide
  Sense strand starting at position 3068 of SEQ ID NO: 1560484
uuguuuggccuccaggaaa

SEQ ID NO: 1603162 - RNA, 19 nt, Artificial Sequence
  Description of Artificial Sequence: Synthetic oligonucleotide
  Antisense strand to SEQ ID NO: 1603161
uuuccuggaggccaaacaa

SEQ ID NO: 1603163 - RNA, 19 nt, Artificial Sequence
  Description of Artificial Sequence: Synthetic oligonucleotide
  Sense strand starting at position 3224 of SEQ ID NO: 1560484
gcugaucccacucgauaag

SEQ ID NO: 1603164 - RNA, 19 nt, Artificial Sequence
  Description of Artificial Sequence: Synthetic oligonucleotide
  Antisense strand to SEQ ID NO: 1603163
cuuaucgagugggaucagc

SEQ ID NO: 1603165 - RNA, 19 nt, Artificial Sequence
  Description of Artificial Sequence: Synthetic oligonucleotide
  Sense strand starting at position 3252 of SEQ ID NO: 1560484
aggagagguuucugugaca

SEQ ID NO: 1603166 - RNA, 19 nt, Artificial Sequence
  Description of Artificial Sequence: Synthetic oligonucleotide
  Antisense strand to SEQ ID NO: 1603165
ugucacagaaaccucuccu

SEQ ID NO: 1603167 - RNA, 19 nt, Artificial Sequence
  Description of Artificial Sequence: Synthetic oligonucleotide
  Sense strand starting at position 3362 of SEQ ID NO: 1560484
uggagaaagugaucgcaaa

SEQ ID NO: 1603168 - RNA, 19 nt, Artificial Sequence
  Description of Artificial Sequence: Synthetic oligonucleotide
  Antisense strand to SEQ ID NO: 1603167
uuugcgaucacuuucucca

SEQ ID NO: 1603169 - RNA, 19 nt, Artificial Sequence
  Description of Artificial Sequence: Synthetic oligonucleotide
  Sense strand starting at position 23 of SEQ ID NO: 1560485
auuugcuacugcugugaaa

SEQ ID NO: 1603170 - RNA, 19 nt, Artificial Sequence
  Description of Artificial Sequence: Synthetic oligonucleotide
  Antisense strand to SEQ ID NO: 1603169
uuucacagcaguagcaaau

SEQ ID NO: 1603171 - RNA, 19 nt, Artificial Sequence
  Description of Artificial Sequence: Synthetic oligonucleotide
  Sense strand starting at position 121 of SEQ ID NO: 1560485
acggguucccgugauucgu

SEQ ID NO: 1603172 - RNA, 19 nt, Artificial Sequence
  Description of Artificial Sequence: Synthetic oligonucleotide
  Antisense strand to SEQ ID NO: 1603171
acgaaucacgggaacccgu

SEQ ID NO: 1603173 - RNA, 19 nt, Artificial Sequence
  Description of Artificial Sequence: Synthetic oligonucleotide
  Sense strand starting at position 127 of SEQ ID NO: 1560485
ucccgugauucguaccaag

SEQ ID NO: 1603174 - RNA, 19 nt, Artificial Sequence
  Description of Artificial Sequence: Synthetic oligonucleotide
  Antisense strand to SEQ ID NO: 1603173
cuugguacgaaucacggga

SEQ ID NO: 1603175 - RNA, 19 nt, Artificial Sequence
  Description of Artificial Sequence: Synthetic oligonucleotide
  Sense strand starting at position 130 of SEQ ID NO: 1560485
cgugauucguaccaagcca

SEQ ID NO: 1603176 - RNA, 19 nt, Artificial Sequence
  Description of Artificial Sequence: Synthetic oligonucleotide
  Antisense strand to SEQ ID NO: 1603175
uggcuugguacgaaucacg

SEQ ID NO: 1603177 - RNA, 19 nt, Artificial Sequence
  Description of Artificial Sequence: Synthetic oligonucleotide
  Sense strand starting at position 156 of SEQ ID NO: 1560485
gcaguuucccgcgacagga

SEQ ID NO: 1603178 - RNA, 19 nt, Artificial Sequence
  Description of Artificial Sequence: Synthetic oligonucleotide
  Antisense strand to SEQ ID NO: 1603177
uccugucgcgggaaacugc

SEQ ID NO: 1603179 - RNA, 19 nt, Artificial Sequence
  Description of Artificial Sequence: Synthetic oligonucleotide
  Sense strand starting at position 421 of SEQ ID NO: 1560485
gaugcagaauuguucgaau

SEQ ID NO: 1603180 - RNA, 19 nt, Artificial Sequence
  Description of Artificial Sequence: Synthetic oligonucleotide
  Antisense strand to SEQ ID NO: 1603179
auucgaacaauucugcauc

SEQ ID NO: 1603181 - RNA, 19 nt, Artificial Sequence
  Description of Artificial Sequence: Synthetic oligonucleotide
  Sense strand starting at position 539 of SEQ ID NO: 1560485
cgcugacuuccacaacuaa

SEQ ID NO: 1603182 - RNA, 19 nt, Artificial Sequence
  Description of Artificial Sequence: Synthetic oligonucleotide
  Antisense strand to SEQ ID NO: 1603181
uuaguuguggaagucagcg

SEQ ID NO: 1603183 - RNA, 19 nt, Artificial Sequence
  Description of Artificial Sequence: Synthetic oligonucleotide
  Sense strand starting at position 1406 of SEQ ID NO: 1560485
cugagucccuccgcugaua

SEQ ID NO: 1603184 - RNA, 19 nt, Artificial Sequence
  Description of Artificial Sequence: Synthetic oligonucleotide
  Antisense strand to SEQ ID NO: 1603183
uaucagcggagggacucag

SEQ ID NO: 1603185 - RNA, 19 nt, Artificial Sequence
  Description of Artificial Sequence: Synthetic oligonucleotide
  Sense strand starting at position 1408 of SEQ ID NO: 1560485
gagucccuccgcugauauu

SEQ ID NO: 1603186 - RNA, 19 nt, Artificial Sequence
  Description of Artificial Sequence: Synthetic oligonucleotide
  Antisense strand to SEQ ID NO: 1603185
aauaucagcggagggacuc

SEQ ID NO: 1603187 - RNA, 19 nt, Artificial Sequence
  Description of Artificial Sequence: Synthetic oligonucleotide
  Sense strand starting at position 1527 of SEQ ID NO: 1560485
cuccgcgcuucugaagaaa

SEQ ID NO: 1603188 - RNA, 19 nt, Artificial Sequence
  Description of Artificial Sequence: Synthetic oligonucleotide
  Antisense strand to SEQ ID NO: 1603187
uuucuucagaagcgcggag

SEQ ID NO: 1603189 - RNA, 19 nt, Artificial Sequence
  Description of Artificial Sequence: Synthetic oligonucleotide
  Sense strand starting at position 1651 of SEQ ID NO: 1560485
uccgccacuucucaggaaa

SEQ ID NO: 1603190 - RNA, 19 nt, Artificial Sequence
  Description of Artificial Sequence: Synthetic oligonucleotide
  Antisense strand to SEQ ID NO: 1603189
uuuccugagaaguggcgga

SEQ ID NO: 1603191 - RNA, 19 nt, Artificial Sequence
  Description of Artificial Sequence: Synthetic oligonucleotide
  Sense strand starting at position 1653 of SEQ ID NO: 1560485
cgccacuucucaggaaaga

SEQ ID NO: 1603192 - RNA, 19 nt, Artificial Sequence
  Description of Artificial Sequence: Synthetic oligonucleotide
  Antisense strand to SEQ ID NO: 1603191
ucuuuccugagaaguggcg

SEQ ID NO: 1603193 - RNA, 19 nt, Artificial Sequence
  Description of Artificial Sequence: Synthetic oligonucleotide
  Sense strand starting at position 1676 of SEQ ID NO: 1560485
gggagaaugcggcagaacu

SEQ ID NO: 1603194 - RNA, 19 nt, Artificial Sequence
  Description of Artificial Sequence: Synthetic oligonucleotide
  Antisense strand to SEQ ID NO: 1603193
aguucugccgcauucuccc

SEQ ID NO: 1603195 - RNA, 19 nt, Artificial Sequence
  Description of Artificial Sequence: Synthetic oligonucleotide
  Sense strand starting at position 1895 of SEQ ID NO: 1560485
gagggaggcuaucauuauu

SEQ ID NO: 1603196 - RNA, 19 nt, Artificial Sequence
  Description of Artificial Sequence: Synthetic oligonucleotide
  Antisense strand to SEQ ID NO: 1603195
aauaaugauagccucccuc

SEQ ID NO: 1603197 - RNA, 19 nt, Artificial Sequence
  Description of Artificial Sequence: Synthetic oligonucleotide
  Sense strand starting at position 2292 of SEQ ID NO: 1560485
ugacaugucucucgaagac

SEQ ID NO: 1603198 - RNA, 19 nt, Artificial Sequence
  Description of Artificial Sequence: Synthetic oligonucleotide
  Antisense strand to SEQ ID NO: 1603197
gucuucgagagacauguca

SEQ ID NO: 1603199 - RNA, 19 nt, Artificial Sequence
  Description of Artificial Sequence: Synthetic oligonucleotide
  Sense strand starting at position 2357 of SEQ ID NO: 1560485
gagggugcucuguacccaa

SEQ ID NO: 1603200 - RNA, 19 nt, Artificial Sequence
  Description of Artificial Sequence: Synthetic oligonucleotide
  Antisense strand to SEQ ID NO: 1603199
uuggguacagagcacccuc

SEQ ID NO: 1603201 - RNA, 19 nt, Artificial Sequence
  Description of Artificial Sequence: Synthetic oligonucleotide
  Sense strand starting at position 2936 of SEQ ID NO: 1560485
agguguucguggagcggau

SEQ ID NO: 1603202 - RNA, 19 nt, Artificial Sequence
  Description of Artificial Sequence: Synthetic oligonucleotide
  Antisense strand to SEQ ID NO: 1603201
auccgcuccacgaacaccu

SEQ ID NO: 1603203 - RNA, 19 nt, Artificial Sequence
  Description of Artificial Sequence: Synthetic oligonucleotide
  Sense strand starting at position 3001 of SEQ ID NO: 1560485
gggaagguuugaguguguu

SEQ ID NO: 1603204 - RNA, 19 nt, Artificial Sequence
  Description of Artificial Sequence: Synthetic oligonucleotide
  Antisense strand to SEQ ID NO: 1603203
aacacacucaaaccuuccc

SEQ ID NO: 1603205 - RNA, 19 nt, Artificial Sequence
  Description of Artificial Sequence: Synthetic oligonucleotide
  Sense strand starting at position 3491 of SEQ ID NO: 1560485
gccagaucccucugugcgu

SEQ ID NO: 1603206 - RNA, 19 nt, Artificial Sequence
  Description of Artificial Sequence: Synthetic oligonucleotide
  Antisense strand to SEQ ID NO: 1603205
acgcacagagggaucuggc

SEQ ID NO: 1603207 - RNA, 19 nt, Artificial Sequence
  Description of Artificial Sequence: Synthetic oligonucleotide
  Sense strand starting at position 3552 of SEQ ID NO: 1560485
gcaguuaucuucuugcugu

SEQ ID NO: 1603208 - RNA, 19 nt, Artificial Sequence
  Description of Artificial Sequence: Synthetic oligonucleotide
  Antisense strand to SEQ ID NO: 1603207
acagcaagaagauaacugc

SEQ ID NO: 1603209 - RNA, 19 nt, Artificial Sequence
  Description of Artificial Sequence: Synthetic oligonucleotide
  Sense strand starting at position 3555 of SEQ ID NO: 1560485
guuaucuucuugcugucua

SEQ ID NO: 1603210 - RNA, 19 nt, Artificial Sequence
  Description of Artificial Sequence: Synthetic oligonucleotide
  Antisense strand to SEQ ID NO: 1603209
uagacagcaagaagauaac

SEQ ID NO: 1603211 - RNA, 19 nt, Artificial Sequence
  Description of Artificial Sequence: Synthetic oligonucleotide
  Sense strand starting at position 3603 of SEQ ID NO: 1560485
ugaaccucucuauguguau

SEQ ID NO: 1603212 - RNA, 19 nt, Artificial Sequence
  Description of Artificial Sequence: Synthetic oligonucleotide
  Antisense strand to SEQ ID NO: 1603211
auacacauagagagguuca

SEQ ID NO: 1603213 - RNA, 19 nt, Artificial Sequence
  Description of Artificial Sequence: Synthetic oligonucleotide
  Sense strand starting at position 3616 of SEQ ID NO: 1560485
guguauauguccguggguu

SEQ ID NO: 1603214 - RNA, 19 nt, Artificial Sequence
  Description of Artificial Sequence: Synthetic oligonucleotide
  Antisense strand to SEQ ID NO: 1603213
aacccacggacauauacac

SEQ ID NO: 1603215 - RNA, 19 nt, Artificial Sequence
  Description of Artificial Sequence: Synthetic oligonucleotide
  Sense strand starting at position 3617 of SEQ ID NO: 1560485
uguauauguccguggguuc

SEQ ID NO: 1603216 - RNA, 19 nt, Artificial Sequence
  Description of Artificial Sequence: Synthetic oligonucleotide
  Antisense strand to SEQ ID NO: 1603215
gaacccacggacauauaca

SEQ ID NO: 1603217 - RNA, 19 nt, Artificial Sequence
  Description of Artificial Sequence: Synthetic oligonucleotide
  Sense strand starting at position 3644 of SEQ ID NO: 1560485
uguguccucugggucuaua

SEQ ID NO: 1603218 - RNA, 19 nt, Artificial Sequence
  Description of Artificial Sequence: Synthetic oligonucleotide
  Antisense strand to SEQ ID NO: 1603217
uauagacccagaggacaca

SEQ ID NO: 1603219 - RNA, 19 nt, Artificial Sequence
  Description of Artificial Sequence: Synthetic oligonucleotide
  Sense strand starting at position 3663 of SEQ ID NO: 1560485
cugguuuccuguugcagga

SEQ ID NO: 1603220 - RNA, 19 nt, Artificial Sequence
  Description of Artificial Sequence: Synthetic oligonucleotide
  Antisense strand to SEQ ID NO: 1603219
uccugcaacaggaaaccag

SEQ ID NO: 1603221 - RNA, 19 nt, Artificial Sequence
  Description of Artificial Sequence: Synthetic oligonucleotide
  Sense strand starting at position 3725 of SEQ ID NO: 1560485
ccauuuguccugugugcac

SEQ ID NO: 1603222 - RNA, 19 nt, Artificial Sequence
  Description of Artificial Sequence: Synthetic oligonucleotide
  Antisense strand to SEQ ID NO: 1603221
gugcacacaggacaaaugg

SEQ ID NO: 1603223 - RNA, 19 nt, Artificial Sequence
  Description of Artificial Sequence: Synthetic oligonucleotide
  Sense strand starting at position 3742 of SEQ ID NO: 1560485
accuguuuccaggacgcau

SEQ ID NO: 1603224 - RNA, 19 nt, Artificial Sequence
  Description of Artificial Sequence: Synthetic oligonucleotide
  Antisense strand to SEQ ID NO: 1603223
augcguccuggaaacaggu

SEQ ID NO: 1603225 - RNA, 19 nt, Artificial Sequence
  Description of Artificial Sequence: Synthetic oligonucleotide
  Sense strand starting at position 3931 of SEQ ID NO: 1560485
caggguaacuucuguauuu

SEQ ID NO: 1603226 - RNA, 19 nt, Artificial Sequence
  Description of Artificial Sequence: Synthetic oligonucleotide
  Antisense strand to SEQ ID NO: 1603225
aaauacagaaguuacccug

SEQ ID NO: 1603227 - RNA, 19 nt, Artificial Sequence
  Description of Artificial Sequence: Synthetic oligonucleotide
  Sense strand starting at position 228 of SEQ ID NO: 1560486
cugacacccucucguaaua

SEQ ID NO: 1603228 - RNA, 19 nt, Artificial Sequence
  Description of Artificial Sequence: Synthetic oligonucleotide
  Antisense strand to SEQ ID NO: 1603227
uauuacgagagggugucag

SEQ ID NO: 1603229 - RNA, 19 nt, Artificial Sequence
  Description of Artificial Sequence: Synthetic oligonucleotide
  Sense strand starting at position 239 of SEQ ID NO: 1560486
ucguaauaaucaccaguac

SEQ ID NO: 1603230 - RNA, 19 nt, Artificial Sequence
  Description of Artificial Sequence: Synthetic oligonucleotide
  Antisense strand to SEQ ID NO: 1603229
guacuggugauuauuacga

SEQ ID NO: 1603231 - RNA, 19 nt, Artificial Sequence
  Description of Artificial Sequence: Synthetic oligonucleotide
  Sense strand starting at position 284 of SEQ ID NO: 1560486
gugauuaaaugggagcaca

SEQ ID NO: 1603232 - RNA, 19 nt, Artificial Sequence
  Description of Artificial Sequence: Synthetic oligonucleotide
  Antisense strand to SEQ ID NO: 1603231
ugugcucccauuuaaucac

SEQ ID NO: 1603233 - RNA, 19 nt, Artificial Sequence
  Description of Artificial Sequence: Synthetic oligonucleotide
  Sense strand starting at position 733 of SEQ ID NO: 1560486
auugccugucuguggauua

SEQ ID NO: 1603234 - RNA, 19 nt, Artificial Sequence
  Description of Artificial Sequence: Synthetic oligonucleotide
  Antisense strand to SEQ ID NO: 1603233
uaauccacagacaggcaau

SEQ ID NO: 1603235 - RNA, 19 nt, Artificial Sequence
  Description of Artificial Sequence: Synthetic oligonucleotide
  Sense strand starting at position 809 of SEQ ID NO: 1560486
uugguagucuuguagaaag

SEQ ID NO: 1603236 - RNA, 19 nt, Artificial Sequence
  Description of Artificial Sequence: Synthetic oligonucleotide
  Antisense strand to SEQ ID NO: 1603235
cuuucuacaagacuaccaa

SEQ ID NO: 1603237 - RNA, 19 nt, Artificial Sequence
  Description of Artificial Sequence: Synthetic oligonucleotide
  Sense strand starting at position 863 of SEQ ID NO: 1560486
cagaacuugccagguggaa

SEQ ID NO: 1603238 - RNA, 19 nt, Artificial Sequence
  Description of Artificial Sequence: Synthetic oligonucleotide
  Antisense strand to SEQ ID NO: 1603237
uuccaccuggcaaguucug

SEQ ID NO: 1603239 - RNA, 19 nt, Artificial Sequence
  Description of Artificial Sequence: Synthetic oligonucleotide
  Sense strand starting at position 876 of SEQ ID NO: 1560486
guggaaucuugacuuugag

SEQ ID NO: 1603240 - RNA, 19 nt, Artificial Sequence
  Description of Artificial Sequence: Synthetic oligonucleotide
  Antisense strand to SEQ ID NO: 1603239
cucaaagucaagauuccac

SEQ ID NO: 1603241 - RNA, 19 nt, Artificial Sequence
  Description of Artificial Sequence: Synthetic oligonucleotide
  Sense strand starting at position 1096 of SEQ ID NO: 1560486
aggccagaauggucucgaa

SEQ ID NO: 1603242 - RNA, 19 nt, Artificial Sequence
  Description of Artificial Sequence: Synthetic oligonucleotide
  Antisense strand to SEQ ID NO: 1603241
uucgagaccauucuggccu

SEQ ID NO: 1603243 - RNA, 19 nt, Artificial Sequence
  Description of Artificial Sequence: Synthetic oligonucleotide
  Sense strand starting at position 1197 of SEQ ID NO: 1560486
augcucauuucuugucacu

SEQ ID NO: 1603244 - RNA, 19 nt, Artificial Sequence
  Description of Artificial Sequence: Synthetic oligonucleotide
  Antisense strand to SEQ ID NO: 1603243
agugacaagaaaugagcau

SEQ ID NO: 1603245 - RNA, 19 nt, Artificial Sequence
  Description of Artificial Sequence: Synthetic oligonucleotide
  Sense strand starting at position 1541 of SEQ ID NO: 1560486
acaguaggcgcucauugaa

SEQ ID NO: 1603246 - RNA, 19 nt, Artificial Sequence
  Description of Artificial Sequence: Synthetic oligonucleotide
  Antisense strand to SEQ ID NO: 1603245
uucaaugagcgccuacugu

SEQ ID NO: 1603247 - RNA, 19 nt, Artificial Sequence
  Description of Artificial Sequence: Synthetic oligonucleotide
  Sense strand starting at position 1800 of SEQ ID NO: 1560486
gucccuaccuuguaguuaa

SEQ ID NO: 1603248 - RNA, 19 nt, Artificial Sequence
  Description of Artificial Sequence: Synthetic oligonucleotide
  Antisense strand to SEQ ID NO: 1603247
uuaacuacaagguagggac

SEQ ID NO: 1603249 - RNA, 19 nt, Artificial Sequence
  Description of Artificial Sequence: Synthetic oligonucleotide
  Sense strand starting at position 2623 of SEQ ID NO: 1560486
cagggaguggcgugucauu

SEQ ID NO: 1603250 - RNA, 19 nt, Artificial Sequence
  Description of Artificial Sequence: Synthetic oligonucleotide
  Antisense strand to SEQ ID NO: 1603249
aaugacacgccacucccug

SEQ ID NO: 1603251 - RNA, 19 nt, Artificial Sequence
  Description of Artificial Sequence: Synthetic oligonucleotide
  Sense strand starting at position 2633 of SEQ ID NO: 1560486
cgugucauuucucuagggu

SEQ ID NO: 1603252 - RNA, 19 nt, Artificial Sequence
  Description of Artificial Sequence: Synthetic oligonucleotide
  Antisense strand to SEQ ID NO: 1603251
acccuagagaaaugacacg

SEQ ID NO: 1603253 - RNA, 19 nt, Artificial Sequence
  Description of Artificial Sequence: Synthetic oligonucleotide
  Sense strand starting at position 2777 of SEQ ID NO: 1560486
gccugugcugucugggaua

SEQ ID NO: 1603254 - RNA, 19 nt, Artificial Sequence
  Description of Artificial Sequence: Synthetic oligonucleotide
  Antisense strand to SEQ ID NO: 1603253
uaucccagacagcacaggc

SEQ ID NO: 1603255 - RNA, 19 nt, Artificial Sequence
  Description of Artificial Sequence: Synthetic oligonucleotide
  Sense strand starting at position 2836 of SEQ ID NO: 1560486
gugacagagccucagcuuu

SEQ ID NO: 1603256 - RNA, 19 nt, Artificial Sequence
  Description of Artificial Sequence: Synthetic oligonucleotide
  Antisense strand to SEQ ID NO: 1603255
aaagcugaggcucugucac

SEQ ID NO: 1603257 - RNA, 19 nt, Artificial Sequence
  Description of Artificial Sequence: Synthetic oligonucleotide
  Sense strand starting at position 2849 of SEQ ID NO: 1560486
agcuuucccuucuguguaa

SEQ ID NO: 1603258 - RNA, 19 nt, Artificial Sequence
  Description of Artificial Sequence: Synthetic oligonucleotide
  Antisense strand to SEQ ID NO: 1603257
uuacacagaagggaaagcu

SEQ ID NO: 1603259 - RNA, 19 nt, Artificial Sequence
  Description of Artificial Sequence: Synthetic oligonucleotide
  Sense strand starting at position 2850 of SEQ ID NO: 1560486
gcuuucccuucuguguaau

SEQ ID NO: 1603260 - RNA, 19 nt, Artificial Sequence
  Description of Artificial Sequence: Synthetic oligonucleotide
  Antisense strand to SEQ ID NO: 1603259
auuacacagaagggaaagc

SEQ ID NO: 1603261 - RNA, 19 nt, Artificial Sequence
  Description of Artificial Sequence: Synthetic oligonucleotide
  Sense strand starting at position 3061 of SEQ ID NO: 1560486
gggaauaacugagacauuc

SEQ ID NO: 1603262 - RNA, 19 nt, Artificial Sequence
  Description of Artificial Sequence: Synthetic oligonucleotide
  Antisense strand to SEQ ID NO: 1603261
gaaugucucaguuauuccc

SEQ ID NO: 1603263 - RNA, 19 nt, Artificial Sequence
  Description of Artificial Sequence: Synthetic oligonucleotide
  Sense strand starting at position 3115 of SEQ ID NO: 1560486
aucggauccuagggaagaa

SEQ ID NO: 1603264 - RNA, 19 nt, Artificial Sequence
  Description of Artificial Sequence: Synthetic oligonucleotide
  Antisense strand to SEQ ID NO: 1603263
uucuucccuaggauccgau

SEQ ID NO: 1603265 - RNA, 19 nt, Artificial Sequence
  Description of Artificial Sequence: Synthetic oligonucleotide
  Sense strand starting at position 3152 of SEQ ID NO: 1560486
ggaagauauaccugagucc

SEQ ID NO: 1603266 - RNA, 19 nt, Artificial Sequence
  Description of Artificial Sequence: Synthetic oligonucleotide
  Antisense strand to SEQ ID NO: 1603265
ggacucagguauaucuucc

SEQ ID NO: 1603267 - RNA, 19 nt, Artificial Sequence
  Description of Artificial Sequence: Synthetic oligonucleotide
  Sense strand starting at position 3235 of SEQ ID NO: 1560486
gccggagcuucucugaagu

SEQ ID NO: 1603268 - RNA, 19 nt, Artificial Sequence
  Description of Artificial Sequence: Synthetic oligonucleotide
  Antisense strand to SEQ ID NO: 1603267
acuucagagaagcuccggc

SEQ ID NO: 1603269 - RNA, 19 nt, Artificial Sequence
  Description of Artificial Sequence: Synthetic oligonucleotide
  Sense strand starting at position 3291 of SEQ ID NO: 1560486
cgaccaaaccguuggcaaa

SEQ ID NO: 1603270 - RNA, 19 nt, Artificial Sequence
  Description of Artificial Sequence: Synthetic oligonucleotide
  Antisense strand to SEQ ID NO: 1603269
uuugccaacgguuuggucg

SEQ ID NO: 1603271 - RNA, 19 nt, Artificial Sequence
  Description of Artificial Sequence: Synthetic oligonucleotide
  Sense strand starting at position 3353 of SEQ ID NO: 1560486
gccgggugggauugaagaa

SEQ ID NO: 1603272 - RNA, 19 nt, Artificial Sequence
  Description of Artificial Sequence: Synthetic oligonucleotide
  Antisense strand to SEQ ID NO: 1603271
uucuucaaucccacccggc

SEQ ID NO: 1603273 - RNA, 19 nt, Artificial Sequence
  Description of Artificial Sequence: Synthetic oligonucleotide
  Sense strand starting at position 3514 of SEQ ID NO: 1560486
auugaacccucagaagcau

SEQ ID NO: 1603274 - RNA, 19 nt, Artificial Sequence
  Description of Artificial Sequence: Synthetic oligonucleotide
  Antisense strand to SEQ ID NO: 1603273
augcuucugaggguucaau

SEQ ID NO: 1603275 - RNA, 19 nt, Artificial Sequence
  Description of Artificial Sequence: Synthetic oligonucleotide
  Sense strand starting at position 3561 of SEQ ID NO: 1560486
gacuccagcugguaacaaa

SEQ ID NO: 1603276 - RNA, 19 nt, Artificial Sequence
  Description of Artificial Sequence: Synthetic oligonucleotide
  Antisense strand to SEQ ID NO: 1603275
uuuguuaccagcuggaguc

SEQ ID NO: 1603277 - RNA, 19 nt, Artificial Sequence
  Description of Artificial Sequence: Synthetic oligonucleotide
  Sense strand starting at position 3655 of SEQ ID NO: 1560486
acgggauauucucuuccac

SEQ ID NO: 1603278 - RNA, 19 nt, Artificial Sequence
  Description of Artificial Sequence: Synthetic oligonucleotide
  Antisense strand to SEQ ID NO: 1603277
guggaagagaauaucccgu

SEQ ID NO: 1603279 - RNA, 19 nt, Artificial Sequence
  Description of Artificial Sequence: Synthetic oligonucleotide
  Sense strand starting at position 3681 of SEQ ID NO: 1560486
ucagcauagcugggaucau

SEQ ID NO: 1603280 - RNA, 19 nt, Artificial Sequence
  Description of Artificial Sequence: Synthetic oligonucleotide
  Antisense strand to SEQ ID NO: 1603279
augaucccagcuaugcuga

SEQ ID NO: 1603281 - RNA, 19 nt, Artificial Sequence
  Description of Artificial Sequence: Synthetic oligonucleotide
  Sense strand starting at position 3682 of SEQ ID NO: 1560486
cagcauagcugggaucaua

SEQ ID NO: 1603282 - RNA, 19 nt, Artificial Sequence
  Description of Artificial Sequence: Synthetic oligonucleotide
  Antisense strand to SEQ ID NO: 1603281
uaugaucccagcuaugcug

SEQ ID NO: 1603283 - RNA, 19 nt, Artificial Sequence
  Description of Artificial Sequence: Synthetic oligonucleotide
  Sense strand starting at position 3745 of SEQ ID NO: 1560486
acaaucugggcuggaguua

SEQ ID NO: 1603284 - RNA, 19 nt, Artificial Sequence
  Description of Artificial Sequence: Synthetic oligonucleotide
  Antisense strand to SEQ ID NO: 1603283
uaacuccagcccagauugu

SEQ ID NO: 1603285 - RNA, 19 nt, Artificial Sequence
  Description of Artificial Sequence: Synthetic oligonucleotide
  Sense strand starting at position 3746 of SEQ ID NO: 1560486
caaucugggcuggaguuau

SEQ ID NO: 1603286 - RNA, 19 nt, Artificial Sequence
  Description of Artificial Sequence: Synthetic oligonucleotide
  Antisense strand to SEQ ID NO: 1603285
auaacuccagcccagauug

SEQ ID NO: 1603287 - RNA, 19 nt, Artificial Sequence
  Description of Artificial Sequence: Synthetic oligonucleotide
  Sense strand starting at position 3756 of SEQ ID NO: 1560486
uggaguuauuuauggguua

SEQ ID NO: 1603288 - RNA, 19 nt, Artificial Sequence
  Description of Artificial Sequence: Synthetic oligonucleotide
  Antisense strand to SEQ ID NO: 1603287
uaacccauaaauaacucca

SEQ ID NO: 1603289 - RNA, 19 nt, Artificial Sequence
  Description of Artificial Sequence: Synthetic oligonucleotide
  Sense strand starting at position 3757 of SEQ ID NO: 1560486
ggaguuauuuauggguuau

SEQ ID NO: 1603290 - RNA, 19 nt, Artificial Sequence
  Description of Artificial Sequence: Synthetic oligonucleotide
  Antisense strand to SEQ ID NO: 1603289
auaacccauaaauaacucc

SEQ ID NO: 1603291 - RNA, 19 nt, Artificial Sequence
  Description of Artificial Sequence: Synthetic oligonucleotide
  Sense strand starting at position 3884 of SEQ ID NO: 1560486
ggagguuucuuucugcacu

SEQ ID NO: 1603292 - RNA, 19 nt, Artificial Sequence
  Description of Artificial Sequence: Synthetic oligonucleotide
  Antisense strand to SEQ ID NO: 1603291
agugcagaaagaaaccucc

SEQ ID NO: 1603293 - RNA, 19 nt, Artificial Sequence
  Description of Artificial Sequence: Synthetic oligonucleotide
  Sense strand starting at position 3885 of SEQ ID NO: 1560486
gagguuucuuucugcacuu

SEQ ID NO: 1603294 - RNA, 19 nt, Artificial Sequence
  Description of Artificial Sequence: Synthetic oligonucleotide
  Antisense strand to SEQ ID NO: 1603293
aagugcagaaagaaaccuc

SEQ ID NO: 1603295 - RNA, 19 nt, Artificial Sequence
  Description of Artificial Sequence: Synthetic oligonucleotide
  Sense strand starting at position 3929 of SEQ ID NO: 1560486
uugagagguggcuguacaa

SEQ ID NO: 1603296 - RNA, 19 nt, Artificial Sequence
  Description of Artificial Sequence: Synthetic oligonucleotide
  Antisense strand to SEQ ID NO: 1603295
uuguacagccaccucucaa

SEQ ID NO: 1603297 - RNA, 19 nt, Artificial Sequence
  Description of Artificial Sequence: Synthetic oligonucleotide
  Sense strand starting at position 681 of SEQ ID NO: 1560487
guugcaugcacagagaaga

SEQ ID NO: 1603298 - RNA, 19 nt, Artificial Sequence
  Description of Artificial Sequence: Synthetic oligonucleotide
  Antisense strand to SEQ ID NO: 1603297
ucuucucugugcaugcaac

SEQ ID NO: 1603299 - RNA, 19 nt, Artificial Sequence
  Description of Artificial Sequence: Synthetic oligonucleotide
  Sense strand starting at position 1035 of SEQ ID NO: 1560487
ggagcaugagcuggaugaa

SEQ ID NO: 1603300 - RNA, 19 nt, Artificial Sequence
  Description of Artificial Sequence: Synthetic oligonucleotide
  Antisense strand to SEQ ID NO: 1603299
uucauccagcucaugcucc

SEQ ID NO: 1603301 - RNA, 19 nt, Artificial Sequence
  Description of Artificial Sequence: Synthetic oligonucleotide
  Sense strand starting at position 1036 of SEQ ID NO: 1560487
gagcaugagcuggaugaau

SEQ ID NO: 1603302 - RNA, 19 nt, Artificial Sequence
  Description of Artificial Sequence: Synthetic oligonucleotide
  Antisense strand to SEQ ID NO: 1603301
auucauccagcucaugcuc

SEQ ID NO: 1603303 - RNA, 19 nt, Artificial Sequence
  Description of Artificial Sequence: Synthetic oligonucleotide
  Sense strand starting at position 1047 of SEQ ID NO: 1560487
ggaugaaugucagugagag

SEQ ID NO: 1603304 - RNA, 19 nt, Artificial Sequence
  Description of Artificial Sequence: Synthetic oligonucleotide
  Antisense strand to SEQ ID NO: 1603303
cucucacugacauucaucc

SEQ ID NO: 1603305 - RNA, 19 nt, Artificial Sequence
  Description of Artificial Sequence: Synthetic oligonucleotide
  Sense strand starting at position 1048 of SEQ ID NO: 1560487
gaugaaugucagugagaga

SEQ ID NO: 1603306 - RNA, 19 nt, Artificial Sequence
  Description of Artificial Sequence: Synthetic oligonucleotide
  Antisense strand to SEQ ID NO: 1603305
ucucucacugacauucauc

SEQ ID NO: 1603307 - RNA, 19 nt, Artificial Sequence
  Description of Artificial Sequence: Synthetic oligonucleotide
  Sense strand starting at position 1051 of SEQ ID NO: 1560487
gaaugucagugagagauaa

SEQ ID NO: 1603308 - RNA, 19 nt, Artificial Sequence
  Description of Artificial Sequence: Synthetic oligonucleotide
  Antisense strand to SEQ ID NO: 1603307
uuaucucucacugacauuc

SEQ ID NO: 1603309 - RNA, 19 nt, Artificial Sequence
  Description of Artificial Sequence: Synthetic oligonucleotide
  Sense strand starting at position 1172 of SEQ ID NO: 1560487
uggagacauuugggagaga

SEQ ID NO: 1603310 - RNA, 19 nt, Artificial Sequence
  Description of Artificial Sequence: Synthetic oligonucleotide
  Antisense strand to SEQ ID NO: 1603309
ucucucccaaaugucucca

SEQ ID NO: 1603311 - RNA, 19 nt, Artificial Sequence
  Description of Artificial Sequence: Synthetic oligonucleotide
  Sense strand starting at position 1246 of SEQ ID NO: 1560487
gccgaugggagaugauaaa

SEQ ID NO: 1603312 - RNA, 19 nt, Artificial Sequence
  Description of Artificial Sequence: Synthetic oligonucleotide
  Antisense strand to SEQ ID NO: 1603311
uuuaucaucucccaucggc

SEQ ID NO: 1603313 - RNA, 19 nt, Artificial Sequence
  Description of Artificial Sequence: Synthetic oligonucleotide
  Sense strand starting at position 1508 of SEQ ID NO: 1560487
uugagugacucuuccuaga

SEQ ID NO: 1603314 - RNA, 19 nt, Artificial Sequence
  Description of Artificial Sequence: Synthetic oligonucleotide
  Antisense strand to SEQ ID NO: 1603313
ucuaggaagagucacucaa

SEQ ID NO: 1603315 - RNA, 19 nt, Artificial Sequence
  Description of Artificial Sequence: Synthetic oligonucleotide
  Sense strand starting at position 1510 of SEQ ID NO: 1560487
gagugacucuuccuagaga

SEQ ID NO: 1603316 - RNA, 19 nt, Artificial Sequence
  Description of Artificial Sequence: Synthetic oligonucleotide
  Antisense strand to SEQ ID NO: 1603315
ucucuaggaagagucacuc

SEQ ID NO: 1603317 - RNA, 19 nt, Artificial Sequence
  Description of Artificial Sequence: Synthetic oligonucleotide
  Sense strand starting at position 1513 of SEQ ID NO: 1560487
ugacucuuccuagagagca

SEQ ID NO: 1603318 - RNA, 19 nt, Artificial Sequence
  Description of Artificial Sequence: Synthetic oligonucleotide
  Antisense strand to SEQ ID NO: 1603317
ugcucucuaggaagaguca

SEQ ID NO: 1603319 - RNA, 19 nt, Artificial Sequence
  Description of Artificial Sequence: Synthetic oligonucleotide
  Sense strand starting at position 1585 of SEQ ID NO: 1560487
ggaugaaguuggccugaca

SEQ ID NO: 1603320 - RNA, 19 nt, Artificial Sequence
  Description of Artificial Sequence: Synthetic oligonucleotide
  Antisense strand to SEQ ID NO: 1603319
ugucaggccaacuucaucc

SEQ ID NO: 1603321 - RNA, 19 nt, Artificial Sequence
  Description of Artificial Sequence: Synthetic oligonucleotide
  Sense strand starting at position 1596 of SEQ ID NO: 1560487
gccugacagcauggguuua

SEQ ID NO: 1603322 - RNA, 19 nt, Artificial Sequence
  Description of Artificial Sequence: Synthetic oligonucleotide
  Antisense strand to SEQ ID NO: 1603321
uaaacccaugcugucaggc

SEQ ID NO: 1603323 - RNA, 19 nt, Artificial Sequence
  Description of Artificial Sequence: Synthetic oligonucleotide
  Sense strand starting at position 1609 of SEQ ID NO: 1560487
gguuuaacccagugcagaa

SEQ ID NO: 1603324 - RNA, 19 nt, Artificial Sequence
  Description of Artificial Sequence: Synthetic oligonucleotide
  Antisense strand to SEQ ID NO: 1603323
uucugcacuggguuaaacc

SEQ ID NO: 1603325 - RNA, 19 nt, Artificial Sequence
  Description of Artificial Sequence: Synthetic oligonucleotide
  Sense strand starting at position 1628 of SEQ ID NO: 1560487
aggauagagguuugccaua

SEQ ID NO: 1603326 - RNA, 19 nt, Artificial Sequence
  Description of Artificial Sequence: Synthetic oligonucleotide
  Antisense strand to SEQ ID NO: 1603325
uauggcaaaccucuauccu

SEQ ID NO: 1603327 - RNA, 19 nt, Artificial Sequence
  Description of Artificial Sequence: Synthetic oligonucleotide
  Sense strand starting at position 1630 of SEQ ID NO: 1560487
gauagagguuugccauagu

SEQ ID NO: 1603328 - RNA, 19 nt, Artificial Sequence
  Description of Artificial Sequence: Synthetic oligonucleotide
  Antisense strand to SEQ ID NO: 1603327
acuauggcaaaccucuauc

SEQ ID NO: 1603329 - RNA, 19 nt, Artificial Sequence
  Description of Artificial Sequence: Synthetic oligonucleotide
  Sense strand starting at position 1688 of SEQ ID NO: 1560487
uugggacacccguagaagu

SEQ ID NO: 1603330 - RNA, 19 nt, Artificial Sequence
  Description of Artificial Sequence: Synthetic oligonucleotide
  Antisense strand to SEQ ID NO: 1603329
acuucuacgggugucccaa

SEQ ID NO: 1603331 - RNA, 19 nt, Artificial Sequence
  Description of Artificial Sequence: Synthetic oligonucleotide
  Sense strand starting at position 2879 of SEQ ID NO: 1560487
agcuucugccauugguuua

SEQ ID NO: 1603332 - RNA, 19 nt, Artificial Sequence
  Description of Artificial Sequence: Synthetic oligonucleotide
  Antisense strand to SEQ ID NO: 1603331
uaaaccaauggcagaagcu

SEQ ID NO: 1603333 - RNA, 19 nt, Artificial Sequence
  Description of Artificial Sequence: Synthetic oligonucleotide
  Sense strand starting at position 2882 of SEQ ID NO: 1560487
uucugccauugguuuaaga

SEQ ID NO: 1603334 - RNA, 19 nt, Artificial Sequence
  Description of Artificial Sequence: Synthetic oligonucleotide
  Antisense strand to SEQ ID NO: 1603333
ucuuaaaccaauggcagaa

SEQ ID NO: 1603335 - RNA, 19 nt, Artificial Sequence
  Description of Artificial Sequence: Synthetic oligonucleotide
  Sense strand starting at position 2884 of SEQ ID NO: 1560487
cugccauugguuuaagaau

SEQ ID NO: 1603336 - RNA, 19 nt, Artificial Sequence
  Description of Artificial Sequence: Synthetic oligonucleotide
  Antisense strand to SEQ ID NO: 1603335
auucuuaaaccaauggcag

SEQ ID NO: 1603337 - RNA, 19 nt, Artificial Sequence
  Description of Artificial Sequence: Synthetic oligonucleotide
  Sense strand starting at position 2893 of SEQ ID NO: 1560487
guuuaagaaugucccauua

SEQ ID NO: 1603338 - RNA, 19 nt, Artificial Sequence
  Description of Artificial Sequence: Synthetic oligonucleotide
  Antisense strand to SEQ ID NO: 1603337
uaaugggacauucuuaaac

SEQ ID NO: 1603339 - RNA, 19 nt, Artificial Sequence
  Description of Artificial Sequence: Synthetic oligonucleotide
  Sense strand starting at position 2930 of SEQ ID NO: 1560487
uccuaauguuucucugagu

SEQ ID NO: 1603340 - RNA, 19 nt, Artificial Sequence
  Description of Artificial Sequence: Synthetic oligonucleotide
  Antisense strand to SEQ ID NO: 1603339
acucagagaaacauuagga

SEQ ID NO: 1603341 - RNA, 19 nt, Artificial Sequence
  Description of Artificial Sequence: Synthetic oligonucleotide
  Sense strand starting at position 2931 of SEQ ID NO: 1560487
ccuaauguuucucugagua

SEQ ID NO: 1603342 - RNA, 19 nt, Artificial Sequence
  Description of Artificial Sequence: Synthetic oligonucleotide
  Antisense strand to SEQ ID NO: 1603341
uacucagagaaacauuagg

SEQ ID NO: 1603343 - RNA, 19 nt, Artificial Sequence
  Description of Artificial Sequence: Synthetic oligonucleotide
  Sense strand starting at position 2935 of SEQ ID NO: 1560487
auguuucucugaguaguua

SEQ ID NO: 1603344 - RNA, 19 nt, Artificial Sequence
  Description of Artificial Sequence: Synthetic oligonucleotide
  Antisense strand to SEQ ID NO: 1603343
uaacuacucagagaaacau

SEQ ID NO: 1603345 - RNA, 19 nt, Artificial Sequence
  Description of Artificial Sequence: Synthetic oligonucleotide
  Sense strand starting at position 2936 of SEQ ID NO: 1560487
uguuucucugaguaguuau

SEQ ID NO: 1603346 - RNA, 19 nt, Artificial Sequence
  Description of Artificial Sequence: Synthetic oligonucleotide
  Antisense strand to SEQ ID NO: 1603345
auaacuacucagagaaaca

SEQ ID NO: 1603347 - RNA, 19 nt, Artificial Sequence
  Description of Artificial Sequence: Synthetic oligonucleotide
  Sense strand starting at position 2982 of SEQ ID NO: 1560487
gugucaccuugacugguua

SEQ ID NO: 1603348 - RNA, 19 nt, Artificial Sequence
  Description of Artificial Sequence: Synthetic oligonucleotide
  Antisense strand to SEQ ID NO: 1603347
uaaccagucaaggugacac

SEQ ID NO: 1603349 - RNA, 19 nt, Artificial Sequence
  Description of Artificial Sequence: Synthetic oligonucleotide
  Sense strand starting at position 2986 of SEQ ID NO: 1560487
caccuugacugguuaaguu

SEQ ID NO: 1603350 - RNA, 19 nt, Artificial Sequence
  Description of Artificial Sequence: Synthetic oligonucleotide
  Antisense strand to SEQ ID NO: 1603349
aacuuaaccagucaaggug

SEQ ID NO: 1603351 - RNA, 19 nt, Artificial Sequence
  Description of Artificial Sequence: Synthetic oligonucleotide
  Sense strand starting at position 2993 of SEQ ID NO: 1560487
acugguuaaguuuaucaga

SEQ ID NO: 1603352 - RNA, 19 nt, Artificial Sequence
  Description of Artificial Sequence: Synthetic oligonucleotide
  Antisense strand to SEQ ID NO: 1603351
ucugauaaacuuaaccagu

SEQ ID NO: 1603353 - RNA, 19 nt, Artificial Sequence
  Description of Artificial Sequence: Synthetic oligonucleotide
  Sense strand starting at position 2995 of SEQ ID NO: 1560487
ugguuaaguuuaucagaua

SEQ ID NO: 1603354 - RNA, 19 nt, Artificial Sequence
  Description of Artificial Sequence: Synthetic oligonucleotide
  Antisense strand to SEQ ID NO: 1603353
uaucugauaaacuuaacca

SEQ ID NO: 1603355 - RNA, 19 nt, Artificial Sequence
  Description of Artificial Sequence: Synthetic oligonucleotide
  Sense strand starting at position 3004 of SEQ ID NO: 1560487
uuaucagauagcuggugau

SEQ ID NO: 1603356 - RNA, 19 nt, Artificial Sequence
  Description of Artificial Sequence: Synthetic oligonucleotide
  Antisense strand to SEQ ID NO: 1603355
aucaccagcuaucugauaa

SEQ ID NO: 1603357 - RNA, 19 nt, Artificial Sequence
  Description of Artificial Sequence: Synthetic oligonucleotide
  Sense strand starting at position 3014 of SEQ ID NO: 1560487
gcuggugaugcguuaauuc

SEQ ID NO: 1603358 - RNA, 19 nt, Artificial Sequence
  Description of Artificial Sequence: Synthetic oligonucleotide
  Antisense strand to SEQ ID NO: 1603357
gaauuaacgcaucaccagc

SEQ ID NO: 1603359 - RNA, 19 nt, Artificial Sequence
  Description of Artificial Sequence: Synthetic oligonucleotide
  Sense strand starting at position 3023 of SEQ ID NO: 1560487
gcguuaauucuggguauga

SEQ ID NO: 1603360 - RNA, 19 nt, Artificial Sequence
  Description of Artificial Sequence: Synthetic oligonucleotide
  Antisense strand to SEQ ID NO: 1603359
ucauacccagaauuaacgc

SEQ ID NO: 1603361 - RNA, 19 nt, Artificial Sequence
  Description of Artificial Sequence: Synthetic oligonucleotide
  Sense strand starting at position 3024 of SEQ ID NO: 1560487
cguuaauucuggguaugac

SEQ ID NO: 1603362 - RNA, 19 nt, Artificial Sequence
  Description of Artificial Sequence: Synthetic oligonucleotide
  Antisense strand to SEQ ID NO: 1603361
gucauacccagaauuaacg

SEQ ID NO: 1603363 - RNA, 19 nt, Artificial Sequence
  Description of Artificial Sequence: Synthetic oligonucleotide
  Sense strand starting at position 3025 of SEQ ID NO: 1560487
guuaauucuggguaugacu

SEQ ID NO: 1603364 - RNA, 19 nt, Artificial Sequence
  Description of Artificial Sequence: Synthetic oligonucleotide
  Antisense strand to SEQ ID NO: 1603363
agucauacccagaauuaac

SEQ ID NO: 1603365 - RNA, 19 nt, Artificial Sequence
  Description of Artificial Sequence: Synthetic oligonucleotide
  Sense strand starting at position 3185 of SEQ ID NO: 1560487
ucucuuaugagcugggaca

SEQ ID NO: 1603366 - RNA, 19 nt, Artificial Sequence
  Description of Artificial Sequence: Synthetic oligonucleotide
  Antisense strand to SEQ ID NO: 1603365
ugucccagcucauaagaga

SEQ ID NO: 1603367 - RNA, 19 nt, Artificial Sequence
  Description of Artificial Sequence: Synthetic oligonucleotide
  Sense strand starting at position 3247 of SEQ ID NO: 1560487
cuuugaaugcugggaugug

SEQ ID NO: 1603368 - RNA, 19 nt, Artificial Sequence
  Description of Artificial Sequence: Synthetic oligonucleotide
  Antisense strand to SEQ ID NO: 1603367
cacaucccagcauucaaag

SEQ ID NO: 1603369 - RNA, 19 nt, Artificial Sequence
  Description of Artificial Sequence: Synthetic oligonucleotide
  Sense strand starting at position 3682 of SEQ ID NO: 1560487
ucccuaauugucugagcca

SEQ ID NO: 1603370 - RNA, 19 nt, Artificial Sequence
  Description of Artificial Sequence: Synthetic oligonucleotide
  Antisense strand to SEQ ID NO: 1603369
uggcucagacaauuaggga

SEQ ID NO: 1603371 - RNA, 19 nt, Artificial Sequence
  Description of Artificial Sequence: Synthetic oligonucleotide
  Sense strand starting at position 3685 of SEQ ID NO: 1560487
cuaauugucugagccaauu

SEQ ID NO: 1603372 - RNA, 19 nt, Artificial Sequence
  Description of Artificial Sequence: Synthetic oligonucleotide
  Antisense strand to SEQ ID NO: 1603371
aauuggcucagacaauuag

SEQ ID NO: 1603373 - RNA, 19 nt, Artificial Sequence
  Description of Artificial Sequence: Synthetic oligonucleotide
  Sense strand starting at position 3928 of SEQ ID NO: 1560487
ggcaaagugacuugccuaa

SEQ ID NO: 1603374 - RNA, 19 nt, Artificial Sequence
  Description of Artificial Sequence: Synthetic oligonucleotide
  Antisense strand to SEQ ID NO: 1603373
uuaggcaagucacuuugcc

SEQ ID NO: 1603375 - RNA, 19 nt, Artificial Sequence
  Description of Artificial Sequence: Synthetic oligonucleotide
  Sense strand starting at position 3981 of SEQ ID NO: 1560487
ugaugaguccuauguacuu

SEQ ID NO: 1603376 - RNA, 19 nt, Artificial Sequence
  Description of Artificial Sequence: Synthetic oligonucleotide
  Antisense strand to SEQ ID NO: 1603375
aaguacauaggacucauca

SEQ ID NO: 1603377 - RNA, 19 nt, Artificial Sequence
  Description of Artificial Sequence: Synthetic oligonucleotide
  Sense strand starting at position 74 of SEQ ID NO: 1560488
ggaacagugaucugccaac

SEQ ID NO: 1603378 - RNA, 19 nt, Artificial Sequence
  Description of Artificial Sequence: Synthetic oligonucleotide
  Antisense strand to SEQ ID NO: 1603377
guuggcagaucacuguucc

SEQ ID NO: 1603379 - RNA, 19 nt, Artificial Sequence
  Description of Artificial Sequence: Synthetic oligonucleotide
  Sense strand starting at position 146 of SEQ ID NO: 1560488
gcagcaaugcuuggauucu

SEQ ID NO: 1603380 - RNA, 19 nt, Artificial Sequence
  Description of Artificial Sequence: Synthetic oligonucleotide
  Antisense strand to SEQ ID NO: 1603379
agaauccaagcauugcugc

SEQ ID NO: 1603381 - RNA, 19 nt, Artificial Sequence
  Description of Artificial Sequence: Synthetic oligonucleotide
  Sense strand starting at position 155 of SEQ ID NO: 1560488
cuuggauucuagccuguga

SEQ ID NO: 1603382 - RNA, 19 nt, Artificial Sequence
  Description of Artificial Sequence: Synthetic oligonucleotide
  Antisense strand to SEQ ID NO: 1603381
ucacaggcuagaauccaag

SEQ ID NO: 1603383 - RNA, 19 nt, Artificial Sequence
  Description of Artificial Sequence: Synthetic oligonucleotide
  Sense strand starting at position 157 of SEQ ID NO: 1560488
uggauucuagccugugagu

SEQ ID NO: 1603384 - RNA, 19 nt, Artificial Sequence
  Description of Artificial Sequence: Synthetic oligonucleotide
  Antisense strand to SEQ ID NO: 1603383
acucacaggcuagaaucca

SEQ ID NO: 1603385 - RNA, 19 nt, Artificial Sequence
  Description of Artificial Sequence: Synthetic oligonucleotide
  Sense strand starting at position 168 of SEQ ID NO: 1560488
cugugagucccacaggaga

SEQ ID NO: 1603386 - RNA, 19 nt, Artificial Sequence
  Description of Artificial Sequence: Synthetic oligonucleotide
  Antisense strand to SEQ ID NO: 1603385
ucuccugugggacucacag

SEQ ID NO: 1603387 - RNA, 19 nt, Artificial Sequence
  Description of Artificial Sequence: Synthetic oligonucleotide
  Sense strand starting at position 230 of SEQ ID NO: 1560488
gcucaucaagugugucuuu

SEQ ID NO: 1603388 - RNA, 19 nt, Artificial Sequence
  Description of Artificial Sequence: Synthetic oligonucleotide
  Antisense strand to SEQ ID NO: 1603387
aaagacacacuugaugagc

SEQ ID NO: 1603389 - RNA, 19 nt, Artificial Sequence
  Description of Artificial Sequence: Synthetic oligonucleotide
  Sense strand starting at position 233 of SEQ ID NO: 1560488
caucaagugugucuuugga

SEQ ID NO: 1603390 - RNA, 19 nt, Artificial Sequence
  Description of Artificial Sequence: Synthetic oligonucleotide
  Antisense strand to SEQ ID NO: 1603389
uccaaagacacacuugaug

SEQ ID NO: 1603391 - RNA, 19 nt, Artificial Sequence
  Description of Artificial Sequence: Synthetic oligonucleotide
  Sense strand starting at position 235 of SEQ ID NO: 1560488
ucaagugugucuuuggaag

SEQ ID NO: 1603392 - RNA, 19 nt, Artificial Sequence
  Description of Artificial Sequence: Synthetic oligonucleotide
  Antisense strand to SEQ ID NO: 1603391
cuuccaaagacacacuuga

SEQ ID NO: 1603393 - RNA, 19 nt, Artificial Sequence
  Description of Artificial Sequence: Synthetic oligonucleotide
  Sense strand starting at position 241 of SEQ ID NO: 1560488
gugucuuuggaagaugcua

SEQ ID NO: 1603394 - RNA, 19 nt, Artificial Sequence
  Description of Artificial Sequence: Synthetic oligonucleotide
  Antisense strand to SEQ ID NO: 1603393
uagcaucuuccaaagacac

SEQ ID NO: 1603395 - RNA, 19 nt, Artificial Sequence
  Description of Artificial Sequence: Synthetic oligonucleotide
  Sense strand starting at position 265 of SEQ ID NO: 1560488
agcguuguuauggcagcaa

SEQ ID NO: 1603396 - RNA, 19 nt, Artificial Sequence
  Description of Artificial Sequence: Synthetic oligonucleotide
  Antisense strand to SEQ ID NO: 1603395
uugcugccauaacaacgcu

SEQ ID NO: 1603397 - RNA, 19 nt, Artificial Sequence
  Description of Artificial Sequence: Synthetic oligonucleotide
  Sense strand starting at position 269 of SEQ ID NO: 1560488
uuguuauggcagcaacaca

SEQ ID NO: 1603398 - RNA, 19 nt, Artificial Sequence
  Description of Artificial Sequence: Synthetic oligonucleotide
  Antisense strand to SEQ ID NO: 1603397
uguguugcugccauaacaa

SEQ ID NO: 1603399 - RNA, 19 nt, Artificial Sequence
  Description of Artificial Sequence: Synthetic oligonucleotide
  Sense strand starting at position 318 of SEQ ID NO: 1560488
caacgucaugagugucuuu

SEQ ID NO: 1603400 - RNA, 19 nt, Artificial Sequence
  Description of Artificial Sequence: Synthetic oligonucleotide
  Antisense strand to SEQ ID NO: 1603399
aaagacacucaugacguug

SEQ ID NO: 1603401 - RNA, 19 nt, Artificial Sequence
  Description of Artificial Sequence: Synthetic oligonucleotide
  Sense strand starting at position 1353 of SEQ ID NO: 1560488
agaagcgacucuuccuaga

SEQ ID NO: 1603402 - RNA, 19 nt, Artificial Sequence
  Description of Artificial Sequence: Synthetic oligonucleotide
  Antisense strand to SEQ ID NO: 1603401
ucuaggaagagucgcuucu

SEQ ID NO: 1603403 - RNA, 19 nt, Artificial Sequence
  Description of Artificial Sequence: Synthetic oligonucleotide
  Sense strand starting at position 1358 of SEQ ID NO: 1560488
cgacucuuccuagacagca

SEQ ID NO: 1603404 - RNA, 19 nt, Artificial Sequence
  Description of Artificial Sequence: Synthetic oligonucleotide
  Antisense strand to SEQ ID NO: 1603403
ugcugucuaggaagagucg

SEQ ID NO: 1603405 - RNA, 19 nt, Artificial Sequence
  Description of Artificial Sequence: Synthetic oligonucleotide
  Sense strand starting at position 1414 of SEQ ID NO: 1560488
agaccauccuggugggauu

SEQ ID NO: 1603406 - RNA, 19 nt, Artificial Sequence
  Description of Artificial Sequence: Synthetic oligonucleotide
  Antisense strand to SEQ ID NO: 1603405
aaucccaccaggauggucu

SEQ ID NO: 1603407 - RNA, 19 nt, Artificial Sequence
  Description of Artificial Sequence: Synthetic oligonucleotide
  Sense strand starting at position 1461 of SEQ ID NO: 1560488
gguuaacugcugggaggau

SEQ ID NO: 1603408 - RNA, 19 nt, Artificial Sequence
  Description of Artificial Sequence: Synthetic oligonucleotide
  Antisense strand to SEQ ID NO: 1603407
auccucccagcaguuaacc

SEQ ID NO: 1603409 - RNA, 19 nt, Artificial Sequence
  Description of Artificial Sequence: Synthetic oligonucleotide
  Sense strand starting at position 1508 of SEQ ID NO: 1560488
augagucagucccuacagu

SEQ ID NO: 1603410 - RNA, 19 nt, Artificial Sequence
  Description of Artificial Sequence: Synthetic oligonucleotide
  Antisense strand to SEQ ID NO: 1603409
acuguagggacugacucau

SEQ ID NO: 1603411 - RNA, 19 nt, Artificial Sequence
  Description of Artificial Sequence: Synthetic oligonucleotide
  Sense strand starting at position 1509 of SEQ ID NO: 1560488
ugagucagucccuacagua

SEQ ID NO: 1603412 - RNA, 19 nt, Artificial Sequence
  Description of Artificial Sequence: Synthetic oligonucleotide
  Antisense strand to SEQ ID NO: 1603411
uacuguagggacugacuca

SEQ ID NO: 1603413 - RNA, 19 nt, Artificial Sequence
  Description of Artificial Sequence: Synthetic oligonucleotide
  Sense strand starting at position 1522 of SEQ ID NO: 1560488
acaguaggagcaugagaua

SEQ ID NO: 1603414 - RNA, 19 nt, Artificial Sequence
  Description of Artificial Sequence: Synthetic oligonucleotide
  Antisense strand to SEQ ID NO: 1603413
uaucucaugcuccuacugu

SEQ ID NO: 1603415 - RNA, 19 nt, Artificial Sequence
  Description of Artificial Sequence: Synthetic oligonucleotide
  Sense strand starting at position 1831 of SEQ ID NO: 1560488
cccagucaugucuguguca

SEQ ID NO: 1603416 - RNA, 19 nt, Artificial Sequence
  Description of Artificial Sequence: Synthetic oligonucleotide
  Antisense strand to SEQ ID NO: 1603415
ugacacagacaugacuggg

SEQ ID NO: 1603417 - RNA, 19 nt, Artificial Sequence
  Description of Artificial Sequence: Synthetic oligonucleotide
  Sense strand starting at position 1833 of SEQ ID NO: 1560488
cagucaugucugugucaca

SEQ ID NO: 1603418 - RNA, 19 nt, Artificial Sequence
  Description of Artificial Sequence: Synthetic oligonucleotide
  Antisense strand to SEQ ID NO: 1603417
ugugacacagacaugacug

SEQ ID NO: 1603419 - RNA, 19 nt, Artificial Sequence
  Description of Artificial Sequence: Synthetic oligonucleotide
  Sense strand starting at position 1840 of SEQ ID NO: 1560488
gucugugucacagagagaa

SEQ ID NO: 1603420 - RNA, 19 nt, Artificial Sequence
  Description of Artificial Sequence: Synthetic oligonucleotide
  Antisense strand to SEQ ID NO: 1603419
uucucucugugacacagac

SEQ ID NO: 1603421 - RNA, 19 nt, Artificial Sequence
  Description of Artificial Sequence: Synthetic oligonucleotide
  Sense strand starting at position 2077 of SEQ ID NO: 1560488
uugacucuuucugucaguu

SEQ ID NO: 1603422 - RNA, 19 nt, Artificial Sequence
  Description of Artificial Sequence: Synthetic oligonucleotide
  Antisense strand to SEQ ID NO: 1603421
aacugacagaaagagucaa

SEQ ID NO: 1603423 - RNA, 19 nt, Artificial Sequence
  Description of Artificial Sequence: Synthetic oligonucleotide
  Sense strand starting at position 2098 of SEQ ID NO: 1560488
gagcucugucugggaugua

SEQ ID NO: 1603424 - RNA, 19 nt, Artificial Sequence
  Description of Artificial Sequence: Synthetic oligonucleotide
  Antisense strand to SEQ ID NO: 1603423
uacaucccagacagagcuc

SEQ ID NO: 1603425 - RNA, 19 nt, Artificial Sequence
  Description of Artificial Sequence: Synthetic oligonucleotide
  Sense strand starting at position 2101 of SEQ ID NO: 1560488
cucugucugggauguaauu

SEQ ID NO: 1603426 - RNA, 19 nt, Artificial Sequence
  Description of Artificial Sequence: Synthetic oligonucleotide
  Antisense strand to SEQ ID NO: 1603425
aauuacaucccagacagag

SEQ ID NO: 1603427 - RNA, 19 nt, Artificial Sequence
  Description of Artificial Sequence: Synthetic oligonucleotide
  Sense strand starting at position 2113 of SEQ ID NO: 1560488
uguaauuccugccugagcu

SEQ ID NO: 1603428 - RNA, 19 nt, Artificial Sequence
  Description of Artificial Sequence: Synthetic oligonucleotide
  Antisense strand to SEQ ID NO: 1603427
agcucaggcaggaauuaca

SEQ ID NO: 1603429 - RNA, 19 nt, Artificial Sequence
  Description of Artificial Sequence: Synthetic oligonucleotide
  Sense strand starting at position 2162 of SEQ ID NO: 1560488
ggcagucccagcugaugua

SEQ ID NO: 1603430 - RNA, 19 nt, Artificial Sequence
  Description of Artificial Sequence: Synthetic oligonucleotide
  Antisense strand to SEQ ID NO: 1603429
uacaucagcugggacugcc

SEQ ID NO: 1603431 - RNA, 19 nt, Artificial Sequence
  Description of Artificial Sequence: Synthetic oligonucleotide
  Sense strand starting at position 2331 of SEQ ID NO: 1560488
guauguucccaggaggauu

SEQ ID NO: 1603432 - RNA, 19 nt, Artificial Sequence
  Description of Artificial Sequence: Synthetic oligonucleotide
  Antisense strand to SEQ ID NO: 1603431
aauccuccugggaacauac

SEQ ID NO: 1603433 - RNA, 19 nt, Artificial Sequence
  Description of Artificial Sequence: Synthetic oligonucleotide
  Sense strand starting at position 2658 of SEQ ID NO: 1560488
acagauuugugccaccauu

SEQ ID NO: 1603434 - RNA, 19 nt, Artificial Sequence
  Description of Artificial Sequence: Synthetic oligonucleotide
  Antisense strand to SEQ ID NO: 1603433
aaugguggcacaaaucugu

SEQ ID NO: 1603435 - RNA, 19 nt, Artificial Sequence
  Description of Artificial Sequence: Synthetic oligonucleotide
  Sense strand starting at position 2748 of SEQ ID NO: 1560488
cgucaagugaucugucugu

SEQ ID NO: 1603436 - RNA, 19 nt, Artificial Sequence
  Description of Artificial Sequence: Synthetic oligonucleotide
  Antisense strand to SEQ ID NO: 1603435
acagacagaucacuugacg

SEQ ID NO: 1603437 - RNA, 19 nt, Artificial Sequence
  Description of Artificial Sequence: Synthetic oligonucleotide
  Sense strand starting at position 3532 of SEQ ID NO: 1560488
uucuuaauugcccaggcaa

SEQ ID NO: 1603438 - RNA, 19 nt, Artificial Sequence
  Description of Artificial Sequence: Synthetic oligonucleotide
  Antisense strand to SEQ ID NO: 1603437
uugccugggcaauuaagaa

SEQ ID NO: 1603439 - RNA, 19 nt, Artificial Sequence
  Description of Artificial Sequence: Synthetic oligonucleotide
  Sense strand starting at position 3571 of SEQ ID NO: 1560488
ggcucugcucaagaacuga

SEQ ID NO: 1603440 - RNA, 19 nt, Artificial Sequence
  Description of Artificial Sequence: Synthetic oligonucleotide
  Antisense strand to SEQ ID NO: 1603439
ucaguucuugagcagagcc

SEQ ID NO: 1603441 - RNA, 19 nt, Artificial Sequence
  Description of Artificial Sequence: Synthetic oligonucleotide
  Sense strand starting at position 3582 of SEQ ID NO: 1560488
agaacugaggugugacgaa

SEQ ID NO: 1603442 - RNA, 19 nt, Artificial Sequence
  Description of Artificial Sequence: Synthetic oligonucleotide
  Antisense strand to SEQ ID NO: 1603441
uucgucacaccucaguucu

SEQ ID NO: 1603443 - RNA, 19 nt, Artificial Sequence
  Description of Artificial Sequence: Synthetic oligonucleotide
  Sense strand starting at position 3619 of SEQ ID NO: 1560488
gugggugccgucuuucuua

SEQ ID NO: 1603444 - RNA, 19 nt, Artificial Sequence
  Description of Artificial Sequence: Synthetic oligonucleotide
  Antisense strand to SEQ ID NO: 1603443
uaagaaagacggcacccac

SEQ ID NO: 1603445 - RNA, 19 nt, Artificial Sequence
  Description of Artificial Sequence: Synthetic oligonucleotide
  Sense strand starting at position 3628 of SEQ ID NO: 1560488
gucuuucuuagggaaguuc

SEQ ID NO: 1603446 - RNA, 19 nt, Artificial Sequence
  Description of Artificial Sequence: Synthetic oligonucleotide
  Antisense strand to SEQ ID NO: 1603445
gaacuucccuaagaaagac

SEQ ID NO: 1603447 - RNA, 19 nt, Artificial Sequence
  Description of Artificial Sequence: Synthetic oligonucleotide
  Sense strand starting at position 3767 of SEQ ID NO: 1560488
augcacagauuuggagaaa

SEQ ID NO: 1603448 - RNA, 19 nt, Artificial Sequence
  Description of Artificial Sequence: Synthetic oligonucleotide
  Antisense strand to SEQ ID NO: 1603447
uuucuccaaaucugugcau

SEQ ID NO: 1603449 - RNA, 19 nt, Artificial Sequence
  Description of Artificial Sequence: Synthetic oligonucleotide
  Sense strand starting at position 3795 of SEQ ID NO: 1560488
acacaauuguuuguguauu

SEQ ID NO: 1603450 - RNA, 19 nt, Artificial Sequence
  Description of Artificial Sequence: Synthetic oligonucleotide
  Antisense strand to SEQ ID NO: 1603449
aauacacaaacaauugugu

SEQ ID NO: 1603451 - RNA, 19 nt, Artificial Sequence
  Description of Artificial Sequence: Synthetic oligonucleotide
  Sense strand starting at position 3807 of SEQ ID NO: 1560488
guguauuuaugugagugau

SEQ ID NO: 1603452 - RNA, 19 nt, Artificial Sequence
  Description of Artificial Sequence: Synthetic oligonucleotide
  Antisense strand to SEQ ID NO: 1603451
aucacucacauaaauacac

SEQ ID NO: 1603453 - RNA, 19 nt, Artificial Sequence
  Description of Artificial Sequence: Synthetic oligonucleotide
  Sense strand starting at position 3860 of SEQ ID NO: 1560488
ggaccucaguuggagaguu

SEQ ID NO: 1603454 - RNA, 19 nt, Artificial Sequence
  Description of Artificial Sequence: Synthetic oligonucleotide
  Antisense strand to SEQ ID NO: 1603453
aacucuccaacugaggucc

SEQ ID NO: 1603455 - RNA, 19 nt, Artificial Sequence
  Description of Artificial Sequence: Synthetic oligonucleotide
  Sense strand starting at position 3862 of SEQ ID NO: 1560488
accucaguuggagaguuua

SEQ ID NO: 1603456 - RNA, 19 nt, Artificial Sequence
  Description of Artificial Sequence: Synthetic oligonucleotide
  Antisense strand to SEQ ID NO: 1603455
uaaacucuccaacugaggu

SEQ ID NO: 1603457 - RNA, 19 nt, Artificial Sequence
  Description of Artificial Sequence: Synthetic oligonucleotide
  Sense strand starting at position 327 of SEQ ID NO: 1560489
auuccaggugcucgauagu

SEQ ID NO: 1603458 - RNA, 19 nt, Artificial Sequence
  Description of Artificial Sequence: Synthetic oligonucleotide
  Antisense strand to SEQ ID NO: 1603457
acuaucgagcaccuggaau

SEQ ID NO: 1603459 - RNA, 19 nt, Artificial Sequence
  Description of Artificial Sequence: Synthetic oligonucleotide
  Sense strand starting at position 387 of SEQ ID NO: 1560489
ugaaccugcuguucuagau

SEQ ID NO: 1603460 - RNA, 19 nt, Artificial Sequence
  Description of Artificial Sequence: Synthetic oligonucleotide
  Antisense strand to SEQ ID NO: 1603459
aucuagaacagcagguuca

SEQ ID NO: 1603461 - RNA, 19 nt, Artificial Sequence
  Description of Artificial Sequence: Synthetic oligonucleotide
  Sense strand starting at position 1294 of SEQ ID NO: 1560489
cagccaguguggucaggua

SEQ ID NO: 1603462 - RNA, 19 nt, Artificial Sequence
  Description of Artificial Sequence: Synthetic oligonucleotide
  Antisense strand to SEQ ID NO: 1603461
uaccugaccacacuggcug

SEQ ID NO: 1603463 - RNA, 19 nt, Artificial Sequence
  Description of Artificial Sequence: Synthetic oligonucleotide
  Sense strand starting at position 1510 of SEQ ID NO: 1560489
agaagcgacucuuccuaga

SEQ ID NO: 1603464 - RNA, 19 nt, Artificial Sequence
  Description of Artificial Sequence: Synthetic oligonucleotide
  Antisense strand to SEQ ID NO: 1603463
ucuaggaagagucgcuucu

SEQ ID NO: 1603465 - RNA, 19 nt, Artificial Sequence
  Description of Artificial Sequence: Synthetic oligonucleotide
  Sense strand starting at position 1515 of SEQ ID NO: 1560489
cgacucuuccuagacagca

SEQ ID NO: 1603466 - RNA, 19 nt, Artificial Sequence
  Description of Artificial Sequence: Synthetic oligonucleotide
  Antisense strand to SEQ ID NO: 1603465
ugcugucuaggaagagucg

SEQ ID NO: 1603467 - RNA, 19 nt, Artificial Sequence
  Description of Artificial Sequence: Synthetic oligonucleotide
  Sense strand starting at position 1618 of SEQ ID NO: 1560489
gguuaacugcugggaggau

SEQ ID NO: 1603468 - RNA, 19 nt, Artificial Sequence
  Description of Artificial Sequence: Synthetic oligonucleotide
  Antisense strand to SEQ ID NO: 1603467
auccucccagcaguuaacc

SEQ ID NO: 1603469 - RNA, 19 nt, Artificial Sequence
  Description of Artificial Sequence: Synthetic oligonucleotide
  Sense strand starting at position 1666 of SEQ ID NO: 1560489
ugagucagucccugcagua

SEQ ID NO: 1603470 - RNA, 19 nt, Artificial Sequence
  Description of Artificial Sequence: Synthetic oligonucleotide
  Antisense strand to SEQ ID NO: 1603469
uacugcagggacugacuca

SEQ ID NO: 1603471 - RNA, 19 nt, Artificial Sequence
  Description of Artificial Sequence: Synthetic oligonucleotide
  Sense strand starting at position 1997 of SEQ ID NO: 1560489
gucugugucacagagagaa

SEQ ID NO: 1603472 - RNA, 19 nt, Artificial Sequence
  Description of Artificial Sequence: Synthetic oligonucleotide
  Antisense strand to SEQ ID NO: 1603471
uucucucugugacacagac

SEQ ID NO: 1603473 - RNA, 19 nt, Artificial Sequence
  Description of Artificial Sequence: Synthetic oligonucleotide
  Sense strand starting at position 2117 of SEQ ID NO: 1560489
uggucuuugucagcagaag

SEQ ID NO: 1603474 - RNA, 19 nt, Artificial Sequence
  Description of Artificial Sequence: Synthetic oligonucleotide
  Antisense strand to SEQ ID NO: 1603473
cuucugcugacaaagacca

SEQ ID NO: 1603475 - RNA, 19 nt, Artificial Sequence
  Description of Artificial Sequence: Synthetic oligonucleotide
  Sense strand starting at position 2118 of SEQ ID NO: 1560489
ggucuuugucagcagaaga

SEQ ID NO: 1603476 - RNA, 19 nt, Artificial Sequence
  Description of Artificial Sequence: Synthetic oligonucleotide
  Antisense strand to SEQ ID NO: 1603475
ucuucugcugacaaagacc

SEQ ID NO: 1603477 - RNA, 19 nt, Artificial Sequence
  Description of Artificial Sequence: Synthetic oligonucleotide
  Sense strand starting at position 2234 of SEQ ID NO: 1560489
uugacucuuucugucaguu

SEQ ID NO: 1603478 - RNA, 19 nt, Artificial Sequence
  Description of Artificial Sequence: Synthetic oligonucleotide
  Antisense strand to SEQ ID NO: 1603477
aacugacagaaagagucaa

SEQ ID NO: 1603479 - RNA, 19 nt, Artificial Sequence
  Description of Artificial Sequence: Synthetic oligonucleotide
  Sense strand starting at position 2255 of SEQ ID NO: 1560489
gagcucugucugggaugua

SEQ ID NO: 1603480 - RNA, 19 nt, Artificial Sequence
  Description of Artificial Sequence: Synthetic oligonucleotide
  Antisense strand to SEQ ID NO: 1603479
uacaucccagacagagcuc

SEQ ID NO: 1603481 - RNA, 19 nt, Artificial Sequence
  Description of Artificial Sequence: Synthetic oligonucleotide
  Sense strand starting at position 2258 of SEQ ID NO: 1560489
cucugucugggauguaauu

SEQ ID NO: 1603482 - RNA, 19 nt, Artificial Sequence
  Description of Artificial Sequence: Synthetic oligonucleotide
  Antisense strand to SEQ ID NO: 1603481
aauuacaucccagacagag

SEQ ID NO: 1603483 - RNA, 19 nt, Artificial Sequence
  Description of Artificial Sequence: Synthetic oligonucleotide
  Sense strand starting at position 2319 of SEQ ID NO: 1560489
ggcagucccagcugaugua

SEQ ID NO: 1603484 - RNA, 19 nt, Artificial Sequence
  Description of Artificial Sequence: Synthetic oligonucleotide
  Antisense strand to SEQ ID NO: 1603483
uacaucagcugggacugcc

SEQ ID NO: 1603485 - RNA, 19 nt, Artificial Sequence
  Description of Artificial Sequence: Synthetic oligonucleotide
  Sense strand starting at position 2484 of SEQ ID NO: 1560489
gaagguauguucccaagag

SEQ ID NO: 1603486 - RNA, 19 nt, Artificial Sequence
  Description of Artificial Sequence: Synthetic oligonucleotide
  Antisense strand to SEQ ID NO: 1603485
cucuugggaacauaccuuc

SEQ ID NO: 1603487 - RNA, 19 nt, Artificial Sequence
  Description of Artificial Sequence: Synthetic oligonucleotide
  Sense strand starting at position 2488 of SEQ ID NO: 1560489
guauguucccaagaggauu

SEQ ID NO: 1603488 - RNA, 19 nt, Artificial Sequence
  Description of Artificial Sequence: Synthetic oligonucleotide
  Antisense strand to SEQ ID NO: 1603487
aauccucuugggaacauac

SEQ ID NO: 1603489 - RNA, 19 nt, Artificial Sequence
  Description of Artificial Sequence: Synthetic oligonucleotide
  Sense strand starting at position 2631 of SEQ ID NO: 1560489
uauuaaagugcugagauua

SEQ ID NO: 1603490 - RNA, 19 nt, Artificial Sequence
  Description of Artificial Sequence: Synthetic oligonucleotide
  Antisense strand to SEQ ID NO: 1603489
uaaucucagcacuuuaaua

SEQ ID NO: 1603491 - RNA, 19 nt, Artificial Sequence
  Description of Artificial Sequence: Synthetic oligonucleotide
  Sense strand starting at position 2825 of SEQ ID NO: 1560489
acagauuugugccaccauu

SEQ ID NO: 1603492 - RNA, 19 nt, Artificial Sequence
  Description of Artificial Sequence: Synthetic oligonucleotide
  Antisense strand to SEQ ID NO: 1603491
aaugguggcacaaaucugu

SEQ ID NO: 1603493 - RNA, 19 nt, Artificial Sequence
  Description of Artificial Sequence: Synthetic oligonucleotide
  Sense strand starting at position 2993 of SEQ ID NO: 1560489
uucuuaauugcccaggcaa

SEQ ID NO: 1603494 - RNA, 19 nt, Artificial Sequence
  Description of Artificial Sequence: Synthetic oligonucleotide
  Antisense strand to SEQ ID NO: 1603493
uugccugggcaauuaagaa

SEQ ID NO: 1603495 - RNA, 19 nt, Artificial Sequence
  Description of Artificial Sequence: Synthetic oligonucleotide
  Sense strand starting at position 3029 of SEQ ID NO: 1560489
ugaggcucugcucaagaau

SEQ ID NO: 1603496 - RNA, 19 nt, Artificial Sequence
  Description of Artificial Sequence: Synthetic oligonucleotide
  Antisense strand to SEQ ID NO: 1603495
auucuugagcagagccuca

SEQ ID NO: 1603497 - RNA, 19 nt, Artificial Sequence
  Description of Artificial Sequence: Synthetic oligonucleotide
  Sense strand starting at position 3032 of SEQ ID NO: 1560489
ggcucugcucaagaauuga

SEQ ID NO: 1603498 - RNA, 19 nt, Artificial Sequence
  Description of Artificial Sequence: Synthetic oligonucleotide
  Antisense strand to SEQ ID NO: 1603497
ucaauucuugagcagagcc

SEQ ID NO: 1603499 - RNA, 19 nt, Artificial Sequence
  Description of Artificial Sequence: Synthetic oligonucleotide
  Sense strand starting at position 3043 of SEQ ID NO: 1560489
agaauugaggugugacgaa

SEQ ID NO: 1603500 - RNA, 19 nt, Artificial Sequence
  Description of Artificial Sequence: Synthetic oligonucleotide
  Antisense strand to SEQ ID NO: 1603499
uucgucacaccucaauucu

SEQ ID NO: 1603501 - RNA, 19 nt, Artificial Sequence
  Description of Artificial Sequence: Synthetic oligonucleotide
  Sense strand starting at position 3080 of SEQ ID NO: 1560489
gugggugccgucuuucuua

SEQ ID NO: 1603502 - RNA, 19 nt, Artificial Sequence
  Description of Artificial Sequence: Synthetic oligonucleotide
  Antisense strand to SEQ ID NO: 1603501
uaagaaagacggcacccac

SEQ ID NO: 1603503 - RNA, 19 nt, Artificial Sequence
  Description of Artificial Sequence: Synthetic oligonucleotide
  Sense strand starting at position 3089 of SEQ ID NO: 1560489
gucuuucuuagggaaguuc

SEQ ID NO: 1603504 - RNA, 19 nt, Artificial Sequence
  Description of Artificial Sequence: Synthetic oligonucleotide
  Antisense strand to SEQ ID NO: 1603503
gaacuucccuaagaaagac

SEQ ID NO: 1603505 - RNA, 19 nt, Artificial Sequence
  Description of Artificial Sequence: Synthetic oligonucleotide
  Sense strand starting at position 3228 of SEQ ID NO: 1560489
augcacagauuuggagaaa

SEQ ID NO: 1603506 - RNA, 19 nt, Artificial Sequence
  Description of Artificial Sequence: Synthetic oligonucleotide
  Antisense strand to SEQ ID NO: 1603505
uuucuccaaaucugugcau

SEQ ID NO: 1603507 - RNA, 19 nt, Artificial Sequence
  Description of Artificial Sequence: Synthetic oligonucleotide
  Sense strand starting at position 3256 of SEQ ID NO: 1560489
acacaauuguuuguguauu

SEQ ID NO: 1603508 - RNA, 19 nt, Artificial Sequence
  Description of Artificial Sequence: Synthetic oligonucleotide
  Antisense strand to SEQ ID NO: 1603507
aauacacaaacaauugugu

SEQ ID NO: 1603509 - RNA, 19 nt, Artificial Sequence
  Description of Artificial Sequence: Synthetic oligonucleotide
  Sense strand starting at position 3267 of SEQ ID NO: 1560489
uguguauuuaugugaguga

SEQ ID NO: 1603510 - RNA, 19 nt, Artificial Sequence
  Description of Artificial Sequence: Synthetic oligonucleotide
  Antisense strand to SEQ ID NO: 1603509
ucacucacauaaauacaca

SEQ ID NO: 1603511 - RNA, 19 nt, Artificial Sequence
  Description of Artificial Sequence: Synthetic oligonucleotide
  Sense strand starting at position 3321 of SEQ ID NO: 1560489
ggaccucagcuggagaguu

SEQ ID NO: 1603512 - RNA, 19 nt, Artificial Sequence
  Description of Artificial Sequence: Synthetic oligonucleotide
  Antisense strand to SEQ ID NO: 1603511
aacucuccagcugaggucc

SEQ ID NO: 1603513 - RNA, 19 nt, Artificial Sequence
  Description of Artificial Sequence: Synthetic oligonucleotide
  Sense strand starting at position 3346 of SEQ ID NO: 1560489
gugaucucaacggacacua

SEQ ID NO: 1603514 - RNA, 19 nt, Artificial Sequence
  Description of Artificial Sequence: Synthetic oligonucleotide
  Antisense strand to SEQ ID NO: 1603513
uaguguccguugagaucac

SEQ ID NO: 1603515 - RNA, 19 nt, Artificial Sequence
  Description of Artificial Sequence: Synthetic oligonucleotide
  Sense strand starting at position 3391 of SEQ ID NO: 1560489
ccauccuauaggugaggaa

SEQ ID NO: 1603516 - RNA, 19 nt, Artificial Sequence
  Description of Artificial Sequence: Synthetic oligonucleotide
  Antisense strand to SEQ ID NO: 1603515
uuccucaccuauaggaugg

SEQ ID NO: 1603517 - RNA, 19 nt, Artificial Sequence
  Description of Artificial Sequence: Synthetic oligonucleotide
  Sense strand starting at position 3530 of SEQ ID NO: 1560489
ucacaaucaucauacggaa

SEQ ID NO: 1603518 - RNA, 19 nt, Artificial Sequence
  Description of Artificial Sequence: Synthetic oligonucleotide
  Antisense strand to SEQ ID NO: 1603517
uuccguaugaugauuguga

SEQ ID NO: 1603519 - RNA, 19 nt, Artificial Sequence
  Description of Artificial Sequence: Synthetic oligonucleotide
  Sense strand starting at position 3570 of SEQ ID NO: 1560489
acucuuugauaacuggcaa

SEQ ID NO: 1603520 - RNA, 19 nt, Artificial Sequence
  Description of Artificial Sequence: Synthetic oligonucleotide
  Antisense strand to SEQ ID NO: 1603519
uugccaguuaucaaagagu

SEQ ID NO: 1603521 - RNA, 19 nt, Artificial Sequence
  Description of Artificial Sequence: Synthetic oligonucleotide
  Sense strand starting at position 3574 of SEQ ID NO: 1560489
uuugauaacuggcaauaaa

SEQ ID NO: 1603522 - RNA, 19 nt, Artificial Sequence
  Description of Artificial Sequence: Synthetic oligonucleotide
  Antisense strand to SEQ ID NO: 1603521
uuuauugccaguuaucaaa

SEQ ID NO: 1603523 - RNA, 19 nt, Artificial Sequence
  Description of Artificial Sequence: Synthetic oligonucleotide
  Sense strand starting at position 3873 of SEQ ID NO: 1560489
guuuccagagcucaaguuu

SEQ ID NO: 1603524 - RNA, 19 nt, Artificial Sequence
  Description of Artificial Sequence: Synthetic oligonucleotide
  Antisense strand to SEQ ID NO: 1603523
aaacuugagcucuggaaac

SEQ ID NO: 1603525 - RNA, 19 nt, Artificial Sequence
  Description of Artificial Sequence: Synthetic oligonucleotide
  Sense strand starting at position 3938 of SEQ ID NO: 1560489
gaaauaucguggcuuccug

SEQ ID NO: 1603526 - RNA, 19 nt, Artificial Sequence
  Description of Artificial Sequence: Synthetic oligonucleotide
  Antisense strand to SEQ ID NO: 1603525
caggaagccacgauauuuc

SEQ ID NO: 1603527 - RNA, 19 nt, Artificial Sequence
  Description of Artificial Sequence: Synthetic oligonucleotide
  Sense strand starting at position 3942 of SEQ ID NO: 1560489
uaucguggcuuccuggaga

SEQ ID NO: 1603528 - RNA, 19 nt, Artificial Sequence
  Description of Artificial Sequence: Synthetic oligonucleotide
  Antisense strand to SEQ ID NO: 1603527
ucuccaggaagccacgaua

SEQ ID NO: 1603529 - RNA, 19 nt, Artificial Sequence
  Description of Artificial Sequence: Synthetic oligonucleotide
  Sense strand starting at position 3945 of SEQ ID NO: 1560489
cguggcuuccuggagaacu

SEQ ID NO: 1603530 - RNA, 19 nt, Artificial Sequence
  Description of Artificial Sequence: Synthetic oligonucleotide
  Antisense strand to SEQ ID NO: 1603529
aguucuccaggaagccacg

SEQ ID NO: 1603531 - RNA, 19 nt, Artificial Sequence
  Description of Artificial Sequence: Synthetic oligonucleotide
  Sense strand starting at position 3956 of SEQ ID NO: 1560489
ggagaacuguggucucuuc

SEQ ID NO: 1603532 - RNA, 19 nt, Artificial Sequence
  Description of Artificial Sequence: Synthetic oligonucleotide
  Antisense strand to SEQ ID NO: 1603531
gaagagaccacaguucucc

SEQ ID NO: 1603533 - RNA, 19 nt, Artificial Sequence
  Description of Artificial Sequence: Synthetic oligonucleotide
  Sense strand starting at position 3964 of SEQ ID NO: 1560489
guggucucuucccuguaga

SEQ ID NO: 1603534 - RNA, 19 nt, Artificial Sequence
  Description of Artificial Sequence: Synthetic oligonucleotide
  Antisense strand to SEQ ID NO: 1603533
ucuacagggaagagaccac

SEQ ID NO: 1603535 - RNA, 19 nt, Artificial Sequence
  Description of Artificial Sequence: Synthetic oligonucleotide
  Sense strand starting at position 3965 of SEQ ID NO: 1560489
uggucucuucccuguagaa

SEQ ID NO: 1603536 - RNA, 19 nt, Artificial Sequence
  Description of Artificial Sequence: Synthetic oligonucleotide
  Antisense strand to SEQ ID NO: 1603535
uucuacagggaagagacca

SEQ ID NO: 1603537 - RNA, 19 nt, Artificial Sequence
  Description of Artificial Sequence: Synthetic oligonucleotide
  Sense strand starting at position 53 of SEQ ID NO: 1560490
gaaauaucguggcuuccug

SEQ ID NO: 1603538 - RNA, 19 nt, Artificial Sequence
  Description of Artificial Sequence: Synthetic oligonucleotide
  Antisense strand to SEQ ID NO: 1603537
caggaagccacgauauuuc

SEQ ID NO: 1603539 - RNA, 19 nt, Artificial Sequence
  Description of Artificial Sequence: Synthetic oligonucleotide
  Sense strand starting at position 57 of SEQ ID NO: 1560490
uaucguggcuuccuggaga

SEQ ID NO: 1603540 - RNA, 19 nt, Artificial Sequence
  Description of Artificial Sequence: Synthetic oligonucleotide
  Antisense strand to SEQ ID NO: 1603539
ucuccaggaagccacgaua

SEQ ID NO: 1603541 - RNA, 19 nt, Artificial Sequence
  Description of Artificial Sequence: Synthetic oligonucleotide
  Sense strand starting at position 60 of SEQ ID NO: 1560490
cguggcuuccuggagaacu

SEQ ID NO: 1603542 - RNA, 19 nt, Artificial Sequence
  Description of Artificial Sequence: Synthetic oligonucleotide
  Antisense strand to SEQ ID NO: 1603541
aguucuccaggaagccacg

SEQ ID NO: 1603543 - RNA, 19 nt, Artificial Sequence
  Description of Artificial Sequence: Synthetic oligonucleotide
  Sense strand starting at position 71 of SEQ ID NO: 1560490
ggagaacuguggucucuuc

SEQ ID NO: 1603544 - RNA, 19 nt, Artificial Sequence
  Description of Artificial Sequence: Synthetic oligonucleotide
  Antisense strand to SEQ ID NO: 1603543
gaagagaccacaguucucc

SEQ ID NO: 1603545 - RNA, 19 nt, Artificial Sequence
  Description of Artificial Sequence: Synthetic oligonucleotide
  Sense strand starting at position 79 of SEQ ID NO: 1560490
guggucucuucccuguaga

SEQ ID NO: 1603546 - RNA, 19 nt, Artificial Sequence
  Description of Artificial Sequence: Synthetic oligonucleotide
  Antisense strand to SEQ ID NO: 1603545
ucuacagggaagagaccac

SEQ ID NO: 1603547 - RNA, 19 nt, Artificial Sequence
  Description of Artificial Sequence: Synthetic oligonucleotide
  Sense strand starting at position 80 of SEQ ID NO: 1560490
uggucucuucccuguagaa

SEQ ID NO: 1603548 - RNA, 19 nt, Artificial Sequence
  Description of Artificial Sequence: Synthetic oligonucleotide
  Antisense strand to SEQ ID NO: 1603547
uucuacagggaagagacca

SEQ ID NO: 1603549 - RNA, 19 nt, Artificial Sequence
  Description of Artificial Sequence: Synthetic oligonucleotide
  Sense strand starting at position 108 of SEQ ID NO: 1560490
ccucuuauaucugagacag

SEQ ID NO: 1603550 - RNA, 19 nt, Artificial Sequence
  Description of Artificial Sequence: Synthetic oligonucleotide
  Antisense strand to SEQ ID NO: 1603549
cugucucagauauaagagg

SEQ ID NO: 1603551 - RNA, 19 nt, Artificial Sequence
  Description of Artificial Sequence: Synthetic oligonucleotide
  Sense strand starting at position 110 of SEQ ID NO: 1560490
ucuuauaucugagacagug

SEQ ID NO: 1603552 - RNA, 19 nt, Artificial Sequence
  Description of Artificial Sequence: Synthetic oligonucleotide
  Antisense strand to SEQ ID NO: 1603551
cacugucucagauauaaga

SEQ ID NO: 1603553 - RNA, 19 nt, Artificial Sequence
  Description of Artificial Sequence: Synthetic oligonucleotide
  Sense strand starting at position 246 of SEQ ID NO: 1560490
ggagguuuccgugcugcca

SEQ ID NO: 1603554 - RNA, 19 nt, Artificial Sequence
  Description of Artificial Sequence: Synthetic oligonucleotide
  Antisense strand to SEQ ID NO: 1603553
uggcagcacggaaaccucc

SEQ ID NO: 1603555 - RNA, 19 nt, Artificial Sequence
  Description of Artificial Sequence: Synthetic oligonucleotide
  Sense strand starting at position 509 of SEQ ID NO: 1560490
cccuguauugccuguugca

SEQ ID NO: 1603556 - RNA, 19 nt, Artificial Sequence
  Description of Artificial Sequence: Synthetic oligonucleotide
  Antisense strand to SEQ ID NO: 1603555
ugcaacaggcaauacaggg

SEQ ID NO: 1603557 - RNA, 19 nt, Artificial Sequence
  Description of Artificial Sequence: Synthetic oligonucleotide
  Sense strand starting at position 1211 of SEQ ID NO: 1560490
gggauuccuggacguggau

SEQ ID NO: 1603558 - RNA, 19 nt, Artificial Sequence
  Description of Artificial Sequence: Synthetic oligonucleotide
  Antisense strand to SEQ ID NO: 1603557
auccacguccaggaauccc

SEQ ID NO: 1603559 - RNA, 19 nt, Artificial Sequence
  Description of Artificial Sequence: Synthetic oligonucleotide
  Sense strand starting at position 1251 of SEQ ID NO: 1560490
gugccugucguguacugaa

SEQ ID NO: 1603560 - RNA, 19 nt, Artificial Sequence
  Description of Artificial Sequence: Synthetic oligonucleotide
  Antisense strand to SEQ ID NO: 1603559
uucaguacacgacaggcac

SEQ ID NO: 1603561 - RNA, 19 nt, Artificial Sequence
  Description of Artificial Sequence: Synthetic oligonucleotide
  Sense strand starting at position 1369 of SEQ ID NO: 1560490
ggcucccuucugugauuga

SEQ ID NO: 1603562 - RNA, 19 nt, Artificial Sequence
  Description of Artificial Sequence: Synthetic oligonucleotide
  Antisense strand to SEQ ID NO: 1603561
ucaaucacagaagggagcc

SEQ ID NO: 1603563 - RNA, 19 nt, Artificial Sequence
  Description of Artificial Sequence: Synthetic oligonucleotide
  Sense strand starting at position 1426 of SEQ ID NO: 1560490
gggucucguggugggaauu

SEQ ID NO: 1603564 - RNA, 19 nt, Artificial Sequence
  Description of Artificial Sequence: Synthetic oligonucleotide
  Antisense strand to SEQ ID NO: 1603563
aauucccaccacgagaccc

SEQ ID NO: 1603565 - RNA, 19 nt, Artificial Sequence
  Description of Artificial Sequence: Synthetic oligonucleotide
  Sense strand starting at position 1441 of SEQ ID NO: 1560490
aauugugggcgcugacaua

SEQ ID NO: 1603566 - RNA, 19 nt, Artificial Sequence
  Description of Artificial Sequence: Synthetic oligonucleotide
  Antisense strand to SEQ ID NO: 1603565
uaugucagcgcccacaauu

SEQ ID NO: 1603567 - RNA, 19 nt, Artificial Sequence
  Description of Artificial Sequence: Synthetic oligonucleotide
  Sense strand starting at position 1797 of SEQ ID NO: 1560490
ggguuaggaucccagggaa

SEQ ID NO: 1603568 - RNA, 19 nt, Artificial Sequence
  Description of Artificial Sequence: Synthetic oligonucleotide
  Antisense strand to SEQ ID NO: 1603567
uucccugggauccuaaccc

SEQ ID NO: 1603569 - RNA, 19 nt, Artificial Sequence
  Description of Artificial Sequence: Synthetic oligonucleotide
  Sense strand starting at position 2075 of SEQ ID NO: 1560490
gggcaagcuuucccaacau

SEQ ID NO: 1603570 - RNA, 19 nt, Artificial Sequence
  Description of Artificial Sequence: Synthetic oligonucleotide
  Antisense strand to SEQ ID NO: 1603569
auguugggaaagcuugccc

SEQ ID NO: 1603571 - RNA, 19 nt, Artificial Sequence
  Description of Artificial Sequence: Synthetic oligonucleotide
  Sense strand starting at position 2254 of SEQ ID NO: 1560490
ucuuuaucuucguucugca

SEQ ID NO: 1603572 - RNA, 19 nt, Artificial Sequence
  Description of Artificial Sequence: Synthetic oligonucleotide
  Antisense strand to SEQ ID NO: 1603571
ugcagaacgaagauaaaga

SEQ ID NO: 1603573 - RNA, 19 nt, Artificial Sequence
  Description of Artificial Sequence: Synthetic oligonucleotide
  Sense strand starting at position 2290 of SEQ ID NO: 1560490
uguaguguugacugugcau

SEQ ID NO: 1603574 - RNA, 19 nt, Artificial Sequence
  Description of Artificial Sequence: Synthetic oligonucleotide
  Antisense strand to SEQ ID NO: 1603573
augcacagucaacacuaca

SEQ ID NO: 1603575 - RNA, 19 nt, Artificial Sequence
  Description of Artificial Sequence: Synthetic oligonucleotide
  Sense strand starting at position 2292 of SEQ ID NO: 1560490
uaguguugacugugcauca

SEQ ID NO: 1603576 - RNA, 19 nt, Artificial Sequence
  Description of Artificial Sequence: Synthetic oligonucleotide
  Antisense strand to SEQ ID NO: 1603575
ugaugcacagucaacacua

SEQ ID NO: 1603577 - RNA, 19 nt, Artificial Sequence
  Description of Artificial Sequence: Synthetic oligonucleotide
  Sense strand starting at position 2305 of SEQ ID NO: 1560490
gcaucaggcucucuucuau

SEQ ID NO: 1603578 - RNA, 19 nt, Artificial Sequence
  Description of Artificial Sequence: Synthetic oligonucleotide
  Antisense strand to SEQ ID NO: 1603577
auagaagagagccugaugc

SEQ ID NO: 1603579 - RNA, 19 nt, Artificial Sequence
  Description of Artificial Sequence: Synthetic oligonucleotide
  Sense strand starting at position 2311 of SEQ ID NO: 1560490
ggcucucuucuauguaauu

SEQ ID NO: 1603580 - RNA, 19 nt, Artificial Sequence
  Description of Artificial Sequence: Synthetic oligonucleotide
  Antisense strand to SEQ ID NO: 1603579
aauuacauagaagagagcc

SEQ ID NO: 1603581 - RNA, 19 nt, Artificial Sequence
  Description of Artificial Sequence: Synthetic oligonucleotide
  Sense strand starting at position 2312 of SEQ ID NO: 1560490
gcucucuucuauguaauug

SEQ ID NO: 1603582 - RNA, 19 nt, Artificial Sequence
  Description of Artificial Sequence: Synthetic oligonucleotide
  Antisense strand to SEQ ID NO: 1603581
caauuacauagaagagagc

SEQ ID NO: 1603583 - RNA, 19 nt, Artificial Sequence
  Description of Artificial Sequence: Synthetic oligonucleotide
  Sense strand starting at position 2618 of SEQ ID NO: 1560490
gccugagcucaagacaucu

SEQ ID NO: 1603584 - RNA, 19 nt, Artificial Sequence
  Description of Artificial Sequence: Synthetic oligonucleotide
  Antisense strand to SEQ ID NO: 1603583
agaugucuugagcucaggc

SEQ ID NO: 1603585 - RNA, 19 nt, Artificial Sequence
  Description of Artificial Sequence: Synthetic oligonucleotide
  Sense strand starting at position 2730 of SEQ ID NO: 1560490
uaucuaugggugcauugau

SEQ ID NO: 1603586 - RNA, 19 nt, Artificial Sequence
  Description of Artificial Sequence: Synthetic oligonucleotide
  Antisense strand to SEQ ID NO: 1603585
aucaaugcacccauagaua

SEQ ID NO: 1603587 - RNA, 19 nt, Artificial Sequence
  Description of Artificial Sequence: Synthetic oligonucleotide
  Sense strand starting at position 2789 of SEQ ID NO: 1560490
ggacgcuuccuuugcuuau

SEQ ID NO: 1603588 - RNA, 19 nt, Artificial Sequence
  Description of Artificial Sequence: Synthetic oligonucleotide
  Antisense strand to SEQ ID NO: 1603587
auaagcaaaggaagcgucc

SEQ ID NO: 1603589 - RNA, 19 nt, Artificial Sequence
  Description of Artificial Sequence: Synthetic oligonucleotide
  Sense strand starting at position 2790 of SEQ ID NO: 1560490
gacgcuuccuuugcuuauu

SEQ ID NO: 1603590 - RNA, 19 nt, Artificial Sequence
  Description of Artificial Sequence: Synthetic oligonucleotide
  Antisense strand to SEQ ID NO: 1603589
aauaagcaaaggaagcguc

SEQ ID NO: 1603591 - RNA, 19 nt, Artificial Sequence
  Description of Artificial Sequence: Synthetic oligonucleotide
  Sense strand starting at position 2791 of SEQ ID NO: 1560490
acgcuuccuuugcuuauua

SEQ ID NO: 1603592 - RNA, 19 nt, Artificial Sequence
  Description of Artificial Sequence: Synthetic oligonucleotide
  Antisense strand to SEQ ID NO: 1603591
uaauaagcaaaggaagcgu

SEQ ID NO: 1603593 - RNA, 19 nt, Artificial Sequence
  Description of Artificial Sequence: Synthetic oligonucleotide
  Sense strand starting at position 2799 of SEQ ID NO: 1560490
uuugcuuauuacuggagga

SEQ ID NO: 1603594 - RNA, 19 nt, Artificial Sequence
  Description of Artificial Sequence: Synthetic oligonucleotide
  Antisense strand to SEQ ID NO: 1603593
uccuccaguaauaagcaaa

SEQ ID NO: 1603595 - RNA, 19 nt, Artificial Sequence
  Description of Artificial Sequence: Synthetic oligonucleotide
  Sense strand starting at position 2800 of SEQ ID NO: 1560490
uugcuuauuacuggaggaa

SEQ ID NO: 1603596 - RNA, 19 nt, Artificial Sequence
  Description of Artificial Sequence: Synthetic oligonucleotide
  Antisense strand to SEQ ID NO: 1603595
uuccuccaguaauaagcaa

SEQ ID NO: 1603597 - RNA, 19 nt, Artificial Sequence
  Description of Artificial Sequence: Synthetic oligonucleotide
  Sense strand starting at position 2862 of SEQ ID NO: 1560490
cacgguuaccuuuagauca

SEQ ID NO: 1603598 - RNA, 19 nt, Artificial Sequence
  Description of Artificial Sequence: Synthetic oligonucleotide
  Antisense strand to SEQ ID NO: 1603597
ugaucuaaagguaaccgug

SEQ ID NO: 1603599 - RNA, 19 nt, Artificial Sequence
  Description of Artificial Sequence: Synthetic oligonucleotide
  Sense strand starting at position 2864 of SEQ ID NO: 1560490
cgguuaccuuuagaucauu

SEQ ID NO: 1603600 - RNA, 19 nt, Artificial Sequence
  Description of Artificial Sequence: Synthetic oligonucleotide
  Antisense strand to SEQ ID NO: 1603599
aaugaucuaaagguaaccg

SEQ ID NO: 1603601 - RNA, 19 nt, Artificial Sequence
  Description of Artificial Sequence: Synthetic oligonucleotide
  Sense strand starting at position 2955 of SEQ ID NO: 1560490
uaugaagaggcaugcuuau

SEQ ID NO: 1603602 - RNA, 19 nt, Artificial Sequence
  Description of Artificial Sequence: Synthetic oligonucleotide
  Antisense strand to SEQ ID NO: 1603601
auaagcaugccucuucaua

SEQ ID NO: 1603603 - RNA, 19 nt, Artificial Sequence
  Description of Artificial Sequence: Synthetic oligonucleotide
  Sense strand starting at position 2961 of SEQ ID NO: 1560490
gaggcaugcuuaugaucug

SEQ ID NO: 1603604 - RNA, 19 nt, Artificial Sequence
  Description of Artificial Sequence: Synthetic oligonucleotide
  Antisense strand to SEQ ID NO: 1603603
cagaucauaagcaugccuc

SEQ ID NO: 1603605 - RNA, 19 nt, Artificial Sequence
  Description of Artificial Sequence: Synthetic oligonucleotide
  Sense strand starting at position 2991 of SEQ ID NO: 1560490
ggaguugcucucugcgcau

SEQ ID NO: 1603606 - RNA, 19 nt, Artificial Sequence
  Description of Artificial Sequence: Synthetic oligonucleotide
  Antisense strand to SEQ ID NO: 1603605
augcgcagagagcaacucc

SEQ ID NO: 1603607 - RNA, 19 nt, Artificial Sequence
  Description of Artificial Sequence: Synthetic oligonucleotide
  Sense strand starting at position 3381 of SEQ ID NO: 1560490
gcaauaaggugucuuuaga

SEQ ID NO: 1603608 - RNA, 19 nt, Artificial Sequence
  Description of Artificial Sequence: Synthetic oligonucleotide
  Antisense strand to SEQ ID NO: 1603607
ucuaaagacaccuuauugc

SEQ ID NO: 1603609 - RNA, 19 nt, Artificial Sequence
  Description of Artificial Sequence: Synthetic oligonucleotide
  Sense strand starting at position 3398 of SEQ ID NO: 1560490
gagcaagaguucucuccuu

SEQ ID NO: 1603610 - RNA, 19 nt, Artificial Sequence
  Description of Artificial Sequence: Synthetic oligonucleotide
  Antisense strand to SEQ ID NO: 1603609
aaggagagaacucuugcuc

SEQ ID NO: 1603611 - RNA, 19 nt, Artificial Sequence
  Description of Artificial Sequence: Synthetic oligonucleotide
  Sense strand starting at position 3419 of SEQ ID NO: 1560490
ccauccuagcuaggaauaa

SEQ ID NO: 1603612 - RNA, 19 nt, Artificial Sequence
  Description of Artificial Sequence: Synthetic oligonucleotide
  Antisense strand to SEQ ID NO: 1603611
uuauuccuagcuaggaugg

SEQ ID NO: 1603613 - RNA, 19 nt, Artificial Sequence
  Description of Artificial Sequence: Synthetic oligonucleotide
  Sense strand starting at position 3465 of SEQ ID NO: 1560490
ggguguucuuucuuugcaa

SEQ ID NO: 1603614 - RNA, 19 nt, Artificial Sequence
  Description of Artificial Sequence: Synthetic oligonucleotide
  Antisense strand to SEQ ID NO: 1603613
uugcaaagaaagaacaccc

SEQ ID NO: 1603615 - RNA, 19 nt, Artificial Sequence
  Description of Artificial Sequence: Synthetic oligonucleotide
  Sense strand starting at position 3466 of SEQ ID NO: 1560490
gguguucuuucuuugcaac

SEQ ID NO: 1603616 - RNA, 19 nt, Artificial Sequence
  Description of Artificial Sequence: Synthetic oligonucleotide
  Antisense strand to SEQ ID NO: 1603615
guugcaaagaaagaacacc

SEQ ID NO: 1603617 - RNA, 19 nt, Artificial Sequence
  Description of Artificial Sequence: Synthetic oligonucleotide
  Sense strand starting at position 58 of SEQ ID NO: 1560491
cccauagccaguuggagaa

SEQ ID NO: 1603618 - RNA, 19 nt, Artificial Sequence
  Description of Artificial Sequence: Synthetic oligonucleotide
  Antisense strand to SEQ ID NO: 1603617
uucuccaacuggcuauggg

SEQ ID NO: 1603619 - RNA, 19 nt, Artificial Sequence
  Description of Artificial Sequence: Synthetic oligonucleotide
  Sense strand starting at position 74 of SEQ ID NO: 1560491
gaaagaaccuccguucuuu

SEQ ID NO: 1603620 - RNA, 19 nt, Artificial Sequence
  Description of Artificial Sequence: Synthetic oligonucleotide
  Antisense strand to SEQ ID NO: 1603619
aaagaacggagguucuuuc

SEQ ID NO: 1603621 - RNA, 19 nt, Artificial Sequence
  Description of Artificial Sequence: Synthetic oligonucleotide
  Sense strand starting at position 102 of SEQ ID NO: 1560491
ucugcaucuccuuaacgua

SEQ ID NO: 1603622 - RNA, 19 nt, Artificial Sequence
  Description of Artificial Sequence: Synthetic oligonucleotide
  Antisense strand to SEQ ID NO: 1603621
uacguuaaggagaugcaga

SEQ ID NO: 1603623 - RNA, 19 nt, Artificial Sequence
  Description of Artificial Sequence: Synthetic oligonucleotide
  Sense strand starting at position 320 of SEQ ID NO: 1560491
cuagucaccgagcacaaau

SEQ ID NO: 1603624 - RNA, 19 nt, Artificial Sequence
  Description of Artificial Sequence: Synthetic oligonucleotide
  Antisense strand to SEQ ID NO: 1603623
auuugugcucggugacuag

SEQ ID NO: 1603625 - RNA, 19 nt, Artificial Sequence
  Description of Artificial Sequence: Synthetic oligonucleotide
  Sense strand starting at position 377 of SEQ ID NO: 1560491
aaauaagugugugcacgaa

SEQ ID NO: 1603626 - RNA, 19 nt, Artificial Sequence
  Description of Artificial Sequence: Synthetic oligonucleotide
  Antisense strand to SEQ ID NO: 1603625
uucgugcacacacuuauuu

SEQ ID NO: 1603627 - RNA, 19 nt, Artificial Sequence
  Description of Artificial Sequence: Synthetic oligonucleotide
  Sense strand starting at position 381 of SEQ ID NO: 1560491
aagugugugcacgaacaga

SEQ ID NO: 1603628 - RNA, 19 nt, Artificial Sequence
  Description of Artificial Sequence: Synthetic oligonucleotide
  Antisense strand to SEQ ID NO: 1603627
ucuguucgugcacacacuu

SEQ ID NO: 1603629 - RNA, 19 nt, Artificial Sequence
  Description of Artificial Sequence: Synthetic oligonucleotide
  Sense strand starting at position 923 of SEQ ID NO: 1560491
uuagcugacacuggagaua

SEQ ID NO: 1603630 - RNA, 19 nt, Artificial Sequence
  Description of Artificial Sequence: Synthetic oligonucleotide
  Antisense strand to SEQ ID NO: 1603629
uaucuccagugucagcuaa

SEQ ID NO: 1603631 - RNA, 19 nt, Artificial Sequence
  Description of Artificial Sequence: Synthetic oligonucleotide
  Sense strand starting at position 1227 of SEQ ID NO: 1560491
aggacucaccugcgacaaa

SEQ ID NO: 1603632 - RNA, 19 nt, Artificial Sequence
  Description of Artificial Sequence: Synthetic oligonucleotide
  Antisense strand to SEQ ID NO: 1603631
uuugucgcaggugaguccu

SEQ ID NO: 1603633 - RNA, 19 nt, Artificial Sequence
  Description of Artificial Sequence: Synthetic oligonucleotide
  Sense strand starting at position 1686 of SEQ ID NO: 1560491
cacagauaugacuggcacu

SEQ ID NO: 1603634 - RNA, 19 nt, Artificial Sequence
  Description of Artificial Sequence: Synthetic oligonucleotide
  Antisense strand to SEQ ID NO: 1603633
agugccagucauaucugug

SEQ ID NO: 1603635 - RNA, 19 nt, Artificial Sequence
  Description of Artificial Sequence: Synthetic oligonucleotide
  Sense strand starting at position 1692 of SEQ ID NO: 1560491
uaugacuggcacugacauu

SEQ ID NO: 1603636 - RNA, 19 nt, Artificial Sequence
  Description of Artificial Sequence: Synthetic oligonucleotide
  Antisense strand to SEQ ID NO: 1603635
aaugucagugccagucaua

SEQ ID NO: 1603637 - RNA, 19 nt, Artificial Sequence
  Description of Artificial Sequence: Synthetic oligonucleotide
  Sense strand starting at position 2038 of SEQ ID NO: 1560491
aucccauauuucuagugga

SEQ ID NO: 1603638 - RNA, 19 nt, Artificial Sequence
  Description of Artificial Sequence: Synthetic oligonucleotide
  Antisense strand to SEQ ID NO: 1603637
uccacuagaaauaugggau

SEQ ID NO: 1603639 - RNA, 19 nt, Artificial Sequence
  Description of Artificial Sequence: Synthetic oligonucleotide
  Sense strand starting at position 2059 of SEQ ID NO: 1560491
uggugaugucauggcauuu

SEQ ID NO: 1603640 - RNA, 19 nt, Artificial Sequence
  Description of Artificial Sequence: Synthetic oligonucleotide
  Antisense strand to SEQ ID NO: 1603639
aaaugccaugacaucacca

SEQ ID NO: 1603641 - RNA, 19 nt, Artificial Sequence
  Description of Artificial Sequence: Synthetic oligonucleotide
  Sense strand starting at position 2142 of SEQ ID NO: 1560491
guacgugucauuguagcuu

SEQ ID NO: 1603642 - RNA, 19 nt, Artificial Sequence
  Description of Artificial Sequence: Synthetic oligonucleotide
  Antisense strand to SEQ ID NO: 1603641
aagcuacaaugacacguac

SEQ ID NO: 1603643 - RNA, 19 nt, Artificial Sequence
  Description of Artificial Sequence: Synthetic oligonucleotide
  Sense strand starting at position 2145 of SEQ ID NO: 1560491
cgugucauuguagcuuuga

SEQ ID NO: 1603644 - RNA, 19 nt, Artificial Sequence
  Description of Artificial Sequence: Synthetic oligonucleotide
  Antisense strand to SEQ ID NO: 1603643
ucaaagcuacaaugacacg

SEQ ID NO: 1603645 - RNA, 19 nt, Artificial Sequence
  Description of Artificial Sequence: Synthetic oligonucleotide
  Sense strand starting at position 2267 of SEQ ID NO: 1560491
caggaugcuccuggcauua

SEQ ID NO: 1603646 - RNA, 19 nt, Artificial Sequence
  Description of Artificial Sequence: Synthetic oligonucleotide
  Antisense strand to SEQ ID NO: 1603645
uaaugccaggagcauccug

SEQ ID NO: 1603647 - RNA, 19 nt, Artificial Sequence
  Description of Artificial Sequence: Synthetic oligonucleotide
  Sense strand starting at position 2326 of SEQ ID NO: 1560491
ggauccuacugagcuauga

SEQ ID NO: 1603648 - RNA, 19 nt, Artificial Sequence
  Description of Artificial Sequence: Synthetic oligonucleotide
  Antisense strand to SEQ ID NO: 1603647
ucauagcucaguaggaucc

SEQ ID NO: 1603649 - RNA, 19 nt, Artificial Sequence
  Description of Artificial Sequence: Synthetic oligonucleotide
  Sense strand starting at position 2330 of SEQ ID NO: 1560491
ccuacugagcuaugacuuu

SEQ ID NO: 1603650 - RNA, 19 nt, Artificial Sequence
  Description of Artificial Sequence: Synthetic oligonucleotide
  Antisense strand to SEQ ID NO: 1603649
aaagucauagcucaguagg

SEQ ID NO: 1603651 - RNA, 19 nt, Artificial Sequence
  Description of Artificial Sequence: Synthetic oligonucleotide
  Sense strand starting at position 2337 of SEQ ID NO: 1560491
agcuaugacuuuccucagu

SEQ ID NO: 1603652 - RNA, 19 nt, Artificial Sequence
  Description of Artificial Sequence: Synthetic oligonucleotide
  Antisense strand to SEQ ID NO: 1603651
acugaggaaagucauagcu

SEQ ID NO: 1603653 - RNA, 19 nt, Artificial Sequence
  Description of Artificial Sequence: Synthetic oligonucleotide
  Sense strand starting at position 2339 of SEQ ID NO: 1560491
cuaugacuuuccucaguuu

SEQ ID NO: 1603654 - RNA, 19 nt, Artificial Sequence
  Description of Artificial Sequence: Synthetic oligonucleotide
  Antisense strand to SEQ ID NO: 1603653
aaacugaggaaagucauag

SEQ ID NO: 1603655 - RNA, 19 nt, Artificial Sequence
  Description of Artificial Sequence: Synthetic oligonucleotide
  Sense strand starting at position 2350 of SEQ ID NO: 1560491
cucaguuuccuugggacau

SEQ ID NO: 1603656 - RNA, 19 nt, Artificial Sequence
  Description of Artificial Sequence: Synthetic oligonucleotide
  Antisense strand to SEQ ID NO: 1603655
augucccaaggaaacugag

SEQ ID NO: 1603657 - RNA, 19 nt, Artificial Sequence
  Description of Artificial Sequence: Synthetic oligonucleotide
  Sense strand starting at position 2363 of SEQ ID NO: 1560491
ggacauugcuaacccauga

SEQ ID NO: 1603658 - RNA, 19 nt, Artificial Sequence
  Description of Artificial Sequence: Synthetic oligonucleotide
  Antisense strand to SEQ ID NO: 1603657
ucauggguuagcaaugucc

SEQ ID NO: 1603659 - RNA, 19 nt, Artificial Sequence
  Description of Artificial Sequence: Synthetic oligonucleotide
  Sense strand starting at position 2441 of SEQ ID NO: 1560491
uccaguaacuucucaguca

SEQ ID NO: 1603660 - RNA, 19 nt, Artificial Sequence
  Description of Artificial Sequence: Synthetic oligonucleotide
  Antisense strand to SEQ ID NO: 1603659
ugacugagaaguuacugga

SEQ ID NO: 1603661 - RNA, 19 nt, Artificial Sequence
  Description of Artificial Sequence: Synthetic oligonucleotide
  Sense strand starting at position 2803 of SEQ ID NO: 1560491
gugucauuaucacugugaa

SEQ ID NO: 1603662 - RNA, 19 nt, Artificial Sequence
  Description of Artificial Sequence: Synthetic oligonucleotide
  Antisense strand to SEQ ID NO: 1603661
uucacagugauaaugacac

SEQ ID NO: 1603663 - RNA, 19 nt, Artificial Sequence
  Description of Artificial Sequence: Synthetic oligonucleotide
  Sense strand starting at position 2804 of SEQ ID NO: 1560491
ugucauuaucacugugaag

SEQ ID NO: 1603664 - RNA, 19 nt, Artificial Sequence
  Description of Artificial Sequence: Synthetic oligonucleotide
  Antisense strand to SEQ ID NO: 1603663
cuucacagugauaaugaca

SEQ ID NO: 1603665 - RNA, 19 nt, Artificial Sequence
  Description of Artificial Sequence: Synthetic oligonucleotide
  Sense strand starting at position 2806 of SEQ ID NO: 1560491
ucauuaucacugugaaguu

SEQ ID NO: 1603666 - RNA, 19 nt, Artificial Sequence
  Description of Artificial Sequence: Synthetic oligonucleotide
  Antisense strand to SEQ ID NO: 1603665
aacuucacagugauaauga

SEQ ID NO: 1603667 - RNA, 19 nt, Artificial Sequence
  Description of Artificial Sequence: Synthetic oligonucleotide
  Sense strand starting at position 2818 of SEQ ID NO: 1560491
ugaaguucugguggagaaa

SEQ ID NO: 1603668 - RNA, 19 nt, Artificial Sequence
  Description of Artificial Sequence: Synthetic oligonucleotide
  Antisense strand to SEQ ID NO: 1603667
uuucuccaccagaacuuca

SEQ ID NO: 1603669 - RNA, 19 nt, Artificial Sequence
  Description of Artificial Sequence: Synthetic oligonucleotide
  Sense strand starting at position 2891 of SEQ ID NO: 1560491
agaggguuggguugugauu

SEQ ID NO: 1603670 - RNA, 19 nt, Artificial Sequence
  Description of Artificial Sequence: Synthetic oligonucleotide
  Antisense strand to SEQ ID NO: 1603669
aaucacaacccaacccucu

SEQ ID NO: 1603671 - RNA, 19 nt, Artificial Sequence
  Description of Artificial Sequence: Synthetic oligonucleotide
  Sense strand starting at position 3010 of SEQ ID NO: 1560491
aggaauuccuccgcucaag

SEQ ID NO: 1603672 - RNA, 19 nt, Artificial Sequence
  Description of Artificial Sequence: Synthetic oligonucleotide
  Antisense strand to SEQ ID NO: 1603671
cuugagcggaggaauuccu

SEQ ID NO: 1603673 - RNA, 19 nt, Artificial Sequence
  Description of Artificial Sequence: Synthetic oligonucleotide
  Sense strand starting at position 3131 of SEQ ID NO: 1560491
ugugguuagauuugugugu

SEQ ID NO: 1603674 - RNA, 19 nt, Artificial Sequence
  Description of Artificial Sequence: Synthetic oligonucleotide
  Antisense strand to SEQ ID NO: 1603673
acacacaaaucuaaccaca

SEQ ID NO: 1603675 - RNA, 19 nt, Artificial Sequence
  Description of Artificial Sequence: Synthetic oligonucleotide
  Sense strand starting at position 3376 of SEQ ID NO: 1560491
cacagauuaggaugugcua

SEQ ID NO: 1603676 - RNA, 19 nt, Artificial Sequence
  Description of Artificial Sequence: Synthetic oligonucleotide
  Antisense strand to SEQ ID NO: 1603675
uagcacauccuaaucugug

SEQ ID NO: 1603677 - RNA, 19 nt, Artificial Sequence
  Description of Artificial Sequence: Synthetic oligonucleotide
  Sense strand starting at position 3378 of SEQ ID NO: 1560491
cagauuaggaugugcuagu

SEQ ID NO: 1603678 - RNA, 19 nt, Artificial Sequence
  Description of Artificial Sequence: Synthetic oligonucleotide
  Antisense strand to SEQ ID NO: 1603677
acuagcacauccuaaucug

SEQ ID NO: 1603679 - RNA, 19 nt, Artificial Sequence
  Description of Artificial Sequence: Synthetic oligonucleotide
  Sense strand starting at position 3379 of SEQ ID NO: 1560491
agauuaggaugugcuagua

SEQ ID NO: 1603680 - RNA, 19 nt, Artificial Sequence
  Description of Artificial Sequence: Synthetic oligonucleotide
  Antisense strand to SEQ ID NO: 1603679
uacuagcacauccuaaucu

SEQ ID NO: 1603681 - RNA, 19 nt, Artificial Sequence
  Description of Artificial Sequence: Synthetic oligonucleotide
  Sense strand starting at position 3419 of SEQ ID NO: 1560491
gggcauaaacaauguuauu

SEQ ID NO: 1603682 - RNA, 19 nt, Artificial Sequence
  Description of Artificial Sequence: Synthetic oligonucleotide
  Antisense strand to SEQ ID NO: 1603681
aauaacauuguuuaugccc

SEQ ID NO: 1603683 - RNA, 19 nt, Artificial Sequence
  Description of Artificial Sequence: Synthetic oligonucleotide
  Sense strand starting at position 3482 of SEQ ID NO: 1560491
acagaaugcugugcucaac

SEQ ID NO: 1603684 - RNA, 19 nt, Artificial Sequence
  Description of Artificial Sequence: Synthetic oligonucleotide
  Antisense strand to SEQ ID NO: 1603683
guugagcacagcauucugu

SEQ ID NO: 1603685 - RNA, 19 nt, Artificial Sequence
  Description of Artificial Sequence: Synthetic oligonucleotide
  Sense strand starting at position 3488 of SEQ ID NO: 1560491
ugcugugcucaacuguuua

SEQ ID NO: 1603686 - RNA, 19 nt, Artificial Sequence
  Description of Artificial Sequence: Synthetic oligonucleotide
  Antisense strand to SEQ ID NO: 1603685
uaaacaguugagcacagca

SEQ ID NO: 1603687 - RNA, 19 nt, Artificial Sequence
  Description of Artificial Sequence: Synthetic oligonucleotide
  Sense strand starting at position 3493 of SEQ ID NO: 1560491
ugcucaacuguuuaugaca

SEQ ID NO: 1603688 - RNA, 19 nt, Artificial Sequence
  Description of Artificial Sequence: Synthetic oligonucleotide
  Antisense strand to SEQ ID NO: 1603687
ugucauaaacaguugagca

SEQ ID NO: 1603689 - RNA, 19 nt, Artificial Sequence
  Description of Artificial Sequence: Synthetic oligonucleotide
  Sense strand starting at position 3687 of SEQ ID NO: 1560491
uuguguauucuccauagag

SEQ ID NO: 1603690 - RNA, 19 nt, Artificial Sequence
  Description of Artificial Sequence: Synthetic oligonucleotide
  Antisense strand to SEQ ID NO: 1603689
cucuauggagaauacacaa

SEQ ID NO: 1603691 - RNA, 19 nt, Artificial Sequence
  Description of Artificial Sequence: Synthetic oligonucleotide
  Sense strand starting at position 3831 of SEQ ID NO: 1560491
ucuuauugggacuguguau

SEQ ID NO: 1603692 - RNA, 19 nt, Artificial Sequence
  Description of Artificial Sequence: Synthetic oligonucleotide
  Antisense strand to SEQ ID NO: 1603691
auacacagucccaauaaga

SEQ ID NO: 1603693 - RNA, 19 nt, Artificial Sequence
  Description of Artificial Sequence: Synthetic oligonucleotide
  Sense strand starting at position 3840 of SEQ ID NO: 1560491
gacuguguauauuccaagu

SEQ ID NO: 1603694 - RNA, 19 nt, Artificial Sequence
  Description of Artificial Sequence: Synthetic oligonucleotide
  Antisense strand to SEQ ID NO: 1603693
acuuggaauauacacaguc

SEQ ID NO: 1603695 - RNA, 19 nt, Artificial Sequence
  Description of Artificial Sequence: Synthetic oligonucleotide
  Sense strand starting at position 3925 of SEQ ID NO: 1560491
agaacuagauaucuaguuu

SEQ ID NO: 1603696 - RNA, 19 nt, Artificial Sequence
  Description of Artificial Sequence: Synthetic oligonucleotide
  Antisense strand to SEQ ID NO: 1603695
aaacuagauaucuaguucu

SEQ ID NO: 1603697 - RNA, 19 nt, Artificial Sequence
  Description of Artificial Sequence: Synthetic oligonucleotide
  Sense strand starting at position 13 of SEQ ID NO: 1560492
uggauaaaugaaugcugau

SEQ ID NO: 1603698 - RNA, 19 nt, Artificial Sequence
  Description of Artificial Sequence: Synthetic oligonucleotide
  Antisense strand to SEQ ID NO: 1603697
aucagcauucauuuaucca

SEQ ID NO: 1603699 - RNA, 19 nt, Artificial Sequence
  Description of Artificial Sequence: Synthetic oligonucleotide
  Sense strand starting at position 135 of SEQ ID NO: 1560492
cacgaaaggucacuuauaa

SEQ ID NO: 1603700 - RNA, 19 nt, Artificial Sequence
  Description of Artificial Sequence: Synthetic oligonucleotide
  Antisense strand to SEQ ID NO: 1603699
uuauaagugaccuuucgug

SEQ ID NO: 1603701 - RNA, 19 nt, Artificial Sequence
  Description of Artificial Sequence: Synthetic oligonucleotide
  Sense strand starting at position 324 of SEQ ID NO: 1560492
cuggaagaugacugagcua

SEQ ID NO: 1603702 - RNA, 19 nt, Artificial Sequence
  Description of Artificial Sequence: Synthetic oligonucleotide
  Antisense strand to SEQ ID NO: 1603701
uagcucagucaucuuccag

SEQ ID NO: 1603703 - RNA, 19 nt, Artificial Sequence
  Description of Artificial Sequence: Synthetic oligonucleotide
  Sense strand starting at position 681 of SEQ ID NO: 1560492
auugcucaucuugauggaa

SEQ ID NO: 1603704 - RNA, 19 nt, Artificial Sequence
  Description of Artificial Sequence: Synthetic oligonucleotide
  Antisense strand to SEQ ID NO: 1603703
uuccaucaagaugagcaau

SEQ ID NO: 1603705 - RNA, 19 nt, Artificial Sequence
  Description of Artificial Sequence: Synthetic oligonucleotide
  Sense strand starting at position 1295 of SEQ ID NO: 1560492
ucuggaaaggguuaagcuu

SEQ ID NO: 1603706 - RNA, 19 nt, Artificial Sequence
  Description of Artificial Sequence: Synthetic oligonucleotide
  Antisense strand to SEQ ID NO: 1603705
aagcuuaacccuuuccaga

SEQ ID NO: 1603707 - RNA, 19 nt, Artificial Sequence
  Description of Artificial Sequence: Synthetic oligonucleotide
  Sense strand starting at position 1356 of SEQ ID NO: 1560492
agaggacacgggugauuau

SEQ ID NO: 1603708 - RNA, 19 nt, Artificial Sequence
  Description of Artificial Sequence: Synthetic oligonucleotide
  Antisense strand to SEQ ID NO: 1603707
auaaucacccguguccucu

SEQ ID NO: 1603709 - RNA, 19 nt, Artificial Sequence
  Description of Artificial Sequence: Synthetic oligonucleotide
  Sense strand starting at position 1367 of SEQ ID NO: 1560492
gugauuaugaggugggaaa

SEQ ID NO: 1603710 - RNA, 19 nt, Artificial Sequence
  Description of Artificial Sequence: Synthetic oligonucleotide
  Antisense strand to SEQ ID NO: 1603709
uuucccaccucauaaucac

SEQ ID NO: 1603711 - RNA, 19 nt, Artificial Sequence
  Description of Artificial Sequence: Synthetic oligonucleotide
  Sense strand starting at position 1407 of SEQ ID NO: 1560492
gagaauuaaguuugagguu

SEQ ID NO: 1603712 - RNA, 19 nt, Artificial Sequence
  Description of Artificial Sequence: Synthetic oligonucleotide
  Antisense strand to SEQ ID NO: 1603711
aaccucaaacuuaauucuc

SEQ ID NO: 1603713 - RNA, 19 nt, Artificial Sequence
  Description of Artificial Sequence: Synthetic oligonucleotide
  Sense strand starting at position 1439 of SEQ ID NO: 1560492
gggauaacaguaggcauua

SEQ ID NO: 1603714 - RNA, 19 nt, Artificial Sequence
  Description of Artificial Sequence: Synthetic oligonucleotide
  Antisense strand to SEQ ID NO: 1603713
uaaugccuacuguuauccc

SEQ ID NO: 1603715 - RNA, 19 nt, Artificial Sequence
  Description of Artificial Sequence: Synthetic oligonucleotide
  Sense strand starting at position 1473 of SEQ ID NO: 1560492
aggguuaccuuaccgaaga

SEQ ID NO: 1603716 - RNA, 19 nt, Artificial Sequence
  Description of Artificial Sequence: Synthetic oligonucleotide
  Antisense strand to SEQ ID NO: 1603715
ucuucgguaagguaacccu

SEQ ID NO: 1603717 - RNA, 19 nt, Artificial Sequence
  Description of Artificial Sequence: Synthetic oligonucleotide
  Sense strand starting at position 1475 of SEQ ID NO: 1560492
gguuaccuuaccgaagauu

SEQ ID NO: 1603718 - RNA, 19 nt, Artificial Sequence
  Description of Artificial Sequence: Synthetic oligonucleotide
  Antisense strand to SEQ ID NO: 1603717
aaucuucgguaagguaacc

SEQ ID NO: 1603719 - RNA, 19 nt, Artificial Sequence
  Description of Artificial Sequence: Synthetic oligonucleotide
  Sense strand starting at position 1543 of SEQ ID NO: 1560492
augggucagugacuuuaua

SEQ ID NO: 1603720 - RNA, 19 nt, Artificial Sequence
  Description of Artificial Sequence: Synthetic oligonucleotide
  Antisense strand to SEQ ID NO: 1603719
uauaaagucacugacccau

SEQ ID NO: 1603721 - RNA, 19 nt, Artificial Sequence
  Description of Artificial Sequence: Synthetic oligonucleotide
  Sense strand starting at position 1565 of SEQ ID NO: 1560492
ggacuuauguaggcuauga

SEQ ID NO: 1603722 - RNA, 19 nt, Artificial Sequence
  Description of Artificial Sequence: Synthetic oligonucleotide
  Antisense strand to SEQ ID NO: 1603721
ucauagccuacauaagucc

SEQ ID NO: 1603723 - RNA, 19 nt, Artificial Sequence
  Description of Artificial Sequence: Synthetic oligonucleotide
  Sense strand starting at position 1684 of SEQ ID NO: 1560492
uuaguaagauguuccugga

SEQ ID NO: 1603724 - RNA, 19 nt, Artificial Sequence
  Description of Artificial Sequence: Synthetic oligonucleotide
  Antisense strand to SEQ ID NO: 1603723
uccaggaacaucuuacuaa

SEQ ID NO: 1603725 - RNA, 19 nt, Artificial Sequence
  Description of Artificial Sequence: Synthetic oligonucleotide
  Sense strand starting at position 1727 of SEQ ID NO: 1560492
cucagaccucucgaaaucu

SEQ ID NO: 1603726 - RNA, 19 nt, Artificial Sequence
  Description of Artificial Sequence: Synthetic oligonucleotide
  Antisense strand to SEQ ID NO: 1603725
agauuucgagaggucugag

SEQ ID NO: 1603727 - RNA, 19 nt, Artificial Sequence
  Description of Artificial Sequence: Synthetic oligonucleotide
  Sense strand starting at position 1749 of SEQ ID NO: 1560492
aguaaaggcuucccuagaa

SEQ ID NO: 1603728 - RNA, 19 nt, Artificial Sequence
  Description of Artificial Sequence: Synthetic oligonucleotide
  Antisense strand to SEQ ID NO: 1603727
uucuagggaagccuuuacu

SEQ ID NO: 1603729 - RNA, 19 nt, Artificial Sequence
  Description of Artificial Sequence: Synthetic oligonucleotide
  Sense strand starting at position 1826 of SEQ ID NO: 1560492
gaaagagauuccuuggcuc

SEQ ID NO: 1603730 - RNA, 19 nt, Artificial Sequence
  Description of Artificial Sequence: Synthetic oligonucleotide
  Antisense strand to SEQ ID NO: 1603729
gagccaaggaaucucuuuc

SEQ ID NO: 1603731 - RNA, 19 nt, Artificial Sequence
  Description of Artificial Sequence: Synthetic oligonucleotide
  Sense strand starting at position 1840 of SEQ ID NO: 1560492
ggcucucacuuaucugaga

SEQ ID NO: 1603732 - RNA, 19 nt, Artificial Sequence
  Description of Artificial Sequence: Synthetic oligonucleotide
  Antisense strand to SEQ ID NO: 1603731
ucucagauaagugagagcc

SEQ ID NO: 1603733 - RNA, 19 nt, Artificial Sequence
  Description of Artificial Sequence: Synthetic oligonucleotide
  Sense strand starting at position 1848 of SEQ ID NO: 1560492
cuuaucugagagcauacua

SEQ ID NO: 1603734 - RNA, 19 nt, Artificial Sequence
  Description of Artificial Sequence: Synthetic oligonucleotide
  Antisense strand to SEQ ID NO: 1603733
uaguaugcucucagauaag

SEQ ID NO: 1603735 - RNA, 19 nt, Artificial Sequence
  Description of Artificial Sequence: Synthetic oligonucleotide
  Sense strand starting at position 2049 of SEQ ID NO: 1560492
auggucuugcaagauugaa

SEQ ID NO: 1603736 - RNA, 19 nt, Artificial Sequence
  Description of Artificial Sequence: Synthetic oligonucleotide
  Antisense strand to SEQ ID NO: 1603735
uucaaucuugcaagaccau

SEQ ID NO: 1603737 - RNA, 19 nt, Artificial Sequence
  Description of Artificial Sequence: Synthetic oligonucleotide
  Sense strand starting at position 2388 of SEQ ID NO: 1560492
acuaaacucugguuuggga

SEQ ID NO: 1603738 - RNA, 19 nt, Artificial Sequence
  Description of Artificial Sequence: Synthetic oligonucleotide
  Antisense strand to SEQ ID NO: 1603737
ucccaaaccagaguuuagu

SEQ ID NO: 1603739 - RNA, 19 nt, Artificial Sequence
  Description of Artificial Sequence: Synthetic oligonucleotide
  Sense strand starting at position 2390 of SEQ ID NO: 1560492
uaaacucugguuugggaga

SEQ ID NO: 1603740 - RNA, 19 nt, Artificial Sequence
  Description of Artificial Sequence: Synthetic oligonucleotide
  Antisense strand to SEQ ID NO: 1603739
ucucccaaaccagaguuua

SEQ ID NO: 1603741 - RNA, 19 nt, Artificial Sequence
  Description of Artificial Sequence: Synthetic oligonucleotide
  Sense strand starting at position 2395 of SEQ ID NO: 1560492
ucugguuugggagagggua

SEQ ID NO: 1603742 - RNA, 19 nt, Artificial Sequence
  Description of Artificial Sequence: Synthetic oligonucleotide
  Antisense strand to SEQ ID NO: 1603741
uacccucucccaaaccaga

SEQ ID NO: 1603743 - RNA, 19 nt, Artificial Sequence
  Description of Artificial Sequence: Synthetic oligonucleotide
  Sense strand starting at position 2497 of SEQ ID NO: 1560492
gagguacuuugucuuggaa

SEQ ID NO: 1603744 - RNA, 19 nt, Artificial Sequence
  Description of Artificial Sequence: Synthetic oligonucleotide
  Antisense strand to SEQ ID NO: 1603743
uuccaagacaaaguaccuc

SEQ ID NO: 1603745 - RNA, 19 nt, Artificial Sequence
  Description of Artificial Sequence: Synthetic oligonucleotide
  Sense strand starting at position 2735 of SEQ ID NO: 1560492
gagugcuuuguccaaggaa

SEQ ID NO: 1603746 - RNA, 19 nt, Artificial Sequence
  Description of Artificial Sequence: Synthetic oligonucleotide
  Antisense strand to SEQ ID NO: 1603745
uuccuuggacaaagcacuc

SEQ ID NO: 1603747 - RNA, 19 nt, Artificial Sequence
  Description of Artificial Sequence: Synthetic oligonucleotide
  Sense strand starting at position 2756 of SEQ ID NO: 1560492
gcuccuucuguguuucuua

SEQ ID NO: 1603748 - RNA, 19 nt, Artificial Sequence
  Description of Artificial Sequence: Synthetic oligonucleotide
  Antisense strand to SEQ ID NO: 1603747
uaagaaacacagaaggagc

SEQ ID NO: 1603749 - RNA, 19 nt, Artificial Sequence
  Description of Artificial Sequence: Synthetic oligonucleotide
  Sense strand starting at position 2818 of SEQ ID NO: 1560492
uaccaugugggcuauuauu

SEQ ID NO: 1603750 - RNA, 19 nt, Artificial Sequence
  Description of Artificial Sequence: Synthetic oligonucleotide
  Antisense strand to SEQ ID NO: 1603749
aauaauagcccacauggua

SEQ ID NO: 1603751 - RNA, 19 nt, Artificial Sequence
  Description of Artificial Sequence: Synthetic oligonucleotide
  Sense strand starting at position 2871 of SEQ ID NO: 1560492
cccaucccacagugagaua

SEQ ID NO: 1603752 - RNA, 19 nt, Artificial Sequence
  Description of Artificial Sequence: Synthetic oligonucleotide
  Antisense strand to SEQ ID NO: 1603751
uaucucacugugggauggg

SEQ ID NO: 1603753 - RNA, 19 nt, Artificial Sequence
  Description of Artificial Sequence: Synthetic oligonucleotide
  Sense strand starting at position 2907 of SEQ ID NO: 1560492
gagaucaggagagguguua

SEQ ID NO: 1603754 - RNA, 19 nt, Artificial Sequence
  Description of Artificial Sequence: Synthetic oligonucleotide
  Antisense strand to SEQ ID NO: 1603753
uaacaccucuccugaucuc

SEQ ID NO: 1603755 - RNA, 19 nt, Artificial Sequence
  Description of Artificial Sequence: Synthetic oligonucleotide
  Sense strand starting at position 2957 of SEQ ID NO: 1560492
aguucuggaccugauaagu

SEQ ID NO: 1603756 - RNA, 19 nt, Artificial Sequence
  Description of Artificial Sequence: Synthetic oligonucleotide
  Antisense strand to SEQ ID NO: 1603755
acuuaucagguccagaacu

SEQ ID NO: 1603757 - RNA, 19 nt, Artificial Sequence
  Description of Artificial Sequence: Synthetic oligonucleotide
  Sense strand starting at position 2962 of SEQ ID NO: 1560492
uggaccugauaagugaauu

SEQ ID NO: 1603758 - RNA, 19 nt, Artificial Sequence
  Description of Artificial Sequence: Synthetic oligonucleotide
  Antisense strand to SEQ ID NO: 1603757
aauucacuuaucaggucca

SEQ ID NO: 1603759 - RNA, 19 nt, Artificial Sequence
  Description of Artificial Sequence: Synthetic oligonucleotide
  Sense strand starting at position 3017 of SEQ ID NO: 1560492
auuguauuccuuuauacug

SEQ ID NO: 1603760 - RNA, 19 nt, Artificial Sequence
  Description of Artificial Sequence: Synthetic oligonucleotide
  Antisense strand to SEQ ID NO: 1603759
caguauaaaggaauacaau

SEQ ID NO: 1603761 - RNA, 19 nt, Artificial Sequence
  Description of Artificial Sequence: Synthetic oligonucleotide
  Sense strand starting at position 3036 of SEQ ID NO: 1560492
gcaagaacuaguggauaca

SEQ ID NO: 1603762 - RNA, 19 nt, Artificial Sequence
  Description of Artificial Sequence: Synthetic oligonucleotide
  Antisense strand to SEQ ID NO: 1603761
uguauccacuaguucuugc

SEQ ID NO: 1603763 - RNA, 19 nt, Artificial Sequence
  Description of Artificial Sequence: Synthetic oligonucleotide
  Sense strand starting at position 3108 of SEQ ID NO: 1560492
acugguauacuguaaaucu

SEQ ID NO: 1603764 - RNA, 19 nt, Artificial Sequence
  Description of Artificial Sequence: Synthetic oligonucleotide
  Antisense strand to SEQ ID NO: 1603763
agauuuacaguauaccagu

SEQ ID NO: 1603765 - RNA, 19 nt, Artificial Sequence
  Description of Artificial Sequence: Synthetic oligonucleotide
  Sense strand starting at position 3139 of SEQ ID NO: 1560492
aaaggauguguacgauuaa

SEQ ID NO: 1603766 - RNA, 19 nt, Artificial Sequence
  Description of Artificial Sequence: Synthetic oligonucleotide
  Antisense strand to SEQ ID NO: 1603765
uuaaucguacacauccuuu

SEQ ID NO: 1603767 - RNA, 19 nt, Artificial Sequence
  Description of Artificial Sequence: Synthetic oligonucleotide
  Sense strand starting at position 3174 of SEQ ID NO: 1560492
uuaaauacagagugguaua

SEQ ID NO: 1603768 - RNA, 19 nt, Artificial Sequence
  Description of Artificial Sequence: Synthetic oligonucleotide
  Antisense strand to SEQ ID NO: 1603767
uauaccacucuguauuuaa

SEQ ID NO: 1603769 - RNA, 19 nt, Artificial Sequence
  Description of Artificial Sequence: Synthetic oligonucleotide
  Sense strand starting at position 3284 of SEQ ID NO: 1560492
caggauuugucugagagag

SEQ ID NO: 1603770 - RNA, 19 nt, Artificial Sequence
  Description of Artificial Sequence: Synthetic oligonucleotide
  Antisense strand to SEQ ID NO: 1603769
cucucucagacaaauccug

SEQ ID NO: 1603771 - RNA, 19 nt, Artificial Sequence
  Description of Artificial Sequence: Synthetic oligonucleotide
  Sense strand starting at position 3424 of SEQ ID NO: 1560492
caguaaugacaacagugua

SEQ ID NO: 1603772 - RNA, 19 nt, Artificial Sequence
  Description of Artificial Sequence: Synthetic oligonucleotide
  Antisense strand to SEQ ID NO: 1603771
uacacuguugucauuacug

SEQ ID NO: 1603773 - RNA, 19 nt, Artificial Sequence
  Description of Artificial Sequence: Synthetic oligonucleotide
  Sense strand starting at position 3427 of SEQ ID NO: 1560492
uaaugacaacaguguagua

SEQ ID NO: 1603774 - RNA, 19 nt, Artificial Sequence
  Description of Artificial Sequence: Synthetic oligonucleotide
  Antisense strand to SEQ ID NO: 1603773
uacuacacuguugucauua

SEQ ID NO: 1603775 - RNA, 19 nt, Artificial Sequence
  Description of Artificial Sequence: Synthetic oligonucleotide
  Sense strand starting at position 3975 of SEQ ID NO: 1560492
cugaacagaugcuuuacaa

SEQ ID NO: 1603776 - RNA, 19 nt, Artificial Sequence
  Description of Artificial Sequence: Synthetic oligonucleotide
  Antisense strand to SEQ ID NO: 1603775
uuguaaagcaucuguucag

SEQ ID NO: 1603777 - RNA, 19 nt, Artificial Sequence
  Description of Artificial Sequence: Synthetic oligonucleotide
  Sense strand starting at position 113 of SEQ ID NO: 1560493
auuguuauuuaccaaggaa

SEQ ID NO: 1603778 - RNA, 19 nt, Artificial Sequence
  Description of Artificial Sequence: Synthetic oligonucleotide
  Antisense strand to SEQ ID NO: 1603777
uuccuugguaaauaacaau

SEQ ID NO: 1603779 - RNA, 19 nt, Artificial Sequence
  Description of Artificial Sequence: Synthetic oligonucleotide
  Sense strand starting at position 256 of SEQ ID NO: 1560493
ugggaauguaauugaugca

SEQ ID NO: 1603780 - RNA, 19 nt, Artificial Sequence
  Description of Artificial Sequence: Synthetic oligonucleotide
  Antisense strand to SEQ ID NO: 1603779
ugcaucaauuacauuccca

SEQ ID NO: 1603781 - RNA, 19 nt, Artificial Sequence
  Description of Artificial Sequence: Synthetic oligonucleotide
  Sense strand starting at position 352 of SEQ ID NO: 1560493
guguacacccaagauaacu

SEQ ID NO: 1603782 - RNA, 19 nt, Artificial Sequence
  Description of Artificial Sequence: Synthetic oligonucleotide
  Antisense strand to SEQ ID NO: 1603781
aguuaucuuggguguacac

SEQ ID NO: 1603783 - RNA, 19 nt, Artificial Sequence
  Description of Artificial Sequence: Synthetic oligonucleotide
  Sense strand starting at position 474 of SEQ ID NO: 1560493
uggauaaaugaaugcugau

SEQ ID NO: 1603784 - RNA, 19 nt, Artificial Sequence
  Description of Artificial Sequence: Synthetic oligonucleotide
  Antisense strand to SEQ ID NO: 1603783
aucagcauucauuuaucca

SEQ ID NO: 1603785 - RNA, 19 nt, Artificial Sequence
  Description of Artificial Sequence: Synthetic oligonucleotide
  Sense strand starting at position 596 of SEQ ID NO: 1560493
cacgaaaggucacuuauaa

SEQ ID NO: 1603786 - RNA, 19 nt, Artificial Sequence
  Description of Artificial Sequence: Synthetic oligonucleotide
  Antisense strand to SEQ ID NO: 1603785
uuauaagugaccuuucgug

SEQ ID NO: 1603787 - RNA, 19 nt, Artificial Sequence
  Description of Artificial Sequence: Synthetic oligonucleotide
  Sense strand starting at position 785 of SEQ ID NO: 1560493
cuggaagaugacugagcua

SEQ ID NO: 1603788 - RNA, 19 nt, Artificial Sequence
  Description of Artificial Sequence: Synthetic oligonucleotide
  Antisense strand to SEQ ID NO: 1603787
uagcucagucaucuuccag

SEQ ID NO: 1603789 - RNA, 19 nt, Artificial Sequence
  Description of Artificial Sequence: Synthetic oligonucleotide
  Sense strand starting at position 1142 of SEQ ID NO: 1560493
auugcucaucuugauggaa

SEQ ID NO: 1603790 - RNA, 19 nt, Artificial Sequence
  Description of Artificial Sequence: Synthetic oligonucleotide
  Antisense strand to SEQ ID NO: 1603789
uuccaucaagaugagcaau

SEQ ID NO: 1603791 - RNA, 19 nt, Artificial Sequence
  Description of Artificial Sequence: Synthetic oligonucleotide
  Sense strand starting at position 1756 of SEQ ID NO: 1560493
ucuggaaaggguuaagcuu

SEQ ID NO: 1603792 - RNA, 19 nt, Artificial Sequence
  Description of Artificial Sequence: Synthetic oligonucleotide
  Antisense strand to SEQ ID NO: 1603791
aagcuuaacccuuuccaga

SEQ ID NO: 1603793 - RNA, 19 nt, Artificial Sequence
  Description of Artificial Sequence: Synthetic oligonucleotide
  Sense strand starting at position 1817 of SEQ ID NO: 1560493
agaggacacgggugauuau

SEQ ID NO: 1603794 - RNA, 19 nt, Artificial Sequence
  Description of Artificial Sequence: Synthetic oligonucleotide
  Antisense strand to SEQ ID NO: 1603793
auaaucacccguguccucu

SEQ ID NO: 1603795 - RNA, 19 nt, Artificial Sequence
  Description of Artificial Sequence: Synthetic oligonucleotide
  Sense strand starting at position 1828 of SEQ ID NO: 1560493
gugauuaugaggugggaaa

SEQ ID NO: 1603796 - RNA, 19 nt, Artificial Sequence
  Description of Artificial Sequence: Synthetic oligonucleotide
  Antisense strand to SEQ ID NO: 1603795
uuucccaccucauaaucac

SEQ ID NO: 1603797 - RNA, 19 nt, Artificial Sequence
  Description of Artificial Sequence: Synthetic oligonucleotide
  Sense strand starting at position 1868 of SEQ ID NO: 1560493
gagaauuaaguuugagguu

SEQ ID NO: 1603798 - RNA, 19 nt, Artificial Sequence
  Description of Artificial Sequence: Synthetic oligonucleotide
  Antisense strand to SEQ ID NO: 1603797
aaccucaaacuuaauucuc

SEQ ID NO: 1603799 - RNA, 19 nt, Artificial Sequence
  Description of Artificial Sequence: Synthetic oligonucleotide
  Sense strand starting at position 1900 of SEQ ID NO: 1560493
gggauaacaguaggcauua

SEQ ID NO: 1603800 - RNA, 19 nt, Artificial Sequence
  Description of Artificial Sequence: Synthetic oligonucleotide
  Antisense strand to SEQ ID NO: 1603799
uaaugccuacuguuauccc

SEQ ID NO: 1603801 - RNA, 19 nt, Artificial Sequence
  Description of Artificial Sequence: Synthetic oligonucleotide
  Sense strand starting at position 1934 of SEQ ID NO: 1560493
aggguuaccuuaccgaaga

SEQ ID NO: 1603802 - RNA, 19 nt, Artificial Sequence
  Description of Artificial Sequence: Synthetic oligonucleotide
  Antisense strand to SEQ ID NO: 1603801
ucuucgguaagguaacccu

SEQ ID NO: 1603803 - RNA, 19 nt, Artificial Sequence
  Description of Artificial Sequence: Synthetic oligonucleotide
  Sense strand starting at position 1936 of SEQ ID NO: 1560493
gguuaccuuaccgaagauu

SEQ ID NO: 1603804 - RNA, 19 nt, Artificial Sequence
  Description of Artificial Sequence: Synthetic oligonucleotide
  Antisense strand to SEQ ID NO: 1603803
aaucuucgguaagguaacc

SEQ ID NO: 1603805 - RNA, 19 nt, Artificial Sequence
  Description of Artificial Sequence: Synthetic oligonucleotide
  Sense strand starting at position 2004 of SEQ ID NO: 1560493
augggucagugacuuuaua

SEQ ID NO: 1603806 - RNA, 19 nt, Artificial Sequence
  Description of Artificial Sequence: Synthetic oligonucleotide
  Antisense strand to SEQ ID NO: 1603805
uauaaagucacugacccau

SEQ ID NO: 1603807 - RNA, 19 nt, Artificial Sequence
  Description of Artificial Sequence: Synthetic oligonucleotide
  Sense strand starting at position 2026 of SEQ ID NO: 1560493
ggacuuauguaggcuauga

SEQ ID NO: 1603808 - RNA, 19 nt, Artificial Sequence
  Description of Artificial Sequence: Synthetic oligonucleotide
  Antisense strand to SEQ ID NO: 1603807
ucauagccuacauaagucc

SEQ ID NO: 1603809 - RNA, 19 nt, Artificial Sequence
  Description of Artificial Sequence: Synthetic oligonucleotide
  Sense strand starting at position 2145 of SEQ ID NO: 1560493
uuaguaagauguuccugga

SEQ ID NO: 1603810 - RNA, 19 nt, Artificial Sequence
  Description of Artificial Sequence: Synthetic oligonucleotide
  Antisense strand to SEQ ID NO: 1603809
uccaggaacaucuuacuaa

SEQ ID NO: 1603811 - RNA, 19 nt, Artificial Sequence
  Description of Artificial Sequence: Synthetic oligonucleotide
  Sense strand starting at position 2188 of SEQ ID NO: 1560493
cucagaccucucgaaaucu

SEQ ID NO: 1603812 - RNA, 19 nt, Artificial Sequence
  Description of Artificial Sequence: Synthetic oligonucleotide
  Antisense strand to SEQ ID NO: 1603811
agauuucgagaggucugag

SEQ ID NO: 1603813 - RNA, 19 nt, Artificial Sequence
  Description of Artificial Sequence: Synthetic oligonucleotide
  Sense strand starting at position 2210 of SEQ ID NO: 1560493
aguaaaggcuucccuagaa

SEQ ID NO: 1603814 - RNA, 19 nt, Artificial Sequence
  Description of Artificial Sequence: Synthetic oligonucleotide
  Antisense strand to SEQ ID NO: 1603813
uucuagggaagccuuuacu

SEQ ID NO: 1603815 - RNA, 19 nt, Artificial Sequence
  Description of Artificial Sequence: Synthetic oligonucleotide
  Sense strand starting at position 2287 of SEQ ID NO: 1560493
gaaagagauuccuuggcuc

SEQ ID NO: 1603816 - RNA, 19 nt, Artificial Sequence
  Description of Artificial Sequence: Synthetic oligonucleotide
  Antisense strand to SEQ ID NO: 1603815
gagccaaggaaucucuuuc

SEQ ID NO: 1603817 - RNA, 19 nt, Artificial Sequence
  Description of Artificial Sequence: Synthetic oligonucleotide
  Sense strand starting at position 2309 of SEQ ID NO: 1560493
cuuaucugagagcauacua

SEQ ID NO: 1603818 - RNA, 19 nt, Artificial Sequence
  Description of Artificial Sequence: Synthetic oligonucleotide
  Antisense strand to SEQ ID NO: 1603817
uaguaugcucucagauaag

SEQ ID NO: 1603819 - RNA, 19 nt, Artificial Sequence
  Description of Artificial Sequence: Synthetic oligonucleotide
  Sense strand starting at position 2510 of SEQ ID NO: 1560493
auggucuugcaagauugaa

SEQ ID NO: 1603820 - RNA, 19 nt, Artificial Sequence
  Description of Artificial Sequence: Synthetic oligonucleotide
  Antisense strand to SEQ ID NO: 1603819
uucaaucuugcaagaccau

SEQ ID NO: 1603821 - RNA, 19 nt, Artificial Sequence
  Description of Artificial Sequence: Synthetic oligonucleotide
  Sense strand starting at position 2849 of SEQ ID NO: 1560493
acuaaacucugguuuggga

SEQ ID NO: 1603822 - RNA, 19 nt, Artificial Sequence
  Description of Artificial Sequence: Synthetic oligonucleotide
  Antisense strand to SEQ ID NO: 1603821
ucccaaaccagaguuuagu

SEQ ID NO: 1603823 - RNA, 19 nt, Artificial Sequence
  Description of Artificial Sequence: Synthetic oligonucleotide
  Sense strand starting at position 2851 of SEQ ID NO: 1560493
uaaacucugguuugggaga

SEQ ID NO: 1603824 - RNA, 19 nt, Artificial Sequence
  Description of Artificial Sequence: Synthetic oligonucleotide
  Antisense strand to SEQ ID NO: 1603823
ucucccaaaccagaguuua

SEQ ID NO: 1603825 - RNA, 19 nt, Artificial Sequence
  Description of Artificial Sequence: Synthetic oligonucleotide
  Sense strand starting at position 2856 of SEQ ID NO: 1560493
ucugguuugggagagggua

SEQ ID NO: 1603826 - RNA, 19 nt, Artificial Sequence
  Description of Artificial Sequence: Synthetic oligonucleotide
  Antisense strand to SEQ ID NO: 1603825
uacccucucccaaaccaga

SEQ ID NO: 1603827 - RNA, 19 nt, Artificial Sequence
  Description of Artificial Sequence: Synthetic oligonucleotide
  Sense strand starting at position 3196 of SEQ ID NO: 1560493
gagugcuuuguccaaggaa

SEQ ID NO: 1603828 - RNA, 19 nt, Artificial Sequence
  Description of Artificial Sequence: Synthetic oligonucleotide
  Antisense strand to SEQ ID NO: 1603827
uuccuuggacaaagcacuc

SEQ ID NO: 1603829 - RNA, 19 nt, Artificial Sequence
  Description of Artificial Sequence: Synthetic oligonucleotide
  Sense strand starting at position 3217 of SEQ ID NO: 1560493
gcuccuucuguguuucuua

SEQ ID NO: 1603830 - RNA, 19 nt, Artificial Sequence
  Description of Artificial Sequence: Synthetic oligonucleotide
  Antisense strand to SEQ ID NO: 1603829
uaagaaacacagaaggagc

SEQ ID NO: 1603831 - RNA, 19 nt, Artificial Sequence
  Description of Artificial Sequence: Synthetic oligonucleotide
  Sense strand starting at position 3279 of SEQ ID NO: 1560493
uaccaugugggcuauuauu

SEQ ID NO: 1603832 - RNA, 19 nt, Artificial Sequence
  Description of Artificial Sequence: Synthetic oligonucleotide
  Antisense strand to SEQ ID NO: 1603831
aauaauagcccacauggua

SEQ ID NO: 1603833 - RNA, 19 nt, Artificial Sequence
  Description of Artificial Sequence: Synthetic oligonucleotide
  Sense strand starting at position 3332 of SEQ ID NO: 1560493
cccaucccacagugagaua

SEQ ID NO: 1603834 - RNA, 19 nt, Artificial Sequence
  Description of Artificial Sequence: Synthetic oligonucleotide
  Antisense strand to SEQ ID NO: 1603833
uaucucacugugggauggg

SEQ ID NO: 1603835 - RNA, 19 nt, Artificial Sequence
  Description of Artificial Sequence: Synthetic oligonucleotide
  Sense strand starting at position 3368 of SEQ ID NO: 1560493
gagaucaggagagguguua

SEQ ID NO: 1603836 - RNA, 19 nt, Artificial Sequence
  Description of Artificial Sequence: Synthetic oligonucleotide
  Antisense strand to SEQ ID NO: 1603835
uaacaccucuccugaucuc

SEQ ID NO: 1603837 - RNA, 19 nt, Artificial Sequence
  Description of Artificial Sequence: Synthetic oligonucleotide
  Sense strand starting at position 3418 of SEQ ID NO: 1560493
aguucuggaccugauaagu

SEQ ID NO: 1603838 - RNA, 19 nt, Artificial Sequence
  Description of Artificial Sequence: Synthetic oligonucleotide
  Antisense strand to SEQ ID NO: 1603837
acuuaucagguccagaacu

SEQ ID NO: 1603839 - RNA, 19 nt, Artificial Sequence
  Description of Artificial Sequence: Synthetic oligonucleotide
  Sense strand starting at position 3423 of SEQ ID NO: 1560493
uggaccugauaagugaauu

SEQ ID NO: 1603840 - RNA, 19 nt, Artificial Sequence
  Description of Artificial Sequence: Synthetic oligonucleotide
  Antisense strand to SEQ ID NO: 1603839
aauucacuuaucaggucca

SEQ ID NO: 1603841 - RNA, 19 nt, Artificial Sequence
  Description of Artificial Sequence: Synthetic oligonucleotide
  Sense strand starting at position 3478 of SEQ ID NO: 1560493
auuguauuccuuuauacug

SEQ ID NO: 1603842 - RNA, 19 nt, Artificial Sequence
  Description of Artificial Sequence: Synthetic oligonucleotide
  Antisense strand to SEQ ID NO: 1603841
caguauaaaggaauacaau

SEQ ID NO: 1603843 - RNA, 19 nt, Artificial Sequence
  Description of Artificial Sequence: Synthetic oligonucleotide
  Sense strand starting at position 3497 of SEQ ID NO: 1560493
gcaagaacuaguggauaca

SEQ ID NO: 1603844 - RNA, 19 nt, Artificial Sequence
  Description of Artificial Sequence: Synthetic oligonucleotide
  Antisense strand to SEQ ID NO: 1603843
uguauccacuaguucuugc

SEQ ID NO: 1603845 - RNA, 19 nt, Artificial Sequence
  Description of Artificial Sequence: Synthetic oligonucleotide
  Sense strand starting at position 3569 of SEQ ID NO: 1560493
acugguauacuguaaaucu

SEQ ID NO: 1603846 - RNA, 19 nt, Artificial Sequence
  Description of Artificial Sequence: Synthetic oligonucleotide
  Antisense strand to SEQ ID NO: 1603845
agauuuacaguauaccagu

SEQ ID NO: 1603847 - RNA, 19 nt, Artificial Sequence
  Description of Artificial Sequence: Synthetic oligonucleotide
  Sense strand starting at position 3600 of SEQ ID NO: 1560493
aaaggauguguacgauuaa

SEQ ID NO: 1603848 - RNA, 19 nt, Artificial Sequence
  Description of Artificial Sequence: Synthetic oligonucleotide
  Antisense strand to SEQ ID NO: 1603847
uuaaucguacacauccuuu

SEQ ID NO: 1603849 - RNA, 19 nt, Artificial Sequence
  Description of Artificial Sequence: Synthetic oligonucleotide
  Sense strand starting at position 3635 of SEQ ID NO: 1560493
uuaaauacagagugguaua

SEQ ID NO: 1603850 - RNA, 19 nt, Artificial Sequence
  Description of Artificial Sequence: Synthetic oligonucleotide
  Antisense strand to SEQ ID NO: 1603849
uauaccacucuguauuuaa

SEQ ID NO: 1603851 - RNA, 19 nt, Artificial Sequence
  Description of Artificial Sequence: Synthetic oligonucleotide
  Sense strand starting at position 3745 of SEQ ID NO: 1560493
caggauuugucugagagag

SEQ ID NO: 1603852 - RNA, 19 nt, Artificial Sequence
  Description of Artificial Sequence: Synthetic oligonucleotide
  Antisense strand to SEQ ID NO: 1603851
cucucucagacaaauccug

SEQ ID NO: 1603853 - RNA, 19 nt, Artificial Sequence
  Description of Artificial Sequence: Synthetic oligonucleotide
  Sense strand starting at position 3885 of SEQ ID NO: 1560493
caguaaugacaacagugua

SEQ ID NO: 1603854 - RNA, 19 nt, Artificial Sequence
  Description of Artificial Sequence: Synthetic oligonucleotide
  Antisense strand to SEQ ID NO: 1603853
uacacuguugucauuacug

SEQ ID NO: 1603855 - RNA, 19 nt, Artificial Sequence
  Description of Artificial Sequence: Synthetic oligonucleotide
  Sense strand starting at position 3888 of SEQ ID NO: 1560493
uaaugacaacaguguagua

SEQ ID NO: 1603856 - RNA, 19 nt, Artificial Sequence
  Description of Artificial Sequence: Synthetic oligonucleotide
  Antisense strand to SEQ ID NO: 1603855
uacuacacuguugucauua

SEQ ID NO: 1603857 - RNA, 19 nt, Artificial Sequence
  Description of Artificial Sequence: Synthetic oligonucleotide
  Sense strand starting at position 320 of SEQ ID NO: 1560494
auguaaaugcuaugacaug

SEQ ID NO: 1603858 - RNA, 19 nt, Artificial Sequence
  Description of Artificial Sequence: Synthetic oligonucleotide
  Antisense strand to SEQ ID NO: 1603857
caugucauagcauuuacau

SEQ ID NO: 1603859 - RNA, 19 nt, Artificial Sequence
  Description of Artificial Sequence: Synthetic oligonucleotide
  Sense strand starting at position 1115 of SEQ ID NO: 1560494
ccguuagaacuccacaaac

SEQ ID NO: 1603860 - RNA, 19 nt, Artificial Sequence
  Description of Artificial Sequence: Synthetic oligonucleotide
  Antisense strand to SEQ ID NO: 1603859
guuuguggaguucuaacgg

SEQ ID NO: 1603861 - RNA, 19 nt, Artificial Sequence
  Description of Artificial Sequence: Synthetic oligonucleotide
  Sense strand starting at position 1182 of SEQ ID NO: 1560494
uuuaguuaagagcaaggua

SEQ ID NO: 1603862 - RNA, 19 nt, Artificial Sequence
  Description of Artificial Sequence: Synthetic oligonucleotide
  Antisense strand to SEQ ID NO: 1603861
uaccuugcucuuaacuaaa

SEQ ID NO: 1603863 - RNA, 19 nt, Artificial Sequence
  Description of Artificial Sequence: Synthetic oligonucleotide
  Sense strand starting at position 1201 of SEQ ID NO: 1560494
gggaccuuuaccugguaca

SEQ ID NO: 1603864 - RNA, 19 nt, Artificial Sequence
  Description of Artificial Sequence: Synthetic oligonucleotide
  Antisense strand to SEQ ID NO: 1603863
uguaccagguaaagguccc

SEQ ID NO: 1603865 - RNA, 19 nt, Artificial Sequence
  Description of Artificial Sequence: Synthetic oligonucleotide
  Sense strand starting at position 1502 of SEQ ID NO: 1560494
guguacauccaaggaagaa

SEQ ID NO: 1603866 - RNA, 19 nt, Artificial Sequence
  Description of Artificial Sequence: Synthetic oligonucleotide
  Antisense strand to SEQ ID NO: 1603865
uucuuccuuggauguacac

SEQ ID NO: 1603867 - RNA, 19 nt, Artificial Sequence
  Description of Artificial Sequence: Synthetic oligonucleotide
  Sense strand starting at position 1626 of SEQ ID NO: 1560494
acuguuauccagcagacaa

SEQ ID NO: 1603868 - RNA, 19 nt, Artificial Sequence
  Description of Artificial Sequence: Synthetic oligonucleotide
  Antisense strand to SEQ ID NO: 1603867
uugucugcuggauaacagu

SEQ ID NO: 1603869 - RNA, 19 nt, Artificial Sequence
  Description of Artificial Sequence: Synthetic oligonucleotide
  Sense strand starting at position 1628 of SEQ ID NO: 1560494
uguuauccagcagacaaga

SEQ ID NO: 1603870 - RNA, 19 nt, Artificial Sequence
  Description of Artificial Sequence: Synthetic oligonucleotide
  Antisense strand to SEQ ID NO: 1603869
ucuugucugcuggauaaca

SEQ ID NO: 1603871 - RNA, 19 nt, Artificial Sequence
  Description of Artificial Sequence: Synthetic oligonucleotide
  Sense strand starting at position 1725 of SEQ ID NO: 1560494
agagguuagggugguuuaa

SEQ ID NO: 1603872 - RNA, 19 nt, Artificial Sequence
  Description of Artificial Sequence: Synthetic oligonucleotide
  Antisense strand to SEQ ID NO: 1603871
uuaaaccacccuaaccucu

SEQ ID NO: 1603873 - RNA, 19 nt, Artificial Sequence
  Description of Artificial Sequence: Synthetic oligonucleotide
  Sense strand starting at position 1727 of SEQ ID NO: 1560494
agguuagggugguuuaaag

SEQ ID NO: 1603874 - RNA, 19 nt, Artificial Sequence
  Description of Artificial Sequence: Synthetic oligonucleotide
  Antisense strand to SEQ ID NO: 1603873
cuuuaaaccacccuaaccu

SEQ ID NO: 1603875 - RNA, 19 nt, Artificial Sequence
  Description of Artificial Sequence: Synthetic oligonucleotide
  Sense strand starting at position 1735 of SEQ ID NO: 1560494
gugguuuaaagguggagau

SEQ ID NO: 1603876 - RNA, 19 nt, Artificial Sequence
  Description of Artificial Sequence: Synthetic oligonucleotide
  Antisense strand to SEQ ID NO: 1603875
aucuccaccuuuaaaccac

SEQ ID NO: 1603877 - RNA, 19 nt, Artificial Sequence
  Description of Artificial Sequence: Synthetic oligonucleotide
  Sense strand starting at position 1736 of SEQ ID NO: 1560494
ugguuuaaagguggagauu

SEQ ID NO: 1603878 - RNA, 19 nt, Artificial Sequence
  Description of Artificial Sequence: Synthetic oligonucleotide
  Antisense strand to SEQ ID NO: 1603877
aaucuccaccuuuaaacca

SEQ ID NO: 1603879 - RNA, 19 nt, Artificial Sequence
  Description of Artificial Sequence: Synthetic oligonucleotide
  Sense strand starting at position 1763 of SEQ ID NO: 1560494
gggcuaagucuguauggga

SEQ ID NO: 1603880 - RNA, 19 nt, Artificial Sequence
  Description of Artificial Sequence: Synthetic oligonucleotide
  Antisense strand to SEQ ID NO: 1603879
ucccauacagacuuagccc

SEQ ID NO: 1603881 - RNA, 19 nt, Artificial Sequence
  Description of Artificial Sequence: Synthetic oligonucleotide
  Sense strand starting at position 1872 of SEQ ID NO: 1560494
gaggaauaaaucggguuga

SEQ ID NO: 1603882 - RNA, 19 nt, Artificial Sequence
  Description of Artificial Sequence: Synthetic oligonucleotide
  Antisense strand to SEQ ID NO: 1603881
ucaacccgauuuauuccuc

SEQ ID NO: 1603883 - RNA, 19 nt, Artificial Sequence
  Description of Artificial Sequence: Synthetic oligonucleotide
  Sense strand starting at position 1917 of SEQ ID NO: 1560494
augagaugauguuuggauu

SEQ ID NO: 1603884 - RNA, 19 nt, Artificial Sequence
  Description of Artificial Sequence: Synthetic oligonucleotide
  Antisense strand to SEQ ID NO: 1603883
aauccaaacaucaucucau

SEQ ID NO: 1603885 - RNA, 19 nt, Artificial Sequence
  Description of Artificial Sequence: Synthetic oligonucleotide
  Sense strand starting at position 1940 of SEQ ID NO: 1560494
guccuacuugcccaagaug

SEQ ID NO: 1603886 - RNA, 19 nt, Artificial Sequence
  Description of Artificial Sequence: Synthetic oligonucleotide
  Antisense strand to SEQ ID NO: 1603885
caucuugggcaaguaggac

SEQ ID NO: 1603887 - RNA, 19 nt, Artificial Sequence
  Description of Artificial Sequence: Synthetic oligonucleotide
  Sense strand starting at position 1978 of SEQ ID NO: 1560494
uuccaaagaugcucuagga

SEQ ID NO: 1603888 - RNA, 19 nt, Artificial Sequence
  Description of Artificial Sequence: Synthetic oligonucleotide
  Antisense strand to SEQ ID NO: 1603887
uccuagagcaucuuuggaa

SEQ ID NO: 1603889 - RNA, 19 nt, Artificial Sequence
  Description of Artificial Sequence: Synthetic oligonucleotide
  Sense strand starting at position 2067 of SEQ ID NO: 1560494
uaaguuuacugauuggaug

SEQ ID NO: 1603890 - RNA, 19 nt, Artificial Sequence
  Description of Artificial Sequence: Synthetic oligonucleotide
  Antisense strand to SEQ ID NO: 1603889
cauccaaucaguaaacuua

SEQ ID NO: 1603891 - RNA, 19 nt, Artificial Sequence
  Description of Artificial Sequence: Synthetic oligonucleotide
  Sense strand starting at position 2156 of SEQ ID NO: 1560494
ucauuaguuucuuuaagga

SEQ ID NO: 1603892 - RNA, 19 nt, Artificial Sequence
  Description of Artificial Sequence: Synthetic oligonucleotide
  Antisense strand to SEQ ID NO: 1603891
uccuuaaagaaacuaauga

SEQ ID NO: 1603893 - RNA, 19 nt, Artificial Sequence
  Description of Artificial Sequence: Synthetic oligonucleotide
  Sense strand starting at position 2486 of SEQ ID NO: 1560494
uugcucuggagucauuaga

SEQ ID NO: 1603894 - RNA, 19 nt, Artificial Sequence
  Description of Artificial Sequence: Synthetic oligonucleotide
  Antisense strand to SEQ ID NO: 1603893
ucuaaugacuccagagcaa

SEQ ID NO: 1603895 - RNA, 19 nt, Artificial Sequence
  Description of Artificial Sequence: Synthetic oligonucleotide
  Sense strand starting at position 2572 of SEQ ID NO: 1560494
auagcaauggcccaaaucu

SEQ ID NO: 1603896 - RNA, 19 nt, Artificial Sequence
  Description of Artificial Sequence: Synthetic oligonucleotide
  Antisense strand to SEQ ID NO: 1603895
agauuugggccauugcuau

SEQ ID NO: 1603897 - RNA, 19 nt, Artificial Sequence
  Description of Artificial Sequence: Synthetic oligonucleotide
  Sense strand starting at position 2616 of SEQ ID NO: 1560494
agagaccuccagcaucuua

SEQ ID NO: 1603898 - RNA, 19 nt, Artificial Sequence
  Description of Artificial Sequence: Synthetic oligonucleotide
  Antisense strand to SEQ ID NO: 1603897
uaagaugcuggaggucucu

SEQ ID NO: 1603899 - RNA, 19 nt, Artificial Sequence
  Description of Artificial Sequence: Synthetic oligonucleotide
  Sense strand starting at position 2632 of SEQ ID NO: 1560494
uuaguuacauggucaggga

SEQ ID NO: 1603900 - RNA, 19 nt, Artificial Sequence
  Description of Artificial Sequence: Synthetic oligonucleotide
  Antisense strand to SEQ ID NO: 1603899
ucccugaccauguaacuaa

SEQ ID NO: 1603901 - RNA, 19 nt, Artificial Sequence
  Description of Artificial Sequence: Synthetic oligonucleotide
  Sense strand starting at position 2636 of SEQ ID NO: 1560494
uuacauggucagggaaagu

SEQ ID NO: 1603902 - RNA, 19 nt, Artificial Sequence
  Description of Artificial Sequence: Synthetic oligonucleotide
  Antisense strand to SEQ ID NO: 1603901
acuuucccugaccauguaa

SEQ ID NO: 1603903 - RNA, 19 nt, Artificial Sequence
  Description of Artificial Sequence: Synthetic oligonucleotide
  Sense strand starting at position 2683 of SEQ ID NO: 1560494
uauauuaguggccaaugau

SEQ ID NO: 1603904 - RNA, 19 nt, Artificial Sequence
  Description of Artificial Sequence: Synthetic oligonucleotide
  Antisense strand to SEQ ID NO: 1603903
aucauuggccacuaauaua

SEQ ID NO: 1603905 - RNA, 19 nt, Artificial Sequence
  Description of Artificial Sequence: Synthetic oligonucleotide
  Sense strand starting at position 2686 of SEQ ID NO: 1560494
auuaguggccaaugauaag

SEQ ID NO: 1603906 - RNA, 19 nt, Artificial Sequence
  Description of Artificial Sequence: Synthetic oligonucleotide
  Antisense strand to SEQ ID NO: 1603905
cuuaucauuggccacuaau

SEQ ID NO: 1603907 - RNA, 19 nt, Artificial Sequence
  Description of Artificial Sequence: Synthetic oligonucleotide
  Sense strand starting at position 2698 of SEQ ID NO: 1560494
ugauaagugauguaguacu

SEQ ID NO: 1603908 - RNA, 19 nt, Artificial Sequence
  Description of Artificial Sequence: Synthetic oligonucleotide
  Antisense strand to SEQ ID NO: 1603907
aguacuacaucacuuauca

SEQ ID NO: 1603909 - RNA, 19 nt, Artificial Sequence
  Description of Artificial Sequence: Synthetic oligonucleotide
  Sense strand starting at position 2705 of SEQ ID NO: 1560494
ugauguaguacuuaggagu

SEQ ID NO: 1603910 - RNA, 19 nt, Artificial Sequence
  Description of Artificial Sequence: Synthetic oligonucleotide
  Antisense strand to SEQ ID NO: 1603909
acuccuaaguacuacauca

SEQ ID NO: 1603911 - RNA, 19 nt, Artificial Sequence
  Description of Artificial Sequence: Synthetic oligonucleotide
  Sense strand starting at position 2930 of SEQ ID NO: 1560494
agggaagaguugcugacuu

SEQ ID NO: 1603912 - RNA, 19 nt, Artificial Sequence
  Description of Artificial Sequence: Synthetic oligonucleotide
  Antisense strand to SEQ ID NO: 1603911
aagucagcaacucuucccu

SEQ ID NO: 1603913 - RNA, 19 nt, Artificial Sequence
  Description of Artificial Sequence: Synthetic oligonucleotide
  Sense strand starting at position 3088 of SEQ ID NO: 1560494
aggccaacaaugugaagau

SEQ ID NO: 1603914 - RNA, 19 nt, Artificial Sequence
  Description of Artificial Sequence: Synthetic oligonucleotide
  Antisense strand to SEQ ID NO: 1603913
aucuucacauuguuggccu

SEQ ID NO: 1603915 - RNA, 19 nt, Artificial Sequence
  Description of Artificial Sequence: Synthetic oligonucleotide
  Sense strand starting at position 3097 of SEQ ID NO: 1560494
augugaagauuccuaguga

SEQ ID NO: 1603916 - RNA, 19 nt, Artificial Sequence
  Description of Artificial Sequence: Synthetic oligonucleotide
  Antisense strand to SEQ ID NO: 1603915
ucacuaggaaucuucacau

SEQ ID NO: 1603917 - RNA, 19 nt, Artificial Sequence
  Description of Artificial Sequence: Synthetic oligonucleotide
  Sense strand starting at position 3121 of SEQ ID NO: 1560494
ggcugucagcuuguuuacu

SEQ ID NO: 1603918 - RNA, 19 nt, Artificial Sequence
  Description of Artificial Sequence: Synthetic oligonucleotide
  Antisense strand to SEQ ID NO: 1603917
aguaaacaagcugacagcc

SEQ ID NO: 1603919 - RNA, 19 nt, Artificial Sequence
  Description of Artificial Sequence: Synthetic oligonucleotide
  Sense strand starting at position 3266 of SEQ ID NO: 1560494
gaaguuaauguguacuuaa

SEQ ID NO: 1603920 - RNA, 19 nt, Artificial Sequence
  Description of Artificial Sequence: Synthetic oligonucleotide
  Antisense strand to SEQ ID NO: 1603919
uuaaguacacauuaacuuc

SEQ ID NO: 1603921 - RNA, 19 nt, Artificial Sequence
  Description of Artificial Sequence: Synthetic oligonucleotide
  Sense strand starting at position 3311 of SEQ ID NO: 1560494
ggcagcuugaagggauaau

SEQ ID NO: 1603922 - RNA, 19 nt, Artificial Sequence
  Description of Artificial Sequence: Synthetic oligonucleotide
  Antisense strand to SEQ ID NO: 1603921
auuaucccuucaagcugcc

SEQ ID NO: 1603923 - RNA, 19 nt, Artificial Sequence
  Description of Artificial Sequence: Synthetic oligonucleotide
  Sense strand starting at position 3312 of SEQ ID NO: 1560494
gcagcuugaagggauaauu

SEQ ID NO: 1603924 - RNA, 19 nt, Artificial Sequence
  Description of Artificial Sequence: Synthetic oligonucleotide
  Antisense strand to SEQ ID NO: 1603923
aauuaucccuucaagcugc

SEQ ID NO: 1603925 - RNA, 19 nt, Artificial Sequence
  Description of Artificial Sequence: Synthetic oligonucleotide
  Sense strand starting at position 3374 of SEQ ID NO: 1560494
guuguaucucauuaacacu

SEQ ID NO: 1603926 - RNA, 19 nt, Artificial Sequence
  Description of Artificial Sequence: Synthetic oligonucleotide
  Antisense strand to SEQ ID NO: 1603925
aguguuaaugagauacaac

SEQ ID NO: 1603927 - RNA, 19 nt, Artificial Sequence
  Description of Artificial Sequence: Synthetic oligonucleotide
  Sense strand starting at position 3481 of SEQ ID NO: 1560494
cauguugagacguagacuu

SEQ ID NO: 1603928 - RNA, 19 nt, Artificial Sequence
  Description of Artificial Sequence: Synthetic oligonucleotide
  Antisense strand to SEQ ID NO: 1603927
aagucuacgucucaacaug

SEQ ID NO: 1603929 - RNA, 19 nt, Artificial Sequence
  Description of Artificial Sequence: Synthetic oligonucleotide
  Sense strand starting at position 3656 of SEQ ID NO: 1560494
aacagcauuggucaugcaa

SEQ ID NO: 1603930 - RNA, 19 nt, Artificial Sequence
  Description of Artificial Sequence: Synthetic oligonucleotide
  Antisense strand to SEQ ID NO: 1603929
uugcaugaccaaugcuguu

SEQ ID NO: 1603931 - RNA, 19 nt, Artificial Sequence
  Description of Artificial Sequence: Synthetic oligonucleotide
  Sense strand starting at position 3909 of SEQ ID NO: 1560494
guuguugaucugcaagaaa

SEQ ID NO: 1603932 - RNA, 19 nt, Artificial Sequence
  Description of Artificial Sequence: Synthetic oligonucleotide
  Antisense strand to SEQ ID NO: 1603931
uuucuugcagaucaacaac

SEQ ID NO: 1603933 - RNA, 19 nt, Artificial Sequence
  Description of Artificial Sequence: Synthetic oligonucleotide
  Sense strand starting at position 3978 of SEQ ID NO: 1560494
guaaauuuacgucaucguc

SEQ ID NO: 1603934 - RNA, 19 nt, Artificial Sequence
  Description of Artificial Sequence: Synthetic oligonucleotide
  Antisense strand to SEQ ID NO: 1603933
gacgaugacguaaauuuac

SEQ ID NO: 1603935 - RNA, 19 nt, Artificial Sequence
  Description of Artificial Sequence: Synthetic oligonucleotide
  Sense strand starting at position 3980 of SEQ ID NO: 1560494
aaauuuacgucaucgucuu

SEQ ID NO: 1603936 - RNA, 19 nt, Artificial Sequence
  Description of Artificial Sequence: Synthetic oligonucleotide
  Antisense strand to SEQ ID NO: 1603935
aagacgaugacguaaauuu

SEQ ID NO: 1603937 - RNA, 19 nt, Artificial Sequence
  Description of Artificial Sequence: Synthetic oligonucleotide
  Sense strand starting at position 814 of SEQ ID NO: 1560495
gcaguauaauuaccaagua

SEQ ID NO: 1603938 - RNA, 19 nt, Artificial Sequence
  Description of Artificial Sequence: Synthetic oligonucleotide
  Antisense strand to SEQ ID NO: 1603937
uacuugguaauuauacugc

SEQ ID NO: 1603939 - RNA, 19 nt, Artificial Sequence
  Description of Artificial Sequence: Synthetic oligonucleotide
  Sense strand starting at position 834 of SEQ ID NO: 1560495
uagauucuagagugaucug

SEQ ID NO: 1603940 - RNA, 19 nt, Artificial Sequence
  Description of Artificial Sequence: Synthetic oligonucleotide
  Antisense strand to SEQ ID NO: 1603939
cagaucacucuagaaucua

SEQ ID NO: 1603941 - RNA, 19 nt, Artificial Sequence
  Description of Artificial Sequence: Synthetic oligonucleotide
  Sense strand starting at position 835 of SEQ ID NO: 1560495
agauucuagagugaucugu

SEQ ID NO: 1603942 - RNA, 19 nt, Artificial Sequence
  Description of Artificial Sequence: Synthetic oligonucleotide
  Antisense strand to SEQ ID NO: 1603941
acagaucacucuagaaucu

SEQ ID NO: 1603943 - RNA, 19 nt, Artificial Sequence
  Description of Artificial Sequence: Synthetic oligonucleotide
  Sense strand starting at position 837 of SEQ ID NO: 1560495
auucuagagugaucuguga

SEQ ID NO: 1603944 - RNA, 19 nt, Artificial Sequence
  Description of Artificial Sequence: Synthetic oligonucleotide
  Antisense strand to SEQ ID NO: 1603943
ucacagaucacucuagaau

SEQ ID NO: 1603945 - RNA, 19 nt, Artificial Sequence
  Description of Artificial Sequence: Synthetic oligonucleotide
  Sense strand starting at position 839 of SEQ ID NO: 1560495
ucuagagugaucugugacu

SEQ ID NO: 1603946 - RNA, 19 nt, Artificial Sequence
  Description of Artificial Sequence: Synthetic oligonucleotide
  Antisense strand to SEQ ID NO: 1603945
agucacagaucacucuaga

SEQ ID NO: 1603947 - RNA, 19 nt, Artificial Sequence
  Description of Artificial Sequence: Synthetic oligonucleotide
  Sense strand starting at position 841 of SEQ ID NO: 1560495
uagagugaucugugacucu

SEQ ID NO: 1603948 - RNA, 19 nt, Artificial Sequence
  Description of Artificial Sequence: Synthetic oligonucleotide
  Antisense strand to SEQ ID NO: 1603947
agagucacagaucacucua

SEQ ID NO: 1603949 - RNA, 19 nt, Artificial Sequence
  Description of Artificial Sequence: Synthetic oligonucleotide
  Sense strand starting at position 912 of SEQ ID NO: 1560495
gugguauuccugcagaagg

SEQ ID NO: 1603950 - RNA, 19 nt, Artificial Sequence
  Description of Artificial Sequence: Synthetic oligonucleotide
  Antisense strand to SEQ ID NO: 1603949
ccuucugcaggaauaccac

SEQ ID NO: 1603951 - RNA, 19 nt, Artificial Sequence
  Description of Artificial Sequence: Synthetic oligonucleotide
  Sense strand starting at position 1008 of SEQ ID NO: 1560495
agaguugcaugguuacuga

SEQ ID NO: 1603952 - RNA, 19 nt, Artificial Sequence
  Description of Artificial Sequence: Synthetic oligonucleotide
  Antisense strand to SEQ ID NO: 1603951
ucaguaaccaugcaacucu

SEQ ID NO: 1603953 - RNA, 19 nt, Artificial Sequence
  Description of Artificial Sequence: Synthetic oligonucleotide
  Sense strand starting at position 1144 of SEQ ID NO: 1560495
ggcacagauccuggugaua

SEQ ID NO: 1603954 - RNA, 19 nt, Artificial Sequence
  Description of Artificial Sequence: Synthetic oligonucleotide
  Antisense strand to SEQ ID NO: 1603953
uaucaccaggaucugugcc

SEQ ID NO: 1603955 - RNA, 19 nt, Artificial Sequence
  Description of Artificial Sequence: Synthetic oligonucleotide
  Sense strand starting at position 1311 of SEQ ID NO: 1560495
ggaugacaccgucaucaca

SEQ ID NO: 1603956 - RNA, 19 nt, Artificial Sequence
  Description of Artificial Sequence: Synthetic oligonucleotide
  Antisense strand to SEQ ID NO: 1603955
ugugaugacggugucaucc

SEQ ID NO: 1603957 - RNA, 19 nt, Artificial Sequence
  Description of Artificial Sequence: Synthetic oligonucleotide
  Sense strand starting at position 1506 of SEQ ID NO: 1560495
gacuccuucugaguuugaa

SEQ ID NO: 1603958 - RNA, 19 nt, Artificial Sequence
  Description of Artificial Sequence: Synthetic oligonucleotide
  Antisense strand to SEQ ID NO: 1603957
uucaaacucagaaggaguc

SEQ ID NO: 1603959 - RNA, 19 nt, Artificial Sequence
  Description of Artificial Sequence: Synthetic oligonucleotide
  Sense strand starting at position 1771 of SEQ ID NO: 1560495
gacagauuacaaugcaguc

SEQ ID NO: 1603960 - RNA, 19 nt, Artificial Sequence
  Description of Artificial Sequence: Synthetic oligonucleotide
  Antisense strand to SEQ ID NO: 1603959
gacugcauuguaaucuguc

SEQ ID NO: 1603961 - RNA, 19 nt, Artificial Sequence
  Description of Artificial Sequence: Synthetic oligonucleotide
  Sense strand starting at position 1794 of SEQ ID NO: 1560495
augacauagcagugauuau

SEQ ID NO: 1603962 - RNA, 19 nt, Artificial Sequence
  Description of Artificial Sequence: Synthetic oligonucleotide
  Antisense strand to SEQ ID NO: 1603961
auaaucacugcuaugucau

SEQ ID NO: 1603963 - RNA, 19 nt, Artificial Sequence
  Description of Artificial Sequence: Synthetic oligonucleotide
  Sense strand starting at position 1795 of SEQ ID NO: 1560495
ugacauagcagugauuaug

SEQ ID NO: 1603964 - RNA, 19 nt, Artificial Sequence
  Description of Artificial Sequence: Synthetic oligonucleotide
  Antisense strand to SEQ ID NO: 1603963
cauaaucacugcuauguca

SEQ ID NO: 1603965 - RNA, 19 nt, Artificial Sequence
  Description of Artificial Sequence: Synthetic oligonucleotide
  Sense strand starting at position 1805 of SEQ ID NO: 1560495
gugauuaugaggugggaca

SEQ ID NO: 1603966 - RNA, 19 nt, Artificial Sequence
  Description of Artificial Sequence: Synthetic oligonucleotide
  Antisense strand to SEQ ID NO: 1603965
ugucccaccucauaaucac

SEQ ID NO: 1603967 - RNA, 19 nt, Artificial Sequence
  Description of Artificial Sequence: Synthetic oligonucleotide
  Sense strand starting at position 1891 of SEQ ID NO: 1560495
uagggauuagcuuagccua

SEQ ID NO: 1603968 - RNA, 19 nt, Artificial Sequence
  Description of Artificial Sequence: Synthetic oligonucleotide
  Antisense strand to SEQ ID NO: 1603967
uaggcuaagcuaaucccua

SEQ ID NO: 1603969 - RNA, 19 nt, Artificial Sequence
  Description of Artificial Sequence: Synthetic oligonucleotide
  Sense strand starting at position 1927 of SEQ ID NO: 1560495
ccagaaauucugggcacca

SEQ ID NO: 1603970 - RNA, 19 nt, Artificial Sequence
  Description of Artificial Sequence: Synthetic oligonucleotide
  Antisense strand to SEQ ID NO: 1603969
uggugcccagaauuucugg

SEQ ID NO: 1603971 - RNA, 19 nt, Artificial Sequence
  Description of Artificial Sequence: Synthetic oligonucleotide
  Sense strand starting at position 2059 of SEQ ID NO: 1560495
aggagugguuucuugggaa

SEQ ID NO: 1603972 - RNA, 19 nt, Artificial Sequence
  Description of Artificial Sequence: Synthetic oligonucleotide
  Antisense strand to SEQ ID NO: 1603971
uucccaagaaaccacuccu

SEQ ID NO: 1603973 - RNA, 19 nt, Artificial Sequence
  Description of Artificial Sequence: Synthetic oligonucleotide
  Sense strand starting at position 2233 of SEQ ID NO: 1560495
gagugucuuucuuugaaca

SEQ ID NO: 1603974 - RNA, 19 nt, Artificial Sequence
  Description of Artificial Sequence: Synthetic oligonucleotide
  Antisense strand to SEQ ID NO: 1603973
uguucaaagaaagacacuc

SEQ ID NO: 1603975 - RNA, 19 nt, Artificial Sequence
  Description of Artificial Sequence: Synthetic oligonucleotide
  Sense strand starting at position 2429 of SEQ ID NO: 1560495
cagagucacguaggagaau

SEQ ID NO: 1603976 - RNA, 19 nt, Artificial Sequence
  Description of Artificial Sequence: Synthetic oligonucleotide
  Antisense strand to SEQ ID NO: 1603975
auucuccuacgugacucug

SEQ ID NO: 1603977 - RNA, 19 nt, Artificial Sequence
  Description of Artificial Sequence: Synthetic oligonucleotide
  Sense strand starting at position 2440 of SEQ ID NO: 1560495
aggagaauuugugaaguug

SEQ ID NO: 1603978 - RNA, 19 nt, Artificial Sequence
  Description of Artificial Sequence: Synthetic oligonucleotide
  Antisense strand to SEQ ID NO: 1603977
caacuucacaaauucuccu

SEQ ID NO: 1603979 - RNA, 19 nt, Artificial Sequence
  Description of Artificial Sequence: Synthetic oligonucleotide
  Sense strand starting at position 2452 of SEQ ID NO: 1560495
gaaguugcagcauaaucua

SEQ ID NO: 1603980 - RNA, 19 nt, Artificial Sequence
  Description of Artificial Sequence: Synthetic oligonucleotide
  Antisense strand to SEQ ID NO: 1603979
uagauuaugcugcaacuuc

SEQ ID NO: 1603981 - RNA, 19 nt, Artificial Sequence
  Description of Artificial Sequence: Synthetic oligonucleotide
  Sense strand starting at position 2455 of SEQ ID NO: 1560495
guugcagcauaaucuagaa

SEQ ID NO: 1603982 - RNA, 19 nt, Artificial Sequence
  Description of Artificial Sequence: Synthetic oligonucleotide
  Antisense strand to SEQ ID NO: 1603981
uucuagauuaugcugcaac

SEQ ID NO: 1603983 - RNA, 19 nt, Artificial Sequence
  Description of Artificial Sequence: Synthetic oligonucleotide
  Sense strand starting at position 2596 of SEQ ID NO: 1560495
gagugccuuguccaagaaa

SEQ ID NO: 1603984 - RNA, 19 nt, Artificial Sequence
  Description of Artificial Sequence: Synthetic oligonucleotide
  Antisense strand to SEQ ID NO: 1603983
uuucuuggacaaggcacuc

SEQ ID NO: 1603985 - RNA, 19 nt, Artificial Sequence
  Description of Artificial Sequence: Synthetic oligonucleotide
  Sense strand starting at position 2623 of SEQ ID NO: 1560495
gugugucucacugugugau

SEQ ID NO: 1603986 - RNA, 19 nt, Artificial Sequence
  Description of Artificial Sequence: Synthetic oligonucleotide
  Antisense strand to SEQ ID NO: 1603985
aucacacagugagacacac

SEQ ID NO: 1603987 - RNA, 19 nt, Artificial Sequence
  Description of Artificial Sequence: Synthetic oligonucleotide
  Sense strand starting at position 2635 of SEQ ID NO: 1560495
gugugaugggauuacaugu

SEQ ID NO: 1603988 - RNA, 19 nt, Artificial Sequence
  Description of Artificial Sequence: Synthetic oligonucleotide
  Antisense strand to SEQ ID NO: 1603987
acauguaaucccaucacac

SEQ ID NO: 1603989 - RNA, 19 nt, Artificial Sequence
  Description of Artificial Sequence: Synthetic oligonucleotide
  Sense strand starting at position 2736 of SEQ ID NO: 1560495
ggauaaggcacagguauua

SEQ ID NO: 1603990 - RNA, 19 nt, Artificial Sequence
  Description of Artificial Sequence: Synthetic oligonucleotide
  Antisense strand to SEQ ID NO: 1603989
uaauaccugugccuuaucc

SEQ ID NO: 1603991 - RNA, 19 nt, Artificial Sequence
  Description of Artificial Sequence: Synthetic oligonucleotide
  Sense strand starting at position 2778 of SEQ ID NO: 1560495
aguauagacucucuagagu

SEQ ID NO: 1603992 - RNA, 19 nt, Artificial Sequence
  Description of Artificial Sequence: Synthetic oligonucleotide
  Antisense strand to SEQ ID NO: 1603991
acucuagagagucuauacu

SEQ ID NO: 1603993 - RNA, 19 nt, Artificial Sequence
  Description of Artificial Sequence: Synthetic oligonucleotide
  Sense strand starting at position 3036 of SEQ ID NO: 1560495
uuggaauccugagcucaag

SEQ ID NO: 1603994 - RNA, 19 nt, Artificial Sequence
  Description of Artificial Sequence: Synthetic oligonucleotide
  Antisense strand to SEQ ID NO: 1603993
cuugagcucaggauuccaa

SEQ ID NO: 1603995 - RNA, 19 nt, Artificial Sequence
  Description of Artificial Sequence: Synthetic oligonucleotide
  Sense strand starting at position 3150 of SEQ ID NO: 1560495
ccaagucuucgguauugau

SEQ ID NO: 1603996 - RNA, 19 nt, Artificial Sequence
  Description of Artificial Sequence: Synthetic oligonucleotide
  Antisense strand to SEQ ID NO: 1603995
aucaauaccgaagacuugg

SEQ ID NO: 1603997 - RNA, 19 nt, Artificial Sequence
  Description of Artificial Sequence: Synthetic oligonucleotide
  Sense strand starting at position 3209 of SEQ ID NO: 1560495
ugcguauuugcauagauau

SEQ ID NO: 1603998 - RNA, 19 nt, Artificial Sequence
  Description of Artificial Sequence: Synthetic oligonucleotide
  Antisense strand to SEQ ID NO: 1603997
auaucuaugcaaauacgca

SEQ ID NO: 1603999 - RNA, 19 nt, Artificial Sequence
  Description of Artificial Sequence: Synthetic oligonucleotide
  Sense strand starting at position 3369 of SEQ ID NO: 1560495
aguuaaguagugugaauac

SEQ ID NO: 1604000 - RNA, 19 nt, Artificial Sequence
  Description of Artificial Sequence: Synthetic oligonucleotide
  Antisense strand to SEQ ID NO: 1603999
guauucacacuacuuaacu

SEQ ID NO: 1604001 - RNA, 19 nt, Artificial Sequence
  Description of Artificial Sequence: Synthetic oligonucleotide
  Sense strand starting at position 3378 of SEQ ID NO: 1560495
gugugaauaccgcauuaua

SEQ ID NO: 1604002 - RNA, 19 nt, Artificial Sequence
  Description of Artificial Sequence: Synthetic oligonucleotide
  Antisense strand to SEQ ID NO: 1604001
uauaaugcgguauucacac

SEQ ID NO: 1604003 - RNA, 19 nt, Artificial Sequence
  Description of Artificial Sequence: Synthetic oligonucleotide
  Sense strand starting at position 3381 of SEQ ID NO: 1560495
ugaauaccgcauuauaacu

SEQ ID NO: 1604004 - RNA, 19 nt, Artificial Sequence
  Description of Artificial Sequence: Synthetic oligonucleotide
  Antisense strand to SEQ ID NO: 1604003
aguuauaaugcgguauuca

SEQ ID NO: 1604005 - RNA, 19 nt, Artificial Sequence
  Description of Artificial Sequence: Synthetic oligonucleotide
  Sense strand starting at position 3496 of SEQ ID NO: 1560495
agaauugaucucuguauaa

SEQ ID NO: 1604006 - RNA, 19 nt, Artificial Sequence
  Description of Artificial Sequence: Synthetic oligonucleotide
  Antisense strand to SEQ ID NO: 1604005
uuauacagagaucaauucu

SEQ ID NO: 1604007 - RNA, 19 nt, Artificial Sequence
  Description of Artificial Sequence: Synthetic oligonucleotide
  Sense strand starting at position 3500 of SEQ ID NO: 1560495
uugaucucuguauaauuga

SEQ ID NO: 1604008 - RNA, 19 nt, Artificial Sequence
  Description of Artificial Sequence: Synthetic oligonucleotide
  Antisense strand to SEQ ID NO: 1604007
ucaauuauacagagaucaa

SEQ ID NO: 1604009 - RNA, 19 nt, Artificial Sequence
  Description of Artificial Sequence: Synthetic oligonucleotide
  Sense strand starting at position 3515 of SEQ ID NO: 1560495
uugaacuaucuauguagaa

SEQ ID NO: 1604010 - RNA, 19 nt, Artificial Sequence
  Description of Artificial Sequence: Synthetic oligonucleotide
  Antisense strand to SEQ ID NO: 1604009
uucuacauagauaguucaa

SEQ ID NO: 1604011 - RNA, 19 nt, Artificial Sequence
  Description of Artificial Sequence: Synthetic oligonucleotide
  Sense strand starting at position 3570 of SEQ ID NO: 1560495
cugacagauucuguuagug

SEQ ID NO: 1604012 - RNA, 19 nt, Artificial Sequence
  Description of Artificial Sequence: Synthetic oligonucleotide
  Antisense strand to SEQ ID NO: 1604011
cacuaacagaaucugucag

SEQ ID NO: 1604013 - RNA, 19 nt, Artificial Sequence
  Description of Artificial Sequence: Synthetic oligonucleotide
  Sense strand starting at position 3574 of SEQ ID NO: 1560495
cagauucuguuagugacaa

SEQ ID NO: 1604014 - RNA, 19 nt, Artificial Sequence
  Description of Artificial Sequence: Synthetic oligonucleotide
  Antisense strand to SEQ ID NO: 1604013
uugucacuaacagaaucug

SEQ ID NO: 1604015 - RNA, 19 nt, Artificial Sequence
  Description of Artificial Sequence: Synthetic oligonucleotide
  Sense strand starting at position 3734 of SEQ ID NO: 1560495
ccuguugcugaguagagaa

SEQ ID NO: 1604016 - RNA, 19 nt, Artificial Sequence
  Description of Artificial Sequence: Synthetic oligonucleotide
  Antisense strand to SEQ ID NO: 1604015
uucucuacucagcaacagg

SEQ ID NO: 1604017 - RNA, 19 nt, Artificial Sequence
  Description of Artificial Sequence: Synthetic oligonucleotide
  Sense strand starting at position 65 of SEQ ID NO: 1560496
uacgaaaucgccgugguca

SEQ ID NO: 1604018 - RNA, 19 nt, Artificial Sequence
  Description of Artificial Sequence: Synthetic oligonucleotide
  Antisense strand to SEQ ID NO: 1604017
ugaccacggcgauuucgua

SEQ ID NO: 1604019 - RNA, 19 nt, Artificial Sequence
  Description of Artificial Sequence: Synthetic oligonucleotide
  Sense strand starting at position 66 of SEQ ID NO: 1560496
acgaaaucgccguggucau

SEQ ID NO: 1604020 - RNA, 19 nt, Artificial Sequence
  Description of Artificial Sequence: Synthetic oligonucleotide
  Antisense strand to SEQ ID NO: 1604019
augaccacggcgauuucgu

SEQ ID NO: 1604021 - RNA, 19 nt, Artificial Sequence
  Description of Artificial Sequence: Synthetic oligonucleotide
  Sense strand starting at position 67 of SEQ ID NO: 1560496
cgaaaucgccguggucauu

SEQ ID NO: 1604022 - RNA, 19 nt, Artificial Sequence
  Description of Artificial Sequence: Synthetic oligonucleotide
  Antisense strand to SEQ ID NO: 1604021
aaugaccacggcgauuucg

SEQ ID NO: 1604023 - RNA, 19 nt, Artificial Sequence
  Description of Artificial Sequence: Synthetic oligonucleotide
  Sense strand starting at position 79 of SEQ ID NO: 1560496
ggucauugaguccgcaguu

SEQ ID NO: 1604024 - RNA, 19 nt, Artificial Sequence
  Description of Artificial Sequence: Synthetic oligonucleotide
  Antisense strand to SEQ ID NO: 1604023
aacugcggacucaaugacc

SEQ ID NO: 1604025 - RNA, 19 nt, Artificial Sequence
  Description of Artificial Sequence: Synthetic oligonucleotide
  Sense strand starting at position 80 of SEQ ID NO: 1560496
gucauugaguccgcaguuu

SEQ ID NO: 1604026 - RNA, 19 nt, Artificial Sequence
  Description of Artificial Sequence: Synthetic oligonucleotide
  Antisense strand to SEQ ID NO: 1604025
aaacugcggacucaaugac

SEQ ID NO: 1604027 - RNA, 19 nt, Artificial Sequence
  Description of Artificial Sequence: Synthetic oligonucleotide
  Sense strand starting at position 619 of SEQ ID NO: 1560496
acuuguugucuggguucca

SEQ ID NO: 1604028 - RNA, 19 nt, Artificial Sequence
  Description of Artificial Sequence: Synthetic oligonucleotide
  Antisense strand to SEQ ID NO: 1604027
uggaacccagacaacaagu

SEQ ID NO: 1604029 - RNA, 19 nt, Artificial Sequence
  Description of Artificial Sequence: Synthetic oligonucleotide
  Sense strand starting at position 883 of SEQ ID NO: 1560496
aacugagccgguuaucaga

SEQ ID NO: 1604030 - RNA, 19 nt, Artificial Sequence
  Description of Artificial Sequence: Synthetic oligonucleotide
  Antisense strand to SEQ ID NO: 1604029
ucugauaaccggcucaguu

SEQ ID NO: 1604031 - RNA, 19 nt, Artificial Sequence
  Description of Artificial Sequence: Synthetic oligonucleotide
  Sense strand starting at position 937 of SEQ ID NO: 1560496
gcggaucuagauugcaaga

SEQ ID NO: 1604032 - RNA, 19 nt, Artificial Sequence
  Description of Artificial Sequence: Synthetic oligonucleotide
  Antisense strand to SEQ ID NO: 1604031
ucuugcaaucuagauccgc

SEQ ID NO: 1604033 - RNA, 19 nt, Artificial Sequence
  Description of Artificial Sequence: Synthetic oligonucleotide
  Sense strand starting at position 939 of SEQ ID NO: 1560496
ggaucuagauugcaagaau

SEQ ID NO: 1604034 - RNA, 19 nt, Artificial Sequence
  Description of Artificial Sequence: Synthetic oligonucleotide
  Antisense strand to SEQ ID NO: 1604033
auucuugcaaucuagaucc

SEQ ID NO: 1604035 - RNA, 19 nt, Artificial Sequence
  Description of Artificial Sequence: Synthetic oligonucleotide
  Sense strand starting at position 942 of SEQ ID NO: 1560496
ucuagauugcaagaaugca

SEQ ID NO: 1604036 - RNA, 19 nt, Artificial Sequence
  Description of Artificial Sequence: Synthetic oligonucleotide
  Antisense strand to SEQ ID NO: 1604035
ugcauucuugcaaucuaga

SEQ ID NO: 1604037 - RNA, 19 nt, Artificial Sequence
  Description of Artificial Sequence: Synthetic oligonucleotide
  Sense strand starting at position 1041 of SEQ ID NO: 1560496
uaggguuauuguggagaau

SEQ ID NO: 1604038 - RNA, 19 nt, Artificial Sequence
  Description of Artificial Sequence: Synthetic oligonucleotide
  Antisense strand to SEQ ID NO: 1604037
auucuccacaauaacccua

SEQ ID NO: 1604039 - RNA, 19 nt, Artificial Sequence
  Description of Artificial Sequence: Synthetic oligonucleotide
  Sense strand starting at position 1059 of SEQ ID NO: 1560496
uuagaaccgucauuagaag

SEQ ID NO: 1604040 - RNA, 19 nt, Artificial Sequence
  Description of Artificial Sequence: Synthetic oligonucleotide
  Antisense strand to SEQ ID NO: 1604039
cuucuaaugacgguucuaa

SEQ ID NO: 1604041 - RNA, 19 nt, Artificial Sequence
  Description of Artificial Sequence: Synthetic oligonucleotide
  Sense strand starting at position 1060 of SEQ ID NO: 1560496
uagaaccgucauuagaagu

SEQ ID NO: 1604042 - RNA, 19 nt, Artificial Sequence
  Description of Artificial Sequence: Synthetic oligonucleotide
  Antisense strand to SEQ ID NO: 1604041
acuucuaaugacgguucua

SEQ ID NO: 1604043 - RNA, 19 nt, Artificial Sequence
  Description of Artificial Sequence: Synthetic oligonucleotide
  Sense strand starting at position 1066 of SEQ ID NO: 1560496
cgucauuagaaguaaagca

SEQ ID NO: 1604044 - RNA, 19 nt, Artificial Sequence
  Description of Artificial Sequence: Synthetic oligonucleotide
  Antisense strand to SEQ ID NO: 1604043
ugcuuuacuucuaaugacg

SEQ ID NO: 1604045 - RNA, 19 nt, Artificial Sequence
  Description of Artificial Sequence: Synthetic oligonucleotide
  Sense strand starting at position 1305 of SEQ ID NO: 1560496
uugcuugagccaugaauua

SEQ ID NO: 1604046 - RNA, 19 nt, Artificial Sequence
  Description of Artificial Sequence: Synthetic oligonucleotide
  Antisense strand to SEQ ID NO: 1604045
uaauucauggcucaagcaa

SEQ ID NO: 1604047 - RNA, 19 nt, Artificial Sequence
  Description of Artificial Sequence: Synthetic oligonucleotide
  Sense strand starting at position 1714 of SEQ ID NO: 1560496
aguguuuaaguguaaggca

SEQ ID NO: 1604048 - RNA, 19 nt, Artificial Sequence
  Description of Artificial Sequence: Synthetic oligonucleotide
  Antisense strand to SEQ ID NO: 1604047
ugccuuacacuuaaacacu

SEQ ID NO: 1604049 - RNA, 19 nt, Artificial Sequence
  Description of Artificial Sequence: Synthetic oligonucleotide
  Sense strand starting at position 1722 of SEQ ID NO: 1560496
aguguaaggcauuacuaac

SEQ ID NO: 1604050 - RNA, 19 nt, Artificial Sequence
  Description of Artificial Sequence: Synthetic oligonucleotide
  Antisense strand to SEQ ID NO: 1604049
guuaguaaugccuuacacu

SEQ ID NO: 1604051 - RNA, 19 nt, Artificial Sequence
  Description of Artificial Sequence: Synthetic oligonucleotide
  Sense strand starting at position 1883 of SEQ ID NO: 1560496
gaauaagccucagauggag

SEQ ID NO: 1604052 - RNA, 19 nt, Artificial Sequence
  Description of Artificial Sequence: Synthetic oligonucleotide
  Antisense strand to SEQ ID NO: 1604051
cuccaucugaggcuuauuc

SEQ ID NO: 1604053 - RNA, 19 nt, Artificial Sequence
  Description of Artificial Sequence: Synthetic oligonucleotide
  Sense strand starting at position 2073 of SEQ ID NO: 1560496
caaguugaugccgaaguga

SEQ ID NO: 1604054 - RNA, 19 nt, Artificial Sequence
  Description of Artificial Sequence: Synthetic oligonucleotide
  Antisense strand to SEQ ID NO: 1604053
ucacuucggcaucaacuug

SEQ ID NO: 1604055 - RNA, 19 nt, Artificial Sequence
  Description of Artificial Sequence: Synthetic oligonucleotide
  Sense strand starting at position 2122 of SEQ ID NO: 1560496
agaagaaggucuccaugcu

SEQ ID NO: 1604056 - RNA, 19 nt, Artificial Sequence
  Description of Artificial Sequence: Synthetic oligonucleotide
  Antisense strand to SEQ ID NO: 1604055
agcauggagaccuucuucu

SEQ ID NO: 1604057 - RNA, 19 nt, Artificial Sequence
  Description of Artificial Sequence: Synthetic oligonucleotide
  Sense strand starting at position 2132 of SEQ ID NO: 1560496
cuccaugcugaacagauua

SEQ ID NO: 1604058 - RNA, 19 nt, Artificial Sequence
  Description of Artificial Sequence: Synthetic oligonucleotide
  Antisense strand to SEQ ID NO: 1604057
uaaucuguucagcauggag

SEQ ID NO: 1604059 - RNA, 19 nt, Artificial Sequence
  Description of Artificial Sequence: Synthetic oligonucleotide
  Sense strand starting at position 2322 of SEQ ID NO: 1560496
gaugguggccaguauggaa

SEQ ID NO: 1604060 - RNA, 19 nt, Artificial Sequence
  Description of Artificial Sequence: Synthetic oligonucleotide
  Antisense strand to SEQ ID NO: 1604059
uuccauacuggccaccauc

SEQ ID NO: 1604061 - RNA, 19 nt, Artificial Sequence
  Description of Artificial Sequence: Synthetic oligonucleotide
  Sense strand starting at position 2390 of SEQ ID NO: 1560496
ugaggaguggugcagagau

SEQ ID NO: 1604062 - RNA, 19 nt, Artificial Sequence
  Description of Artificial Sequence: Synthetic oligonucleotide
  Antisense strand to SEQ ID NO: 1604061
aucucugcaccacuccuca

SEQ ID NO: 1604063 - RNA, 19 nt, Artificial Sequence
  Description of Artificial Sequence: Synthetic oligonucleotide
  Sense strand starting at position 2441 of SEQ ID NO: 1560496
gcaggagggugcugaaaua

SEQ ID NO: 1604064 - RNA, 19 nt, Artificial Sequence
  Description of Artificial Sequence: Synthetic oligonucleotide
  Antisense strand to SEQ ID NO: 1604063
uauuucagcacccuccugc

SEQ ID NO: 1604065 - RNA, 19 nt, Artificial Sequence
  Description of Artificial Sequence: Synthetic oligonucleotide
  Sense strand starting at position 2606 of SEQ ID NO: 1560496
cagaacuacucuuagggua

SEQ ID NO: 1604066 - RNA, 19 nt, Artificial Sequence
  Description of Artificial Sequence: Synthetic oligonucleotide
  Antisense strand to SEQ ID NO: 1604065
uacccuaagaguaguucug

SEQ ID NO: 1604067 - RNA, 19 nt, Artificial Sequence
  Description of Artificial Sequence: Synthetic oligonucleotide
  Sense strand starting at position 2608 of SEQ ID NO: 1560496
gaacuacucuuaggguaua

SEQ ID NO: 1604068 - RNA, 19 nt, Artificial Sequence
  Description of Artificial Sequence: Synthetic oligonucleotide
  Antisense strand to SEQ ID NO: 1604067
uauacccuaagaguaguuc

SEQ ID NO: 1604069 - RNA, 19 nt, Artificial Sequence
  Description of Artificial Sequence: Synthetic oligonucleotide
  Sense strand starting at position 2622 of SEQ ID NO: 1560496
guauaagagucuugggaau

SEQ ID NO: 1604070 - RNA, 19 nt, Artificial Sequence
  Description of Artificial Sequence: Synthetic oligonucleotide
  Antisense strand to SEQ ID NO: 1604069
auucccaagacucuuauac

SEQ ID NO: 1604071 - RNA, 19 nt, Artificial Sequence
  Description of Artificial Sequence: Synthetic oligonucleotide
  Sense strand starting at position 2624 of SEQ ID NO: 1560496
auaagagucuugggaauga

SEQ ID NO: 1604072 - RNA, 19 nt, Artificial Sequence
  Description of Artificial Sequence: Synthetic oligonucleotide
  Antisense strand to SEQ ID NO: 1604071
ucauucccaagacucuuau

SEQ ID NO: 1604073 - RNA, 19 nt, Artificial Sequence
  Description of Artificial Sequence: Synthetic oligonucleotide
  Sense strand starting at position 3287 of SEQ ID NO: 1560496
uaggguuaggcucaucuga

SEQ ID NO: 1604074 - RNA, 19 nt, Artificial Sequence
  Description of Artificial Sequence: Synthetic oligonucleotide
  Antisense strand to SEQ ID NO: 1604073
ucagaugagccuaacccua

SEQ ID NO: 1604075 - RNA, 19 nt, Artificial Sequence
  Description of Artificial Sequence: Synthetic oligonucleotide
  Sense strand starting at position 3292 of SEQ ID NO: 1560496
uuaggcucaucugaggaua

SEQ ID NO: 1604076 - RNA, 19 nt, Artificial Sequence
  Description of Artificial Sequence: Synthetic oligonucleotide
  Antisense strand to SEQ ID NO: 1604075
uauccucagaugagccuaa

SEQ ID NO: 1604077 - RNA, 19 nt, Artificial Sequence
  Description of Artificial Sequence: Synthetic oligonucleotide
  Sense strand starting at position 3294 of SEQ ID NO: 1560496
aggcucaucugaggauaua

SEQ ID NO: 1604078 - RNA, 19 nt, Artificial Sequence
  Description of Artificial Sequence: Synthetic oligonucleotide
  Antisense strand to SEQ ID NO: 1604077
uauauccucagaugagccu

SEQ ID NO: 1604079 - RNA, 19 nt, Artificial Sequence
  Description of Artificial Sequence: Synthetic oligonucleotide
  Sense strand starting at position 3390 of SEQ ID NO: 1560496
ucuggagguucugggaaau

SEQ ID NO: 1604080 - RNA, 19 nt, Artificial Sequence
  Description of Artificial Sequence: Synthetic oligonucleotide
  Antisense strand to SEQ ID NO: 1604079
auuucccagaaccuccaga

SEQ ID NO: 1604081 - RNA, 19 nt, Artificial Sequence
  Description of Artificial Sequence: Synthetic oligonucleotide
  Sense strand starting at position 3443 of SEQ ID NO: 1560496
cggguacauucccugcaua

SEQ ID NO: 1604082 - RNA, 19 nt, Artificial Sequence
  Description of Artificial Sequence: Synthetic oligonucleotide
  Antisense strand to SEQ ID NO: 1604081
uaugcagggaauguacccg

SEQ ID NO: 1604083 - RNA, 19 nt, Artificial Sequence
  Description of Artificial Sequence: Synthetic oligonucleotide
  Sense strand starting at position 3446 of SEQ ID NO: 1560496
guacauucccugcauagag

SEQ ID NO: 1604084 - RNA, 19 nt, Artificial Sequence
  Description of Artificial Sequence: Synthetic oligonucleotide
  Antisense strand to SEQ ID NO: 1604083
cucuaugcagggaauguac

SEQ ID NO: 1604085 - RNA, 19 nt, Artificial Sequence
  Description of Artificial Sequence: Synthetic oligonucleotide
  Sense strand starting at position 3476 of SEQ ID NO: 1560496
ggaggaagccauugucacu

SEQ ID NO: 1604086 - RNA, 19 nt, Artificial Sequence
  Description of Artificial Sequence: Synthetic oligonucleotide
  Antisense strand to SEQ ID NO: 1604085
agugacaauggcuuccucc

SEQ ID NO: 1604087 - RNA, 19 nt, Artificial Sequence
  Description of Artificial Sequence: Synthetic oligonucleotide
  Sense strand starting at position 3582 of SEQ ID NO: 1560496
gcaugacucccggaaguca

SEQ ID NO: 1604088 - RNA, 19 nt, Artificial Sequence
  Description of Artificial Sequence: Synthetic oligonucleotide
  Antisense strand to SEQ ID NO: 1604087
ugacuuccgggagucaugc

SEQ ID NO: 1604089 - RNA, 19 nt, Artificial Sequence
  Description of Artificial Sequence: Synthetic oligonucleotide
  Sense strand starting at position 3774 of SEQ ID NO: 1560496
uggauuuagugaugaaauu

SEQ ID NO: 1604090 - RNA, 19 nt, Artificial Sequence
  Description of Artificial Sequence: Synthetic oligonucleotide
  Antisense strand to SEQ ID NO: 1604089
aauuucaucacuaaaucca

SEQ ID NO: 1604091 - RNA, 19 nt, Artificial Sequence
  Description of Artificial Sequence: Synthetic oligonucleotide
  Sense strand starting at position 3949 of SEQ ID NO: 1560496
uccugcaguucugugaaca

SEQ ID NO: 1604092 - RNA, 19 nt, Artificial Sequence
  Description of Artificial Sequence: Synthetic oligonucleotide
  Antisense strand to SEQ ID NO: 1604091
uguucacagaacugcagga

SEQ ID NO: 1604093 - RNA, 19 nt, Artificial Sequence
  Description of Artificial Sequence: Synthetic oligonucleotide
  Sense strand starting at position 3961 of SEQ ID NO: 1560496
gugaacaccuccuguggaa

SEQ ID NO: 1604094 - RNA, 19 nt, Artificial Sequence
  Description of Artificial Sequence: Synthetic oligonucleotide
  Antisense strand to SEQ ID NO: 1604093
uuccacaggagguguucac

SEQ ID NO: 1604095 - RNA, 19 nt, Artificial Sequence
  Description of Artificial Sequence: Synthetic oligonucleotide
  Sense strand starting at position 3963 of SEQ ID NO: 1560496
gaacaccuccuguggaaga

SEQ ID NO: 1604096 - RNA, 19 nt, Artificial Sequence
  Description of Artificial Sequence: Synthetic oligonucleotide
  Antisense strand to SEQ ID NO: 1604095
ucuuccacaggagguguuc

SEQ ID NO: 1604097 - RNA, 19 nt, Artificial Sequence
  Description of Artificial Sequence: Synthetic oligonucleotide
  Sense strand starting at position 23 of SEQ ID NO: 1560497
ucgcuugaggcagggaaau

SEQ ID NO: 1604098 - RNA, 19 nt, Artificial Sequence
  Description of Artificial Sequence: Synthetic oligonucleotide
  Antisense strand to SEQ ID NO: 1604097
auuucccugccucaagcga

SEQ ID NO: 1604099 - RNA, 19 nt, Artificial Sequence
  Description of Artificial Sequence: Synthetic oligonucleotide
  Sense strand starting at position 50 of SEQ ID NO: 1560497
cagugagcuguguaugcuu

SEQ ID NO: 1604100 - RNA, 19 nt, Artificial Sequence
  Description of Artificial Sequence: Synthetic oligonucleotide
  Antisense strand to SEQ ID NO: 1604099
aagcauacacagcucacug

SEQ ID NO: 1604101 - RNA, 19 nt, Artificial Sequence
  Description of Artificial Sequence: Synthetic oligonucleotide
  Sense strand starting at position 326 of SEQ ID NO: 1560497
gagagaaguuaaugaagau

SEQ ID NO: 1604102 - RNA, 19 nt, Artificial Sequence
  Description of Artificial Sequence: Synthetic oligonucleotide
  Antisense strand to SEQ ID NO: 1604101
aucuucauuaacuucucuc

SEQ ID NO: 1604103 - RNA, 19 nt, Artificial Sequence
  Description of Artificial Sequence: Synthetic oligonucleotide
  Sense strand starting at position 348 of SEQ ID NO: 1560497
ggcauaagugaggaagcaa

SEQ ID NO: 1604104 - RNA, 19 nt, Artificial Sequence
  Description of Artificial Sequence: Synthetic oligonucleotide
  Antisense strand to SEQ ID NO: 1604103
uugcuuccucacuuaugcc

SEQ ID NO: 1604105 - RNA, 19 nt, Artificial Sequence
  Description of Artificial Sequence: Synthetic oligonucleotide
  Sense strand starting at position 363 of SEQ ID NO: 1560497
gcaagcaaguaucaagaga

SEQ ID NO: 1604106 - RNA, 19 nt, Artificial Sequence
  Description of Artificial Sequence: Synthetic oligonucleotide
  Antisense strand to SEQ ID NO: 1604105
ucucuugauacuugcuugc

SEQ ID NO: 1604107 - RNA, 19 nt, Artificial Sequence
  Description of Artificial Sequence: Synthetic oligonucleotide
  Sense strand starting at position 371 of SEQ ID NO: 1560497
guaucaagagacugaguca

SEQ ID NO: 1604108 - RNA, 19 nt, Artificial Sequence
  Description of Artificial Sequence: Synthetic oligonucleotide
  Antisense strand to SEQ ID NO: 1604107
ugacucagucucuugauac

SEQ ID NO: 1604109 - RNA, 19 nt, Artificial Sequence
  Description of Artificial Sequence: Synthetic oligonucleotide
  Sense strand starting at position 378 of SEQ ID NO: 1560497
gagacugagucaugcaaug

SEQ ID NO: 1604110 - RNA, 19 nt, Artificial Sequence
  Description of Artificial Sequence: Synthetic oligonucleotide
  Antisense strand to SEQ ID NO: 1604109
cauugcaugacucagucuc

SEQ ID NO: 1604111 - RNA, 19 nt, Artificial Sequence
  Description of Artificial Sequence: Synthetic oligonucleotide
  Sense strand starting at position 383 of SEQ ID NO: 1560497
ugagucaugcaaugggcaa

SEQ ID NO: 1604112 - RNA, 19 nt, Artificial Sequence
  Description of Artificial Sequence: Synthetic oligonucleotide
  Antisense strand to SEQ ID NO: 1604111
uugcccauugcaugacuca

SEQ ID NO: 1604113 - RNA, 19 nt, Artificial Sequence
  Description of Artificial Sequence: Synthetic oligonucleotide
  Sense strand starting at position 490 of SEQ ID NO: 1560497
gaaagucagcaguggauaa

SEQ ID NO: 1604114 - RNA, 19 nt, Artificial Sequence
  Description of Artificial Sequence: Synthetic oligonucleotide
  Antisense strand to SEQ ID NO: 1604113
uuauccacugcugacuuuc

SEQ ID NO: 1604115 - RNA, 19 nt, Artificial Sequence
  Description of Artificial Sequence: Synthetic oligonucleotide
  Sense strand starting at position 756 of SEQ ID NO: 1560497
ggguuucugugccagacuu

SEQ ID NO: 1604116 - RNA, 19 nt, Artificial Sequence
  Description of Artificial Sequence: Synthetic oligonucleotide
  Antisense strand to SEQ ID NO: 1604115
aagucuggcacagaaaccc

SEQ ID NO: 1604117 - RNA, 19 nt, Artificial Sequence
  Description of Artificial Sequence: Synthetic oligonucleotide
  Sense strand starting at position 824 of SEQ ID NO: 1560497
cuugguugucccuggaacu

SEQ ID NO: 1604118 - RNA, 19 nt, Artificial Sequence
  Description of Artificial Sequence: Synthetic oligonucleotide
  Antisense strand to SEQ ID NO: 1604117
aguuccagggacaaccaag

SEQ ID NO: 1604119 - RNA, 19 nt, Artificial Sequence
  Description of Artificial Sequence: Synthetic oligonucleotide
  Sense strand starting at position 873 of SEQ ID NO: 1560497
uccagaaagucugaauuaa

SEQ ID NO: 1604120 - RNA, 19 nt, Artificial Sequence
  Description of Artificial Sequence: Synthetic oligonucleotide
  Antisense strand to SEQ ID NO: 1604119
uuaauucagacuuucugga

SEQ ID NO: 1604121 - RNA, 19 nt, Artificial Sequence
  Description of Artificial Sequence: Synthetic oligonucleotide
  Sense strand starting at position 972 of SEQ ID NO: 1560497
cuaggaaucuccuugacca

SEQ ID NO: 1604122 - RNA, 19 nt, Artificial Sequence
  Description of Artificial Sequence: Synthetic oligonucleotide
  Antisense strand to SEQ ID NO: 1604121
uggucaaggagauuccuag

SEQ ID NO: 1604123 - RNA, 19 nt, Artificial Sequence
  Description of Artificial Sequence: Synthetic oligonucleotide
  Sense strand starting at position 1035 of SEQ ID NO: 1560497
aucuaaccucagugcagaa

SEQ ID NO: 1604124 - RNA, 19 nt, Artificial Sequence
  Description of Artificial Sequence: Synthetic oligonucleotide
  Antisense strand to SEQ ID NO: 1604123
uucugcacugagguuagau

SEQ ID NO: 1604125 - RNA, 19 nt, Artificial Sequence
  Description of Artificial Sequence: Synthetic oligonucleotide
  Sense strand starting at position 1200 of SEQ ID NO: 1560497
ucaaucagagcuugggaau

SEQ ID NO: 1604126 - RNA, 19 nt, Artificial Sequence
  Description of Artificial Sequence: Synthetic oligonucleotide
  Antisense strand to SEQ ID NO: 1604125
auucccaagcucugauuga

SEQ ID NO: 1604127 - RNA, 19 nt, Artificial Sequence
  Description of Artificial Sequence: Synthetic oligonucleotide
  Sense strand starting at position 1368 of SEQ ID NO: 1560497
gggacuaggucuguggaca

SEQ ID NO: 1604128 - RNA, 19 nt, Artificial Sequence
  Description of Artificial Sequence: Synthetic oligonucleotide
  Antisense strand to SEQ ID NO: 1604127
uguccacagaccuaguccc

SEQ ID NO: 1604129 - RNA, 19 nt, Artificial Sequence
  Description of Artificial Sequence: Synthetic oligonucleotide
  Sense strand starting at position 1433 of SEQ ID NO: 1560497
gaccucugucccgagauga

SEQ ID NO: 1604130 - RNA, 19 nt, Artificial Sequence
  Description of Artificial Sequence: Synthetic oligonucleotide
  Antisense strand to SEQ ID NO: 1604129
ucaucucgggacagagguc

SEQ ID NO: 1604131 - RNA, 19 nt, Artificial Sequence
  Description of Artificial Sequence: Synthetic oligonucleotide
  Sense strand starting at position 2266 of SEQ ID NO: 1560497
guugcuuguuggagggaga

SEQ ID NO: 1604132 - RNA, 19 nt, Artificial Sequence
  Description of Artificial Sequence: Synthetic oligonucleotide
  Antisense strand to SEQ ID NO: 1604131
ucucccuccaacaagcaac

SEQ ID NO: 1604133 - RNA, 19 nt, Artificial Sequence
  Description of Artificial Sequence: Synthetic oligonucleotide
  Sense strand starting at position 2279 of SEQ ID NO: 1560497
gggagaggccuuuguuacu

SEQ ID NO: 1604134 - RNA, 19 nt, Artificial Sequence
  Description of Artificial Sequence: Synthetic oligonucleotide
  Antisense strand to SEQ ID NO: 1604133
aguaacaaaggccucuccc

SEQ ID NO: 1604135 - RNA, 19 nt, Artificial Sequence
  Description of Artificial Sequence: Synthetic oligonucleotide
  Sense strand starting at position 2361 of SEQ ID NO: 1560497
cacggagucugggauacuu

SEQ ID NO: 1604136 - RNA, 19 nt, Artificial Sequence
  Description of Artificial Sequence: Synthetic oligonucleotide
  Antisense strand to SEQ ID NO: 1604135
aaguaucccagacuccgug

SEQ ID NO: 1604137 - RNA, 19 nt, Artificial Sequence
  Description of Artificial Sequence: Synthetic oligonucleotide
  Sense strand starting at position 3623 of SEQ ID NO: 1560497
accauaauccaggguuuag

SEQ ID NO: 1604138 - RNA, 19 nt, Artificial Sequence
  Description of Artificial Sequence: Synthetic oligonucleotide
  Antisense strand to SEQ ID NO: 1604137
cuaaacccuggauuauggu

SEQ ID NO: 1604139 - RNA, 19 nt, Artificial Sequence
  Description of Artificial Sequence: Synthetic oligonucleotide
  Sense strand starting at position 3671 of SEQ ID NO: 1560497
cacugacuuggcuguguga

SEQ ID NO: 1604140 - RNA, 19 nt, Artificial Sequence
  Description of Artificial Sequence: Synthetic oligonucleotide
  Antisense strand to SEQ ID NO: 1604139
ucacacagccaagucagug

SEQ ID NO: 1604141 - RNA, 19 nt, Artificial Sequence
  Description of Artificial Sequence: Synthetic oligonucleotide
  Sense strand starting at position 3752 of SEQ ID NO: 1560497
ccuauugcccaagguuauu

SEQ ID NO: 1604142 - RNA, 19 nt, Artificial Sequence
  Description of Artificial Sequence: Synthetic oligonucleotide
  Antisense strand to SEQ ID NO: 1604141
aauaaccuugggcaauagg

SEQ ID NO: 1604143 - RNA, 19 nt, Artificial Sequence
  Description of Artificial Sequence: Synthetic oligonucleotide
  Sense strand starting at position 3757 of SEQ ID NO: 1560497
ugcccaagguuauugagaa

SEQ ID NO: 1604144 - RNA, 19 nt, Artificial Sequence
  Description of Artificial Sequence: Synthetic oligonucleotide
  Antisense strand to SEQ ID NO: 1604143
uucucaauaaccuugggca

SEQ ID NO: 1604145 - RNA, 19 nt, Artificial Sequence
  Description of Artificial Sequence: Synthetic oligonucleotide
  Sense strand starting at position 3758 of SEQ ID NO: 1560497
gcccaagguuauugagaag

SEQ ID NO: 1604146 - RNA, 19 nt, Artificial Sequence
  Description of Artificial Sequence: Synthetic oligonucleotide
  Antisense strand to SEQ ID NO: 1604145
cuucucaauaaccuugggc

SEQ ID NO: 1604147 - RNA, 19 nt, Artificial Sequence
  Description of Artificial Sequence: Synthetic oligonucleotide
  Sense strand starting at position 3861 of SEQ ID NO: 1560497
aucuguuuacuagguguau

SEQ ID NO: 1604148 - RNA, 19 nt, Artificial Sequence
  Description of Artificial Sequence: Synthetic oligonucleotide
  Antisense strand to SEQ ID NO: 1604147
auacaccuaguaaacagau

SEQ ID NO: 1604149 - RNA, 19 nt, Artificial Sequence
  Description of Artificial Sequence: Synthetic oligonucleotide
  Sense strand starting at position 3862 of SEQ ID NO: 1560497
ucuguuuacuagguguauu

SEQ ID NO: 1604150 - RNA, 19 nt, Artificial Sequence
  Description of Artificial Sequence: Synthetic oligonucleotide
  Antisense strand to SEQ ID NO: 1604149
aauacaccuaguaaacaga

SEQ ID NO: 1604151 - RNA, 19 nt, Artificial Sequence
  Description of Artificial Sequence: Synthetic oligonucleotide
  Sense strand starting at position 3865 of SEQ ID NO: 1560497
guuuacuagguguauucca

SEQ ID NO: 1604152 - RNA, 19 nt, Artificial Sequence
  Description of Artificial Sequence: Synthetic oligonucleotide
  Antisense strand to SEQ ID NO: 1604151
uggaauacaccuaguaaac

SEQ ID NO: 1604153 - RNA, 19 nt, Artificial Sequence
  Description of Artificial Sequence: Synthetic oligonucleotide
  Sense strand starting at position 3925 of SEQ ID NO: 1560497
aaucucugagucuacguua

SEQ ID NO: 1604154 - RNA, 19 nt, Artificial Sequence
  Description of Artificial Sequence: Synthetic oligonucleotide
  Antisense strand to SEQ ID NO: 1604153
uaacguagacucagagauu

SEQ ID NO: 1604155 - RNA, 19 nt, Artificial Sequence
  Description of Artificial Sequence: Synthetic oligonucleotide
  Sense strand starting at position 3928 of SEQ ID NO: 1560497
cucugagucuacguuauuu

SEQ ID NO: 1604156 - RNA, 19 nt, Artificial Sequence
  Description of Artificial Sequence: Synthetic oligonucleotide
  Antisense strand to SEQ ID NO: 1604155
aaauaacguagacucagag

SEQ ID NO: 1604157 - RNA, 19 nt, Artificial Sequence
  Description of Artificial Sequence: Synthetic oligonucleotide
  Sense strand starting at position 3933 of SEQ ID NO: 1560497
agucuacguuauuucugua

SEQ ID NO: 1604158 - RNA, 19 nt, Artificial Sequence
  Description of Artificial Sequence: Synthetic oligonucleotide
  Antisense strand to SEQ ID NO: 1604157
uacagaaauaacguagacu

SEQ ID NO: 1604159 - RNA, 19 nt, Artificial Sequence
  Description of Artificial Sequence: Synthetic oligonucleotide
  Sense strand starting at position 3936 of SEQ ID NO: 1560497
cuacguuauuucuguagca

SEQ ID NO: 1604160 - RNA, 19 nt, Artificial Sequence
  Description of Artificial Sequence: Synthetic oligonucleotide
  Antisense strand to SEQ ID NO: 1604159
ugcuacagaaauaacguag

SEQ ID NO: 1604161 - RNA, 19 nt, Artificial Sequence
  Description of Artificial Sequence: Synthetic oligonucleotide
  Sense strand starting at position 3938 of SEQ ID NO: 1560497
acguuauuucuguagcagu

SEQ ID NO: 1604162 - RNA, 19 nt, Artificial Sequence
  Description of Artificial Sequence: Synthetic oligonucleotide
  Antisense strand to SEQ ID NO: 1604161
acugcuacagaaauaacgu

SEQ ID NO: 1604163 - RNA, 19 nt, Artificial Sequence
  Description of Artificial Sequence: Synthetic oligonucleotide
  Sense strand starting at position 685 of SEQ ID NO: 1560498
guguguggucucuggaaag

SEQ ID NO: 1604164 - RNA, 19 nt, Artificial Sequence
  Description of Artificial Sequence: Synthetic oligonucleotide
  Antisense strand to SEQ ID NO: 1604163
cuuuccagagaccacacac

SEQ ID NO: 1604165 - RNA, 19 nt, Artificial Sequence
  Description of Artificial Sequence: Synthetic oligonucleotide
  Sense strand starting at position 688 of SEQ ID NO: 1560498
uguggucucuggaaagugu

SEQ ID NO: 1604166 - RNA, 19 nt, Artificial Sequence
  Description of Artificial Sequence: Synthetic oligonucleotide
  Antisense strand to SEQ ID NO: 1604165
acacuuuccagagaccaca

SEQ ID NO: 1604167 - RNA, 19 nt, Artificial Sequence
  Description of Artificial Sequence: Synthetic oligonucleotide
  Sense strand starting at position 697 of SEQ ID NO: 1560498
uggaaaguguggucuggga

SEQ ID NO: 1604168 - RNA, 19 nt, Artificial Sequence
  Description of Artificial Sequence: Synthetic oligonucleotide
  Antisense strand to SEQ ID NO: 1604167
ucccagaccacacuuucca

SEQ ID NO: 1604169 - RNA, 19 nt, Artificial Sequence
  Description of Artificial Sequence: Synthetic oligonucleotide
  Sense strand starting at position 748 of SEQ ID NO: 1560498
gccacuuccaaguguguga

SEQ ID NO: 1604170 - RNA, 19 nt, Artificial Sequence
  Description of Artificial Sequence: Synthetic oligonucleotide
  Antisense strand to SEQ ID NO: 1604169
ucacacacuuggaaguggc

SEQ ID NO: 1604171 - RNA, 19 nt, Artificial Sequence
  Description of Artificial Sequence: Synthetic oligonucleotide
  Sense strand starting at position 810 of SEQ ID NO: 1560498
cugugaaauagggaucgua

SEQ ID NO: 1604172 - RNA, 19 nt, Artificial Sequence
  Description of Artificial Sequence: Synthetic oligonucleotide
  Antisense strand to SEQ ID NO: 1604171
uacgaucccuauuucacag

SEQ ID NO: 1604173 - RNA, 19 nt, Artificial Sequence
  Description of Artificial Sequence: Synthetic oligonucleotide
  Sense strand starting at position 849 of SEQ ID NO: 1560498
ugugauaagagguaaaugu

SEQ ID NO: 1604174 - RNA, 19 nt, Artificial Sequence
  Description of Artificial Sequence: Synthetic oligonucleotide
  Antisense strand to SEQ ID NO: 1604173
acauuuaccucuuaucaca

SEQ ID NO: 1604175 - RNA, 19 nt, Artificial Sequence
  Description of Artificial Sequence: Synthetic oligonucleotide
  Sense strand starting at position 856 of SEQ ID NO: 1560498
agagguaaauguuacuaua

SEQ ID NO: 1604176 - RNA, 19 nt, Artificial Sequence
  Description of Artificial Sequence: Synthetic oligonucleotide
  Antisense strand to SEQ ID NO: 1604175
uauaguaacauuuaccucu

SEQ ID NO: 1604177 - RNA, 19 nt, Artificial Sequence
  Description of Artificial Sequence: Synthetic oligonucleotide
  Sense strand starting at position 859 of SEQ ID NO: 1560498
gguaaauguuacuauagga

SEQ ID NO: 1604178 - RNA, 19 nt, Artificial Sequence
  Description of Artificial Sequence: Synthetic oligonucleotide
  Antisense strand to SEQ ID NO: 1604177
uccuauaguaacauuuacc

SEQ ID NO: 1604179 - RNA, 19 nt, Artificial Sequence
  Description of Artificial Sequence: Synthetic oligonucleotide
  Sense strand starting at position 1252 of SEQ ID NO: 1560498
uucuauuacggcuguuauu

SEQ ID NO: 1604180 - RNA, 19 nt, Artificial Sequence
  Description of Artificial Sequence: Synthetic oligonucleotide
  Antisense strand to SEQ ID NO: 1604179
aauaacagccguaauagaa

SEQ ID NO: 1604181 - RNA, 19 nt, Artificial Sequence
  Description of Artificial Sequence: Synthetic oligonucleotide
  Sense strand starting at position 1387 of SEQ ID NO: 1560498
uugccagcccugugaucuu

SEQ ID NO: 1604182 - RNA, 19 nt, Artificial Sequence
  Description of Artificial Sequence: Synthetic oligonucleotide
  Antisense strand to SEQ ID NO: 1604181
aagaucacagggcuggcaa

SEQ ID NO: 1604183 - RNA, 19 nt, Artificial Sequence
  Description of Artificial Sequence: Synthetic oligonucleotide
  Sense strand starting at position 1483 of SEQ ID NO: 1560498
cggaguggccuucaagagu

SEQ ID NO: 1604184 - RNA, 19 nt, Artificial Sequence
  Description of Artificial Sequence: Synthetic oligonucleotide
  Antisense strand to SEQ ID NO: 1604183
acucuugaaggccacuccg

SEQ ID NO: 1604185 - RNA, 19 nt, Artificial Sequence
  Description of Artificial Sequence: Synthetic oligonucleotide
  Sense strand starting at position 1498 of SEQ ID NO: 1560498
gaguucucaugaguugggu

SEQ ID NO: 1604186 - RNA, 19 nt, Artificial Sequence
  Description of Artificial Sequence: Synthetic oligonucleotide
  Antisense strand to SEQ ID NO: 1604185
acccaacucaugagaacuc

SEQ ID NO: 1604187 - RNA, 19 nt, Artificial Sequence
  Description of Artificial Sequence: Synthetic oligonucleotide
  Sense strand starting at position 1728 of SEQ ID NO: 1560498
cagagaaggucuccucauc

SEQ ID NO: 1604188 - RNA, 19 nt, Artificial Sequence
  Description of Artificial Sequence: Synthetic oligonucleotide
  Antisense strand to SEQ ID NO: 1604187
gaugaggagaccuucucug

SEQ ID NO: 1604189 - RNA, 19 nt, Artificial Sequence
  Description of Artificial Sequence: Synthetic oligonucleotide
  Sense strand starting at position 2100 of SEQ ID NO: 1560498
ggcuuuggacucugaacca

SEQ ID NO: 1604190 - RNA, 19 nt, Artificial Sequence
  Description of Artificial Sequence: Synthetic oligonucleotide
  Antisense strand to SEQ ID NO: 1604189
ugguucagaguccaaagcc

SEQ ID NO: 1604191 - RNA, 19 nt, Artificial Sequence
  Description of Artificial Sequence: Synthetic oligonucleotide
  Sense strand starting at position 2203 of SEQ ID NO: 1560498
aguagugccuggucacgua

SEQ ID NO: 1604192 - RNA, 19 nt, Artificial Sequence
  Description of Artificial Sequence: Synthetic oligonucleotide
  Antisense strand to SEQ ID NO: 1604191
uacgugaccaggcacuacu

SEQ ID NO: 1604193 - RNA, 19 nt, Artificial Sequence
  Description of Artificial Sequence: Synthetic oligonucleotide
  Sense strand starting at position 2219 of SEQ ID NO: 1560498
guaguaggcgcucaacgaa

SEQ ID NO: 1604194 - RNA, 19 nt, Artificial Sequence
  Description of Artificial Sequence: Synthetic oligonucleotide
  Antisense strand to SEQ ID NO: 1604193
uucguugagcgccuacuac

SEQ ID NO: 1604195 - RNA, 19 nt, Artificial Sequence
  Description of Artificial Sequence: Synthetic oligonucleotide
  Sense strand starting at position 2247 of SEQ ID NO: 1560498
cuaugaagucaaugcuaau

SEQ ID NO: 1604196 - RNA, 19 nt, Artificial Sequence
  Description of Artificial Sequence: Synthetic oligonucleotide
  Antisense strand to SEQ ID NO: 1604195
auuagcauugacuucauag

SEQ ID NO: 1604197 - RNA, 19 nt, Artificial Sequence
  Description of Artificial Sequence: Synthetic oligonucleotide
  Sense strand starting at position 2250 of SEQ ID NO: 1560498
ugaagucaaugcuaauuau

SEQ ID NO: 1604198 - RNA, 19 nt, Artificial Sequence
  Description of Artificial Sequence: Synthetic oligonucleotide
  Antisense strand to SEQ ID NO: 1604197
auaauuagcauugacuuca

SEQ ID NO: 1604199 - RNA, 19 nt, Artificial Sequence
  Description of Artificial Sequence: Synthetic oligonucleotide
  Sense strand starting at position 2264 of SEQ ID NO: 1560498
auuauaauuuggugucuag

SEQ ID NO: 1604200 - RNA, 19 nt, Artificial Sequence
  Description of Artificial Sequence: Synthetic oligonucleotide
  Antisense strand to SEQ ID NO: 1604199
cuagacaccaaauuauaau

SEQ ID NO: 1604201 - RNA, 19 nt, Artificial Sequence
  Description of Artificial Sequence: Synthetic oligonucleotide
  Sense strand starting at position 2279 of SEQ ID NO: 1560498
cuaggauguccuggaggca

SEQ ID NO: 1604202 - RNA, 19 nt, Artificial Sequence
  Description of Artificial Sequence: Synthetic oligonucleotide
  Antisense strand to SEQ ID NO: 1604201
ugccuccaggacauccuag

SEQ ID NO: 1604203 - RNA, 19 nt, Artificial Sequence
  Description of Artificial Sequence: Synthetic oligonucleotide
  Sense strand starting at position 2280 of SEQ ID NO: 1560498
uaggauguccuggaggcau

SEQ ID NO: 1604204 - RNA, 19 nt, Artificial Sequence
  Description of Artificial Sequence: Synthetic oligonucleotide
  Antisense strand to SEQ ID NO: 1604203
augccuccaggacauccua

SEQ ID NO: 1604205 - RNA, 19 nt, Artificial Sequence
  Description of Artificial Sequence: Synthetic oligonucleotide
  Sense strand starting at position 2301 of SEQ ID NO: 1560498
uuagaaucccguuaucagg

SEQ ID NO: 1604206 - RNA, 19 nt, Artificial Sequence
  Description of Artificial Sequence: Synthetic oligonucleotide
  Antisense strand to SEQ ID NO: 1604205
ccugauaacgggauucuaa

SEQ ID NO: 1604207 - RNA, 19 nt, Artificial Sequence
  Description of Artificial Sequence: Synthetic oligonucleotide
  Sense strand starting at position 2315 of SEQ ID NO: 1560498
ucaggagcuugcucagacu

SEQ ID NO: 1604208 - RNA, 19 nt, Artificial Sequence
  Description of Artificial Sequence: Synthetic oligonucleotide
  Antisense strand to SEQ ID NO: 1604207
agucugagcaagcuccuga

SEQ ID NO: 1604209 - RNA, 19 nt, Artificial Sequence
  Description of Artificial Sequence: Synthetic oligonucleotide
  Sense strand starting at position 2445 of SEQ ID NO: 1560498
aaacuaauagcugguguuu

SEQ ID NO: 1604210 - RNA, 19 nt, Artificial Sequence
  Description of Artificial Sequence: Synthetic oligonucleotide
  Antisense strand to SEQ ID NO: 1604209
aaacaccagcuauuaguuu

SEQ ID NO: 1604211 - RNA, 19 nt, Artificial Sequence
  Description of Artificial Sequence: Synthetic oligonucleotide
  Sense strand starting at position 2451 of SEQ ID NO: 1560498
auagcugguguuuauugaa

SEQ ID NO: 1604212 - RNA, 19 nt, Artificial Sequence
  Description of Artificial Sequence: Synthetic oligonucleotide
  Antisense strand to SEQ ID NO: 1604211
uucaauaaacaccagcuau

SEQ ID NO: 1604213 - RNA, 19 nt, Artificial Sequence
  Description of Artificial Sequence: Synthetic oligonucleotide
  Sense strand starting at position 2473 of SEQ ID NO: 1560498
cuacuauaugccggacaca

SEQ ID NO: 1604214 - RNA, 19 nt, Artificial Sequence
  Description of Artificial Sequence: Synthetic oligonucleotide
  Antisense strand to SEQ ID NO: 1604213
uguguccggcauauaguag

SEQ ID NO: 1604215 - RNA, 19 nt, Artificial Sequence
  Description of Artificial Sequence: Synthetic oligonucleotide
  Sense strand starting at position 2492 of SEQ ID NO: 1560498
gcauuaaccuuguaacagg

SEQ ID NO: 1604216 - RNA, 19 nt, Artificial Sequence
  Description of Artificial Sequence: Synthetic oligonucleotide
  Antisense strand to SEQ ID NO: 1604215
ccuguuacaagguuaaugc

SEQ ID NO: 1604217 - RNA, 19 nt, Artificial Sequence
  Description of Artificial Sequence: Synthetic oligonucleotide
  Sense strand starting at position 2503 of SEQ ID NO: 1560498
guaacaggguugccuaauu

SEQ ID NO: 1604218 - RNA, 19 nt, Artificial Sequence
  Description of Artificial Sequence: Synthetic oligonucleotide
  Antisense strand to SEQ ID NO: 1604217
aauuaggcaacccuguuac

SEQ ID NO: 1604219 - RNA, 19 nt, Artificial Sequence
  Description of Artificial Sequence: Synthetic oligonucleotide
  Sense strand starting at position 2712 of SEQ ID NO: 1560498
agcugacuguaucuuauua

SEQ ID NO: 1604220 - RNA, 19 nt, Artificial Sequence
  Description of Artificial Sequence: Synthetic oligonucleotide
  Antisense strand to SEQ ID NO: 1604219
uaauaagauacagucagcu

SEQ ID NO: 1604221 - RNA, 19 nt, Artificial Sequence
  Description of Artificial Sequence: Synthetic oligonucleotide
  Sense strand starting at position 2947 of SEQ ID NO: 1560498
cagggauguugucuggcuu

SEQ ID NO: 1604222 - RNA, 19 nt, Artificial Sequence
  Description of Artificial Sequence: Synthetic oligonucleotide
  Antisense strand to SEQ ID NO: 1604221
aagccagacaacaucccug

SEQ ID NO: 1604223 - RNA, 19 nt, Artificial Sequence
  Description of Artificial Sequence: Synthetic oligonucleotide
  Sense strand starting at position 2966 of SEQ ID NO: 1560498
guggcuaugucccuaguga

SEQ ID NO: 1604224 - RNA, 19 nt, Artificial Sequence
  Description of Artificial Sequence: Synthetic oligonucleotide
  Antisense strand to SEQ ID NO: 1604223
ucacuagggacauagccac

SEQ ID NO: 1604225 - RNA, 19 nt, Artificial Sequence
  Description of Artificial Sequence: Synthetic oligonucleotide
  Sense strand starting at position 2967 of SEQ ID NO: 1560498
uggcuaugucccuagugac

SEQ ID NO: 1604226 - RNA, 19 nt, Artificial Sequence
  Description of Artificial Sequence: Synthetic oligonucleotide
  Antisense strand to SEQ ID NO: 1604225
gucacuagggacauagcca

SEQ ID NO: 1604227 - RNA, 19 nt, Artificial Sequence
  Description of Artificial Sequence: Synthetic oligonucleotide
  Sense strand starting at position 2974 of SEQ ID NO: 1560498
gucccuagugacuagaaca

SEQ ID NO: 1604228 - RNA, 19 nt, Artificial Sequence
  Description of Artificial Sequence: Synthetic oligonucleotide
  Antisense strand to SEQ ID NO: 1604227
uguucuagucacuagggac

SEQ ID NO: 1604229 - RNA, 19 nt, Artificial Sequence
  Description of Artificial Sequence: Synthetic oligonucleotide
  Sense strand starting at position 3152 of SEQ ID NO: 1560498
ggacuacagucucacacua

SEQ ID NO: 1604230 - RNA, 19 nt, Artificial Sequence
  Description of Artificial Sequence: Synthetic oligonucleotide
  Antisense strand to SEQ ID NO: 1604229
uagugugagacuguagucc

SEQ ID NO: 1604231 - RNA, 19 nt, Artificial Sequence
  Description of Artificial Sequence: Synthetic oligonucleotide
  Sense strand starting at position 3366 of SEQ ID NO: 1560498
gugaaaugggaguguucag

SEQ ID NO: 1604232 - RNA, 19 nt, Artificial Sequence
  Description of Artificial Sequence: Synthetic oligonucleotide
  Antisense strand to SEQ ID NO: 1604231
cugaacacucccauuucac

SEQ ID NO: 1604233 - RNA, 19 nt, Artificial Sequence
  Description of Artificial Sequence: Synthetic oligonucleotide
  Sense strand starting at position 3393 of SEQ ID NO: 1560498
ucagaucuuucugacuuag

SEQ ID NO: 1604234 - RNA, 19 nt, Artificial Sequence
  Description of Artificial Sequence: Synthetic oligonucleotide
  Antisense strand to SEQ ID NO: 1604233
cuaagucagaaagaucuga

SEQ ID NO: 1604235 - RNA, 19 nt, Artificial Sequence
  Description of Artificial Sequence: Synthetic oligonucleotide
  Sense strand starting at position 3485 of SEQ ID NO: 1560498
aauagucauuaucagguga

SEQ ID NO: 1604236 - RNA, 19 nt, Artificial Sequence
  Description of Artificial Sequence: Synthetic oligonucleotide
  Antisense strand to SEQ ID NO: 1604235
ucaccugauaaugacuauu

SEQ ID NO: 1604237 - RNA, 19 nt, Artificial Sequence
  Description of Artificial Sequence: Synthetic oligonucleotide
  Sense strand starting at position 3573 of SEQ ID NO: 1560498
gugauuagcuaggucagga

SEQ ID NO: 1604238 - RNA, 19 nt, Artificial Sequence
  Description of Artificial Sequence: Synthetic oligonucleotide
  Antisense strand to SEQ ID NO: 1604237
uccugaccuagcuaaucac

SEQ ID NO: 1604239 - RNA, 19 nt, Artificial Sequence
  Description of Artificial Sequence: Synthetic oligonucleotide
  Sense strand starting at position 3608 of SEQ ID NO: 1560498
aguaaauauuuacgaugca

SEQ ID NO: 1604240 - RNA, 19 nt, Artificial Sequence
  Description of Artificial Sequence: Synthetic oligonucleotide
  Antisense strand to SEQ ID NO: 1604239
ugcaucguaaauauuuacu

SEQ ID NO: 1604241 - RNA, 19 nt, Artificial Sequence
  Description of Artificial Sequence: Synthetic oligonucleotide
  Sense strand starting at position 3843 of SEQ ID NO: 1560498
agcaaucucuuacggauuu

SEQ ID NO: 1604242 - RNA, 19 nt, Artificial Sequence
  Description of Artificial Sequence: Synthetic oligonucleotide
  Antisense strand to SEQ ID NO: 1604241
aaauccguaagagauugcu

SEQ ID NO: 1604243 - RNA, 19 nt, Artificial Sequence
  Description of Artificial Sequence: Synthetic oligonucleotide
  Sense strand starting at position 2596 of SEQ ID NO: 1560499
ggagagguucugggaguca

SEQ ID NO: 1604244 - RNA, 19 nt, Artificial Sequence
  Description of Artificial Sequence: Synthetic oligonucleotide
  Antisense strand to SEQ ID NO: 1604243
ugacucccagaaccucucc

SEQ ID NO: 1604245 - RNA, 19 nt, Artificial Sequence
  Description of Artificial Sequence: Synthetic oligonucleotide
  Sense strand starting at position 2945 of SEQ ID NO: 1560499
gugcaauggcgcgaucaau

SEQ ID NO: 1604246 - RNA, 19 nt, Artificial Sequence
  Description of Artificial Sequence: Synthetic oligonucleotide
  Antisense strand to SEQ ID NO: 1604245
auugaucgcgccauugcac

SEQ ID NO: 1604247 - RNA, 19 nt, Artificial Sequence
  Description of Artificial Sequence: Synthetic oligonucleotide
  Sense strand starting at position 3597 of SEQ ID NO: 1560499
gcaagaccuccaugugcga

SEQ ID NO: 1604248 - RNA, 19 nt, Artificial Sequence
  Description of Artificial Sequence: Synthetic oligonucleotide
  Antisense strand to SEQ ID NO: 1604247
ucgcacauggaggucuugc

SEQ ID NO: 1604249 - RNA, 19 nt, Artificial Sequence
  Description of Artificial Sequence: Synthetic oligonucleotide
  Sense strand starting at position 3726 of SEQ ID NO: 1560499
caaagucagugcugaccau

SEQ ID NO: 1604250 - RNA, 19 nt, Artificial Sequence
  Description of Artificial Sequence: Synthetic oligonucleotide
  Antisense strand to SEQ ID NO: 1604249
auggucagcacugacuuug

SEQ ID NO: 1604251 - RNA, 19 nt, Artificial Sequence
  Description of Artificial Sequence: Synthetic oligonucleotide
  Sense strand starting at position 3795 of SEQ ID NO: 1560499
agaugucgccuucgagaga

SEQ ID NO: 1604252 - RNA, 19 nt, Artificial Sequence
  Description of Artificial Sequence: Synthetic oligonucleotide
  Antisense strand to SEQ ID NO: 1604251
ucucucgaaggcgacaucu

SEQ ID NO: 1604253 - RNA, 19 nt, Artificial Sequence
  Description of Artificial Sequence: Synthetic oligonucleotide
  Sense strand starting at position 85 of SEQ ID NO: 1560500
cagucugcuagguguggaa

SEQ ID NO: 1604254 - RNA, 19 nt, Artificial Sequence
  Description of Artificial Sequence: Synthetic oligonucleotide
  Antisense strand to SEQ ID NO: 1604253
uuccacaccuagcagacug

SEQ ID NO: 1604255 - RNA, 19 nt, Artificial Sequence
  Description of Artificial Sequence: Synthetic oligonucleotide
  Sense strand starting at position 401 of SEQ ID NO: 1560500
ugccacuaucuccaggaua

SEQ ID NO: 1604256 - RNA, 19 nt, Artificial Sequence
  Description of Artificial Sequence: Synthetic oligonucleotide
  Antisense strand to SEQ ID NO: 1604255
uauccuggagauaguggca

SEQ ID NO: 1604257 - RNA, 19 nt, Artificial Sequence
  Description of Artificial Sequence: Synthetic oligonucleotide
  Sense strand starting at position 861 of SEQ ID NO: 1560500
cucccauagugcuggauuu

SEQ ID NO: 1604258 - RNA, 19 nt, Artificial Sequence
  Description of Artificial Sequence: Synthetic oligonucleotide
  Antisense strand to SEQ ID NO: 1604257
aaauccagcacuaugggag

SEQ ID NO: 1604259 - RNA, 19 nt, Artificial Sequence
  Description of Artificial Sequence: Synthetic oligonucleotide
  Sense strand starting at position 895 of SEQ ID NO: 1560500
cgugcagggccugagauua

SEQ ID NO: 1604260 - RNA, 19 nt, Artificial Sequence
  Description of Artificial Sequence: Synthetic oligonucleotide
  Antisense strand to SEQ ID NO: 1604259
uaaucucaggcccugcacg

SEQ ID NO: 1604261 - RNA, 19 nt, Artificial Sequence
  Description of Artificial Sequence: Synthetic oligonucleotide
  Sense strand starting at position 1032 of SEQ ID NO: 1560500
gcgagacgcugucucugua

SEQ ID NO: 1604262 - RNA, 19 nt, Artificial Sequence
  Description of Artificial Sequence: Synthetic oligonucleotide
  Antisense strand to SEQ ID NO: 1604261
uacagagacagcgucucgc

SEQ ID NO: 1604263 - RNA, 19 nt, Artificial Sequence
  Description of Artificial Sequence: Synthetic oligonucleotide
  Sense strand starting at position 1158 of SEQ ID NO: 1560500
ugcaaugaguuaugauuag

SEQ ID NO: 1604264 - RNA, 19 nt, Artificial Sequence
  Description of Artificial Sequence: Synthetic oligonucleotide
  Antisense strand to SEQ ID NO: 1604263
cuaaucauaacucauugca

SEQ ID NO: 1604265 - RNA, 19 nt, Artificial Sequence
  Description of Artificial Sequence: Synthetic oligonucleotide
  Sense strand starting at position 1162 of SEQ ID NO: 1560500
augaguuaugauuaggcca

SEQ ID NO: 1604266 - RNA, 19 nt, Artificial Sequence
  Description of Artificial Sequence: Synthetic oligonucleotide
  Antisense strand to SEQ ID NO: 1604265
uggccuaaucauaacucau

SEQ ID NO: 1604267 - RNA, 19 nt, Artificial Sequence
  Description of Artificial Sequence: Synthetic oligonucleotide
  Sense strand starting at position 1164 of SEQ ID NO: 1560500
gaguuaugauuaggccacu

SEQ ID NO: 1604268 - RNA, 19 nt, Artificial Sequence
  Description of Artificial Sequence: Synthetic oligonucleotide
  Antisense strand to SEQ ID NO: 1604267
aguggccuaaucauaacuc

SEQ ID NO: 1604269 - RNA, 19 nt, Artificial Sequence
  Description of Artificial Sequence: Synthetic oligonucleotide
  Sense strand starting at position 1421 of SEQ ID NO: 1560500
augucuaucuauuguaaac

SEQ ID NO: 1604270 - RNA, 19 nt, Artificial Sequence
  Description of Artificial Sequence: Synthetic oligonucleotide
  Antisense strand to SEQ ID NO: 1604269
guuuacaauagauagacau

SEQ ID NO: 1604271 - RNA, 19 nt, Artificial Sequence
  Description of Artificial Sequence: Synthetic oligonucleotide
  Sense strand starting at position 1423 of SEQ ID NO: 1560500
gucuaucuauuguaaacua

SEQ ID NO: 1604272 - RNA, 19 nt, Artificial Sequence
  Description of Artificial Sequence: Synthetic oligonucleotide
  Antisense strand to SEQ ID NO: 1604271
uaguuuacaauagauagac

SEQ ID NO: 1604273 - RNA, 19 nt, Artificial Sequence
  Description of Artificial Sequence: Synthetic oligonucleotide
  Sense strand starting at position 1462 of SEQ ID NO: 1560500
auguauaccuauuagauac

SEQ ID NO: 1604274 - RNA, 19 nt, Artificial Sequence
  Description of Artificial Sequence: Synthetic oligonucleotide
  Antisense strand to SEQ ID NO: 1604273
guaucuaauagguauacau

SEQ ID NO: 1604275 - RNA, 19 nt, Artificial Sequence
  Description of Artificial Sequence: Synthetic oligonucleotide
  Sense strand starting at position 1464 of SEQ ID NO: 1560500
guauaccuauuagauacau

SEQ ID NO: 1604276 - RNA, 19 nt, Artificial Sequence
  Description of Artificial Sequence: Synthetic oligonucleotide
  Antisense strand to SEQ ID NO: 1604275
auguaucuaauagguauac

SEQ ID NO: 1604277 - RNA, 19 nt, Artificial Sequence
  Description of Artificial Sequence: Synthetic oligonucleotide
  Sense strand starting at position 1578 of SEQ ID NO: 1560500
gaggaaagaugucuaaguu

SEQ ID NO: 1604278 - RNA, 19 nt, Artificial Sequence
  Description of Artificial Sequence: Synthetic oligonucleotide
  Antisense strand to SEQ ID NO: 1604277
aacuuagacaucuuuccuc

SEQ ID NO: 1604279 - RNA, 19 nt, Artificial Sequence
  Description of Artificial Sequence: Synthetic oligonucleotide
  Sense strand starting at position 1582 of SEQ ID NO: 1560500
aaagaugucuaaguucgau

SEQ ID NO: 1604280 - RNA, 19 nt, Artificial Sequence
  Description of Artificial Sequence: Synthetic oligonucleotide
  Antisense strand to SEQ ID NO: 1604279
aucgaacuuagacaucuuu

SEQ ID NO: 1604281 - RNA, 19 nt, Artificial Sequence
  Description of Artificial Sequence: Synthetic oligonucleotide
  Sense strand starting at position 2055 of SEQ ID NO: 1560500
gagcaagucugacuuugga

SEQ ID NO: 1604282 - RNA, 19 nt, Artificial Sequence
  Description of Artificial Sequence: Synthetic oligonucleotide
  Antisense strand to SEQ ID NO: 1604281
uccaaagucagacuugcuc

SEQ ID NO: 1604283 - RNA, 19 nt, Artificial Sequence
  Description of Artificial Sequence: Synthetic oligonucleotide
  Sense strand starting at position 2059 of SEQ ID NO: 1560500
aagucugacuuuggagcaa

SEQ ID NO: 1604284 - RNA, 19 nt, Artificial Sequence
  Description of Artificial Sequence: Synthetic oligonucleotide
  Antisense strand to SEQ ID NO: 1604283
uugcuccaaagucagacuu

SEQ ID NO: 1604285 - RNA, 19 nt, Artificial Sequence
  Description of Artificial Sequence: Synthetic oligonucleotide
  Sense strand starting at position 2071 of SEQ ID NO: 1560500
ggagcaagucaggguucua

SEQ ID NO: 1604286 - RNA, 19 nt, Artificial Sequence
  Description of Artificial Sequence: Synthetic oligonucleotide
  Antisense strand to SEQ ID NO: 1604285
uagaacccugacuugcucc

SEQ ID NO: 1604287 - RNA, 19 nt, Artificial Sequence
  Description of Artificial Sequence: Synthetic oligonucleotide
  Sense strand starting at position 2830 of SEQ ID NO: 1560500
uucugaaucugagacucaa

SEQ ID NO: 1604288 - RNA, 19 nt, Artificial Sequence
  Description of Artificial Sequence: Synthetic oligonucleotide
  Antisense strand to SEQ ID NO: 1604287
uugagucucagauucagaa

SEQ ID NO: 1604289 - RNA, 19 nt, Artificial Sequence
  Description of Artificial Sequence: Synthetic oligonucleotide
  Sense strand starting at position 2859 of SEQ ID NO: 1560500
agggcaguguucuuggaug

SEQ ID NO: 1604290 - RNA, 19 nt, Artificial Sequence
  Description of Artificial Sequence: Synthetic oligonucleotide
  Antisense strand to SEQ ID NO: 1604289
cauccaagaacacugcccu

SEQ ID NO: 1604291 - RNA, 19 nt, Artificial Sequence
  Description of Artificial Sequence: Synthetic oligonucleotide
  Sense strand starting at position 2864 of SEQ ID NO: 1560500
aguguucuuggauggccua

SEQ ID NO: 1604292 - RNA, 19 nt, Artificial Sequence
  Description of Artificial Sequence: Synthetic oligonucleotide
  Antisense strand to SEQ ID NO: 1604291
uaggccauccaagaacacu

SEQ ID NO: 1604293 - RNA, 19 nt, Artificial Sequence
  Description of Artificial Sequence: Synthetic oligonucleotide
  Sense strand starting at position 2867 of SEQ ID NO: 1560500
guucuuggauggccuaauu

SEQ ID NO: 1604294 - RNA, 19 nt, Artificial Sequence
  Description of Artificial Sequence: Synthetic oligonucleotide
  Antisense strand to SEQ ID NO: 1604293
aauuaggccauccaagaac

SEQ ID NO: 1604295 - RNA, 19 nt, Artificial Sequence
  Description of Artificial Sequence: Synthetic oligonucleotide
  Sense strand starting at position 3619 of SEQ ID NO: 1560500
uuucuuagccucugaguau

SEQ ID NO: 1604296 - RNA, 19 nt, Artificial Sequence
  Description of Artificial Sequence: Synthetic oligonucleotide
  Antisense strand to SEQ ID NO: 1604295
auacucagaggcuaagaaa

SEQ ID NO: 1604297 - RNA, 19 nt, Artificial Sequence
  Description of Artificial Sequence: Synthetic oligonucleotide
  Sense strand starting at position 3667 of SEQ ID NO: 1560500
cggcaaagccucuaaaugu

SEQ ID NO: 1604298 - RNA, 19 nt, Artificial Sequence
  Description of Artificial Sequence: Synthetic oligonucleotide
  Antisense strand to SEQ ID NO: 1604297
acauuuagaggcuuugccg

SEQ ID NO: 1604299 - RNA, 19 nt, Artificial Sequence
  Description of Artificial Sequence: Synthetic oligonucleotide
  Sense strand starting at position 3676 of SEQ ID NO: 1560500
cucuaaaugucaguggaga

SEQ ID NO: 1604300 - RNA, 19 nt, Artificial Sequence
  Description of Artificial Sequence: Synthetic oligonucleotide
  Antisense strand to SEQ ID NO: 1604299
ucuccacugacauuuagag

SEQ ID NO: 1604301 - RNA, 19 nt, Artificial Sequence
  Description of Artificial Sequence: Synthetic oligonucleotide
  Sense strand starting at position 3677 of SEQ ID NO: 1560500
ucuaaaugucaguggagaa

SEQ ID NO: 1604302 - RNA, 19 nt, Artificial Sequence
  Description of Artificial Sequence: Synthetic oligonucleotide
  Antisense strand to SEQ ID NO: 1604301
uucuccacugacauuuaga

SEQ ID NO: 1604303 - RNA, 19 nt, Artificial Sequence
  Description of Artificial Sequence: Synthetic oligonucleotide
  Sense strand starting at position 3678 of SEQ ID NO: 1560500
cuaaaugucaguggagaag

SEQ ID NO: 1604304 - RNA, 19 nt, Artificial Sequence
  Description of Artificial Sequence: Synthetic oligonucleotide
  Antisense strand to SEQ ID NO: 1604303
cuucuccacugacauuuag

SEQ ID NO: 1604305 - RNA, 19 nt, Artificial Sequence
  Description of Artificial Sequence: Synthetic oligonucleotide
  Sense strand starting at position 3689 of SEQ ID NO: 1560500
uggagaagcucugauccaa

SEQ ID NO: 1604306 - RNA, 19 nt, Artificial Sequence
  Description of Artificial Sequence: Synthetic oligonucleotide
  Antisense strand to SEQ ID NO: 1604305
uuggaucagagcuucucca

SEQ ID NO: 1604307 - RNA, 19 nt, Artificial Sequence
  Description of Artificial Sequence: Synthetic oligonucleotide
  Sense strand starting at position 243 of SEQ ID NO: 1560501
uauuucucuugauggcuga

SEQ ID NO: 1604308 - RNA, 19 nt, Artificial Sequence
  Description of Artificial Sequence: Synthetic oligonucleotide
  Antisense strand to SEQ ID NO: 1604307
ucagccaucaagagaaaua

SEQ ID NO: 1604309 - RNA, 19 nt, Artificial Sequence
  Description of Artificial Sequence: Synthetic oligonucleotide
  Sense strand starting at position 247 of SEQ ID NO: 1560501
ucucuugauggcugaguuu

SEQ ID NO: 1604310 - RNA, 19 nt, Artificial Sequence
  Description of Artificial Sequence: Synthetic oligonucleotide
  Antisense strand to SEQ ID NO: 1604309
aaacucagccaucaagaga

SEQ ID NO: 1604311 - RNA, 19 nt, Artificial Sequence
  Description of Artificial Sequence: Synthetic oligonucleotide
  Sense strand starting at position 323 of SEQ ID NO: 1560501
acccguucugcugugugua

SEQ ID NO: 1604312 - RNA, 19 nt, Artificial Sequence
  Description of Artificial Sequence: Synthetic oligonucleotide
  Antisense strand to SEQ ID NO: 1604311
uacacacagcagaacgggu

SEQ ID NO: 1604313 - RNA, 19 nt, Artificial Sequence
  Description of Artificial Sequence: Synthetic oligonucleotide
  Sense strand starting at position 689 of SEQ ID NO: 1560501
ugggcauauugauuaaccu

SEQ ID NO: 1604314 - RNA, 19 nt, Artificial Sequence
  Description of Artificial Sequence: Synthetic oligonucleotide
  Antisense strand to SEQ ID NO: 1604313
agguuaaucaauaugccca

SEQ ID NO: 1604315 - RNA, 19 nt, Artificial Sequence
  Description of Artificial Sequence: Synthetic oligonucleotide
  Sense strand starting at position 745 of SEQ ID NO: 1560501
gaacgaugcugccuuacuu

SEQ ID NO: 1604316 - RNA, 19 nt, Artificial Sequence
  Description of Artificial Sequence: Synthetic oligonucleotide
  Antisense strand to SEQ ID NO: 1604315
aaguaaggcagcaucguuc

SEQ ID NO: 1604317 - RNA, 19 nt, Artificial Sequence
  Description of Artificial Sequence: Synthetic oligonucleotide
  Sense strand starting at position 754 of SEQ ID NO: 1560501
ugccuuacuucugagagga

SEQ ID NO: 1604318 - RNA, 19 nt, Artificial Sequence
  Description of Artificial Sequence: Synthetic oligonucleotide
  Antisense strand to SEQ ID NO: 1604317
uccucucagaaguaaggca

SEQ ID NO: 1604319 - RNA, 19 nt, Artificial Sequence
  Description of Artificial Sequence: Synthetic oligonucleotide
  Sense strand starting at position 756 of SEQ ID NO: 1560501
ccuuacuucugagaggauu

SEQ ID NO: 1604320 - RNA, 19 nt, Artificial Sequence
  Description of Artificial Sequence: Synthetic oligonucleotide
  Antisense strand to SEQ ID NO: 1604319
aauccucucagaaguaagg

SEQ ID NO: 1604321 - RNA, 19 nt, Artificial Sequence
  Description of Artificial Sequence: Synthetic oligonucleotide
  Sense strand starting at position 1322 of SEQ ID NO: 1560501
cagagagcucaccauaugu

SEQ ID NO: 1604322 - RNA, 19 nt, Artificial Sequence
  Description of Artificial Sequence: Synthetic oligonucleotide
  Antisense strand to SEQ ID NO: 1604321
acauauggugagcucucug

SEQ ID NO: 1604323 - RNA, 19 nt, Artificial Sequence
  Description of Artificial Sequence: Synthetic oligonucleotide
  Sense strand starting at position 1353 of SEQ ID NO: 1560501
uaguccuauuacuagcgau

SEQ ID NO: 1604324 - RNA, 19 nt, Artificial Sequence
  Description of Artificial Sequence: Synthetic oligonucleotide
  Antisense strand to SEQ ID NO: 1604323
aucgcuaguaauaggacua

SEQ ID NO: 1604325 - RNA, 19 nt, Artificial Sequence
  Description of Artificial Sequence: Synthetic oligonucleotide
  Sense strand starting at position 1356 of SEQ ID NO: 1560501
uccuauuacuagcgaugua

SEQ ID NO: 1604326 - RNA, 19 nt, Artificial Sequence
  Description of Artificial Sequence: Synthetic oligonucleotide
  Antisense strand to SEQ ID NO: 1604325
uacaucgcuaguaauagga

SEQ ID NO: 1604327 - RNA, 19 nt, Artificial Sequence
  Description of Artificial Sequence: Synthetic oligonucleotide
  Sense strand starting at position 1359 of SEQ ID NO: 1560501
uauuacuagcgauguauua

SEQ ID NO: 1604328 - RNA, 19 nt, Artificial Sequence
  Description of Artificial Sequence: Synthetic oligonucleotide
  Antisense strand to SEQ ID NO: 1604327
uaauacaucgcuaguaaua

SEQ ID NO: 1604329 - RNA, 19 nt, Artificial Sequence
  Description of Artificial Sequence: Synthetic oligonucleotide
  Sense strand starting at position 1477 of SEQ ID NO: 1560501
ggcgcccauuugucagaau

SEQ ID NO: 1604330 - RNA, 19 nt, Artificial Sequence
  Description of Artificial Sequence: Synthetic oligonucleotide
  Antisense strand to SEQ ID NO: 1604329
auucugacaaaugggcgcc

SEQ ID NO: 1604331 - RNA, 19 nt, Artificial Sequence
  Description of Artificial Sequence: Synthetic oligonucleotide
  Sense strand starting at position 1478 of SEQ ID NO: 1560501
gcgcccauuugucagaaua

SEQ ID NO: 1604332 - RNA, 19 nt, Artificial Sequence
  Description of Artificial Sequence: Synthetic oligonucleotide
  Antisense strand to SEQ ID NO: 1604331
uauucugacaaaugggcgc

SEQ ID NO: 1604333 - RNA, 19 nt, Artificial Sequence
  Description of Artificial Sequence: Synthetic oligonucleotide
  Sense strand starting at position 1480 of SEQ ID NO: 1560501
gcccauuugucagaauaag

SEQ ID NO: 1604334 - RNA, 19 nt, Artificial Sequence
  Description of Artificial Sequence: Synthetic oligonucleotide
  Antisense strand to SEQ ID NO: 1604333
cuuauucugacaaaugggc

SEQ ID NO: 1604335 - RNA, 19 nt, Artificial Sequence
  Description of Artificial Sequence: Synthetic oligonucleotide
  Sense strand starting at position 1682 of SEQ ID NO: 1560501
cugaguuuauguuuaggag

SEQ ID NO: 1604336 - RNA, 19 nt, Artificial Sequence
  Description of Artificial Sequence: Synthetic oligonucleotide
  Antisense strand to SEQ ID NO: 1604335
cuccuaaacauaaacucag

SEQ ID NO: 1604337 - RNA, 19 nt, Artificial Sequence
  Description of Artificial Sequence: Synthetic oligonucleotide
  Sense strand starting at position 1738 of SEQ ID NO: 1560501
acagcagaagccuaaguuu

SEQ ID NO: 1604338 - RNA, 19 nt, Artificial Sequence
  Description of Artificial Sequence: Synthetic oligonucleotide
  Antisense strand to SEQ ID NO: 1604337
aaacuuaggcuucugcugu

SEQ ID NO: 1604339 - RNA, 19 nt, Artificial Sequence
  Description of Artificial Sequence: Synthetic oligonucleotide
  Sense strand starting at position 1741 of SEQ ID NO: 1560501
gcagaagccuaaguuugaa

SEQ ID NO: 1604340 - RNA, 19 nt, Artificial Sequence
  Description of Artificial Sequence: Synthetic oligonucleotide
  Antisense strand to SEQ ID NO: 1604339
uucaaacuuaggcuucugc

SEQ ID NO: 1604341 - RNA, 19 nt, Artificial Sequence
  Description of Artificial Sequence: Synthetic oligonucleotide
  Sense strand starting at position 1889 of SEQ ID NO: 1560501
uuaagaagccaccaaguuu

SEQ ID NO: 1604342 - RNA, 19 nt, Artificial Sequence
  Description of Artificial Sequence: Synthetic oligonucleotide
  Antisense strand to SEQ ID NO: 1604341
aaacuugguggcuucuuaa

SEQ ID NO: 1604343 - RNA, 19 nt, Artificial Sequence
  Description of Artificial Sequence: Synthetic oligonucleotide
  Sense strand starting at position 1931 of SEQ ID NO: 1560501
gcacuuacccaacgaacau

SEQ ID NO: 1604344 - RNA, 19 nt, Artificial Sequence
  Description of Artificial Sequence: Synthetic oligonucleotide
  Antisense strand to SEQ ID NO: 1604343
auguucguuggguaagugc

SEQ ID NO: 1604345 - RNA, 19 nt, Artificial Sequence
  Description of Artificial Sequence: Synthetic oligonucleotide
  Sense strand starting at position 2078 of SEQ ID NO: 1560501
agugaucaguugugauaag

SEQ ID NO: 1604346 - RNA, 19 nt, Artificial Sequence
  Description of Artificial Sequence: Synthetic oligonucleotide
  Antisense strand to SEQ ID NO: 1604345
cuuaucacaacugaucacu

SEQ ID NO: 1604347 - RNA, 19 nt, Artificial Sequence
  Description of Artificial Sequence: Synthetic oligonucleotide
  Sense strand starting at position 2085 of SEQ ID NO: 1560501
aguugugauaagggacuca

SEQ ID NO: 1604348 - RNA, 19 nt, Artificial Sequence
  Description of Artificial Sequence: Synthetic oligonucleotide
  Antisense strand to SEQ ID NO: 1604347
ugagucccuuaucacaacu

SEQ ID NO: 1604349 - RNA, 19 nt, Artificial Sequence
  Description of Artificial Sequence: Synthetic oligonucleotide
  Sense strand starting at position 2193 of SEQ ID NO: 1560501
ggcgguauuuagggaaaug

SEQ ID NO: 1604350 - RNA, 19 nt, Artificial Sequence
  Description of Artificial Sequence: Synthetic oligonucleotide
  Antisense strand to SEQ ID NO: 1604349
cauuucccuaaauaccgcc

SEQ ID NO: 1604351 - RNA, 19 nt, Artificial Sequence
  Description of Artificial Sequence: Synthetic oligonucleotide
  Sense strand starting at position 2698 of SEQ ID NO: 1560501
aacauuuccugaugguaag

SEQ ID NO: 1604352 - RNA, 19 nt, Artificial Sequence
  Description of Artificial Sequence: Synthetic oligonucleotide
  Antisense strand to SEQ ID NO: 1604351
cuuaccaucaggaaauguu

SEQ ID NO: 1604353 - RNA, 19 nt, Artificial Sequence
  Description of Artificial Sequence: Synthetic oligonucleotide
  Sense strand starting at position 2704 of SEQ ID NO: 1560501
uccugaugguaaguucuau

SEQ ID NO: 1604354 - RNA, 19 nt, Artificial Sequence
  Description of Artificial Sequence: Synthetic oligonucleotide
  Antisense strand to SEQ ID NO: 1604353
auagaacuuaccaucagga

SEQ ID NO: 1604355 - RNA, 19 nt, Artificial Sequence
  Description of Artificial Sequence: Synthetic oligonucleotide
  Sense strand starting at position 2708 of SEQ ID NO: 1560501
gaugguaaguucuauguua

SEQ ID NO: 1604356 - RNA, 19 nt, Artificial Sequence
  Description of Artificial Sequence: Synthetic oligonucleotide
  Antisense strand to SEQ ID NO: 1604355
uaacauagaacuuaccauc

SEQ ID NO: 1604357 - RNA, 19 nt, Artificial Sequence
  Description of Artificial Sequence: Synthetic oligonucleotide
  Sense strand starting at position 2710 of SEQ ID NO: 1560501
ugguaaguucuauguuaca

SEQ ID NO: 1604358 - RNA, 19 nt, Artificial Sequence
  Description of Artificial Sequence: Synthetic oligonucleotide
  Antisense strand to SEQ ID NO: 1604357
uguaacauagaacuuacca

SEQ ID NO: 1604359 - RNA, 19 nt, Artificial Sequence
  Description of Artificial Sequence: Synthetic oligonucleotide
  Sense strand starting at position 2954 of SEQ ID NO: 1560501
agccuuucuuaccuguuua

SEQ ID NO: 1604360 - RNA, 19 nt, Artificial Sequence
  Description of Artificial Sequence: Synthetic oligonucleotide
  Antisense strand to SEQ ID NO: 1604359
uaaacagguaagaaaggcu

SEQ ID NO: 1604361 - RNA, 19 nt, Artificial Sequence
  Description of Artificial Sequence: Synthetic oligonucleotide
  Sense strand starting at position 2958 of SEQ ID NO: 1560501
uuucuuaccuguuuauaug

SEQ ID NO: 1604362 - RNA, 19 nt, Artificial Sequence
  Description of Artificial Sequence: Synthetic oligonucleotide
  Antisense strand to SEQ ID NO: 1604361
cauauaaacagguaagaaa

SEQ ID NO: 1604363 - RNA, 19 nt, Artificial Sequence
  Description of Artificial Sequence: Synthetic oligonucleotide
  Sense strand starting at position 3014 of SEQ ID NO: 1560501
ggcugauggccaggacuua

SEQ ID NO: 1604364 - RNA, 19 nt, Artificial Sequence
  Description of Artificial Sequence: Synthetic oligonucleotide
  Antisense strand to SEQ ID NO: 1604363
uaaguccuggccaucagcc

SEQ ID NO: 1604365 - RNA, 19 nt, Artificial Sequence
  Description of Artificial Sequence: Synthetic oligonucleotide
  Sense strand starting at position 3015 of SEQ ID NO: 1560501
gcugauggccaggacuuaa

SEQ ID NO: 1604366 - RNA, 19 nt, Artificial Sequence
  Description of Artificial Sequence: Synthetic oligonucleotide
  Antisense strand to SEQ ID NO: 1604365
uuaaguccuggccaucagc

SEQ ID NO: 1604367 - RNA, 19 nt, Artificial Sequence
  Description of Artificial Sequence: Synthetic oligonucleotide
  Sense strand starting at position 3795 of SEQ ID NO: 1560501
gcccgaguggucagugcua

SEQ ID NO: 1604368 - RNA, 19 nt, Artificial Sequence
  Description of Artificial Sequence: Synthetic oligonucleotide
  Antisense strand to SEQ ID NO: 1604367
uagcacugaccacucgggc

SEQ ID NO: 1604369 - RNA, 19 nt, Artificial Sequence
  Description of Artificial Sequence: Synthetic oligonucleotide
  Sense strand starting at position 3797 of SEQ ID NO: 1560501
ccgaguggucagugcuauu

SEQ ID NO: 1604370 - RNA, 19 nt, Artificial Sequence
  Description of Artificial Sequence: Synthetic oligonucleotide
  Antisense strand to SEQ ID NO: 1604369
aauagcacugaccacucgg

SEQ ID NO: 1604371 - RNA, 19 nt, Artificial Sequence
  Description of Artificial Sequence: Synthetic oligonucleotide
  Sense strand starting at position 3800 of SEQ ID NO: 1560501
aguggucagugcuauuauu

SEQ ID NO: 1604372 - RNA, 19 nt, Artificial Sequence
  Description of Artificial Sequence: Synthetic oligonucleotide
  Antisense strand to SEQ ID NO: 1604371
aauaauagcacugaccacu

SEQ ID NO: 1604373 - RNA, 19 nt, Artificial Sequence
  Description of Artificial Sequence: Synthetic oligonucleotide
  Sense strand starting at position 3956 of SEQ ID NO: 1560501
ccuuguuaaugguccagga

SEQ ID NO: 1604374 - RNA, 19 nt, Artificial Sequence
  Description of Artificial Sequence: Synthetic oligonucleotide
  Antisense strand to SEQ ID NO: 1604373
uccuggaccauuaacaagg

SEQ ID NO: 1604375 - RNA, 19 nt, Artificial Sequence
  Description of Artificial Sequence: Synthetic oligonucleotide
  Sense strand starting at position 742 of SEQ ID NO: 1560502
cucuccuggcccuaugauu

SEQ ID NO: 1604376 - RNA, 19 nt, Artificial Sequence
  Description of Artificial Sequence: Synthetic oligonucleotide
  Antisense strand to SEQ ID NO: 1604375
aaucauagggccaggagag

SEQ ID NO: 1604377 - RNA, 19 nt, Artificial Sequence
  Description of Artificial Sequence: Synthetic oligonucleotide
  Sense strand starting at position 748 of SEQ ID NO: 1560502
uggcccuaugauugcuauu

SEQ ID NO: 1604378 - RNA, 19 nt, Artificial Sequence
  Description of Artificial Sequence: Synthetic oligonucleotide
  Antisense strand to SEQ ID NO: 1604377
aauagcaaucauagggcca

SEQ ID NO: 1604379 - RNA, 19 nt, Artificial Sequence
  Description of Artificial Sequence: Synthetic oligonucleotide
  Sense strand starting at position 750 of SEQ ID NO: 1560502
gcccuaugauugcuauuua

SEQ ID NO: 1604380 - RNA, 19 nt, Artificial Sequence
  Description of Artificial Sequence: Synthetic oligonucleotide
  Antisense strand to SEQ ID NO: 1604379
uaaauagcaaucauagggc

SEQ ID NO: 1604381 - RNA, 19 nt, Artificial Sequence
  Description of Artificial Sequence: Synthetic oligonucleotide
  Sense strand starting at position 1146 of SEQ ID NO: 1560502
gcuugacuccuggaaccuu

SEQ ID NO: 1604382 - RNA, 19 nt, Artificial Sequence
  Description of Artificial Sequence: Synthetic oligonucleotide
  Antisense strand to SEQ ID NO: 1604381
aagguuccaggagucaagc

SEQ ID NO: 1604383 - RNA, 19 nt, Artificial Sequence
  Description of Artificial Sequence: Synthetic oligonucleotide
  Sense strand starting at position 1367 of SEQ ID NO: 1560502
gucagagggucucaggaaa

SEQ ID NO: 1604384 - RNA, 19 nt, Artificial Sequence
  Description of Artificial Sequence: Synthetic oligonucleotide
  Antisense strand to SEQ ID NO: 1604383
uuuccugagacccucugac

SEQ ID NO: 1604385 - RNA, 19 nt, Artificial Sequence
  Description of Artificial Sequence: Synthetic oligonucleotide
  Sense strand starting at position 1688 of SEQ ID NO: 1560502
cguggcuuauccuggagca

SEQ ID NO: 1604386 - RNA, 19 nt, Artificial Sequence
  Description of Artificial Sequence: Synthetic oligonucleotide
  Antisense strand to SEQ ID NO: 1604385
ugcuccaggauaagccacg

SEQ ID NO: 1604387 - RNA, 19 nt, Artificial Sequence
  Description of Artificial Sequence: Synthetic oligonucleotide
  Sense strand starting at position 1690 of SEQ ID NO: 1560502
uggcuuauccuggagcacu

SEQ ID NO: 1604388 - RNA, 19 nt, Artificial Sequence
  Description of Artificial Sequence: Synthetic oligonucleotide
  Antisense strand to SEQ ID NO: 1604387
agugcuccaggauaagcca

SEQ ID NO: 1604389 - RNA, 19 nt, Artificial Sequence
  Description of Artificial Sequence: Synthetic oligonucleotide
  Sense strand starting at position 2186 of SEQ ID NO: 1560502
cugccaaagucuucgaauu

SEQ ID NO: 1604390 - RNA, 19 nt, Artificial Sequence
  Description of Artificial Sequence: Synthetic oligonucleotide
  Antisense strand to SEQ ID NO: 1604389
aauucgaagacuuuggcag

SEQ ID NO: 1604391 - RNA, 19 nt, Artificial Sequence
  Description of Artificial Sequence: Synthetic oligonucleotide
  Sense strand starting at position 2187 of SEQ ID NO: 1560502
ugccaaagucuucgaauuu

SEQ ID NO: 1604392 - RNA, 19 nt, Artificial Sequence
  Description of Artificial Sequence: Synthetic oligonucleotide
  Antisense strand to SEQ ID NO: 1604391
aaauucgaagacuuuggca

SEQ ID NO: 1604393 - RNA, 19 nt, Artificial Sequence
  Description of Artificial Sequence: Synthetic oligonucleotide
  Sense strand starting at position 2211 of SEQ ID NO: 1560502
auuggaguuugggaagauu

SEQ ID NO: 1604394 - RNA, 19 nt, Artificial Sequence
  Description of Artificial Sequence: Synthetic oligonucleotide
  Antisense strand to SEQ ID NO: 1604393
aaucuucccaaacuccaau

SEQ ID NO: 1604395 - RNA, 19 nt, Artificial Sequence
  Description of Artificial Sequence: Synthetic oligonucleotide
  Sense strand starting at position 2595 of SEQ ID NO: 1560502
ucaugauaggcuggucaaa

SEQ ID NO: 1604396 - RNA, 19 nt, Artificial Sequence
  Description of Artificial Sequence: Synthetic oligonucleotide
  Antisense strand to SEQ ID NO: 1604395
uuugaccagccuaucauga

SEQ ID NO: 1604397 - RNA, 19 nt, Artificial Sequence
  Description of Artificial Sequence: Synthetic oligonucleotide
  Sense strand starting at position 2625 of SEQ ID NO: 1560502
gauagguggugucgggaga

SEQ ID NO: 1604398 - RNA, 19 nt, Artificial Sequence
  Description of Artificial Sequence: Synthetic oligonucleotide
  Antisense strand to SEQ ID NO: 1604397
ucucccgacaccaccuauc

SEQ ID NO: 1604399 - RNA, 19 nt, Artificial Sequence
  Description of Artificial Sequence: Synthetic oligonucleotide
  Sense strand starting at position 2663 of SEQ ID NO: 1560502
gccucugugacuuguagau

SEQ ID NO: 1604400 - RNA, 19 nt, Artificial Sequence
  Description of Artificial Sequence: Synthetic oligonucleotide
  Antisense strand to SEQ ID NO: 1604399
aucuacaagucacagaggc

SEQ ID NO: 1604401 - RNA, 19 nt, Artificial Sequence
  Description of Artificial Sequence: Synthetic oligonucleotide
  Sense strand starting at position 2665 of SEQ ID NO: 1560502
cucugugacuuguagauga

SEQ ID NO: 1604402 - RNA, 19 nt, Artificial Sequence
  Description of Artificial Sequence: Synthetic oligonucleotide
  Antisense strand to SEQ ID NO: 1604401
ucaucuacaagucacagag

SEQ ID NO: 1604403 - RNA, 19 nt, Artificial Sequence
  Description of Artificial Sequence: Synthetic oligonucleotide
  Sense strand starting at position 2667 of SEQ ID NO: 1560502
cugugacuuguagaugaau

SEQ ID NO: 1604404 - RNA, 19 nt, Artificial Sequence
  Description of Artificial Sequence: Synthetic oligonucleotide
  Antisense strand to SEQ ID NO: 1604403
auucaucuacaagucacag

SEQ ID NO: 1604405 - RNA, 19 nt, Artificial Sequence
  Description of Artificial Sequence: Synthetic oligonucleotide
  Sense strand starting at position 2669 of SEQ ID NO: 1560502
gugacuuguagaugaauga

SEQ ID NO: 1604406 - RNA, 19 nt, Artificial Sequence
  Description of Artificial Sequence: Synthetic oligonucleotide
  Antisense strand to SEQ ID NO: 1604405
ucauucaucuacaagucac

SEQ ID NO: 1604407 - RNA, 19 nt, Artificial Sequence
  Description of Artificial Sequence: Synthetic oligonucleotide
  Sense strand starting at position 2692 of SEQ ID NO: 1560502
augugugaggcucgaaaga

SEQ ID NO: 1604408 - RNA, 19 nt, Artificial Sequence
  Description of Artificial Sequence: Synthetic oligonucleotide
  Antisense strand to SEQ ID NO: 1604407
ucuuucgagccucacacau

SEQ ID NO: 1604409 - RNA, 19 nt, Artificial Sequence
  Description of Artificial Sequence: Synthetic oligonucleotide
  Sense strand starting at position 2694 of SEQ ID NO: 1560502
gugugaggcucgaaagaca

SEQ ID NO: 1604410 - RNA, 19 nt, Artificial Sequence
  Description of Artificial Sequence: Synthetic oligonucleotide
  Antisense strand to SEQ ID NO: 1604409
ugucuuucgagccucacac

SEQ ID NO: 1604411 - RNA, 19 nt, Artificial Sequence
  Description of Artificial Sequence: Synthetic oligonucleotide
  Sense strand starting at position 3042 of SEQ ID NO: 1560502
ugaacagaguuagugauca

SEQ ID NO: 1604412 - RNA, 19 nt, Artificial Sequence
  Description of Artificial Sequence: Synthetic oligonucleotide
  Antisense strand to SEQ ID NO: 1604411
ugaucacuaacucuguuca

SEQ ID NO: 1604413 - RNA, 19 nt, Artificial Sequence
  Description of Artificial Sequence: Synthetic oligonucleotide
  Sense strand starting at position 3100 of SEQ ID NO: 1560502
ccagucuagcucugaucuu

SEQ ID NO: 1604414 - RNA, 19 nt, Artificial Sequence
  Description of Artificial Sequence: Synthetic oligonucleotide
  Antisense strand to SEQ ID NO: 1604413
aagaucagagcuagacugg

SEQ ID NO: 1604415 - RNA, 19 nt, Artificial Sequence
  Description of Artificial Sequence: Synthetic oligonucleotide
  Sense strand starting at position 3106 of SEQ ID NO: 1560502
uagcucugaucuugugaca

SEQ ID NO: 1604416 - RNA, 19 nt, Artificial Sequence
  Description of Artificial Sequence: Synthetic oligonucleotide
  Antisense strand to SEQ ID NO: 1604415
ugucacaagaucagagcua

SEQ ID NO: 1604417 - RNA, 19 nt, Artificial Sequence
  Description of Artificial Sequence: Synthetic oligonucleotide
  Sense strand starting at position 3109 of SEQ ID NO: 1560502
cucugaucuugugacaaca

SEQ ID NO: 1604418 - RNA, 19 nt, Artificial Sequence
  Description of Artificial Sequence: Synthetic oligonucleotide
  Antisense strand to SEQ ID NO: 1604417
uguugucacaagaucagag

SEQ ID NO: 1604419 - RNA, 19 nt, Artificial Sequence
  Description of Artificial Sequence: Synthetic oligonucleotide
  Sense strand starting at position 3111 of SEQ ID NO: 1560502
cugaucuugugacaacagu

SEQ ID NO: 1604420 - RNA, 19 nt, Artificial Sequence
  Description of Artificial Sequence: Synthetic oligonucleotide
  Antisense strand to SEQ ID NO: 1604419
acuguugucacaagaucag

SEQ ID NO: 1604421 - RNA, 19 nt, Artificial Sequence
  Description of Artificial Sequence: Synthetic oligonucleotide
  Sense strand starting at position 3120 of SEQ ID NO: 1560502
ugacaacagucauagacau

SEQ ID NO: 1604422 - RNA, 19 nt, Artificial Sequence
  Description of Artificial Sequence: Synthetic oligonucleotide
  Antisense strand to SEQ ID NO: 1604421
augucuaugacuguuguca

SEQ ID NO: 1604423 - RNA, 19 nt, Artificial Sequence
  Description of Artificial Sequence: Synthetic oligonucleotide
  Sense strand starting at position 3187 of SEQ ID NO: 1560502
gccagaguaggugggauua

SEQ ID NO: 1604424 - RNA, 19 nt, Artificial Sequence
  Description of Artificial Sequence: Synthetic oligonucleotide
  Antisense strand to SEQ ID NO: 1604423
uaaucccaccuacucuggc

SEQ ID NO: 1604425 - RNA, 19 nt, Artificial Sequence
  Description of Artificial Sequence: Synthetic oligonucleotide
  Sense strand starting at position 3393 of SEQ ID NO: 1560502
aauugaggaccugguacau

SEQ ID NO: 1604426 - RNA, 19 nt, Artificial Sequence
  Description of Artificial Sequence: Synthetic oligonucleotide
  Antisense strand to SEQ ID NO: 1604425
auguaccagguccucaauu

SEQ ID NO: 1604427 - RNA, 19 nt, Artificial Sequence
  Description of Artificial Sequence: Synthetic oligonucleotide
  Sense strand starting at position 3444 of SEQ ID NO: 1560502
cuucucuaaucgugagcaa

SEQ ID NO: 1604428 - RNA, 19 nt, Artificial Sequence
  Description of Artificial Sequence: Synthetic oligonucleotide
  Antisense strand to SEQ ID NO: 1604427
uugcucacgauuagagaag

SEQ ID NO: 1604429 - RNA, 19 nt, Artificial Sequence
  Description of Artificial Sequence: Synthetic oligonucleotide
  Sense strand starting at position 3445 of SEQ ID NO: 1560502
uucucuaaucgugagcaag

SEQ ID NO: 1604430 - RNA, 19 nt, Artificial Sequence
  Description of Artificial Sequence: Synthetic oligonucleotide
  Antisense strand to SEQ ID NO: 1604429
cuugcucacgauuagagaa

SEQ ID NO: 1604431 - RNA, 19 nt, Artificial Sequence
  Description of Artificial Sequence: Synthetic oligonucleotide
  Sense strand starting at position 3447 of SEQ ID NO: 1560502
cucuaaucgugagcaagua

SEQ ID NO: 1604432 - RNA, 19 nt, Artificial Sequence
  Description of Artificial Sequence: Synthetic oligonucleotide
  Antisense strand to SEQ ID NO: 1604431
uacuugcucacgauuagag

SEQ ID NO: 1604433 - RNA, 19 nt, Artificial Sequence
  Description of Artificial Sequence: Synthetic oligonucleotide
  Sense strand starting at position 3448 of SEQ ID NO: 1560502
ucuaaucgugagcaaguaa

SEQ ID NO: 1604434 - RNA, 19 nt, Artificial Sequence
  Description of Artificial Sequence: Synthetic oligonucleotide
  Antisense strand to SEQ ID NO: 1604433
uuacuugcucacgauuaga

SEQ ID NO: 1604435 - RNA, 19 nt, Artificial Sequence
  Description of Artificial Sequence: Synthetic oligonucleotide
  Sense strand starting at position 3750 of SEQ ID NO: 1560502
guuagacauguuggcacaa

SEQ ID NO: 1604436 - RNA, 19 nt, Artificial Sequence
  Description of Artificial Sequence: Synthetic oligonucleotide
  Antisense strand to SEQ ID NO: 1604435
uugugccaacaugucuaac

SEQ ID NO: 1604437 - RNA, 19 nt, Artificial Sequence
  Description of Artificial Sequence: Synthetic oligonucleotide
  Sense strand starting at position 3942 of SEQ ID NO: 1560502
ucacuuacuuugugucaaa

SEQ ID NO: 1604438 - RNA, 19 nt, Artificial Sequence
  Description of Artificial Sequence: Synthetic oligonucleotide
  Antisense strand to SEQ ID NO: 1604437
uuugacacaaaguaaguga

SEQ ID NO: 1604439 - RNA, 19 nt, Artificial Sequence
  Description of Artificial Sequence: Synthetic oligonucleotide
  Sense strand starting at position 3945 of SEQ ID NO: 1560502
cuuacuuugugucaaacaa

SEQ ID NO: 1604440 - RNA, 19 nt, Artificial Sequence
  Description of Artificial Sequence: Synthetic oligonucleotide
  Antisense strand to SEQ ID NO: 1604439
uuguuugacacaaaguaag

SEQ ID NO: 1604441 - RNA, 19 nt, Artificial Sequence
  Description of Artificial Sequence: Synthetic oligonucleotide
  Sense strand starting at position 66 of SEQ ID NO: 1560503
caguaagugcucuaaggga

SEQ ID NO: 1604442 - RNA, 19 nt, Artificial Sequence
  Description of Artificial Sequence: Synthetic oligonucleotide
  Antisense strand to SEQ ID NO: 1604441
ucccuuagagcacuuacug

SEQ ID NO: 1604443 - RNA, 19 nt, Artificial Sequence
  Description of Artificial Sequence: Synthetic oligonucleotide
  Sense strand starting at position 145 of SEQ ID NO: 1560503
uuguguguaccgcucagua

SEQ ID NO: 1604444 - RNA, 19 nt, Artificial Sequence
  Description of Artificial Sequence: Synthetic oligonucleotide
  Antisense strand to SEQ ID NO: 1604443
uacugagcgguacacacaa

SEQ ID NO: 1604445 - RNA, 19 nt, Artificial Sequence
  Description of Artificial Sequence: Synthetic oligonucleotide
  Sense strand starting at position 248 of SEQ ID NO: 1560503
uccugauguggaugggaca

SEQ ID NO: 1604446 - RNA, 19 nt, Artificial Sequence
  Description of Artificial Sequence: Synthetic oligonucleotide
  Antisense strand to SEQ ID NO: 1604445
ugucccauccacaucagga

SEQ ID NO: 1604447 - RNA, 19 nt, Artificial Sequence
  Description of Artificial Sequence: Synthetic oligonucleotide
  Sense strand starting at position 347 of SEQ ID NO: 1560503
auggcuacccugugacuaa

SEQ ID NO: 1604448 - RNA, 19 nt, Artificial Sequence
  Description of Artificial Sequence: Synthetic oligonucleotide
  Antisense strand to SEQ ID NO: 1604447
uuagucacaggguagccau

SEQ ID NO: 1604449 - RNA, 19 nt, Artificial Sequence
  Description of Artificial Sequence: Synthetic oligonucleotide
  Sense strand starting at position 392 of SEQ ID NO: 1560503
gcaggguugggagauaguu

SEQ ID NO: 1604450 - RNA, 19 nt, Artificial Sequence
  Description of Artificial Sequence: Synthetic oligonucleotide
  Antisense strand to SEQ ID NO: 1604449
aacuaucucccaacccugc

SEQ ID NO: 1604451 - RNA, 19 nt, Artificial Sequence
  Description of Artificial Sequence: Synthetic oligonucleotide
  Sense strand starting at position 400 of SEQ ID NO: 1560503
gggagauaguuccuaucca

SEQ ID NO: 1604452 - RNA, 19 nt, Artificial Sequence
  Description of Artificial Sequence: Synthetic oligonucleotide
  Antisense strand to SEQ ID NO: 1604451
uggauaggaacuaucuccc

SEQ ID NO: 1604453 - RNA, 19 nt, Artificial Sequence
  Description of Artificial Sequence: Synthetic oligonucleotide
  Sense strand starting at position 401 of SEQ ID NO: 1560503
ggagauaguuccuauccag

SEQ ID NO: 1604454 - RNA, 19 nt, Artificial Sequence
  Description of Artificial Sequence: Synthetic oligonucleotide
  Antisense strand to SEQ ID NO: 1604453
cuggauaggaacuaucucc

SEQ ID NO: 1604455 - RNA, 19 nt, Artificial Sequence
  Description of Artificial Sequence: Synthetic oligonucleotide
  Sense strand starting at position 630 of SEQ ID NO: 1560503
ggcucuuacaagugguaag

SEQ ID NO: 1604456 - RNA, 19 nt, Artificial Sequence
  Description of Artificial Sequence: Synthetic oligonucleotide
  Antisense strand to SEQ ID NO: 1604455
cuuaccacuuguaagagcc

SEQ ID NO: 1604457 - RNA, 19 nt, Artificial Sequence
  Description of Artificial Sequence: Synthetic oligonucleotide
  Sense strand starting at position 633 of SEQ ID NO: 1560503
ucuuacaagugguaaggaa

SEQ ID NO: 1604458 - RNA, 19 nt, Artificial Sequence
  Description of Artificial Sequence: Synthetic oligonucleotide
  Antisense strand to SEQ ID NO: 1604457
uuccuuaccacuuguaaga

SEQ ID NO: 1604459 - RNA, 19 nt, Artificial Sequence
  Description of Artificial Sequence: Synthetic oligonucleotide
  Sense strand starting at position 1001 of SEQ ID NO: 1560503
acaggaauguaugaguuga

SEQ ID NO: 1604460 - RNA, 19 nt, Artificial Sequence
  Description of Artificial Sequence: Synthetic oligonucleotide
  Antisense strand to SEQ ID NO: 1604459
ucaacucauacauuccugu

SEQ ID NO: 1604461 - RNA, 19 nt, Artificial Sequence
  Description of Artificial Sequence: Synthetic oligonucleotide
  Sense strand starting at position 1005 of SEQ ID NO: 1560503
gaauguaugaguugagcuc

SEQ ID NO: 1604462 - RNA, 19 nt, Artificial Sequence
  Description of Artificial Sequence: Synthetic oligonucleotide
  Antisense strand to SEQ ID NO: 1604461
gagcucaacucauacauuc

SEQ ID NO: 1604463 - RNA, 19 nt, Artificial Sequence
  Description of Artificial Sequence: Synthetic oligonucleotide
  Sense strand starting at position 1012 of SEQ ID NO: 1560503
ugaguugagcucugugcau

SEQ ID NO: 1604464 - RNA, 19 nt, Artificial Sequence
  Description of Artificial Sequence: Synthetic oligonucleotide
  Antisense strand to SEQ ID NO: 1604463
augcacagagcucaacuca

SEQ ID NO: 1604465 - RNA, 19 nt, Artificial Sequence
  Description of Artificial Sequence: Synthetic oligonucleotide
  Sense strand starting at position 1014 of SEQ ID NO: 1560503
aguugagcucugugcauaa

SEQ ID NO: 1604466 - RNA, 19 nt, Artificial Sequence
  Description of Artificial Sequence: Synthetic oligonucleotide
  Antisense strand to SEQ ID NO: 1604465
uuaugcacagagcucaacu

SEQ ID NO: 1604467 - RNA, 19 nt, Artificial Sequence
  Description of Artificial Sequence: Synthetic oligonucleotide
  Sense strand starting at position 1025 of SEQ ID NO: 1560503
gugcauaaggcuugccaga

SEQ ID NO: 1604468 - RNA, 19 nt, Artificial Sequence
  Description of Artificial Sequence: Synthetic oligonucleotide
  Antisense strand to SEQ ID NO: 1604467
ucuggcaagccuuaugcac

SEQ ID NO: 1604469 - RNA, 19 nt, Artificial Sequence
  Description of Artificial Sequence: Synthetic oligonucleotide
  Sense strand starting at position 1027 of SEQ ID NO: 1560503
gcauaaggcuugccagaca

SEQ ID NO: 1604470 - RNA, 19 nt, Artificial Sequence
  Description of Artificial Sequence: Synthetic oligonucleotide
  Antisense strand to SEQ ID NO: 1604469
ugucuggcaagccuuaugc

SEQ ID NO: 1604471 - RNA, 19 nt, Artificial Sequence
  Description of Artificial Sequence: Synthetic oligonucleotide
  Sense strand starting at position 1035 of SEQ ID NO: 1560503
cuugccagacaucgucuua

SEQ ID NO: 1604472 - RNA, 19 nt, Artificial Sequence
  Description of Artificial Sequence: Synthetic oligonucleotide
  Antisense strand to SEQ ID NO: 1604471
uaagacgaugucuggcaag

SEQ ID NO: 1604473 - RNA, 19 nt, Artificial Sequence
  Description of Artificial Sequence: Synthetic oligonucleotide
  Sense strand starting at position 1040 of SEQ ID NO: 1560503
cagacaucgucuuauuuga

SEQ ID NO: 1604474 - RNA, 19 nt, Artificial Sequence
  Description of Artificial Sequence: Synthetic oligonucleotide
  Antisense strand to SEQ ID NO: 1604473
ucaaauaagacgaugucug

SEQ ID NO: 1604475 - RNA, 19 nt, Artificial Sequence
  Description of Artificial Sequence: Synthetic oligonucleotide
  Sense strand starting at position 1042 of SEQ ID NO: 1560503
gacaucgucuuauuugagu

SEQ ID NO: 1604476 - RNA, 19 nt, Artificial Sequence
  Description of Artificial Sequence: Synthetic oligonucleotide
  Antisense strand to SEQ ID NO: 1604475
acucaaauaagacgauguc

SEQ ID NO: 1604477 - RNA, 19 nt, Artificial Sequence
  Description of Artificial Sequence: Synthetic oligonucleotide
  Sense strand starting at position 1047 of SEQ ID NO: 1560503
cgucuuauuugagucucau

SEQ ID NO: 1604478 - RNA, 19 nt, Artificial Sequence
  Description of Artificial Sequence: Synthetic oligonucleotide
  Antisense strand to SEQ ID NO: 1604477
augagacucaaauaagacg

SEQ ID NO: 1604479 - RNA, 19 nt, Artificial Sequence
  Description of Artificial Sequence: Synthetic oligonucleotide
  Sense strand starting at position 1129 of SEQ ID NO: 1560503
aguuauuugcccgaggcca

SEQ ID NO: 1604480 - RNA, 19 nt, Artificial Sequence
  Description of Artificial Sequence: Synthetic oligonucleotide
  Antisense strand to SEQ ID NO: 1604479
uggccucgggcaaauaacu

SEQ ID NO: 1604481 - RNA, 19 nt, Artificial Sequence
  Description of Artificial Sequence: Synthetic oligonucleotide
  Sense strand starting at position 1157 of SEQ ID NO: 1560503
gucuguauuugggagagug

SEQ ID NO: 1604482 - RNA, 19 nt, Artificial Sequence
  Description of Artificial Sequence: Synthetic oligonucleotide
  Antisense strand to SEQ ID NO: 1604481
cacucucccaaauacagac

SEQ ID NO: 1604483 - RNA, 19 nt, Artificial Sequence
  Description of Artificial Sequence: Synthetic oligonucleotide
  Sense strand starting at position 1851 of SEQ ID NO: 1560503
gcagccauggagugaguaa

SEQ ID NO: 1604484 - RNA, 19 nt, Artificial Sequence
  Description of Artificial Sequence: Synthetic oligonucleotide
  Antisense strand to SEQ ID NO: 1604483
uuacucacuccauggcugc

SEQ ID NO: 1604485 - RNA, 19 nt, Artificial Sequence
  Description of Artificial Sequence: Synthetic oligonucleotide
  Sense strand starting at position 1863 of SEQ ID NO: 1560503
ugaguaaccgcuuaccucu

SEQ ID NO: 1604486 - RNA, 19 nt, Artificial Sequence
  Description of Artificial Sequence: Synthetic oligonucleotide
  Antisense strand to SEQ ID NO: 1604485
agagguaagcgguuacuca

SEQ ID NO: 1604487 - RNA, 19 nt, Artificial Sequence
  Description of Artificial Sequence: Synthetic oligonucleotide
  Sense strand starting at position 2042 of SEQ ID NO: 1560503
gugggagaguucuagacuc

SEQ ID NO: 1604488 - RNA, 19 nt, Artificial Sequence
  Description of Artificial Sequence: Synthetic oligonucleotide
  Antisense strand to SEQ ID NO: 1604487
gagucuagaacucucccac

SEQ ID NO: 1604489 - RNA, 19 nt, Artificial Sequence
  Description of Artificial Sequence: Synthetic oligonucleotide
  Sense strand starting at position 2048 of SEQ ID NO: 1560503
gaguucuagacucgauguu

SEQ ID NO: 1604490 - RNA, 19 nt, Artificial Sequence
  Description of Artificial Sequence: Synthetic oligonucleotide
  Antisense strand to SEQ ID NO: 1604489
aacaucgagucuagaacuc

SEQ ID NO: 1604491 - RNA, 19 nt, Artificial Sequence
  Description of Artificial Sequence: Synthetic oligonucleotide
  Sense strand starting at position 2049 of SEQ ID NO: 1560503
aguucuagacucgauguuu

SEQ ID NO: 1604492 - RNA, 19 nt, Artificial Sequence
  Description of Artificial Sequence: Synthetic oligonucleotide
  Antisense strand to SEQ ID NO: 1604491
aaacaucgagucuagaacu

SEQ ID NO: 1604493 - RNA, 19 nt, Artificial Sequence
  Description of Artificial Sequence: Synthetic oligonucleotide
  Sense strand starting at position 2131 of SEQ ID NO: 1560503
cgauucuucgugcuugguu

SEQ ID NO: 1604494 - RNA, 19 nt, Artificial Sequence
  Description of Artificial Sequence: Synthetic oligonucleotide
  Antisense strand to SEQ ID NO: 1604493
aaccaagcacgaagaaucg

SEQ ID NO: 1604495 - RNA, 19 nt, Artificial Sequence
  Description of Artificial Sequence: Synthetic oligonucleotide
  Sense strand starting at position 2444 of SEQ ID NO: 1560503
cuuagauugacagggcaga

SEQ ID NO: 1604496 - RNA, 19 nt, Artificial Sequence
  Description of Artificial Sequence: Synthetic oligonucleotide
  Antisense strand to SEQ ID NO: 1604495
ucugcccugucaaucuaag

SEQ ID NO: 1604497 - RNA, 19 nt, Artificial Sequence
  Description of Artificial Sequence: Synthetic oligonucleotide
  Sense strand starting at position 2503 of SEQ ID NO: 1560503
gaaccacugucgucacgau

SEQ ID NO: 1604498 - RNA, 19 nt, Artificial Sequence
  Description of Artificial Sequence: Synthetic oligonucleotide
  Antisense strand to SEQ ID NO: 1604497
aucgugacgacagugguuc

SEQ ID NO: 1604499 - RNA, 19 nt, Artificial Sequence
  Description of Artificial Sequence: Synthetic oligonucleotide
  Sense strand starting at position 2559 of SEQ ID NO: 1560503
ggcuaaaccaaccguuagu

SEQ ID NO: 1604500 - RNA, 19 nt, Artificial Sequence
  Description of Artificial Sequence: Synthetic oligonucleotide
  Antisense strand to SEQ ID NO: 1604499
acuaacgguugguuuagcc

SEQ ID NO: 1604501 - RNA, 19 nt, Artificial Sequence
  Description of Artificial Sequence: Synthetic oligonucleotide
  Sense strand starting at position 2903 of SEQ ID NO: 1560503
cugggagaccuuuagguuu

SEQ ID NO: 1604502 - RNA, 19 nt, Artificial Sequence
  Description of Artificial Sequence: Synthetic oligonucleotide
  Antisense strand to SEQ ID NO: 1604501
aaaccuaaaggucucccag

SEQ ID NO: 1604503 - RNA, 19 nt, Artificial Sequence
  Description of Artificial Sequence: Synthetic oligonucleotide
  Sense strand starting at position 2975 of SEQ ID NO: 1560503
aagaaauucccuugggagu

SEQ ID NO: 1604504 - RNA, 19 nt, Artificial Sequence
  Description of Artificial Sequence: Synthetic oligonucleotide
  Antisense strand to SEQ ID NO: 1604503
acucccaagggaauuucuu

SEQ ID NO: 1604505 - RNA, 19 nt, Artificial Sequence
  Description of Artificial Sequence: Synthetic oligonucleotide
  Sense strand starting at position 3002 of SEQ ID NO: 1560503
cucagagauuuggguaaag

SEQ ID NO: 1604506 - RNA, 19 nt, Artificial Sequence
  Description of Artificial Sequence: Synthetic oligonucleotide
  Antisense strand to SEQ ID NO: 1604505
cuuuacccaaaucucugag

SEQ ID NO: 1604507 - RNA, 19 nt, Artificial Sequence
  Description of Artificial Sequence: Synthetic oligonucleotide
  Sense strand starting at position 3050 of SEQ ID NO: 1560503
gaggcuuaguguucuaaac

SEQ ID NO: 1604508 - RNA, 19 nt, Artificial Sequence
  Description of Artificial Sequence: Synthetic oligonucleotide
  Antisense strand to SEQ ID NO: 1604507
guuuagaacacuaagccuc

SEQ ID NO: 1604509 - RNA, 19 nt, Artificial Sequence
  Description of Artificial Sequence: Synthetic oligonucleotide
  Sense strand starting at position 3692 of SEQ ID NO: 1560503
auuaaaugagaguguauug

SEQ ID NO: 1604510 - RNA, 19 nt, Artificial Sequence
  Description of Artificial Sequence: Synthetic oligonucleotide
  Antisense strand to SEQ ID NO: 1604509
caauacacucucauuuaau

SEQ ID NO: 1604511 - RNA, 19 nt, Artificial Sequence
  Description of Artificial Sequence: Synthetic oligonucleotide
  Sense strand starting at position 3699 of SEQ ID NO: 1560503
gagaguguauuggaauaag

SEQ ID NO: 1604512 - RNA, 19 nt, Artificial Sequence
  Description of Artificial Sequence: Synthetic oligonucleotide
  Antisense strand to SEQ ID NO: 1604511
cuuauuccaauacacucuc

SEQ ID NO: 1604513 - RNA, 19 nt, Artificial Sequence
  Description of Artificial Sequence: Synthetic oligonucleotide
  Sense strand starting at position 3702 of SEQ ID NO: 1560503
aguguauuggaauaaguca

SEQ ID NO: 1604514 - RNA, 19 nt, Artificial Sequence
  Description of Artificial Sequence: Synthetic oligonucleotide
  Antisense strand to SEQ ID NO: 1604513
ugacuuauuccaauacacu

SEQ ID NO: 1604515 - RNA, 19 nt, Artificial Sequence
  Description of Artificial Sequence: Synthetic oligonucleotide
  Sense strand starting at position 3767 of SEQ ID NO: 1560503
uagaauggguagccagaaa

SEQ ID NO: 1604516 - RNA, 19 nt, Artificial Sequence
  Description of Artificial Sequence: Synthetic oligonucleotide
  Antisense strand to SEQ ID NO: 1604515
uuucuggcuacccauucua

SEQ ID NO: 1604517 - RNA, 19 nt, Artificial Sequence
  Description of Artificial Sequence: Synthetic oligonucleotide
  Sense strand starting at position 3807 of SEQ ID NO: 1560503
uguugacugaggcauaaau

SEQ ID NO: 1604518 - RNA, 19 nt, Artificial Sequence
  Description of Artificial Sequence: Synthetic oligonucleotide
  Antisense strand to SEQ ID NO: 1604517
auuuaugccucagucaaca

SEQ ID NO: 1604519 - RNA, 19 nt, Artificial Sequence
  Description of Artificial Sequence: Synthetic oligonucleotide
  Sense strand starting at position 3819 of SEQ ID NO: 1560503
cauaaaugaugggaaggaa

SEQ ID NO: 1604520 - RNA, 19 nt, Artificial Sequence
  Description of Artificial Sequence: Synthetic oligonucleotide
  Antisense strand to SEQ ID NO: 1604519
uuccuucccaucauuuaug

SEQ ID NO: 1604521 - RNA, 19 nt, Artificial Sequence
  Description of Artificial Sequence: Synthetic oligonucleotide
  Sense strand starting at position 31 of SEQ ID NO: 1560504
gcaagacugaggugaggau

SEQ ID NO: 1604522 - RNA, 19 nt, Artificial Sequence
  Description of Artificial Sequence: Synthetic oligonucleotide
  Antisense strand to SEQ ID NO: 1604521
auccucaccucagucuugc

SEQ ID NO: 1604523 - RNA, 19 nt, Artificial Sequence
  Description of Artificial Sequence: Synthetic oligonucleotide
  Sense strand starting at position 81 of SEQ ID NO: 1560504
gggagucagaguggaaguu

SEQ ID NO: 1604524 - RNA, 19 nt, Artificial Sequence
  Description of Artificial Sequence: Synthetic oligonucleotide
  Antisense strand to SEQ ID NO: 1604523
aacuuccacucugacuccc

SEQ ID NO: 1604525 - RNA, 19 nt, Artificial Sequence
  Description of Artificial Sequence: Synthetic oligonucleotide
  Sense strand starting at position 529 of SEQ ID NO: 1560504
ggagaugacccauaugcgu

SEQ ID NO: 1604526 - RNA, 19 nt, Artificial Sequence
  Description of Artificial Sequence: Synthetic oligonucleotide
  Antisense strand to SEQ ID NO: 1604525
acgcauaugggucaucucc

SEQ ID NO: 1604527 - RNA, 19 nt, Artificial Sequence
  Description of Artificial Sequence: Synthetic oligonucleotide
  Sense strand starting at position 566 of SEQ ID NO: 1560504
ccauucucauucucggauu

SEQ ID NO: 1604528 - RNA, 19 nt, Artificial Sequence
  Description of Artificial Sequence: Synthetic oligonucleotide
  Antisense strand to SEQ ID NO: 1604527
aauccgagaaugagaaugg

SEQ ID NO: 1604529 - RNA, 19 nt, Artificial Sequence
  Description of Artificial Sequence: Synthetic oligonucleotide
  Sense strand starting at position 569 of SEQ ID NO: 1560504
uucucauucucggauugca

SEQ ID NO: 1604530 - RNA, 19 nt, Artificial Sequence
  Description of Artificial Sequence: Synthetic oligonucleotide
  Antisense strand to SEQ ID NO: 1604529
ugcaauccgagaaugagaa

SEQ ID NO: 1604531 - RNA, 19 nt, Artificial Sequence
  Description of Artificial Sequence: Synthetic oligonucleotide
  Sense strand starting at position 577 of SEQ ID NO: 1560504
cucggauugcagugaguag

SEQ ID NO: 1604532 - RNA, 19 nt, Artificial Sequence
  Description of Artificial Sequence: Synthetic oligonucleotide
  Antisense strand to SEQ ID NO: 1604531
cuacucacugcaauccgag

SEQ ID NO: 1604533 - RNA, 19 nt, Artificial Sequence
  Description of Artificial Sequence: Synthetic oligonucleotide
  Sense strand starting at position 588 of SEQ ID NO: 1560504
gugaguaggucagugguua

SEQ ID NO: 1604534 - RNA, 19 nt, Artificial Sequence
  Description of Artificial Sequence: Synthetic oligonucleotide
  Antisense strand to SEQ ID NO: 1604533
uaaccacugaccuacucac

SEQ ID NO: 1604535 - RNA, 19 nt, Artificial Sequence
  Description of Artificial Sequence: Synthetic oligonucleotide
  Sense strand starting at position 589 of SEQ ID NO: 1560504
ugaguaggucagugguuag

SEQ ID NO: 1604536 - RNA, 19 nt, Artificial Sequence
  Description of Artificial Sequence: Synthetic oligonucleotide
  Antisense strand to SEQ ID NO: 1604535
cuaaccacugaccuacuca

SEQ ID NO: 1604537 - RNA, 19 nt, Artificial Sequence
  Description of Artificial Sequence: Synthetic oligonucleotide
  Sense strand starting at position 630 of SEQ ID NO: 1560504
gguagaguuucccucucca

SEQ ID NO: 1604538 - RNA, 19 nt, Artificial Sequence
  Description of Artificial Sequence: Synthetic oligonucleotide
  Antisense strand to SEQ ID NO: 1604537
uggagagggaaacucuacc

SEQ ID NO: 1604539 - RNA, 19 nt, Artificial Sequence
  Description of Artificial Sequence: Synthetic oligonucleotide
  Sense strand starting at position 680 of SEQ ID NO: 1560504
cuuugagccagugagacuu

SEQ ID NO: 1604540 - RNA, 19 nt, Artificial Sequence
  Description of Artificial Sequence: Synthetic oligonucleotide
  Antisense strand to SEQ ID NO: 1604539
aagucucacuggcucaaag

SEQ ID NO: 1604541 - RNA, 19 nt, Artificial Sequence
  Description of Artificial Sequence: Synthetic oligonucleotide
  Sense strand starting at position 692 of SEQ ID NO: 1560504
gagacuucccucugggaug

SEQ ID NO: 1604542 - RNA, 19 nt, Artificial Sequence
  Description of Artificial Sequence: Synthetic oligonucleotide
  Antisense strand to SEQ ID NO: 1604541
caucccagagggaagucuc

SEQ ID NO: 1604543 - RNA, 19 nt, Artificial Sequence
  Description of Artificial Sequence: Synthetic oligonucleotide
  Sense strand starting at position 693 of SEQ ID NO: 1560504
agacuucccucugggauga

SEQ ID NO: 1604544 - RNA, 19 nt, Artificial Sequence
  Description of Artificial Sequence: Synthetic oligonucleotide
  Antisense strand to SEQ ID NO: 1604543
ucaucccagagggaagucu

SEQ ID NO: 1604545 - RNA, 19 nt, Artificial Sequence
  Description of Artificial Sequence: Synthetic oligonucleotide
  Sense strand starting at position 694 of SEQ ID NO: 1560504
gacuucccucugggaugaa

SEQ ID NO: 1604546 - RNA, 19 nt, Artificial Sequence
  Description of Artificial Sequence: Synthetic oligonucleotide
  Antisense strand to SEQ ID NO: 1604545
uucaucccagagggaaguc

SEQ ID NO: 1604547 - RNA, 19 nt, Artificial Sequence
  Description of Artificial Sequence: Synthetic oligonucleotide
  Sense strand starting at position 695 of SEQ ID NO: 1560504
acuucccucugggaugaaa

SEQ ID NO: 1604548 - RNA, 19 nt, Artificial Sequence
  Description of Artificial Sequence: Synthetic oligonucleotide
  Antisense strand to SEQ ID NO: 1604547
uuucaucccagagggaagu

SEQ ID NO: 1604549 - RNA, 19 nt, Artificial Sequence
  Description of Artificial Sequence: Synthetic oligonucleotide
  Sense strand starting at position 736 of SEQ ID NO: 1560504
ggccucucaguggagacau

SEQ ID NO: 1604550 - RNA, 19 nt, Artificial Sequence
  Description of Artificial Sequence: Synthetic oligonucleotide
  Antisense strand to SEQ ID NO: 1604549
augucuccacugagaggcc

SEQ ID NO: 1604551 - RNA, 19 nt, Artificial Sequence
  Description of Artificial Sequence: Synthetic oligonucleotide
  Sense strand starting at position 1218 of SEQ ID NO: 1560504
ucuacucacuuguuccaga

SEQ ID NO: 1604552 - RNA, 19 nt, Artificial Sequence
  Description of Artificial Sequence: Synthetic oligonucleotide
  Antisense strand to SEQ ID NO: 1604551
ucuggaacaagugaguaga

SEQ ID NO: 1604553 - RNA, 19 nt, Artificial Sequence
  Description of Artificial Sequence: Synthetic oligonucleotide
  Sense strand starting at position 1268 of SEQ ID NO: 1560504
caugacucucggugggaga

SEQ ID NO: 1604554 - RNA, 19 nt, Artificial Sequence
  Description of Artificial Sequence: Synthetic oligonucleotide
  Antisense strand to SEQ ID NO: 1604553
ucucccaccgagagucaug

SEQ ID NO: 1604555 - RNA, 19 nt, Artificial Sequence
  Description of Artificial Sequence: Synthetic oligonucleotide
  Sense strand starting at position 2061 of SEQ ID NO: 1560504
gaaacuggccgagggaaau

SEQ ID NO: 1604556 - RNA, 19 nt, Artificial Sequence
  Description of Artificial Sequence: Synthetic oligonucleotide
  Antisense strand to SEQ ID NO: 1604555
auuucccucggccaguuuc

SEQ ID NO: 1604557 - RNA, 19 nt, Artificial Sequence
  Description of Artificial Sequence: Synthetic oligonucleotide
  Sense strand starting at position 2106 of SEQ ID NO: 1560504
guccaaugcucagagucua

SEQ ID NO: 1604558 - RNA, 19 nt, Artificial Sequence
  Description of Artificial Sequence: Synthetic oligonucleotide
  Antisense strand to SEQ ID NO: 1604557
uagacucugagcauuggac

SEQ ID NO: 1604559 - RNA, 19 nt, Artificial Sequence
  Description of Artificial Sequence: Synthetic oligonucleotide
  Sense strand starting at position 2118 of SEQ ID NO: 1560504
gagucuaguugagguugga

SEQ ID NO: 1604560 - RNA, 19 nt, Artificial Sequence
  Description of Artificial Sequence: Synthetic oligonucleotide
  Antisense strand to SEQ ID NO: 1604559
uccaaccucaacuagacuc

SEQ ID NO: 1604561 - RNA, 19 nt, Artificial Sequence
  Description of Artificial Sequence: Synthetic oligonucleotide
  Sense strand starting at position 2121 of SEQ ID NO: 1560504
ucuaguugagguuggagaa

SEQ ID NO: 1604562 - RNA, 19 nt, Artificial Sequence
  Description of Artificial Sequence: Synthetic oligonucleotide
  Antisense strand to SEQ ID NO: 1604561
uucuccaaccucaacuaga

SEQ ID NO: 1604563 - RNA, 19 nt, Artificial Sequence
  Description of Artificial Sequence: Synthetic oligonucleotide
  Sense strand starting at position 2122 of SEQ ID NO: 1560504
cuaguugagguuggagaaa

SEQ ID NO: 1604564 - RNA, 19 nt, Artificial Sequence
  Description of Artificial Sequence: Synthetic oligonucleotide
  Antisense strand to SEQ ID NO: 1604563
uuucuccaaccucaacuag

SEQ ID NO: 1604565 - RNA, 19 nt, Artificial Sequence
  Description of Artificial Sequence: Synthetic oligonucleotide
  Sense strand starting at position 2148 of SEQ ID NO: 1560504
ggaggaaguuaaucagucu

SEQ ID NO: 1604566 - RNA, 19 nt, Artificial Sequence
  Description of Artificial Sequence: Synthetic oligonucleotide
  Antisense strand to SEQ ID NO: 1604565
agacugauuaacuuccucc

SEQ ID NO: 1604567 - RNA, 19 nt, Artificial Sequence
  Description of Artificial Sequence: Synthetic oligonucleotide
  Sense strand starting at position 2151 of SEQ ID NO: 1560504
ggaaguuaaucagucuauu

SEQ ID NO: 1604568 - RNA, 19 nt, Artificial Sequence
  Description of Artificial Sequence: Synthetic oligonucleotide
  Antisense strand to SEQ ID NO: 1604567
aauagacugauuaacuucc

SEQ ID NO: 1604569 - RNA, 19 nt, Artificial Sequence
  Description of Artificial Sequence: Synthetic oligonucleotide
  Sense strand starting at position 2200 of SEQ ID NO: 1560504
ugguuuggaggccagaaau

SEQ ID NO: 1604570 - RNA, 19 nt, Artificial Sequence
  Description of Artificial Sequence: Synthetic oligonucleotide
  Antisense strand to SEQ ID NO: 1604569
auuucuggccuccaaacca

SEQ ID NO: 1604571 - RNA, 19 nt, Artificial Sequence
  Description of Artificial Sequence: Synthetic oligonucleotide
  Sense strand starting at position 2213 of SEQ ID NO: 1560504
agaaauagaugcucaggua

SEQ ID NO: 1604572 - RNA, 19 nt, Artificial Sequence
  Description of Artificial Sequence: Synthetic oligonucleotide
  Antisense strand to SEQ ID NO: 1604571
uaccugagcaucuauuucu

SEQ ID NO: 1604573 - RNA, 19 nt, Artificial Sequence
  Description of Artificial Sequence: Synthetic oligonucleotide
  Sense strand starting at position 2568 of SEQ ID NO: 1560504
gucuacagcugucaaauga

SEQ ID NO: 1604574 - RNA, 19 nt, Artificial Sequence
  Description of Artificial Sequence: Synthetic oligonucleotide
  Antisense strand to SEQ ID NO: 1604573
ucauuugacagcuguagac

SEQ ID NO: 1604575 - RNA, 19 nt, Artificial Sequence
  Description of Artificial Sequence: Synthetic oligonucleotide
  Sense strand starting at position 2667 of SEQ ID NO: 1560504
ggaagcugcuccuuuggaa

SEQ ID NO: 1604576 - RNA, 19 nt, Artificial Sequence
  Description of Artificial Sequence: Synthetic oligonucleotide
  Antisense strand to SEQ ID NO: 1604575
uuccaaaggagcagcuucc

SEQ ID NO: 1604577 - RNA, 19 nt, Artificial Sequence
  Description of Artificial Sequence: Synthetic oligonucleotide
  Sense strand starting at position 2975 of SEQ ID NO: 1560504
gggaaacucccgcaguaaa

SEQ ID NO: 1604578 - RNA, 19 nt, Artificial Sequence
  Description of Artificial Sequence: Synthetic oligonucleotide
  Antisense strand to SEQ ID NO: 1604577
uuuacugcgggaguuuccc

SEQ ID NO: 1604579 - RNA, 19 nt, Artificial Sequence
  Description of Artificial Sequence: Synthetic oligonucleotide
  Sense strand starting at position 3031 of SEQ ID NO: 1560504
gggugaaugugaguaacaa

SEQ ID NO: 1604580 - RNA, 19 nt, Artificial Sequence
  Description of Artificial Sequence: Synthetic oligonucleotide
  Antisense strand to SEQ ID NO: 1604579
uuguuacucacauucaccc

SEQ ID NO: 1604581 - RNA, 19 nt, Artificial Sequence
  Description of Artificial Sequence: Synthetic oligonucleotide
  Sense strand starting at position 3091 of SEQ ID NO: 1560504
gaucaaagagcuggagagu

SEQ ID NO: 1604582 - RNA, 19 nt, Artificial Sequence
  Description of Artificial Sequence: Synthetic oligonucleotide
  Antisense strand to SEQ ID NO: 1604581
acucuccagcucuuugauc

SEQ ID NO: 1604583 - RNA, 19 nt, Artificial Sequence
  Description of Artificial Sequence: Synthetic oligonucleotide
  Sense strand starting at position 3121 of SEQ ID NO: 1560504
aagagcuugggucagcaaa

SEQ ID NO: 1604584 - RNA, 19 nt, Artificial Sequence
  Description of Artificial Sequence: Synthetic oligonucleotide
  Antisense strand to SEQ ID NO: 1604583
uuugcugacccaagcucuu

SEQ ID NO: 1604585 - RNA, 19 nt, Artificial Sequence
  Description of Artificial Sequence: Synthetic oligonucleotide
  Sense strand starting at position 3568 of SEQ ID NO: 1560504
gcgaaacccuuucucuaaa

SEQ ID NO: 1604586 - RNA, 19 nt, Artificial Sequence
  Description of Artificial Sequence: Synthetic oligonucleotide
  Antisense strand to SEQ ID NO: 1604585
uuuagagaaaggguuucgc

SEQ ID NO: 1604587 - RNA, 19 nt, Artificial Sequence
  Description of Artificial Sequence: Synthetic oligonucleotide
  Sense strand starting at position 3654 of SEQ ID NO: 1560504
gggcuuugcacccaucgua

SEQ ID NO: 1604588 - RNA, 19 nt, Artificial Sequence
  Description of Artificial Sequence: Synthetic oligonucleotide
  Antisense strand to SEQ ID NO: 1604587
uacgaugggugcaaagccc

SEQ ID NO: 1604589 - RNA, 19 nt, Artificial Sequence
  Description of Artificial Sequence: Synthetic oligonucleotide
  Sense strand starting at position 4 of SEQ ID NO: 1560505
ccucaugcucaggaauaug

SEQ ID NO: 1604590 - RNA, 19 nt, Artificial Sequence
  Description of Artificial Sequence: Synthetic oligonucleotide
  Antisense strand to SEQ ID NO: 1604589
cauauuccugagcaugagg

SEQ ID NO: 1604591 - RNA, 19 nt, Artificial Sequence
  Description of Artificial Sequence: Synthetic oligonucleotide
  Sense strand starting at position 142 of SEQ ID NO: 1560505
ggcuaagcuccaggaagau

SEQ ID NO: 1604592 - RNA, 19 nt, Artificial Sequence
  Description of Artificial Sequence: Synthetic oligonucleotide
  Antisense strand to SEQ ID NO: 1604591
aucuuccuggagcuuagcc

SEQ ID NO: 1604593 - RNA, 19 nt, Artificial Sequence
  Description of Artificial Sequence: Synthetic oligonucleotide
  Sense strand starting at position 160 of SEQ ID NO: 1560505
uagggagagugauaaauag

SEQ ID NO: 1604594 - RNA, 19 nt, Artificial Sequence
  Description of Artificial Sequence: Synthetic oligonucleotide
  Antisense strand to SEQ ID NO: 1604593
cuauuuaucacucucccua

SEQ ID NO: 1604595 - RNA, 19 nt, Artificial Sequence
  Description of Artificial Sequence: Synthetic oligonucleotide
  Sense strand starting at position 208 of SEQ ID NO: 1560505
agucauugcuagccuccaa

SEQ ID NO: 1604596 - RNA, 19 nt, Artificial Sequence
  Description of Artificial Sequence: Synthetic oligonucleotide
  Antisense strand to SEQ ID NO: 1604595
uuggaggcuagcaaugacu

SEQ ID NO: 1604597 - RNA, 19 nt, Artificial Sequence
  Description of Artificial Sequence: Synthetic oligonucleotide
  Sense strand starting at position 375 of SEQ ID NO: 1560505
gcuuuccagcugugaauga

SEQ ID NO: 1604598 - RNA, 19 nt, Artificial Sequence
  Description of Artificial Sequence: Synthetic oligonucleotide
  Antisense strand to SEQ ID NO: 1604597
ucauucacagcuggaaagc

SEQ ID NO: 1604599 - RNA, 19 nt, Artificial Sequence
  Description of Artificial Sequence: Synthetic oligonucleotide
  Sense strand starting at position 496 of SEQ ID NO: 1560505
cugagcaauccauggagau

SEQ ID NO: 1604600 - RNA, 19 nt, Artificial Sequence
  Description of Artificial Sequence: Synthetic oligonucleotide
  Antisense strand to SEQ ID NO: 1604599
aucuccauggauugcucag

SEQ ID NO: 1604601 - RNA, 19 nt, Artificial Sequence
  Description of Artificial Sequence: Synthetic oligonucleotide
  Sense strand starting at position 497 of SEQ ID NO: 1560505
ugagcaauccauggagauu

SEQ ID NO: 1604602 - RNA, 19 nt, Artificial Sequence
  Description of Artificial Sequence: Synthetic oligonucleotide
  Antisense strand to SEQ ID NO: 1604601
aaucuccauggauugcuca

SEQ ID NO: 1604603 - RNA, 19 nt, Artificial Sequence
  Description of Artificial Sequence: Synthetic oligonucleotide
  Sense strand starting at position 667 of SEQ ID NO: 1560505
agugaauuaccggagucca

SEQ ID NO: 1604604 - RNA, 19 nt, Artificial Sequence
  Description of Artificial Sequence: Synthetic oligonucleotide
  Antisense strand to SEQ ID NO: 1604603
uggacuccgguaauucacu

SEQ ID NO: 1604605 - RNA, 19 nt, Artificial Sequence
  Description of Artificial Sequence: Synthetic oligonucleotide
  Sense strand starting at position 849 of SEQ ID NO: 1560505
ucauccaggcggugaauua

SEQ ID NO: 1604606 - RNA, 19 nt, Artificial Sequence
  Description of Artificial Sequence: Synthetic oligonucleotide
  Antisense strand to SEQ ID NO: 1604605
uaauucaccgccuggauga

SEQ ID NO: 1604607 - RNA, 19 nt, Artificial Sequence
  Description of Artificial Sequence: Synthetic oligonucleotide
  Sense strand starting at position 850 of SEQ ID NO: 1560505
cauccaggcggugaauuaa

SEQ ID NO: 1604608 - RNA, 19 nt, Artificial Sequence
  Description of Artificial Sequence: Synthetic oligonucleotide
  Antisense strand to SEQ ID NO: 1604607
uuaauucaccgccuggaug

SEQ ID NO: 1604609 - RNA, 19 nt, Artificial Sequence
  Description of Artificial Sequence: Synthetic oligonucleotide
  Sense strand starting at position 874 of SEQ ID NO: 1560505
gcagaaccucaugaguaac

SEQ ID NO: 1604610 - RNA, 19 nt, Artificial Sequence
  Description of Artificial Sequence: Synthetic oligonucleotide
  Antisense strand to SEQ ID NO: 1604609
guuacucaugagguucugc

SEQ ID NO: 1604611 - RNA, 19 nt, Artificial Sequence
  Description of Artificial Sequence: Synthetic oligonucleotide
  Sense strand starting at position 886 of SEQ ID NO: 1560505
gaguaaccucgagaaucuc

SEQ ID NO: 1604612 - RNA, 19 nt, Artificial Sequence
  Description of Artificial Sequence: Synthetic oligonucleotide
  Antisense strand to SEQ ID NO: 1604611
gagauucucgagguuacuc

SEQ ID NO: 1604613 - RNA, 19 nt, Artificial Sequence
  Description of Artificial Sequence: Synthetic oligonucleotide
  Sense strand starting at position 1154 of SEQ ID NO: 1560505
cagcaauccgcgugggaag

SEQ ID NO: 1604614 - RNA, 19 nt, Artificial Sequence
  Description of Artificial Sequence: Synthetic oligonucleotide
  Antisense strand to SEQ ID NO: 1604613
cuucccacgcggauugcug

SEQ ID NO: 1604615 - RNA, 19 nt, Artificial Sequence
  Description of Artificial Sequence: Synthetic oligonucleotide
  Sense strand starting at position 1549 of SEQ ID NO: 1560505
uuuguuuccuccgcacaau

SEQ ID NO: 1604616 - RNA, 19 nt, Artificial Sequence
  Description of Artificial Sequence: Synthetic oligonucleotide
  Antisense strand to SEQ ID NO: 1604615
auugugcggaggaaacaaa

SEQ ID NO: 1604617 - RNA, 19 nt, Artificial Sequence
  Description of Artificial Sequence: Synthetic oligonucleotide
  Sense strand starting at position 2100 of SEQ ID NO: 1560505
ggugcaagcgggaguguuu

SEQ ID NO: 1604618 - RNA, 19 nt, Artificial Sequence
  Description of Artificial Sequence: Synthetic oligonucleotide
  Antisense strand to SEQ ID NO: 1604617
aaacacucccgcuugcacc

SEQ ID NO: 1604619 - RNA, 19 nt, Artificial Sequence
  Description of Artificial Sequence: Synthetic oligonucleotide
  Sense strand starting at position 2111 of SEQ ID NO: 1560505
gaguguuugcgugcguagu

SEQ ID NO: 1604620 - RNA, 19 nt, Artificial Sequence
  Description of Artificial Sequence: Synthetic oligonucleotide
  Antisense strand to SEQ ID NO: 1604619
acuacgcacgcaaacacuc

SEQ ID NO: 1604621 - RNA, 19 nt, Artificial Sequence
  Description of Artificial Sequence: Synthetic oligonucleotide
  Sense strand starting at position 2121 of SEQ ID NO: 1560505
gugcguagucacgugacuu

SEQ ID NO: 1604622 - RNA, 19 nt, Artificial Sequence
  Description of Artificial Sequence: Synthetic oligonucleotide
  Antisense strand to SEQ ID NO: 1604621
aagucacgugacuacgcac

SEQ ID NO: 1604623 - RNA, 19 nt, Artificial Sequence
  Description of Artificial Sequence: Synthetic oligonucleotide
  Sense strand starting at position 2131 of SEQ ID NO: 1560505
acgugacuucggcaccuuu

SEQ ID NO: 1604624 - RNA, 19 nt, Artificial Sequence
  Description of Artificial Sequence: Synthetic oligonucleotide
  Antisense strand to SEQ ID NO: 1604623
aaaggugccgaagucacgu

SEQ ID NO: 1604625 - RNA, 19 nt, Artificial Sequence
  Description of Artificial Sequence: Synthetic oligonucleotide
  Sense strand starting at position 2160 of SEQ ID NO: 1560505
ucgauagguugcuccauca

SEQ ID NO: 1604626 - RNA, 19 nt, Artificial Sequence
  Description of Artificial Sequence: Synthetic oligonucleotide
  Antisense strand to SEQ ID NO: 1604625
ugauggagcaaccuaucga

SEQ ID NO: 1604627 - RNA, 19 nt, Artificial Sequence
  Description of Artificial Sequence: Synthetic oligonucleotide
  Sense strand starting at position 2176 of SEQ ID NO: 1560505
ucaugugacaauggcgaau

SEQ ID NO: 1604628 - RNA, 19 nt, Artificial Sequence
  Description of Artificial Sequence: Synthetic oligonucleotide
  Antisense strand to SEQ ID NO: 1604627
auucgccauugucacauga

SEQ ID NO: 1604629 - RNA, 19 nt, Artificial Sequence
  Description of Artificial Sequence: Synthetic oligonucleotide
  Sense strand starting at position 2178 of SEQ ID NO: 1560505
augugacaauggcgaauuu

SEQ ID NO: 1604630 - RNA, 19 nt, Artificial Sequence
  Description of Artificial Sequence: Synthetic oligonucleotide
  Antisense strand to SEQ ID NO: 1604629
aaauucgccauugucacau

SEQ ID NO: 1604631 - RNA, 19 nt, Artificial Sequence
  Description of Artificial Sequence: Synthetic oligonucleotide
  Sense strand starting at position 2310 of SEQ ID NO: 1560505
gccauuaccacgugaugca

SEQ ID NO: 1604632 - RNA, 19 nt, Artificial Sequence
  Description of Artificial Sequence: Synthetic oligonucleotide
  Antisense strand to SEQ ID NO: 1604631
ugcaucacgugguaauggc

SEQ ID NO: 1604633 - RNA, 19 nt, Artificial Sequence
  Description of Artificial Sequence: Synthetic oligonucleotide
  Sense strand starting at position 2311 of SEQ ID NO: 1560505
ccauuaccacgugaugcaa

SEQ ID NO: 1604634 - RNA, 19 nt, Artificial Sequence
  Description of Artificial Sequence: Synthetic oligonucleotide
  Antisense strand to SEQ ID NO: 1604633
uugcaucacgugguaaugg

SEQ ID NO: 1604635 - RNA, 19 nt, Artificial Sequence
  Description of Artificial Sequence: Synthetic oligonucleotide
  Sense strand starting at position 2407 of SEQ ID NO: 1560505
cugaguacguuagcggaaa

SEQ ID NO: 1604636 - RNA, 19 nt, Artificial Sequence
  Description of Artificial Sequence: Synthetic oligonucleotide
  Antisense strand to SEQ ID NO: 1604635
uuuccgcuaacguacucag

SEQ ID NO: 1604637 - RNA, 19 nt, Artificial Sequence
  Description of Artificial Sequence: Synthetic oligonucleotide
  Sense strand starting at position 2542 of SEQ ID NO: 1560505
agguuagagaugugugcga

SEQ ID NO: 1604638 - RNA, 19 nt, Artificial Sequence
  Description of Artificial Sequence: Synthetic oligonucleotide
  Antisense strand to SEQ ID NO: 1604637
ucgcacacaucucuaaccu

SEQ ID NO: 1604639 - RNA, 19 nt, Artificial Sequence
  Description of Artificial Sequence: Synthetic oligonucleotide
  Sense strand starting at position 2546 of SEQ ID NO: 1560505
uagagaugugugcgaggaa

SEQ ID NO: 1604640 - RNA, 19 nt, Artificial Sequence
  Description of Artificial Sequence: Synthetic oligonucleotide
  Antisense strand to SEQ ID NO: 1604639
uuccucgcacacaucucua

SEQ ID NO: 1604641 - RNA, 19 nt, Artificial Sequence
  Description of Artificial Sequence: Synthetic oligonucleotide
  Sense strand starting at position 2638 of SEQ ID NO: 1560505
gguucuuucgucccgcaga

SEQ ID NO: 1604642 - RNA, 19 nt, Artificial Sequence
  Description of Artificial Sequence: Synthetic oligonucleotide
  Antisense strand to SEQ ID NO: 1604641
ucugcgggacgaaagaacc

SEQ ID NO: 1604643 - RNA, 19 nt, Artificial Sequence
  Description of Artificial Sequence: Synthetic oligonucleotide
  Sense strand starting at position 2859 of SEQ ID NO: 1560505
cgcggagcuccgaaguaaa

SEQ ID NO: 1604644 - RNA, 19 nt, Artificial Sequence
  Description of Artificial Sequence: Synthetic oligonucleotide
  Antisense strand to SEQ ID NO: 1604643
uuuacuucggagcuccgcg

SEQ ID NO: 1604645 - RNA, 19 nt, Artificial Sequence
  Description of Artificial Sequence: Synthetic oligonucleotide
  Sense strand starting at position 2892 of SEQ ID NO: 1560505
agugcuuuguccuuacaag

SEQ ID NO: 1604646 - RNA, 19 nt, Artificial Sequence
  Description of Artificial Sequence: Synthetic oligonucleotide
  Antisense strand to SEQ ID NO: 1604645
cuuguaaggacaaagcacu

SEQ ID NO: 1604647 - RNA, 19 nt, Artificial Sequence
  Description of Artificial Sequence: Synthetic oligonucleotide
  Sense strand starting at position 2911 of SEQ ID NO: 1560505
cgugguguucuugaaugcu

SEQ ID NO: 1604648 - RNA, 19 nt, Artificial Sequence
  Description of Artificial Sequence: Synthetic oligonucleotide
  Antisense strand to SEQ ID NO: 1604647
agcauucaagaacaccacg

SEQ ID NO: 1604649 - RNA, 19 nt, Artificial Sequence
  Description of Artificial Sequence: Synthetic oligonucleotide
  Sense strand starting at position 2952 of SEQ ID NO: 1560505
cgauguacaaucugugcuu

SEQ ID NO: 1604650 - RNA, 19 nt, Artificial Sequence
  Description of Artificial Sequence: Synthetic oligonucleotide
  Antisense strand to SEQ ID NO: 1604649
aagcacagauuguacaucg

SEQ ID NO: 1604651 - RNA, 19 nt, Artificial Sequence
  Description of Artificial Sequence: Synthetic oligonucleotide
  Sense strand starting at position 2953 of SEQ ID NO: 1560505
gauguacaaucugugcuua

SEQ ID NO: 1604652 - RNA, 19 nt, Artificial Sequence
  Description of Artificial Sequence: Synthetic oligonucleotide
  Antisense strand to SEQ ID NO: 1604651
uaagcacagauuguacauc

SEQ ID NO: 1604653 - RNA, 19 nt, Artificial Sequence
  Description of Artificial Sequence: Synthetic oligonucleotide
  Sense strand starting at position 2954 of SEQ ID NO: 1560505
auguacaaucugugcuuaa

SEQ ID NO: 1604654 - RNA, 19 nt, Artificial Sequence
  Description of Artificial Sequence: Synthetic oligonucleotide
  Antisense strand to SEQ ID NO: 1604653
uuaagcacagauuguacau

SEQ ID NO: 1604655 - RNA, 19 nt, Artificial Sequence
  Description of Artificial Sequence: Synthetic oligonucleotide
  Sense strand starting at position 2955 of SEQ ID NO: 1560505
uguacaaucugugcuuaac

SEQ ID NO: 1604656 - RNA, 19 nt, Artificial Sequence
  Description of Artificial Sequence: Synthetic oligonucleotide
  Antisense strand to SEQ ID NO: 1604655
guuaagcacagauuguaca

SEQ ID NO: 1604657 - RNA, 19 nt, Artificial Sequence
  Description of Artificial Sequence: Synthetic oligonucleotide
  Sense strand starting at position 3024 of SEQ ID NO: 1560505
cuaggaagguuugacagau

SEQ ID NO: 1604658 - RNA, 19 nt, Artificial Sequence
  Description of Artificial Sequence: Synthetic oligonucleotide
  Antisense strand to SEQ ID NO: 1604657
aucugucaaaccuuccuag

SEQ ID NO: 1604659 - RNA, 19 nt, Artificial Sequence
  Description of Artificial Sequence: Synthetic oligonucleotide
  Sense strand starting at position 3286 of SEQ ID NO: 1560505
aggagaauuguuugaccug

SEQ ID NO: 1604660 - RNA, 19 nt, Artificial Sequence
  Description of Artificial Sequence: Synthetic oligonucleotide
  Antisense strand to SEQ ID NO: 1604659
caggucaaacaauucuccu

SEQ ID NO: 1604661 - RNA, 19 nt, Artificial Sequence
  Description of Artificial Sequence: Synthetic oligonucleotide
  Sense strand starting at position 3289 of SEQ ID NO: 1560505
agaauuguuugaccuggca

SEQ ID NO: 1604662 - RNA, 19 nt, Artificial Sequence
  Description of Artificial Sequence: Synthetic oligonucleotide
  Antisense strand to SEQ ID NO: 1604661
ugccaggucaaacaauucu

SEQ ID NO: 1604663 - RNA, 19 nt, Artificial Sequence
  Description of Artificial Sequence: Synthetic oligonucleotide
  Sense strand starting at position 3390 of SEQ ID NO: 1560505
agagcaaggagguguugaa

SEQ ID NO: 1604664 - RNA, 19 nt, Artificial Sequence
  Description of Artificial Sequence: Synthetic oligonucleotide
  Antisense strand to SEQ ID NO: 1604663
uucaacaccuccuugcucu

SEQ ID NO: 1604665 - RNA, 19 nt, Artificial Sequence
  Description of Artificial Sequence: Synthetic oligonucleotide
  Sense strand starting at position 3786 of SEQ ID NO: 1560505
uggcuugaaucacuugaac

SEQ ID NO: 1604666 - RNA, 19 nt, Artificial Sequence
  Description of Artificial Sequence: Synthetic oligonucleotide
  Antisense strand to SEQ ID NO: 1604665
guucaagugauucaagcca

SEQ ID NO: 1604667 - RNA, 19 nt, Artificial Sequence
  Description of Artificial Sequence: Synthetic oligonucleotide
  Sense strand starting at position 3916 of SEQ ID NO: 1560505
aguguaaagaugugauuau

SEQ ID NO: 1604668 - RNA, 19 nt, Artificial Sequence
  Description of Artificial Sequence: Synthetic oligonucleotide
  Antisense strand to SEQ ID NO: 1604667
auaaucacaucuuuacacu

SEQ ID NO: 1604669 - RNA, 19 nt, Artificial Sequence
  Description of Artificial Sequence: Synthetic oligonucleotide
  Sense strand starting at position 199 of SEQ ID NO: 1560506
ccuccaguauccuugcaga

SEQ ID NO: 1604670 - RNA, 19 nt, Artificial Sequence
  Description of Artificial Sequence: Synthetic oligonucleotide
  Antisense strand to SEQ ID NO: 1604669
ucugcaaggauacuggagg

SEQ ID NO: 1604671 - RNA, 19 nt, Artificial Sequence
  Description of Artificial Sequence: Synthetic oligonucleotide
  Sense strand starting at position 391 of SEQ ID NO: 1560506
auccaaggcuugcuuuaaa

SEQ ID NO: 1604672 - RNA, 19 nt, Artificial Sequence
  Description of Artificial Sequence: Synthetic oligonucleotide
  Antisense strand to SEQ ID NO: 1604671
uuuaaagcaagccuuggau

SEQ ID NO: 1604673 - RNA, 19 nt, Artificial Sequence
  Description of Artificial Sequence: Synthetic oligonucleotide
  Sense strand starting at position 606 of SEQ ID NO: 1560506
acaugucaccuagggcaaa

SEQ ID NO: 1604674 - RNA, 19 nt, Artificial Sequence
  Description of Artificial Sequence: Synthetic oligonucleotide
  Antisense strand to SEQ ID NO: 1604673
uuugcccuaggugacaugu

SEQ ID NO: 1604675 - RNA, 19 nt, Artificial Sequence
  Description of Artificial Sequence: Synthetic oligonucleotide
  Sense strand starting at position 748 of SEQ ID NO: 1560506
gagggcaacuguuaugaaa

SEQ ID NO: 1604676 - RNA, 19 nt, Artificial Sequence
  Description of Artificial Sequence: Synthetic oligonucleotide
  Antisense strand to SEQ ID NO: 1604675
uuucauaacaguugcccuc

SEQ ID NO: 1604677 - RNA, 19 nt, Artificial Sequence
  Description of Artificial Sequence: Synthetic oligonucleotide
  Sense strand starting at position 841 of SEQ ID NO: 1560506
cuguccaucuguucuguga

SEQ ID NO: 1604678 - RNA, 19 nt, Artificial Sequence
  Description of Artificial Sequence: Synthetic oligonucleotide
  Antisense strand to SEQ ID NO: 1604677
ucacagaacagauggacag

SEQ ID NO: 1604679 - RNA, 19 nt, Artificial Sequence
  Description of Artificial Sequence: Synthetic oligonucleotide
  Sense strand starting at position 924 of SEQ ID NO: 1560506
cucucuuaccaguggcaaa

SEQ ID NO: 1604680 - RNA, 19 nt, Artificial Sequence
  Description of Artificial Sequence: Synthetic oligonucleotide
  Antisense strand to SEQ ID NO: 1604679
uuugccacugguaagagag

SEQ ID NO: 1604681 - RNA, 19 nt, Artificial Sequence
  Description of Artificial Sequence: Synthetic oligonucleotide
  Sense strand starting at position 1263 of SEQ ID NO: 1560506
ggugguaccuaagagagaa

SEQ ID NO: 1604682 - RNA, 19 nt, Artificial Sequence
  Description of Artificial Sequence: Synthetic oligonucleotide
  Antisense strand to SEQ ID NO: 1604681
uucucucuuagguaccacc

SEQ ID NO: 1604683 - RNA, 19 nt, Artificial Sequence
  Description of Artificial Sequence: Synthetic oligonucleotide
  Sense strand starting at position 1310 of SEQ ID NO: 1560506
gggaaccucuccggaagaa

SEQ ID NO: 1604684 - RNA, 19 nt, Artificial Sequence
  Description of Artificial Sequence: Synthetic oligonucleotide
  Antisense strand to SEQ ID NO: 1604683
uucuuccggagagguuccc

SEQ ID NO: 1604685 - RNA, 19 nt, Artificial Sequence
  Description of Artificial Sequence: Synthetic oligonucleotide
  Sense strand starting at position 1446 of SEQ ID NO: 1560506
ccaugccucuccgugacaa

SEQ ID NO: 1604686 - RNA, 19 nt, Artificial Sequence
  Description of Artificial Sequence: Synthetic oligonucleotide
  Antisense strand to SEQ ID NO: 1604685
uugucacggagaggcaugg

SEQ ID NO: 1604687 - RNA, 19 nt, Artificial Sequence
  Description of Artificial Sequence: Synthetic oligonucleotide
  Sense strand starting at position 1577 of SEQ ID NO: 1560506
uuaccuacuugucaaugga

SEQ ID NO: 1604688 - RNA, 19 nt, Artificial Sequence
  Description of Artificial Sequence: Synthetic oligonucleotide
  Antisense strand to SEQ ID NO: 1604687
uccauugacaaguagguaa

SEQ ID NO: 1604689 - RNA, 19 nt, Artificial Sequence
  Description of Artificial Sequence: Synthetic oligonucleotide
  Sense strand starting at position 1664 of SEQ ID NO: 1560506
cauguuacgucaccaagag

SEQ ID NO: 1604690 - RNA, 19 nt, Artificial Sequence
  Description of Artificial Sequence: Synthetic oligonucleotide
  Antisense strand to SEQ ID NO: 1604689
cucuuggugacguaacaug

SEQ ID NO: 1604691 - RNA, 19 nt, Artificial Sequence
  Description of Artificial Sequence: Synthetic oligonucleotide
  Sense strand starting at position 2272 of SEQ ID NO: 1560506
gcaagaccaugucucacaa

SEQ ID NO: 1604692 - RNA, 19 nt, Artificial Sequence
  Description of Artificial Sequence: Synthetic oligonucleotide
  Antisense strand to SEQ ID NO: 1604691
uugugagacauggucuugc

SEQ ID NO: 1604693 - RNA, 19 nt, Artificial Sequence
  Description of Artificial Sequence: Synthetic oligonucleotide
  Sense strand starting at position 2394 of SEQ ID NO: 1560506
guauaauagguauaguagu

SEQ ID NO: 1604694 - RNA, 19 nt, Artificial Sequence
  Description of Artificial Sequence: Synthetic oligonucleotide
  Antisense strand to SEQ ID NO: 1604693
acuacuauaccuauuauac

SEQ ID NO: 1604695 - RNA, 19 nt, Artificial Sequence
  Description of Artificial Sequence: Synthetic oligonucleotide
  Sense strand starting at position 2408 of SEQ ID NO: 1560506
guaguaagcaaaggaaauu

SEQ ID NO: 1604696 - RNA, 19 nt, Artificial Sequence
  Description of Artificial Sequence: Synthetic oligonucleotide
  Antisense strand to SEQ ID NO: 1604695
aauuuccuuugcuuacuac

SEQ ID NO: 1604697 - RNA, 19 nt, Artificial Sequence
  Description of Artificial Sequence: Synthetic oligonucleotide
  Sense strand starting at position 2589 of SEQ ID NO: 1560506
aggacaaauuuguggauaa

SEQ ID NO: 1604698 - RNA, 19 nt, Artificial Sequence
  Description of Artificial Sequence: Synthetic oligonucleotide
  Antisense strand to SEQ ID NO: 1604697
uuauccacaaauuuguccu

SEQ ID NO: 1604699 - RNA, 19 nt, Artificial Sequence
  Description of Artificial Sequence: Synthetic oligonucleotide
  Sense strand starting at position 2590 of SEQ ID NO: 1560506
ggacaaauuuguggauaaa

SEQ ID NO: 1604700 - RNA, 19 nt, Artificial Sequence
  Description of Artificial Sequence: Synthetic oligonucleotide
  Antisense strand to SEQ ID NO: 1604699
uuuauccacaaauuugucc

SEQ ID NO: 1604701 - RNA, 19 nt, Artificial Sequence
  Description of Artificial Sequence: Synthetic oligonucleotide
  Sense strand starting at position 2599 of SEQ ID NO: 1560506
uguggauaaaguuggugaa

SEQ ID NO: 1604702 - RNA, 19 nt, Artificial Sequence
  Description of Artificial Sequence: Synthetic oligonucleotide
  Antisense strand to SEQ ID NO: 1604701
uucaccaacuuuauccaca

SEQ ID NO: 1604703 - RNA, 19 nt, Artificial Sequence
  Description of Artificial Sequence: Synthetic oligonucleotide
  Sense strand starting at position 2600 of SEQ ID NO: 1560506
guggauaaaguuggugaaa

SEQ ID NO: 1604704 - RNA, 19 nt, Artificial Sequence
  Description of Artificial Sequence: Synthetic oligonucleotide
  Antisense strand to SEQ ID NO: 1604703
uuucaccaacuuuauccac

SEQ ID NO: 1604705 - RNA, 19 nt, Artificial Sequence
  Description of Artificial Sequence: Synthetic oligonucleotide
  Sense strand starting at position 2601 of SEQ ID NO: 1560506
uggauaaaguuggugaaau

SEQ ID NO: 1604706 - RNA, 19 nt, Artificial Sequence
  Description of Artificial Sequence: Synthetic oligonucleotide
  Antisense strand to SEQ ID NO: 1604705
auuucaccaacuuuaucca

SEQ ID NO: 1604707 - RNA, 19 nt, Artificial Sequence
  Description of Artificial Sequence: Synthetic oligonucleotide
  Sense strand starting at position 2622 of SEQ ID NO: 1560506
aaauaaaguuuggaguuga

SEQ ID NO: 1604708 - RNA, 19 nt, Artificial Sequence
  Description of Artificial Sequence: Synthetic oligonucleotide
  Antisense strand to SEQ ID NO: 1604707
ucaacuccaaacuuuauuu

SEQ ID NO: 1604709 - RNA, 19 nt, Artificial Sequence
  Description of Artificial Sequence: Synthetic oligonucleotide
  Sense strand starting at position 2626 of SEQ ID NO: 1560506
aaaguuuggaguugaguua

SEQ ID NO: 1604710 - RNA, 19 nt, Artificial Sequence
  Description of Artificial Sequence: Synthetic oligonucleotide
  Antisense strand to SEQ ID NO: 1604709
uaacucaacuccaaacuuu

SEQ ID NO: 1604711 - RNA, 19 nt, Artificial Sequence
  Description of Artificial Sequence: Synthetic oligonucleotide
  Sense strand starting at position 2637 of SEQ ID NO: 1560506
uugaguuaguaguaaugaa

SEQ ID NO: 1604712 - RNA, 19 nt, Artificial Sequence
  Description of Artificial Sequence: Synthetic oligonucleotide
  Antisense strand to SEQ ID NO: 1604711
uucauuacuacuaacucaa

SEQ ID NO: 1604713 - RNA, 19 nt, Artificial Sequence
  Description of Artificial Sequence: Synthetic oligonucleotide
  Sense strand starting at position 2645 of SEQ ID NO: 1560506
guaguaaugaaccaguguu

SEQ ID NO: 1604714 - RNA, 19 nt, Artificial Sequence
  Description of Artificial Sequence: Synthetic oligonucleotide
  Antisense strand to SEQ ID NO: 1604713
aacacugguucauuacuac

SEQ ID NO: 1604715 - RNA, 19 nt, Artificial Sequence
  Description of Artificial Sequence: Synthetic oligonucleotide
  Sense strand starting at position 2705 of SEQ ID NO: 1560506
guuagcauucagggaagcu

SEQ ID NO: 1604716 - RNA, 19 nt, Artificial Sequence
  Description of Artificial Sequence: Synthetic oligonucleotide
  Antisense strand to SEQ ID NO: 1604715
agcuucccugaaugcuaac

SEQ ID NO: 1604717 - RNA, 19 nt, Artificial Sequence
  Description of Artificial Sequence: Synthetic oligonucleotide
  Sense strand starting at position 2849 of SEQ ID NO: 1560506
uguaaauucuuucuuggga

SEQ ID NO: 1604718 - RNA, 19 nt, Artificial Sequence
  Description of Artificial Sequence: Synthetic oligonucleotide
  Antisense strand to SEQ ID NO: 1604717
ucccaagaaagaauuuaca

SEQ ID NO: 1604719 - RNA, 19 nt, Artificial Sequence
  Description of Artificial Sequence: Synthetic oligonucleotide
  Sense strand starting at position 2850 of SEQ ID NO: 1560506
guaaauucuuucuugggag

SEQ ID NO: 1604720 - RNA, 19 nt, Artificial Sequence
  Description of Artificial Sequence: Synthetic oligonucleotide
  Antisense strand to SEQ ID NO: 1604719
cucccaagaaagaauuuac

SEQ ID NO: 1604721 - RNA, 19 nt, Artificial Sequence
  Description of Artificial Sequence: Synthetic oligonucleotide
  Sense strand starting at position 2854 of SEQ ID NO: 1560506
auucuuucuugggagacaa

SEQ ID NO: 1604722 - RNA, 19 nt, Artificial Sequence
  Description of Artificial Sequence: Synthetic oligonucleotide
  Antisense strand to SEQ ID NO: 1604721
uugucucccaagaaagaau

SEQ ID NO: 1604723 - RNA, 19 nt, Artificial Sequence
  Description of Artificial Sequence: Synthetic oligonucleotide
  Sense strand starting at position 2874 of SEQ ID NO: 1560506
gcuuuaacaugcuccaaga

SEQ ID NO: 1604724 - RNA, 19 nt, Artificial Sequence
  Description of Artificial Sequence: Synthetic oligonucleotide
  Antisense strand to SEQ ID NO: 1604723
ucuuggagcauguuaaagc

SEQ ID NO: 1604725 - RNA, 19 nt, Artificial Sequence
  Description of Artificial Sequence: Synthetic oligonucleotide
  Sense strand starting at position 2925 of SEQ ID NO: 1560506
gaaagauugucacuaggca

SEQ ID NO: 1604726 - RNA, 19 nt, Artificial Sequence
  Description of Artificial Sequence: Synthetic oligonucleotide
  Antisense strand to SEQ ID NO: 1604725
ugccuagugacaaucuuuc

SEQ ID NO: 1604727 - RNA, 19 nt, Artificial Sequence
  Description of Artificial Sequence: Synthetic oligonucleotide
  Sense strand starting at position 2929 of SEQ ID NO: 1560506
gauugucacuaggcaaaug

SEQ ID NO: 1604728 - RNA, 19 nt, Artificial Sequence
  Description of Artificial Sequence: Synthetic oligonucleotide
  Antisense strand to SEQ ID NO: 1604727
cauuugccuagugacaauc

SEQ ID NO: 1604729 - RNA, 19 nt, Artificial Sequence
  Description of Artificial Sequence: Synthetic oligonucleotide
  Sense strand starting at position 2963 of SEQ ID NO: 1560506
agccgaaagcuggauuauu

SEQ ID NO: 1604730 - RNA, 19 nt, Artificial Sequence
  Description of Artificial Sequence: Synthetic oligonucleotide
  Antisense strand to SEQ ID NO: 1604729
aauaauccagcuuucggcu

SEQ ID NO: 1604731 - RNA, 19 nt, Artificial Sequence
  Description of Artificial Sequence: Synthetic oligonucleotide
  Sense strand starting at position 3051 of SEQ ID NO: 1560506
ggugguccauguguguaau

SEQ ID NO: 1604732 - RNA, 19 nt, Artificial Sequence
  Description of Artificial Sequence: Synthetic oligonucleotide
  Antisense strand to SEQ ID NO: 1604731
auuacacacauggaccacc

SEQ ID NO: 1604733 - RNA, 19 nt, Artificial Sequence
  Description of Artificial Sequence: Synthetic oligonucleotide
  Sense strand starting at position 3383 of SEQ ID NO: 1560506
ccaagagguugugucuaca

SEQ ID NO: 1604734 - RNA, 19 nt, Artificial Sequence
  Description of Artificial Sequence: Synthetic oligonucleotide
  Antisense strand to SEQ ID NO: 1604733
uguagacacaaccucuugg

SEQ ID NO: 1604735 - RNA, 19 nt, Artificial Sequence
  Description of Artificial Sequence: Synthetic oligonucleotide
  Sense strand starting at position 3546 of SEQ ID NO: 1560506
auuauugaguuagagggau

SEQ ID NO: 1604736 - RNA, 19 nt, Artificial Sequence
  Description of Artificial Sequence: Synthetic oligonucleotide
  Antisense strand to SEQ ID NO: 1604735
aucccucuaacucaauaau

SEQ ID NO: 1604737 - RNA, 19 nt, Artificial Sequence
  Description of Artificial Sequence: Synthetic oligonucleotide
  Sense strand starting at position 3656 of SEQ ID NO: 1560506
ccacaaggaucuggagaaa

SEQ ID NO: 1604738 - RNA, 19 nt, Artificial Sequence
  Description of Artificial Sequence: Synthetic oligonucleotide
  Antisense strand to SEQ ID NO: 1604737
uuucuccagauccuugugg

SEQ ID NO: 1604739 - RNA, 19 nt, Artificial Sequence
  Description of Artificial Sequence: Synthetic oligonucleotide
  Sense strand starting at position 3732 of SEQ ID NO: 1560506
uccuuugauggccauaaca

SEQ ID NO: 1604740 - RNA, 19 nt, Artificial Sequence
  Description of Artificial Sequence: Synthetic oligonucleotide
  Antisense strand to SEQ ID NO: 1604739
uguuauggccaucaaagga

SEQ ID NO: 1604741 - RNA, 19 nt, Artificial Sequence
  Description of Artificial Sequence: Synthetic oligonucleotide
  Sense strand starting at position 3734 of SEQ ID NO: 1560506
cuuugauggccauaacaca

SEQ ID NO: 1604742 - RNA, 19 nt, Artificial Sequence
  Description of Artificial Sequence: Synthetic oligonucleotide
  Antisense strand to SEQ ID NO: 1604741
uguguuauggccaucaaag

SEQ ID NO: 1604743 - RNA, 19 nt, Artificial Sequence
  Description of Artificial Sequence: Synthetic oligonucleotide
  Sense strand starting at position 3759 of SEQ ID NO: 1560506
caaauuggguggcuugaaa

SEQ ID NO: 1604744 - RNA, 19 nt, Artificial Sequence
  Description of Artificial Sequence: Synthetic oligonucleotide
  Antisense strand to SEQ ID NO: 1604743
uuucaagccacccaauuug

SEQ ID NO: 1604745 - RNA, 19 nt, Artificial Sequence
  Description of Artificial Sequence: Synthetic oligonucleotide
  Sense strand starting at position 3846 of SEQ ID NO: 1560506
acacucucucgagaucuuu

SEQ ID NO: 1604746 - RNA, 19 nt, Artificial Sequence
  Description of Artificial Sequence: Synthetic oligonucleotide
  Antisense strand to SEQ ID NO: 1604745
aaagaucucgagagagugu

SEQ ID NO: 1604747 - RNA, 19 nt, Artificial Sequence
  Description of Artificial Sequence: Synthetic oligonucleotide
  Sense strand starting at position 3973 of SEQ ID NO: 1560506
gccugcaucuccuucugua

SEQ ID NO: 1604748 - RNA, 19 nt, Artificial Sequence
  Description of Artificial Sequence: Synthetic oligonucleotide
  Antisense strand to SEQ ID NO: 1604747
uacagaaggagaugcaggc

SEQ ID NO: 1604749 - RNA, 19 nt, Artificial Sequence
  Description of Artificial Sequence: Synthetic oligonucleotide
  Sense strand starting at position 211 of SEQ ID NO: 1560507
gucacacaguuuguaauga

SEQ ID NO: 1604750 - RNA, 19 nt, Artificial Sequence
  Description of Artificial Sequence: Synthetic oligonucleotide
  Antisense strand to SEQ ID NO: 1604749
ucauuacaaacugugugac

SEQ ID NO: 1604751 - RNA, 19 nt, Artificial Sequence
  Description of Artificial Sequence: Synthetic oligonucleotide
  Sense strand starting at position 306 of SEQ ID NO: 1560507
agugcuggcuuccuagauu

SEQ ID NO: 1604752 - RNA, 19 nt, Artificial Sequence
  Description of Artificial Sequence: Synthetic oligonucleotide
  Antisense strand to SEQ ID NO: 1604751
aaucuaggaagccagcacu

SEQ ID NO: 1604753 - RNA, 19 nt, Artificial Sequence
  Description of Artificial Sequence: Synthetic oligonucleotide
  Sense strand starting at position 405 of SEQ ID NO: 1560507
cacagaucuccaggagcca

SEQ ID NO: 1604754 - RNA, 19 nt, Artificial Sequence
  Description of Artificial Sequence: Synthetic oligonucleotide
  Antisense strand to SEQ ID NO: 1604753
uggcuccuggagaucugug

SEQ ID NO: 1604755 - RNA, 19 nt, Artificial Sequence
  Description of Artificial Sequence: Synthetic oligonucleotide
  Sense strand starting at position 498 of SEQ ID NO: 1560507
cagcuuccugcaugucaga

SEQ ID NO: 1604756 - RNA, 19 nt, Artificial Sequence
  Description of Artificial Sequence: Synthetic oligonucleotide
  Antisense strand to SEQ ID NO: 1604755
ucugacaugcaggaagcug

SEQ ID NO: 1604757 - RNA, 19 nt, Artificial Sequence
  Description of Artificial Sequence: Synthetic oligonucleotide
  Sense strand starting at position 540 of SEQ ID NO: 1560507
gccucagucuuccaggaug

SEQ ID NO: 1604758 - RNA, 19 nt, Artificial Sequence
  Description of Artificial Sequence: Synthetic oligonucleotide
  Antisense strand to SEQ ID NO: 1604757
cauccuggaagacugaggc

SEQ ID NO: 1604759 - RNA, 19 nt, Artificial Sequence
  Description of Artificial Sequence: Synthetic oligonucleotide
  Sense strand starting at position 682 of SEQ ID NO: 1560507
ggucauuggcucugagauu

SEQ ID NO: 1604760 - RNA, 19 nt, Artificial Sequence
  Description of Artificial Sequence: Synthetic oligonucleotide
  Antisense strand to SEQ ID NO: 1604759
aaucucagagccaaugacc

SEQ ID NO: 1604761 - RNA, 19 nt, Artificial Sequence
  Description of Artificial Sequence: Synthetic oligonucleotide
  Sense strand starting at position 683 of SEQ ID NO: 1560507
gucauuggcucugagauuu

SEQ ID NO: 1604762 - RNA, 19 nt, Artificial Sequence
  Description of Artificial Sequence: Synthetic oligonucleotide
  Antisense strand to SEQ ID NO: 1604761
aaaucucagagccaaugac

SEQ ID NO: 1604763 - RNA, 19 nt, Artificial Sequence
  Description of Artificial Sequence: Synthetic oligonucleotide
  Sense strand starting at position 797 of SEQ ID NO: 1560507
aacugagaucccuggguga

SEQ ID NO: 1604764 - RNA, 19 nt, Artificial Sequence
  Description of Artificial Sequence: Synthetic oligonucleotide
  Antisense strand to SEQ ID NO: 1604763
ucacccagggaucucaguu

SEQ ID NO: 1604765 - RNA, 19 nt, Artificial Sequence
  Description of Artificial Sequence: Synthetic oligonucleotide
  Sense strand starting at position 799 of SEQ ID NO: 1560507
cugagaucccugggugauu

SEQ ID NO: 1604766 - RNA, 19 nt, Artificial Sequence
  Description of Artificial Sequence: Synthetic oligonucleotide
  Antisense strand to SEQ ID NO: 1604765
aaucacccagggaucucag

SEQ ID NO: 1604767 - RNA, 19 nt, Artificial Sequence
  Description of Artificial Sequence: Synthetic oligonucleotide
  Sense strand starting at position 820 of SEQ ID NO: 1560507
gccucugucccugacauga

SEQ ID NO: 1604768 - RNA, 19 nt, Artificial Sequence
  Description of Artificial Sequence: Synthetic oligonucleotide
  Antisense strand to SEQ ID NO: 1604767
ucaugucagggacagaggc

SEQ ID NO: 1604769 - RNA, 19 nt, Artificial Sequence
  Description of Artificial Sequence: Synthetic oligonucleotide
  Sense strand starting at position 822 of SEQ ID NO: 1560507
cucugucccugacaugaua

SEQ ID NO: 1604770 - RNA, 19 nt, Artificial Sequence
  Description of Artificial Sequence: Synthetic oligonucleotide
  Antisense strand to SEQ ID NO: 1604769
uaucaugucagggacagag

SEQ ID NO: 1604771 - RNA, 19 nt, Artificial Sequence
  Description of Artificial Sequence: Synthetic oligonucleotide
  Sense strand starting at position 825 of SEQ ID NO: 1560507
ugucccugacaugauaauu

SEQ ID NO: 1604772 - RNA, 19 nt, Artificial Sequence
  Description of Artificial Sequence: Synthetic oligonucleotide
  Antisense strand to SEQ ID NO: 1604771
aauuaucaugucagggaca

SEQ ID NO: 1604773 - RNA, 19 nt, Artificial Sequence
  Description of Artificial Sequence: Synthetic oligonucleotide
  Sense strand starting at position 867 of SEQ ID NO: 1560507
cccagcuauuguccuauau

SEQ ID NO: 1604774 - RNA, 19 nt, Artificial Sequence
  Description of Artificial Sequence: Synthetic oligonucleotide
  Antisense strand to SEQ ID NO: 1604773
auauaggacaauagcuggg

SEQ ID NO: 1604775 - RNA, 19 nt, Artificial Sequence
  Description of Artificial Sequence: Synthetic oligonucleotide
  Sense strand starting at position 900 of SEQ ID NO: 1560507
ucuugucuccugugcugua

SEQ ID NO: 1604776 - RNA, 19 nt, Artificial Sequence
  Description of Artificial Sequence: Synthetic oligonucleotide
  Antisense strand to SEQ ID NO: 1604775
uacagcacaggagacaaga

SEQ ID NO: 1604777 - RNA, 19 nt, Artificial Sequence
  Description of Artificial Sequence: Synthetic oligonucleotide
  Sense strand starting at position 1155 of SEQ ID NO: 1560507
ggcaucucugcagacaaca

SEQ ID NO: 1604778 - RNA, 19 nt, Artificial Sequence
  Description of Artificial Sequence: Synthetic oligonucleotide
  Antisense strand to SEQ ID NO: 1604777
uguugucugcagagaugcc

SEQ ID NO: 1604779 - RNA, 19 nt, Artificial Sequence
  Description of Artificial Sequence: Synthetic oligonucleotide
  Sense strand starting at position 3054 of SEQ ID NO: 1560507
gcggaagcacugcguuuaa

SEQ ID NO: 1604780 - RNA, 19 nt, Artificial Sequence
  Description of Artificial Sequence: Synthetic oligonucleotide
  Antisense strand to SEQ ID NO: 1604779
uuaaacgcagugcuuccgc

SEQ ID NO: 1604781 - RNA, 19 nt, Artificial Sequence
  Description of Artificial Sequence: Synthetic oligonucleotide
  Sense strand starting at position 3080 of SEQ ID NO: 1560507
gggcuggcgcccgaguaau

SEQ ID NO: 1604782 - RNA, 19 nt, Artificial Sequence
  Description of Artificial Sequence: Synthetic oligonucleotide
  Antisense strand to SEQ ID NO: 1604781
auuacucgggcgccagccc

SEQ ID NO: 1604783 - RNA, 19 nt, Artificial Sequence
  Description of Artificial Sequence: Synthetic oligonucleotide
  Sense strand starting at position 3152 of SEQ ID NO: 1560507
gcgggagauucggccugaa

SEQ ID NO: 1604784 - RNA, 19 nt, Artificial Sequence
  Description of Artificial Sequence: Synthetic oligonucleotide
  Antisense strand to SEQ ID NO: 1604783
uucaggccgaaucucccgc

SEQ ID NO: 1604785 - RNA, 19 nt, Artificial Sequence
  Description of Artificial Sequence: Synthetic oligonucleotide
  Sense strand starting at position 3155 of SEQ ID NO: 1560507
ggagauucggccugaagac

SEQ ID NO: 1604786 - RNA, 19 nt, Artificial Sequence
  Description of Artificial Sequence: Synthetic oligonucleotide
  Antisense strand to SEQ ID NO: 1604785
gucuucaggccgaaucucc

SEQ ID NO: 1604787 - RNA, 19 nt, Artificial Sequence
  Description of Artificial Sequence: Synthetic oligonucleotide
  Sense strand starting at position 3156 of SEQ ID NO: 1560507
gagauucggccugaagacu

SEQ ID NO: 1604788 - RNA, 19 nt, Artificial Sequence
  Description of Artificial Sequence: Synthetic oligonucleotide
  Antisense strand to SEQ ID NO: 1604787
agucuucaggccgaaucuc

SEQ ID NO: 1604789 - RNA, 19 nt, Artificial Sequence
  Description of Artificial Sequence: Synthetic oligonucleotide
  Sense strand starting at position 3611 of SEQ ID NO: 1560507
ccacgucucucauccaguu

SEQ ID NO: 1604790 - RNA, 19 nt, Artificial Sequence
  Description of Artificial Sequence: Synthetic oligonucleotide
  Antisense strand to SEQ ID NO: 1604789
aacuggaugagagacgugg

SEQ ID NO: 1604791 - RNA, 19 nt, Artificial Sequence
  Description of Artificial Sequence: Synthetic oligonucleotide
  Sense strand starting at position 3678 of SEQ ID NO: 1560507
gacuaauccucucagcgga

SEQ ID NO: 1604792 - RNA, 19 nt, Artificial Sequence
  Description of Artificial Sequence: Synthetic oligonucleotide
  Antisense strand to SEQ ID NO: 1604791
uccgcugagaggauuaguc

SEQ ID NO: 1604793 - RNA, 19 nt, Artificial Sequence
  Description of Artificial Sequence: Synthetic oligonucleotide
  Sense strand starting at position 3726 of SEQ ID NO: 1560507
accguuuacaaucgaggaa

SEQ ID NO: 1604794 - RNA, 19 nt, Artificial Sequence
  Description of Artificial Sequence: Synthetic oligonucleotide
  Antisense strand to SEQ ID NO: 1604793
uuccucgauuguaaacggu

SEQ ID NO: 1604795 - RNA, 19 nt, Artificial Sequence
  Description of Artificial Sequence: Synthetic oligonucleotide
  Sense strand starting at position 3727 of SEQ ID NO: 1560507
ccguuuacaaucgaggaaa

SEQ ID NO: 1604796 - RNA, 19 nt, Artificial Sequence
  Description of Artificial Sequence: Synthetic oligonucleotide
  Antisense strand to SEQ ID NO: 1604795
uuuccucgauuguaaacgg

SEQ ID NO: 1604797 - RNA, 19 nt, Artificial Sequence
  Description of Artificial Sequence: Synthetic oligonucleotide
  Sense strand starting at position 812 of SEQ ID NO: 1560508
agugacucacaucgcuaau

SEQ ID NO: 1604798 - RNA, 19 nt, Artificial Sequence
  Description of Artificial Sequence: Synthetic oligonucleotide
  Antisense strand to SEQ ID NO: 1604797
auuagcgaugugagucacu

SEQ ID NO: 1604799 - RNA, 19 nt, Artificial Sequence
  Description of Artificial Sequence: Synthetic oligonucleotide
  Sense strand starting at position 1153 of SEQ ID NO: 1560508
aggaucucaccauguacuu

SEQ ID NO: 1604800 - RNA, 19 nt, Artificial Sequence
  Description of Artificial Sequence: Synthetic oligonucleotide
  Antisense strand to SEQ ID NO: 1604799
aaguacauggugagauccu

SEQ ID NO: 1604801 - RNA, 19 nt, Artificial Sequence
  Description of Artificial Sequence: Synthetic oligonucleotide
  Sense strand starting at position 1219 of SEQ ID NO: 1560508
ggacucaugcucugaggac

SEQ ID NO: 1604802 - RNA, 19 nt, Artificial Sequence
  Description of Artificial Sequence: Synthetic oligonucleotide
  Antisense strand to SEQ ID NO: 1604801
guccucagagcaugagucc

SEQ ID NO: 1604803 - RNA, 19 nt, Artificial Sequence
  Description of Artificial Sequence: Synthetic oligonucleotide
  Sense strand starting at position 1220 of SEQ ID NO: 1560508
gacucaugcucugaggacu

SEQ ID NO: 1604804 - RNA, 19 nt, Artificial Sequence
  Description of Artificial Sequence: Synthetic oligonucleotide
  Antisense strand to SEQ ID NO: 1604803
aguccucagagcaugaguc

SEQ ID NO: 1604805 - RNA, 19 nt, Artificial Sequence
  Description of Artificial Sequence: Synthetic oligonucleotide
  Sense strand starting at position 2057 of SEQ ID NO: 1560508
ggguuagugccagagccuu

SEQ ID NO: 1604806 - RNA, 19 nt, Artificial Sequence
  Description of Artificial Sequence: Synthetic oligonucleotide
  Antisense strand to SEQ ID NO: 1604805
aaggcucuggcacuaaccc

SEQ ID NO: 1604807 - RNA, 19 nt, Artificial Sequence
  Description of Artificial Sequence: Synthetic oligonucleotide
  Sense strand starting at position 2096 of SEQ ID NO: 1560508
ggauguacuucucccagag

SEQ ID NO: 1604808 - RNA, 19 nt, Artificial Sequence
  Description of Artificial Sequence: Synthetic oligonucleotide
  Antisense strand to SEQ ID NO: 1604807
cucugggagaaguacaucc

SEQ ID NO: 1604809 - RNA, 19 nt, Artificial Sequence
  Description of Artificial Sequence: Synthetic oligonucleotide
  Sense strand starting at position 2441 of SEQ ID NO: 1560508
augagcugugccuggacua

SEQ ID NO: 1604810 - RNA, 19 nt, Artificial Sequence
  Description of Artificial Sequence: Synthetic oligonucleotide
  Antisense strand to SEQ ID NO: 1604809
uaguccaggcacagcucau

SEQ ID NO: 1604811 - RNA, 19 nt, Artificial Sequence
  Description of Artificial Sequence: Synthetic oligonucleotide
  Sense strand starting at position 2975 of SEQ ID NO: 1560508
ccuguaauggcaggaucau

SEQ ID NO: 1604812 - RNA, 19 nt, Artificial Sequence
  Description of Artificial Sequence: Synthetic oligonucleotide
  Antisense strand to SEQ ID NO: 1604811
augauccugccauuacagg

SEQ ID NO: 1604813 - RNA, 19 nt, Artificial Sequence
  Description of Artificial Sequence: Synthetic oligonucleotide
  Sense strand starting at position 2976 of SEQ ID NO: 1560508
cuguaauggcaggaucaua

SEQ ID NO: 1604814 - RNA, 19 nt, Artificial Sequence
  Description of Artificial Sequence: Synthetic oligonucleotide
  Antisense strand to SEQ ID NO: 1604813
uaugauccugccauuacag

SEQ ID NO: 1604815 - RNA, 19 nt, Artificial Sequence
  Description of Artificial Sequence: Synthetic oligonucleotide
  Sense strand starting at position 3059 of SEQ ID NO: 1560508
ggacuacaggccugcaaua

SEQ ID NO: 1604816 - RNA, 19 nt, Artificial Sequence
  Description of Artificial Sequence: Synthetic oligonucleotide
  Antisense strand to SEQ ID NO: 1604815
uauugcaggccuguagucc

SEQ ID NO: 1604817 - RNA, 19 nt, Artificial Sequence
  Description of Artificial Sequence: Synthetic oligonucleotide
  Sense strand starting at position 3533 of SEQ ID NO: 1560508
cggccaagucuucgcuauu

SEQ ID NO: 1604818 - RNA, 19 nt, Artificial Sequence
  Description of Artificial Sequence: Synthetic oligonucleotide
  Antisense strand to SEQ ID NO: 1604817
aauagcgaagacuuggccg

SEQ ID NO: 1604819 - RNA, 19 nt, Artificial Sequence
  Description of Artificial Sequence: Synthetic oligonucleotide
  Sense strand starting at position 3539 of SEQ ID NO: 1560508
agucuucgcuauugucuua

SEQ ID NO: 1604820 - RNA, 19 nt, Artificial Sequence
  Description of Artificial Sequence: Synthetic oligonucleotide
  Antisense strand to SEQ ID NO: 1604819
uaagacaauagcgaagacu

SEQ ID NO: 1604821 - RNA, 19 nt, Artificial Sequence
  Description of Artificial Sequence: Synthetic oligonucleotide
  Sense strand starting at position 3544 of SEQ ID NO: 1560508
ucgcuauugucuuaaccag

SEQ ID NO: 1604822 - RNA, 19 nt, Artificial Sequence
  Description of Artificial Sequence: Synthetic oligonucleotide
  Antisense strand to SEQ ID NO: 1604821
cugguuaagacaauagcga

SEQ ID NO: 1604823 - RNA, 19 nt, Artificial Sequence
  Description of Artificial Sequence: Synthetic oligonucleotide
  Sense strand starting at position 3669 of SEQ ID NO: 1560508
uguuguuucuauuacugua

SEQ ID NO: 1604824 - RNA, 19 nt, Artificial Sequence
  Description of Artificial Sequence: Synthetic oligonucleotide
  Antisense strand to SEQ ID NO: 1604823
uacaguaauagaaacaaca

SEQ ID NO: 1604825 - RNA, 19 nt, Artificial Sequence
  Description of Artificial Sequence: Synthetic oligonucleotide
  Sense strand starting at position 3672 of SEQ ID NO: 1560508
uguuucuauuacuguacaa

SEQ ID NO: 1604826 - RNA, 19 nt, Artificial Sequence
  Description of Artificial Sequence: Synthetic oligonucleotide
  Antisense strand to SEQ ID NO: 1604825
uuguacaguaauagaaaca

SEQ ID NO: 1604827 - RNA, 19 nt, Artificial Sequence
  Description of Artificial Sequence: Synthetic oligonucleotide
  Sense strand starting at position 3741 of SEQ ID NO: 1560508
gcaagcacuuugggaagau

SEQ ID NO: 1604828 - RNA, 19 nt, Artificial Sequence
  Description of Artificial Sequence: Synthetic oligonucleotide
  Antisense strand to SEQ ID NO: 1604827
aucuucccaaagugcuugc

SEQ ID NO: 1604829 - RNA, 19 nt, Artificial Sequence
  Description of Artificial Sequence: Synthetic oligonucleotide
  Sense strand starting at position 497 of SEQ ID NO: 1560509
gacauuaugugauugacag

SEQ ID NO: 1604830 - RNA, 19 nt, Artificial Sequence
  Description of Artificial Sequence: Synthetic oligonucleotide
  Antisense strand to SEQ ID NO: 1604829
cugucaaucacauaauguc

SEQ ID NO: 1604831 - RNA, 19 nt, Artificial Sequence
  Description of Artificial Sequence: Synthetic oligonucleotide
  Sense strand starting at position 498 of SEQ ID NO: 1560509
acauuaugugauugacaga

SEQ ID NO: 1604832 - RNA, 19 nt, Artificial Sequence
  Description of Artificial Sequence: Synthetic oligonucleotide
  Antisense strand to SEQ ID NO: 1604831
ucugucaaucacauaaugu

SEQ ID NO: 1604833 - RNA, 19 nt, Artificial Sequence
  Description of Artificial Sequence: Synthetic oligonucleotide
  Sense strand starting at position 503 of SEQ ID NO: 1560509
augugauugacagagucga

SEQ ID NO: 1604834 - RNA, 19 nt, Artificial Sequence
  Description of Artificial Sequence: Synthetic oligonucleotide
  Antisense strand to SEQ ID NO: 1604833
ucgacucugucaaucacau

SEQ ID NO: 1604835 - RNA, 19 nt, Artificial Sequence
  Description of Artificial Sequence: Synthetic oligonucleotide
  Sense strand starting at position 709 of SEQ ID NO: 1560509
gugggaaacccaggcuaua

SEQ ID NO: 1604836 - RNA, 19 nt, Artificial Sequence
  Description of Artificial Sequence: Synthetic oligonucleotide
  Antisense strand to SEQ ID NO: 1604835
uauagccuggguuucccac

SEQ ID NO: 1604837 - RNA, 19 nt, Artificial Sequence
  Description of Artificial Sequence: Synthetic oligonucleotide
  Sense strand starting at position 720 of SEQ ID NO: 1560509
aggcuauauuccuuaaaug

SEQ ID NO: 1604838 - RNA, 19 nt, Artificial Sequence
  Description of Artificial Sequence: Synthetic oligonucleotide
  Antisense strand to SEQ ID NO: 1604837
cauuuaaggaauauagccu

SEQ ID NO: 1604839 - RNA, 19 nt, Artificial Sequence
  Description of Artificial Sequence: Synthetic oligonucleotide
  Sense strand starting at position 721 of SEQ ID NO: 1560509
ggcuauauuccuuaaauga

SEQ ID NO: 1604840 - RNA, 19 nt, Artificial Sequence
  Description of Artificial Sequence: Synthetic oligonucleotide
  Antisense strand to SEQ ID NO: 1604839
ucauuuaaggaauauagcc

SEQ ID NO: 1604841 - RNA, 19 nt, Artificial Sequence
  Description of Artificial Sequence: Synthetic oligonucleotide
  Sense strand starting at position 931 of SEQ ID NO: 1560509
uccagauucuugggcagaa

SEQ ID NO: 1604842 - RNA, 19 nt, Artificial Sequence
  Description of Artificial Sequence: Synthetic oligonucleotide
  Antisense strand to SEQ ID NO: 1604841
uucugcccaagaaucugga

SEQ ID NO: 1604843 - RNA, 19 nt, Artificial Sequence
  Description of Artificial Sequence: Synthetic oligonucleotide
  Sense strand starting at position 932 of SEQ ID NO: 1560509
ccagauucuugggcagaac

SEQ ID NO: 1604844 - RNA, 19 nt, Artificial Sequence
  Description of Artificial Sequence: Synthetic oligonucleotide
  Antisense strand to SEQ ID NO: 1604843
guucugcccaagaaucugg

SEQ ID NO: 1604845 - RNA, 19 nt, Artificial Sequence
  Description of Artificial Sequence: Synthetic oligonucleotide
  Sense strand starting at position 998 of SEQ ID NO: 1560509
aagggaguuaugcguccua

SEQ ID NO: 1604846 - RNA, 19 nt, Artificial Sequence
  Description of Artificial Sequence: Synthetic oligonucleotide
  Antisense strand to SEQ ID NO: 1604845
uaggacgcauaacucccuu

SEQ ID NO: 1604847 - RNA, 19 nt, Artificial Sequence
  Description of Artificial Sequence: Synthetic oligonucleotide
  Sense strand starting at position 1003 of SEQ ID NO: 1560509
aguuaugcguccuacauga

SEQ ID NO: 1604848 - RNA, 19 nt, Artificial Sequence
  Description of Artificial Sequence: Synthetic oligonucleotide
  Antisense strand to SEQ ID NO: 1604847
ucauguaggacgcauaacu

SEQ ID NO: 1604849 - RNA, 19 nt, Artificial Sequence
  Description of Artificial Sequence: Synthetic oligonucleotide
  Sense strand starting at position 1014 of SEQ ID NO: 1560509
cuacaugagccucaguuua

SEQ ID NO: 1604850 - RNA, 19 nt, Artificial Sequence
  Description of Artificial Sequence: Synthetic oligonucleotide
  Antisense strand to SEQ ID NO: 1604849
uaaacugaggcucauguag

SEQ ID NO: 1604851 - RNA, 19 nt, Artificial Sequence
  Description of Artificial Sequence: Synthetic oligonucleotide
  Sense strand starting at position 1016 of SEQ ID NO: 1560509
acaugagccucaguuuacu

SEQ ID NO: 1604852 - RNA, 19 nt, Artificial Sequence
  Description of Artificial Sequence: Synthetic oligonucleotide
  Antisense strand to SEQ ID NO: 1604851
aguaaacugaggcucaugu

SEQ ID NO: 1604853 - RNA, 19 nt, Artificial Sequence
  Description of Artificial Sequence: Synthetic oligonucleotide
  Sense strand starting at position 1038 of SEQ ID NO: 1560509
cugugaaaugggugcauaa

SEQ ID NO: 1604854 - RNA, 19 nt, Artificial Sequence
  Description of Artificial Sequence: Synthetic oligonucleotide
  Antisense strand to SEQ ID NO: 1604853
uuaugcacccauuucacag

SEQ ID NO: 1604855 - RNA, 19 nt, Artificial Sequence
  Description of Artificial Sequence: Synthetic oligonucleotide
  Sense strand starting at position 1040 of SEQ ID NO: 1560509
gugaaaugggugcauaacu

SEQ ID NO: 1604856 - RNA, 19 nt, Artificial Sequence
  Description of Artificial Sequence: Synthetic oligonucleotide
  Antisense strand to SEQ ID NO: 1604855
aguuaugcacccauuucac

SEQ ID NO: 1604857 - RNA, 19 nt, Artificial Sequence
  Description of Artificial Sequence: Synthetic oligonucleotide
  Sense strand starting at position 1186 of SEQ ID NO: 1560509
uugcuaaggcuuuagaauu

SEQ ID NO: 1604858 - RNA, 19 nt, Artificial Sequence
  Description of Artificial Sequence: Synthetic oligonucleotide
  Antisense strand to SEQ ID NO: 1604857
aauucuaaagccuuagcaa

SEQ ID NO: 1604859 - RNA, 19 nt, Artificial Sequence
  Description of Artificial Sequence: Synthetic oligonucleotide
  Sense strand starting at position 1200 of SEQ ID NO: 1560509
gaauuugccuccggacauc

SEQ ID NO: 1604860 - RNA, 19 nt, Artificial Sequence
  Description of Artificial Sequence: Synthetic oligonucleotide
  Antisense strand to SEQ ID NO: 1604859
gauguccggaggcaaauuc

SEQ ID NO: 1604861 - RNA, 19 nt, Artificial Sequence
  Description of Artificial Sequence: Synthetic oligonucleotide
  Sense strand starting at position 2075 of SEQ ID NO: 1560509
gcggcuucgccagcuacaa

SEQ ID NO: 1604862 - RNA, 19 nt, Artificial Sequence
  Description of Artificial Sequence: Synthetic oligonucleotide
  Antisense strand to SEQ ID NO: 1604861
uuguagcuggcgaagccgc

SEQ ID NO: 1604863 - RNA, 19 nt, Artificial Sequence
  Description of Artificial Sequence: Synthetic oligonucleotide
  Sense strand starting at position 2076 of SEQ ID NO: 1560509
cggcuucgccagcuacaaa

SEQ ID NO: 1604864 - RNA, 19 nt, Artificial Sequence
  Description of Artificial Sequence: Synthetic oligonucleotide
  Antisense strand to SEQ ID NO: 1604863
uuuguagcuggcgaagccg

SEQ ID NO: 1604865 - RNA, 19 nt, Artificial Sequence
  Description of Artificial Sequence: Synthetic oligonucleotide
  Sense strand starting at position 2077 of SEQ ID NO: 1560509
ggcuucgccagcuacaaau

SEQ ID NO: 1604866 - RNA, 19 nt, Artificial Sequence
  Description of Artificial Sequence: Synthetic oligonucleotide
  Antisense strand to SEQ ID NO: 1604865
auuuguagcuggcgaagcc

SEQ ID NO: 1604867 - RNA, 19 nt, Artificial Sequence
  Description of Artificial Sequence: Synthetic oligonucleotide
  Sense strand starting at position 2704 of SEQ ID NO: 1560509
uuuggaggauuccuguuga

SEQ ID NO: 1604868 - RNA, 19 nt, Artificial Sequence
  Description of Artificial Sequence: Synthetic oligonucleotide
  Antisense strand to SEQ ID NO: 1604867
ucaacaggaauccuccaaa

SEQ ID NO: 1604869 - RNA, 19 nt, Artificial Sequence
  Description of Artificial Sequence: Synthetic oligonucleotide
  Sense strand starting at position 2988 of SEQ ID NO: 1560509
gugcgcucccuguguucaa

SEQ ID NO: 1604870 - RNA, 19 nt, Artificial Sequence
  Description of Artificial Sequence: Synthetic oligonucleotide
  Antisense strand to SEQ ID NO: 1604869
uugaacacagggagcgcac

SEQ ID NO: 1604871 - RNA, 19 nt, Artificial Sequence
  Description of Artificial Sequence: Synthetic oligonucleotide
  Sense strand starting at position 2998 of SEQ ID NO: 1560509
uguguucaaguuggagaaa

SEQ ID NO: 1604872 - RNA, 19 nt, Artificial Sequence
  Description of Artificial Sequence: Synthetic oligonucleotide
  Antisense strand to SEQ ID NO: 1604871
uuucuccaacuugaacaca

SEQ ID NO: 1604873 - RNA, 19 nt, Artificial Sequence
  Description of Artificial Sequence: Synthetic oligonucleotide
  Sense strand starting at position 2999 of SEQ ID NO: 1560509
guguucaaguuggagaaau

SEQ ID NO: 1604874 - RNA, 19 nt, Artificial Sequence
  Description of Artificial Sequence: Synthetic oligonucleotide
  Antisense strand to SEQ ID NO: 1604873
auuucuccaacuugaacac

SEQ ID NO: 1604875 - RNA, 19 nt, Artificial Sequence
  Description of Artificial Sequence: Synthetic oligonucleotide
  Sense strand starting at position 3129 of SEQ ID NO: 1560509
gccuguaugugucugaagu

SEQ ID NO: 1604876 - RNA, 19 nt, Artificial Sequence
  Description of Artificial Sequence: Synthetic oligonucleotide
  Antisense strand to SEQ ID NO: 1604875
acuucagacacauacaggc

SEQ ID NO: 1604877 - RNA, 19 nt, Artificial Sequence
  Description of Artificial Sequence: Synthetic oligonucleotide
  Sense strand starting at position 3130 of SEQ ID NO: 1560509
ccuguaugugucugaaguc

SEQ ID NO: 1604878 - RNA, 19 nt, Artificial Sequence
  Description of Artificial Sequence: Synthetic oligonucleotide
  Antisense strand to SEQ ID NO: 1604877
gacuucagacacauacagg

SEQ ID NO: 1604879 - RNA, 19 nt, Artificial Sequence
  Description of Artificial Sequence: Synthetic oligonucleotide
  Sense strand starting at position 3131 of SEQ ID NO: 1560509
cuguaugugucugaagucu

SEQ ID NO: 1604880 - RNA, 19 nt, Artificial Sequence
  Description of Artificial Sequence: Synthetic oligonucleotide
  Antisense strand to SEQ ID NO: 1604879
agacuucagacacauacag

SEQ ID NO: 1604881 - RNA, 19 nt, Artificial Sequence
  Description of Artificial Sequence: Synthetic oligonucleotide
  Sense strand starting at position 3143 of SEQ ID NO: 1560509
gaagucuagcaacgacauu

SEQ ID NO: 1604882 - RNA, 19 nt, Artificial Sequence
  Description of Artificial Sequence: Synthetic oligonucleotide
  Antisense strand to SEQ ID NO: 1604881
aaugucguugcuagacuuc

SEQ ID NO: 1604883 - RNA, 19 nt, Artificial Sequence
  Description of Artificial Sequence: Synthetic oligonucleotide
  Sense strand starting at position 3308 of SEQ ID NO: 1560509
gggccaguuucacuugugu

SEQ ID NO: 1604884 - RNA, 19 nt, Artificial Sequence
  Description of Artificial Sequence: Synthetic oligonucleotide
  Antisense strand to SEQ ID NO: 1604883
acacaagugaaacuggccc

SEQ ID NO: 1604885 - RNA, 19 nt, Artificial Sequence
  Description of Artificial Sequence: Synthetic oligonucleotide
  Sense strand starting at position 3317 of SEQ ID NO: 1560509
ucacuuguguaauggguuu

SEQ ID NO: 1604886 - RNA, 19 nt, Artificial Sequence
  Description of Artificial Sequence: Synthetic oligonucleotide
  Antisense strand to SEQ ID NO: 1604885
aaacccauuacacaaguga

SEQ ID NO: 1604887 - RNA, 19 nt, Artificial Sequence
  Description of Artificial Sequence: Synthetic oligonucleotide
  Sense strand starting at position 3319 of SEQ ID NO: 1560509
acuuguguaauggguuuaa

SEQ ID NO: 1604888 - RNA, 19 nt, Artificial Sequence
  Description of Artificial Sequence: Synthetic oligonucleotide
  Antisense strand to SEQ ID NO: 1604887
uuaaacccauuacacaagu

SEQ ID NO: 1604889 - RNA, 19 nt, Artificial Sequence
  Description of Artificial Sequence: Synthetic oligonucleotide
  Sense strand starting at position 3323 of SEQ ID NO: 1560509
guguaauggguuuaauaau

SEQ ID NO: 1604890 - RNA, 19 nt, Artificial Sequence
  Description of Artificial Sequence: Synthetic oligonucleotide
  Antisense strand to SEQ ID NO: 1604889
auuauuaaacccauuacac

SEQ ID NO: 1604891 - RNA, 19 nt, Artificial Sequence
  Description of Artificial Sequence: Synthetic oligonucleotide
  Sense strand starting at position 621 of SEQ ID NO: 1560510
ccgccauucuccugaucca

SEQ ID NO: 1604892 - RNA, 19 nt, Artificial Sequence
  Description of Artificial Sequence: Synthetic oligonucleotide
  Antisense strand to SEQ ID NO: 1604891
uggaucaggagaauggcgg

SEQ ID NO: 1604893 - RNA, 19 nt, Artificial Sequence
  Description of Artificial Sequence: Synthetic oligonucleotide
  Sense strand starting at position 622 of SEQ ID NO: 1560510
cgccauucuccugauccau

SEQ ID NO: 1604894 - RNA, 19 nt, Artificial Sequence
  Description of Artificial Sequence: Synthetic oligonucleotide
  Antisense strand to SEQ ID NO: 1604893
auggaucaggagaauggcg

SEQ ID NO: 1604895 - RNA, 19 nt, Artificial Sequence
  Description of Artificial Sequence: Synthetic oligonucleotide
  Sense strand starting at position 644 of SEQ ID NO: 1560510
ggcguucauauucgaggua

SEQ ID NO: 1604896 - RNA, 19 nt, Artificial Sequence
  Description of Artificial Sequence: Synthetic oligonucleotide
  Antisense strand to SEQ ID NO: 1604895
uaccucgaauaugaacgcc

SEQ ID NO: 1604897 - RNA, 19 nt, Artificial Sequence
  Description of Artificial Sequence: Synthetic oligonucleotide
  Sense strand starting at position 649 of SEQ ID NO: 1560510
ucauauucgagguacuuga

SEQ ID NO: 1604898 - RNA, 19 nt, Artificial Sequence
  Description of Artificial Sequence: Synthetic oligonucleotide
  Antisense strand to SEQ ID NO: 1604897
ucaaguaccucgaauauga

SEQ ID NO: 1604899 - RNA, 19 nt, Artificial Sequence
  Description of Artificial Sequence: Synthetic oligonucleotide
  Sense strand starting at position 660 of SEQ ID NO: 1560510
guacuugaagcccgaagaa

SEQ ID NO: 1604900 - RNA, 19 nt, Artificial Sequence
  Description of Artificial Sequence: Synthetic oligonucleotide
  Antisense strand to SEQ ID NO: 1604899
uucuucgggcuucaaguac

SEQ ID NO: 1604901 - RNA, 19 nt, Artificial Sequence
  Description of Artificial Sequence: Synthetic oligonucleotide
  Sense strand starting at position 770 of SEQ ID NO: 1560510
gguauucggugaagagcuu

SEQ ID NO: 1604902 - RNA, 19 nt, Artificial Sequence
  Description of Artificial Sequence: Synthetic oligonucleotide
  Antisense strand to SEQ ID NO: 1604901
aagcucuucaccgaauacc

SEQ ID NO: 1604903 - RNA, 19 nt, Artificial Sequence
  Description of Artificial Sequence: Synthetic oligonucleotide
  Sense strand starting at position 795 of SEQ ID NO: 1560510
gaacucguauccuggagga

SEQ ID NO: 1604904 - RNA, 19 nt, Artificial Sequence
  Description of Artificial Sequence: Synthetic oligonucleotide
  Antisense strand to SEQ ID NO: 1604903
uccuccaggauacgaguuc

SEQ ID NO: 1604905 - RNA, 19 nt, Artificial Sequence
  Description of Artificial Sequence: Synthetic oligonucleotide
  Sense strand starting at position 853 of SEQ ID NO: 1560510
ccgugauccuucuugaagc

SEQ ID NO: 1604906 - RNA, 19 nt, Artificial Sequence
  Description of Artificial Sequence: Synthetic oligonucleotide
  Antisense strand to SEQ ID NO: 1604905
gcuucaagaaggaucacgg

SEQ ID NO: 1604907 - RNA, 19 nt, Artificial Sequence
  Description of Artificial Sequence: Synthetic oligonucleotide
  Sense strand starting at position 1002 of SEQ ID NO: 1560510
cugcuucucuuucucgaaa

SEQ ID NO: 1604908 - RNA, 19 nt, Artificial Sequence
  Description of Artificial Sequence: Synthetic oligonucleotide
  Antisense strand to SEQ ID NO: 1604907
uuucgagaaagagaagcag

SEQ ID NO: 1604909 - RNA, 19 nt, Artificial Sequence
  Description of Artificial Sequence: Synthetic oligonucleotide
  Sense strand starting at position 1003 of SEQ ID NO: 1560510
ugcuucucuuucucgaaau

SEQ ID NO: 1604910 - RNA, 19 nt, Artificial Sequence
  Description of Artificial Sequence: Synthetic oligonucleotide
  Antisense strand to SEQ ID NO: 1604909
auuucgagaaagagaagca

SEQ ID NO: 1604911 - RNA, 19 nt, Artificial Sequence
  Description of Artificial Sequence: Synthetic oligonucleotide
  Sense strand starting at position 1979 of SEQ ID NO: 1560510
gccgcuucgcagggaaagu

SEQ ID NO: 1604912 - RNA, 19 nt, Artificial Sequence
  Description of Artificial Sequence: Synthetic oligonucleotide
  Antisense strand to SEQ ID NO: 1604911
acuuucccugcgaagcggc

SEQ ID NO: 1604913 - RNA, 19 nt, Artificial Sequence
  Description of Artificial Sequence: Synthetic oligonucleotide
  Sense strand starting at position 1980 of SEQ ID NO: 1560510
ccgcuucgcagggaaaguu

SEQ ID NO: 1604914 - RNA, 19 nt, Artificial Sequence
  Description of Artificial Sequence: Synthetic oligonucleotide
  Antisense strand to SEQ ID NO: 1604913
aacuuucccugcgaagcgg

SEQ ID NO: 1604915 - RNA, 19 nt, Artificial Sequence
  Description of Artificial Sequence: Synthetic oligonucleotide
  Sense strand starting at position 1988 of SEQ ID NO: 1560510
cagggaaaguuacauaaca

SEQ ID NO: 1604916 - RNA, 19 nt, Artificial Sequence
  Description of Artificial Sequence: Synthetic oligonucleotide
  Antisense strand to SEQ ID NO: 1604915
uguuauguaacuuucccug

SEQ ID NO: 1604917 - RNA, 19 nt, Artificial Sequence
  Description of Artificial Sequence: Synthetic oligonucleotide
  Sense strand starting at position 2011 of SEQ ID NO: 1560510
ugcaaagccuucugggaaa

SEQ ID NO: 1604918 - RNA, 19 nt, Artificial Sequence
  Description of Artificial Sequence: Synthetic oligonucleotide
  Antisense strand to SEQ ID NO: 1604917
uuucccagaaggcuuugca

SEQ ID NO: 1604919 - RNA, 19 nt, Artificial Sequence
  Description of Artificial Sequence: Synthetic oligonucleotide
  Sense strand starting at position 2150 of SEQ ID NO: 1560510
gcaagaugcugggacacaa

SEQ ID NO: 1604920 - RNA, 19 nt, Artificial Sequence
  Description of Artificial Sequence: Synthetic oligonucleotide
  Antisense strand to SEQ ID NO: 1604919
uugugucccagcaucuugc

SEQ ID NO: 1604921 - RNA, 19 nt, Artificial Sequence
  Description of Artificial Sequence: Synthetic oligonucleotide
  Sense strand starting at position 2254 of SEQ ID NO: 1560510
uccaacuucugcucggauu

SEQ ID NO: 1604922 - RNA, 19 nt, Artificial Sequence
  Description of Artificial Sequence: Synthetic oligonucleotide
  Antisense strand to SEQ ID NO: 1604921
aauccgagcagaaguugga

SEQ ID NO: 1604923 - RNA, 19 nt, Artificial Sequence
  Description of Artificial Sequence: Synthetic oligonucleotide
  Sense strand starting at position 2255 of SEQ ID NO: 1560510
ccaacuucugcucggauuu

SEQ ID NO: 1604924 - RNA, 19 nt, Artificial Sequence
  Description of Artificial Sequence: Synthetic oligonucleotide
  Antisense strand to SEQ ID NO: 1604923
aaauccgagcagaaguugg

SEQ ID NO: 1604925 - RNA, 19 nt, Artificial Sequence
  Description of Artificial Sequence: Synthetic oligonucleotide
  Sense strand starting at position 2538 of SEQ ID NO: 1560510
gagccagagccuugucuca

SEQ ID NO: 1604926 - RNA, 19 nt, Artificial Sequence
  Description of Artificial Sequence: Synthetic oligonucleotide
  Antisense strand to SEQ ID NO: 1604925
ugagacaaggcucuggcuc

SEQ ID NO: 1604927 - RNA, 19 nt, Artificial Sequence
  Description of Artificial Sequence: Synthetic oligonucleotide
  Sense strand starting at position 2540 of SEQ ID NO: 1560510
gccagagccuugucucagu

SEQ ID NO: 1604928 - RNA, 19 nt, Artificial Sequence
  Description of Artificial Sequence: Synthetic oligonucleotide
  Antisense strand to SEQ ID NO: 1604927
acugagacaaggcucuggc

SEQ ID NO: 1604929 - RNA, 19 nt, Artificial Sequence
  Description of Artificial Sequence: Synthetic oligonucleotide
  Sense strand starting at position 2545 of SEQ ID NO: 1560510
agccuugucucaguuguuu

SEQ ID NO: 1604930 - RNA, 19 nt, Artificial Sequence
  Description of Artificial Sequence: Synthetic oligonucleotide
  Antisense strand to SEQ ID NO: 1604929
aaacaacugagacaaggcu

SEQ ID NO: 1604931 - RNA, 19 nt, Artificial Sequence
  Description of Artificial Sequence: Synthetic oligonucleotide
  Sense strand starting at position 2553 of SEQ ID NO: 1560510
cucaguuguuucucugcua

SEQ ID NO: 1604932 - RNA, 19 nt, Artificial Sequence
  Description of Artificial Sequence: Synthetic oligonucleotide
  Antisense strand to SEQ ID NO: 1604931
uagcagagaaacaacugag

SEQ ID NO: 1604933 - RNA, 19 nt, Artificial Sequence
  Description of Artificial Sequence: Synthetic oligonucleotide
  Sense strand starting at position 2554 of SEQ ID NO: 1560510
ucaguuguuucucugcuaa

SEQ ID NO: 1604934 - RNA, 19 nt, Artificial Sequence
  Description of Artificial Sequence: Synthetic oligonucleotide
  Antisense strand to SEQ ID NO: 1604933
uuagcagagaaacaacuga

SEQ ID NO: 1604935 - RNA, 19 nt, Artificial Sequence
  Description of Artificial Sequence: Synthetic oligonucleotide
  Sense strand starting at position 2620 of SEQ ID NO: 1560510
gcgcgcucuggucucuaaa

SEQ ID NO: 1604936 - RNA, 19 nt, Artificial Sequence
  Description of Artificial Sequence: Synthetic oligonucleotide
  Antisense strand to SEQ ID NO: 1604935
uuuagagaccagagcgcgc

SEQ ID NO: 1604937 - RNA, 19 nt, Artificial Sequence
  Description of Artificial Sequence: Synthetic oligonucleotide
  Sense strand starting at position 3107 of SEQ ID NO: 1560510
guccguguuaggugcucaa

SEQ ID NO: 1604938 - RNA, 19 nt, Artificial Sequence
  Description of Artificial Sequence: Synthetic oligonucleotide
  Antisense strand to SEQ ID NO: 1604937
uugagcaccuaacacggac

SEQ ID NO: 1604939 - RNA, 19 nt, Artificial Sequence
  Description of Artificial Sequence: Synthetic oligonucleotide
  Sense strand starting at position 3223 of SEQ ID NO: 1560510
uucuguuacccagaccuca

SEQ ID NO: 1604940 - RNA, 19 nt, Artificial Sequence
  Description of Artificial Sequence: Synthetic oligonucleotide
  Antisense strand to SEQ ID NO: 1604939
ugaggucuggguaacagaa

SEQ ID NO: 1604941 - RNA, 19 nt, Artificial Sequence
  Description of Artificial Sequence: Synthetic oligonucleotide
  Sense strand starting at position 3335 of SEQ ID NO: 1560510
uugcuugagccuggagaua

SEQ ID NO: 1604942 - RNA, 19 nt, Artificial Sequence
  Description of Artificial Sequence: Synthetic oligonucleotide
  Antisense strand to SEQ ID NO: 1604941
uaucuccaggcucaagcaa

SEQ ID NO: 1604943 - RNA, 19 nt, Artificial Sequence
  Description of Artificial Sequence: Synthetic oligonucleotide
  Sense strand starting at position 3457 of SEQ ID NO: 1560510
uuugccucauccuagguaa

SEQ ID NO: 1604944 - RNA, 19 nt, Artificial Sequence
  Description of Artificial Sequence: Synthetic oligonucleotide
  Antisense strand to SEQ ID NO: 1604943
uuaccuaggaugaggcaaa

SEQ ID NO: 1604945 - RNA, 19 nt, Artificial Sequence
  Description of Artificial Sequence: Synthetic oligonucleotide
  Sense strand starting at position 3459 of SEQ ID NO: 1560510
ugccucauccuagguaaua

SEQ ID NO: 1604946 - RNA, 19 nt, Artificial Sequence
  Description of Artificial Sequence: Synthetic oligonucleotide
  Antisense strand to SEQ ID NO: 1604945
uauuaccuaggaugaggca

SEQ ID NO: 1604947 - RNA, 19 nt, Artificial Sequence
  Description of Artificial Sequence: Synthetic oligonucleotide
  Sense strand starting at position 3460 of SEQ ID NO: 1560510
gccucauccuagguaauac

SEQ ID NO: 1604948 - RNA, 19 nt, Artificial Sequence
  Description of Artificial Sequence: Synthetic oligonucleotide
  Antisense strand to SEQ ID NO: 1604947
guauuaccuaggaugaggc

SEQ ID NO: 1604949 - RNA, 19 nt, Artificial Sequence
  Description of Artificial Sequence: Synthetic oligonucleotide
  Sense strand starting at position 3549 of SEQ ID NO: 1560510
agaggacauuaauauguca

SEQ ID NO: 1604950 - RNA, 19 nt, Artificial Sequence
  Description of Artificial Sequence: Synthetic oligonucleotide
  Antisense strand to SEQ ID NO: 1604949
ugacauauuaauguccucu

SEQ ID NO: 1604951 - RNA, 19 nt, Artificial Sequence
  Description of Artificial Sequence: Synthetic oligonucleotide
  Sense strand starting at position 3552 of SEQ ID NO: 1560510
ggacauuaauaugucacuu

SEQ ID NO: 1604952 - RNA, 19 nt, Artificial Sequence
  Description of Artificial Sequence: Synthetic oligonucleotide
  Antisense strand to SEQ ID NO: 1604951
aagugacauauuaaugucc

SEQ ID NO: 1604953 - RNA, 19 nt, Artificial Sequence
  Description of Artificial Sequence: Synthetic oligonucleotide
  Sense strand starting at position 3570 of SEQ ID NO: 1560510
uaaaguugccuuugggcua

SEQ ID NO: 1604954 - RNA, 19 nt, Artificial Sequence
  Description of Artificial Sequence: Synthetic oligonucleotide
  Antisense strand to SEQ ID NO: 1604953
uagcccaaaggcaacuuua

SEQ ID NO: 1604955 - RNA, 19 nt, Artificial Sequence
  Description of Artificial Sequence: Synthetic oligonucleotide
  Sense strand starting at position 3575 of SEQ ID NO: 1560510
uugccuuugggcuauuauu

SEQ ID NO: 1604956 - RNA, 19 nt, Artificial Sequence
  Description of Artificial Sequence: Synthetic oligonucleotide
  Antisense strand to SEQ ID NO: 1604955
aauaauagcccaaaggcaa

SEQ ID NO: 1604957 - RNA, 19 nt, Artificial Sequence
  Description of Artificial Sequence: Synthetic oligonucleotide
  Sense strand starting at position 3584 of SEQ ID NO: 1560510
ggcuauuauuuacgaaaca

SEQ ID NO: 1604958 - RNA, 19 nt, Artificial Sequence
  Description of Artificial Sequence: Synthetic oligonucleotide
  Antisense strand to SEQ ID NO: 1604957
uguuucguaaauaauagcc

SEQ ID NO: 1604959 - RNA, 19 nt, Artificial Sequence
  Description of Artificial Sequence: Synthetic oligonucleotide
  Sense strand starting at position 3585 of SEQ ID NO: 1560510
gcuauuauuuacgaaacac

SEQ ID NO: 1604960 - RNA, 19 nt, Artificial Sequence
  Description of Artificial Sequence: Synthetic oligonucleotide
  Antisense strand to SEQ ID NO: 1604959
guguuucguaaauaauagc

SEQ ID NO: 1604961 - RNA, 19 nt, Artificial Sequence
  Description of Artificial Sequence: Synthetic oligonucleotide
  Sense strand starting at position 3614 of SEQ ID NO: 1560510
uaaggcuucuggccagauu

SEQ ID NO: 1604962 - RNA, 19 nt, Artificial Sequence
  Description of Artificial Sequence: Synthetic oligonucleotide
  Antisense strand to SEQ ID NO: 1604961
aaucuggccagaagccuua

SEQ ID NO: 1604963 - RNA, 19 nt, Artificial Sequence
  Description of Artificial Sequence: Synthetic oligonucleotide
  Sense strand starting at position 3677 of SEQ ID NO: 1560510
ugggccaguuucuaaacuu

SEQ ID NO: 1604964 - RNA, 19 nt, Artificial Sequence
  Description of Artificial Sequence: Synthetic oligonucleotide
  Antisense strand to SEQ ID NO: 1604963
aaguuuagaaacuggccca

SEQ ID NO: 1604965 - RNA, 19 nt, Artificial Sequence
  Description of Artificial Sequence: Synthetic oligonucleotide
  Sense strand starting at position 3763 of SEQ ID NO: 1560510
gcauauaaaugcuuagcuu

SEQ ID NO: 1604966 - RNA, 19 nt, Artificial Sequence
  Description of Artificial Sequence: Synthetic oligonucleotide
  Antisense strand to SEQ ID NO: 1604965
aagcuaagcauuuauaugc

SEQ ID NO: 1604967 - RNA, 19 nt, Artificial Sequence
  Description of Artificial Sequence: Synthetic oligonucleotide
  Sense strand starting at position 3891 of SEQ ID NO: 1560510
gugacugagacaggcuuua

SEQ ID NO: 1604968 - RNA, 19 nt, Artificial Sequence
  Description of Artificial Sequence: Synthetic oligonucleotide
  Antisense strand to SEQ ID NO: 1604967
uaaagccugucucagucac

SEQ ID NO: 1604969 - RNA, 19 nt, Artificial Sequence
  Description of Artificial Sequence: Synthetic oligonucleotide
  Sense strand starting at position 3943 of SEQ ID NO: 1560510
ggaggcagauaguaaauuu

SEQ ID NO: 1604970 - RNA, 19 nt, Artificial Sequence
  Description of Artificial Sequence: Synthetic oligonucleotide
  Antisense strand to SEQ ID NO: 1604969
aaauuuacuaucugccucc

SEQ ID NO: 1604971 - RNA, 19 nt, Artificial Sequence
  Description of Artificial Sequence: Synthetic oligonucleotide
  Sense strand starting at position 133 of SEQ ID NO: 1560511
uuugaaaccucuuugguuu

SEQ ID NO: 1604972 - RNA, 19 nt, Artificial Sequence
  Description of Artificial Sequence: Synthetic oligonucleotide
  Antisense strand to SEQ ID NO: 1604971
aaaccaaagagguuucaaa

SEQ ID NO: 1604973 - RNA, 19 nt, Artificial Sequence
  Description of Artificial Sequence: Synthetic oligonucleotide
  Sense strand starting at position 335 of SEQ ID NO: 1560511
ugucuaaucccgugcacca

SEQ ID NO: 1604974 - RNA, 19 nt, Artificial Sequence
  Description of Artificial Sequence: Synthetic oligonucleotide
  Antisense strand to SEQ ID NO: 1604973
uggugcacgggauuagaca

SEQ ID NO: 1604975 - RNA, 19 nt, Artificial Sequence
  Description of Artificial Sequence: Synthetic oligonucleotide
  Sense strand starting at position 361 of SEQ ID NO: 1560511
cgcgacacccucugugaua

SEQ ID NO: 1604976 - RNA, 19 nt, Artificial Sequence
  Description of Artificial Sequence: Synthetic oligonucleotide
  Antisense strand to SEQ ID NO: 1604975
uaucacagagggugucgcg

SEQ ID NO: 1604977 - RNA, 19 nt, Artificial Sequence
  Description of Artificial Sequence: Synthetic oligonucleotide
  Sense strand starting at position 362 of SEQ ID NO: 1560511
gcgacacccucugugauaa

SEQ ID NO: 1604978 - RNA, 19 nt, Artificial Sequence
  Description of Artificial Sequence: Synthetic oligonucleotide
  Antisense strand to SEQ ID NO: 1604977
uuaucacagagggugucgc

SEQ ID NO: 1604979 - RNA, 19 nt, Artificial Sequence
  Description of Artificial Sequence: Synthetic oligonucleotide
  Sense strand starting at position 410 of SEQ ID NO: 1560511
ggcauauacuaauucggua

SEQ ID NO: 1604980 - RNA, 19 nt, Artificial Sequence
  Description of Artificial Sequence: Synthetic oligonucleotide
  Antisense strand to SEQ ID NO: 1604979
uaccgaauuaguauaugcc

SEQ ID NO: 1604981 - RNA, 19 nt, Artificial Sequence
  Description of Artificial Sequence: Synthetic oligonucleotide
  Sense strand starting at position 414 of SEQ ID NO: 1560511
uauacuaauucgguaguua

SEQ ID NO: 1604982 - RNA, 19 nt, Artificial Sequence
  Description of Artificial Sequence: Synthetic oligonucleotide
  Antisense strand to SEQ ID NO: 1604981
uaacuaccgaauuaguaua

SEQ ID NO: 1604983 - RNA, 19 nt, Artificial Sequence
  Description of Artificial Sequence: Synthetic oligonucleotide
  Sense strand starting at position 415 of SEQ ID NO: 1560511
auacuaauucgguaguuag

SEQ ID NO: 1604984 - RNA, 19 nt, Artificial Sequence
  Description of Artificial Sequence: Synthetic oligonucleotide
  Antisense strand to SEQ ID NO: 1604983
cuaacuaccgaauuaguau

SEQ ID NO: 1604985 - RNA, 19 nt, Artificial Sequence
  Description of Artificial Sequence: Synthetic oligonucleotide
  Sense strand starting at position 418 of SEQ ID NO: 1560511
cuaauucgguaguuaggaa

SEQ ID NO: 1604986 - RNA, 19 nt, Artificial Sequence
  Description of Artificial Sequence: Synthetic oligonucleotide
  Antisense strand to SEQ ID NO: 1604985
uuccuaacuaccgaauuag

SEQ ID NO: 1604987 - RNA, 19 nt, Artificial Sequence
  Description of Artificial Sequence: Synthetic oligonucleotide
  Sense strand starting at position 543 of SEQ ID NO: 1560511
ggaugcauuuccuuugcgu

SEQ ID NO: 1604988 - RNA, 19 nt, Artificial Sequence
  Description of Artificial Sequence: Synthetic oligonucleotide
  Antisense strand to SEQ ID NO: 1604987
acgcaaaggaaaugcaucc

SEQ ID NO: 1604989 - RNA, 19 nt, Artificial Sequence
  Description of Artificial Sequence: Synthetic oligonucleotide
  Sense strand starting at position 798 of SEQ ID NO: 1560511
ccuggaagauuccgaaauc

SEQ ID NO: 1604990 - RNA, 19 nt, Artificial Sequence
  Description of Artificial Sequence: Synthetic oligonucleotide
  Antisense strand to SEQ ID NO: 1604989
gauuucggaaucuuccagg

SEQ ID NO: 1604991 - RNA, 19 nt, Artificial Sequence
  Description of Artificial Sequence: Synthetic oligonucleotide
  Sense strand starting at position 840 of SEQ ID NO: 1560511
ggccgugcuuccaagggau

SEQ ID NO: 1604992 - RNA, 19 nt, Artificial Sequence
  Description of Artificial Sequence: Synthetic oligonucleotide
  Antisense strand to SEQ ID NO: 1604991
aucccuuggaagcacggcc

SEQ ID NO: 1604993 - RNA, 19 nt, Artificial Sequence
  Description of Artificial Sequence: Synthetic oligonucleotide
  Sense strand starting at position 1136 of SEQ ID NO: 1560511
ccgagaggcucucuaauca

SEQ ID NO: 1604994 - RNA, 19 nt, Artificial Sequence
  Description of Artificial Sequence: Synthetic oligonucleotide
  Antisense strand to SEQ ID NO: 1604993
ugauuagagagccucucgg

SEQ ID NO: 1604995 - RNA, 19 nt, Artificial Sequence
  Description of Artificial Sequence: Synthetic oligonucleotide
  Sense strand starting at position 1160 of SEQ ID NO: 1560511
gguuccuucccauauccau

SEQ ID NO: 1604996 - RNA, 19 nt, Artificial Sequence
  Description of Artificial Sequence: Synthetic oligonucleotide
  Antisense strand to SEQ ID NO: 1604995
auggauaugggaaggaacc

SEQ ID NO: 1604997 - RNA, 19 nt, Artificial Sequence
  Description of Artificial Sequence: Synthetic oligonucleotide
  Sense strand starting at position 1221 of SEQ ID NO: 1560511
ccucaauuccgccaguaua

SEQ ID NO: 1604998 - RNA, 19 nt, Artificial Sequence
  Description of Artificial Sequence: Synthetic oligonucleotide
  Antisense strand to SEQ ID NO: 1604997
uauacuggcggaauugagg

SEQ ID NO: 1604999 - RNA, 19 nt, Artificial Sequence
  Description of Artificial Sequence: Synthetic oligonucleotide
  Sense strand starting at position 2407 of SEQ ID NO: 1560511
uugguaguucccgaugcuu

SEQ ID NO: 1605000 - RNA, 19 nt, Artificial Sequence
  Description of Artificial Sequence: Synthetic oligonucleotide
  Antisense strand to SEQ ID NO: 1604999
aagcaucgggaacuaccaa

SEQ ID NO: 1605001 - RNA, 19 nt, Artificial Sequence
  Description of Artificial Sequence: Synthetic oligonucleotide
  Sense strand starting at position 2409 of SEQ ID NO: 1560511
gguaguucccgaugcuuua

SEQ ID NO: 1605002 - RNA, 19 nt, Artificial Sequence
  Description of Artificial Sequence: Synthetic oligonucleotide
  Antisense strand to SEQ ID NO: 1605001
uaaagcaucgggaacuacc

SEQ ID NO: 1605003 - RNA, 19 nt, Artificial Sequence
  Description of Artificial Sequence: Synthetic oligonucleotide
  Sense strand starting at position 2423 of SEQ ID NO: 1560511
cuuuaaggguuucaggagu

SEQ ID NO: 1605004 - RNA, 19 nt, Artificial Sequence
  Description of Artificial Sequence: Synthetic oligonucleotide
  Antisense strand to SEQ ID NO: 1605003
acuccugaaacccuuaaag

SEQ ID NO: 1605005 - RNA, 19 nt, Artificial Sequence
  Description of Artificial Sequence: Synthetic oligonucleotide
  Sense strand starting at position 2431 of SEQ ID NO: 1560511
guuucaggaguuuggcaua

SEQ ID NO: 1605006 - RNA, 19 nt, Artificial Sequence
  Description of Artificial Sequence: Synthetic oligonucleotide
  Antisense strand to SEQ ID NO: 1605005
uaugccaaacuccugaaac

SEQ ID NO: 1605007 - RNA, 19 nt, Artificial Sequence
  Description of Artificial Sequence: Synthetic oligonucleotide
  Sense strand starting at position 2436 of SEQ ID NO: 1560511
aggaguuuggcauaugccu

SEQ ID NO: 1605008 - RNA, 19 nt, Artificial Sequence
  Description of Artificial Sequence: Synthetic oligonucleotide
  Antisense strand to SEQ ID NO: 1605007
aggcauaugccaaacuccu

SEQ ID NO: 1605009 - RNA, 19 nt, Artificial Sequence
  Description of Artificial Sequence: Synthetic oligonucleotide
  Sense strand starting at position 2605 of SEQ ID NO: 1560511
ccaccuuuccuuggaucga

SEQ ID NO: 1605010 - RNA, 19 nt, Artificial Sequence
  Description of Artificial Sequence: Synthetic oligonucleotide
  Antisense strand to SEQ ID NO: 1605009
ucgauccaaggaaaggugg

SEQ ID NO: 1605011 - RNA, 19 nt, Artificial Sequence
  Description of Artificial Sequence: Synthetic oligonucleotide
  Sense strand starting at position 2610 of SEQ ID NO: 1560511
uuuccuuggaucgaagagu

SEQ ID NO: 1605012 - RNA, 19 nt, Artificial Sequence
  Description of Artificial Sequence: Synthetic oligonucleotide
  Antisense strand to SEQ ID NO: 1605011
acucuucgauccaaggaaa

SEQ ID NO: 1605013 - RNA, 19 nt, Artificial Sequence
  Description of Artificial Sequence: Synthetic oligonucleotide
  Sense strand starting at position 3274 of SEQ ID NO: 1560511
gguuuagagccugguaaga

SEQ ID NO: 1605014 - RNA, 19 nt, Artificial Sequence
  Description of Artificial Sequence: Synthetic oligonucleotide
  Antisense strand to SEQ ID NO: 1605013
ucuuaccaggcucuaaacc

SEQ ID NO: 1605015 - RNA, 19 nt, Artificial Sequence
  Description of Artificial Sequence: Synthetic oligonucleotide
  Sense strand starting at position 3276 of SEQ ID NO: 1560511
uuuagagccugguaagaga

SEQ ID NO: 1605016 - RNA, 19 nt, Artificial Sequence
  Description of Artificial Sequence: Synthetic oligonucleotide
  Antisense strand to SEQ ID NO: 1605015
ucucuuaccaggcucuaaa

SEQ ID NO: 1605017 - RNA, 19 nt, Artificial Sequence
  Description of Artificial Sequence: Synthetic oligonucleotide
  Sense strand starting at position 3287 of SEQ ID NO: 1560511
guaagagauuuccaugauc

SEQ ID NO: 1605018 - RNA, 19 nt, Artificial Sequence
  Description of Artificial Sequence: Synthetic oligonucleotide
  Antisense strand to SEQ ID NO: 1605017
gaucauggaaaucucuuac

SEQ ID NO: 1605019 - RNA, 19 nt, Artificial Sequence
  Description of Artificial Sequence: Synthetic oligonucleotide
  Sense strand starting at position 3341 of SEQ ID NO: 1560511
aguuuaagaucacucagcu

SEQ ID NO: 1605020 - RNA, 19 nt, Artificial Sequence
  Description of Artificial Sequence: Synthetic oligonucleotide
  Antisense strand to SEQ ID NO: 1605019
agcugagugaucuuaaacu

SEQ ID NO: 1605021 - RNA, 19 nt, Artificial Sequence
  Description of Artificial Sequence: Synthetic oligonucleotide
  Sense strand starting at position 3463 of SEQ ID NO: 1560511
cagagagcauuuggucaau

SEQ ID NO: 1605022 - RNA, 19 nt, Artificial Sequence
  Description of Artificial Sequence: Synthetic oligonucleotide
  Antisense strand to SEQ ID NO: 1605021
auugaccaaaugcucucug

SEQ ID NO: 1605023 - RNA, 19 nt, Artificial Sequence
  Description of Artificial Sequence: Synthetic oligonucleotide
  Sense strand starting at position 3474 of SEQ ID NO: 1560511
uggucaaucugguuguugu

SEQ ID NO: 1605024 - RNA, 19 nt, Artificial Sequence
  Description of Artificial Sequence: Synthetic oligonucleotide
  Antisense strand to SEQ ID NO: 1605023
acaacaaccagauugacca

SEQ ID NO: 1605025 - RNA, 19 nt, Artificial Sequence
  Description of Artificial Sequence: Synthetic oligonucleotide
  Sense strand starting at position 3675 of SEQ ID NO: 1560511
ggaggaggucacuggacuu

SEQ ID NO: 1605026 - RNA, 19 nt, Artificial Sequence
  Description of Artificial Sequence: Synthetic oligonucleotide
  Antisense strand to SEQ ID NO: 1605025
aaguccagugaccuccucc

SEQ ID NO: 1605027 - RNA, 19 nt, Artificial Sequence
  Description of Artificial Sequence: Synthetic oligonucleotide
  Sense strand starting at position 3681 of SEQ ID NO: 1560511
ggucacuggacuugaucaa

SEQ ID NO: 1605028 - RNA, 19 nt, Artificial Sequence
  Description of Artificial Sequence: Synthetic oligonucleotide
  Antisense strand to SEQ ID NO: 1605027
uugaucaaguccagugacc

SEQ ID NO: 1605029 - RNA, 19 nt, Artificial Sequence
  Description of Artificial Sequence: Synthetic oligonucleotide
  Sense strand starting at position 3697 of SEQ ID NO: 1560511
caaggugacccacaaguuu

SEQ ID NO: 1605030 - RNA, 19 nt, Artificial Sequence
  Description of Artificial Sequence: Synthetic oligonucleotide
  Antisense strand to SEQ ID NO: 1605029
aaacuugugggucaccuug

SEQ ID NO: 1605031 - RNA, 19 nt, Artificial Sequence
  Description of Artificial Sequence: Synthetic oligonucleotide
  Sense strand starting at position 3712 of SEQ ID NO: 1560511
guuuccucauaggugugaa

SEQ ID NO: 1605032 - RNA, 19 nt, Artificial Sequence
  Description of Artificial Sequence: Synthetic oligonucleotide
  Antisense strand to SEQ ID NO: 1605031
uucacaccuaugaggaaac

SEQ ID NO: 1605033 - RNA, 19 nt, Artificial Sequence
  Description of Artificial Sequence: Synthetic oligonucleotide
  Sense strand starting at position 3715 of SEQ ID NO: 1560511
uccucauaggugugaaccu

SEQ ID NO: 1605034 - RNA, 19 nt, Artificial Sequence
  Description of Artificial Sequence: Synthetic oligonucleotide
  Antisense strand to SEQ ID NO: 1605033
agguucacaccuaugagga

SEQ ID NO: 1605035 - RNA, 19 nt, Artificial Sequence
  Description of Artificial Sequence: Synthetic oligonucleotide
  Sense strand starting at position 3722 of SEQ ID NO: 1560511
aggugugaaccuggacaga

SEQ ID NO: 1605036 - RNA, 19 nt, Artificial Sequence
  Description of Artificial Sequence: Synthetic oligonucleotide
  Antisense strand to SEQ ID NO: 1605035
ucuguccagguucacaccu

SEQ ID NO: 1605037 - RNA, 19 nt, Artificial Sequence
  Description of Artificial Sequence: Synthetic oligonucleotide
  Sense strand starting at position 3813 of SEQ ID NO: 1560511
uggugaugucuguagugag

SEQ ID NO: 1605038 - RNA, 19 nt, Artificial Sequence
  Description of Artificial Sequence: Synthetic oligonucleotide
  Antisense strand to SEQ ID NO: 1605037
cucacuacagacaucacca

SEQ ID NO: 1605039 - RNA, 19 nt, Artificial Sequence
  Description of Artificial Sequence: Synthetic oligonucleotide
  Sense strand starting at position 3814 of SEQ ID NO: 1560511
ggugaugucuguagugagu

SEQ ID NO: 1605040 - RNA, 19 nt, Artificial Sequence
  Description of Artificial Sequence: Synthetic oligonucleotide
  Antisense strand to SEQ ID NO: 1605039
acucacuacagacaucacc

SEQ ID NO: 1605041 - RNA, 19 nt, Artificial Sequence
  Description of Artificial Sequence: Synthetic oligonucleotide
  Sense strand starting at position 3863 of SEQ ID NO: 1560511
guguuugccuuccuuggau

SEQ ID NO: 1605042 - RNA, 19 nt, Artificial Sequence
  Description of Artificial Sequence: Synthetic oligonucleotide
  Antisense strand to SEQ ID NO: 1605041
auccaaggaaggcaaacac

SEQ ID NO: 1605043 - RNA, 19 nt, Artificial Sequence
  Description of Artificial Sequence: Synthetic oligonucleotide
  Sense strand starting at position 3865 of SEQ ID NO: 1560511
guuugccuuccuuggauga

SEQ ID NO: 1605044 - RNA, 19 nt, Artificial Sequence
  Description of Artificial Sequence: Synthetic oligonucleotide
  Antisense strand to SEQ ID NO: 1605043
ucauccaaggaaggcaaac

SEQ ID NO: 1605045 - RNA, 19 nt, Artificial Sequence
  Description of Artificial Sequence: Synthetic oligonucleotide
  Sense strand starting at position 3869 of SEQ ID NO: 1560511
gccuuccuuggaugagauc

SEQ ID NO: 1605046 - RNA, 19 nt, Artificial Sequence
  Description of Artificial Sequence: Synthetic oligonucleotide
  Antisense strand to SEQ ID NO: 1605045
gaucucauccaaggaaggc

SEQ ID NO: 1605047 - RNA, 19 nt, Artificial Sequence
  Description of Artificial Sequence: Synthetic oligonucleotide
  Sense strand starting at position 3895 of SEQ ID NO: 1560511
aggucuaguugagcucuga

SEQ ID NO: 1605048 - RNA, 19 nt, Artificial Sequence
  Description of Artificial Sequence: Synthetic oligonucleotide
  Antisense strand to SEQ ID NO: 1605047
ucagagcucaacuagaccu

SEQ ID NO: 1605049 - RNA, 19 nt, Artificial Sequence
  Description of Artificial Sequence: Synthetic oligonucleotide
  Sense strand starting at position 3899 of SEQ ID NO: 1560511
cuaguugagcucugacagu

SEQ ID NO: 1605050 - RNA, 19 nt, Artificial Sequence
  Description of Artificial Sequence: Synthetic oligonucleotide
  Antisense strand to SEQ ID NO: 1605049
acugucagagcucaacuag

SEQ ID NO: 1605051 - RNA, 19 nt, Artificial Sequence
  Description of Artificial Sequence: Synthetic oligonucleotide
  Sense strand starting at position 27 of SEQ ID NO: 1560512
agcacagugcuacgaucau

SEQ ID NO: 1605052 - RNA, 19 nt, Artificial Sequence
  Description of Artificial Sequence: Synthetic oligonucleotide
  Antisense strand to SEQ ID NO: 1605051
augaucguagcacugugcu

SEQ ID NO: 1605053 - RNA, 19 nt, Artificial Sequence
  Description of Artificial Sequence: Synthetic oligonucleotide
  Sense strand starting at position 233 of SEQ ID NO: 1560512
cccagagcgcugggauuaa

SEQ ID NO: 1605054 - RNA, 19 nt, Artificial Sequence
  Description of Artificial Sequence: Synthetic oligonucleotide
  Antisense strand to SEQ ID NO: 1605053
uuaaucccagcgcucuggg

SEQ ID NO: 1605055 - RNA, 19 nt, Artificial Sequence
  Description of Artificial Sequence: Synthetic oligonucleotide
  Sense strand starting at position 264 of SEQ ID NO: 1560512
cuaugccuggccugaaauu

SEQ ID NO: 1605056 - RNA, 19 nt, Artificial Sequence
  Description of Artificial Sequence: Synthetic oligonucleotide
  Antisense strand to SEQ ID NO: 1605055
aauuucaggccaggcauag

SEQ ID NO: 1605057 - RNA, 19 nt, Artificial Sequence
  Description of Artificial Sequence: Synthetic oligonucleotide
  Sense strand starting at position 322 of SEQ ID NO: 1560512
cguacugggccuugcaaau

SEQ ID NO: 1605058 - RNA, 19 nt, Artificial Sequence
  Description of Artificial Sequence: Synthetic oligonucleotide
  Antisense strand to SEQ ID NO: 1605057
auuugcaaggcccaguacg

SEQ ID NO: 1605059 - RNA, 19 nt, Artificial Sequence
  Description of Artificial Sequence: Synthetic oligonucleotide
  Sense strand starting at position 339 of SEQ ID NO: 1560512
auuauauagccagggcaaa

SEQ ID NO: 1605060 - RNA, 19 nt, Artificial Sequence
  Description of Artificial Sequence: Synthetic oligonucleotide
  Antisense strand to SEQ ID NO: 1605059
uuugcccuggcuauauaau

SEQ ID NO: 1605061 - RNA, 19 nt, Artificial Sequence
  Description of Artificial Sequence: Synthetic oligonucleotide
  Sense strand starting at position 340 of SEQ ID NO: 1560512
uuauauagccagggcaaau

SEQ ID NO: 1605062 - RNA, 19 nt, Artificial Sequence
  Description of Artificial Sequence: Synthetic oligonucleotide
  Antisense strand to SEQ ID NO: 1605061
auuugcccuggcuauauaa

SEQ ID NO: 1605063 - RNA, 19 nt, Artificial Sequence
  Description of Artificial Sequence: Synthetic oligonucleotide
  Sense strand starting at position 506 of SEQ ID NO: 1560512
cauacuuacugagugaugu

SEQ ID NO: 1605064 - RNA, 19 nt, Artificial Sequence
  Description of Artificial Sequence: Synthetic oligonucleotide
  Antisense strand to SEQ ID NO: 1605063
acaucacucaguaaguaug

SEQ ID NO: 1605065 - RNA, 19 nt, Artificial Sequence
  Description of Artificial Sequence: Synthetic oligonucleotide
  Sense strand starting at position 517 of SEQ ID NO: 1560512
agugaugugaggcaaguua

SEQ ID NO: 1605066 - RNA, 19 nt, Artificial Sequence
  Description of Artificial Sequence: Synthetic oligonucleotide
  Antisense strand to SEQ ID NO: 1605065
uaacuugccucacaucacu

SEQ ID NO: 1605067 - RNA, 19 nt, Artificial Sequence
  Description of Artificial Sequence: Synthetic oligonucleotide
  Sense strand starting at position 561 of SEQ ID NO: 1560512
ucugaacacugagaaugau

SEQ ID NO: 1605068 - RNA, 19 nt, Artificial Sequence
  Description of Artificial Sequence: Synthetic oligonucleotide
  Antisense strand to SEQ ID NO: 1605067
aucauucucaguguucaga

SEQ ID NO: 1605069 - RNA, 19 nt, Artificial Sequence
  Description of Artificial Sequence: Synthetic oligonucleotide
  Sense strand starting at position 605 of SEQ ID NO: 1560512
cuaggaucucugugacuug

SEQ ID NO: 1605070 - RNA, 19 nt, Artificial Sequence
  Description of Artificial Sequence: Synthetic oligonucleotide
  Antisense strand to SEQ ID NO: 1605069
caagucacagagauccuag

SEQ ID NO: 1605071 - RNA, 19 nt, Artificial Sequence
  Description of Artificial Sequence: Synthetic oligonucleotide
  Sense strand starting at position 608 of SEQ ID NO: 1560512
ggaucucugugacuugaau

SEQ ID NO: 1605072 - RNA, 19 nt, Artificial Sequence
  Description of Artificial Sequence: Synthetic oligonucleotide
  Antisense strand to SEQ ID NO: 1605071
auucaagucacagagaucc

SEQ ID NO: 1605073 - RNA, 19 nt, Artificial Sequence
  Description of Artificial Sequence: Synthetic oligonucleotide
  Sense strand starting at position 614 of SEQ ID NO: 1560512
cugugacuugaaugaguua

SEQ ID NO: 1605074 - RNA, 19 nt, Artificial Sequence
  Description of Artificial Sequence: Synthetic oligonucleotide
  Antisense strand to SEQ ID NO: 1605073
uaacucauucaagucacag

SEQ ID NO: 1605075 - RNA, 19 nt, Artificial Sequence
  Description of Artificial Sequence: Synthetic oligonucleotide
  Sense strand starting at position 615 of SEQ ID NO: 1560512
ugugacuugaaugaguuau

SEQ ID NO: 1605076 - RNA, 19 nt, Artificial Sequence
  Description of Artificial Sequence: Synthetic oligonucleotide
  Antisense strand to SEQ ID NO: 1605075
auaacucauucaagucaca

SEQ ID NO: 1605077 - RNA, 19 nt, Artificial Sequence
  Description of Artificial Sequence: Synthetic oligonucleotide
  Sense strand starting at position 617 of SEQ ID NO: 1560512
ugacuugaaugaguuauga

SEQ ID NO: 1605078 - RNA, 19 nt, Artificial Sequence
  Description of Artificial Sequence: Synthetic oligonucleotide
  Antisense strand to SEQ ID NO: 1605077
ucauaacucauucaaguca

SEQ ID NO: 1605079 - RNA, 19 nt, Artificial Sequence
  Description of Artificial Sequence: Synthetic oligonucleotide
  Sense strand starting at position 694 of SEQ ID NO: 1560512
ucaccaucaucgucauuau

SEQ ID NO: 1605080 - RNA, 19 nt, Artificial Sequence
  Description of Artificial Sequence: Synthetic oligonucleotide
  Antisense strand to SEQ ID NO: 1605079
auaaugacgaugaugguga

SEQ ID NO: 1605081 - RNA, 19 nt, Artificial Sequence
  Description of Artificial Sequence: Synthetic oligonucleotide
  Sense strand starting at position 697 of SEQ ID NO: 1560512
ccaucaucgucauuauucu

SEQ ID NO: 1605082 - RNA, 19 nt, Artificial Sequence
  Description of Artificial Sequence: Synthetic oligonucleotide
  Antisense strand to SEQ ID NO: 1605081
agaauaaugacgaugaugg

SEQ ID NO: 1605083 - RNA, 19 nt, Artificial Sequence
  Description of Artificial Sequence: Synthetic oligonucleotide
  Sense strand starting at position 721 of SEQ ID NO: 1560512
uuaguaauauucuuagcug

SEQ ID NO: 1605084 - RNA, 19 nt, Artificial Sequence
  Description of Artificial Sequence: Synthetic oligonucleotide
  Antisense strand to SEQ ID NO: 1605083
cagcuaagaauauuacuaa

SEQ ID NO: 1605085 - RNA, 19 nt, Artificial Sequence
  Description of Artificial Sequence: Synthetic oligonucleotide
  Sense strand starting at position 724 of SEQ ID NO: 1560512
guaauauucuuagcugugu

SEQ ID NO: 1605086 - RNA, 19 nt, Artificial Sequence
  Description of Artificial Sequence: Synthetic oligonucleotide
  Antisense strand to SEQ ID NO: 1605085
acacagcuaagaauauuac

SEQ ID NO: 1605087 - RNA, 19 nt, Artificial Sequence
  Description of Artificial Sequence: Synthetic oligonucleotide
  Sense strand starting at position 728 of SEQ ID NO: 1560512
uauucuuagcugugugacu

SEQ ID NO: 1605088 - RNA, 19 nt, Artificial Sequence
  Description of Artificial Sequence: Synthetic oligonucleotide
  Antisense strand to SEQ ID NO: 1605087
agucacacagcuaagaaua

SEQ ID NO: 1605089 - RNA, 19 nt, Artificial Sequence
  Description of Artificial Sequence: Synthetic oligonucleotide
  Sense strand starting at position 854 of SEQ ID NO: 1560512
ggcugacuuuggguucaga

SEQ ID NO: 1605090 - RNA, 19 nt, Artificial Sequence
  Description of Artificial Sequence: Synthetic oligonucleotide
  Antisense strand to SEQ ID NO: 1605089
ucugaacccaaagucagcc

SEQ ID NO: 1605091 - RNA, 19 nt, Artificial Sequence
  Description of Artificial Sequence: Synthetic oligonucleotide
  Sense strand starting at position 918 of SEQ ID NO: 1560512
aggagucauuuccaugaaa

SEQ ID NO: 1605092 - RNA, 19 nt, Artificial Sequence
  Description of Artificial Sequence: Synthetic oligonucleotide
  Antisense strand to SEQ ID NO: 1605091
uuucauggaaaugacuccu

SEQ ID NO: 1605093 - RNA, 19 nt, Artificial Sequence
  Description of Artificial Sequence: Synthetic oligonucleotide
  Sense strand starting at position 1135 of SEQ ID NO: 1560512
gggagagcugcucaugucu

SEQ ID NO: 1605094 - RNA, 19 nt, Artificial Sequence
  Description of Artificial Sequence: Synthetic oligonucleotide
  Antisense strand to SEQ ID NO: 1605093
agacaugagcagcucuccc

SEQ ID NO: 1605095 - RNA, 19 nt, Artificial Sequence
  Description of Artificial Sequence: Synthetic oligonucleotide
  Sense strand starting at position 1705 of SEQ ID NO: 1560512
agacauuguugccuccaga

SEQ ID NO: 1605096 - RNA, 19 nt, Artificial Sequence
  Description of Artificial Sequence: Synthetic oligonucleotide
  Antisense strand to SEQ ID NO: 1605095
ucuggaggcaacaaugucu

SEQ ID NO: 1605097 - RNA, 19 nt, Artificial Sequence
  Description of Artificial Sequence: Synthetic oligonucleotide
  Sense strand starting at position 1817 of SEQ ID NO: 1560512
acaagucagugguuggaau

SEQ ID NO: 1605098 - RNA, 19 nt, Artificial Sequence
  Description of Artificial Sequence: Synthetic oligonucleotide
  Antisense strand to SEQ ID NO: 1605097
auuccaaccacugacuugu

SEQ ID NO: 1605099 - RNA, 19 nt, Artificial Sequence
  Description of Artificial Sequence: Synthetic oligonucleotide
  Sense strand starting at position 1818 of SEQ ID NO: 1560512
caagucagugguuggaauu

SEQ ID NO: 1605100 - RNA, 19 nt, Artificial Sequence
  Description of Artificial Sequence: Synthetic oligonucleotide
  Antisense strand to SEQ ID NO: 1605099
aauuccaaccacugacuug

SEQ ID NO: 1605101 - RNA, 19 nt, Artificial Sequence
  Description of Artificial Sequence: Synthetic oligonucleotide
  Sense strand starting at position 2030 of SEQ ID NO: 1560512
gcagcuuauuggucagcca

SEQ ID NO: 1605102 - RNA, 19 nt, Artificial Sequence
  Description of Artificial Sequence: Synthetic oligonucleotide
  Antisense strand to SEQ ID NO: 1605101
uggcugaccaauaagcugc

SEQ ID NO: 1605103 - RNA, 19 nt, Artificial Sequence
  Description of Artificial Sequence: Synthetic oligonucleotide
  Sense strand starting at position 2033 of SEQ ID NO: 1560512
gcuuauuggucagccagac

SEQ ID NO: 1605104 - RNA, 19 nt, Artificial Sequence
  Description of Artificial Sequence: Synthetic oligonucleotide
  Antisense strand to SEQ ID NO: 1605103
gucuggcugaccaauaagc

SEQ ID NO: 1605105 - RNA, 19 nt, Artificial Sequence
  Description of Artificial Sequence: Synthetic oligonucleotide
  Sense strand starting at position 2046 of SEQ ID NO: 1560512
ccagaccuggugcaauaau

SEQ ID NO: 1605106 - RNA, 19 nt, Artificial Sequence
  Description of Artificial Sequence: Synthetic oligonucleotide
  Antisense strand to SEQ ID NO: 1605105
auuauugcaccaggucugg

SEQ ID NO: 1605107 - RNA, 19 nt, Artificial Sequence
  Description of Artificial Sequence: Synthetic oligonucleotide
  Sense strand starting at position 2054 of SEQ ID NO: 1560512
ggugcaauaaugcgacagu

SEQ ID NO: 1605108 - RNA, 19 nt, Artificial Sequence
  Description of Artificial Sequence: Synthetic oligonucleotide
  Antisense strand to SEQ ID NO: 1605107
acugucgcauuauugcacc

SEQ ID NO: 1605109 - RNA, 19 nt, Artificial Sequence
  Description of Artificial Sequence: Synthetic oligonucleotide
  Sense strand starting at position 2240 of SEQ ID NO: 1560512
aggacaaagucucagauuc

SEQ ID NO: 1605110 - RNA, 19 nt, Artificial Sequence
  Description of Artificial Sequence: Synthetic oligonucleotide
  Antisense strand to SEQ ID NO: 1605109
gaaucugagacuuuguccu

SEQ ID NO: 1605111 - RNA, 19 nt, Artificial Sequence
  Description of Artificial Sequence: Synthetic oligonucleotide
  Sense strand starting at position 2325 of SEQ ID NO: 1560512
cccagagaagugugaaagu

SEQ ID NO: 1605112 - RNA, 19 nt, Artificial Sequence
  Description of Artificial Sequence: Synthetic oligonucleotide
  Antisense strand to SEQ ID NO: 1605111
acuuucacacuucucuggg

SEQ ID NO: 1605113 - RNA, 19 nt, Artificial Sequence
  Description of Artificial Sequence: Synthetic oligonucleotide
  Sense strand starting at position 2332 of SEQ ID NO: 1560512
aagugugaaaguugaugau

SEQ ID NO: 1605114 - RNA, 19 nt, Artificial Sequence
  Description of Artificial Sequence: Synthetic oligonucleotide
  Antisense strand to SEQ ID NO: 1605113
aucaucaacuuucacacuu

SEQ ID NO: 1605115 - RNA, 19 nt, Artificial Sequence
  Description of Artificial Sequence: Synthetic oligonucleotide
  Sense strand starting at position 2338 of SEQ ID NO: 1560512
gaaaguugaugauacaaau

SEQ ID NO: 1605116 - RNA, 19 nt, Artificial Sequence
  Description of Artificial Sequence: Synthetic oligonucleotide
  Antisense strand to SEQ ID NO: 1605115
auuuguaucaucaacuuuc

SEQ ID NO: 1605117 - RNA, 19 nt, Artificial Sequence
  Description of Artificial Sequence: Synthetic oligonucleotide
  Sense strand starting at position 2348 of SEQ ID NO: 1560512
gauacaaauucggucauug

SEQ ID NO: 1605118 - RNA, 19 nt, Artificial Sequence
  Description of Artificial Sequence: Synthetic oligonucleotide
  Antisense strand to SEQ ID NO: 1605117
caaugaccgaauuuguauc

SEQ ID NO: 1605119 - RNA, 19 nt, Artificial Sequence
  Description of Artificial Sequence: Synthetic oligonucleotide
  Sense strand starting at position 2553 of SEQ ID NO: 1560512
gcuaucuuguaagcccaau

SEQ ID NO: 1605120 - RNA, 19 nt, Artificial Sequence
  Description of Artificial Sequence: Synthetic oligonucleotide
  Antisense strand to SEQ ID NO: 1605119
auugggcuuacaagauagc

SEQ ID NO: 1605121 - RNA, 19 nt, Artificial Sequence
  Description of Artificial Sequence: Synthetic oligonucleotide
  Sense strand starting at position 2930 of SEQ ID NO: 1560512
cuucuuguccuuuauaagu

SEQ ID NO: 1605122 - RNA, 19 nt, Artificial Sequence
  Description of Artificial Sequence: Synthetic oligonucleotide
  Antisense strand to SEQ ID NO: 1605121
acuuauaaaggacaagaag

SEQ ID NO: 1605123 - RNA, 19 nt, Artificial Sequence
  Description of Artificial Sequence: Synthetic oligonucleotide
  Sense strand starting at position 3016 of SEQ ID NO: 1560512
ucuccucuuguagggaauu

SEQ ID NO: 1605124 - RNA, 19 nt, Artificial Sequence
  Description of Artificial Sequence: Synthetic oligonucleotide
  Antisense strand to SEQ ID NO: 1605123
aauucccuacaagaggaga

SEQ ID NO: 1605125 - RNA, 19 nt, Artificial Sequence
  Description of Artificial Sequence: Synthetic oligonucleotide
  Sense strand starting at position 3017 of SEQ ID NO: 1560512
cuccucuuguagggaauuu

SEQ ID NO: 1605126 - RNA, 19 nt, Artificial Sequence
  Description of Artificial Sequence: Synthetic oligonucleotide
  Antisense strand to SEQ ID NO: 1605125
aaauucccuacaagaggag

SEQ ID NO: 1605127 - RNA, 19 nt, Artificial Sequence
  Description of Artificial Sequence: Synthetic oligonucleotide
  Sense strand starting at position 3198 of SEQ ID NO: 1560512
guucuuaagccacagguga

SEQ ID NO: 1605128 - RNA, 19 nt, Artificial Sequence
  Description of Artificial Sequence: Synthetic oligonucleotide
  Antisense strand to SEQ ID NO: 1605127
ucaccuguggcuuaagaac

SEQ ID NO: 1605129 - RNA, 19 nt, Artificial Sequence
  Description of Artificial Sequence: Synthetic oligonucleotide
  Sense strand starting at position 3298 of SEQ ID NO: 1560512
acaacaugguucucagacu

SEQ ID NO: 1605130 - RNA, 19 nt, Artificial Sequence
  Description of Artificial Sequence: Synthetic oligonucleotide
  Antisense strand to SEQ ID NO: 1605129
agucugagaaccauguugu

SEQ ID NO: 1605131 - RNA, 19 nt, Artificial Sequence
  Description of Artificial Sequence: Synthetic oligonucleotide
  Sense strand starting at position 63 of SEQ ID NO: 1560513
gagucucacgacuguaauc

SEQ ID NO: 1605132 - RNA, 19 nt, Artificial Sequence
  Description of Artificial Sequence: Synthetic oligonucleotide
  Antisense strand to SEQ ID NO: 1605131
gauuacagucgugagacuc

SEQ ID NO: 1605133 - RNA, 19 nt, Artificial Sequence
  Description of Artificial Sequence: Synthetic oligonucleotide
  Sense strand starting at position 256 of SEQ ID NO: 1560513
gaaacagugagaugcuguu

SEQ ID NO: 1605134 - RNA, 19 nt, Artificial Sequence
  Description of Artificial Sequence: Synthetic oligonucleotide
  Antisense strand to SEQ ID NO: 1605133
aacagcaucucacuguuuc

SEQ ID NO: 1605135 - RNA, 19 nt, Artificial Sequence
  Description of Artificial Sequence: Synthetic oligonucleotide
  Sense strand starting at position 1765 of SEQ ID NO: 1560513
ucagaaaucuggcuuccag

SEQ ID NO: 1605136 - RNA, 19 nt, Artificial Sequence
  Description of Artificial Sequence: Synthetic oligonucleotide
  Antisense strand to SEQ ID NO: 1605135
cuggaagccagauuucuga

SEQ ID NO: 1605137 - RNA, 19 nt, Artificial Sequence
  Description of Artificial Sequence: Synthetic oligonucleotide
  Sense strand starting at position 1988 of SEQ ID NO: 1560513
uagcuuuaaccugacguca

SEQ ID NO: 1605138 - RNA, 19 nt, Artificial Sequence
  Description of Artificial Sequence: Synthetic oligonucleotide
  Antisense strand to SEQ ID NO: 1605137
ugacgucagguuaaagcua

SEQ ID NO: 1605139 - RNA, 19 nt, Artificial Sequence
  Description of Artificial Sequence: Synthetic oligonucleotide
  Sense strand starting at position 2205 of SEQ ID NO: 1560513
gaggcugaacgucaucaaa

SEQ ID NO: 1605140 - RNA, 19 nt, Artificial Sequence
  Description of Artificial Sequence: Synthetic oligonucleotide
  Antisense strand to SEQ ID NO: 1605139
uuugaugacguucagccuc

SEQ ID NO: 1605141 - RNA, 19 nt, Artificial Sequence
  Description of Artificial Sequence: Synthetic oligonucleotide
  Sense strand starting at position 2653 of SEQ ID NO: 1560513
gcuggugucaaagaucaag

SEQ ID NO: 1605142 - RNA, 19 nt, Artificial Sequence
  Description of Artificial Sequence: Synthetic oligonucleotide
  Antisense strand to SEQ ID NO: 1605141
cuugaucuuugacaccagc

SEQ ID NO: 1605143 - RNA, 19 nt, Artificial Sequence
  Description of Artificial Sequence: Synthetic oligonucleotide
  Sense strand starting at position 2679 of SEQ ID NO: 1560513
cgcugaguucagggaguua

SEQ ID NO: 1605144 - RNA, 19 nt, Artificial Sequence
  Description of Artificial Sequence: Synthetic oligonucleotide
  Antisense strand to SEQ ID NO: 1605143
uaacucccugaacucagcg

SEQ ID NO: 1605145 - RNA, 19 nt, Artificial Sequence
  Description of Artificial Sequence: Synthetic oligonucleotide
  Sense strand starting at position 2760 of SEQ ID NO: 1560513
gaaauccaguccuuuggga

SEQ ID NO: 1605146 - RNA, 19 nt, Artificial Sequence
  Description of Artificial Sequence: Synthetic oligonucleotide
  Antisense strand to SEQ ID NO: 1605145
ucccaaaggacuggauuuc

SEQ ID NO: 1605147 - RNA, 19 nt, Artificial Sequence
  Description of Artificial Sequence: Synthetic oligonucleotide
  Sense strand starting at position 2767 of SEQ ID NO: 1560513
aguccuuugggagguuuga

SEQ ID NO: 1605148 - RNA, 19 nt, Artificial Sequence
  Description of Artificial Sequence: Synthetic oligonucleotide
  Antisense strand to SEQ ID NO: 1605147
ucaaaccucccaaaggacu

SEQ ID NO: 1605149 - RNA, 19 nt, Artificial Sequence
  Description of Artificial Sequence: Synthetic oligonucleotide
  Sense strand starting at position 2870 of SEQ ID NO: 1560513
ggcgaugucaaaggucaua

SEQ ID NO: 1605150 - RNA, 19 nt, Artificial Sequence
  Description of Artificial Sequence: Synthetic oligonucleotide
  Antisense strand to SEQ ID NO: 1605149
uaugaccuuugacaucgcc

SEQ ID NO: 1605151 - RNA, 19 nt, Artificial Sequence
  Description of Artificial Sequence: Synthetic oligonucleotide
  Sense strand starting at position 2889 of SEQ ID NO: 1560513
gacuuagggugcccucuaa

SEQ ID NO: 1605152 - RNA, 19 nt, Artificial Sequence
  Description of Artificial Sequence: Synthetic oligonucleotide
  Antisense strand to SEQ ID NO: 1605151
uuagagggcacccuaaguc

SEQ ID NO: 1605153 - RNA, 19 nt, Artificial Sequence
  Description of Artificial Sequence: Synthetic oligonucleotide
  Sense strand starting at position 2893 of SEQ ID NO: 1560513
uagggugcccucuaagacu

SEQ ID NO: 1605154 - RNA, 19 nt, Artificial Sequence
  Description of Artificial Sequence: Synthetic oligonucleotide
  Antisense strand to SEQ ID NO: 1605153
agucuuagagggcacccua

SEQ ID NO: 1605155 - RNA, 19 nt, Artificial Sequence
  Description of Artificial Sequence: Synthetic oligonucleotide
  Sense strand starting at position 2902 of SEQ ID NO: 1560513
cucuaagacugguaacaga

SEQ ID NO: 1605156 - RNA, 19 nt, Artificial Sequence
  Description of Artificial Sequence: Synthetic oligonucleotide
  Antisense strand to SEQ ID NO: 1605155
ucuguuaccagucuuagag

SEQ ID NO: 1605157 - RNA, 19 nt, Artificial Sequence
  Description of Artificial Sequence: Synthetic oligonucleotide
  Sense strand starting at position 3046 of SEQ ID NO: 1560513
ggaggcaacaucugugagu

SEQ ID NO: 1605158 - RNA, 19 nt, Artificial Sequence
  Description of Artificial Sequence: Synthetic oligonucleotide
  Antisense strand to SEQ ID NO: 1605157
acucacagauguugccucc

SEQ ID NO: 1605159 - RNA, 19 nt, Artificial Sequence
  Description of Artificial Sequence: Synthetic oligonucleotide
  Sense strand starting at position 3047 of SEQ ID NO: 1560513
gaggcaacaucugugagua

SEQ ID NO: 1605160 - RNA, 19 nt, Artificial Sequence
  Description of Artificial Sequence: Synthetic oligonucleotide
  Antisense strand to SEQ ID NO: 1605159
uacucacagauguugccuc

SEQ ID NO: 1605161 - RNA, 19 nt, Artificial Sequence
  Description of Artificial Sequence: Synthetic oligonucleotide
  Sense strand starting at position 3048 of SEQ ID NO: 1560513
aggcaacaucugugaguac

SEQ ID NO: 1605162 - RNA, 19 nt, Artificial Sequence
  Description of Artificial Sequence: Synthetic oligonucleotide
  Antisense strand to SEQ ID NO: 1605161
guacucacagauguugccu

SEQ ID NO: 1605163 - RNA, 19 nt, Artificial Sequence
  Description of Artificial Sequence: Synthetic oligonucleotide
  Sense strand starting at position 3109 of SEQ ID NO: 1560513
ugcuaagaucucuguggca

SEQ ID NO: 1605164 - RNA, 19 nt, Artificial Sequence
  Description of Artificial Sequence: Synthetic oligonucleotide
  Antisense strand to SEQ ID NO: 1605163
ugccacagagaucuuagca

SEQ ID NO: 1605165 - RNA, 19 nt, Artificial Sequence
  Description of Artificial Sequence: Synthetic oligonucleotide
  Sense strand starting at position 3111 of SEQ ID NO: 1560513
cuaagaucucuguggcacu

SEQ ID NO: 1605166 - RNA, 19 nt, Artificial Sequence
  Description of Artificial Sequence: Synthetic oligonucleotide
  Antisense strand to SEQ ID NO: 1605165
agugccacagagaucuuag

SEQ ID NO: 1605167 - RNA, 19 nt, Artificial Sequence
  Description of Artificial Sequence: Synthetic oligonucleotide
  Sense strand starting at position 3173 of SEQ ID NO: 1560513
cuguaauggucccugagcu

SEQ ID NO: 1605168 - RNA, 19 nt, Artificial Sequence
  Description of Artificial Sequence: Synthetic oligonucleotide
  Antisense strand to SEQ ID NO: 1605167
agcucagggaccauuacag

SEQ ID NO: 1605169 - RNA, 19 nt, Artificial Sequence
  Description of Artificial Sequence: Synthetic oligonucleotide
  Sense strand starting at position 3222 of SEQ ID NO: 1560513
agcuuauguggccagagua

SEQ ID NO: 1605170 - RNA, 19 nt, Artificial Sequence
  Description of Artificial Sequence: Synthetic oligonucleotide
  Antisense strand to SEQ ID NO: 1605169
uacucuggccacauaagcu

SEQ ID NO: 1605171 - RNA, 19 nt, Artificial Sequence
  Description of Artificial Sequence: Synthetic oligonucleotide
  Sense strand starting at position 3264 of SEQ ID NO: 1560513
gcaggauugcaaugcuuau

SEQ ID NO: 1605172 - RNA, 19 nt, Artificial Sequence
  Description of Artificial Sequence: Synthetic oligonucleotide
  Antisense strand to SEQ ID NO: 1605171
auaagcauugcaauccugc

SEQ ID NO: 1605173 - RNA, 19 nt, Artificial Sequence
  Description of Artificial Sequence: Synthetic oligonucleotide
  Sense strand starting at position 3312 of SEQ ID NO: 1560513
agaggcuuggguuggagau

SEQ ID NO: 1605174 - RNA, 19 nt, Artificial Sequence
  Description of Artificial Sequence: Synthetic oligonucleotide
  Antisense strand to SEQ ID NO: 1605173
aucuccaacccaagccucu

SEQ ID NO: 1605175 - RNA, 19 nt, Artificial Sequence
  Description of Artificial Sequence: Synthetic oligonucleotide
  Sense strand starting at position 3324 of SEQ ID NO: 1560513
uggagauguggcugggaau

SEQ ID NO: 1605176 - RNA, 19 nt, Artificial Sequence
  Description of Artificial Sequence: Synthetic oligonucleotide
  Antisense strand to SEQ ID NO: 1605175
auucccagccacaucucca

SEQ ID NO: 1605177 - RNA, 19 nt, Artificial Sequence
  Description of Artificial Sequence: Synthetic oligonucleotide
  Sense strand starting at position 3325 of SEQ ID NO: 1560513
ggagauguggcugggaaug

SEQ ID NO: 1605178 - RNA, 19 nt, Artificial Sequence
  Description of Artificial Sequence: Synthetic oligonucleotide
  Antisense strand to SEQ ID NO: 1605177
cauucccagccacaucucc

SEQ ID NO: 1605179 - RNA, 19 nt, Artificial Sequence
  Description of Artificial Sequence: Synthetic oligonucleotide
  Sense strand starting at position 3342 of SEQ ID NO: 1560513
ugguucuauugggagagaa

SEQ ID NO: 1605180 - RNA, 19 nt, Artificial Sequence
  Description of Artificial Sequence: Synthetic oligonucleotide
  Antisense strand to SEQ ID NO: 1605179
uucucucccaauagaacca

SEQ ID NO: 1605181 - RNA, 19 nt, Artificial Sequence
  Description of Artificial Sequence: Synthetic oligonucleotide
  Sense strand starting at position 3364 of SEQ ID NO: 1560513
ccaagauucuggucccaac

SEQ ID NO: 1605182 - RNA, 19 nt, Artificial Sequence
  Description of Artificial Sequence: Synthetic oligonucleotide
  Antisense strand to SEQ ID NO: 1605181
guugggaccagaaucuugg

SEQ ID NO: 1605183 - RNA, 19 nt, Artificial Sequence
  Description of Artificial Sequence: Synthetic oligonucleotide
  Sense strand starting at position 3415 of SEQ ID NO: 1560513
ugguuuccuugacugucaa

SEQ ID NO: 1605184 - RNA, 19 nt, Artificial Sequence
  Description of Artificial Sequence: Synthetic oligonucleotide
  Antisense strand to SEQ ID NO: 1605183
uugacagucaaggaaacca

SEQ ID NO: 1605185 - RNA, 19 nt, Artificial Sequence
  Description of Artificial Sequence: Synthetic oligonucleotide
  Sense strand starting at position 3416 of SEQ ID NO: 1560513
gguuuccuugacugucaaa

SEQ ID NO: 1605186 - RNA, 19 nt, Artificial Sequence
  Description of Artificial Sequence: Synthetic oligonucleotide
  Antisense strand to SEQ ID NO: 1605185
uuugacagucaaggaaacc

SEQ ID NO: 1605187 - RNA, 19 nt, Artificial Sequence
  Description of Artificial Sequence: Synthetic oligonucleotide
  Sense strand starting at position 3469 of SEQ ID NO: 1560513
ugggauuaacugcagcaaa

SEQ ID NO: 1605188 - RNA, 19 nt, Artificial Sequence
  Description of Artificial Sequence: Synthetic oligonucleotide
  Antisense strand to SEQ ID NO: 1605187
uuugcugcaguuaauccca

SEQ ID NO: 1605189 - RNA, 19 nt, Artificial Sequence
  Description of Artificial Sequence: Synthetic oligonucleotide
  Sense strand starting at position 3504 of SEQ ID NO: 1560513
uaaugaugguagccaguuu

SEQ ID NO: 1605190 - RNA, 19 nt, Artificial Sequence
  Description of Artificial Sequence: Synthetic oligonucleotide
  Antisense strand to SEQ ID NO: 1605189
aaacuggcuaccaucauua

SEQ ID NO: 1605191 - RNA, 19 nt, Artificial Sequence
  Description of Artificial Sequence: Synthetic oligonucleotide
  Sense strand starting at position 3555 of SEQ ID NO: 1560513
uuuauuaugagcuaggugu

SEQ ID NO: 1605192 - RNA, 19 nt, Artificial Sequence
  Description of Artificial Sequence: Synthetic oligonucleotide
  Antisense strand to SEQ ID NO: 1605191
acaccuagcucauaauaaa

SEQ ID NO: 1605193 - RNA, 19 nt, Artificial Sequence
  Description of Artificial Sequence: Synthetic oligonucleotide
  Sense strand starting at position 3557 of SEQ ID NO: 1560513
uauuaugagcuagguguau

SEQ ID NO: 1605194 - RNA, 19 nt, Artificial Sequence
  Description of Artificial Sequence: Synthetic oligonucleotide
  Antisense strand to SEQ ID NO: 1605193
auacaccuagcucauaaua

SEQ ID NO: 1605195 - RNA, 19 nt, Artificial Sequence
  Description of Artificial Sequence: Synthetic oligonucleotide
  Sense strand starting at position 3559 of SEQ ID NO: 1560513
uuaugagcuagguguauuu

SEQ ID NO: 1605196 - RNA, 19 nt, Artificial Sequence
  Description of Artificial Sequence: Synthetic oligonucleotide
  Antisense strand to SEQ ID NO: 1605195
aaauacaccuagcucauaa

SEQ ID NO: 1605197 - RNA, 19 nt, Artificial Sequence
  Description of Artificial Sequence: Synthetic oligonucleotide
  Sense strand starting at position 3639 of SEQ ID NO: 1560513
ccuuuaaacugggaacuga

SEQ ID NO: 1605198 - RNA, 19 nt, Artificial Sequence
  Description of Artificial Sequence: Synthetic oligonucleotide
  Antisense strand to SEQ ID NO: 1605197
ucaguucccaguuuaaagg

SEQ ID NO: 1605199 - RNA, 19 nt, Artificial Sequence
  Description of Artificial Sequence: Synthetic oligonucleotide
  Sense strand starting at position 3698 of SEQ ID NO: 1560513
gcccuugagccagagacua

SEQ ID NO: 1605200 - RNA, 19 nt, Artificial Sequence
  Description of Artificial Sequence: Synthetic oligonucleotide
  Antisense strand to SEQ ID NO: 1605199
uagucucuggcucaagggc

SEQ ID NO: 1605201 - RNA, 19 nt, Artificial Sequence
  Description of Artificial Sequence: Synthetic oligonucleotide
  Sense strand starting at position 3744 of SEQ ID NO: 1560513
uuggguuucucacugcaau

SEQ ID NO: 1605202 - RNA, 19 nt, Artificial Sequence
  Description of Artificial Sequence: Synthetic oligonucleotide
  Antisense strand to SEQ ID NO: 1605201
auugcagugagaaacccaa

SEQ ID NO: 1605203 - RNA, 19 nt, Artificial Sequence
  Description of Artificial Sequence: Synthetic oligonucleotide
  Sense strand starting at position 3745 of SEQ ID NO: 1560513
uggguuucucacugcaaug

SEQ ID NO: 1605204 - RNA, 19 nt, Artificial Sequence
  Description of Artificial Sequence: Synthetic oligonucleotide
  Antisense strand to SEQ ID NO: 1605203
cauugcagugagaaaccca

SEQ ID NO: 1605205 - RNA, 19 nt, Artificial Sequence
  Description of Artificial Sequence: Synthetic oligonucleotide
  Sense strand starting at position 3747 of SEQ ID NO: 1560513
gguuucucacugcaaugaa

SEQ ID NO: 1605206 - RNA, 19 nt, Artificial Sequence
  Description of Artificial Sequence: Synthetic oligonucleotide
  Antisense strand to SEQ ID NO: 1605205
uucauugcagugagaaacc

SEQ ID NO: 1605207 - RNA, 19 nt, Artificial Sequence
  Description of Artificial Sequence: Synthetic oligonucleotide
  Sense strand starting at position 3905 of SEQ ID NO: 1560513
gcaauucuaugauuggcua

SEQ ID NO: 1605208 - RNA, 19 nt, Artificial Sequence
  Description of Artificial Sequence: Synthetic oligonucleotide
  Antisense strand to SEQ ID NO: 1605207
uagccaaucauagaauugc

SEQ ID NO: 1605209 - RNA, 19 nt, Artificial Sequence
  Description of Artificial Sequence: Synthetic oligonucleotide
  Sense strand starting at position 3968 of SEQ ID NO: 1560513
ucaagcucugacugauaaa

SEQ ID NO: 1605210 - RNA, 19 nt, Artificial Sequence
  Description of Artificial Sequence: Synthetic oligonucleotide
  Antisense strand to SEQ ID NO: 1605209
uuuaucagucagagcuuga

SEQ ID NO: 1605211 - RNA, 19 nt, Artificial Sequence
  Description of Artificial Sequence: Synthetic oligonucleotide
  Sense strand starting at position 98 of SEQ ID NO: 1560514
aagggaugguucugaggga

SEQ ID NO: 1605212 - RNA, 19 nt, Artificial Sequence
  Description of Artificial Sequence: Synthetic oligonucleotide
  Antisense strand to SEQ ID NO: 1605211
ucccucagaaccaucccuu

SEQ ID NO: 1605213 - RNA, 19 nt, Artificial Sequence
  Description of Artificial Sequence: Synthetic oligonucleotide
  Sense strand starting at position 99 of SEQ ID NO: 1560514
agggaugguucugagggaa

SEQ ID NO: 1605214 - RNA, 19 nt, Artificial Sequence
  Description of Artificial Sequence: Synthetic oligonucleotide
  Antisense strand to SEQ ID NO: 1605213
uucccucagaaccaucccu

SEQ ID NO: 1605215 - RNA, 19 nt, Artificial Sequence
  Description of Artificial Sequence: Synthetic oligonucleotide
  Sense strand starting at position 102 of SEQ ID NO: 1560514
gaugguucugagggaacca

SEQ ID NO: 1605216 - RNA, 19 nt, Artificial Sequence
  Description of Artificial Sequence: Synthetic oligonucleotide
  Antisense strand to SEQ ID NO: 1605215
ugguucccucagaaccauc

SEQ ID NO: 1605217 - RNA, 19 nt, Artificial Sequence
  Description of Artificial Sequence: Synthetic oligonucleotide
  Sense strand starting at position 359 of SEQ ID NO: 1560514
agcugcuccuaagcauuua

SEQ ID NO: 1605218 - RNA, 19 nt, Artificial Sequence
  Description of Artificial Sequence: Synthetic oligonucleotide
  Antisense strand to SEQ ID NO: 1605217
uaaaugcuuaggagcagcu

SEQ ID NO: 1605219 - RNA, 19 nt, Artificial Sequence
  Description of Artificial Sequence: Synthetic oligonucleotide
  Sense strand starting at position 473 of SEQ ID NO: 1560514
gaggguacugguuacguaa

SEQ ID NO: 1605220 - RNA, 19 nt, Artificial Sequence
  Description of Artificial Sequence: Synthetic oligonucleotide
  Antisense strand to SEQ ID NO: 1605219
uuacguaaccaguacccuc

SEQ ID NO: 1605221 - RNA, 19 nt, Artificial Sequence
  Description of Artificial Sequence: Synthetic oligonucleotide
  Sense strand starting at position 511 of SEQ ID NO: 1560514
cuguuauuccucgcagcca

SEQ ID NO: 1605222 - RNA, 19 nt, Artificial Sequence
  Description of Artificial Sequence: Synthetic oligonucleotide
  Antisense strand to SEQ ID NO: 1605221
uggcugcgaggaauaacag

SEQ ID NO: 1605223 - RNA, 19 nt, Artificial Sequence
  Description of Artificial Sequence: Synthetic oligonucleotide
  Sense strand starting at position 540 of SEQ ID NO: 1560514
cgaggaagcucuuuaagua

SEQ ID NO: 1605224 - RNA, 19 nt, Artificial Sequence
  Description of Artificial Sequence: Synthetic oligonucleotide
  Antisense strand to SEQ ID NO: 1605223
uacuuaaagagcuuccucg

SEQ ID NO: 1605225 - RNA, 19 nt, Artificial Sequence
  Description of Artificial Sequence: Synthetic oligonucleotide
  Sense strand starting at position 657 of SEQ ID NO: 1560514
gucuguguugccuauaucu

SEQ ID NO: 1605226 - RNA, 19 nt, Artificial Sequence
  Description of Artificial Sequence: Synthetic oligonucleotide
  Antisense strand to SEQ ID NO: 1605225
agauauaggcaacacagac

SEQ ID NO: 1605227 - RNA, 19 nt, Artificial Sequence
  Description of Artificial Sequence: Synthetic oligonucleotide
  Sense strand starting at position 659 of SEQ ID NO: 1560514
cuguguugccuauaucuau

SEQ ID NO: 1605228 - RNA, 19 nt, Artificial Sequence
  Description of Artificial Sequence: Synthetic oligonucleotide
  Antisense strand to SEQ ID NO: 1605227
auagauauaggcaacacag

SEQ ID NO: 1605229 - RNA, 19 nt, Artificial Sequence
  Description of Artificial Sequence: Synthetic oligonucleotide
  Sense strand starting at position 678 of SEQ ID NO: 1560514
aucugcuaucucuggcaaa

SEQ ID NO: 1605230 - RNA, 19 nt, Artificial Sequence
  Description of Artificial Sequence: Synthetic oligonucleotide
  Antisense strand to SEQ ID NO: 1605229
uuugccagagauagcagau

SEQ ID NO: 1605231 - RNA, 19 nt, Artificial Sequence
  Description of Artificial Sequence: Synthetic oligonucleotide
  Sense strand starting at position 802 of SEQ ID NO: 1560514
gcaacaaguugucuaguca

SEQ ID NO: 1605232 - RNA, 19 nt, Artificial Sequence
  Description of Artificial Sequence: Synthetic oligonucleotide
  Antisense strand to SEQ ID NO: 1605231
ugacuagacaacuuguugc

SEQ ID NO: 1605233 - RNA, 19 nt, Artificial Sequence
  Description of Artificial Sequence: Synthetic oligonucleotide
  Sense strand starting at position 810 of SEQ ID NO: 1560514
uugucuagucaauacuaua

SEQ ID NO: 1605234 - RNA, 19 nt, Artificial Sequence
  Description of Artificial Sequence: Synthetic oligonucleotide
  Antisense strand to SEQ ID NO: 1605233
uauaguauugacuagacaa

SEQ ID NO: 1605235 - RNA, 19 nt, Artificial Sequence
  Description of Artificial Sequence: Synthetic oligonucleotide
  Sense strand starting at position 830 of SEQ ID NO: 1560514
acaauaaaggguuggcaua

SEQ ID NO: 1605236 - RNA, 19 nt, Artificial Sequence
  Description of Artificial Sequence: Synthetic oligonucleotide
  Antisense strand to SEQ ID NO: 1605235
uaugccaacccuuuauugu

SEQ ID NO: 1605237 - RNA, 19 nt, Artificial Sequence
  Description of Artificial Sequence: Synthetic oligonucleotide
  Sense strand starting at position 831 of SEQ ID NO: 1560514
caauaaaggguuggcauaa

SEQ ID NO: 1605238 - RNA, 19 nt, Artificial Sequence
  Description of Artificial Sequence: Synthetic oligonucleotide
  Antisense strand to SEQ ID NO: 1605237
uuaugccaacccuuuauug

SEQ ID NO: 1605239 - RNA, 19 nt, Artificial Sequence
  Description of Artificial Sequence: Synthetic oligonucleotide
  Sense strand starting at position 832 of SEQ ID NO: 1560514
aauaaaggguuggcauaaa

SEQ ID NO: 1605240 - RNA, 19 nt, Artificial Sequence
  Description of Artificial Sequence: Synthetic oligonucleotide
  Antisense strand to SEQ ID NO: 1605239
uuuaugccaacccuuuauu

SEQ ID NO: 1605241 - RNA, 19 nt, Artificial Sequence
  Description of Artificial Sequence: Synthetic oligonucleotide
  Sense strand starting at position 870 of SEQ ID NO: 1560514
gaucuauggcgucagaagc

SEQ ID NO: 1605242 - RNA, 19 nt, Artificial Sequence
  Description of Artificial Sequence: Synthetic oligonucleotide
  Antisense strand to SEQ ID NO: 1605241
gcuucugacgccauagauc

SEQ ID NO: 1605243 - RNA, 19 nt, Artificial Sequence
  Description of Artificial Sequence: Synthetic oligonucleotide
  Sense strand starting at position 934 of SEQ ID NO: 1560514
gcgggagauccugggaugu

SEQ ID NO: 1605244 - RNA, 19 nt, Artificial Sequence
  Description of Artificial Sequence: Synthetic oligonucleotide
  Antisense strand to SEQ ID NO: 1605243
acaucccaggaucucccgc

SEQ ID NO: 1605245 - RNA, 19 nt, Artificial Sequence
  Description of Artificial Sequence: Synthetic oligonucleotide
  Sense strand starting at position 974 of SEQ ID NO: 1560514
uuuggauacuuguuuacac

SEQ ID NO: 1605246 - RNA, 19 nt, Artificial Sequence
  Description of Artificial Sequence: Synthetic oligonucleotide
  Antisense strand to SEQ ID NO: 1605245
guguaaacaaguauccaaa

SEQ ID NO: 1605247 - RNA, 19 nt, Artificial Sequence
  Description of Artificial Sequence: Synthetic oligonucleotide
  Sense strand starting at position 995 of SEQ ID NO: 1560514
gggugcucccuuuauaaau

SEQ ID NO: 1605248 - RNA, 19 nt, Artificial Sequence
  Description of Artificial Sequence: Synthetic oligonucleotide
  Antisense strand to SEQ ID NO: 1605247
auuuauaaagggagcaccc

SEQ ID NO: 1605249 - RNA, 19 nt, Artificial Sequence
  Description of Artificial Sequence: Synthetic oligonucleotide
  Sense strand starting at position 1786 of SEQ ID NO: 1560514
uaaggucggucuccaaaua

SEQ ID NO: 1605250 - RNA, 19 nt, Artificial Sequence
  Description of Artificial Sequence: Synthetic oligonucleotide
  Antisense strand to SEQ ID NO: 1605249
uauuuggagaccgaccuua

SEQ ID NO: 1605251 - RNA, 19 nt, Artificial Sequence
  Description of Artificial Sequence: Synthetic oligonucleotide
  Sense strand starting at position 1943 of SEQ ID NO: 1560514
gcugguuaccguuucguua

SEQ ID NO: 1605252 - RNA, 19 nt, Artificial Sequence
  Description of Artificial Sequence: Synthetic oligonucleotide
  Antisense strand to SEQ ID NO: 1605251
uaacgaaacgguaaccagc

SEQ ID NO: 1605253 - RNA, 19 nt, Artificial Sequence
  Description of Artificial Sequence: Synthetic oligonucleotide
  Sense strand starting at position 2208 of SEQ ID NO: 1560514
aaaugauuagcucgcaaag

SEQ ID NO: 1605254 - RNA, 19 nt, Artificial Sequence
  Description of Artificial Sequence: Synthetic oligonucleotide
  Antisense strand to SEQ ID NO: 1605253
cuuugcgagcuaaucauuu

SEQ ID NO: 1605255 - RNA, 19 nt, Artificial Sequence
  Description of Artificial Sequence: Synthetic oligonucleotide
  Sense strand starting at position 2408 of SEQ ID NO: 1560514
gggucuuaccuagaguaga

SEQ ID NO: 1605256 - RNA, 19 nt, Artificial Sequence
  Description of Artificial Sequence: Synthetic oligonucleotide
  Antisense strand to SEQ ID NO: 1605255
ucuacucuagguaagaccc

SEQ ID NO: 1605257 - RNA, 19 nt, Artificial Sequence
  Description of Artificial Sequence: Synthetic oligonucleotide
  Sense strand starting at position 2427 of SEQ ID NO: 1560514
ggcaugucugcgguucgaa

SEQ ID NO: 1605258 - RNA, 19 nt, Artificial Sequence
  Description of Artificial Sequence: Synthetic oligonucleotide
  Antisense strand to SEQ ID NO: 1605257
uucgaaccgcagacaugcc

SEQ ID NO: 1605259 - RNA, 19 nt, Artificial Sequence
  Description of Artificial Sequence: Synthetic oligonucleotide
  Sense strand starting at position 2428 of SEQ ID NO: 1560514
gcaugucugcgguucgaaa

SEQ ID NO: 1605260 - RNA, 19 nt, Artificial Sequence
  Description of Artificial Sequence: Synthetic oligonucleotide
  Antisense strand to SEQ ID NO: 1605259
uuucgaaccgcagacaugc

SEQ ID NO: 1605261 - RNA, 19 nt, Artificial Sequence
  Description of Artificial Sequence: Synthetic oligonucleotide
  Sense strand starting at position 2465 of SEQ ID NO: 1560514
aacggaggcuuacaaagau

SEQ ID NO: 1605262 - RNA, 19 nt, Artificial Sequence
  Description of Artificial Sequence: Synthetic oligonucleotide
  Antisense strand to SEQ ID NO: 1605261
aucuuuguaagccuccguu

SEQ ID NO: 1605263 - RNA, 19 nt, Artificial Sequence
  Description of Artificial Sequence: Synthetic oligonucleotide
  Sense strand starting at position 2518 of SEQ ID NO: 1560514
gagcgaucaagugaggaau

SEQ ID NO: 1605264 - RNA, 19 nt, Artificial Sequence
  Description of Artificial Sequence: Synthetic oligonucleotide
  Antisense strand to SEQ ID NO: 1605263
auuccucacuugaucgcuc

SEQ ID NO: 1605265 - RNA, 19 nt, Artificial Sequence
  Description of Artificial Sequence: Synthetic oligonucleotide
  Sense strand starting at position 2520 of SEQ ID NO: 1560514
gcgaucaagugaggaauuu

SEQ ID NO: 1605266 - RNA, 19 nt, Artificial Sequence
  Description of Artificial Sequence: Synthetic oligonucleotide
  Antisense strand to SEQ ID NO: 1605265
aaauuccucacuugaucgc

SEQ ID NO: 1605267 - RNA, 19 nt, Artificial Sequence
  Description of Artificial Sequence: Synthetic oligonucleotide
  Sense strand starting at position 2604 of SEQ ID NO: 1560514
ucgggugguguuuagaaua

SEQ ID NO: 1605268 - RNA, 19 nt, Artificial Sequence
  Description of Artificial Sequence: Synthetic oligonucleotide
  Antisense strand to SEQ ID NO: 1605267
uauucuaaacaccacccga

SEQ ID NO: 1605269 - RNA, 19 nt, Artificial Sequence
  Description of Artificial Sequence: Synthetic oligonucleotide
  Sense strand starting at position 2627 of SEQ ID NO: 1560514
agacucugugcuuggaaau

SEQ ID NO: 1605270 - RNA, 19 nt, Artificial Sequence
  Description of Artificial Sequence: Synthetic oligonucleotide
  Antisense strand to SEQ ID NO: 1605269
auuuccaagcacagagucu

SEQ ID NO: 1605271 - RNA, 19 nt, Artificial Sequence
  Description of Artificial Sequence: Synthetic oligonucleotide
  Sense strand starting at position 2628 of SEQ ID NO: 1560514
gacucugugcuuggaaaug

SEQ ID NO: 1605272 - RNA, 19 nt, Artificial Sequence
  Description of Artificial Sequence: Synthetic oligonucleotide
  Antisense strand to SEQ ID NO: 1605271
cauuuccaagcacagaguc

SEQ ID NO: 1605273 - RNA, 19 nt, Artificial Sequence
  Description of Artificial Sequence: Synthetic oligonucleotide
  Sense strand starting at position 2661 of SEQ ID NO: 1560514
gagagaauuuccuaucugu

SEQ ID NO: 1605274 - RNA, 19 nt, Artificial Sequence
  Description of Artificial Sequence: Synthetic oligonucleotide
  Antisense strand to SEQ ID NO: 1605273
acagauaggaaauucucuc

SEQ ID NO: 1605275 - RNA, 19 nt, Artificial Sequence
  Description of Artificial Sequence: Synthetic oligonucleotide
  Sense strand starting at position 2668 of SEQ ID NO: 1560514
uuuccuaucugucuuggaa

SEQ ID NO: 1605276 - RNA, 19 nt, Artificial Sequence
  Description of Artificial Sequence: Synthetic oligonucleotide
  Antisense strand to SEQ ID NO: 1605275
uuccaagacagauaggaaa

SEQ ID NO: 1605277 - RNA, 19 nt, Artificial Sequence
  Description of Artificial Sequence: Synthetic oligonucleotide
  Sense strand starting at position 2671 of SEQ ID NO: 1560514
ccuaucugucuuggaauaa

SEQ ID NO: 1605278 - RNA, 19 nt, Artificial Sequence
  Description of Artificial Sequence: Synthetic oligonucleotide
  Antisense strand to SEQ ID NO: 1605277
uuauuccaagacagauagg

SEQ ID NO: 1605279 - RNA, 19 nt, Artificial Sequence
  Description of Artificial Sequence: Synthetic oligonucleotide
  Sense strand starting at position 3456 of SEQ ID NO: 1560514
auaguaggcgcucgauaca

SEQ ID NO: 1605280 - RNA, 19 nt, Artificial Sequence
  Description of Artificial Sequence: Synthetic oligonucleotide
  Antisense strand to SEQ ID NO: 1605279
uguaucgagcgccuacuau

SEQ ID NO: 1605281 - RNA, 19 nt, Artificial Sequence
  Description of Artificial Sequence: Synthetic oligonucleotide
  Sense strand starting at position 3466 of SEQ ID NO: 1560514
cucgauacaucuuugggaa

SEQ ID NO: 1605282 - RNA, 19 nt, Artificial Sequence
  Description of Artificial Sequence: Synthetic oligonucleotide
  Antisense strand to SEQ ID NO: 1605281
uucccaaagauguaucgag

SEQ ID NO: 1605283 - RNA, 19 nt, Artificial Sequence
  Description of Artificial Sequence: Synthetic oligonucleotide
  Sense strand starting at position 3467 of SEQ ID NO: 1560514
ucgauacaucuuugggaau

SEQ ID NO: 1605284 - RNA, 19 nt, Artificial Sequence
  Description of Artificial Sequence: Synthetic oligonucleotide
  Antisense strand to SEQ ID NO: 1605283
auucccaaagauguaucga

SEQ ID NO: 1605285 - RNA, 19 nt, Artificial Sequence
  Description of Artificial Sequence: Synthetic oligonucleotide
  Sense strand starting at position 3470 of SEQ ID NO: 1560514
auacaucuuugggaauaaa

SEQ ID NO: 1605286 - RNA, 19 nt, Artificial Sequence
  Description of Artificial Sequence: Synthetic oligonucleotide
  Antisense strand to SEQ ID NO: 1605285
uuuauucccaaagauguau

SEQ ID NO: 1605287 - RNA, 19 nt, Artificial Sequence
  Description of Artificial Sequence: Synthetic oligonucleotide
  Sense strand starting at position 3480 of SEQ ID NO: 1560514
gggaauaaaugacaggaga

SEQ ID NO: 1605288 - RNA, 19 nt, Artificial Sequence
  Description of Artificial Sequence: Synthetic oligonucleotide
  Antisense strand to SEQ ID NO: 1605287
ucuccugucauuuauuccc

SEQ ID NO: 1605289 - RNA, 19 nt, Artificial Sequence
  Description of Artificial Sequence: Synthetic oligonucleotide
  Sense strand starting at position 3654 of SEQ ID NO: 1560514
gggucuggguugguuuauu

SEQ ID NO: 1605290 - RNA, 19 nt, Artificial Sequence
  Description of Artificial Sequence: Synthetic oligonucleotide
  Antisense strand to SEQ ID NO: 1605289
aauaaaccaacccagaccc

SEQ ID NO: 1605291 - RNA, 19 nt, Artificial Sequence
  Description of Artificial Sequence: Synthetic oligonucleotide
  Sense strand starting at position 59 of SEQ ID NO: 1560515
gucguugaggccuggaauc

SEQ ID NO: 1605292 - RNA, 19 nt, Artificial Sequence
  Description of Artificial Sequence: Synthetic oligonucleotide
  Antisense strand to SEQ ID NO: 1605291
gauuccaggccucaacgac

SEQ ID NO: 1605293 - RNA, 19 nt, Artificial Sequence
  Description of Artificial Sequence: Synthetic oligonucleotide
  Sense strand starting at position 112 of SEQ ID NO: 1560515
gcacuaugacuuuguccag

SEQ ID NO: 1605294 - RNA, 19 nt, Artificial Sequence
  Description of Artificial Sequence: Synthetic oligonucleotide
  Antisense strand to SEQ ID NO: 1605293
cuggacaaagucauagugc

SEQ ID NO: 1605295 - RNA, 19 nt, Artificial Sequence
  Description of Artificial Sequence: Synthetic oligonucleotide
  Sense strand starting at position 151 of SEQ ID NO: 1560515
cucggaugucccugcggau

SEQ ID NO: 1605296 - RNA, 19 nt, Artificial Sequence
  Description of Artificial Sequence: Synthetic oligonucleotide
  Antisense strand to SEQ ID NO: 1605295
auccgcagggacauccgag

SEQ ID NO: 1605297 - RNA, 19 nt, Artificial Sequence
  Description of Artificial Sequence: Synthetic oligonucleotide
  Sense strand starting at position 222 of SEQ ID NO: 1560515
uagggaaguugguuguaca

SEQ ID NO: 1605298 - RNA, 19 nt, Artificial Sequence
  Description of Artificial Sequence: Synthetic oligonucleotide
  Antisense strand to SEQ ID NO: 1605297
uguacaaccaacuucccua

SEQ ID NO: 1605299 - RNA, 19 nt, Artificial Sequence
  Description of Artificial Sequence: Synthetic oligonucleotide
  Sense strand starting at position 223 of SEQ ID NO: 1560515
agggaaguugguuguacau

SEQ ID NO: 1605300 - RNA, 19 nt, Artificial Sequence
  Description of Artificial Sequence: Synthetic oligonucleotide
  Antisense strand to SEQ ID NO: 1605299
auguacaaccaacuucccu

SEQ ID NO: 1605301 - RNA, 19 nt, Artificial Sequence
  Description of Artificial Sequence: Synthetic oligonucleotide
  Sense strand starting at position 236 of SEQ ID NO: 1560515
guacauacucucggacuca

SEQ ID NO: 1605302 - RNA, 19 nt, Artificial Sequence
  Description of Artificial Sequence: Synthetic oligonucleotide
  Antisense strand to SEQ ID NO: 1605301
ugaguccgagaguauguac

SEQ ID NO: 1605303 - RNA, 19 nt, Artificial Sequence
  Description of Artificial Sequence: Synthetic oligonucleotide
  Sense strand starting at position 427 of SEQ ID NO: 1560515
ucugguuggccgcgaugaa

SEQ ID NO: 1605304 - RNA, 19 nt, Artificial Sequence
  Description of Artificial Sequence: Synthetic oligonucleotide
  Antisense strand to SEQ ID NO: 1605303
uucaucgcggccaaccaga

SEQ ID NO: 1605305 - RNA, 19 nt, Artificial Sequence
  Description of Artificial Sequence: Synthetic oligonucleotide
  Sense strand starting at position 428 of SEQ ID NO: 1560515
cugguuggccgcgaugaau

SEQ ID NO: 1605306 - RNA, 19 nt, Artificial Sequence
  Description of Artificial Sequence: Synthetic oligonucleotide
  Antisense strand to SEQ ID NO: 1605305
auucaucgcggccaaccag

SEQ ID NO: 1605307 - RNA, 19 nt, Artificial Sequence
  Description of Artificial Sequence: Synthetic oligonucleotide
  Sense strand starting at position 777 of SEQ ID NO: 1560515
gagucagcgagccguagua

SEQ ID NO: 1605308 - RNA, 19 nt, Artificial Sequence
  Description of Artificial Sequence: Synthetic oligonucleotide
  Antisense strand to SEQ ID NO: 1605307
uacuacggcucgcugacuc

SEQ ID NO: 1605309 - RNA, 19 nt, Artificial Sequence
  Description of Artificial Sequence: Synthetic oligonucleotide
  Sense strand starting at position 1600 of SEQ ID NO: 1560515
acucguauugcgccucgau

SEQ ID NO: 1605310 - RNA, 19 nt, Artificial Sequence
  Description of Artificial Sequence: Synthetic oligonucleotide
  Antisense strand to SEQ ID NO: 1605309
aucgaggcgcaauacgagu

SEQ ID NO: 1605311 - RNA, 19 nt, Artificial Sequence
  Description of Artificial Sequence: Synthetic oligonucleotide
  Sense strand starting at position 1642 of SEQ ID NO: 1560515
ccgggcucucgacgaagaa

SEQ ID NO: 1605312 - RNA, 19 nt, Artificial Sequence
  Description of Artificial Sequence: Synthetic oligonucleotide
  Antisense strand to SEQ ID NO: 1605311
uucuucgucgagagcccgg

SEQ ID NO: 1605313 - RNA, 19 nt, Artificial Sequence
  Description of Artificial Sequence: Synthetic oligonucleotide
  Sense strand starting at position 1842 of SEQ ID NO: 1560515
cgcgcgaccuccggagaaa

SEQ ID NO: 1605314 - RNA, 19 nt, Artificial Sequence
  Description of Artificial Sequence: Synthetic oligonucleotide
  Antisense strand to SEQ ID NO: 1605313
uuucuccggaggucgcgcg

SEQ ID NO: 1605315 - RNA, 19 nt, Artificial Sequence
  Description of Artificial Sequence: Synthetic oligonucleotide
  Sense strand starting at position 2445 of SEQ ID NO: 1560515
ggaggcuguucgcuggaaa

SEQ ID NO: 1605316 - RNA, 19 nt, Artificial Sequence
  Description of Artificial Sequence: Synthetic oligonucleotide
  Antisense strand to SEQ ID NO: 1605315
uuuccagcgaacagccucc

SEQ ID NO: 1605317 - RNA, 19 nt, Artificial Sequence
  Description of Artificial Sequence: Synthetic oligonucleotide
  Sense strand starting at position 2446 of SEQ ID NO: 1560515
gaggcuguucgcuggaaag

SEQ ID NO: 1605318 - RNA, 19 nt, Artificial Sequence
  Description of Artificial Sequence: Synthetic oligonucleotide
  Antisense strand to SEQ ID NO: 1605317
cuuuccagcgaacagccuc

SEQ ID NO: 1605319 - RNA, 19 nt, Artificial Sequence
  Description of Artificial Sequence: Synthetic oligonucleotide
  Sense strand starting at position 2532 of SEQ ID NO: 1560515
cccucaugcgcgcugauaa

SEQ ID NO: 1605320 - RNA, 19 nt, Artificial Sequence
  Description of Artificial Sequence: Synthetic oligonucleotide
  Antisense strand to SEQ ID NO: 1605319
uuaucagcgcgcaugaggg

SEQ ID NO: 1605321 - RNA, 19 nt, Artificial Sequence
  Description of Artificial Sequence: Synthetic oligonucleotide
  Sense strand starting at position 2622 of SEQ ID NO: 1560515
ccggaaaguuuccaccacu

SEQ ID NO: 1605322 - RNA, 19 nt, Artificial Sequence
  Description of Artificial Sequence: Synthetic oligonucleotide
  Antisense strand to SEQ ID NO: 1605321
agugguggaaacuuuccgg

SEQ ID NO: 1605323 - RNA, 19 nt, Artificial Sequence
  Description of Artificial Sequence: Synthetic oligonucleotide
  Sense strand starting at position 2657 of SEQ ID NO: 1560515
guggauaguugggaacguu

SEQ ID NO: 1605324 - RNA, 19 nt, Artificial Sequence
  Description of Artificial Sequence: Synthetic oligonucleotide
  Antisense strand to SEQ ID NO: 1605323
aacguucccaacuauccac

SEQ ID NO: 1605325 - RNA, 19 nt, Artificial Sequence
  Description of Artificial Sequence: Synthetic oligonucleotide
  Sense strand starting at position 2666 of SEQ ID NO: 1560515
ugggaacguuugcaagaga

SEQ ID NO: 1605326 - RNA, 19 nt, Artificial Sequence
  Description of Artificial Sequence: Synthetic oligonucleotide
  Antisense strand to SEQ ID NO: 1605325
ucucuugcaaacguuccca

SEQ ID NO: 1605327 - RNA, 19 nt, Artificial Sequence
  Description of Artificial Sequence: Synthetic oligonucleotide
  Sense strand starting at position 2669 of SEQ ID NO: 1560515
gaacguuugcaagagacag

SEQ ID NO: 1605328 - RNA, 19 nt, Artificial Sequence
  Description of Artificial Sequence: Synthetic oligonucleotide
  Antisense strand to SEQ ID NO: 1605327
cugucucuugcaaacguuc

SEQ ID NO: 1605329 - RNA, 19 nt, Artificial Sequence
  Description of Artificial Sequence: Synthetic oligonucleotide
  Sense strand starting at position 3006 of SEQ ID NO: 1560515
gaaagaguauuugguguuu

SEQ ID NO: 1605330 - RNA, 19 nt, Artificial Sequence
  Description of Artificial Sequence: Synthetic oligonucleotide
  Antisense strand to SEQ ID NO: 1605329
aaacaccaaauacucuuuc

SEQ ID NO: 1605331 - RNA, 19 nt, Artificial Sequence
  Description of Artificial Sequence: Synthetic oligonucleotide
  Sense strand starting at position 3008 of SEQ ID NO: 1560515
aagaguauuugguguuugu

SEQ ID NO: 1605332 - RNA, 19 nt, Artificial Sequence
  Description of Artificial Sequence: Synthetic oligonucleotide
  Antisense strand to SEQ ID NO: 1605331
acaaacaccaaauacucuu

SEQ ID NO: 1605333 - RNA, 19 nt, Artificial Sequence
  Description of Artificial Sequence: Synthetic oligonucleotide
  Sense strand starting at position 3018 of SEQ ID NO: 1560515
gguguuuguuccugguucu

SEQ ID NO: 1605334 - RNA, 19 nt, Artificial Sequence
  Description of Artificial Sequence: Synthetic oligonucleotide
  Antisense strand to SEQ ID NO: 1605333
agaaccaggaacaaacacc

SEQ ID NO: 1605335 - RNA, 19 nt, Artificial Sequence
  Description of Artificial Sequence: Synthetic oligonucleotide
  Sense strand starting at position 3019 of SEQ ID NO: 1560515
guguuuguuccugguucuu

SEQ ID NO: 1605336 - RNA, 19 nt, Artificial Sequence
  Description of Artificial Sequence: Synthetic oligonucleotide
  Antisense strand to SEQ ID NO: 1605335
aagaaccaggaacaaacac

SEQ ID NO: 1605337 - RNA, 19 nt, Artificial Sequence
  Description of Artificial Sequence: Synthetic oligonucleotide
  Sense strand starting at position 3028 of SEQ ID NO: 1560515
ccugguucuugguuagaca

SEQ ID NO: 1605338 - RNA, 19 nt, Artificial Sequence
  Description of Artificial Sequence: Synthetic oligonucleotide
  Antisense strand to SEQ ID NO: 1605337
ugucuaaccaagaaccagg

SEQ ID NO: 1605339 - RNA, 19 nt, Artificial Sequence
  Description of Artificial Sequence: Synthetic oligonucleotide
  Sense strand starting at position 3029 of SEQ ID NO: 1560515
cugguucuugguuagacau

SEQ ID NO: 1605340 - RNA, 19 nt, Artificial Sequence
  Description of Artificial Sequence: Synthetic oligonucleotide
  Antisense strand to SEQ ID NO: 1605339
augucuaaccaagaaccag

SEQ ID NO: 1605341 - RNA, 19 nt, Artificial Sequence
  Description of Artificial Sequence: Synthetic oligonucleotide
  Sense strand starting at position 3183 of SEQ ID NO: 1560515
ucggaaagcucagaaucga

SEQ ID NO: 1605342 - RNA, 19 nt, Artificial Sequence
  Description of Artificial Sequence: Synthetic oligonucleotide
  Antisense strand to SEQ ID NO: 1605341
ucgauucugagcuuuccga

SEQ ID NO: 1605343 - RNA, 19 nt, Artificial Sequence
  Description of Artificial Sequence: Synthetic oligonucleotide
  Sense strand starting at position 3415 of SEQ ID NO: 1560515
aaggaaugcuacccagagu

SEQ ID NO: 1605344 - RNA, 19 nt, Artificial Sequence
  Description of Artificial Sequence: Synthetic oligonucleotide
  Antisense strand to SEQ ID NO: 1605343
acucuggguagcauuccuu

SEQ ID NO: 1605345 - RNA, 19 nt, Artificial Sequence
  Description of Artificial Sequence: Synthetic oligonucleotide
  Sense strand starting at position 3418 of SEQ ID NO: 1560515
gaaugcuacccagagucua

SEQ ID NO: 1605346 - RNA, 19 nt, Artificial Sequence
  Description of Artificial Sequence: Synthetic oligonucleotide
  Antisense strand to SEQ ID NO: 1605345
uagacucuggguagcauuc

SEQ ID NO: 1605347 - RNA, 19 nt, Artificial Sequence
  Description of Artificial Sequence: Synthetic oligonucleotide
  Sense strand starting at position 3473 of SEQ ID NO: 1560515
gucugcucccuuuaagauc

SEQ ID NO: 1605348 - RNA, 19 nt, Artificial Sequence
  Description of Artificial Sequence: Synthetic oligonucleotide
  Antisense strand to SEQ ID NO: 1605347
gaucuuaaagggagcagac

SEQ ID NO: 1605349 - RNA, 19 nt, Artificial Sequence
  Description of Artificial Sequence: Synthetic oligonucleotide
  Sense strand starting at position 3482 of SEQ ID NO: 1560515
cuuuaagaucuacaguguu

SEQ ID NO: 1605350 - RNA, 19 nt, Artificial Sequence
  Description of Artificial Sequence: Synthetic oligonucleotide
  Antisense strand to SEQ ID NO: 1605349
aacacuguagaucuuaaag

SEQ ID NO: 1605351 - RNA, 19 nt, Artificial Sequence
  Description of Artificial Sequence: Synthetic oligonucleotide
  Sense strand starting at position 3949 of SEQ ID NO: 1560515
uccauuuggcugugagcau

SEQ ID NO: 1605352 - RNA, 19 nt, Artificial Sequence
  Description of Artificial Sequence: Synthetic oligonucleotide
  Antisense strand to SEQ ID NO: 1605351
augcucacagccaaaugga

SEQ ID NO: 1605353 - RNA, 19 nt, Artificial Sequence
  Description of Artificial Sequence: Synthetic oligonucleotide
  Sense strand starting at position 3950 of SEQ ID NO: 1560515
ccauuuggcugugagcauu

SEQ ID NO: 1605354 - RNA, 19 nt, Artificial Sequence
  Description of Artificial Sequence: Synthetic oligonucleotide
  Antisense strand to SEQ ID NO: 1605353
aaugcucacagccaaaugg

SEQ ID NO: 1605355 - RNA, 19 nt, Artificial Sequence
  Description of Artificial Sequence: Synthetic oligonucleotide
  Sense strand starting at position 3970 of SEQ ID NO: 1560515
uccggaguucugugagcug

SEQ ID NO: 1605356 - RNA, 19 nt, Artificial Sequence
  Description of Artificial Sequence: Synthetic oligonucleotide
  Antisense strand to SEQ ID NO: 1605355
cagcucacagaacuccgga

SEQ ID NO: 1605357 - RNA, 19 nt, Artificial Sequence
  Description of Artificial Sequence: Synthetic oligonucleotide
  Sense strand starting at position 3972 of SEQ ID NO: 1560515
cggaguucugugagcuguu

SEQ ID NO: 1605358 - RNA, 19 nt, Artificial Sequence
  Description of Artificial Sequence: Synthetic oligonucleotide
  Antisense strand to SEQ ID NO: 1605357
aacagcucacagaacuccg

SEQ ID NO: 1605359 - RNA, 19 nt, Artificial Sequence
  Description of Artificial Sequence: Synthetic oligonucleotide
  Sense strand starting at position 21 of SEQ ID NO: 1560516
gcacuaguggcgccuugaa

SEQ ID NO: 1605360 - RNA, 19 nt, Artificial Sequence
  Description of Artificial Sequence: Synthetic oligonucleotide
  Antisense strand to SEQ ID NO: 1605359
uucaaggcgccacuagugc

SEQ ID NO: 1605361 - RNA, 19 nt, Artificial Sequence
  Description of Artificial Sequence: Synthetic oligonucleotide
  Sense strand starting at position 87 of SEQ ID NO: 1560516
gguccaugucagugcagaa

SEQ ID NO: 1605362 - RNA, 19 nt, Artificial Sequence
  Description of Artificial Sequence: Synthetic oligonucleotide
  Antisense strand to SEQ ID NO: 1605361
uucugcacugacauggacc

SEQ ID NO: 1605363 - RNA, 19 nt, Artificial Sequence
  Description of Artificial Sequence: Synthetic oligonucleotide
  Sense strand starting at position 135 of SEQ ID NO: 1560516
gcgcuagguccagcaugau

SEQ ID NO: 1605364 - RNA, 19 nt, Artificial Sequence
  Description of Artificial Sequence: Synthetic oligonucleotide
  Antisense strand to SEQ ID NO: 1605363
aucaugcuggaccuagcgc

SEQ ID NO: 1605365 - RNA, 19 nt, Artificial Sequence
  Description of Artificial Sequence: Synthetic oligonucleotide
  Sense strand starting at position 294 of SEQ ID NO: 1560516
agcaucagcuccgagguau

SEQ ID NO: 1605366 - RNA, 19 nt, Artificial Sequence
  Description of Artificial Sequence: Synthetic oligonucleotide
  Antisense strand to SEQ ID NO: 1605365
auaccucggagcugaugcu

SEQ ID NO: 1605367 - RNA, 19 nt, Artificial Sequence
  Description of Artificial Sequence: Synthetic oligonucleotide
  Sense strand starting at position 588 of SEQ ID NO: 1560516
gguuguaacucacgaugga

SEQ ID NO: 1605368 - RNA, 19 nt, Artificial Sequence
  Description of Artificial Sequence: Synthetic oligonucleotide
  Antisense strand to SEQ ID NO: 1605367
uccaucgugaguuacaacc

SEQ ID NO: 1605369 - RNA, 19 nt, Artificial Sequence
  Description of Artificial Sequence: Synthetic oligonucleotide
  Sense strand starting at position 786 of SEQ ID NO: 1560516
gaagucaucuccgcccaca

SEQ ID NO: 1605370 - RNA, 19 nt, Artificial Sequence
  Description of Artificial Sequence: Synthetic oligonucleotide
  Antisense strand to SEQ ID NO: 1605369
ugugggcggagaugacuuc

SEQ ID NO: 1605371 - RNA, 19 nt, Artificial Sequence
  Description of Artificial Sequence: Synthetic oligonucleotide
  Sense strand starting at position 845 of SEQ ID NO: 1560516
ccaggguguucugcggaga

SEQ ID NO: 1605372 - RNA, 19 nt, Artificial Sequence
  Description of Artificial Sequence: Synthetic oligonucleotide
  Antisense strand to SEQ ID NO: 1605371
ucuccgcagaacacccugg

SEQ ID NO: 1605373 - RNA, 19 nt, Artificial Sequence
  Description of Artificial Sequence: Synthetic oligonucleotide
  Sense strand starting at position 1051 of SEQ ID NO: 1560516
gucguugaggccuggaauc

SEQ ID NO: 1605374 - RNA, 19 nt, Artificial Sequence
  Description of Artificial Sequence: Synthetic oligonucleotide
  Antisense strand to SEQ ID NO: 1605373
gauuccaggccucaacgac

SEQ ID NO: 1605375 - RNA, 19 nt, Artificial Sequence
  Description of Artificial Sequence: Synthetic oligonucleotide
  Sense strand starting at position 1104 of SEQ ID NO: 1560516
gcacuaugacuuuguccag

SEQ ID NO: 1605376 - RNA, 19 nt, Artificial Sequence
  Description of Artificial Sequence: Synthetic oligonucleotide
  Antisense strand to SEQ ID NO: 1605375
cuggacaaagucauagugc

SEQ ID NO: 1605377 - RNA, 19 nt, Artificial Sequence
  Description of Artificial Sequence: Synthetic oligonucleotide
  Sense strand starting at position 1143 of SEQ ID NO: 1560516
cucggaugucccugcggau

SEQ ID NO: 1605378 - RNA, 19 nt, Artificial Sequence
  Description of Artificial Sequence: Synthetic oligonucleotide
  Antisense strand to SEQ ID NO: 1605377
auccgcagggacauccgag

SEQ ID NO: 1605379 - RNA, 19 nt, Artificial Sequence
  Description of Artificial Sequence: Synthetic oligonucleotide
  Sense strand starting at position 1214 of SEQ ID NO: 1560516
uagggaaguugguuguaca

SEQ ID NO: 1605380 - RNA, 19 nt, Artificial Sequence
  Description of Artificial Sequence: Synthetic oligonucleotide
  Antisense strand to SEQ ID NO: 1605379
uguacaaccaacuucccua

SEQ ID NO: 1605381 - RNA, 19 nt, Artificial Sequence
  Description of Artificial Sequence: Synthetic oligonucleotide
  Sense strand starting at position 1215 of SEQ ID NO: 1560516
agggaaguugguuguacau

SEQ ID NO: 1605382 - RNA, 19 nt, Artificial Sequence
  Description of Artificial Sequence: Synthetic oligonucleotide
  Antisense strand to SEQ ID NO: 1605381
auguacaaccaacuucccu

SEQ ID NO: 1605383 - RNA, 19 nt, Artificial Sequence
  Description of Artificial Sequence: Synthetic oligonucleotide
  Sense strand starting at position 1228 of SEQ ID NO: 1560516
guacauacucucggacuca

SEQ ID NO: 1605384 - RNA, 19 nt, Artificial Sequence
  Description of Artificial Sequence: Synthetic oligonucleotide
  Antisense strand to SEQ ID NO: 1605383
ugaguccgagaguauguac

SEQ ID NO: 1605385 - RNA, 19 nt, Artificial Sequence
  Description of Artificial Sequence: Synthetic oligonucleotide
  Sense strand starting at position 1419 of SEQ ID NO: 1560516
ucugguuggccgcgaugaa

SEQ ID NO: 1605386 - RNA, 19 nt, Artificial Sequence
  Description of Artificial Sequence: Synthetic oligonucleotide
  Antisense strand to SEQ ID NO: 1605385
uucaucgcggccaaccaga

SEQ ID NO: 1605387 - RNA, 19 nt, Artificial Sequence
  Description of Artificial Sequence: Synthetic oligonucleotide
  Sense strand starting at position 1420 of SEQ ID NO: 1560516
cugguuggccgcgaugaau

SEQ ID NO: 1605388 - RNA, 19 nt, Artificial Sequence
  Description of Artificial Sequence: Synthetic oligonucleotide
  Antisense strand to SEQ ID NO: 1605387
auucaucgcggccaaccag

SEQ ID NO: 1605389 - RNA, 19 nt, Artificial Sequence
  Description of Artificial Sequence: Synthetic oligonucleotide
  Sense strand starting at position 1769 of SEQ ID NO: 1560516
gagucagcgagccguagua

SEQ ID NO: 1605390 - RNA, 19 nt, Artificial Sequence
  Description of Artificial Sequence: Synthetic oligonucleotide
  Antisense strand to SEQ ID NO: 1605389
uacuacggcucgcugacuc

SEQ ID NO: 1605391 - RNA, 19 nt, Artificial Sequence
  Description of Artificial Sequence: Synthetic oligonucleotide
  Sense strand starting at position 2592 of SEQ ID NO: 1560516
acucguauugcgccucgau

SEQ ID NO: 1605392 - RNA, 19 nt, Artificial Sequence
  Description of Artificial Sequence: Synthetic oligonucleotide
  Antisense strand to SEQ ID NO: 1605391
aucgaggcgcaauacgagu

SEQ ID NO: 1605393 - RNA, 19 nt, Artificial Sequence
  Description of Artificial Sequence: Synthetic oligonucleotide
  Sense strand starting at position 2634 of SEQ ID NO: 1560516
ccgggcucucgacgaagaa

SEQ ID NO: 1605394 - RNA, 19 nt, Artificial Sequence
  Description of Artificial Sequence: Synthetic oligonucleotide
  Antisense strand to SEQ ID NO: 1605393
uucuucgucgagagcccgg

SEQ ID NO: 1605395 - RNA, 19 nt, Artificial Sequence
  Description of Artificial Sequence: Synthetic oligonucleotide
  Sense strand starting at position 2834 of SEQ ID NO: 1560516
cgcgcgaccuccggagaaa

SEQ ID NO: 1605396 - RNA, 19 nt, Artificial Sequence
  Description of Artificial Sequence: Synthetic oligonucleotide
  Antisense strand to SEQ ID NO: 1605395
uuucuccggaggucgcgcg

SEQ ID NO: 1605397 - RNA, 19 nt, Artificial Sequence
  Description of Artificial Sequence: Synthetic oligonucleotide
  Sense strand starting at position 3437 of SEQ ID NO: 1560516
ggaggcuguucgcuggaaa

SEQ ID NO: 1605398 - RNA, 19 nt, Artificial Sequence
  Description of Artificial Sequence: Synthetic oligonucleotide
  Antisense strand to SEQ ID NO: 1605397
uuuccagcgaacagccucc

SEQ ID NO: 1605399 - RNA, 19 nt, Artificial Sequence
  Description of Artificial Sequence: Synthetic oligonucleotide
  Sense strand starting at position 3438 of SEQ ID NO: 1560516
gaggcuguucgcuggaaag

SEQ ID NO: 1605400 - RNA, 19 nt, Artificial Sequence
  Description of Artificial Sequence: Synthetic oligonucleotide
  Antisense strand to SEQ ID NO: 1605399
cuuuccagcgaacagccuc

SEQ ID NO: 1605401 - RNA, 19 nt, Artificial Sequence
  Description of Artificial Sequence: Synthetic oligonucleotide
  Sense strand starting at position 3524 of SEQ ID NO: 1560516
cccucaugcgcgcugauaa

SEQ ID NO: 1605402 - RNA, 19 nt, Artificial Sequence
  Description of Artificial Sequence: Synthetic oligonucleotide
  Antisense strand to SEQ ID NO: 1605401
uuaucagcgcgcaugaggg

SEQ ID NO: 1605403 - RNA, 19 nt, Artificial Sequence
  Description of Artificial Sequence: Synthetic oligonucleotide
  Sense strand starting at position 3614 of SEQ ID NO: 1560516
ccggaaaguuuccaccacu

SEQ ID NO: 1605404 - RNA, 19 nt, Artificial Sequence
  Description of Artificial Sequence: Synthetic oligonucleotide
  Antisense strand to SEQ ID NO: 1605403
agugguggaaacuuuccgg

SEQ ID NO: 1605405 - RNA, 19 nt, Artificial Sequence
  Description of Artificial Sequence: Synthetic oligonucleotide
  Sense strand starting at position 3649 of SEQ ID NO: 1560516
guggauaguugggaacguu

SEQ ID NO: 1605406 - RNA, 19 nt, Artificial Sequence
  Description of Artificial Sequence: Synthetic oligonucleotide
  Antisense strand to SEQ ID NO: 1605405
aacguucccaacuauccac

SEQ ID NO: 1605407 - RNA, 19 nt, Artificial Sequence
  Description of Artificial Sequence: Synthetic oligonucleotide
  Sense strand starting at position 3658 of SEQ ID NO: 1560516
ugggaacguuugcaagaga

SEQ ID NO: 1605408 - RNA, 19 nt, Artificial Sequence
  Description of Artificial Sequence: Synthetic oligonucleotide
  Antisense strand to SEQ ID NO: 1605407
ucucuugcaaacguuccca

SEQ ID NO: 1605409 - RNA, 19 nt, Artificial Sequence
  Description of Artificial Sequence: Synthetic oligonucleotide
  Sense strand starting at position 3661 of SEQ ID NO: 1560516
gaacguuugcaagagacag

SEQ ID NO: 1605410 - RNA, 19 nt, Artificial Sequence
  Description of Artificial Sequence: Synthetic oligonucleotide
  Antisense strand to SEQ ID NO: 1605409
cugucucuugcaaacguuc

SEQ ID NO: 1605411 - RNA, 19 nt, Artificial Sequence
  Description of Artificial Sequence: Synthetic oligonucleotide
  Sense strand starting at position 348 of SEQ ID NO: 1560517
gaagguuugugacccuuua

SEQ ID NO: 1605412 - RNA, 19 nt, Artificial Sequence
  Description of Artificial Sequence: Synthetic oligonucleotide
  Antisense strand to SEQ ID NO: 1605411
uaaagggucacaaaccuuc

SEQ ID NO: 1605413 - RNA, 19 nt, Artificial Sequence
  Description of Artificial Sequence: Synthetic oligonucleotide
  Sense strand starting at position 448 of SEQ ID NO: 1560517
uccagaggauuagacagau

SEQ ID NO: 1605414 - RNA, 19 nt, Artificial Sequence
  Description of Artificial Sequence: Synthetic oligonucleotide
  Antisense strand to SEQ ID NO: 1605413
aucugucuaauccucugga

SEQ ID NO: 1605415 - RNA, 19 nt, Artificial Sequence
  Description of Artificial Sequence: Synthetic oligonucleotide
  Sense strand starting at position 481 of SEQ ID NO: 1560517
gcaacaauguaugugaaca

SEQ ID NO: 1605416 - RNA, 19 nt, Artificial Sequence
  Description of Artificial Sequence: Synthetic oligonucleotide
  Antisense strand to SEQ ID NO: 1605415
uguucacauacauuguugc

SEQ ID NO: 1605417 - RNA, 19 nt, Artificial Sequence
  Description of Artificial Sequence: Synthetic oligonucleotide
  Sense strand starting at position 629 of SEQ ID NO: 1560517
gggugccuggagugaauua

SEQ ID NO: 1605418 - RNA, 19 nt, Artificial Sequence
  Description of Artificial Sequence: Synthetic oligonucleotide
  Antisense strand to SEQ ID NO: 1605417
uaauucacuccaggcaccc

SEQ ID NO: 1605419 - RNA, 19 nt, Artificial Sequence
  Description of Artificial Sequence: Synthetic oligonucleotide
  Sense strand starting at position 646 of SEQ ID NO: 1560517
uaguaaccuggcugucaga

SEQ ID NO: 1605420 - RNA, 19 nt, Artificial Sequence
  Description of Artificial Sequence: Synthetic oligonucleotide
  Antisense strand to SEQ ID NO: 1605419
ucugacagccagguuacua

SEQ ID NO: 1605421 - RNA, 19 nt, Artificial Sequence
  Description of Artificial Sequence: Synthetic oligonucleotide
  Sense strand starting at position 689 of SEQ ID NO: 1560517
gguucccggagaugaaauu

SEQ ID NO: 1605422 - RNA, 19 nt, Artificial Sequence
  Description of Artificial Sequence: Synthetic oligonucleotide
  Antisense strand to SEQ ID NO: 1605421
aauuucaucuccgggaacc

SEQ ID NO: 1605423 - RNA, 19 nt, Artificial Sequence
  Description of Artificial Sequence: Synthetic oligonucleotide
  Sense strand starting at position 2449 of SEQ ID NO: 1560517
gagaccuuccucugccagu

SEQ ID NO: 1605424 - RNA, 19 nt, Artificial Sequence
  Description of Artificial Sequence: Synthetic oligonucleotide
  Antisense strand to SEQ ID NO: 1605423
acuggcagaggaaggucuc

SEQ ID NO: 1605425 - RNA, 19 nt, Artificial Sequence
  Description of Artificial Sequence: Synthetic oligonucleotide
  Sense strand starting at position 2493 of SEQ ID NO: 1560517
ugacuuacgcuccauugga

SEQ ID NO: 1605426 - RNA, 19 nt, Artificial Sequence
  Description of Artificial Sequence: Synthetic oligonucleotide
  Antisense strand to SEQ ID NO: 1605425
uccaauggagcguaaguca

SEQ ID NO: 1605427 - RNA, 19 nt, Artificial Sequence
  Description of Artificial Sequence: Synthetic oligonucleotide
  Sense strand starting at position 2518 of SEQ ID NO: 1560517
guaagaaaucucugucaug

SEQ ID NO: 1605428 - RNA, 19 nt, Artificial Sequence
  Description of Artificial Sequence: Synthetic oligonucleotide
  Antisense strand to SEQ ID NO: 1605427
caugacagagauuucuuac

SEQ ID NO: 1605429 - RNA, 19 nt, Artificial Sequence
  Description of Artificial Sequence: Synthetic oligonucleotide
  Sense strand starting at position 2527 of SEQ ID NO: 1560517
cucugucauguauagagua

SEQ ID NO: 1605430 - RNA, 19 nt, Artificial Sequence
  Description of Artificial Sequence: Synthetic oligonucleotide
  Antisense strand to SEQ ID NO: 1605429
uacucuauacaugacagag

SEQ ID NO: 1605431 - RNA, 19 nt, Artificial Sequence
  Description of Artificial Sequence: Synthetic oligonucleotide
  Sense strand starting at position 2529 of SEQ ID NO: 1560517
cugucauguauagaguacu

SEQ ID NO: 1605432 - RNA, 19 nt, Artificial Sequence
  Description of Artificial Sequence: Synthetic oligonucleotide
  Antisense strand to SEQ ID NO: 1605431
aguacucuauacaugacag

SEQ ID NO: 1605433 - RNA, 19 nt, Artificial Sequence
  Description of Artificial Sequence: Synthetic oligonucleotide
  Sense strand starting at position 2539 of SEQ ID NO: 1560517
uagaguacuuguucuguau

SEQ ID NO: 1605434 - RNA, 19 nt, Artificial Sequence
  Description of Artificial Sequence: Synthetic oligonucleotide
  Antisense strand to SEQ ID NO: 1605433
auacagaacaaguacucua

SEQ ID NO: 1605435 - RNA, 19 nt, Artificial Sequence
  Description of Artificial Sequence: Synthetic oligonucleotide
  Sense strand starting at position 2543 of SEQ ID NO: 1560517
guacuuguucuguaucaga

SEQ ID NO: 1605436 - RNA, 19 nt, Artificial Sequence
  Description of Artificial Sequence: Synthetic oligonucleotide
  Antisense strand to SEQ ID NO: 1605435
ucugauacagaacaaguac

SEQ ID NO: 1605437 - RNA, 19 nt, Artificial Sequence
  Description of Artificial Sequence: Synthetic oligonucleotide
  Sense strand starting at position 2684 of SEQ ID NO: 1560517
gcuaucugacaugaucuca

SEQ ID NO: 1605438 - RNA, 19 nt, Artificial Sequence
  Description of Artificial Sequence: Synthetic oligonucleotide
  Antisense strand to SEQ ID NO: 1605437
ugagaucaugucagauagc

SEQ ID NO: 1605439 - RNA, 19 nt, Artificial Sequence
  Description of Artificial Sequence: Synthetic oligonucleotide
  Sense strand starting at position 2695 of SEQ ID NO: 1560517
ugaucucauguaugugaag

SEQ ID NO: 1605440 - RNA, 19 nt, Artificial Sequence
  Description of Artificial Sequence: Synthetic oligonucleotide
  Antisense strand to SEQ ID NO: 1605439
cuucacauacaugagauca

SEQ ID NO: 1605441 - RNA, 19 nt, Artificial Sequence
  Description of Artificial Sequence: Synthetic oligonucleotide
  Sense strand starting at position 2741 of SEQ ID NO: 1560517
guuguagcccaguaggauu

SEQ ID NO: 1605442 - RNA, 19 nt, Artificial Sequence
  Description of Artificial Sequence: Synthetic oligonucleotide
  Antisense strand to SEQ ID NO: 1605441
aauccuacugggcuacaac

SEQ ID NO: 1605443 - RNA, 19 nt, Artificial Sequence
  Description of Artificial Sequence: Synthetic oligonucleotide
  Sense strand starting at position 2754 of SEQ ID NO: 1560517
aggauuauuuauuguccua

SEQ ID NO: 1605444 - RNA, 19 nt, Artificial Sequence
  Description of Artificial Sequence: Synthetic oligonucleotide
  Antisense strand to SEQ ID NO: 1605443
uaggacaauaaauaauccu

SEQ ID NO: 1605445 - RNA, 19 nt, Artificial Sequence
  Description of Artificial Sequence: Synthetic oligonucleotide
  Sense strand starting at position 2759 of SEQ ID NO: 1560517
uauuuauuguccuagguga

SEQ ID NO: 1605446 - RNA, 19 nt, Artificial Sequence
  Description of Artificial Sequence: Synthetic oligonucleotide
  Antisense strand to SEQ ID NO: 1605445
ucaccuaggacaauaaaua

SEQ ID NO: 1605447 - RNA, 19 nt, Artificial Sequence
  Description of Artificial Sequence: Synthetic oligonucleotide
  Sense strand starting at position 2761 of SEQ ID NO: 1560517
uuuauuguccuaggugauu

SEQ ID NO: 1605448 - RNA, 19 nt, Artificial Sequence
  Description of Artificial Sequence: Synthetic oligonucleotide
  Antisense strand to SEQ ID NO: 1605447
aaucaccuaggacaauaaa

SEQ ID NO: 1605449 - RNA, 19 nt, Artificial Sequence
  Description of Artificial Sequence: Synthetic oligonucleotide
  Sense strand starting at position 2853 of SEQ ID NO: 1560517
ggaggugguuugucuugaa

SEQ ID NO: 1605450 - RNA, 19 nt, Artificial Sequence
  Description of Artificial Sequence: Synthetic oligonucleotide
  Antisense strand to SEQ ID NO: 1605449
uucaagacaaaccaccucc

SEQ ID NO: 1605451 - RNA, 19 nt, Artificial Sequence
  Description of Artificial Sequence: Synthetic oligonucleotide
  Sense strand starting at position 2857 of SEQ ID NO: 1560517
gugguuugucuugaaauug

SEQ ID NO: 1605452 - RNA, 19 nt, Artificial Sequence
  Description of Artificial Sequence: Synthetic oligonucleotide
  Antisense strand to SEQ ID NO: 1605451
caauuucaagacaaaccac

SEQ ID NO: 1605453 - RNA, 19 nt, Artificial Sequence
  Description of Artificial Sequence: Synthetic oligonucleotide
  Sense strand starting at position 2865 of SEQ ID NO: 1560517
ucuugaaauugagucaacu

SEQ ID NO: 1605454 - RNA, 19 nt, Artificial Sequence
  Description of Artificial Sequence: Synthetic oligonucleotide
  Antisense strand to SEQ ID NO: 1605453
aguugacucaauuucaaga

SEQ ID NO: 1605455 - RNA, 19 nt, Artificial Sequence
  Description of Artificial Sequence: Synthetic oligonucleotide
  Sense strand starting at position 3162 of SEQ ID NO: 1560517
ucuauuccagacugugaga

SEQ ID NO: 1605456 - RNA, 19 nt, Artificial Sequence
  Description of Artificial Sequence: Synthetic oligonucleotide
  Antisense strand to SEQ ID NO: 1605455
ucucacagucuggaauaga

SEQ ID NO: 1605457 - RNA, 19 nt, Artificial Sequence
  Description of Artificial Sequence: Synthetic oligonucleotide
  Sense strand starting at position 3175 of SEQ ID NO: 1560517
gugagaagugggugaguca

SEQ ID NO: 1605458 - RNA, 19 nt, Artificial Sequence
  Description of Artificial Sequence: Synthetic oligonucleotide
  Antisense strand to SEQ ID NO: 1605457
ugacucacccacuucucac

SEQ ID NO: 1605459 - RNA, 19 nt, Artificial Sequence
  Description of Artificial Sequence: Synthetic oligonucleotide
  Sense strand starting at position 3307 of SEQ ID NO: 1560517
cugacucagcacugggaau

SEQ ID NO: 1605460 - RNA, 19 nt, Artificial Sequence
  Description of Artificial Sequence: Synthetic oligonucleotide
  Antisense strand to SEQ ID NO: 1605459
auucccagugcugagucag

SEQ ID NO: 1605461 - RNA, 19 nt, Artificial Sequence
  Description of Artificial Sequence: Synthetic oligonucleotide
  Sense strand starting at position 3318 of SEQ ID NO: 1560517
cugggaaucuuggcugagu

SEQ ID NO: 1605462 - RNA, 19 nt, Artificial Sequence
  Description of Artificial Sequence: Synthetic oligonucleotide
  Antisense strand to SEQ ID NO: 1605461
acucagccaagauucccag

SEQ ID NO: 1605463 - RNA, 19 nt, Artificial Sequence
  Description of Artificial Sequence: Synthetic oligonucleotide
  Sense strand starting at position 3320 of SEQ ID NO: 1560517
gggaaucuuggcugagugu

SEQ ID NO: 1605464 - RNA, 19 nt, Artificial Sequence
  Description of Artificial Sequence: Synthetic oligonucleotide
  Antisense strand to SEQ ID NO: 1605463
acacucagccaagauuccc

SEQ ID NO: 1605465 - RNA, 19 nt, Artificial Sequence
  Description of Artificial Sequence: Synthetic oligonucleotide
  Sense strand starting at position 3333 of SEQ ID NO: 1560517
gaguguguucugggaaaug

SEQ ID NO: 1605466 - RNA, 19 nt, Artificial Sequence
  Description of Artificial Sequence: Synthetic oligonucleotide
  Antisense strand to SEQ ID NO: 1605465
cauuucccagaacacacuc

SEQ ID NO: 1605467 - RNA, 19 nt, Artificial Sequence
  Description of Artificial Sequence: Synthetic oligonucleotide
  Sense strand starting at position 3463 of SEQ ID NO: 1560517
aggguauguacacgagaga

SEQ ID NO: 1605468 - RNA, 19 nt, Artificial Sequence
  Description of Artificial Sequence: Synthetic oligonucleotide
  Antisense strand to SEQ ID NO: 1605467
ucucucguguacauacccu

SEQ ID NO: 1605469 - RNA, 19 nt, Artificial Sequence
  Description of Artificial Sequence: Synthetic oligonucleotide
  Sense strand starting at position 3466 of SEQ ID NO: 1560517
guauguacacgagagaguu

SEQ ID NO: 1605470 - RNA, 19 nt, Artificial Sequence
  Description of Artificial Sequence: Synthetic oligonucleotide
  Antisense strand to SEQ ID NO: 1605469
aacucucucguguacauac

SEQ ID NO: 1605471 - RNA, 19 nt, Artificial Sequence
  Description of Artificial Sequence: Synthetic oligonucleotide
  Sense strand starting at position 3588 of SEQ ID NO: 1560517
cuccaugugcaagggaaau

SEQ ID NO: 1605472 - RNA, 19 nt, Artificial Sequence
  Description of Artificial Sequence: Synthetic oligonucleotide
  Antisense strand to SEQ ID NO: 1605471
auuucccuugcacauggag

SEQ ID NO: 1605473 - RNA, 19 nt, Artificial Sequence
  Description of Artificial Sequence: Synthetic oligonucleotide
  Sense strand starting at position 3599 of SEQ ID NO: 1560517
agggaaauguuugcuggga

SEQ ID NO: 1605474 - RNA, 19 nt, Artificial Sequence
  Description of Artificial Sequence: Synthetic oligonucleotide
  Antisense strand to SEQ ID NO: 1605473
ucccagcaaacauuucccu

SEQ ID NO: 1605475 - RNA, 19 nt, Artificial Sequence
  Description of Artificial Sequence: Synthetic oligonucleotide
  Sense strand starting at position 3600 of SEQ ID NO: 1560517
gggaaauguuugcugggaa

SEQ ID NO: 1605476 - RNA, 19 nt, Artificial Sequence
  Description of Artificial Sequence: Synthetic oligonucleotide
  Antisense strand to SEQ ID NO: 1605475
uucccagcaaacauuuccc

SEQ ID NO: 1605477 - RNA, 19 nt, Artificial Sequence
  Description of Artificial Sequence: Synthetic oligonucleotide
  Sense strand starting at position 3603 of SEQ ID NO: 1560517
aaauguuugcugggaagaa

SEQ ID NO: 1605478 - RNA, 19 nt, Artificial Sequence
  Description of Artificial Sequence: Synthetic oligonucleotide
  Antisense strand to SEQ ID NO: 1605477
uucuucccagcaaacauuu

SEQ ID NO: 1605479 - RNA, 19 nt, Artificial Sequence
  Description of Artificial Sequence: Synthetic oligonucleotide
  Sense strand starting at position 3612 of SEQ ID NO: 1560517
cugggaagaauguguauuc

SEQ ID NO: 1605480 - RNA, 19 nt, Artificial Sequence
  Description of Artificial Sequence: Synthetic oligonucleotide
  Antisense strand to SEQ ID NO: 1605479
gaauacacauucuucccag

SEQ ID NO: 1605481 - RNA, 19 nt, Artificial Sequence
  Description of Artificial Sequence: Synthetic oligonucleotide
  Sense strand starting at position 3613 of SEQ ID NO: 1560517
ugggaagaauguguauuca

SEQ ID NO: 1605482 - RNA, 19 nt, Artificial Sequence
  Description of Artificial Sequence: Synthetic oligonucleotide
  Antisense strand to SEQ ID NO: 1605481
ugaauacacauucuuccca

SEQ ID NO: 1605483 - RNA, 19 nt, Artificial Sequence
  Description of Artificial Sequence: Synthetic oligonucleotide
  Sense strand starting at position 3682 of SEQ ID NO: 1560517
aagauauucgugcagaaga

SEQ ID NO: 1605484 - RNA, 19 nt, Artificial Sequence
  Description of Artificial Sequence: Synthetic oligonucleotide
  Antisense strand to SEQ ID NO: 1605483
ucuucugcacgaauaucuu

SEQ ID NO: 1605485 - RNA, 19 nt, Artificial Sequence
  Description of Artificial Sequence: Synthetic oligonucleotide
  Sense strand starting at position 3684 of SEQ ID NO: 1560517
gauauucgugcagaagaga

SEQ ID NO: 1605486 - RNA, 19 nt, Artificial Sequence
  Description of Artificial Sequence: Synthetic oligonucleotide
  Antisense strand to SEQ ID NO: 1605485
ucucuucugcacgaauauc

SEQ ID NO: 1605487 - RNA, 19 nt, Artificial Sequence
  Description of Artificial Sequence: Synthetic oligonucleotide
  Sense strand starting at position 3708 of SEQ ID NO: 1560517
cagguuuguaagggagacu

SEQ ID NO: 1605488 - RNA, 19 nt, Artificial Sequence
  Description of Artificial Sequence: Synthetic oligonucleotide
  Antisense strand to SEQ ID NO: 1605487
agucucccuuacaaaccug

SEQ ID NO: 1605489 - RNA, 19 nt, Artificial Sequence
  Description of Artificial Sequence: Synthetic oligonucleotide
  Sense strand starting at position 3918 of SEQ ID NO: 1560517
ggagaaacuccgugccagu

SEQ ID NO: 1605490 - RNA, 19 nt, Artificial Sequence
  Description of Artificial Sequence: Synthetic oligonucleotide
  Antisense strand to SEQ ID NO: 1605489
acuggcacggaguuucucc

SEQ ID NO: 1605491 - RNA, 19 nt, Artificial Sequence
  Description of Artificial Sequence: Synthetic oligonucleotide
  Sense strand starting at position 221 of SEQ ID NO: 1560518
ccuaguaucugaccaagag

SEQ ID NO: 1605492 - RNA, 19 nt, Artificial Sequence
  Description of Artificial Sequence: Synthetic oligonucleotide
  Antisense strand to SEQ ID NO: 1605491
cucuuggucagauacuagg

SEQ ID NO: 1605493 - RNA, 19 nt, Artificial Sequence
  Description of Artificial Sequence: Synthetic oligonucleotide
  Sense strand starting at position 264 of SEQ ID NO: 1560518
cucugagagauucgggacu

SEQ ID NO: 1605494 - RNA, 19 nt, Artificial Sequence
  Description of Artificial Sequence: Synthetic oligonucleotide
  Antisense strand to SEQ ID NO: 1605493
agucccgaaucucucagag

SEQ ID NO: 1605495 - RNA, 19 nt, Artificial Sequence
  Description of Artificial Sequence: Synthetic oligonucleotide
  Sense strand starting at position 308 of SEQ ID NO: 1560518
uuacaucacugucugugau

SEQ ID NO: 1605496 - RNA, 19 nt, Artificial Sequence
  Description of Artificial Sequence: Synthetic oligonucleotide
  Antisense strand to SEQ ID NO: 1605495
aucacagacagugauguaa

SEQ ID NO: 1605497 - RNA, 19 nt, Artificial Sequence
  Description of Artificial Sequence: Synthetic oligonucleotide
  Sense strand starting at position 376 of SEQ ID NO: 1560518
ucaucugucagaggagaua

SEQ ID NO: 1605498 - RNA, 19 nt, Artificial Sequence
  Description of Artificial Sequence: Synthetic oligonucleotide
  Antisense strand to SEQ ID NO: 1605497
uaucuccucugacagauga

SEQ ID NO: 1605499 - RNA, 19 nt, Artificial Sequence
  Description of Artificial Sequence: Synthetic oligonucleotide
  Sense strand starting at position 471 of SEQ ID NO: 1560518
caaagauaggccugguuaa

SEQ ID NO: 1605500 - RNA, 19 nt, Artificial Sequence
  Description of Artificial Sequence: Synthetic oligonucleotide
  Antisense strand to SEQ ID NO: 1605499
uuaaccaggccuaucuuug

SEQ ID NO: 1605501 - RNA, 19 nt, Artificial Sequence
  Description of Artificial Sequence: Synthetic oligonucleotide
  Sense strand starting at position 472 of SEQ ID NO: 1560518
aaagauaggccugguuaag

SEQ ID NO: 1605502 - RNA, 19 nt, Artificial Sequence
  Description of Artificial Sequence: Synthetic oligonucleotide
  Antisense strand to SEQ ID NO: 1605501
cuuaaccaggccuaucuuu

SEQ ID NO: 1605503 - RNA, 19 nt, Artificial Sequence
  Description of Artificial Sequence: Synthetic oligonucleotide
  Sense strand starting at position 731 of SEQ ID NO: 1560518
aggcauccucauuaagcga

SEQ ID NO: 1605504 - RNA, 19 nt, Artificial Sequence
  Description of Artificial Sequence: Synthetic oligonucleotide
  Antisense strand to SEQ ID NO: 1605503
ucgcuuaaugaggaugccu

SEQ ID NO: 1605505 - RNA, 19 nt, Artificial Sequence
  Description of Artificial Sequence: Synthetic oligonucleotide
  Sense strand starting at position 744 of SEQ ID NO: 1560518
aagcgacaguuccuggaaa

SEQ ID NO: 1605506 - RNA, 19 nt, Artificial Sequence
  Description of Artificial Sequence: Synthetic oligonucleotide
  Antisense strand to SEQ ID NO: 1605505
uuuccaggaacugucgcuu

SEQ ID NO: 1605507 - RNA, 19 nt, Artificial Sequence
  Description of Artificial Sequence: Synthetic oligonucleotide
  Sense strand starting at position 746 of SEQ ID NO: 1560518
gcgacaguuccuggaaauc

SEQ ID NO: 1605508 - RNA, 19 nt, Artificial Sequence
  Description of Artificial Sequence: Synthetic oligonucleotide
  Antisense strand to SEQ ID NO: 1605507
gauuuccaggaacugucgc

SEQ ID NO: 1605509 - RNA, 19 nt, Artificial Sequence
  Description of Artificial Sequence: Synthetic oligonucleotide
  Sense strand starting at position 788 of SEQ ID NO: 1560518
ccaucauggcuuugugaug

SEQ ID NO: 1605510 - RNA, 19 nt, Artificial Sequence
  Description of Artificial Sequence: Synthetic oligonucleotide
  Antisense strand to SEQ ID NO: 1605509
caucacaaagccaugaugg

SEQ ID NO: 1605511 - RNA, 19 nt, Artificial Sequence
  Description of Artificial Sequence: Synthetic oligonucleotide
  Sense strand starting at position 795 of SEQ ID NO: 1560518
ggcuuugugaugcuucgca

SEQ ID NO: 1605512 - RNA, 19 nt, Artificial Sequence
  Description of Artificial Sequence: Synthetic oligonucleotide
  Antisense strand to SEQ ID NO: 1605511
ugcgaagcaucacaaagcc

SEQ ID NO: 1605513 - RNA, 19 nt, Artificial Sequence
  Description of Artificial Sequence: Synthetic oligonucleotide
  Sense strand starting at position 797 of SEQ ID NO: 1560518
cuuugugaugcuucgcauc

SEQ ID NO: 1605514 - RNA, 19 nt, Artificial Sequence
  Description of Artificial Sequence: Synthetic oligonucleotide
  Antisense strand to SEQ ID NO: 1605513
gaugcgaagcaucacaaag

SEQ ID NO: 1605515 - RNA, 19 nt, Artificial Sequence
  Description of Artificial Sequence: Synthetic oligonucleotide
  Sense strand starting at position 830 of SEQ ID NO: 1560518
gguaaucuuucuccaggga

SEQ ID NO: 1605516 - RNA, 19 nt, Artificial Sequence
  Description of Artificial Sequence: Synthetic oligonucleotide
  Antisense strand to SEQ ID NO: 1605515
ucccuggagaaagauuacc

SEQ ID NO: 1605517 - RNA, 19 nt, Artificial Sequence
  Description of Artificial Sequence: Synthetic oligonucleotide
  Sense strand starting at position 834 of SEQ ID NO: 1560518
aucuuucuccagggacuuu

SEQ ID NO: 1605518 - RNA, 19 nt, Artificial Sequence
  Description of Artificial Sequence: Synthetic oligonucleotide
  Antisense strand to SEQ ID NO: 1605517
aaagucccuggagaaagau

SEQ ID NO: 1605519 - RNA, 19 nt, Artificial Sequence
  Description of Artificial Sequence: Synthetic oligonucleotide
  Sense strand starting at position 1725 of SEQ ID NO: 1560518
cccgauuuguggccucuaa

SEQ ID NO: 1605520 - RNA, 19 nt, Artificial Sequence
  Description of Artificial Sequence: Synthetic oligonucleotide
  Antisense strand to SEQ ID NO: 1605519
uuagaggccacaaaucggg

SEQ ID NO: 1605521 - RNA, 19 nt, Artificial Sequence
  Description of Artificial Sequence: Synthetic oligonucleotide
  Sense strand starting at position 1870 of SEQ ID NO: 1560518
guugguugcgugaaaucga

SEQ ID NO: 1605522 - RNA, 19 nt, Artificial Sequence
  Description of Artificial Sequence: Synthetic oligonucleotide
  Antisense strand to SEQ ID NO: 1605521
ucgauuucacgcaaccaac

SEQ ID NO: 1605523 - RNA, 19 nt, Artificial Sequence
  Description of Artificial Sequence: Synthetic oligonucleotide
  Sense strand starting at position 1974 of SEQ ID NO: 1560518
gggcccgaauuccuuuaua

SEQ ID NO: 1605524 - RNA, 19 nt, Artificial Sequence
  Description of Artificial Sequence: Synthetic oligonucleotide
  Antisense strand to SEQ ID NO: 1605523
uauaaaggaauucgggccc

SEQ ID NO: 1605525 - RNA, 19 nt, Artificial Sequence
  Description of Artificial Sequence: Synthetic oligonucleotide
  Sense strand starting at position 1977 of SEQ ID NO: 1560518
cccgaauuccuuuauagau

SEQ ID NO: 1605526 - RNA, 19 nt, Artificial Sequence
  Description of Artificial Sequence: Synthetic oligonucleotide
  Antisense strand to SEQ ID NO: 1605525
aucuauaaaggaauucggg

SEQ ID NO: 1605527 - RNA, 19 nt, Artificial Sequence
  Description of Artificial Sequence: Synthetic oligonucleotide
  Sense strand starting at position 2039 of SEQ ID NO: 1560518
gucugauuggacugcaaca

SEQ ID NO: 1605528 - RNA, 19 nt, Artificial Sequence
  Description of Artificial Sequence: Synthetic oligonucleotide
  Antisense strand to SEQ ID NO: 1605527
uguugcaguccaaucagac

SEQ ID NO: 1605529 - RNA, 19 nt, Artificial Sequence
  Description of Artificial Sequence: Synthetic oligonucleotide
  Sense strand starting at position 2382 of SEQ ID NO: 1560518
ccucauagcuuuccgggaa

SEQ ID NO: 1605530 - RNA, 19 nt, Artificial Sequence
  Description of Artificial Sequence: Synthetic oligonucleotide
  Antisense strand to SEQ ID NO: 1605529
uucccggaaagcuaugagg

SEQ ID NO: 1605531 - RNA, 19 nt, Artificial Sequence
  Description of Artificial Sequence: Synthetic oligonucleotide
  Sense strand starting at position 2385 of SEQ ID NO: 1560518
cauagcuuuccgggaaaug

SEQ ID NO: 1605532 - RNA, 19 nt, Artificial Sequence
  Description of Artificial Sequence: Synthetic oligonucleotide
  Antisense strand to SEQ ID NO: 1605531
cauuucccggaaagcuaug

SEQ ID NO: 1605533 - RNA, 19 nt, Artificial Sequence
  Description of Artificial Sequence: Synthetic oligonucleotide
  Sense strand starting at position 2386 of SEQ ID NO: 1560518
auagcuuuccgggaaaugu

SEQ ID NO: 1605534 - RNA, 19 nt, Artificial Sequence
  Description of Artificial Sequence: Synthetic oligonucleotide
  Antisense strand to SEQ ID NO: 1605533
acauuucccggaaagcuau

SEQ ID NO: 1605535 - RNA, 19 nt, Artificial Sequence
  Description of Artificial Sequence: Synthetic oligonucleotide
  Sense strand starting at position 2395 of SEQ ID NO: 1560518
cgggaaauguaguucagug

SEQ ID NO: 1605536 - RNA, 19 nt, Artificial Sequence
  Description of Artificial Sequence: Synthetic oligonucleotide
  Antisense strand to SEQ ID NO: 1605535
cacugaacuacauuucccg

SEQ ID NO: 1605537 - RNA, 19 nt, Artificial Sequence
  Description of Artificial Sequence: Synthetic oligonucleotide
  Sense strand starting at position 2397 of SEQ ID NO: 1560518
ggaaauguaguucagugau

SEQ ID NO: 1605538 - RNA, 19 nt, Artificial Sequence
  Description of Artificial Sequence: Synthetic oligonucleotide
  Antisense strand to SEQ ID NO: 1605537
aucacugaacuacauuucc

SEQ ID NO: 1605539 - RNA, 19 nt, Artificial Sequence
  Description of Artificial Sequence: Synthetic oligonucleotide
  Sense strand starting at position 2543 of SEQ ID NO: 1560518
cucucuccugugugauaga

SEQ ID NO: 1605540 - RNA, 19 nt, Artificial Sequence
  Description of Artificial Sequence: Synthetic oligonucleotide
  Antisense strand to SEQ ID NO: 1605539
ucuaucacacaggagagag

SEQ ID NO: 1605541 - RNA, 19 nt, Artificial Sequence
  Description of Artificial Sequence: Synthetic oligonucleotide
  Sense strand starting at position 2615 of SEQ ID NO: 1560518
ggcugucagaucuaaguag

SEQ ID NO: 1605542 - RNA, 19 nt, Artificial Sequence
  Description of Artificial Sequence: Synthetic oligonucleotide
  Antisense strand to SEQ ID NO: 1605541
cuacuuagaucugacagcc

SEQ ID NO: 1605543 - RNA, 19 nt, Artificial Sequence
  Description of Artificial Sequence: Synthetic oligonucleotide
  Sense strand starting at position 2641 of SEQ ID NO: 1560518
acucccaaucacgaguaau

SEQ ID NO: 1605544 - RNA, 19 nt, Artificial Sequence
  Description of Artificial Sequence: Synthetic oligonucleotide
  Antisense strand to SEQ ID NO: 1605543
auuacucgugauugggagu

SEQ ID NO: 1605545 - RNA, 19 nt, Artificial Sequence
  Description of Artificial Sequence: Synthetic oligonucleotide
  Sense strand starting at position 3099 of SEQ ID NO: 1560518
ggguuagugcuguagacuu

SEQ ID NO: 1605546 - RNA, 19 nt, Artificial Sequence
  Description of Artificial Sequence: Synthetic oligonucleotide
  Antisense strand to SEQ ID NO: 1605545
aagucuacagcacuaaccc

SEQ ID NO: 1605547 - RNA, 19 nt, Artificial Sequence
  Description of Artificial Sequence: Synthetic oligonucleotide
  Sense strand starting at position 3184 of SEQ ID NO: 1560518
acuguaacucccugauaag

SEQ ID NO: 1605548 - RNA, 19 nt, Artificial Sequence
  Description of Artificial Sequence: Synthetic oligonucleotide
  Antisense strand to SEQ ID NO: 1605547
cuuaucagggaguuacagu

SEQ ID NO: 1605549 - RNA, 19 nt, Artificial Sequence
  Description of Artificial Sequence: Synthetic oligonucleotide
  Sense strand starting at position 3239 of SEQ ID NO: 1560518
ugugaucagagcugacuau

SEQ ID NO: 1605550 - RNA, 19 nt, Artificial Sequence
  Description of Artificial Sequence: Synthetic oligonucleotide
  Antisense strand to SEQ ID NO: 1605549
auagucagcucugaucaca

SEQ ID NO: 1605551 - RNA, 19 nt, Artificial Sequence
  Description of Artificial Sequence: Synthetic oligonucleotide
  Sense strand starting at position 3243 of SEQ ID NO: 1560518
aucagagcugacuauguuu

SEQ ID NO: 1605552 - RNA, 19 nt, Artificial Sequence
  Description of Artificial Sequence: Synthetic oligonucleotide
  Antisense strand to SEQ ID NO: 1605551
aaacauagucagcucugau

SEQ ID NO: 1605553 - RNA, 19 nt, Artificial Sequence
  Description of Artificial Sequence: Synthetic oligonucleotide
  Sense strand starting at position 3245 of SEQ ID NO: 1560518
cagagcugacuauguuuaa

SEQ ID NO: 1605554 - RNA, 19 nt, Artificial Sequence
  Description of Artificial Sequence: Synthetic oligonucleotide
  Antisense strand to SEQ ID NO: 1605553
uuaaacauagucagcucug

SEQ ID NO: 1605555 - RNA, 19 nt, Artificial Sequence
  Description of Artificial Sequence: Synthetic oligonucleotide
  Sense strand starting at position 3249 of SEQ ID NO: 1560518
gcugacuauguuuaagguu

SEQ ID NO: 1605556 - RNA, 19 nt, Artificial Sequence
  Description of Artificial Sequence: Synthetic oligonucleotide
  Antisense strand to SEQ ID NO: 1605555
aaccuuaaacauagucagc

SEQ ID NO: 1605557 - RNA, 19 nt, Artificial Sequence
  Description of Artificial Sequence: Synthetic oligonucleotide
  Sense strand starting at position 3373 of SEQ ID NO: 1560518
gggucugccuaccuuuaga

SEQ ID NO: 1605558 - RNA, 19 nt, Artificial Sequence
  Description of Artificial Sequence: Synthetic oligonucleotide
  Antisense strand to SEQ ID NO: 1605557
ucuaaagguaggcagaccc

SEQ ID NO: 1605559 - RNA, 19 nt, Artificial Sequence
  Description of Artificial Sequence: Synthetic oligonucleotide
  Sense strand starting at position 3446 of SEQ ID NO: 1560518
gacagacagugguuagcaa

SEQ ID NO: 1605560 - RNA, 19 nt, Artificial Sequence
  Description of Artificial Sequence: Synthetic oligonucleotide
  Antisense strand to SEQ ID NO: 1605559
uugcuaaccacugucuguc

SEQ ID NO: 1605561 - RNA, 19 nt, Artificial Sequence
  Description of Artificial Sequence: Synthetic oligonucleotide
  Sense strand starting at position 3447 of SEQ ID NO: 1560518
acagacagugguuagcaau

SEQ ID NO: 1605562 - RNA, 19 nt, Artificial Sequence
  Description of Artificial Sequence: Synthetic oligonucleotide
  Antisense strand to SEQ ID NO: 1605561
auugcuaaccacugucugu

SEQ ID NO: 1605563 - RNA, 19 nt, Artificial Sequence
  Description of Artificial Sequence: Synthetic oligonucleotide
  Sense strand starting at position 3506 of SEQ ID NO: 1560518
uguuuauaccugcacacuu

SEQ ID NO: 1605564 - RNA, 19 nt, Artificial Sequence
  Description of Artificial Sequence: Synthetic oligonucleotide
  Antisense strand to SEQ ID NO: 1605563
aagugugcagguauaaaca

SEQ ID NO: 1605565 - RNA, 19 nt, Artificial Sequence
  Description of Artificial Sequence: Synthetic oligonucleotide
  Sense strand starting at position 3629 of SEQ ID NO: 1560518
ggcaguuuaugagcuuuaa

SEQ ID NO: 1605566 - RNA, 19 nt, Artificial Sequence
  Description of Artificial Sequence: Synthetic oligonucleotide
  Antisense strand to SEQ ID NO: 1605565
uuaaagcucauaaacugcc

SEQ ID NO: 1605567 - RNA, 19 nt, Artificial Sequence
  Description of Artificial Sequence: Synthetic oligonucleotide
  Sense strand starting at position 3896 of SEQ ID NO: 1560518
ccagcaaugguggaacauu

SEQ ID NO: 1605568 - RNA, 19 nt, Artificial Sequence
  Description of Artificial Sequence: Synthetic oligonucleotide
  Antisense strand to SEQ ID NO: 1605567
aauguuccaccauugcugg

SEQ ID NO: 1605569 - RNA, 19 nt, Artificial Sequence
  Description of Artificial Sequence: Synthetic oligonucleotide
  Sense strand starting at position 3924 of SEQ ID NO: 1560518
cuacaauuagguugcacau

SEQ ID NO: 1605570 - RNA, 19 nt, Artificial Sequence
  Description of Artificial Sequence: Synthetic oligonucleotide
  Antisense strand to SEQ ID NO: 1605569
augugcaaccuaauuguag

SEQ ID NO: 1605571 - RNA, 19 nt, Artificial Sequence
  Description of Artificial Sequence: Synthetic oligonucleotide
  Sense strand starting at position 165 of SEQ ID NO: 1560519
cugugcaauucgucagcau

SEQ ID NO: 1605572 - RNA, 19 nt, Artificial Sequence
  Description of Artificial Sequence: Synthetic oligonucleotide
  Antisense strand to SEQ ID NO: 1605571
augcugacgaauugcacag

SEQ ID NO: 1605573 - RNA, 19 nt, Artificial Sequence
  Description of Artificial Sequence: Synthetic oligonucleotide
  Sense strand starting at position 166 of SEQ ID NO: 1560519
ugugcaauucgucagcaug

SEQ ID NO: 1605574 - RNA, 19 nt, Artificial Sequence
  Description of Artificial Sequence: Synthetic oligonucleotide
  Antisense strand to SEQ ID NO: 1605573
caugcugacgaauugcaca

SEQ ID NO: 1605575 - RNA, 19 nt, Artificial Sequence
  Description of Artificial Sequence: Synthetic oligonucleotide
  Sense strand starting at position 169 of SEQ ID NO: 1560519
gcaauucgucagcaugacu

SEQ ID NO: 1605576 - RNA, 19 nt, Artificial Sequence
  Description of Artificial Sequence: Synthetic oligonucleotide
  Antisense strand to SEQ ID NO: 1605575
agucaugcugacgaauugc

SEQ ID NO: 1605577 - RNA, 19 nt, Artificial Sequence
  Description of Artificial Sequence: Synthetic oligonucleotide
  Sense strand starting at position 297 of SEQ ID NO: 1560519
cuuggauguucugugacua

SEQ ID NO: 1605578 - RNA, 19 nt, Artificial Sequence
  Description of Artificial Sequence: Synthetic oligonucleotide
  Antisense strand to SEQ ID NO: 1605577
uagucacagaacauccaag

SEQ ID NO: 1605579 - RNA, 19 nt, Artificial Sequence
  Description of Artificial Sequence: Synthetic oligonucleotide
  Sense strand starting at position 298 of SEQ ID NO: 1560519
uuggauguucugugacuau

SEQ ID NO: 1605580 - RNA, 19 nt, Artificial Sequence
  Description of Artificial Sequence: Synthetic oligonucleotide
  Antisense strand to SEQ ID NO: 1605579
auagucacagaacauccaa

SEQ ID NO: 1605581 - RNA, 19 nt, Artificial Sequence
  Description of Artificial Sequence: Synthetic oligonucleotide
  Sense strand starting at position 307 of SEQ ID NO: 1560519
cugugacuaugccaaacau

SEQ ID NO: 1605582 - RNA, 19 nt, Artificial Sequence
  Description of Artificial Sequence: Synthetic oligonucleotide
  Antisense strand to SEQ ID NO: 1605581
auguuuggcauagucacag

SEQ ID NO: 1605583 - RNA, 19 nt, Artificial Sequence
  Description of Artificial Sequence: Synthetic oligonucleotide
  Sense strand starting at position 508 of SEQ ID NO: 1560519
uuccguggucccugcuuua

SEQ ID NO: 1605584 - RNA, 19 nt, Artificial Sequence
  Description of Artificial Sequence: Synthetic oligonucleotide
  Antisense strand to SEQ ID NO: 1605583
uaaagcagggaccacggaa

SEQ ID NO: 1605585 - RNA, 19 nt, Artificial Sequence
  Description of Artificial Sequence: Synthetic oligonucleotide
  Sense strand starting at position 511 of SEQ ID NO: 1560519
cguggucccugcuuuauuu

SEQ ID NO: 1605586 - RNA, 19 nt, Artificial Sequence
  Description of Artificial Sequence: Synthetic oligonucleotide
  Antisense strand to SEQ ID NO: 1605585
aaauaaagcagggaccacg

SEQ ID NO: 1605587 - RNA, 19 nt, Artificial Sequence
  Description of Artificial Sequence: Synthetic oligonucleotide
  Sense strand starting at position 687 of SEQ ID NO: 1560519
ggaauauccugccuguuaa

SEQ ID NO: 1605588 - RNA, 19 nt, Artificial Sequence
  Description of Artificial Sequence: Synthetic oligonucleotide
  Antisense strand to SEQ ID NO: 1605587
uuaacaggcaggauauucc

SEQ ID NO: 1605589 - RNA, 19 nt, Artificial Sequence
  Description of Artificial Sequence: Synthetic oligonucleotide
  Sense strand starting at position 688 of SEQ ID NO: 1560519
gaauauccugccuguuaag

SEQ ID NO: 1605590 - RNA, 19 nt, Artificial Sequence
  Description of Artificial Sequence: Synthetic oligonucleotide
  Antisense strand to SEQ ID NO: 1605589
cuuaacaggcaggauauuc

SEQ ID NO: 1605591 - RNA, 19 nt, Artificial Sequence
  Description of Artificial Sequence: Synthetic oligonucleotide
  Sense strand starting at position 691 of SEQ ID NO: 1560519
uauccugccuguuaagagu

SEQ ID NO: 1605592 - RNA, 19 nt, Artificial Sequence
  Description of Artificial Sequence: Synthetic oligonucleotide
  Antisense strand to SEQ ID NO: 1605591
acucuuaacaggcaggaua

SEQ ID NO: 1605593 - RNA, 19 nt, Artificial Sequence
  Description of Artificial Sequence: Synthetic oligonucleotide
  Sense strand starting at position 700 of SEQ ID NO: 1560519
uguuaagaguaucuugguu

SEQ ID NO: 1605594 - RNA, 19 nt, Artificial Sequence
  Description of Artificial Sequence: Synthetic oligonucleotide
  Antisense strand to SEQ ID NO: 1605593
aaccaagauacucuuaaca

SEQ ID NO: 1605595 - RNA, 19 nt, Artificial Sequence
  Description of Artificial Sequence: Synthetic oligonucleotide
  Sense strand starting at position 702 of SEQ ID NO: 1560519
uuaagaguaucuugguuug

SEQ ID NO: 1605596 - RNA, 19 nt, Artificial Sequence
  Description of Artificial Sequence: Synthetic oligonucleotide
  Antisense strand to SEQ ID NO: 1605595
caaaccaagauacucuuaa

SEQ ID NO: 1605597 - RNA, 19 nt, Artificial Sequence
  Description of Artificial Sequence: Synthetic oligonucleotide
  Sense strand starting at position 1027 of SEQ ID NO: 1560519
aagaguaucuugguuuaug

SEQ ID NO: 1605598 - RNA, 19 nt, Artificial Sequence
  Description of Artificial Sequence: Synthetic oligonucleotide
  Antisense strand to SEQ ID NO: 1605597
cauaaaccaagauacucuu

SEQ ID NO: 1605599 - RNA, 19 nt, Artificial Sequence
  Description of Artificial Sequence: Synthetic oligonucleotide
  Sense strand starting at position 1028 of SEQ ID NO: 1560519
agaguaucuugguuuauga

SEQ ID NO: 1605600 - RNA, 19 nt, Artificial Sequence
  Description of Artificial Sequence: Synthetic oligonucleotide
  Antisense strand to SEQ ID NO: 1605599
ucauaaaccaagauacucu

SEQ ID NO: 1605601 - RNA, 19 nt, Artificial Sequence
  Description of Artificial Sequence: Synthetic oligonucleotide
  Sense strand starting at position 1101 of SEQ ID NO: 1560519
aggauuuauugaggccaga

SEQ ID NO: 1605602 - RNA, 19 nt, Artificial Sequence
  Description of Artificial Sequence: Synthetic oligonucleotide
  Antisense strand to SEQ ID NO: 1605601
ucuggccucaauaaauccu

SEQ ID NO: 1605603 - RNA, 19 nt, Artificial Sequence
  Description of Artificial Sequence: Synthetic oligonucleotide
  Sense strand starting at position 1360 of SEQ ID NO: 1560519
gcaugcguguuugcucuua

SEQ ID NO: 1605604 - RNA, 19 nt, Artificial Sequence
  Description of Artificial Sequence: Synthetic oligonucleotide
  Antisense strand to SEQ ID NO: 1605603
uaagagcaaacacgcaugc

SEQ ID NO: 1605605 - RNA, 19 nt, Artificial Sequence
  Description of Artificial Sequence: Synthetic oligonucleotide
  Sense strand starting at position 1362 of SEQ ID NO: 1560519
augcguguuugcucuuauu

SEQ ID NO: 1605606 - RNA, 19 nt, Artificial Sequence
  Description of Artificial Sequence: Synthetic oligonucleotide
  Antisense strand to SEQ ID NO: 1605605
aauaagagcaaacacgcau

SEQ ID NO: 1605607 - RNA, 19 nt, Artificial Sequence
  Description of Artificial Sequence: Synthetic oligonucleotide
  Sense strand starting at position 1484 of SEQ ID NO: 1560519
ugcguuugguucuugacaa

SEQ ID NO: 1605608 - RNA, 19 nt, Artificial Sequence
  Description of Artificial Sequence: Synthetic oligonucleotide
  Antisense strand to SEQ ID NO: 1605607
uugucaagaaccaaacgca

SEQ ID NO: 1605609 - RNA, 19 nt, Artificial Sequence
  Description of Artificial Sequence: Synthetic oligonucleotide
  Sense strand starting at position 1488 of SEQ ID NO: 1560519
uuugguucuugacaaagga

SEQ ID NO: 1605610 - RNA, 19 nt, Artificial Sequence
  Description of Artificial Sequence: Synthetic oligonucleotide
  Antisense strand to SEQ ID NO: 1605609
uccuuugucaagaaccaaa

SEQ ID NO: 1605611 - RNA, 19 nt, Artificial Sequence
  Description of Artificial Sequence: Synthetic oligonucleotide
  Sense strand starting at position 1706 of SEQ ID NO: 1560519
gcgcguagucccggaagaa

SEQ ID NO: 1605612 - RNA, 19 nt, Artificial Sequence
  Description of Artificial Sequence: Synthetic oligonucleotide
  Antisense strand to SEQ ID NO: 1605611
uucuuccgggacuacgcgc

SEQ ID NO: 1605613 - RNA, 19 nt, Artificial Sequence
  Description of Artificial Sequence: Synthetic oligonucleotide
  Sense strand starting at position 1707 of SEQ ID NO: 1560519
cgcguagucccggaagaaa

SEQ ID NO: 1605614 - RNA, 19 nt, Artificial Sequence
  Description of Artificial Sequence: Synthetic oligonucleotide
  Antisense strand to SEQ ID NO: 1605613
uuucuuccgggacuacgcg

SEQ ID NO: 1605615 - RNA, 19 nt, Artificial Sequence
  Description of Artificial Sequence: Synthetic oligonucleotide
  Sense strand starting at position 1925 of SEQ ID NO: 1560519
ugugacgucacagagagaa

SEQ ID NO: 1605616 - RNA, 19 nt, Artificial Sequence
  Description of Artificial Sequence: Synthetic oligonucleotide
  Antisense strand to SEQ ID NO: 1605615
uucucucugugacgucaca

SEQ ID NO: 1605617 - RNA, 19 nt, Artificial Sequence
  Description of Artificial Sequence: Synthetic oligonucleotide
  Sense strand starting at position 1991 of SEQ ID NO: 1560519
ggagcaucacgguguuaca

SEQ ID NO: 1605618 - RNA, 19 nt, Artificial Sequence
  Description of Artificial Sequence: Synthetic oligonucleotide
  Antisense strand to SEQ ID NO: 1605617
uguaacaccgugaugcucc

SEQ ID NO: 1605619 - RNA, 19 nt, Artificial Sequence
  Description of Artificial Sequence: Synthetic oligonucleotide
  Sense strand starting at position 2080 of SEQ ID NO: 1560519
acagaaagccucugcucaa

SEQ ID NO: 1605620 - RNA, 19 nt, Artificial Sequence
  Description of Artificial Sequence: Synthetic oligonucleotide
  Antisense strand to SEQ ID NO: 1605619
uugagcagaggcuuucugu

SEQ ID NO: 1605621 - RNA, 19 nt, Artificial Sequence
  Description of Artificial Sequence: Synthetic oligonucleotide
  Sense strand starting at position 3103 of SEQ ID NO: 1560519
gguucuugugcuugcagua

SEQ ID NO: 1605622 - RNA, 19 nt, Artificial Sequence
  Description of Artificial Sequence: Synthetic oligonucleotide
  Antisense strand to SEQ ID NO: 1605621
uacugcaagcacaagaacc

SEQ ID NO: 1605623 - RNA, 19 nt, Artificial Sequence
  Description of Artificial Sequence: Synthetic oligonucleotide
  Sense strand starting at position 3108 of SEQ ID NO: 1560519
uugugcuugcaguacuuaa

SEQ ID NO: 1605624 - RNA, 19 nt, Artificial Sequence
  Description of Artificial Sequence: Synthetic oligonucleotide
  Antisense strand to SEQ ID NO: 1605623
uuaaguacugcaagcacaa

SEQ ID NO: 1605625 - RNA, 19 nt, Artificial Sequence
  Description of Artificial Sequence: Synthetic oligonucleotide
  Sense strand starting at position 3179 of SEQ ID NO: 1560519
gagauagacugacauaaga

SEQ ID NO: 1605626 - RNA, 19 nt, Artificial Sequence
  Description of Artificial Sequence: Synthetic oligonucleotide
  Antisense strand to SEQ ID NO: 1605625
ucuuaugucagucuaucuc

SEQ ID NO: 1605627 - RNA, 19 nt, Artificial Sequence
  Description of Artificial Sequence: Synthetic oligonucleotide
  Sense strand starting at position 3271 of SEQ ID NO: 1560519
cugguacacagaugaguaa

SEQ ID NO: 1605628 - RNA, 19 nt, Artificial Sequence
  Description of Artificial Sequence: Synthetic oligonucleotide
  Antisense strand to SEQ ID NO: 1605627
uuacucaucuguguaccag

SEQ ID NO: 1605629 - RNA, 19 nt, Artificial Sequence
  Description of Artificial Sequence: Synthetic oligonucleotide
  Sense strand starting at position 3325 of SEQ ID NO: 1560519
gcaaauacacagugugaua

SEQ ID NO: 1605630 - RNA, 19 nt, Artificial Sequence
  Description of Artificial Sequence: Synthetic oligonucleotide
  Antisense strand to SEQ ID NO: 1605629
uaucacacuguguauuugc

SEQ ID NO: 1605631 - RNA, 19 nt, Artificial Sequence
  Description of Artificial Sequence: Synthetic oligonucleotide
  Sense strand starting at position 3330 of SEQ ID NO: 1560519
uacacagugugauacaguu

SEQ ID NO: 1605632 - RNA, 19 nt, Artificial Sequence
  Description of Artificial Sequence: Synthetic oligonucleotide
  Antisense strand to SEQ ID NO: 1605631
aacuguaucacacugugua

SEQ ID NO: 1605633 - RNA, 19 nt, Artificial Sequence
  Description of Artificial Sequence: Synthetic oligonucleotide
  Sense strand starting at position 3336 of SEQ ID NO: 1560519
gugugauacaguuaagaga

SEQ ID NO: 1605634 - RNA, 19 nt, Artificial Sequence
  Description of Artificial Sequence: Synthetic oligonucleotide
  Antisense strand to SEQ ID NO: 1605633
ucucuuaacuguaucacac

SEQ ID NO: 1605635 - RNA, 19 nt, Artificial Sequence
  Description of Artificial Sequence: Synthetic oligonucleotide
  Sense strand starting at position 3526 of SEQ ID NO: 1560519
ggagaacaguugcaaggau

SEQ ID NO: 1605636 - RNA, 19 nt, Artificial Sequence
  Description of Artificial Sequence: Synthetic oligonucleotide
  Antisense strand to SEQ ID NO: 1605635
auccuugcaacuguucucc

SEQ ID NO: 1605637 - RNA, 19 nt, Artificial Sequence
  Description of Artificial Sequence: Synthetic oligonucleotide
  Sense strand starting at position 3583 of SEQ ID NO: 1560519
uucgcuguaucucucuaua

SEQ ID NO: 1605638 - RNA, 19 nt, Artificial Sequence
  Description of Artificial Sequence: Synthetic oligonucleotide
  Antisense strand to SEQ ID NO: 1605637
uauagagagauacagcgaa

SEQ ID NO: 1605639 - RNA, 19 nt, Artificial Sequence
  Description of Artificial Sequence: Synthetic oligonucleotide
  Sense strand starting at position 3585 of SEQ ID NO: 1560519
cgcuguaucucucuauaua

SEQ ID NO: 1605640 - RNA, 19 nt, Artificial Sequence
  Description of Artificial Sequence: Synthetic oligonucleotide
  Antisense strand to SEQ ID NO: 1605639
uauauagagagauacagcg

SEQ ID NO: 1605641 - RNA, 19 nt, Artificial Sequence
  Description of Artificial Sequence: Synthetic oligonucleotide
  Sense strand starting at position 3586 of SEQ ID NO: 1560519
gcuguaucucucuauauau

SEQ ID NO: 1605642 - RNA, 19 nt, Artificial Sequence
  Description of Artificial Sequence: Synthetic oligonucleotide
  Antisense strand to SEQ ID NO: 1605641
auauauagagagauacagc

SEQ ID NO: 1605643 - RNA, 19 nt, Artificial Sequence
  Description of Artificial Sequence: Synthetic oligonucleotide
  Sense strand starting at position 3755 of SEQ ID NO: 1560519
auauuacuacguugaggga

SEQ ID NO: 1605644 - RNA, 19 nt, Artificial Sequence
  Description of Artificial Sequence: Synthetic oligonucleotide
  Antisense strand to SEQ ID NO: 1605643
ucccucaacguaguaauau

SEQ ID NO: 1605645 - RNA, 19 nt, Artificial Sequence
  Description of Artificial Sequence: Synthetic oligonucleotide
  Sense strand starting at position 3802 of SEQ ID NO: 1560519
gagggcaguugucuuauua

SEQ ID NO: 1605646 - RNA, 19 nt, Artificial Sequence
  Description of Artificial Sequence: Synthetic oligonucleotide
  Antisense strand to SEQ ID NO: 1605645
uaauaagacaacugcccuc

SEQ ID NO: 1605647 - RNA, 19 nt, Artificial Sequence
  Description of Artificial Sequence: Synthetic oligonucleotide
  Sense strand starting at position 3806 of SEQ ID NO: 1560519
gcaguugucuuauuaauag

SEQ ID NO: 1605648 - RNA, 19 nt, Artificial Sequence
  Description of Artificial Sequence: Synthetic oligonucleotide
  Antisense strand to SEQ ID NO: 1605647
cuauuaauaagacaacugc

SEQ ID NO: 1605649 - RNA, 19 nt, Artificial Sequence
  Description of Artificial Sequence: Synthetic oligonucleotide
  Sense strand starting at position 3943 of SEQ ID NO: 1560519
ggagcucucuucuuguauc

SEQ ID NO: 1605650 - RNA, 19 nt, Artificial Sequence
  Description of Artificial Sequence: Synthetic oligonucleotide
  Antisense strand to SEQ ID NO: 1605649
gauacaagaagagagcucc

SEQ ID NO: 1605651 - RNA, 19 nt, Artificial Sequence
  Description of Artificial Sequence: Synthetic oligonucleotide
  Sense strand starting at position 71 of SEQ ID NO: 1560520
gcucguguccugucugaaa

SEQ ID NO: 1605652 - RNA, 19 nt, Artificial Sequence
  Description of Artificial Sequence: Synthetic oligonucleotide
  Antisense strand to SEQ ID NO: 1605651
uuucagacaggacacgagc

SEQ ID NO: 1605653 - RNA, 19 nt, Artificial Sequence
  Description of Artificial Sequence: Synthetic oligonucleotide
  Sense strand starting at position 196 of SEQ ID NO: 1560520
gggacccuuuaggaaagau

SEQ ID NO: 1605654 - RNA, 19 nt, Artificial Sequence
  Description of Artificial Sequence: Synthetic oligonucleotide
  Antisense strand to SEQ ID NO: 1605653
aucuuuccuaaaggguccc

SEQ ID NO: 1605655 - RNA, 19 nt, Artificial Sequence
  Description of Artificial Sequence: Synthetic oligonucleotide
  Sense strand starting at position 233 of SEQ ID NO: 1560520
gucggagaccuuugaggga

SEQ ID NO: 1605656 - RNA, 19 nt, Artificial Sequence
  Description of Artificial Sequence: Synthetic oligonucleotide
  Antisense strand to SEQ ID NO: 1605655
ucccucaaaggucuccgac

SEQ ID NO: 1605657 - RNA, 19 nt, Artificial Sequence
  Description of Artificial Sequence: Synthetic oligonucleotide
  Sense strand starting at position 411 of SEQ ID NO: 1560520
gggacuuacuugugccagu

SEQ ID NO: 1605658 - RNA, 19 nt, Artificial Sequence
  Description of Artificial Sequence: Synthetic oligonucleotide
  Antisense strand to SEQ ID NO: 1605657
acuggcacaaguaaguccc

SEQ ID NO: 1605659 - RNA, 19 nt, Artificial Sequence
  Description of Artificial Sequence: Synthetic oligonucleotide
  Sense strand starting at position 412 of SEQ ID NO: 1560520
ggacuuacuugugccaguu

SEQ ID NO: 1605660 - RNA, 19 nt, Artificial Sequence
  Description of Artificial Sequence: Synthetic oligonucleotide
  Antisense strand to SEQ ID NO: 1605659
aacuggcacaaguaagucc

SEQ ID NO: 1605661 - RNA, 19 nt, Artificial Sequence
  Description of Artificial Sequence: Synthetic oligonucleotide
  Sense strand starting at position 414 of SEQ ID NO: 1560520
acuuacuugugccaguuau

SEQ ID NO: 1605662 - RNA, 19 nt, Artificial Sequence
  Description of Artificial Sequence: Synthetic oligonucleotide
  Antisense strand to SEQ ID NO: 1605661
auaacuggcacaaguaagu

SEQ ID NO: 1605663 - RNA, 19 nt, Artificial Sequence
  Description of Artificial Sequence: Synthetic oligonucleotide
  Sense strand starting at position 421 of SEQ ID NO: 1560520
ugugccaguuauuucuaca

SEQ ID NO: 1605664 - RNA, 19 nt, Artificial Sequence
  Description of Artificial Sequence: Synthetic oligonucleotide
  Antisense strand to SEQ ID NO: 1605663
uguagaaauaacuggcaca

SEQ ID NO: 1605665 - RNA, 19 nt, Artificial Sequence
  Description of Artificial Sequence: Synthetic oligonucleotide
  Sense strand starting at position 424 of SEQ ID NO: 1560520
gccaguuauuucuacaaag

SEQ ID NO: 1605666 - RNA, 19 nt, Artificial Sequence
  Description of Artificial Sequence: Synthetic oligonucleotide
  Antisense strand to SEQ ID NO: 1605665
cuuuguagaaauaacuggc

SEQ ID NO: 1605667 - RNA, 19 nt, Artificial Sequence
  Description of Artificial Sequence: Synthetic oligonucleotide
  Sense strand starting at position 734 of SEQ ID NO: 1560520
gagcccuacucgcaguuau

SEQ ID NO: 1605668 - RNA, 19 nt, Artificial Sequence
  Description of Artificial Sequence: Synthetic oligonucleotide
  Antisense strand to SEQ ID NO: 1605667
auaacugcgaguagggcuc

SEQ ID NO: 1605669 - RNA, 19 nt, Artificial Sequence
  Description of Artificial Sequence: Synthetic oligonucleotide
  Sense strand starting at position 808 of SEQ ID NO: 1560520
cuggaagaugccugaaaca

SEQ ID NO: 1605670 - RNA, 19 nt, Artificial Sequence
  Description of Artificial Sequence: Synthetic oligonucleotide
  Antisense strand to SEQ ID NO: 1605669
uguuucaggcaucuuccag

SEQ ID NO: 1605671 - RNA, 19 nt, Artificial Sequence
  Description of Artificial Sequence: Synthetic oligonucleotide
  Sense strand starting at position 817 of SEQ ID NO: 1560520
gccugaaacacguacaaga

SEQ ID NO: 1605672 - RNA, 19 nt, Artificial Sequence
  Description of Artificial Sequence: Synthetic oligonucleotide
  Antisense strand to SEQ ID NO: 1605671
ucuuguacguguuucaggc

SEQ ID NO: 1605673 - RNA, 19 nt, Artificial Sequence
  Description of Artificial Sequence: Synthetic oligonucleotide
  Sense strand starting at position 1200 of SEQ ID NO: 1560520
gggugauggcauugauccu

SEQ ID NO: 1605674 - RNA, 19 nt, Artificial Sequence
  Description of Artificial Sequence: Synthetic oligonucleotide
  Antisense strand to SEQ ID NO: 1605673
aggaucaaugccaucaccc

SEQ ID NO: 1605675 - RNA, 19 nt, Artificial Sequence
  Description of Artificial Sequence: Synthetic oligonucleotide
  Sense strand starting at position 1201 of SEQ ID NO: 1560520
ggugauggcauugauccuu

SEQ ID NO: 1605676 - RNA, 19 nt, Artificial Sequence
  Description of Artificial Sequence: Synthetic oligonucleotide
  Antisense strand to SEQ ID NO: 1605675
aaggaucaaugccaucacc

SEQ ID NO: 1605677 - RNA, 19 nt, Artificial Sequence
  Description of Artificial Sequence: Synthetic oligonucleotide
  Sense strand starting at position 1362 of SEQ ID NO: 1560520
cuuauuugcucacuuucga

SEQ ID NO: 1605678 - RNA, 19 nt, Artificial Sequence
  Description of Artificial Sequence: Synthetic oligonucleotide
  Antisense strand to SEQ ID NO: 1605677
ucgaaagugagcaaauaag

SEQ ID NO: 1605679 - RNA, 19 nt, Artificial Sequence
  Description of Artificial Sequence: Synthetic oligonucleotide
  Sense strand starting at position 1366 of SEQ ID NO: 1560520
uuugcucacuuucgaugau

SEQ ID NO: 1605680 - RNA, 19 nt, Artificial Sequence
  Description of Artificial Sequence: Synthetic oligonucleotide
  Antisense strand to SEQ ID NO: 1605679
aucaucgaaagugagcaaa

SEQ ID NO: 1605681 - RNA, 19 nt, Artificial Sequence
  Description of Artificial Sequence: Synthetic oligonucleotide
  Sense strand starting at position 1437 of SEQ ID NO: 1560520
gggaaauacccugagucgu

SEQ ID NO: 1605682 - RNA, 19 nt, Artificial Sequence
  Description of Artificial Sequence: Synthetic oligonucleotide
  Antisense strand to SEQ ID NO: 1605681
acgacucaggguauuuccc

SEQ ID NO: 1605683 - RNA, 19 nt, Artificial Sequence
  Description of Artificial Sequence: Synthetic oligonucleotide
  Sense strand starting at position 2724 of SEQ ID NO: 1560520
gagaccgaguucucaggaa

SEQ ID NO: 1605684 - RNA, 19 nt, Artificial Sequence
  Description of Artificial Sequence: Synthetic oligonucleotide
  Antisense strand to SEQ ID NO: 1605683
uuccugagaacucggucuc

SEQ ID NO: 1605685 - RNA, 19 nt, Artificial Sequence
  Description of Artificial Sequence: Synthetic oligonucleotide
  Sense strand starting at position 3628 of SEQ ID NO: 1560520
ggguaagauuuccagucuu

SEQ ID NO: 1605686 - RNA, 19 nt, Artificial Sequence
  Description of Artificial Sequence: Synthetic oligonucleotide
  Antisense strand to SEQ ID NO: 1605685
aagacuggaaaucuuaccc

SEQ ID NO: 1605687 - RNA, 19 nt, Artificial Sequence
  Description of Artificial Sequence: Synthetic oligonucleotide
  Sense strand starting at position 3636 of SEQ ID NO: 1560520
uuuccagucuuuguacaca

SEQ ID NO: 1605688 - RNA, 19 nt, Artificial Sequence
  Description of Artificial Sequence: Synthetic oligonucleotide
  Antisense strand to SEQ ID NO: 1605687
uguguacaaagacuggaaa

SEQ ID NO: 1605689 - RNA, 19 nt, Artificial Sequence
  Description of Artificial Sequence: Synthetic oligonucleotide
  Sense strand starting at position 55 of SEQ ID NO: 1560521
ggauuaccggcgugagaaa

SEQ ID NO: 1605690 - RNA, 19 nt, Artificial Sequence
  Description of Artificial Sequence: Synthetic oligonucleotide
  Antisense strand to SEQ ID NO: 1605689
uuucucacgccgguaaucc

SEQ ID NO: 1605691 - RNA, 19 nt, Artificial Sequence
  Description of Artificial Sequence: Synthetic oligonucleotide
  Sense strand starting at position 80 of SEQ ID NO: 1560521
cuggccuaaugagguuuaa

SEQ ID NO: 1605692 - RNA, 19 nt, Artificial Sequence
  Description of Artificial Sequence: Synthetic oligonucleotide
  Antisense strand to SEQ ID NO: 1605691
uuaaaccucauuaggccag

SEQ ID NO: 1605693 - RNA, 19 nt, Artificial Sequence
  Description of Artificial Sequence: Synthetic oligonucleotide
  Sense strand starting at position 129 of SEQ ID NO: 1560521
cagcuuucgcagcugugaa

SEQ ID NO: 1605694 - RNA, 19 nt, Artificial Sequence
  Description of Artificial Sequence: Synthetic oligonucleotide
  Antisense strand to SEQ ID NO: 1605693
uucacagcugcgaaagcug

SEQ ID NO: 1605695 - RNA, 19 nt, Artificial Sequence
  Description of Artificial Sequence: Synthetic oligonucleotide
  Sense strand starting at position 130 of SEQ ID NO: 1560521
agcuuucgcagcugugaaa

SEQ ID NO: 1605696 - RNA, 19 nt, Artificial Sequence
  Description of Artificial Sequence: Synthetic oligonucleotide
  Antisense strand to SEQ ID NO: 1605695
uuucacagcugcgaaagcu

SEQ ID NO: 1605697 - RNA, 19 nt, Artificial Sequence
  Description of Artificial Sequence: Synthetic oligonucleotide
  Sense strand starting at position 131 of SEQ ID NO: 1560521
gcuuucgcagcugugaaau

SEQ ID NO: 1605698 - RNA, 19 nt, Artificial Sequence
  Description of Artificial Sequence: Synthetic oligonucleotide
  Antisense strand to SEQ ID NO: 1605697
auuucacagcugcgaaagc

SEQ ID NO: 1605699 - RNA, 19 nt, Artificial Sequence
  Description of Artificial Sequence: Synthetic oligonucleotide
  Sense strand starting at position 161 of SEQ ID NO: 1560521
ccagcauccucauugaggu

SEQ ID NO: 1605700 - RNA, 19 nt, Artificial Sequence
  Description of Artificial Sequence: Synthetic oligonucleotide
  Antisense strand to SEQ ID NO: 1605699
accucaaugaggaugcugg

SEQ ID NO: 1605701 - RNA, 19 nt, Artificial Sequence
  Description of Artificial Sequence: Synthetic oligonucleotide
  Sense strand starting at position 200 of SEQ ID NO: 1560521
ggccuaaagugucaacuca

SEQ ID NO: 1605702 - RNA, 19 nt, Artificial Sequence
  Description of Artificial Sequence: Synthetic oligonucleotide
  Antisense strand to SEQ ID NO: 1605701
ugaguugacacuuuaggcc

SEQ ID NO: 1605703 - RNA, 19 nt, Artificial Sequence
  Description of Artificial Sequence: Synthetic oligonucleotide
  Sense strand starting at position 250 of SEQ ID NO: 1560521
ugaugugccgguaagcgau

SEQ ID NO: 1605704 - RNA, 19 nt, Artificial Sequence
  Description of Artificial Sequence: Synthetic oligonucleotide
  Antisense strand to SEQ ID NO: 1605703
aucgcuuaccggcacauca

SEQ ID NO: 1605705 - RNA, 19 nt, Artificial Sequence
  Description of Artificial Sequence: Synthetic oligonucleotide
  Sense strand starting at position 257 of SEQ ID NO: 1560521
ccgguaagcgaucaacaaa

SEQ ID NO: 1605706 - RNA, 19 nt, Artificial Sequence
  Description of Artificial Sequence: Synthetic oligonucleotide
  Antisense strand to SEQ ID NO: 1605705
uuuguugaucgcuuaccgg

SEQ ID NO: 1605707 - RNA, 19 nt, Artificial Sequence
  Description of Artificial Sequence: Synthetic oligonucleotide
  Sense strand starting at position 268 of SEQ ID NO: 1560521
ucaacaaacgccuguuaaa

SEQ ID NO: 1605708 - RNA, 19 nt, Artificial Sequence
  Description of Artificial Sequence: Synthetic oligonucleotide
  Antisense strand to SEQ ID NO: 1605707
uuuaacaggcguuuguuga

SEQ ID NO: 1605709 - RNA, 19 nt, Artificial Sequence
  Description of Artificial Sequence: Synthetic oligonucleotide
  Sense strand starting at position 372 of SEQ ID NO: 1560521
acacuuugaugucaccgau

SEQ ID NO: 1605710 - RNA, 19 nt, Artificial Sequence
  Description of Artificial Sequence: Synthetic oligonucleotide
  Antisense strand to SEQ ID NO: 1605709
aucggugacaucaaagugu

SEQ ID NO: 1605711 - RNA, 19 nt, Artificial Sequence
  Description of Artificial Sequence: Synthetic oligonucleotide
  Sense strand starting at position 454 of SEQ ID NO: 1560521
cagagagauugaugucuag

SEQ ID NO: 1605712 - RNA, 19 nt, Artificial Sequence
  Description of Artificial Sequence: Synthetic oligonucleotide
  Antisense strand to SEQ ID NO: 1605711
cuagacaucaaucucucug

SEQ ID NO: 1605713 - RNA, 19 nt, Artificial Sequence
  Description of Artificial Sequence: Synthetic oligonucleotide
  Sense strand starting at position 457 of SEQ ID NO: 1560521
agagauugaugucuaguuu

SEQ ID NO: 1605714 - RNA, 19 nt, Artificial Sequence
  Description of Artificial Sequence: Synthetic oligonucleotide
  Antisense strand to SEQ ID NO: 1605713
aaacuagacaucaaucucu

SEQ ID NO: 1605715 - RNA, 19 nt, Artificial Sequence
  Description of Artificial Sequence: Synthetic oligonucleotide
  Sense strand starting at position 1261 of SEQ ID NO: 1560521
ggguuagagaccugccuga

SEQ ID NO: 1605716 - RNA, 19 nt, Artificial Sequence
  Description of Artificial Sequence: Synthetic oligonucleotide
  Antisense strand to SEQ ID NO: 1605715
ucaggcaggucucuaaccc

SEQ ID NO: 1605717 - RNA, 19 nt, Artificial Sequence
  Description of Artificial Sequence: Synthetic oligonucleotide
  Sense strand starting at position 1377 of SEQ ID NO: 1560521
ggugauguuuggucccaga

SEQ ID NO: 1605718 - RNA, 19 nt, Artificial Sequence
  Description of Artificial Sequence: Synthetic oligonucleotide
  Antisense strand to SEQ ID NO: 1605717
ucugggaccaaacaucacc

SEQ ID NO: 1605719 - RNA, 19 nt, Artificial Sequence
  Description of Artificial Sequence: Synthetic oligonucleotide
  Sense strand starting at position 1513 of SEQ ID NO: 1560521
uguuuauaauccucaacgu

SEQ ID NO: 1605720 - RNA, 19 nt, Artificial Sequence
  Description of Artificial Sequence: Synthetic oligonucleotide
  Antisense strand to SEQ ID NO: 1605719
acguugaggauuauaaaca

SEQ ID NO: 1605721 - RNA, 19 nt, Artificial Sequence
  Description of Artificial Sequence: Synthetic oligonucleotide
  Sense strand starting at position 1514 of SEQ ID NO: 1560521
guuuauaauccucaacguu

SEQ ID NO: 1605722 - RNA, 19 nt, Artificial Sequence
  Description of Artificial Sequence: Synthetic oligonucleotide
  Antisense strand to SEQ ID NO: 1605721
aacguugaggauuauaaac

SEQ ID NO: 1605723 - RNA, 19 nt, Artificial Sequence
  Description of Artificial Sequence: Synthetic oligonucleotide
  Sense strand starting at position 1894 of SEQ ID NO: 1560521
gcggcaucgccagcucuua

SEQ ID NO: 1605724 - RNA, 19 nt, Artificial Sequence
  Description of Artificial Sequence: Synthetic oligonucleotide
  Antisense strand to SEQ ID NO: 1605723
uaagagcuggcgaugccgc

SEQ ID NO: 1605725 - RNA, 19 nt, Artificial Sequence
  Description of Artificial Sequence: Synthetic oligonucleotide
  Sense strand starting at position 2022 of SEQ ID NO: 1560521
acugucauuuaccgaaagu

SEQ ID NO: 1605726 - RNA, 19 nt, Artificial Sequence
  Description of Artificial Sequence: Synthetic oligonucleotide
  Antisense strand to SEQ ID NO: 1605725
acuuucgguaaaugacagu

SEQ ID NO: 1605727 - RNA, 19 nt, Artificial Sequence
  Description of Artificial Sequence: Synthetic oligonucleotide
  Sense strand starting at position 2244 of SEQ ID NO: 1560521
cccuuauugccucaguuua

SEQ ID NO: 1605728 - RNA, 19 nt, Artificial Sequence
  Description of Artificial Sequence: Synthetic oligonucleotide
  Antisense strand to SEQ ID NO: 1605727
uaaacugaggcaauaaggg

SEQ ID NO: 1605729 - RNA, 19 nt, Artificial Sequence
  Description of Artificial Sequence: Synthetic oligonucleotide
  Sense strand starting at position 2266 of SEQ ID NO: 1560521
aucuguagcaugugugagu

SEQ ID NO: 1605730 - RNA, 19 nt, Artificial Sequence
  Description of Artificial Sequence: Synthetic oligonucleotide
  Antisense strand to SEQ ID NO: 1605729
acucacacaugcuacagau

SEQ ID NO: 1605731 - RNA, 19 nt, Artificial Sequence
  Description of Artificial Sequence: Synthetic oligonucleotide
  Sense strand starting at position 2319 of SEQ ID NO: 1560521
aaggaaaccuggcuggauu

SEQ ID NO: 1605732 - RNA, 19 nt, Artificial Sequence
  Description of Artificial Sequence: Synthetic oligonucleotide
  Antisense strand to SEQ ID NO: 1605731
aauccagccagguuuccuu

SEQ ID NO: 1605733 - RNA, 19 nt, Artificial Sequence
  Description of Artificial Sequence: Synthetic oligonucleotide
  Sense strand starting at position 2374 of SEQ ID NO: 1560521
aggucaaguucuucuuuga

SEQ ID NO: 1605734 - RNA, 19 nt, Artificial Sequence
  Description of Artificial Sequence: Synthetic oligonucleotide
  Antisense strand to SEQ ID NO: 1605733
ucaaagaagaacuugaccu

SEQ ID NO: 1605735 - RNA, 19 nt, Artificial Sequence
  Description of Artificial Sequence: Synthetic oligonucleotide
  Sense strand starting at position 2379 of SEQ ID NO: 1560521
aaguucuucuuugagguau

SEQ ID NO: 1605736 - RNA, 19 nt, Artificial Sequence
  Description of Artificial Sequence: Synthetic oligonucleotide
  Antisense strand to SEQ ID NO: 1605735
auaccucaaagaagaacuu

SEQ ID NO: 1605737 - RNA, 19 nt, Artificial Sequence
  Description of Artificial Sequence: Synthetic oligonucleotide
  Sense strand starting at position 2381 of SEQ ID NO: 1560521
guucuucuuugagguauuu

SEQ ID NO: 1605738 - RNA, 19 nt, Artificial Sequence
  Description of Artificial Sequence: Synthetic oligonucleotide
  Antisense strand to SEQ ID NO: 1605737
aaauaccucaaagaagaac

SEQ ID NO: 1605739 - RNA, 19 nt, Artificial Sequence
  Description of Artificial Sequence: Synthetic oligonucleotide
  Sense strand starting at position 2691 of SEQ ID NO: 1560521
ccuggugaugccuguaauc

SEQ ID NO: 1605740 - RNA, 19 nt, Artificial Sequence
  Description of Artificial Sequence: Synthetic oligonucleotide
  Antisense strand to SEQ ID NO: 1605739
gauuacaggcaucaccagg

SEQ ID NO: 1605741 - RNA, 19 nt, Artificial Sequence
  Description of Artificial Sequence: Synthetic oligonucleotide
  Sense strand starting at position 2756 of SEQ ID NO: 1560521
ggcggauguuacagugaga

SEQ ID NO: 1605742 - RNA, 19 nt, Artificial Sequence
  Description of Artificial Sequence: Synthetic oligonucleotide
  Antisense strand to SEQ ID NO: 1605741
ucucacuguaacauccgcc

SEQ ID NO: 1605743 - RNA, 19 nt, Artificial Sequence
  Description of Artificial Sequence: Synthetic oligonucleotide
  Sense strand starting at position 2759 of SEQ ID NO: 1560521
ggauguuacagugagacga

SEQ ID NO: 1605744 - RNA, 19 nt, Artificial Sequence
  Description of Artificial Sequence: Synthetic oligonucleotide
  Antisense strand to SEQ ID NO: 1605743
ucgucucacuguaacaucc

SEQ ID NO: 1605745 - RNA, 19 nt, Artificial Sequence
  Description of Artificial Sequence: Synthetic oligonucleotide
  Sense strand starting at position 2933 of SEQ ID NO: 1560521
gugaucuggcgcugagaca

SEQ ID NO: 1605746 - RNA, 19 nt, Artificial Sequence
  Description of Artificial Sequence: Synthetic oligonucleotide
  Antisense strand to SEQ ID NO: 1605745
ugucucagcgccagaucac

SEQ ID NO: 1605747 - RNA, 19 nt, Artificial Sequence
  Description of Artificial Sequence: Synthetic oligonucleotide
  Sense strand starting at position 2934 of SEQ ID NO: 1560521
ugaucuggcgcugagacaa

SEQ ID NO: 1605748 - RNA, 19 nt, Artificial Sequence
  Description of Artificial Sequence: Synthetic oligonucleotide
  Antisense strand to SEQ ID NO: 1605747
uugucucagcgccagauca

SEQ ID NO: 1605749 - RNA, 19 nt, Artificial Sequence
  Description of Artificial Sequence: Synthetic oligonucleotide
  Sense strand starting at position 2968 of SEQ ID NO: 1560521
gccaaaucaucgcagacaa

SEQ ID NO: 1605750 - RNA, 19 nt, Artificial Sequence
  Description of Artificial Sequence: Synthetic oligonucleotide
  Antisense strand to SEQ ID NO: 1605749
uugucugcgaugauuuggc

SEQ ID NO: 1605751 - RNA, 19 nt, Artificial Sequence
  Description of Artificial Sequence: Synthetic oligonucleotide
  Sense strand starting at position 3102 of SEQ ID NO: 1560521
uugagagggcagugaucuu

SEQ ID NO: 1605752 - RNA, 19 nt, Artificial Sequence
  Description of Artificial Sequence: Synthetic oligonucleotide
  Antisense strand to SEQ ID NO: 1605751
aagaucacugcccucucaa

SEQ ID NO: 1605753 - RNA, 19 nt, Artificial Sequence
  Description of Artificial Sequence: Synthetic oligonucleotide
  Sense strand starting at position 3286 of SEQ ID NO: 1560521
ggaaguaggagcuguuaua

SEQ ID NO: 1605754 - RNA, 19 nt, Artificial Sequence
  Description of Artificial Sequence: Synthetic oligonucleotide
  Antisense strand to SEQ ID NO: 1605753
uauaacagcuccuacuucc

SEQ ID NO: 1605755 - RNA, 19 nt, Artificial Sequence
  Description of Artificial Sequence: Synthetic oligonucleotide
  Sense strand starting at position 3351 of SEQ ID NO: 1560521
gggccaguguucuuaggau

SEQ ID NO: 1605756 - RNA, 19 nt, Artificial Sequence
  Description of Artificial Sequence: Synthetic oligonucleotide
  Antisense strand to SEQ ID NO: 1605755
auccuaagaacacuggccc

SEQ ID NO: 1605757 - RNA, 19 nt, Artificial Sequence
  Description of Artificial Sequence: Synthetic oligonucleotide
  Sense strand starting at position 3355 of SEQ ID NO: 1560521
caguguucuuaggauaaua

SEQ ID NO: 1605758 - RNA, 19 nt, Artificial Sequence
  Description of Artificial Sequence: Synthetic oligonucleotide
  Antisense strand to SEQ ID NO: 1605757
uauuauccuaagaacacug

SEQ ID NO: 1605759 - RNA, 19 nt, Artificial Sequence
  Description of Artificial Sequence: Synthetic oligonucleotide
  Sense strand starting at position 3363 of SEQ ID NO: 1560521
uuaggauaauaggaucaga

SEQ ID NO: 1605760 - RNA, 19 nt, Artificial Sequence
  Description of Artificial Sequence: Synthetic oligonucleotide
  Antisense strand to SEQ ID NO: 1605759
ucugauccuauuauccuaa

SEQ ID NO: 1605761 - RNA, 19 nt, Artificial Sequence
  Description of Artificial Sequence: Synthetic oligonucleotide
  Sense strand starting at position 3390 of SEQ ID NO: 1560521
aguagagcuucaggaauag

SEQ ID NO: 1605762 - RNA, 19 nt, Artificial Sequence
  Description of Artificial Sequence: Synthetic oligonucleotide
  Antisense strand to SEQ ID NO: 1605761
cuauuccugaagcucuacu

SEQ ID NO: 1605763 - RNA, 19 nt, Artificial Sequence
  Description of Artificial Sequence: Synthetic oligonucleotide
  Sense strand starting at position 3737 of SEQ ID NO: 1560521
aguuguggccaagaacagu

SEQ ID NO: 1605764 - RNA, 19 nt, Artificial Sequence
  Description of Artificial Sequence: Synthetic oligonucleotide
  Antisense strand to SEQ ID NO: 1605763
acuguucuuggccacaacu

SEQ ID NO: 1605765 - RNA, 19 nt, Artificial Sequence
  Description of Artificial Sequence: Synthetic oligonucleotide
  Sense strand starting at position 35 of SEQ ID NO: 1560522
gccaaagagugauguugga

SEQ ID NO: 1605766 - RNA, 19 nt, Artificial Sequence
  Description of Artificial Sequence: Synthetic oligonucleotide
  Antisense strand to SEQ ID NO: 1605765
uccaacaucacucuuuggc

SEQ ID NO: 1605767 - RNA, 19 nt, Artificial Sequence
  Description of Artificial Sequence: Synthetic oligonucleotide
  Sense strand starting at position 39 of SEQ ID NO: 1560522
aagagugauguuggacauu

SEQ ID NO: 1605768 - RNA, 19 nt, Artificial Sequence
  Description of Artificial Sequence: Synthetic oligonucleotide
  Antisense strand to SEQ ID NO: 1605767
aauguccaacaucacucuu

SEQ ID NO: 1605769 - RNA, 19 nt, Artificial Sequence
  Description of Artificial Sequence: Synthetic oligonucleotide
  Sense strand starting at position 48 of SEQ ID NO: 1560522
guuggacauugugaauagu

SEQ ID NO: 1605770 - RNA, 19 nt, Artificial Sequence
  Description of Artificial Sequence: Synthetic oligonucleotide
  Antisense strand to SEQ ID NO: 1605769
acuauucacaauguccaac

SEQ ID NO: 1605771 - RNA, 19 nt, Artificial Sequence
  Description of Artificial Sequence: Synthetic oligonucleotide
  Sense strand starting at position 77 of SEQ ID NO: 1560522
auuccaugcuggcagagaa

SEQ ID NO: 1605772 - RNA, 19 nt, Artificial Sequence
  Description of Artificial Sequence: Synthetic oligonucleotide
  Antisense strand to SEQ ID NO: 1605771
uucucugccagcauggaau

SEQ ID NO: 1605773 - RNA, 19 nt, Artificial Sequence
  Description of Artificial Sequence: Synthetic oligonucleotide
  Sense strand starting at position 160 of SEQ ID NO: 1560522
aguggagagucugguuuga

SEQ ID NO: 1605774 - RNA, 19 nt, Artificial Sequence
  Description of Artificial Sequence: Synthetic oligonucleotide
  Antisense strand to SEQ ID NO: 1605773
ucaaaccagacucuccacu

SEQ ID NO: 1605775 - RNA, 19 nt, Artificial Sequence
  Description of Artificial Sequence: Synthetic oligonucleotide
  Sense strand starting at position 183 of SEQ ID NO: 1560522
ggccgugagggcugaagau

SEQ ID NO: 1605776 - RNA, 19 nt, Artificial Sequence
  Description of Artificial Sequence: Synthetic oligonucleotide
  Antisense strand to SEQ ID NO: 1605775
aucuucagcccucacggcc

SEQ ID NO: 1605777 - RNA, 19 nt, Artificial Sequence
  Description of Artificial Sequence: Synthetic oligonucleotide
  Sense strand starting at position 289 of SEQ ID NO: 1560522
ccagauaagagaugccuga

SEQ ID NO: 1605778 - RNA, 19 nt, Artificial Sequence
  Description of Artificial Sequence: Synthetic oligonucleotide
  Antisense strand to SEQ ID NO: 1605777
ucaggcaucucuuaucugg

SEQ ID NO: 1605779 - RNA, 19 nt, Artificial Sequence
  Description of Artificial Sequence: Synthetic oligonucleotide
  Sense strand starting at position 293 of SEQ ID NO: 1560522
auaagagaugccugaagcu

SEQ ID NO: 1605780 - RNA, 19 nt, Artificial Sequence
  Description of Artificial Sequence: Synthetic oligonucleotide
  Antisense strand to SEQ ID NO: 1605779
agcuucaggcaucucuuau

SEQ ID NO: 1605781 - RNA, 19 nt, Artificial Sequence
  Description of Artificial Sequence: Synthetic oligonucleotide
  Sense strand starting at position 923 of SEQ ID NO: 1560522
acggucaccucuugcagau

SEQ ID NO: 1605782 - RNA, 19 nt, Artificial Sequence
  Description of Artificial Sequence: Synthetic oligonucleotide
  Antisense strand to SEQ ID NO: 1605781
aucugcaagaggugaccgu

SEQ ID NO: 1605783 - RNA, 19 nt, Artificial Sequence
  Description of Artificial Sequence: Synthetic oligonucleotide
  Sense strand starting at position 949 of SEQ ID NO: 1560522
gcagccuccuggcuaaaga

SEQ ID NO: 1605784 - RNA, 19 nt, Artificial Sequence
  Description of Artificial Sequence: Synthetic oligonucleotide
  Antisense strand to SEQ ID NO: 1605783
ucuuuagccaggaggcugc

SEQ ID NO: 1605785 - RNA, 19 nt, Artificial Sequence
  Description of Artificial Sequence: Synthetic oligonucleotide
  Sense strand starting at position 1166 of SEQ ID NO: 1560522
gggcaucgccauugauuga

SEQ ID NO: 1605786 - RNA, 19 nt, Artificial Sequence
  Description of Artificial Sequence: Synthetic oligonucleotide
  Antisense strand to SEQ ID NO: 1605785
ucaaucaauggcgaugccc

SEQ ID NO: 1605787 - RNA, 19 nt, Artificial Sequence
  Description of Artificial Sequence: Synthetic oligonucleotide
  Sense strand starting at position 1173 of SEQ ID NO: 1560522
gccauugauugagcuggga

SEQ ID NO: 1605788 - RNA, 19 nt, Artificial Sequence
  Description of Artificial Sequence: Synthetic oligonucleotide
  Antisense strand to SEQ ID NO: 1605787
ucccagcucaaucaauggc

SEQ ID NO: 1605789 - RNA, 19 nt, Artificial Sequence
  Description of Artificial Sequence: Synthetic oligonucleotide
  Sense strand starting at position 1331 of SEQ ID NO: 1560522
cucaccaggucucuaagua

SEQ ID NO: 1605790 - RNA, 19 nt, Artificial Sequence
  Description of Artificial Sequence: Synthetic oligonucleotide
  Antisense strand to SEQ ID NO: 1605789
uacuuagagaccuggugag

SEQ ID NO: 1605791 - RNA, 19 nt, Artificial Sequence
  Description of Artificial Sequence: Synthetic oligonucleotide
  Sense strand starting at position 1332 of SEQ ID NO: 1560522
ucaccaggucucuaaguaa

SEQ ID NO: 1605792 - RNA, 19 nt, Artificial Sequence
  Description of Artificial Sequence: Synthetic oligonucleotide
  Antisense strand to SEQ ID NO: 1605791
uuacuuagagaccugguga

SEQ ID NO: 1605793 - RNA, 19 nt, Artificial Sequence
  Description of Artificial Sequence: Synthetic oligonucleotide
  Sense strand starting at position 1356 of SEQ ID NO: 1560522
ucccuaucauggucaccua

SEQ ID NO: 1605794 - RNA, 19 nt, Artificial Sequence
  Description of Artificial Sequence: Synthetic oligonucleotide
  Antisense strand to SEQ ID NO: 1605793
uaggugaccaugauaggga

SEQ ID NO: 1605795 - RNA, 19 nt, Artificial Sequence
  Description of Artificial Sequence: Synthetic oligonucleotide
  Sense strand starting at position 1414 of SEQ ID NO: 1560522
ggcgcucugugguuaccua

SEQ ID NO: 1605796 - RNA, 19 nt, Artificial Sequence
  Description of Artificial Sequence: Synthetic oligonucleotide
  Antisense strand to SEQ ID NO: 1605795
uagguaaccacagagcgcc

SEQ ID NO: 1605797 - RNA, 19 nt, Artificial Sequence
  Description of Artificial Sequence: Synthetic oligonucleotide
  Sense strand starting at position 1418 of SEQ ID NO: 1560522
cucugugguuaccuagcaa

SEQ ID NO: 1605798 - RNA, 19 nt, Artificial Sequence
  Description of Artificial Sequence: Synthetic oligonucleotide
  Antisense strand to SEQ ID NO: 1605797
uugcuagguaaccacagag

SEQ ID NO: 1605799 - RNA, 19 nt, Artificial Sequence
  Description of Artificial Sequence: Synthetic oligonucleotide
  Sense strand starting at position 1422 of SEQ ID NO: 1560522
gugguuaccuagcaacaaa

SEQ ID NO: 1605800 - RNA, 19 nt, Artificial Sequence
  Description of Artificial Sequence: Synthetic oligonucleotide
  Antisense strand to SEQ ID NO: 1605799
uuuguugcuagguaaccac

SEQ ID NO: 1605801 - RNA, 19 nt, Artificial Sequence
  Description of Artificial Sequence: Synthetic oligonucleotide
  Sense strand starting at position 2080 of SEQ ID NO: 1560522
gcccacuacugcucagaga

SEQ ID NO: 1605802 - RNA, 19 nt, Artificial Sequence
  Description of Artificial Sequence: Synthetic oligonucleotide
  Antisense strand to SEQ ID NO: 1605801
ucucugagcaguagugggc

SEQ ID NO: 1605803 - RNA, 19 nt, Artificial Sequence
  Description of Artificial Sequence: Synthetic oligonucleotide
  Sense strand starting at position 2081 of SEQ ID NO: 1560522
cccacuacugcucagagau

SEQ ID NO: 1605804 - RNA, 19 nt, Artificial Sequence
  Description of Artificial Sequence: Synthetic oligonucleotide
  Antisense strand to SEQ ID NO: 1605803
aucucugagcaguaguggg

SEQ ID NO: 1605805 - RNA, 19 nt, Artificial Sequence
  Description of Artificial Sequence: Synthetic oligonucleotide
  Sense strand starting at position 2101 of SEQ ID NO: 1560522
cuaggaaacuuaguaggua

SEQ ID NO: 1605806 - RNA, 19 nt, Artificial Sequence
  Description of Artificial Sequence: Synthetic oligonucleotide
  Antisense strand to SEQ ID NO: 1605805
uaccuacuaaguuuccuag

SEQ ID NO: 1605807 - RNA, 19 nt, Artificial Sequence
  Description of Artificial Sequence: Synthetic oligonucleotide
  Sense strand starting at position 2114 of SEQ ID NO: 1560522
uagguaggcucucgcgaua

SEQ ID NO: 1605808 - RNA, 19 nt, Artificial Sequence
  Description of Artificial Sequence: Synthetic oligonucleotide
  Antisense strand to SEQ ID NO: 1605807
uaucgcgagagccuaccua

SEQ ID NO: 1605809 - RNA, 19 nt, Artificial Sequence
  Description of Artificial Sequence: Synthetic oligonucleotide
  Sense strand starting at position 2260 of SEQ ID NO: 1560522
cggugaucuuuacugaguc

SEQ ID NO: 1605810 - RNA, 19 nt, Artificial Sequence
  Description of Artificial Sequence: Synthetic oligonucleotide
  Antisense strand to SEQ ID NO: 1605809
gacucaguaaagaucaccg

SEQ ID NO: 1605811 - RNA, 19 nt, Artificial Sequence
  Description of Artificial Sequence: Synthetic oligonucleotide
  Sense strand starting at position 2261 of SEQ ID NO: 1560522
ggugaucuuuacugaguca

SEQ ID NO: 1605812 - RNA, 19 nt, Artificial Sequence
  Description of Artificial Sequence: Synthetic oligonucleotide
  Antisense strand to SEQ ID NO: 1605811
ugacucaguaaagaucacc

SEQ ID NO: 1605813 - RNA, 19 nt, Artificial Sequence
  Description of Artificial Sequence: Synthetic oligonucleotide
  Sense strand starting at position 2264 of SEQ ID NO: 1560522
gaucuuuacugagucagaa

SEQ ID NO: 1605814 - RNA, 19 nt, Artificial Sequence
  Description of Artificial Sequence: Synthetic oligonucleotide
  Antisense strand to SEQ ID NO: 1605813
uucugacucaguaaagauc

SEQ ID NO: 1605815 - RNA, 19 nt, Artificial Sequence
  Description of Artificial Sequence: Synthetic oligonucleotide
  Sense strand starting at position 2343 of SEQ ID NO: 1560522
agaugaucuugucucggga

SEQ ID NO: 1605816 - RNA, 19 nt, Artificial Sequence
  Description of Artificial Sequence: Synthetic oligonucleotide
  Antisense strand to SEQ ID NO: 1605815
ucccgagacaagaucaucu

SEQ ID NO: 1605817 - RNA, 19 nt, Artificial Sequence
  Description of Artificial Sequence: Synthetic oligonucleotide
  Sense strand starting at position 2347 of SEQ ID NO: 1560522
gaucuugucucgggaggga

SEQ ID NO: 1605818 - RNA, 19 nt, Artificial Sequence
  Description of Artificial Sequence: Synthetic oligonucleotide
  Antisense strand to SEQ ID NO: 1605817
ucccucccgagacaagauc

SEQ ID NO: 1605819 - RNA, 19 nt, Artificial Sequence
  Description of Artificial Sequence: Synthetic oligonucleotide
  Sense strand starting at position 2637 of SEQ ID NO: 1560522
gagagagguuaaggaaaua

SEQ ID NO: 1605820 - RNA, 19 nt, Artificial Sequence
  Description of Artificial Sequence: Synthetic oligonucleotide
  Antisense strand to SEQ ID NO: 1605819
uauuuccuuaaccucucuc

SEQ ID NO: 1605821 - RNA, 19 nt, Artificial Sequence
  Description of Artificial Sequence: Synthetic oligonucleotide
  Sense strand starting at position 3072 of SEQ ID NO: 1560522
ccgccaugguguuggaauu

SEQ ID NO: 1605822 - RNA, 19 nt, Artificial Sequence
  Description of Artificial Sequence: Synthetic oligonucleotide
  Antisense strand to SEQ ID NO: 1605821
aauuccaacaccauggcgg

SEQ ID NO: 1605823 - RNA, 19 nt, Artificial Sequence
  Description of Artificial Sequence: Synthetic oligonucleotide
  Sense strand starting at position 3073 of SEQ ID NO: 1560522
cgccaugguguuggaauuu

SEQ ID NO: 1605824 - RNA, 19 nt, Artificial Sequence
  Description of Artificial Sequence: Synthetic oligonucleotide
  Antisense strand to SEQ ID NO: 1605823
aaauuccaacaccauggcg

SEQ ID NO: 1605825 - RNA, 19 nt, Artificial Sequence
  Description of Artificial Sequence: Synthetic oligonucleotide
  Sense strand starting at position 3539 of SEQ ID NO: 1560522
gggcucugcguaaaugguu

SEQ ID NO: 1605826 - RNA, 19 nt, Artificial Sequence
  Description of Artificial Sequence: Synthetic oligonucleotide
  Antisense strand to SEQ ID NO: 1605825
aaccauuuacgcagagccc

SEQ ID NO: 1605827 - RNA, 19 nt, Artificial Sequence
  Description of Artificial Sequence: Synthetic oligonucleotide
  Sense strand starting at position 3681 of SEQ ID NO: 1560522
gggucuuggagagguauua

SEQ ID NO: 1605828 - RNA, 19 nt, Artificial Sequence
  Description of Artificial Sequence: Synthetic oligonucleotide
  Antisense strand to SEQ ID NO: 1605827
uaauaccucuccaagaccc

SEQ ID NO: 1605829 - RNA, 19 nt, Artificial Sequence
  Description of Artificial Sequence: Synthetic oligonucleotide
  Sense strand starting at position 3781 of SEQ ID NO: 1560522
auggguucguccuguuuca

SEQ ID NO: 1605830 - RNA, 19 nt, Artificial Sequence
  Description of Artificial Sequence: Synthetic oligonucleotide
  Antisense strand to SEQ ID NO: 1605829
ugaaacaggacgaacccau

SEQ ID NO: 1605831 - RNA, 19 nt, Artificial Sequence
  Description of Artificial Sequence: Synthetic oligonucleotide
  Sense strand starting at position 3970 of SEQ ID NO: 1560522
ugccauucguccuggguca

SEQ ID NO: 1605832 - RNA, 19 nt, Artificial Sequence
  Description of Artificial Sequence: Synthetic oligonucleotide
  Antisense strand to SEQ ID NO: 1605831
ugacccaggacgaauggca

SEQ ID NO: 1605833 - RNA, 19 nt, Artificial Sequence
  Description of Artificial Sequence: Synthetic oligonucleotide
  Sense strand starting at position 3983 of SEQ ID NO: 1560522
gggucacgauuccagacaa

SEQ ID NO: 1605834 - RNA, 19 nt, Artificial Sequence
  Description of Artificial Sequence: Synthetic oligonucleotide
  Antisense strand to SEQ ID NO: 1605833
uugucuggaaucgugaccc

SEQ ID NO: 1605835 - RNA, 19 nt, Artificial Sequence
  Description of Artificial Sequence: Synthetic oligonucleotide
  Sense strand starting at position 231 of SEQ ID NO: 1560523
gccaaagagugauguugga

SEQ ID NO: 1605836 - RNA, 19 nt, Artificial Sequence
  Description of Artificial Sequence: Synthetic oligonucleotide
  Antisense strand to SEQ ID NO: 1605835
uccaacaucacucuuuggc

SEQ ID NO: 1605837 - RNA, 19 nt, Artificial Sequence
  Description of Artificial Sequence: Synthetic oligonucleotide
  Sense strand starting at position 235 of SEQ ID NO: 1560523
aagagugauguuggacauu

SEQ ID NO: 1605838 - RNA, 19 nt, Artificial Sequence
  Description of Artificial Sequence: Synthetic oligonucleotide
  Antisense strand to SEQ ID NO: 1605837
aauguccaacaucacucuu

SEQ ID NO: 1605839 - RNA, 19 nt, Artificial Sequence
  Description of Artificial Sequence: Synthetic oligonucleotide
  Sense strand starting at position 244 of SEQ ID NO: 1560523
guuggacauugugaauagu

SEQ ID NO: 1605840 - RNA, 19 nt, Artificial Sequence
  Description of Artificial Sequence: Synthetic oligonucleotide
  Antisense strand to SEQ ID NO: 1605839
acuauucacaauguccaac

SEQ ID NO: 1605841 - RNA, 19 nt, Artificial Sequence
  Description of Artificial Sequence: Synthetic oligonucleotide
  Sense strand starting at position 273 of SEQ ID NO: 1560523
auuccaugcuggcagagaa

SEQ ID NO: 1605842 - RNA, 19 nt, Artificial Sequence
  Description of Artificial Sequence: Synthetic oligonucleotide
  Antisense strand to SEQ ID NO: 1605841
uucucugccagcauggaau

SEQ ID NO: 1605843 - RNA, 19 nt, Artificial Sequence
  Description of Artificial Sequence: Synthetic oligonucleotide
  Sense strand starting at position 356 of SEQ ID NO: 1560523
aguggagagucugguuuga

SEQ ID NO: 1605844 - RNA, 19 nt, Artificial Sequence
  Description of Artificial Sequence: Synthetic oligonucleotide
  Antisense strand to SEQ ID NO: 1605843
ucaaaccagacucuccacu

SEQ ID NO: 1605845 - RNA, 19 nt, Artificial Sequence
  Description of Artificial Sequence: Synthetic oligonucleotide
  Sense strand starting at position 379 of SEQ ID NO: 1560523
ggccgugagggcugaagau

SEQ ID NO: 1605846 - RNA, 19 nt, Artificial Sequence
  Description of Artificial Sequence: Synthetic oligonucleotide
  Antisense strand to SEQ ID NO: 1605845
aucuucagcccucacggcc

SEQ ID NO: 1605847 - RNA, 19 nt, Artificial Sequence
  Description of Artificial Sequence: Synthetic oligonucleotide
  Sense strand starting at position 485 of SEQ ID NO: 1560523
ccagauaagagaugccuga

SEQ ID NO: 1605848 - RNA, 19 nt, Artificial Sequence
  Description of Artificial Sequence: Synthetic oligonucleotide
  Antisense strand to SEQ ID NO: 1605847
ucaggcaucucuuaucugg

SEQ ID NO: 1605849 - RNA, 19 nt, Artificial Sequence
  Description of Artificial Sequence: Synthetic oligonucleotide
  Sense strand starting at position 489 of SEQ ID NO: 1560523
auaagagaugccugaagcu

SEQ ID NO: 1605850 - RNA, 19 nt, Artificial Sequence
  Description of Artificial Sequence: Synthetic oligonucleotide
  Antisense strand to SEQ ID NO: 1605849
agcuucaggcaucucuuau

SEQ ID NO: 1605851 - RNA, 19 nt, Artificial Sequence
  Description of Artificial Sequence: Synthetic oligonucleotide
  Sense strand starting at position 1119 of SEQ ID NO: 1560523
acggucaccucuugcagau

SEQ ID NO: 1605852 - RNA, 19 nt, Artificial Sequence
  Description of Artificial Sequence: Synthetic oligonucleotide
  Antisense strand to SEQ ID NO: 1605851
aucugcaagaggugaccgu

SEQ ID NO: 1605853 - RNA, 19 nt, Artificial Sequence
  Description of Artificial Sequence: Synthetic oligonucleotide
  Sense strand starting at position 1145 of SEQ ID NO: 1560523
gcagccuccuggcuaaaga

SEQ ID NO: 1605854 - RNA, 19 nt, Artificial Sequence
  Description of Artificial Sequence: Synthetic oligonucleotide
  Antisense strand to SEQ ID NO: 1605853
ucuuuagccaggaggcugc

SEQ ID NO: 1605855 - RNA, 19 nt, Artificial Sequence
  Description of Artificial Sequence: Synthetic oligonucleotide
  Sense strand starting at position 1362 of SEQ ID NO: 1560523
gggcaucgccauugauuga

SEQ ID NO: 1605856 - RNA, 19 nt, Artificial Sequence
  Description of Artificial Sequence: Synthetic oligonucleotide
  Antisense strand to SEQ ID NO: 1605855
ucaaucaauggcgaugccc

SEQ ID NO: 1605857 - RNA, 19 nt, Artificial Sequence
  Description of Artificial Sequence: Synthetic oligonucleotide
  Sense strand starting at position 1369 of SEQ ID NO: 1560523
gccauugauugagcuggga

SEQ ID NO: 1605858 - RNA, 19 nt, Artificial Sequence
  Description of Artificial Sequence: Synthetic oligonucleotide
  Antisense strand to SEQ ID NO: 1605857
ucccagcucaaucaauggc

SEQ ID NO: 1605859 - RNA, 19 nt, Artificial Sequence
  Description of Artificial Sequence: Synthetic oligonucleotide
  Sense strand starting at position 1527 of SEQ ID NO: 1560523
cucaccaggucucuaagua

SEQ ID NO: 1605860 - RNA, 19 nt, Artificial Sequence
  Description of Artificial Sequence: Synthetic oligonucleotide
  Antisense strand to SEQ ID NO: 1605859
uacuuagagaccuggugag

SEQ ID NO: 1605861 - RNA, 19 nt, Artificial Sequence
  Description of Artificial Sequence: Synthetic oligonucleotide
  Sense strand starting at position 1528 of SEQ ID NO: 1560523
ucaccaggucucuaaguaa

SEQ ID NO: 1605862 - RNA, 19 nt, Artificial Sequence
  Description of Artificial Sequence: Synthetic oligonucleotide
  Antisense strand to SEQ ID NO: 1605861
uuacuuagagaccugguga

SEQ ID NO: 1605863 - RNA, 19 nt, Artificial Sequence
  Description of Artificial Sequence: Synthetic oligonucleotide
  Sense strand starting at position 1552 of SEQ ID NO: 1560523
ucccuaucauggucaccua

SEQ ID NO: 1605864 - RNA, 19 nt, Artificial Sequence
  Description of Artificial Sequence: Synthetic oligonucleotide
  Antisense strand to SEQ ID NO: 1605863
uaggugaccaugauaggga

SEQ ID NO: 1605865 - RNA, 19 nt, Artificial Sequence
  Description of Artificial Sequence: Synthetic oligonucleotide
  Sense strand starting at position 1610 of SEQ ID NO: 1560523
ggcgcucugugguuaccua

SEQ ID NO: 1605866 - RNA, 19 nt, Artificial Sequence
  Description of Artificial Sequence: Synthetic oligonucleotide
  Antisense strand to SEQ ID NO: 1605865
uagguaaccacagagcgcc

SEQ ID NO: 1605867 - RNA, 19 nt, Artificial Sequence
  Description of Artificial Sequence: Synthetic oligonucleotide
  Sense strand starting at position 1614 of SEQ ID NO: 1560523
cucugugguuaccuagcaa

SEQ ID NO: 1605868 - RNA, 19 nt, Artificial Sequence
  Description of Artificial Sequence: Synthetic oligonucleotide
  Antisense strand to SEQ ID NO: 1605867
uugcuagguaaccacagag

SEQ ID NO: 1605869 - RNA, 19 nt, Artificial Sequence
  Description of Artificial Sequence: Synthetic oligonucleotide
  Sense strand starting at position 1618 of SEQ ID NO: 1560523
gugguuaccuagcaacaaa

SEQ ID NO: 1605870 - RNA, 19 nt, Artificial Sequence
  Description of Artificial Sequence: Synthetic oligonucleotide
  Antisense strand to SEQ ID NO: 1605869
uuuguugcuagguaaccac

SEQ ID NO: 1605871 - RNA, 19 nt, Artificial Sequence
  Description of Artificial Sequence: Synthetic oligonucleotide
  Sense strand starting at position 2276 of SEQ ID NO: 1560523
gcccacuacugcucagaga

SEQ ID NO: 1605872 - RNA, 19 nt, Artificial Sequence
  Description of Artificial Sequence: Synthetic oligonucleotide
  Antisense strand to SEQ ID NO: 1605871
ucucugagcaguagugggc

SEQ ID NO: 1605873 - RNA, 19 nt, Artificial Sequence
  Description of Artificial Sequence: Synthetic oligonucleotide
  Sense strand starting at position 2277 of SEQ ID NO: 1560523
cccacuacugcucagagau

SEQ ID NO: 1605874 - RNA, 19 nt, Artificial Sequence
  Description of Artificial Sequence: Synthetic oligonucleotide
  Antisense strand to SEQ ID NO: 1605873
aucucugagcaguaguggg

SEQ ID NO: 1605875 - RNA, 19 nt, Artificial Sequence
  Description of Artificial Sequence: Synthetic oligonucleotide
  Sense strand starting at position 2297 of SEQ ID NO: 1560523
cuaggaaacuuaguaggua

SEQ ID NO: 1605876 - RNA, 19 nt, Artificial Sequence
  Description of Artificial Sequence: Synthetic oligonucleotide
  Antisense strand to SEQ ID NO: 1605875
uaccuacuaaguuuccuag

SEQ ID NO: 1605877 - RNA, 19 nt, Artificial Sequence
  Description of Artificial Sequence: Synthetic oligonucleotide
  Sense strand starting at position 2310 of SEQ ID NO: 1560523
uagguaggcucucgcgaua

SEQ ID NO: 1605878 - RNA, 19 nt, Artificial Sequence
  Description of Artificial Sequence: Synthetic oligonucleotide
  Antisense strand to SEQ ID NO: 1605877
uaucgcgagagccuaccua

SEQ ID NO: 1605879 - RNA, 19 nt, Artificial Sequence
  Description of Artificial Sequence: Synthetic oligonucleotide
  Sense strand starting at position 2456 of SEQ ID NO: 1560523
cggugaucuuuacugaguc

SEQ ID NO: 1605880 - RNA, 19 nt, Artificial Sequence
  Description of Artificial Sequence: Synthetic oligonucleotide
  Antisense strand to SEQ ID NO: 1605879
gacucaguaaagaucaccg

SEQ ID NO: 1605881 - RNA, 19 nt, Artificial Sequence
  Description of Artificial Sequence: Synthetic oligonucleotide
  Sense strand starting at position 2457 of SEQ ID NO: 1560523
ggugaucuuuacugaguca

SEQ ID NO: 1605882 - RNA, 19 nt, Artificial Sequence
  Description of Artificial Sequence: Synthetic oligonucleotide
  Antisense strand to SEQ ID NO: 1605881
ugacucaguaaagaucacc

SEQ ID NO: 1605883 - RNA, 19 nt, Artificial Sequence
  Description of Artificial Sequence: Synthetic oligonucleotide
  Sense strand starting at position 2460 of SEQ ID NO: 1560523
gaucuuuacugagucagaa

SEQ ID NO: 1605884 - RNA, 19 nt, Artificial Sequence
  Description of Artificial Sequence: Synthetic oligonucleotide
  Antisense strand to SEQ ID NO: 1605883
uucugacucaguaaagauc

SEQ ID NO: 1605885 - RNA, 19 nt, Artificial Sequence
  Description of Artificial Sequence: Synthetic oligonucleotide
  Sense strand starting at position 2539 of SEQ ID NO: 1560523
agaugaucuugucucggga

SEQ ID NO: 1605886 - RNA, 19 nt, Artificial Sequence
  Description of Artificial Sequence: Synthetic oligonucleotide
  Antisense strand to SEQ ID NO: 1605885
ucccgagacaagaucaucu

SEQ ID NO: 1605887 - RNA, 19 nt, Artificial Sequence
  Description of Artificial Sequence: Synthetic oligonucleotide
  Sense strand starting at position 2543 of SEQ ID NO: 1560523
gaucuugucucgggaggga

SEQ ID NO: 1605888 - RNA, 19 nt, Artificial Sequence
  Description of Artificial Sequence: Synthetic oligonucleotide
  Antisense strand to SEQ ID NO: 1605887
ucccucccgagacaagauc

SEQ ID NO: 1605889 - RNA, 19 nt, Artificial Sequence
  Description of Artificial Sequence: Synthetic oligonucleotide
  Sense strand starting at position 2833 of SEQ ID NO: 1560523
gagagagguuaaggaaaua

SEQ ID NO: 1605890 - RNA, 19 nt, Artificial Sequence
  Description of Artificial Sequence: Synthetic oligonucleotide
  Antisense strand to SEQ ID NO: 1605889
uauuuccuuaaccucucuc

SEQ ID NO: 1605891 - RNA, 19 nt, Artificial Sequence
  Description of Artificial Sequence: Synthetic oligonucleotide
  Sense strand starting at position 3268 of SEQ ID NO: 1560523
ccgccaugguguuggaauu

SEQ ID NO: 1605892 - RNA, 19 nt, Artificial Sequence
  Description of Artificial Sequence: Synthetic oligonucleotide
  Antisense strand to SEQ ID NO: 1605891
aauuccaacaccauggcgg

SEQ ID NO: 1605893 - RNA, 19 nt, Artificial Sequence
  Description of Artificial Sequence: Synthetic oligonucleotide
  Sense strand starting at position 3269 of SEQ ID NO: 1560523
cgccaugguguuggaauuu

SEQ ID NO: 1605894 - RNA, 19 nt, Artificial Sequence
  Description of Artificial Sequence: Synthetic oligonucleotide
  Antisense strand to SEQ ID NO: 1605893
aaauuccaacaccauggcg

SEQ ID NO: 1605895 - RNA, 19 nt, Artificial Sequence
  Description of Artificial Sequence: Synthetic oligonucleotide
  Sense strand starting at position 3735 of SEQ ID NO: 1560523
gggcucugcguaaaugguu

SEQ ID NO: 1605896 - RNA, 19 nt, Artificial Sequence
  Description of Artificial Sequence: Synthetic oligonucleotide
  Antisense strand to SEQ ID NO: 1605895
aaccauuuacgcagagccc

SEQ ID NO: 1605897 - RNA, 19 nt, Artificial Sequence
  Description of Artificial Sequence: Synthetic oligonucleotide
  Sense strand starting at position 3877 of SEQ ID NO: 1560523
gggucuuggagagguauua

SEQ ID NO: 1605898 - RNA, 19 nt, Artificial Sequence
  Description of Artificial Sequence: Synthetic oligonucleotide
  Antisense strand to SEQ ID NO: 1605897
uaauaccucuccaagaccc

SEQ ID NO: 1605899 - RNA, 19 nt, Artificial Sequence
  Description of Artificial Sequence: Synthetic oligonucleotide
  Sense strand starting at position 3977 of SEQ ID NO: 1560523
auggguucguccuguuuca

SEQ ID NO: 1605900 - RNA, 19 nt, Artificial Sequence
  Description of Artificial Sequence: Synthetic oligonucleotide
  Antisense strand to SEQ ID NO: 1605899
ugaaacaggacgaacccau

SEQ ID NO: 1605901 - RNA, 19 nt, Artificial Sequence
  Description of Artificial Sequence: Synthetic oligonucleotide
  Sense strand starting at position 411 of SEQ ID NO: 1560524
gugacuuaugaucauguca

SEQ ID NO: 1605902 - RNA, 19 nt, Artificial Sequence
  Description of Artificial Sequence: Synthetic oligonucleotide
  Antisense strand to SEQ ID NO: 1605901
ugacaugaucauaagucac

SEQ ID NO: 1605903 - RNA, 19 nt, Artificial Sequence
  Description of Artificial Sequence: Synthetic oligonucleotide
  Sense strand starting at position 416 of SEQ ID NO: 1560524
uuaugaucaugucacugua

SEQ ID NO: 1605904 - RNA, 19 nt, Artificial Sequence
  Description of Artificial Sequence: Synthetic oligonucleotide
  Antisense strand to SEQ ID NO: 1605903
uacagugacaugaucauaa

SEQ ID NO: 1605905 - RNA, 19 nt, Artificial Sequence
  Description of Artificial Sequence: Synthetic oligonucleotide
  Sense strand starting at position 519 of SEQ ID NO: 1560524
ggagacagcuuugcccaaa

SEQ ID NO: 1605906 - RNA, 19 nt, Artificial Sequence
  Description of Artificial Sequence: Synthetic oligonucleotide
  Antisense strand to SEQ ID NO: 1605905
uuugggcaaagcugucucc

SEQ ID NO: 1605907 - RNA, 19 nt, Artificial Sequence
  Description of Artificial Sequence: Synthetic oligonucleotide
  Sense strand starting at position 700 of SEQ ID NO: 1560524
aagcucuagucucugaaga

SEQ ID NO: 1605908 - RNA, 19 nt, Artificial Sequence
  Description of Artificial Sequence: Synthetic oligonucleotide
  Antisense strand to SEQ ID NO: 1605907
ucuucagagacuagagcuu

SEQ ID NO: 1605909 - RNA, 19 nt, Artificial Sequence
  Description of Artificial Sequence: Synthetic oligonucleotide
  Sense strand starting at position 701 of SEQ ID NO: 1560524
agcucuagucucugaagau

SEQ ID NO: 1605910 - RNA, 19 nt, Artificial Sequence
  Description of Artificial Sequence: Synthetic oligonucleotide
  Antisense strand to SEQ ID NO: 1605909
aucuucagagacuagagcu

SEQ ID NO: 1605911 - RNA, 19 nt, Artificial Sequence
  Description of Artificial Sequence: Synthetic oligonucleotide
  Sense strand starting at position 702 of SEQ ID NO: 1560524
gcucuagucucugaagaug

SEQ ID NO: 1605912 - RNA, 19 nt, Artificial Sequence
  Description of Artificial Sequence: Synthetic oligonucleotide
  Antisense strand to SEQ ID NO: 1605911
caucuucagagacuagagc

SEQ ID NO: 1605913 - RNA, 19 nt, Artificial Sequence
  Description of Artificial Sequence: Synthetic oligonucleotide
  Sense strand starting at position 935 of SEQ ID NO: 1560524
ggaacaaggucuugcauuu

SEQ ID NO: 1605914 - RNA, 19 nt, Artificial Sequence
  Description of Artificial Sequence: Synthetic oligonucleotide
  Antisense strand to SEQ ID NO: 1605913
aaaugcaagaccuuguucc

SEQ ID NO: 1605915 - RNA, 19 nt, Artificial Sequence
  Description of Artificial Sequence: Synthetic oligonucleotide
  Sense strand starting at position 1030 of SEQ ID NO: 1560524
ccuccucacucggcaaauu

SEQ ID NO: 1605916 - RNA, 19 nt, Artificial Sequence
  Description of Artificial Sequence: Synthetic oligonucleotide
  Antisense strand to SEQ ID NO: 1605915
aauuugccgagugaggagg

SEQ ID NO: 1605917 - RNA, 19 nt, Artificial Sequence
  Description of Artificial Sequence: Synthetic oligonucleotide
  Sense strand starting at position 1148 of SEQ ID NO: 1560524
uccaguauccaucaguaca

SEQ ID NO: 1605918 - RNA, 19 nt, Artificial Sequence
  Description of Artificial Sequence: Synthetic oligonucleotide
  Antisense strand to SEQ ID NO: 1605917
uguacugauggauacugga

SEQ ID NO: 1605919 - RNA, 19 nt, Artificial Sequence
  Description of Artificial Sequence: Synthetic oligonucleotide
  Sense strand starting at position 1151 of SEQ ID NO: 1560524
aguauccaucaguacagua

SEQ ID NO: 1605920 - RNA, 19 nt, Artificial Sequence
  Description of Artificial Sequence: Synthetic oligonucleotide
  Antisense strand to SEQ ID NO: 1605919
uacuguacugauggauacu

SEQ ID NO: 1605921 - RNA, 19 nt, Artificial Sequence
  Description of Artificial Sequence: Synthetic oligonucleotide
  Sense strand starting at position 1269 of SEQ ID NO: 1560524
cagcucauguucucugaga

SEQ ID NO: 1605922 - RNA, 19 nt, Artificial Sequence
  Description of Artificial Sequence: Synthetic oligonucleotide
  Antisense strand to SEQ ID NO: 1605921
ucucagagaacaugagcug

SEQ ID NO: 1605923 - RNA, 19 nt, Artificial Sequence
  Description of Artificial Sequence: Synthetic oligonucleotide
  Sense strand starting at position 1270 of SEQ ID NO: 1560524
agcucauguucucugagac

SEQ ID NO: 1605924 - RNA, 19 nt, Artificial Sequence
  Description of Artificial Sequence: Synthetic oligonucleotide
  Antisense strand to SEQ ID NO: 1605923
gucucagagaacaugagcu

SEQ ID NO: 1605925 - RNA, 19 nt, Artificial Sequence
  Description of Artificial Sequence: Synthetic oligonucleotide
  Sense strand starting at position 1425 of SEQ ID NO: 1560524
gcgugacccugugagucua

SEQ ID NO: 1605926 - RNA, 19 nt, Artificial Sequence
  Description of Artificial Sequence: Synthetic oligonucleotide
  Antisense strand to SEQ ID NO: 1605925
uagacucacagggucacgc

SEQ ID NO: 1605927 - RNA, 19 nt, Artificial Sequence
  Description of Artificial Sequence: Synthetic oligonucleotide
  Sense strand starting at position 1530 of SEQ ID NO: 1560524
gucuucugauccugacaca

SEQ ID NO: 1605928 - RNA, 19 nt, Artificial Sequence
  Description of Artificial Sequence: Synthetic oligonucleotide
  Antisense strand to SEQ ID NO: 1605927
ugugucaggaucagaagac

SEQ ID NO: 1605929 - RNA, 19 nt, Artificial Sequence
  Description of Artificial Sequence: Synthetic oligonucleotide
  Sense strand starting at position 1699 of SEQ ID NO: 1560524
ggauuagggugucccugua

SEQ ID NO: 1605930 - RNA, 19 nt, Artificial Sequence
  Description of Artificial Sequence: Synthetic oligonucleotide
  Antisense strand to SEQ ID NO: 1605929
uacagggacacccuaaucc

SEQ ID NO: 1605931 - RNA, 19 nt, Artificial Sequence
  Description of Artificial Sequence: Synthetic oligonucleotide
  Sense strand starting at position 1711 of SEQ ID NO: 1560524
cccuguaucuaggcugaaa

SEQ ID NO: 1605932 - RNA, 19 nt, Artificial Sequence
  Description of Artificial Sequence: Synthetic oligonucleotide
  Antisense strand to SEQ ID NO: 1605931
uuucagccuagauacaggg

SEQ ID NO: 1605933 - RNA, 19 nt, Artificial Sequence
  Description of Artificial Sequence: Synthetic oligonucleotide
  Sense strand starting at position 2593 of SEQ ID NO: 1560524
ccgcaaguaauccauguga

SEQ ID NO: 1605934 - RNA, 19 nt, Artificial Sequence
  Description of Artificial Sequence: Synthetic oligonucleotide
  Antisense strand to SEQ ID NO: 1605933
ucacauggauuacuugcgg

SEQ ID NO: 1605935 - RNA, 19 nt, Artificial Sequence
  Description of Artificial Sequence: Synthetic oligonucleotide
  Sense strand starting at position 2595 of SEQ ID NO: 1560524
gcaaguaauccaugugauc

SEQ ID NO: 1605936 - RNA, 19 nt, Artificial Sequence
  Description of Artificial Sequence: Synthetic oligonucleotide
  Antisense strand to SEQ ID NO: 1605935
gaucacauggauuacuugc

SEQ ID NO: 1605937 - RNA, 19 nt, Artificial Sequence
  Description of Artificial Sequence: Synthetic oligonucleotide
  Sense strand starting at position 2729 of SEQ ID NO: 1560524
ggcucauacacucggaacu

SEQ ID NO: 1605938 - RNA, 19 nt, Artificial Sequence
  Description of Artificial Sequence: Synthetic oligonucleotide
  Antisense strand to SEQ ID NO: 1605937
aguuccgaguguaugagcc

SEQ ID NO: 1605939 - RNA, 19 nt, Artificial Sequence
  Description of Artificial Sequence: Synthetic oligonucleotide
  Sense strand starting at position 2920 of SEQ ID NO: 1560524
uggugaggccuguguguua

SEQ ID NO: 1605940 - RNA, 19 nt, Artificial Sequence
  Description of Artificial Sequence: Synthetic oligonucleotide
  Antisense strand to SEQ ID NO: 1605939
uaacacacaggccucacca

SEQ ID NO: 1605941 - RNA, 19 nt, Artificial Sequence
  Description of Artificial Sequence: Synthetic oligonucleotide
  Sense strand starting at position 3085 of SEQ ID NO: 1560524
aaauuagugaggcgugaua

SEQ ID NO: 1605942 - RNA, 19 nt, Artificial Sequence
  Description of Artificial Sequence: Synthetic oligonucleotide
  Antisense strand to SEQ ID NO: 1605941
uaucacgccucacuaauuu

SEQ ID NO: 1605943 - RNA, 19 nt, Artificial Sequence
  Description of Artificial Sequence: Synthetic oligonucleotide
  Sense strand starting at position 3087 of SEQ ID NO: 1560524
auuagugaggcgugauagu

SEQ ID NO: 1605944 - RNA, 19 nt, Artificial Sequence
  Description of Artificial Sequence: Synthetic oligonucleotide
  Antisense strand to SEQ ID NO: 1605943
acuaucacgccucacuaau

SEQ ID NO: 1605945 - RNA, 19 nt, Artificial Sequence
  Description of Artificial Sequence: Synthetic oligonucleotide
  Sense strand starting at position 3777 of SEQ ID NO: 1560524
acagacacuguuuaauagu

SEQ ID NO: 1605946 - RNA, 19 nt, Artificial Sequence
  Description of Artificial Sequence: Synthetic oligonucleotide
  Antisense strand to SEQ ID NO: 1605945
acuauuaaacagugucugu

SEQ ID NO: 1605947 - RNA, 19 nt, Artificial Sequence
  Description of Artificial Sequence: Synthetic oligonucleotide
  Sense strand starting at position 3783 of SEQ ID NO: 1560524
acuguuuaauaguuugaca

SEQ ID NO: 1605948 - RNA, 19 nt, Artificial Sequence
  Description of Artificial Sequence: Synthetic oligonucleotide
  Antisense strand to SEQ ID NO: 1605947
ugucaaacuauuaaacagu

SEQ ID NO: 1605949 - RNA, 19 nt, Artificial Sequence
  Description of Artificial Sequence: Synthetic oligonucleotide
  Sense strand starting at position 3786 of SEQ ID NO: 1560524
guuuaauaguuugacaugu

SEQ ID NO: 1605950 - RNA, 19 nt, Artificial Sequence
  Description of Artificial Sequence: Synthetic oligonucleotide
  Antisense strand to SEQ ID NO: 1605949
acaugucaaacuauuaaac

SEQ ID NO: 1605951 - RNA, 19 nt, Artificial Sequence
  Description of Artificial Sequence: Synthetic oligonucleotide
  Sense strand starting at position 3788 of SEQ ID NO: 1560524
uuaauaguuugacauguuc

SEQ ID NO: 1605952 - RNA, 19 nt, Artificial Sequence
  Description of Artificial Sequence: Synthetic oligonucleotide
  Antisense strand to SEQ ID NO: 1605951
gaacaugucaaacuauuaa

SEQ ID NO: 1605953 - RNA, 19 nt, Artificial Sequence
  Description of Artificial Sequence: Synthetic oligonucleotide
  Sense strand starting at position 3803 of SEQ ID NO: 1560524
guucuuuccgcuguuugua

SEQ ID NO: 1605954 - RNA, 19 nt, Artificial Sequence
  Description of Artificial Sequence: Synthetic oligonucleotide
  Antisense strand to SEQ ID NO: 1605953
uacaaacagcggaaagaac

SEQ ID NO: 1605955 - RNA, 19 nt, Artificial Sequence
  Description of Artificial Sequence: Synthetic oligonucleotide
  Sense strand starting at position 3804 of SEQ ID NO: 1560524
uucuuuccgcuguuuguaa

SEQ ID NO: 1605956 - RNA, 19 nt, Artificial Sequence
  Description of Artificial Sequence: Synthetic oligonucleotide
  Antisense strand to SEQ ID NO: 1605955
uuacaaacagcggaaagaa

SEQ ID NO: 1605957 - RNA, 19 nt, Artificial Sequence
  Description of Artificial Sequence: Synthetic oligonucleotide
  Sense strand starting at position 3811 of SEQ ID NO: 1560524
cgcuguuuguaacuuguga

SEQ ID NO: 1605958 - RNA, 19 nt, Artificial Sequence
  Description of Artificial Sequence: Synthetic oligonucleotide
  Antisense strand to SEQ ID NO: 1605957
ucacaaguuacaaacagcg

SEQ ID NO: 1605959 - RNA, 19 nt, Artificial Sequence
  Description of Artificial Sequence: Synthetic oligonucleotide
  Sense strand starting at position 3813 of SEQ ID NO: 1560524
cuguuuguaacuugugauu

SEQ ID NO: 1605960 - RNA, 19 nt, Artificial Sequence
  Description of Artificial Sequence: Synthetic oligonucleotide
  Antisense strand to SEQ ID NO: 1605959
aaucacaaguuacaaacag

SEQ ID NO: 1605961 - RNA, 19 nt, Artificial Sequence
  Description of Artificial Sequence: Synthetic oligonucleotide
  Sense strand starting at position 3856 of SEQ ID NO: 1560524
uuauaaagcuggcauaauu

SEQ ID NO: 1605962 - RNA, 19 nt, Artificial Sequence
  Description of Artificial Sequence: Synthetic oligonucleotide
  Antisense strand to SEQ ID NO: 1605961
aauuaugccagcuuuauaa

SEQ ID NO: 1605963 - RNA, 19 nt, Artificial Sequence
  Description of Artificial Sequence: Synthetic oligonucleotide
  Sense strand starting at position 3882 of SEQ ID NO: 1560524
ggcugaacaucuuguuugu

SEQ ID NO: 1605964 - RNA, 19 nt, Artificial Sequence
  Description of Artificial Sequence: Synthetic oligonucleotide
  Antisense strand to SEQ ID NO: 1605963
acaaacaagauguucagcc

SEQ ID NO: 1605965 - RNA, 19 nt, Artificial Sequence
  Description of Artificial Sequence: Synthetic oligonucleotide
  Sense strand starting at position 3884 of SEQ ID NO: 1560524
cugaacaucuuguuuguaa

SEQ ID NO: 1605966 - RNA, 19 nt, Artificial Sequence
  Description of Artificial Sequence: Synthetic oligonucleotide
  Antisense strand to SEQ ID NO: 1605965
uuacaaacaagauguucag

SEQ ID NO: 1605967 - RNA, 19 nt, Artificial Sequence
  Description of Artificial Sequence: Synthetic oligonucleotide
  Sense strand starting at position 3885 of SEQ ID NO: 1560524
ugaacaucuuguuuguaac

SEQ ID NO: 1605968 - RNA, 19 nt, Artificial Sequence
  Description of Artificial Sequence: Synthetic oligonucleotide
  Antisense strand to SEQ ID NO: 1605967
guuacaaacaagauguuca

SEQ ID NO: 1605969 - RNA, 19 nt, Artificial Sequence
  Description of Artificial Sequence: Synthetic oligonucleotide
  Sense strand starting at position 3888 of SEQ ID NO: 1560524
acaucuuguuuguaaccua

SEQ ID NO: 1605970 - RNA, 19 nt, Artificial Sequence
  Description of Artificial Sequence: Synthetic oligonucleotide
  Antisense strand to SEQ ID NO: 1605969
uagguuacaaacaagaugu

SEQ ID NO: 1605971 - RNA, 19 nt, Artificial Sequence
  Description of Artificial Sequence: Synthetic oligonucleotide
  Sense strand starting at position 3891 of SEQ ID NO: 1560524
ucuuguuuguaaccuagau

SEQ ID NO: 1605972 - RNA, 19 nt, Artificial Sequence
  Description of Artificial Sequence: Synthetic oligonucleotide
  Antisense strand to SEQ ID NO: 1605971
aucuagguuacaaacaaga

SEQ ID NO: 1605973 - RNA, 19 nt, Artificial Sequence
  Description of Artificial Sequence: Synthetic oligonucleotide
  Sense strand starting at position 2058 of SEQ ID NO: 1560525
acggaagugcgcuccgauu

SEQ ID NO: 1605974 - RNA, 19 nt, Artificial Sequence
  Description of Artificial Sequence: Synthetic oligonucleotide
  Antisense strand to SEQ ID NO: 1605973
aaucggagcgcacuuccgu

SEQ ID NO: 1605975 - RNA, 19 nt, Artificial Sequence
  Description of Artificial Sequence: Synthetic oligonucleotide
  Sense strand starting at position 2157 of SEQ ID NO: 1560525
aagcgcguguccuuguaaa

SEQ ID NO: 1605976 - RNA, 19 nt, Artificial Sequence
  Description of Artificial Sequence: Synthetic oligonucleotide
  Antisense strand to SEQ ID NO: 1605975
uuuacaaggacacgcgcuu

SEQ ID NO: 1605977 - RNA, 19 nt, Artificial Sequence
  Description of Artificial Sequence: Synthetic oligonucleotide
  Sense strand starting at position 2159 of SEQ ID NO: 1560525
gcgcguguccuuguaaaca

SEQ ID NO: 1605978 - RNA, 19 nt, Artificial Sequence
  Description of Artificial Sequence: Synthetic oligonucleotide
  Antisense strand to SEQ ID NO: 1605977
uguuuacaaggacacgcgc

SEQ ID NO: 1605979 - RNA, 19 nt, Artificial Sequence
  Description of Artificial Sequence: Synthetic oligonucleotide
  Sense strand starting at position 2311 of SEQ ID NO: 1560525
ggaguccacugggacaaau

SEQ ID NO: 1605980 - RNA, 19 nt, Artificial Sequence
  Description of Artificial Sequence: Synthetic oligonucleotide
  Antisense strand to SEQ ID NO: 1605979
auuugucccaguggacucc

SEQ ID NO: 1605981 - RNA, 19 nt, Artificial Sequence
  Description of Artificial Sequence: Synthetic oligonucleotide
  Sense strand starting at position 2365 of SEQ ID NO: 1560525
cccaguaugugcgaagaaa

SEQ ID NO: 1605982 - RNA, 19 nt, Artificial Sequence
  Description of Artificial Sequence: Synthetic oligonucleotide
  Antisense strand to SEQ ID NO: 1605981
uuucuucgcacauacuggg

SEQ ID NO: 1605983 - RNA, 19 nt, Artificial Sequence
  Description of Artificial Sequence: Synthetic oligonucleotide
  Sense strand starting at position 2458 of SEQ ID NO: 1560525
aggguuaagcacuguaaau

SEQ ID NO: 1605984 - RNA, 19 nt, Artificial Sequence
  Description of Artificial Sequence: Synthetic oligonucleotide
  Antisense strand to SEQ ID NO: 1605983
auuuacagugcuuaacccu

SEQ ID NO: 1605985 - RNA, 19 nt, Artificial Sequence
  Description of Artificial Sequence: Synthetic oligonucleotide
  Sense strand starting at position 2468 of SEQ ID NO: 1560525
acuguaaaucgggaggguu

SEQ ID NO: 1605986 - RNA, 19 nt, Artificial Sequence
  Description of Artificial Sequence: Synthetic oligonucleotide
  Antisense strand to SEQ ID NO: 1605985
aacccucccgauuuacagu

SEQ ID NO: 1605987 - RNA, 19 nt, Artificial Sequence
  Description of Artificial Sequence: Synthetic oligonucleotide
  Sense strand starting at position 2470 of SEQ ID NO: 1560525
uguaaaucgggaggguuaa

SEQ ID NO: 1605988 - RNA, 19 nt, Artificial Sequence
  Description of Artificial Sequence: Synthetic oligonucleotide
  Antisense strand to SEQ ID NO: 1605987
uuaacccucccgauuuaca

SEQ ID NO: 1605989 - RNA, 19 nt, Artificial Sequence
  Description of Artificial Sequence: Synthetic oligonucleotide
  Sense strand starting at position 2706 of SEQ ID NO: 1560525
aagucuagauaugcagaaa

SEQ ID NO: 1605990 - RNA, 19 nt, Artificial Sequence
  Description of Artificial Sequence: Synthetic oligonucleotide
  Antisense strand to SEQ ID NO: 1605989
uuucugcauaucuagacuu

SEQ ID NO: 1605991 - RNA, 19 nt, Artificial Sequence
  Description of Artificial Sequence: Synthetic oligonucleotide
  Sense strand starting at position 2709 of SEQ ID NO: 1560525
ucuagauaugcagaaagcu

SEQ ID NO: 1605992 - RNA, 19 nt, Artificial Sequence
  Description of Artificial Sequence: Synthetic oligonucleotide
  Antisense strand to SEQ ID NO: 1605991
agcuuucugcauaucuaga

SEQ ID NO: 1605993 - RNA, 19 nt, Artificial Sequence
  Description of Artificial Sequence: Synthetic oligonucleotide
  Sense strand starting at position 2779 of SEQ ID NO: 1560525
uggagacaugucugccaga

SEQ ID NO: 1605994 - RNA, 19 nt, Artificial Sequence
  Description of Artificial Sequence: Synthetic oligonucleotide
  Antisense strand to SEQ ID NO: 1605993
ucuggcagacaugucucca

SEQ ID NO: 1605995 - RNA, 19 nt, Artificial Sequence
  Description of Artificial Sequence: Synthetic oligonucleotide
  Sense strand starting at position 2780 of SEQ ID NO: 1560525
ggagacaugucugccagaa

SEQ ID NO: 1605996 - RNA, 19 nt, Artificial Sequence
  Description of Artificial Sequence: Synthetic oligonucleotide
  Antisense strand to SEQ ID NO: 1605995
uucuggcagacaugucucc

SEQ ID NO: 1605997 - RNA, 19 nt, Artificial Sequence
  Description of Artificial Sequence: Synthetic oligonucleotide
  Sense strand starting at position 2782 of SEQ ID NO: 1560525
agacaugucugccagaaau

SEQ ID NO: 1605998 - RNA, 19 nt, Artificial Sequence
  Description of Artificial Sequence: Synthetic oligonucleotide
  Antisense strand to SEQ ID NO: 1605997
auuucuggcagacaugucu

SEQ ID NO: 1605999 - RNA, 19 nt, Artificial Sequence
  Description of Artificial Sequence: Synthetic oligonucleotide
  Sense strand starting at position 2784 of SEQ ID NO: 1560525
acaugucugccagaaauug

SEQ ID NO: 1606000 - RNA, 19 nt, Artificial Sequence
  Description of Artificial Sequence: Synthetic oligonucleotide
  Antisense strand to SEQ ID NO: 1605999
caauuucuggcagacaugu

SEQ ID NO: 1606001 - RNA, 19 nt, Artificial Sequence
  Description of Artificial Sequence: Synthetic oligonucleotide
  Sense strand starting at position 2858 of SEQ ID NO: 1560525
gacacaucuucggagcaga

SEQ ID NO: 1606002 - RNA, 19 nt, Artificial Sequence
  Description of Artificial Sequence: Synthetic oligonucleotide
  Antisense strand to SEQ ID NO: 1606001
ucugcuccgaagauguguc

SEQ ID NO: 1606003 - RNA, 19 nt, Artificial Sequence
  Description of Artificial Sequence: Synthetic oligonucleotide
  Sense strand starting at position 2889 of SEQ ID NO: 1560525
aggguacucaguugacaug

SEQ ID NO: 1606004 - RNA, 19 nt, Artificial Sequence
  Description of Artificial Sequence: Synthetic oligonucleotide
  Antisense strand to SEQ ID NO: 1606003
caugucaacugaguacccu

SEQ ID NO: 1606005 - RNA, 19 nt, Artificial Sequence
  Description of Artificial Sequence: Synthetic oligonucleotide
  Sense strand starting at position 2892 of SEQ ID NO: 1560525
guacucaguugacauguga

SEQ ID NO: 1606006 - RNA, 19 nt, Artificial Sequence
  Description of Artificial Sequence: Synthetic oligonucleotide
  Antisense strand to SEQ ID NO: 1606005
ucacaugucaacugaguac

SEQ ID NO: 1606007 - RNA, 19 nt, Artificial Sequence
  Description of Artificial Sequence: Synthetic oligonucleotide
  Sense strand starting at position 2972 of SEQ ID NO: 1560525
ccucgaugguaaccucuua

SEQ ID NO: 1606008 - RNA, 19 nt, Artificial Sequence
  Description of Artificial Sequence: Synthetic oligonucleotide
  Antisense strand to SEQ ID NO: 1606007
uaagagguuaccaucgagg

SEQ ID NO: 1606009 - RNA, 19 nt, Artificial Sequence
  Description of Artificial Sequence: Synthetic oligonucleotide
  Sense strand starting at position 2977 of SEQ ID NO: 1560525
augguaaccucuuagucau

SEQ ID NO: 1606010 - RNA, 19 nt, Artificial Sequence
  Description of Artificial Sequence: Synthetic oligonucleotide
  Antisense strand to SEQ ID NO: 1606009
augacuaagagguuaccau

SEQ ID NO: 1606011 - RNA, 19 nt, Artificial Sequence
  Description of Artificial Sequence: Synthetic oligonucleotide
  Sense strand starting at position 2983 of SEQ ID NO: 1560525
accucuuagucaucuguau

SEQ ID NO: 1606012 - RNA, 19 nt, Artificial Sequence
  Description of Artificial Sequence: Synthetic oligonucleotide
  Antisense strand to SEQ ID NO: 1606011
auacagaugacuaagaggu

SEQ ID NO: 1606013 - RNA, 19 nt, Artificial Sequence
  Description of Artificial Sequence: Synthetic oligonucleotide
  Sense strand starting at position 3415 of SEQ ID NO: 1560525
gaguguuccauuggcccga

SEQ ID NO: 1606014 - RNA, 19 nt, Artificial Sequence
  Description of Artificial Sequence: Synthetic oligonucleotide
  Antisense strand to SEQ ID NO: 1606013
ucgggccaauggaacacuc

SEQ ID NO: 1606015 - RNA, 19 nt, Artificial Sequence
  Description of Artificial Sequence: Synthetic oligonucleotide
  Sense strand starting at position 3961 of SEQ ID NO: 1560525
cccacucacucaugugagu

SEQ ID NO: 1606016 - RNA, 19 nt, Artificial Sequence
  Description of Artificial Sequence: Synthetic oligonucleotide
  Antisense strand to SEQ ID NO: 1606015
acucacaugagugaguggg

SEQ ID NO: 1606017 - RNA, 19 nt, Artificial Sequence
  Description of Artificial Sequence: Synthetic oligonucleotide
  Sense strand starting at position 329 of SEQ ID NO: 1560526
caacguuuguucccgagua

SEQ ID NO: 1606018 - RNA, 19 nt, Artificial Sequence
  Description of Artificial Sequence: Synthetic oligonucleotide
  Antisense strand to SEQ ID NO: 1606017
uacucgggaacaaacguug

SEQ ID NO: 1606019 - RNA, 19 nt, Artificial Sequence
  Description of Artificial Sequence: Synthetic oligonucleotide
  Sense strand starting at position 330 of SEQ ID NO: 1560526
aacguuuguucccgaguag

SEQ ID NO: 1606020 - RNA, 19 nt, Artificial Sequence
  Description of Artificial Sequence: Synthetic oligonucleotide
  Antisense strand to SEQ ID NO: 1606019
cuacucgggaacaaacguu

SEQ ID NO: 1606021 - RNA, 19 nt, Artificial Sequence
  Description of Artificial Sequence: Synthetic oligonucleotide
  Sense strand starting at position 331 of SEQ ID NO: 1560526
acguuuguucccgaguaga

SEQ ID NO: 1606022 - RNA, 19 nt, Artificial Sequence
  Description of Artificial Sequence: Synthetic oligonucleotide
  Antisense strand to SEQ ID NO: 1606021
ucuacucgggaacaaacgu

SEQ ID NO: 1606023 - RNA, 19 nt, Artificial Sequence
  Description of Artificial Sequence: Synthetic oligonucleotide
  Sense strand starting at position 334 of SEQ ID NO: 1560526
uuuguucccgaguagaaac

SEQ ID NO: 1606024 - RNA, 19 nt, Artificial Sequence
  Description of Artificial Sequence: Synthetic oligonucleotide
  Antisense strand to SEQ ID NO: 1606023
guuucuacucgggaacaaa

SEQ ID NO: 1606025 - RNA, 19 nt, Artificial Sequence
  Description of Artificial Sequence: Synthetic oligonucleotide
  Sense strand starting at position 650 of SEQ ID NO: 1560526
cucugaguuccugggcaca

SEQ ID NO: 1606026 - RNA, 19 nt, Artificial Sequence
  Description of Artificial Sequence: Synthetic oligonucleotide
  Antisense strand to SEQ ID NO: 1606025
ugugcccaggaacucagag

SEQ ID NO: 1606027 - RNA, 19 nt, Artificial Sequence
  Description of Artificial Sequence: Synthetic oligonucleotide
  Sense strand starting at position 652 of SEQ ID NO: 1560526
cugaguuccugggcacacu

SEQ ID NO: 1606028 - RNA, 19 nt, Artificial Sequence
  Description of Artificial Sequence: Synthetic oligonucleotide
  Antisense strand to SEQ ID NO: 1606027
agugugcccaggaacucag

SEQ ID NO: 1606029 - RNA, 19 nt, Artificial Sequence
  Description of Artificial Sequence: Synthetic oligonucleotide
  Sense strand starting at position 907 of SEQ ID NO: 1560526
uguucugacucuugagggu

SEQ ID NO: 1606030 - RNA, 19 nt, Artificial Sequence
  Description of Artificial Sequence: Synthetic oligonucleotide
  Antisense strand to SEQ ID NO: 1606029
acccucaagagucagaaca

SEQ ID NO: 1606031 - RNA, 19 nt, Artificial Sequence
  Description of Artificial Sequence: Synthetic oligonucleotide
  Sense strand starting at position 946 of SEQ ID NO: 1560526
gcgagaugcgcuccagcuu

SEQ ID NO: 1606032 - RNA, 19 nt, Artificial Sequence
  Description of Artificial Sequence: Synthetic oligonucleotide
  Antisense strand to SEQ ID NO: 1606031
aagcuggagcgcaucucgc

SEQ ID NO: 1606033 - RNA, 19 nt, Artificial Sequence
  Description of Artificial Sequence: Synthetic oligonucleotide
  Sense strand starting at position 1372 of SEQ ID NO: 1560526
gcugguucugcuuguguaa

SEQ ID NO: 1606034 - RNA, 19 nt, Artificial Sequence
  Description of Artificial Sequence: Synthetic oligonucleotide
  Antisense strand to SEQ ID NO: 1606033
uuacacaagcagaaccagc

SEQ ID NO: 1606035 - RNA, 19 nt, Artificial Sequence
  Description of Artificial Sequence: Synthetic oligonucleotide
  Sense strand starting at position 1374 of SEQ ID NO: 1560526
ugguucugcuuguguaaau

SEQ ID NO: 1606036 - RNA, 19 nt, Artificial Sequence
  Description of Artificial Sequence: Synthetic oligonucleotide
  Antisense strand to SEQ ID NO: 1606035
auuuacacaagcagaacca

SEQ ID NO: 1606037 - RNA, 19 nt, Artificial Sequence
  Description of Artificial Sequence: Synthetic oligonucleotide
  Sense strand starting at position 1375 of SEQ ID NO: 1560526
gguucugcuuguguaaauc

SEQ ID NO: 1606038 - RNA, 19 nt, Artificial Sequence
  Description of Artificial Sequence: Synthetic oligonucleotide
  Antisense strand to SEQ ID NO: 1606037
gauuuacacaagcagaacc

SEQ ID NO: 1606039 - RNA, 19 nt, Artificial Sequence
  Description of Artificial Sequence: Synthetic oligonucleotide
  Sense strand starting at position 1492 of SEQ ID NO: 1560526
gcccguuggacuggaugau

SEQ ID NO: 1606040 - RNA, 19 nt, Artificial Sequence
  Description of Artificial Sequence: Synthetic oligonucleotide
  Antisense strand to SEQ ID NO: 1606039
aucauccaguccaacgggc

SEQ ID NO: 1606041 - RNA, 19 nt, Artificial Sequence
  Description of Artificial Sequence: Synthetic oligonucleotide
  Sense strand starting at position 1798 of SEQ ID NO: 1560526
gcgccucaucgccguagaa

SEQ ID NO: 1606042 - RNA, 19 nt, Artificial Sequence
  Description of Artificial Sequence: Synthetic oligonucleotide
  Antisense strand to SEQ ID NO: 1606041
uucuacggcgaugaggcgc

SEQ ID NO: 1606043 - RNA, 19 nt, Artificial Sequence
  Description of Artificial Sequence: Synthetic oligonucleotide
  Sense strand starting at position 1811 of SEQ ID NO: 1560526
guagaaggguguuuccauc

SEQ ID NO: 1606044 - RNA, 19 nt, Artificial Sequence
  Description of Artificial Sequence: Synthetic oligonucleotide
  Antisense strand to SEQ ID NO: 1606043
gauggaaacacccuucuac

SEQ ID NO: 1606045 - RNA, 19 nt, Artificial Sequence
  Description of Artificial Sequence: Synthetic oligonucleotide
  Sense strand starting at position 1977 of SEQ ID NO: 1560526
acuugugcgcccucuuaua

SEQ ID NO: 1606046 - RNA, 19 nt, Artificial Sequence
  Description of Artificial Sequence: Synthetic oligonucleotide
  Antisense strand to SEQ ID NO: 1606045
uauaagagggcgcacaagu

SEQ ID NO: 1606047 - RNA, 19 nt, Artificial Sequence
  Description of Artificial Sequence: Synthetic oligonucleotide
  Sense strand starting at position 2043 of SEQ ID NO: 1560526
gcgggugacgucgcucauu

SEQ ID NO: 1606048 - RNA, 19 nt, Artificial Sequence
  Description of Artificial Sequence: Synthetic oligonucleotide
  Antisense strand to SEQ ID NO: 1606047
aaugagcgacgucacccgc

SEQ ID NO: 1606049 - RNA, 19 nt, Artificial Sequence
  Description of Artificial Sequence: Synthetic oligonucleotide
  Sense strand starting at position 2044 of SEQ ID NO: 1560526
cgggugacgucgcucauuu

SEQ ID NO: 1606050 - RNA, 19 nt, Artificial Sequence
  Description of Artificial Sequence: Synthetic oligonucleotide
  Antisense strand to SEQ ID NO: 1606049
aaaugagcgacgucacccg

SEQ ID NO: 1606051 - RNA, 19 nt, Artificial Sequence
  Description of Artificial Sequence: Synthetic oligonucleotide
  Sense strand starting at position 2595 of SEQ ID NO: 1560526
gcgugugauugcucaggaa

SEQ ID NO: 1606052 - RNA, 19 nt, Artificial Sequence
  Description of Artificial Sequence: Synthetic oligonucleotide
  Antisense strand to SEQ ID NO: 1606051
uuccugagcaaucacacgc

SEQ ID NO: 1606053 - RNA, 19 nt, Artificial Sequence
  Description of Artificial Sequence: Synthetic oligonucleotide
  Sense strand starting at position 2655 of SEQ ID NO: 1560526
gcgcuuggauccugaucau

SEQ ID NO: 1606054 - RNA, 19 nt, Artificial Sequence
  Description of Artificial Sequence: Synthetic oligonucleotide
  Antisense strand to SEQ ID NO: 1606053
augaucaggauccaagcgc

SEQ ID NO: 1606055 - RNA, 19 nt, Artificial Sequence
  Description of Artificial Sequence: Synthetic oligonucleotide
  Sense strand starting at position 2713 of SEQ ID NO: 1560526
ugccuuuacagaugggaaa

SEQ ID NO: 1606056 - RNA, 19 nt, Artificial Sequence
  Description of Artificial Sequence: Synthetic oligonucleotide
  Antisense strand to SEQ ID NO: 1606055
uuucccaucuguaaaggca

SEQ ID NO: 1606057 - RNA, 19 nt, Artificial Sequence
  Description of Artificial Sequence: Synthetic oligonucleotide
  Sense strand starting at position 2762 of SEQ ID NO: 1560526
ccgagaguuagcuaggagu

SEQ ID NO: 1606058 - RNA, 19 nt, Artificial Sequence
  Description of Artificial Sequence: Synthetic oligonucleotide
  Antisense strand to SEQ ID NO: 1606057
acuccuagcuaacucucgg

SEQ ID NO: 1606059 - RNA, 19 nt, Artificial Sequence
  Description of Artificial Sequence: Synthetic oligonucleotide
  Sense strand starting at position 2764 of SEQ ID NO: 1560526
gagaguuagcuaggaguca

SEQ ID NO: 1606060 - RNA, 19 nt, Artificial Sequence
  Description of Artificial Sequence: Synthetic oligonucleotide
  Antisense strand to SEQ ID NO: 1606059
ugacuccuagcuaacucuc

SEQ ID NO: 1606061 - RNA, 19 nt, Artificial Sequence
  Description of Artificial Sequence: Synthetic oligonucleotide
  Sense strand starting at position 2910 of SEQ ID NO: 1560526
gcugugauguccugggcga

SEQ ID NO: 1606062 - RNA, 19 nt, Artificial Sequence
  Description of Artificial Sequence: Synthetic oligonucleotide
  Antisense strand to SEQ ID NO: 1606061
ucgcccaggacaucacagc

SEQ ID NO: 1606063 - RNA, 19 nt, Artificial Sequence
  Description of Artificial Sequence: Synthetic oligonucleotide
  Sense strand starting at position 2961 of SEQ ID NO: 1560526
gcaggaaugccggguauaa

SEQ ID NO: 1606064 - RNA, 19 nt, Artificial Sequence
  Description of Artificial Sequence: Synthetic oligonucleotide
  Antisense strand to SEQ ID NO: 1606063
uuauacccggcauuccugc

SEQ ID NO: 1606065 - RNA, 19 nt, Artificial Sequence
  Description of Artificial Sequence: Synthetic oligonucleotide
  Sense strand starting at position 2963 of SEQ ID NO: 1560526
aggaaugccggguauaauu

SEQ ID NO: 1606066 - RNA, 19 nt, Artificial Sequence
  Description of Artificial Sequence: Synthetic oligonucleotide
  Antisense strand to SEQ ID NO: 1606065
aauuauacccggcauuccu

SEQ ID NO: 1606067 - RNA, 19 nt, Artificial Sequence
  Description of Artificial Sequence: Synthetic oligonucleotide
  Sense strand starting at position 2965 of SEQ ID NO: 1560526
gaaugccggguauaauuau

SEQ ID NO: 1606068 - RNA, 19 nt, Artificial Sequence
  Description of Artificial Sequence: Synthetic oligonucleotide
  Antisense strand to SEQ ID NO: 1606067
auaauuauacccggcauuc

SEQ ID NO: 1606069 - RNA, 19 nt, Artificial Sequence
  Description of Artificial Sequence: Synthetic oligonucleotide
  Sense strand starting at position 2971 of SEQ ID NO: 1560526
cggguauaauuauuacaug

SEQ ID NO: 1606070 - RNA, 19 nt, Artificial Sequence
  Description of Artificial Sequence: Synthetic oligonucleotide
  Antisense strand to SEQ ID NO: 1606069
cauguaauaauuauacccg

SEQ ID NO: 1606071 - RNA, 19 nt, Artificial Sequence
  Description of Artificial Sequence: Synthetic oligonucleotide
  Sense strand starting at position 2989 of SEQ ID NO: 1560526
gcuuguuaccacuaucaug

SEQ ID NO: 1606072 - RNA, 19 nt, Artificial Sequence
  Description of Artificial Sequence: Synthetic oligonucleotide
  Antisense strand to SEQ ID NO: 1606071
caugauagugguaacaagc

SEQ ID NO: 1606073 - RNA, 19 nt, Artificial Sequence
  Description of Artificial Sequence: Synthetic oligonucleotide
  Sense strand starting at position 3008 of SEQ ID NO: 1560526
gcuguuagggcuuaaugag

SEQ ID NO: 1606074 - RNA, 19 nt, Artificial Sequence
  Description of Artificial Sequence: Synthetic oligonucleotide
  Antisense strand to SEQ ID NO: 1606073
cucauuaagcccuaacagc

SEQ ID NO: 1606075 - RNA, 19 nt, Artificial Sequence
  Description of Artificial Sequence: Synthetic oligonucleotide
  Sense strand starting at position 3095 of SEQ ID NO: 1560526
aagggauccuuaggacauc

SEQ ID NO: 1606076 - RNA, 19 nt, Artificial Sequence
  Description of Artificial Sequence: Synthetic oligonucleotide
  Antisense strand to SEQ ID NO: 1606075
gauguccuaaggaucccuu

SEQ ID NO: 1606077 - RNA, 19 nt, Artificial Sequence
  Description of Artificial Sequence: Synthetic oligonucleotide
  Sense strand starting at position 3361 of SEQ ID NO: 1560526
gccucugaaucugccagaa

SEQ ID NO: 1606078 - RNA, 19 nt, Artificial Sequence
  Description of Artificial Sequence: Synthetic oligonucleotide
  Antisense strand to SEQ ID NO: 1606077
uucuggcagauucagaggc

SEQ ID NO: 1606079 - RNA, 19 nt, Artificial Sequence
  Description of Artificial Sequence: Synthetic oligonucleotide
  Sense strand starting at position 3363 of SEQ ID NO: 1560526
cucugaaucugccagaaug

SEQ ID NO: 1606080 - RNA, 19 nt, Artificial Sequence
  Description of Artificial Sequence: Synthetic oligonucleotide
  Antisense strand to SEQ ID NO: 1606079
cauucuggcagauucagag

SEQ ID NO: 1606081 - RNA, 19 nt, Artificial Sequence
  Description of Artificial Sequence: Synthetic oligonucleotide
  Sense strand starting at position 3390 of SEQ ID NO: 1560526
gaccauagucccugaaggu

SEQ ID NO: 1606082 - RNA, 19 nt, Artificial Sequence
  Description of Artificial Sequence: Synthetic oligonucleotide
  Antisense strand to SEQ ID NO: 1606081
accuucagggacuaugguc

SEQ ID NO: 1606083 - RNA, 19 nt, Artificial Sequence
  Description of Artificial Sequence: Synthetic oligonucleotide
  Sense strand starting at position 3400 of SEQ ID NO: 1560526
ccugaaggucagggacauu

SEQ ID NO: 1606084 - RNA, 19 nt, Artificial Sequence
  Description of Artificial Sequence: Synthetic oligonucleotide
  Antisense strand to SEQ ID NO: 1606083
aaugucccugaccuucagg

SEQ ID NO: 1606085 - RNA, 19 nt, Artificial Sequence
  Description of Artificial Sequence: Synthetic oligonucleotide
  Sense strand starting at position 3454 of SEQ ID NO: 1560526
aauggaugcucaguauuaa

SEQ ID NO: 1606086 - RNA, 19 nt, Artificial Sequence
  Description of Artificial Sequence: Synthetic oligonucleotide
  Antisense strand to SEQ ID NO: 1606085
uuaauacugagcauccauu

SEQ ID NO: 1606087 - RNA, 19 nt, Artificial Sequence
  Description of Artificial Sequence: Synthetic oligonucleotide
  Sense strand starting at position 3455 of SEQ ID NO: 1560526
auggaugcucaguauuaaa

SEQ ID NO: 1606088 - RNA, 19 nt, Artificial Sequence
  Description of Artificial Sequence: Synthetic oligonucleotide
  Antisense strand to SEQ ID NO: 1606087
uuuaauacugagcauccau

SEQ ID NO: 1606089 - RNA, 19 nt, Artificial Sequence
  Description of Artificial Sequence: Synthetic oligonucleotide
  Sense strand starting at position 3458 of SEQ ID NO: 1560526
gaugcucaguauuaaaggu

SEQ ID NO: 1606090 - RNA, 19 nt, Artificial Sequence
  Description of Artificial Sequence: Synthetic oligonucleotide
  Antisense strand to SEQ ID NO: 1606089
accuuuaauacugagcauc

SEQ ID NO: 1606091 - RNA, 19 nt, Artificial Sequence
  Description of Artificial Sequence: Synthetic oligonucleotide
  Sense strand starting at position 267 of SEQ ID NO: 1560527
ucaccaauugcaggaaauu

SEQ ID NO: 1606092 - RNA, 19 nt, Artificial Sequence
  Description of Artificial Sequence: Synthetic oligonucleotide
  Antisense strand to SEQ ID NO: 1606091
aauuuccugcaauugguga

SEQ ID NO: 1606093 - RNA, 19 nt, Artificial Sequence
  Description of Artificial Sequence: Synthetic oligonucleotide
  Sense strand starting at position 319 of SEQ ID NO: 1560527
gcaacagaaaguugauuga

SEQ ID NO: 1606094 - RNA, 19 nt, Artificial Sequence
  Description of Artificial Sequence: Synthetic oligonucleotide
  Antisense strand to SEQ ID NO: 1606093
ucaaucaacuuucuguugc

SEQ ID NO: 1606095 - RNA, 19 nt, Artificial Sequence
  Description of Artificial Sequence: Synthetic oligonucleotide
  Sense strand starting at position 383 of SEQ ID NO: 1560527
gcgggauuggagcaggauu

SEQ ID NO: 1606096 - RNA, 19 nt, Artificial Sequence
  Description of Artificial Sequence: Synthetic oligonucleotide
  Antisense strand to SEQ ID NO: 1606095
aauccugcuccaaucccgc

SEQ ID NO: 1606097 - RNA, 19 nt, Artificial Sequence
  Description of Artificial Sequence: Synthetic oligonucleotide
  Sense strand starting at position 440 of SEQ ID NO: 1560527
gagggugcugcuggguaaa

SEQ ID NO: 1606098 - RNA, 19 nt, Artificial Sequence
  Description of Artificial Sequence: Synthetic oligonucleotide
  Antisense strand to SEQ ID NO: 1606097
uuuacccagcagcacccuc

SEQ ID NO: 1606099 - RNA, 19 nt, Artificial Sequence
  Description of Artificial Sequence: Synthetic oligonucleotide
  Sense strand starting at position 442 of SEQ ID NO: 1560527
gggugcugcuggguaaaua

SEQ ID NO: 1606100 - RNA, 19 nt, Artificial Sequence
  Description of Artificial Sequence: Synthetic oligonucleotide
  Antisense strand to SEQ ID NO: 1606099
uauuuacccagcagcaccc

SEQ ID NO: 1606101 - RNA, 19 nt, Artificial Sequence
  Description of Artificial Sequence: Synthetic oligonucleotide
  Sense strand starting at position 450 of SEQ ID NO: 1560527
cuggguaaauaguauagua

SEQ ID NO: 1606102 - RNA, 19 nt, Artificial Sequence
  Description of Artificial Sequence: Synthetic oligonucleotide
  Antisense strand to SEQ ID NO: 1606101
uacuauacuauuuacccag

SEQ ID NO: 1606103 - RNA, 19 nt, Artificial Sequence
  Description of Artificial Sequence: Synthetic oligonucleotide
  Sense strand starting at position 812 of SEQ ID NO: 1560527
ucaugacaauucuaugaga

SEQ ID NO: 1606104 - RNA, 19 nt, Artificial Sequence
  Description of Artificial Sequence: Synthetic oligonucleotide
  Antisense strand to SEQ ID NO: 1606103
ucucauagaauugucauga

SEQ ID NO: 1606105 - RNA, 19 nt, Artificial Sequence
  Description of Artificial Sequence: Synthetic oligonucleotide
  Sense strand starting at position 998 of SEQ ID NO: 1560527
aucagauaucucuacccgu

SEQ ID NO: 1606106 - RNA, 19 nt, Artificial Sequence
  Description of Artificial Sequence: Synthetic oligonucleotide
  Antisense strand to SEQ ID NO: 1606105
acggguagagauaucugau

SEQ ID NO: 1606107 - RNA, 19 nt, Artificial Sequence
  Description of Artificial Sequence: Synthetic oligonucleotide
  Sense strand starting at position 1133 of SEQ ID NO: 1560527
gauggaugucuguggcuga

SEQ ID NO: 1606108 - RNA, 19 nt, Artificial Sequence
  Description of Artificial Sequence: Synthetic oligonucleotide
  Antisense strand to SEQ ID NO: 1606107
ucagccacagacauccauc

SEQ ID NO: 1606109 - RNA, 19 nt, Artificial Sequence
  Description of Artificial Sequence: Synthetic oligonucleotide
  Sense strand starting at position 1737 of SEQ ID NO: 1560527
acuccaagucuggaaaguu

SEQ ID NO: 1606110 - RNA, 19 nt, Artificial Sequence
  Description of Artificial Sequence: Synthetic oligonucleotide
  Antisense strand to SEQ ID NO: 1606109
aacuuuccagacuuggagu

SEQ ID NO: 1606111 - RNA, 19 nt, Artificial Sequence
  Description of Artificial Sequence: Synthetic oligonucleotide
  Sense strand starting at position 2543 of SEQ ID NO: 1560527
uggagaugaucauguuagc

SEQ ID NO: 1606112 - RNA, 19 nt, Artificial Sequence
  Description of Artificial Sequence: Synthetic oligonucleotide
  Antisense strand to SEQ ID NO: 1606111
gcuaacaugaucaucucca

SEQ ID NO: 1606113 - RNA, 19 nt, Artificial Sequence
  Description of Artificial Sequence: Synthetic oligonucleotide
  Sense strand starting at position 2568 of SEQ ID NO: 1560527
auaggagcguugagaagau

SEQ ID NO: 1606114 - RNA, 19 nt, Artificial Sequence
  Description of Artificial Sequence: Synthetic oligonucleotide
  Antisense strand to SEQ ID NO: 1606113
aucuucucaacgcuccuau

SEQ ID NO: 1606115 - RNA, 19 nt, Artificial Sequence
  Description of Artificial Sequence: Synthetic oligonucleotide
  Sense strand starting at position 2623 of SEQ ID NO: 1560527
ggaggcccuucggguuaaa

SEQ ID NO: 1606116 - RNA, 19 nt, Artificial Sequence
  Description of Artificial Sequence: Synthetic oligonucleotide
  Antisense strand to SEQ ID NO: 1606115
uuuaacccgaagggccucc

SEQ ID NO: 1606117 - RNA, 19 nt, Artificial Sequence
  Description of Artificial Sequence: Synthetic oligonucleotide
  Sense strand starting at position 2714 of SEQ ID NO: 1560527
ucagcaagggcuuaauaaa

SEQ ID NO: 1606118 - RNA, 19 nt, Artificial Sequence
  Description of Artificial Sequence: Synthetic oligonucleotide
  Antisense strand to SEQ ID NO: 1606117
uuuauuaagcccuugcuga

SEQ ID NO: 1606119 - RNA, 19 nt, Artificial Sequence
  Description of Artificial Sequence: Synthetic oligonucleotide
  Sense strand starting at position 2941 of SEQ ID NO: 1560527
ggcggauuauuugagccaa

SEQ ID NO: 1606120 - RNA, 19 nt, Artificial Sequence
  Description of Artificial Sequence: Synthetic oligonucleotide
  Antisense strand to SEQ ID NO: 1606119
uuggcucaaauaauccgcc

SEQ ID NO: 1606121 - RNA, 19 nt, Artificial Sequence
  Description of Artificial Sequence: Synthetic oligonucleotide
  Sense strand starting at position 2972 of SEQ ID NO: 1560527
cagcuuuggcaauauggua

SEQ ID NO: 1606122 - RNA, 19 nt, Artificial Sequence
  Description of Artificial Sequence: Synthetic oligonucleotide
  Antisense strand to SEQ ID NO: 1606121
uaccauauugccaaagcug

SEQ ID NO: 1606123 - RNA, 19 nt, Artificial Sequence
  Description of Artificial Sequence: Synthetic oligonucleotide
  Sense strand starting at position 3037 of SEQ ID NO: 1560527
cgagaaauggcucaugccu

SEQ ID NO: 1606124 - RNA, 19 nt, Artificial Sequence
  Description of Artificial Sequence: Synthetic oligonucleotide
  Antisense strand to SEQ ID NO: 1606123
aggcaugagccauuucucg

SEQ ID NO: 1606125 - RNA, 19 nt, Artificial Sequence
  Description of Artificial Sequence: Synthetic oligonucleotide
  Sense strand starting at position 3498 of SEQ ID NO: 1560527
uguuauugcagguaagcau

SEQ ID NO: 1606126 - RNA, 19 nt, Artificial Sequence
  Description of Artificial Sequence: Synthetic oligonucleotide
  Antisense strand to SEQ ID NO: 1606125
augcuuaccugcaauaaca

SEQ ID NO: 1606127 - RNA, 19 nt, Artificial Sequence
  Description of Artificial Sequence: Synthetic oligonucleotide
  Sense strand starting at position 3507 of SEQ ID NO: 1560527
agguaagcaugugacauua

SEQ ID NO: 1606128 - RNA, 19 nt, Artificial Sequence
  Description of Artificial Sequence: Synthetic oligonucleotide
  Antisense strand to SEQ ID NO: 1606127
uaaugucacaugcuuaccu

SEQ ID NO: 1606129 - RNA, 19 nt, Artificial Sequence
  Description of Artificial Sequence: Synthetic oligonucleotide
  Sense strand starting at position 3509 of SEQ ID NO: 1560527
guaagcaugugacauuauu

SEQ ID NO: 1606130 - RNA, 19 nt, Artificial Sequence
  Description of Artificial Sequence: Synthetic oligonucleotide
  Antisense strand to SEQ ID NO: 1606129
aauaaugucacaugcuuac

SEQ ID NO: 1606131 - RNA, 19 nt, Artificial Sequence
  Description of Artificial Sequence: Synthetic oligonucleotide
  Sense strand starting at position 3516 of SEQ ID NO: 1560527
ugugacauuauuugugugu

SEQ ID NO: 1606132 - RNA, 19 nt, Artificial Sequence
  Description of Artificial Sequence: Synthetic oligonucleotide
  Antisense strand to SEQ ID NO: 1606131
acacacaaauaaugucaca

SEQ ID NO: 1606133 - RNA, 19 nt, Artificial Sequence
  Description of Artificial Sequence: Synthetic oligonucleotide
  Sense strand starting at position 3517 of SEQ ID NO: 1560527
gugacauuauuuguguguu

SEQ ID NO: 1606134 - RNA, 19 nt, Artificial Sequence
  Description of Artificial Sequence: Synthetic oligonucleotide
  Antisense strand to SEQ ID NO: 1606133
aacacacaaauaaugucac

SEQ ID NO: 1606135 - RNA, 19 nt, Artificial Sequence
  Description of Artificial Sequence: Synthetic oligonucleotide
  Sense strand starting at position 3518 of SEQ ID NO: 1560527
ugacauuauuuguguguug

SEQ ID NO: 1606136 - RNA, 19 nt, Artificial Sequence
  Description of Artificial Sequence: Synthetic oligonucleotide
  Antisense strand to SEQ ID NO: 1606135
caacacacaaauaauguca

SEQ ID NO: 1606137 - RNA, 19 nt, Artificial Sequence
  Description of Artificial Sequence: Synthetic oligonucleotide
  Sense strand starting at position 3527 of SEQ ID NO: 1560527
uuguguguugccuucccua

SEQ ID NO: 1606138 - RNA, 19 nt, Artificial Sequence
  Description of Artificial Sequence: Synthetic oligonucleotide
  Antisense strand to SEQ ID NO: 1606137
uagggaaggcaacacacaa

SEQ ID NO: 1606139 - RNA, 19 nt, Artificial Sequence
  Description of Artificial Sequence: Synthetic oligonucleotide
  Sense strand starting at position 3529 of SEQ ID NO: 1560527
guguguugccuucccuacu

SEQ ID NO: 1606140 - RNA, 19 nt, Artificial Sequence
  Description of Artificial Sequence: Synthetic oligonucleotide
  Antisense strand to SEQ ID NO: 1606139
aguagggaaggcaacacac

SEQ ID NO: 1606141 - RNA, 19 nt, Artificial Sequence
  Description of Artificial Sequence: Synthetic oligonucleotide
  Sense strand starting at position 3530 of SEQ ID NO: 1560527
uguguugccuucccuacua

SEQ ID NO: 1606142 - RNA, 19 nt, Artificial Sequence
  Description of Artificial Sequence: Synthetic oligonucleotide
  Antisense strand to SEQ ID NO: 1606141
uaguagggaaggcaacaca

SEQ ID NO: 1606143 - RNA, 19 nt, Artificial Sequence
  Description of Artificial Sequence: Synthetic oligonucleotide
  Sense strand starting at position 3532 of SEQ ID NO: 1560527
uguugccuucccuacuaga

SEQ ID NO: 1606144 - RNA, 19 nt, Artificial Sequence
  Description of Artificial Sequence: Synthetic oligonucleotide
  Antisense strand to SEQ ID NO: 1606143
ucuaguagggaaggcaaca

SEQ ID NO: 1606145 - RNA, 19 nt, Artificial Sequence
  Description of Artificial Sequence: Synthetic oligonucleotide
  Sense strand starting at position 3608 of SEQ ID NO: 1560527
cccaguauguucuuggugu

SEQ ID NO: 1606146 - RNA, 19 nt, Artificial Sequence
  Description of Artificial Sequence: Synthetic oligonucleotide
  Antisense strand to SEQ ID NO: 1606145
acaccaagaacauacuggg

SEQ ID NO: 1606147 - RNA, 19 nt, Artificial Sequence
  Description of Artificial Sequence: Synthetic oligonucleotide
  Sense strand starting at position 3609 of SEQ ID NO: 1560527
ccaguauguucuugguguc

SEQ ID NO: 1606148 - RNA, 19 nt, Artificial Sequence
  Description of Artificial Sequence: Synthetic oligonucleotide
  Antisense strand to SEQ ID NO: 1606147
gacaccaagaacauacugg

SEQ ID NO: 1606149 - RNA, 19 nt, Artificial Sequence
  Description of Artificial Sequence: Synthetic oligonucleotide
  Sense strand starting at position 3671 of SEQ ID NO: 1560527
gugagcaugugaugagcau

SEQ ID NO: 1606150 - RNA, 19 nt, Artificial Sequence
  Description of Artificial Sequence: Synthetic oligonucleotide
  Antisense strand to SEQ ID NO: 1606149
augcucaucacaugcucac

SEQ ID NO: 1606151 - RNA, 19 nt, Artificial Sequence
  Description of Artificial Sequence: Synthetic oligonucleotide
  Sense strand starting at position 3675 of SEQ ID NO: 1560527
gcaugugaugagcauguga

SEQ ID NO: 1606152 - RNA, 19 nt, Artificial Sequence
  Description of Artificial Sequence: Synthetic oligonucleotide
  Antisense strand to SEQ ID NO: 1606151
ucacaugcucaucacaugc

SEQ ID NO: 1606153 - RNA, 19 nt, Artificial Sequence
  Description of Artificial Sequence: Synthetic oligonucleotide
  Sense strand starting at position 3720 of SEQ ID NO: 1560527
ggcacagguugcuuauaaa

SEQ ID NO: 1606154 - RNA, 19 nt, Artificial Sequence
  Description of Artificial Sequence: Synthetic oligonucleotide
  Antisense strand to SEQ ID NO: 1606153
uuuauaagcaaccugugcc

SEQ ID NO: 1606155 - RNA, 19 nt, Artificial Sequence
  Description of Artificial Sequence: Synthetic oligonucleotide
  Sense strand starting at position 3927 of SEQ ID NO: 1560527
ggcucagaggucugccuuu

SEQ ID NO: 1606156 - RNA, 19 nt, Artificial Sequence
  Description of Artificial Sequence: Synthetic oligonucleotide
  Antisense strand to SEQ ID NO: 1606155
aaaggcagaccucugagcc

SEQ ID NO: 1606157 - RNA, 19 nt, Artificial Sequence
  Description of Artificial Sequence: Synthetic oligonucleotide
  Sense strand starting at position 3936 of SEQ ID NO: 1560527
gucugccuuucggaaacuu

SEQ ID NO: 1606158 - RNA, 19 nt, Artificial Sequence
  Description of Artificial Sequence: Synthetic oligonucleotide
  Antisense strand to SEQ ID NO: 1606157
aaguuuccgaaaggcagac

SEQ ID NO: 1606159 - RNA, 19 nt, Artificial Sequence
  Description of Artificial Sequence: Synthetic oligonucleotide
  Sense strand starting at position 3944 of SEQ ID NO: 1560527
uucggaaacuugcucuguu

SEQ ID NO: 1606160 - RNA, 19 nt, Artificial Sequence
  Description of Artificial Sequence: Synthetic oligonucleotide
  Antisense strand to SEQ ID NO: 1606159
aacagagcaaguuuccgaa

SEQ ID NO: 1606161 - RNA, 19 nt, Artificial Sequence
  Description of Artificial Sequence: Synthetic oligonucleotide
  Sense strand starting at position 253 of SEQ ID NO: 1560528
cgcagcuucgcucugugau

SEQ ID NO: 1606162 - RNA, 19 nt, Artificial Sequence
  Description of Artificial Sequence: Synthetic oligonucleotide
  Antisense strand to SEQ ID NO: 1606161
aucacagagcgaagcugcg

SEQ ID NO: 1606163 - RNA, 19 nt, Artificial Sequence
  Description of Artificial Sequence: Synthetic oligonucleotide
  Sense strand starting at position 254 of SEQ ID NO: 1560528
gcagcuucgcucugugaug

SEQ ID NO: 1606164 - RNA, 19 nt, Artificial Sequence
  Description of Artificial Sequence: Synthetic oligonucleotide
  Antisense strand to SEQ ID NO: 1606163
caucacagagcgaagcugc

SEQ ID NO: 1606165 - RNA, 19 nt, Artificial Sequence
  Description of Artificial Sequence: Synthetic oligonucleotide
  Sense strand starting at position 259 of SEQ ID NO: 1560528
uucgcucugugaugcuaau

SEQ ID NO: 1606166 - RNA, 19 nt, Artificial Sequence
  Description of Artificial Sequence: Synthetic oligonucleotide
  Antisense strand to SEQ ID NO: 1606165
auuagcaucacagagcgaa

SEQ ID NO: 1606167 - RNA, 19 nt, Artificial Sequence
  Description of Artificial Sequence: Synthetic oligonucleotide
  Sense strand starting at position 265 of SEQ ID NO: 1560528
cugugaugcuaaucuucuu

SEQ ID NO: 1606168 - RNA, 19 nt, Artificial Sequence
  Description of Artificial Sequence: Synthetic oligonucleotide
  Antisense strand to SEQ ID NO: 1606167
aagaagauuagcaucacag

SEQ ID NO: 1606169 - RNA, 19 nt, Artificial Sequence
  Description of Artificial Sequence: Synthetic oligonucleotide
  Sense strand starting at position 783 of SEQ ID NO: 1560528
aggaacuucuggcucuuaa

SEQ ID NO: 1606170 - RNA, 19 nt, Artificial Sequence
  Description of Artificial Sequence: Synthetic oligonucleotide
  Antisense strand to SEQ ID NO: 1606169
uuaagagccagaaguuccu

SEQ ID NO: 1606171 - RNA, 19 nt, Artificial Sequence
  Description of Artificial Sequence: Synthetic oligonucleotide
  Sense strand starting at position 1152 of SEQ ID NO: 1560528
gcaccauacugaggguaga

SEQ ID NO: 1606172 - RNA, 19 nt, Artificial Sequence
  Description of Artificial Sequence: Synthetic oligonucleotide
  Antisense strand to SEQ ID NO: 1606171
ucuacccucaguauggugc

SEQ ID NO: 1606173 - RNA, 19 nt, Artificial Sequence
  Description of Artificial Sequence: Synthetic oligonucleotide
  Sense strand starting at position 1315 of SEQ ID NO: 1560528
gcguguggcccuucucgau

SEQ ID NO: 1606174 - RNA, 19 nt, Artificial Sequence
  Description of Artificial Sequence: Synthetic oligonucleotide
  Antisense strand to SEQ ID NO: 1606173
aucgagaagggccacacgc

SEQ ID NO: 1606175 - RNA, 19 nt, Artificial Sequence
  Description of Artificial Sequence: Synthetic oligonucleotide
  Sense strand starting at position 1321 of SEQ ID NO: 1560528
ggcccuucucgaugucauc

SEQ ID NO: 1606176 - RNA, 19 nt, Artificial Sequence
  Description of Artificial Sequence: Synthetic oligonucleotide
  Antisense strand to SEQ ID NO: 1606175
gaugacaucgagaagggcc

SEQ ID NO: 1606177 - RNA, 19 nt, Artificial Sequence
  Description of Artificial Sequence: Synthetic oligonucleotide
  Sense strand starting at position 1330 of SEQ ID NO: 1560528
cgaugucauccacguacuu

SEQ ID NO: 1606178 - RNA, 19 nt, Artificial Sequence
  Description of Artificial Sequence: Synthetic oligonucleotide
  Antisense strand to SEQ ID NO: 1606177
aaguacguggaugacaucg

SEQ ID NO: 1606179 - RNA, 19 nt, Artificial Sequence
  Description of Artificial Sequence: Synthetic oligonucleotide
  Sense strand starting at position 1534 of SEQ ID NO: 1560528
ggguuuauuugccgaagag

SEQ ID NO: 1606180 - RNA, 19 nt, Artificial Sequence
  Description of Artificial Sequence: Synthetic oligonucleotide
  Antisense strand to SEQ ID NO: 1606179
cucuucggcaaauaaaccc

SEQ ID NO: 1606181 - RNA, 19 nt, Artificial Sequence
  Description of Artificial Sequence: Synthetic oligonucleotide
  Sense strand starting at position 1670 of SEQ ID NO: 1560528
ggcucuaucccucggcuua

SEQ ID NO: 1606182 - RNA, 19 nt, Artificial Sequence
  Description of Artificial Sequence: Synthetic oligonucleotide
  Antisense strand to SEQ ID NO: 1606181
uaagccgagggauagagcc

SEQ ID NO: 1606183 - RNA, 19 nt, Artificial Sequence
  Description of Artificial Sequence: Synthetic oligonucleotide
  Sense strand starting at position 1672 of SEQ ID NO: 1560528
cucuaucccucggcuuaga

SEQ ID NO: 1606184 - RNA, 19 nt, Artificial Sequence
  Description of Artificial Sequence: Synthetic oligonucleotide
  Antisense strand to SEQ ID NO: 1606183
ucuaagccgagggauagag

SEQ ID NO: 1606185 - RNA, 19 nt, Artificial Sequence
  Description of Artificial Sequence: Synthetic oligonucleotide
  Sense strand starting at position 1931 of SEQ ID NO: 1560528
uacagaugcuccuuggaag

SEQ ID NO: 1606186 - RNA, 19 nt, Artificial Sequence
  Description of Artificial Sequence: Synthetic oligonucleotide
  Antisense strand to SEQ ID NO: 1606185
cuuccaaggagcaucugua

SEQ ID NO: 1606187 - RNA, 19 nt, Artificial Sequence
  Description of Artificial Sequence: Synthetic oligonucleotide
  Sense strand starting at position 1932 of SEQ ID NO: 1560528
acagaugcuccuuggaagu

SEQ ID NO: 1606188 - RNA, 19 nt, Artificial Sequence
  Description of Artificial Sequence: Synthetic oligonucleotide
  Antisense strand to SEQ ID NO: 1606187
acuuccaaggagcaucugu

SEQ ID NO: 1606189 - RNA, 19 nt, Artificial Sequence
  Description of Artificial Sequence: Synthetic oligonucleotide
  Sense strand starting at position 2407 of SEQ ID NO: 1560528
cucgucuuccugcaaggau

SEQ ID NO: 1606190 - RNA, 19 nt, Artificial Sequence
  Description of Artificial Sequence: Synthetic oligonucleotide
  Antisense strand to SEQ ID NO: 1606189
auccuugcaggaagacgag

SEQ ID NO: 1606191 - RNA, 19 nt, Artificial Sequence
  Description of Artificial Sequence: Synthetic oligonucleotide
  Sense strand starting at position 2773 of SEQ ID NO: 1560528
gucagagccucucacuaaa

SEQ ID NO: 1606192 - RNA, 19 nt, Artificial Sequence
  Description of Artificial Sequence: Synthetic oligonucleotide
  Antisense strand to SEQ ID NO: 1606191
uuuagugagaggcucugac

SEQ ID NO: 1606193 - RNA, 19 nt, Artificial Sequence
  Description of Artificial Sequence: Synthetic oligonucleotide
  Sense strand starting at position 2858 of SEQ ID NO: 1560528
gguccuuucuguuaucuga

SEQ ID NO: 1606194 - RNA, 19 nt, Artificial Sequence
  Description of Artificial Sequence: Synthetic oligonucleotide
  Antisense strand to SEQ ID NO: 1606193
ucagauaacagaaaggacc

SEQ ID NO: 1606195 - RNA, 19 nt, Artificial Sequence
  Description of Artificial Sequence: Synthetic oligonucleotide
  Sense strand starting at position 3244 of SEQ ID NO: 1560528
ucaccaauugcaggaaauu

SEQ ID NO: 1606196 - RNA, 19 nt, Artificial Sequence
  Description of Artificial Sequence: Synthetic oligonucleotide
  Antisense strand to SEQ ID NO: 1606195
aauuuccugcaauugguga

SEQ ID NO: 1606197 - RNA, 19 nt, Artificial Sequence
  Description of Artificial Sequence: Synthetic oligonucleotide
  Sense strand starting at position 3296 of SEQ ID NO: 1560528
gcaacagaaaguugauuga

SEQ ID NO: 1606198 - RNA, 19 nt, Artificial Sequence
  Description of Artificial Sequence: Synthetic oligonucleotide
  Antisense strand to SEQ ID NO: 1606197
ucaaucaacuuucuguugc

SEQ ID NO: 1606199 - RNA, 19 nt, Artificial Sequence
  Description of Artificial Sequence: Synthetic oligonucleotide
  Sense strand starting at position 3360 of SEQ ID NO: 1560528
gcgggauuggagcaggauu

SEQ ID NO: 1606200 - RNA, 19 nt, Artificial Sequence
  Description of Artificial Sequence: Synthetic oligonucleotide
  Antisense strand to SEQ ID NO: 1606199
aauccugcuccaaucccgc

SEQ ID NO: 1606201 - RNA, 19 nt, Artificial Sequence
  Description of Artificial Sequence: Synthetic oligonucleotide
  Sense strand starting at position 3417 of SEQ ID NO: 1560528
gagggugcugcuggguaaa

SEQ ID NO: 1606202 - RNA, 19 nt, Artificial Sequence
  Description of Artificial Sequence: Synthetic oligonucleotide
  Antisense strand to SEQ ID NO: 1606201
uuuacccagcagcacccuc

SEQ ID NO: 1606203 - RNA, 19 nt, Artificial Sequence
  Description of Artificial Sequence: Synthetic oligonucleotide
  Sense strand starting at position 3419 of SEQ ID NO: 1560528
gggugcugcuggguaaaua

SEQ ID NO: 1606204 - RNA, 19 nt, Artificial Sequence
  Description of Artificial Sequence: Synthetic oligonucleotide
  Antisense strand to SEQ ID NO: 1606203
uauuuacccagcagcaccc

SEQ ID NO: 1606205 - RNA, 19 nt, Artificial Sequence
  Description of Artificial Sequence: Synthetic oligonucleotide
  Sense strand starting at position 3427 of SEQ ID NO: 1560528
cuggguaaauaguauagua

SEQ ID NO: 1606206 - RNA, 19 nt, Artificial Sequence
  Description of Artificial Sequence: Synthetic oligonucleotide
  Antisense strand to SEQ ID NO: 1606205
uacuauacuauuuacccag

SEQ ID NO: 1606207 - RNA, 19 nt, Artificial Sequence
  Description of Artificial Sequence: Synthetic oligonucleotide
  Sense strand starting at position 3789 of SEQ ID NO: 1560528
ucaugacaauucuaugaga

SEQ ID NO: 1606208 - RNA, 19 nt, Artificial Sequence
  Description of Artificial Sequence: Synthetic oligonucleotide
  Antisense strand to SEQ ID NO: 1606207
ucucauagaauugucauga

SEQ ID NO: 1606209 - RNA, 19 nt, Artificial Sequence
  Description of Artificial Sequence: Synthetic oligonucleotide
  Sense strand starting at position 3975 of SEQ ID NO: 1560528
aucagauaucucuacccgu

SEQ ID NO: 1606210 - RNA, 19 nt, Artificial Sequence
  Description of Artificial Sequence: Synthetic oligonucleotide
  Antisense strand to SEQ ID NO: 1606209
acggguagagauaucugau

SEQ ID NO: 1606211 - RNA, 19 nt, Artificial Sequence
  Description of Artificial Sequence: Synthetic oligonucleotide
  Sense strand starting at position 17 of SEQ ID NO: 1560529
gagucaguggcucgaucau

SEQ ID NO: 1606212 - RNA, 19 nt, Artificial Sequence
  Description of Artificial Sequence: Synthetic oligonucleotide
  Antisense strand to SEQ ID NO: 1606211
augaucgagccacugacuc

SEQ ID NO: 1606213 - RNA, 19 nt, Artificial Sequence
  Description of Artificial Sequence: Synthetic oligonucleotide
  Sense strand starting at position 411 of SEQ ID NO: 1560529
agauacaggugucuugcua

SEQ ID NO: 1606214 - RNA, 19 nt, Artificial Sequence
  Description of Artificial Sequence: Synthetic oligonucleotide
  Antisense strand to SEQ ID NO: 1606213
uagcaagacaccuguaucu

SEQ ID NO: 1606215 - RNA, 19 nt, Artificial Sequence
  Description of Artificial Sequence: Synthetic oligonucleotide
  Sense strand starting at position 519 of SEQ ID NO: 1560529
gcaccugaccuugacuuau

SEQ ID NO: 1606216 - RNA, 19 nt, Artificial Sequence
  Description of Artificial Sequence: Synthetic oligonucleotide
  Antisense strand to SEQ ID NO: 1606215
auaagucaaggucaggugc

SEQ ID NO: 1606217 - RNA, 19 nt, Artificial Sequence
  Description of Artificial Sequence: Synthetic oligonucleotide
  Sense strand starting at position 551 of SEQ ID NO: 1560529
agcuaaauccacugagguu

SEQ ID NO: 1606218 - RNA, 19 nt, Artificial Sequence
  Description of Artificial Sequence: Synthetic oligonucleotide
  Antisense strand to SEQ ID NO: 1606217
aaccucaguggauuuagcu

SEQ ID NO: 1606219 - RNA, 19 nt, Artificial Sequence
  Description of Artificial Sequence: Synthetic oligonucleotide
  Sense strand starting at position 552 of SEQ ID NO: 1560529
gcuaaauccacugagguug

SEQ ID NO: 1606220 - RNA, 19 nt, Artificial Sequence
  Description of Artificial Sequence: Synthetic oligonucleotide
  Antisense strand to SEQ ID NO: 1606219
caaccucaguggauuuagc

SEQ ID NO: 1606221 - RNA, 19 nt, Artificial Sequence
  Description of Artificial Sequence: Synthetic oligonucleotide
  Sense strand starting at position 569 of SEQ ID NO: 1560529
uggauuuccuaugaucauu

SEQ ID NO: 1606222 - RNA, 19 nt, Artificial Sequence
  Description of Artificial Sequence: Synthetic oligonucleotide
  Antisense strand to SEQ ID NO: 1606221
aaugaucauaggaaaucca

SEQ ID NO: 1606223 - RNA, 19 nt, Artificial Sequence
  Description of Artificial Sequence: Synthetic oligonucleotide
  Sense strand starting at position 643 of SEQ ID NO: 1560529
cugccuggguccugucaua

SEQ ID NO: 1606224 - RNA, 19 nt, Artificial Sequence
  Description of Artificial Sequence: Synthetic oligonucleotide
  Antisense strand to SEQ ID NO: 1606223
uaugacaggacccaggcag

SEQ ID NO: 1606225 - RNA, 19 nt, Artificial Sequence
  Description of Artificial Sequence: Synthetic oligonucleotide
  Sense strand starting at position 696 of SEQ ID NO: 1560529
cuuccagaguccuugcuuu

SEQ ID NO: 1606226 - RNA, 19 nt, Artificial Sequence
  Description of Artificial Sequence: Synthetic oligonucleotide
  Antisense strand to SEQ ID NO: 1606225
aaagcaaggacucuggaag

SEQ ID NO: 1606227 - RNA, 19 nt, Artificial Sequence
  Description of Artificial Sequence: Synthetic oligonucleotide
  Sense strand starting at position 1049 of SEQ ID NO: 1560529
agccuacaccugugucaga

SEQ ID NO: 1606228 - RNA, 19 nt, Artificial Sequence
  Description of Artificial Sequence: Synthetic oligonucleotide
  Antisense strand to SEQ ID NO: 1606227
ucugacacagguguaggcu

SEQ ID NO: 1606229 - RNA, 19 nt, Artificial Sequence
  Description of Artificial Sequence: Synthetic oligonucleotide
  Sense strand starting at position 1210 of SEQ ID NO: 1560529
cccucauuaggccgucaga

SEQ ID NO: 1606230 - RNA, 19 nt, Artificial Sequence
  Description of Artificial Sequence: Synthetic oligonucleotide
  Antisense strand to SEQ ID NO: 1606229
ucugacggccuaaugaggg

SEQ ID NO: 1606231 - RNA, 19 nt, Artificial Sequence
  Description of Artificial Sequence: Synthetic oligonucleotide
  Sense strand starting at position 1277 of SEQ ID NO: 1560529
cagagcugugaucaccaaa

SEQ ID NO: 1606232 - RNA, 19 nt, Artificial Sequence
  Description of Artificial Sequence: Synthetic oligonucleotide
  Antisense strand to SEQ ID NO: 1606231
uuuggugaucacagcucug

SEQ ID NO: 1606233 - RNA, 19 nt, Artificial Sequence
  Description of Artificial Sequence: Synthetic oligonucleotide
  Sense strand starting at position 1383 of SEQ ID NO: 1560529
ccugaugucugcugggacu

SEQ ID NO: 1606234 - RNA, 19 nt, Artificial Sequence
  Description of Artificial Sequence: Synthetic oligonucleotide
  Antisense strand to SEQ ID NO: 1606233
agucccagcagacaucagg

SEQ ID NO: 1606235 - RNA, 19 nt, Artificial Sequence
  Description of Artificial Sequence: Synthetic oligonucleotide
  Sense strand starting at position 1442 of SEQ ID NO: 1560529
caggaagguggguguuaaa

SEQ ID NO: 1606236 - RNA, 19 nt, Artificial Sequence
  Description of Artificial Sequence: Synthetic oligonucleotide
  Antisense strand to SEQ ID NO: 1606235
uuuaacacccaccuuccug

SEQ ID NO: 1606237 - RNA, 19 nt, Artificial Sequence
  Description of Artificial Sequence: Synthetic oligonucleotide
  Sense strand starting at position 1451 of SEQ ID NO: 1560529
ggguguuaaagucaucauc

SEQ ID NO: 1606238 - RNA, 19 nt, Artificial Sequence
  Description of Artificial Sequence: Synthetic oligonucleotide
  Antisense strand to SEQ ID NO: 1606237
gaugaugacuuuaacaccc

SEQ ID NO: 1606239 - RNA, 19 nt, Artificial Sequence
  Description of Artificial Sequence: Synthetic oligonucleotide
  Sense strand starting at position 1453 of SEQ ID NO: 1560529
guguuaaagucaucaucac

SEQ ID NO: 1606240 - RNA, 19 nt, Artificial Sequence
  Description of Artificial Sequence: Synthetic oligonucleotide
  Antisense strand to SEQ ID NO: 1606239
gugaugaugacuuuaacac

SEQ ID NO: 1606241 - RNA, 19 nt, Artificial Sequence
  Description of Artificial Sequence: Synthetic oligonucleotide
  Sense strand starting at position 1508 of SEQ ID NO: 1560529
agagcaguuuccuacagga

SEQ ID NO: 1606242 - RNA, 19 nt, Artificial Sequence
  Description of Artificial Sequence: Synthetic oligonucleotide
  Antisense strand to SEQ ID NO: 1606241
uccuguaggaaacugcucu

SEQ ID NO: 1606243 - RNA, 19 nt, Artificial Sequence
  Description of Artificial Sequence: Synthetic oligonucleotide
  Sense strand starting at position 1510 of SEQ ID NO: 1560529
agcaguuuccuacaggaag

SEQ ID NO: 1606244 - RNA, 19 nt, Artificial Sequence
  Description of Artificial Sequence: Synthetic oligonucleotide
  Antisense strand to SEQ ID NO: 1606243
cuuccuguaggaaacugcu

SEQ ID NO: 1606245 - RNA, 19 nt, Artificial Sequence
  Description of Artificial Sequence: Synthetic oligonucleotide
  Sense strand starting at position 1790 of SEQ ID NO: 1560529
ugggacuuccaauguggga

SEQ ID NO: 1606246 - RNA, 19 nt, Artificial Sequence
  Description of Artificial Sequence: Synthetic oligonucleotide
  Antisense strand to SEQ ID NO: 1606245
ucccacauuggaaguccca

SEQ ID NO: 1606247 - RNA, 19 nt, Artificial Sequence
  Description of Artificial Sequence: Synthetic oligonucleotide
  Sense strand starting at position 2031 of SEQ ID NO: 1560529
aggccuucgcccuaacuga

SEQ ID NO: 1606248 - RNA, 19 nt, Artificial Sequence
  Description of Artificial Sequence: Synthetic oligonucleotide
  Antisense strand to SEQ ID NO: 1606247
ucaguuagggcgaaggccu

SEQ ID NO: 1606249 - RNA, 19 nt, Artificial Sequence
  Description of Artificial Sequence: Synthetic oligonucleotide
  Sense strand starting at position 2296 of SEQ ID NO: 1560529
agaguaacccggugggauu

SEQ ID NO: 1606250 - RNA, 19 nt, Artificial Sequence
  Description of Artificial Sequence: Synthetic oligonucleotide
  Antisense strand to SEQ ID NO: 1606249
aaucccaccggguuacucu

SEQ ID NO: 1606251 - RNA, 19 nt, Artificial Sequence
  Description of Artificial Sequence: Synthetic oligonucleotide
  Sense strand starting at position 2352 of SEQ ID NO: 1560529
guaucaggucccggaucuu

SEQ ID NO: 1606252 - RNA, 19 nt, Artificial Sequence
  Description of Artificial Sequence: Synthetic oligonucleotide
  Antisense strand to SEQ ID NO: 1606251
aagauccgggaccugauac

SEQ ID NO: 1606253 - RNA, 19 nt, Artificial Sequence
  Description of Artificial Sequence: Synthetic oligonucleotide
  Sense strand starting at position 2938 of SEQ ID NO: 1560529
uccaguauuuagggaggca

SEQ ID NO: 1606254 - RNA, 19 nt, Artificial Sequence
  Description of Artificial Sequence: Synthetic oligonucleotide
  Antisense strand to SEQ ID NO: 1606253
ugccucccuaaauacugga

SEQ ID NO: 1606255 - RNA, 19 nt, Artificial Sequence
  Description of Artificial Sequence: Synthetic oligonucleotide
  Sense strand starting at position 2952 of SEQ ID NO: 1560529
aggcauagaugggaggaua

SEQ ID NO: 1606256 - RNA, 19 nt, Artificial Sequence
  Description of Artificial Sequence: Synthetic oligonucleotide
  Antisense strand to SEQ ID NO: 1606255
uauccucccaucuaugccu

SEQ ID NO: 1606257 - RNA, 19 nt, Artificial Sequence
  Description of Artificial Sequence: Synthetic oligonucleotide
  Sense strand starting at position 3385 of SEQ ID NO: 1560529
augccuggcugguuauuua

SEQ ID NO: 1606258 - RNA, 19 nt, Artificial Sequence
  Description of Artificial Sequence: Synthetic oligonucleotide
  Antisense strand to SEQ ID NO: 1606257
uaaauaaccagccaggcau

SEQ ID NO: 1606259 - RNA, 19 nt, Artificial Sequence
  Description of Artificial Sequence: Synthetic oligonucleotide
  Sense strand starting at position 3392 of SEQ ID NO: 1560529
gcugguuauuuauugguuu

SEQ ID NO: 1606260 - RNA, 19 nt, Artificial Sequence
  Description of Artificial Sequence: Synthetic oligonucleotide
  Antisense strand to SEQ ID NO: 1606259
aaaccaauaaauaaccagc

SEQ ID NO: 1606261 - RNA, 19 nt, Artificial Sequence
  Description of Artificial Sequence: Synthetic oligonucleotide
  Sense strand starting at position 3393 of SEQ ID NO: 1560529
cugguuauuuauugguuua

SEQ ID NO: 1606262 - RNA, 19 nt, Artificial Sequence
  Description of Artificial Sequence: Synthetic oligonucleotide
  Antisense strand to SEQ ID NO: 1606261
uaaaccaauaaauaaccag

SEQ ID NO: 1606263 - RNA, 19 nt, Artificial Sequence
  Description of Artificial Sequence: Synthetic oligonucleotide
  Sense strand starting at position 3396 of SEQ ID NO: 1560529
guuauuuauugguuuaccu

SEQ ID NO: 1606264 - RNA, 19 nt, Artificial Sequence
  Description of Artificial Sequence: Synthetic oligonucleotide
  Antisense strand to SEQ ID NO: 1606263
agguaaaccaauaaauaac

SEQ ID NO: 1606265 - RNA, 19 nt, Artificial Sequence
  Description of Artificial Sequence: Synthetic oligonucleotide
  Sense strand starting at position 3427 of SEQ ID NO: 1560529
acuaaagugucggcaccaa

SEQ ID NO: 1606266 - RNA, 19 nt, Artificial Sequence
  Description of Artificial Sequence: Synthetic oligonucleotide
  Antisense strand to SEQ ID NO: 1606265
uuggugccgacacuuuagu

SEQ ID NO: 1606267 - RNA, 19 nt, Artificial Sequence
  Description of Artificial Sequence: Synthetic oligonucleotide
  Sense strand starting at position 3602 of SEQ ID NO: 1560529
ugauaacugcuuuauccag

SEQ ID NO: 1606268 - RNA, 19 nt, Artificial Sequence
  Description of Artificial Sequence: Synthetic oligonucleotide
  Antisense strand to SEQ ID NO: 1606267
cuggauaaagcaguuauca

SEQ ID NO: 1606269 - RNA, 19 nt, Artificial Sequence
  Description of Artificial Sequence: Synthetic oligonucleotide
  Sense strand starting at position 3713 of SEQ ID NO: 1560529
gguagagugcuguggcaca

SEQ ID NO: 1606270 - RNA, 19 nt, Artificial Sequence
  Description of Artificial Sequence: Synthetic oligonucleotide
  Antisense strand to SEQ ID NO: 1606269
ugugccacagcacucuacc

SEQ ID NO: 1606271 - RNA, 19 nt, Artificial Sequence
  Description of Artificial Sequence: Synthetic oligonucleotide
  Sense strand starting at position 3815 of SEQ ID NO: 1560529
gugugcuacgccuagcuaa

SEQ ID NO: 1606272 - RNA, 19 nt, Artificial Sequence
  Description of Artificial Sequence: Synthetic oligonucleotide
  Antisense strand to SEQ ID NO: 1606271
uuagcuaggcguagcacac

SEQ ID NO: 1606273 - RNA, 19 nt, Artificial Sequence
  Description of Artificial Sequence: Synthetic oligonucleotide
  Sense strand starting at position 3817 of SEQ ID NO: 1560529
gugcuacgccuagcuaauu

SEQ ID NO: 1606274 - RNA, 19 nt, Artificial Sequence
  Description of Artificial Sequence: Synthetic oligonucleotide
  Antisense strand to SEQ ID NO: 1606273
aauuagcuaggcguagcac

SEQ ID NO: 1606275 - RNA, 19 nt, Artificial Sequence
  Description of Artificial Sequence: Synthetic oligonucleotide
  Sense strand starting at position 3965 of SEQ ID NO: 1560529
gccagaauauaguaauauu

SEQ ID NO: 1606276 - RNA, 19 nt, Artificial Sequence
  Description of Artificial Sequence: Synthetic oligonucleotide
  Antisense strand to SEQ ID NO: 1606275
aauauuacuauauucuggc

SEQ ID NO: 1606277 - RNA, 19 nt, Artificial Sequence
  Description of Artificial Sequence: Synthetic oligonucleotide
  Sense strand starting at position 64 of SEQ ID NO: 1560530
gugaccugguuaucccaga

SEQ ID NO: 1606278 - RNA, 19 nt, Artificial Sequence
  Description of Artificial Sequence: Synthetic oligonucleotide
  Antisense strand to SEQ ID NO: 1606277
ucugggauaaccaggucac

SEQ ID NO: 1606279 - RNA, 19 nt, Artificial Sequence
  Description of Artificial Sequence: Synthetic oligonucleotide
  Sense strand starting at position 120 of SEQ ID NO: 1560530
ugacuuucugguugccuga

SEQ ID NO: 1606280 - RNA, 19 nt, Artificial Sequence
  Description of Artificial Sequence: Synthetic oligonucleotide
  Antisense strand to SEQ ID NO: 1606279
ucaggcaaccagaaaguca

SEQ ID NO: 1606281 - RNA, 19 nt, Artificial Sequence
  Description of Artificial Sequence: Synthetic oligonucleotide
  Sense strand starting at position 182 of SEQ ID NO: 1560530
gggaacucauguuugagua

SEQ ID NO: 1606282 - RNA, 19 nt, Artificial Sequence
  Description of Artificial Sequence: Synthetic oligonucleotide
  Antisense strand to SEQ ID NO: 1606281
uacucaaacaugaguuccc

SEQ ID NO: 1606283 - RNA, 19 nt, Artificial Sequence
  Description of Artificial Sequence: Synthetic oligonucleotide
  Sense strand starting at position 183 of SEQ ID NO: 1560530
ggaacucauguuugaguag

SEQ ID NO: 1606284 - RNA, 19 nt, Artificial Sequence
  Description of Artificial Sequence: Synthetic oligonucleotide
  Antisense strand to SEQ ID NO: 1606283
cuacucaaacaugaguucc

SEQ ID NO: 1606285 - RNA, 19 nt, Artificial Sequence
  Description of Artificial Sequence: Synthetic oligonucleotide
  Sense strand starting at position 684 of SEQ ID NO: 1560530
cuggcuuucuuuccauaga

SEQ ID NO: 1606286 - RNA, 19 nt, Artificial Sequence
  Description of Artificial Sequence: Synthetic oligonucleotide
  Antisense strand to SEQ ID NO: 1606285
ucuauggaaagaaagccag

SEQ ID NO: 1606287 - RNA, 19 nt, Artificial Sequence
  Description of Artificial Sequence: Synthetic oligonucleotide
  Sense strand starting at position 685 of SEQ ID NO: 1560530
uggcuuucuuuccauagau

SEQ ID NO: 1606288 - RNA, 19 nt, Artificial Sequence
  Description of Artificial Sequence: Synthetic oligonucleotide
  Antisense strand to SEQ ID NO: 1606287
aucuauggaaagaaagcca

SEQ ID NO: 1606289 - RNA, 19 nt, Artificial Sequence
  Description of Artificial Sequence: Synthetic oligonucleotide
  Sense strand starting at position 1225 of SEQ ID NO: 1560530
cugagagcucucgggaaac

SEQ ID NO: 1606290 - RNA, 19 nt, Artificial Sequence
  Description of Artificial Sequence: Synthetic oligonucleotide
  Antisense strand to SEQ ID NO: 1606289
guuucccgagagcucucag

SEQ ID NO: 1606291 - RNA, 19 nt, Artificial Sequence
  Description of Artificial Sequence: Synthetic oligonucleotide
  Sense strand starting at position 1460 of SEQ ID NO: 1560530
cggugccggucgaagaaau

SEQ ID NO: 1606292 - RNA, 19 nt, Artificial Sequence
  Description of Artificial Sequence: Synthetic oligonucleotide
  Antisense strand to SEQ ID NO: 1606291
auuucuucgaccggcaccg

SEQ ID NO: 1606293 - RNA, 19 nt, Artificial Sequence
  Description of Artificial Sequence: Synthetic oligonucleotide
  Sense strand starting at position 1763 of SEQ ID NO: 1560530
uccgguguccgcgcguaaa

SEQ ID NO: 1606294 - RNA, 19 nt, Artificial Sequence
  Description of Artificial Sequence: Synthetic oligonucleotide
  Antisense strand to SEQ ID NO: 1606293
uuuacgcgcggacaccgga

SEQ ID NO: 1606295 - RNA, 19 nt, Artificial Sequence
  Description of Artificial Sequence: Synthetic oligonucleotide
  Sense strand starting at position 2005 of SEQ ID NO: 1560530
gugcguguguuucgucaga

SEQ ID NO: 1606296 - RNA, 19 nt, Artificial Sequence
  Description of Artificial Sequence: Synthetic oligonucleotide
  Antisense strand to SEQ ID NO: 1606295
ucugacgaaacacacgcac

SEQ ID NO: 1606297 - RNA, 19 nt, Artificial Sequence
  Description of Artificial Sequence: Synthetic oligonucleotide
  Sense strand starting at position 2007 of SEQ ID NO: 1560530
gcguguguuucgucagaau

SEQ ID NO: 1606298 - RNA, 19 nt, Artificial Sequence
  Description of Artificial Sequence: Synthetic oligonucleotide
  Antisense strand to SEQ ID NO: 1606297
auucugacgaaacacacgc

SEQ ID NO: 1606299 - RNA, 19 nt, Artificial Sequence
  Description of Artificial Sequence: Synthetic oligonucleotide
  Sense strand starting at position 2010 of SEQ ID NO: 1560530
uguguuucgucagaaucag

SEQ ID NO: 1606300 - RNA, 19 nt, Artificial Sequence
  Description of Artificial Sequence: Synthetic oligonucleotide
  Antisense strand to SEQ ID NO: 1606299
cugauucugacgaaacaca

SEQ ID NO: 1606301 - RNA, 19 nt, Artificial Sequence
  Description of Artificial Sequence: Synthetic oligonucleotide
  Sense strand starting at position 2473 of SEQ ID NO: 1560530
ugggauguaucucugagua

SEQ ID NO: 1606302 - RNA, 19 nt, Artificial Sequence
  Description of Artificial Sequence: Synthetic oligonucleotide
  Antisense strand to SEQ ID NO: 1606301
uacucagagauacauccca

SEQ ID NO: 1606303 - RNA, 19 nt, Artificial Sequence
  Description of Artificial Sequence: Synthetic oligonucleotide
  Sense strand starting at position 2475 of SEQ ID NO: 1560530
ggauguaucucugaguauc

SEQ ID NO: 1606304 - RNA, 19 nt, Artificial Sequence
  Description of Artificial Sequence: Synthetic oligonucleotide
  Antisense strand to SEQ ID NO: 1606303
gauacucagagauacaucc

SEQ ID NO: 1606305 - RNA, 19 nt, Artificial Sequence
  Description of Artificial Sequence: Synthetic oligonucleotide
  Sense strand starting at position 2486 of SEQ ID NO: 1560530
ugaguaucucuauggguca

SEQ ID NO: 1606306 - RNA, 19 nt, Artificial Sequence
  Description of Artificial Sequence: Synthetic oligonucleotide
  Antisense strand to SEQ ID NO: 1606305
ugacccauagagauacuca

SEQ ID NO: 1606307 - RNA, 19 nt, Artificial Sequence
  Description of Artificial Sequence: Synthetic oligonucleotide
  Sense strand starting at position 2487 of SEQ ID NO: 1560530
gaguaucucuaugggucau

SEQ ID NO: 1606308 - RNA, 19 nt, Artificial Sequence
  Description of Artificial Sequence: Synthetic oligonucleotide
  Antisense strand to SEQ ID NO: 1606307
augacccauagagauacuc

SEQ ID NO: 1606309 - RNA, 19 nt, Artificial Sequence
  Description of Artificial Sequence: Synthetic oligonucleotide
  Sense strand starting at position 2501 of SEQ ID NO: 1560530
gucauuuauuucugagauu

SEQ ID NO: 1606310 - RNA, 19 nt, Artificial Sequence
  Description of Artificial Sequence: Synthetic oligonucleotide
  Antisense strand to SEQ ID NO: 1606309
aaucucagaaauaaaugac

SEQ ID NO: 1606311 - RNA, 19 nt, Artificial Sequence
  Description of Artificial Sequence: Synthetic oligonucleotide
  Sense strand starting at position 2504 of SEQ ID NO: 1560530
auuuauuucugagauucgu

SEQ ID NO: 1606312 - RNA, 19 nt, Artificial Sequence
  Description of Artificial Sequence: Synthetic oligonucleotide
  Antisense strand to SEQ ID NO: 1606311
acgaaucucagaaauaaau

SEQ ID NO: 1606313 - RNA, 19 nt, Artificial Sequence
  Description of Artificial Sequence: Synthetic oligonucleotide
  Sense strand starting at position 2508 of SEQ ID NO: 1560530
auuucugagauucgucguu

SEQ ID NO: 1606314 - RNA, 19 nt, Artificial Sequence
  Description of Artificial Sequence: Synthetic oligonucleotide
  Antisense strand to SEQ ID NO: 1606313
aacgacgaaucucagaaau

SEQ ID NO: 1606315 - RNA, 19 nt, Artificial Sequence
  Description of Artificial Sequence: Synthetic oligonucleotide
  Sense strand starting at position 2510 of SEQ ID NO: 1560530
uucugagauucgucguucu

SEQ ID NO: 1606316 - RNA, 19 nt, Artificial Sequence
  Description of Artificial Sequence: Synthetic oligonucleotide
  Antisense strand to SEQ ID NO: 1606315
agaacgacgaaucucagaa

SEQ ID NO: 1606317 - RNA, 19 nt, Artificial Sequence
  Description of Artificial Sequence: Synthetic oligonucleotide
  Sense strand starting at position 2567 of SEQ ID NO: 1560530
cucggucuccgccuuuauu

SEQ ID NO: 1606318 - RNA, 19 nt, Artificial Sequence
  Description of Artificial Sequence: Synthetic oligonucleotide
  Antisense strand to SEQ ID NO: 1606317
aauaaaggcggagaccgag

SEQ ID NO: 1606319 - RNA, 19 nt, Artificial Sequence
  Description of Artificial Sequence: Synthetic oligonucleotide
  Sense strand starting at position 2604 of SEQ ID NO: 1560530
ccguuuaucucuugucucu

SEQ ID NO: 1606320 - RNA, 19 nt, Artificial Sequence
  Description of Artificial Sequence: Synthetic oligonucleotide
  Antisense strand to SEQ ID NO: 1606319
agagacaagagauaaacgg

SEQ ID NO: 1606321 - RNA, 19 nt, Artificial Sequence
  Description of Artificial Sequence: Synthetic oligonucleotide
  Sense strand starting at position 2758 of SEQ ID NO: 1560530
ggagucauaucucuugauc

SEQ ID NO: 1606322 - RNA, 19 nt, Artificial Sequence
  Description of Artificial Sequence: Synthetic oligonucleotide
  Antisense strand to SEQ ID NO: 1606321
gaucaagagauaugacucc

SEQ ID NO: 1606323 - RNA, 19 nt, Artificial Sequence
  Description of Artificial Sequence: Synthetic oligonucleotide
  Sense strand starting at position 2760 of SEQ ID NO: 1560530
agucauaucucuugaucuc

SEQ ID NO: 1606324 - RNA, 19 nt, Artificial Sequence
  Description of Artificial Sequence: Synthetic oligonucleotide
  Antisense strand to SEQ ID NO: 1606323
gagaucaagagauaugacu

SEQ ID NO: 1606325 - RNA, 19 nt, Artificial Sequence
  Description of Artificial Sequence: Synthetic oligonucleotide
  Sense strand starting at position 2761 of SEQ ID NO: 1560530
gucauaucucuugaucucu

SEQ ID NO: 1606326 - RNA, 19 nt, Artificial Sequence
  Description of Artificial Sequence: Synthetic oligonucleotide
  Antisense strand to SEQ ID NO: 1606325
agagaucaagagauaugac

SEQ ID NO: 1606327 - RNA, 19 nt, Artificial Sequence
  Description of Artificial Sequence: Synthetic oligonucleotide
  Sense strand starting at position 2917 of SEQ ID NO: 1560530
ccuggauucuucgcaagac

SEQ ID NO: 1606328 - RNA, 19 nt, Artificial Sequence
  Description of Artificial Sequence: Synthetic oligonucleotide
  Antisense strand to SEQ ID NO: 1606327
gucuugcgaagaauccagg

SEQ ID NO: 1606329 - RNA, 19 nt, Artificial Sequence
  Description of Artificial Sequence: Synthetic oligonucleotide
  Sense strand starting at position 2918 of SEQ ID NO: 1560530
cuggauucuucgcaagacu

SEQ ID NO: 1606330 - RNA, 19 nt, Artificial Sequence
  Description of Artificial Sequence: Synthetic oligonucleotide
  Antisense strand to SEQ ID NO: 1606329
agucuugcgaagaauccag

SEQ ID NO: 1606331 - RNA, 19 nt, Artificial Sequence
  Description of Artificial Sequence: Synthetic oligonucleotide
  Sense strand starting at position 2929 of SEQ ID NO: 1560530
gcaagacuuucugagaccu

SEQ ID NO: 1606332 - RNA, 19 nt, Artificial Sequence
  Description of Artificial Sequence: Synthetic oligonucleotide
  Antisense strand to SEQ ID NO: 1606331
aggucucagaaagucuugc

SEQ ID NO: 1606333 - RNA, 19 nt, Artificial Sequence
  Description of Artificial Sequence: Synthetic oligonucleotide
  Sense strand starting at position 3096 of SEQ ID NO: 1560530
acugguguccggugacacu

SEQ ID NO: 1606334 - RNA, 19 nt, Artificial Sequence
  Description of Artificial Sequence: Synthetic oligonucleotide
  Antisense strand to SEQ ID NO: 1606333
agugucaccggacaccagu

SEQ ID NO: 1606335 - RNA, 19 nt, Artificial Sequence
  Description of Artificial Sequence: Synthetic oligonucleotide
  Sense strand starting at position 3157 of SEQ ID NO: 1560530
ggguuugaucacugagacu

SEQ ID NO: 1606336 - RNA, 19 nt, Artificial Sequence
  Description of Artificial Sequence: Synthetic oligonucleotide
  Antisense strand to SEQ ID NO: 1606335
agucucagugaucaaaccc

SEQ ID NO: 1606337 - RNA, 19 nt, Artificial Sequence
  Description of Artificial Sequence: Synthetic oligonucleotide
  Sense strand starting at position 3236 of SEQ ID NO: 1560530
guucgaacgcccugcuaau

SEQ ID NO: 1606338 - RNA, 19 nt, Artificial Sequence
  Description of Artificial Sequence: Synthetic oligonucleotide
  Antisense strand to SEQ ID NO: 1606337
auuagcagggcguucgaac

SEQ ID NO: 1606339 - RNA, 19 nt, Artificial Sequence
  Description of Artificial Sequence: Synthetic oligonucleotide
  Sense strand starting at position 3343 of SEQ ID NO: 1560530
agaggaguuucccucuugu

SEQ ID NO: 1606340 - RNA, 19 nt, Artificial Sequence
  Description of Artificial Sequence: Synthetic oligonucleotide
  Antisense strand to SEQ ID NO: 1606339
acaagagggaaacuccucu

SEQ ID NO: 1606341 - RNA, 19 nt, Artificial Sequence
  Description of Artificial Sequence: Synthetic oligonucleotide
  Sense strand starting at position 3786 of SEQ ID NO: 1560530
aauuguuugugggcggcaa

SEQ ID NO: 1606342 - RNA, 19 nt, Artificial Sequence
  Description of Artificial Sequence: Synthetic oligonucleotide
  Antisense strand to SEQ ID NO: 1606341
uugccgcccacaaacaauu

SEQ ID NO: 1606343 - RNA, 19 nt, Artificial Sequence
  Description of Artificial Sequence: Synthetic oligonucleotide
  Sense strand starting at position 114 of SEQ ID NO: 1560531
uccagaaggcugugagguu

SEQ ID NO: 1606344 - RNA, 19 nt, Artificial Sequence
  Description of Artificial Sequence: Synthetic oligonucleotide
  Antisense strand to SEQ ID NO: 1606343
aaccucacagccuucugga

SEQ ID NO: 1606345 - RNA, 19 nt, Artificial Sequence
  Description of Artificial Sequence: Synthetic oligonucleotide
  Sense strand starting at position 349 of SEQ ID NO: 1560531
aggagaauuugagggcuga

SEQ ID NO: 1606346 - RNA, 19 nt, Artificial Sequence
  Description of Artificial Sequence: Synthetic oligonucleotide
  Antisense strand to SEQ ID NO: 1606345
ucagcccucaaauucuccu

SEQ ID NO: 1606347 - RNA, 19 nt, Artificial Sequence
  Description of Artificial Sequence: Synthetic oligonucleotide
  Sense strand starting at position 424 of SEQ ID NO: 1560531
gaccaagaguagugagaag

SEQ ID NO: 1606348 - RNA, 19 nt, Artificial Sequence
  Description of Artificial Sequence: Synthetic oligonucleotide
  Antisense strand to SEQ ID NO: 1606347
cuucucacuacucuugguc

SEQ ID NO: 1606349 - RNA, 19 nt, Artificial Sequence
  Description of Artificial Sequence: Synthetic oligonucleotide
  Sense strand starting at position 548 of SEQ ID NO: 1560531
ggaggaagugucuaagcgu

SEQ ID NO: 1606350 - RNA, 19 nt, Artificial Sequence
  Description of Artificial Sequence: Synthetic oligonucleotide
  Antisense strand to SEQ ID NO: 1606349
acgcuuagacacuuccucc

SEQ ID NO: 1606351 - RNA, 19 nt, Artificial Sequence
  Description of Artificial Sequence: Synthetic oligonucleotide
  Sense strand starting at position 551 of SEQ ID NO: 1560531
ggaagugucuaagcgucua

SEQ ID NO: 1606352 - RNA, 19 nt, Artificial Sequence
  Description of Artificial Sequence: Synthetic oligonucleotide
  Antisense strand to SEQ ID NO: 1606351
uagacgcuuagacacuucc

SEQ ID NO: 1606353 - RNA, 19 nt, Artificial Sequence
  Description of Artificial Sequence: Synthetic oligonucleotide
  Sense strand starting at position 628 of SEQ ID NO: 1560531
gagauccgucuuuggagga

SEQ ID NO: 1606354 - RNA, 19 nt, Artificial Sequence
  Description of Artificial Sequence: Synthetic oligonucleotide
  Antisense strand to SEQ ID NO: 1606353
uccuccaaagacggaucuc

SEQ ID NO: 1606355 - RNA, 19 nt, Artificial Sequence
  Description of Artificial Sequence: Synthetic oligonucleotide
  Sense strand starting at position 629 of SEQ ID NO: 1560531
agauccgucuuuggaggau

SEQ ID NO: 1606356 - RNA, 19 nt, Artificial Sequence
  Description of Artificial Sequence: Synthetic oligonucleotide
  Antisense strand to SEQ ID NO: 1606355
auccuccaaagacggaucu

SEQ ID NO: 1606357 - RNA, 19 nt, Artificial Sequence
  Description of Artificial Sequence: Synthetic oligonucleotide
  Sense strand starting at position 707 of SEQ ID NO: 1560531
ggaagaggcuucuaggaga

SEQ ID NO: 1606358 - RNA, 19 nt, Artificial Sequence
  Description of Artificial Sequence: Synthetic oligonucleotide
  Antisense strand to SEQ ID NO: 1606357
ucuccuagaagccucuucc

SEQ ID NO: 1606359 - RNA, 19 nt, Artificial Sequence
  Description of Artificial Sequence: Synthetic oligonucleotide
  Sense strand starting at position 1191 of SEQ ID NO: 1560531
ccgagcuccuccucaaaca

SEQ ID NO: 1606360 - RNA, 19 nt, Artificial Sequence
  Description of Artificial Sequence: Synthetic oligonucleotide
  Antisense strand to SEQ ID NO: 1606359
uguuugaggaggagcucgg

SEQ ID NO: 1606361 - RNA, 19 nt, Artificial Sequence
  Description of Artificial Sequence: Synthetic oligonucleotide
  Sense strand starting at position 1252 of SEQ ID NO: 1560531
gguaguaguugagcacgua

SEQ ID NO: 1606362 - RNA, 19 nt, Artificial Sequence
  Description of Artificial Sequence: Synthetic oligonucleotide
  Antisense strand to SEQ ID NO: 1606361
uacgugcucaacuacuacc

SEQ ID NO: 1606363 - RNA, 19 nt, Artificial Sequence
  Description of Artificial Sequence: Synthetic oligonucleotide
  Sense strand starting at position 1423 of SEQ ID NO: 1560531
ccacguugaucacgaucuu

SEQ ID NO: 1606364 - RNA, 19 nt, Artificial Sequence
  Description of Artificial Sequence: Synthetic oligonucleotide
  Antisense strand to SEQ ID NO: 1606363
aagaucgugaucaacgugg

SEQ ID NO: 1606365 - RNA, 19 nt, Artificial Sequence
  Description of Artificial Sequence: Synthetic oligonucleotide
  Sense strand starting at position 1688 of SEQ ID NO: 1560531
gcagacugagcucagcauu

SEQ ID NO: 1606366 - RNA, 19 nt, Artificial Sequence
  Description of Artificial Sequence: Synthetic oligonucleotide
  Antisense strand to SEQ ID NO: 1606365
aaugcugagcucagucugc

SEQ ID NO: 1606367 - RNA, 19 nt, Artificial Sequence
  Description of Artificial Sequence: Synthetic oligonucleotide
  Sense strand starting at position 1691 of SEQ ID NO: 1560531
gacugagcucagcauugga

SEQ ID NO: 1606368 - RNA, 19 nt, Artificial Sequence
  Description of Artificial Sequence: Synthetic oligonucleotide
  Antisense strand to SEQ ID NO: 1606367
uccaaugcugagcucaguc

SEQ ID NO: 1606369 - RNA, 19 nt, Artificial Sequence
  Description of Artificial Sequence: Synthetic oligonucleotide
  Sense strand starting at position 1933 of SEQ ID NO: 1560531
gcgauuggcucuuucuaag

SEQ ID NO: 1606370 - RNA, 19 nt, Artificial Sequence
  Description of Artificial Sequence: Synthetic oligonucleotide
  Antisense strand to SEQ ID NO: 1606369
cuuagaaagagccaaucgc

SEQ ID NO: 1606371 - RNA, 19 nt, Artificial Sequence
  Description of Artificial Sequence: Synthetic oligonucleotide
  Sense strand starting at position 1936 of SEQ ID NO: 1560531
auuggcucuuucuaagaga

SEQ ID NO: 1606372 - RNA, 19 nt, Artificial Sequence
  Description of Artificial Sequence: Synthetic oligonucleotide
  Antisense strand to SEQ ID NO: 1606371
ucucuuagaaagagccaau

SEQ ID NO: 1606373 - RNA, 19 nt, Artificial Sequence
  Description of Artificial Sequence: Synthetic oligonucleotide
  Sense strand starting at position 1939 of SEQ ID NO: 1560531
ggcucuuucuaagagagca

SEQ ID NO: 1606374 - RNA, 19 nt, Artificial Sequence
  Description of Artificial Sequence: Synthetic oligonucleotide
  Antisense strand to SEQ ID NO: 1606373
ugcucucuuagaaagagcc

SEQ ID NO: 1606375 - RNA, 19 nt, Artificial Sequence
  Description of Artificial Sequence: Synthetic oligonucleotide
  Sense strand starting at position 1992 of SEQ ID NO: 1560531
gggaccgguuacuacuaau

SEQ ID NO: 1606376 - RNA, 19 nt, Artificial Sequence
  Description of Artificial Sequence: Synthetic oligonucleotide
  Antisense strand to SEQ ID NO: 1606375
auuaguaguaaccgguccc

SEQ ID NO: 1606377 - RNA, 19 nt, Artificial Sequence
  Description of Artificial Sequence: Synthetic oligonucleotide
  Sense strand starting at position 1998 of SEQ ID NO: 1560531
gguuacuacuaauuguguu

SEQ ID NO: 1606378 - RNA, 19 nt, Artificial Sequence
  Description of Artificial Sequence: Synthetic oligonucleotide
  Antisense strand to SEQ ID NO: 1606377
aacacaauuaguaguaacc

SEQ ID NO: 1606379 - RNA, 19 nt, Artificial Sequence
  Description of Artificial Sequence: Synthetic oligonucleotide
  Sense strand starting at position 2006 of SEQ ID NO: 1560531
cuaauuguguucggcagca

SEQ ID NO: 1606380 - RNA, 19 nt, Artificial Sequence
  Description of Artificial Sequence: Synthetic oligonucleotide
  Antisense strand to SEQ ID NO: 1606379
ugcugccgaacacaauuag

SEQ ID NO: 1606381 - RNA, 19 nt, Artificial Sequence
  Description of Artificial Sequence: Synthetic oligonucleotide
  Sense strand starting at position 2008 of SEQ ID NO: 1560531
aauuguguucggcagcacu

SEQ ID NO: 1606382 - RNA, 19 nt, Artificial Sequence
  Description of Artificial Sequence: Synthetic oligonucleotide
  Antisense strand to SEQ ID NO: 1606381
agugcugccgaacacaauu

SEQ ID NO: 1606383 - RNA, 19 nt, Artificial Sequence
  Description of Artificial Sequence: Synthetic oligonucleotide
  Sense strand starting at position 2178 of SEQ ID NO: 1560531
cguccugauugggcugaga

SEQ ID NO: 1606384 - RNA, 19 nt, Artificial Sequence
  Description of Artificial Sequence: Synthetic oligonucleotide
  Antisense strand to SEQ ID NO: 1606383
ucucagcccaaucaggacg

SEQ ID NO: 1606385 - RNA, 19 nt, Artificial Sequence
  Description of Artificial Sequence: Synthetic oligonucleotide
  Sense strand starting at position 2180 of SEQ ID NO: 1560531
uccugauugggcugagaaa

SEQ ID NO: 1606386 - RNA, 19 nt, Artificial Sequence
  Description of Artificial Sequence: Synthetic oligonucleotide
  Antisense strand to SEQ ID NO: 1606385
uuucucagcccaaucagga

SEQ ID NO: 1606387 - RNA, 19 nt, Artificial Sequence
  Description of Artificial Sequence: Synthetic oligonucleotide
  Sense strand starting at position 2265 of SEQ ID NO: 1560531
ggaggagcauugcuuggaa

SEQ ID NO: 1606388 - RNA, 19 nt, Artificial Sequence
  Description of Artificial Sequence: Synthetic oligonucleotide
  Antisense strand to SEQ ID NO: 1606387
uuccaagcaaugcuccucc

SEQ ID NO: 1606389 - RNA, 19 nt, Artificial Sequence
  Description of Artificial Sequence: Synthetic oligonucleotide
  Sense strand starting at position 2267 of SEQ ID NO: 1560531
aggagcauugcuuggaaga

SEQ ID NO: 1606390 - RNA, 19 nt, Artificial Sequence
  Description of Artificial Sequence: Synthetic oligonucleotide
  Antisense strand to SEQ ID NO: 1606389
ucuuccaagcaaugcuccu

SEQ ID NO: 1606391 - RNA, 19 nt, Artificial Sequence
  Description of Artificial Sequence: Synthetic oligonucleotide
  Sense strand starting at position 2268 of SEQ ID NO: 1560531
ggagcauugcuuggaagag

SEQ ID NO: 1606392 - RNA, 19 nt, Artificial Sequence
  Description of Artificial Sequence: Synthetic oligonucleotide
  Antisense strand to SEQ ID NO: 1606391
cucuuccaagcaaugcucc

SEQ ID NO: 1606393 - RNA, 19 nt, Artificial Sequence
  Description of Artificial Sequence: Synthetic oligonucleotide
  Sense strand starting at position 2269 of SEQ ID NO: 1560531
gagcauugcuuggaagaga

SEQ ID NO: 1606394 - RNA, 19 nt, Artificial Sequence
  Description of Artificial Sequence: Synthetic oligonucleotide
  Antisense strand to SEQ ID NO: 1606393
ucucuuccaagcaaugcuc

SEQ ID NO: 1606395 - RNA, 19 nt, Artificial Sequence
  Description of Artificial Sequence: Synthetic oligonucleotide
  Sense strand starting at position 2302 of SEQ ID NO: 1560531
guagaaacgguccagauga

SEQ ID NO: 1606396 - RNA, 19 nt, Artificial Sequence
  Description of Artificial Sequence: Synthetic oligonucleotide
  Antisense strand to SEQ ID NO: 1606395
ucaucuggaccguuucuac

SEQ ID NO: 1606397 - RNA, 19 nt, Artificial Sequence
  Description of Artificial Sequence: Synthetic oligonucleotide
  Sense strand starting at position 2406 of SEQ ID NO: 1560531
agacuuagacucggugaga

SEQ ID NO: 1606398 - RNA, 19 nt, Artificial Sequence
  Description of Artificial Sequence: Synthetic oligonucleotide
  Antisense strand to SEQ ID NO: 1606397
ucucaccgagucuaagucu

SEQ ID NO: 1606399 - RNA, 19 nt, Artificial Sequence
  Description of Artificial Sequence: Synthetic oligonucleotide
  Sense strand starting at position 2407 of SEQ ID NO: 1560531
gacuuagacucggugagaa

SEQ ID NO: 1606400 - RNA, 19 nt, Artificial Sequence
  Description of Artificial Sequence: Synthetic oligonucleotide
  Antisense strand to SEQ ID NO: 1606399
uucucaccgagucuaaguc

SEQ ID NO: 1606401 - RNA, 19 nt, Artificial Sequence
  Description of Artificial Sequence: Synthetic oligonucleotide
  Sense strand starting at position 2419 of SEQ ID NO: 1560531
gugagaagguguugaaacu

SEQ ID NO: 1606402 - RNA, 19 nt, Artificial Sequence
  Description of Artificial Sequence: Synthetic oligonucleotide
  Antisense strand to SEQ ID NO: 1606401
aguuucaacaccuucucac

SEQ ID NO: 1606403 - RNA, 19 nt, Artificial Sequence
  Description of Artificial Sequence: Synthetic oligonucleotide
  Sense strand starting at position 2426 of SEQ ID NO: 1560531
gguguugaaacuugagaga

SEQ ID NO: 1606404 - RNA, 19 nt, Artificial Sequence
  Description of Artificial Sequence: Synthetic oligonucleotide
  Antisense strand to SEQ ID NO: 1606403
ucucucaaguuucaacacc

SEQ ID NO: 1606405 - RNA, 19 nt, Artificial Sequence
  Description of Artificial Sequence: Synthetic oligonucleotide
  Sense strand starting at position 2437 of SEQ ID NO: 1560531
uugagagaguccuggaaac

SEQ ID NO: 1606406 - RNA, 19 nt, Artificial Sequence
  Description of Artificial Sequence: Synthetic oligonucleotide
  Antisense strand to SEQ ID NO: 1606405
guuuccaggacucucucaa

SEQ ID NO: 1606407 - RNA, 19 nt, Artificial Sequence
  Description of Artificial Sequence: Synthetic oligonucleotide
  Sense strand starting at position 2536 of SEQ ID NO: 1560531
gagaaugaguguccggaug

SEQ ID NO: 1606408 - RNA, 19 nt, Artificial Sequence
  Description of Artificial Sequence: Synthetic oligonucleotide
  Antisense strand to SEQ ID NO: 1606407
cauccggacacucauucuc

SEQ ID NO: 1606409 - RNA, 19 nt, Artificial Sequence
  Description of Artificial Sequence: Synthetic oligonucleotide
  Sense strand starting at position 2538 of SEQ ID NO: 1560531
gaaugaguguccggaugga

SEQ ID NO: 1606410 - RNA, 19 nt, Artificial Sequence
  Description of Artificial Sequence: Synthetic oligonucleotide
  Antisense strand to SEQ ID NO: 1606409
uccauccggacacucauuc

SEQ ID NO: 1606411 - RNA, 19 nt, Artificial Sequence
  Description of Artificial Sequence: Synthetic oligonucleotide
  Sense strand starting at position 2541 of SEQ ID NO: 1560531
ugaguguccggauggauga

SEQ ID NO: 1606412 - RNA, 19 nt, Artificial Sequence
  Description of Artificial Sequence: Synthetic oligonucleotide
  Antisense strand to SEQ ID NO: 1606411
ucauccauccggacacuca

SEQ ID NO: 1606413 - RNA, 19 nt, Artificial Sequence
  Description of Artificial Sequence: Synthetic oligonucleotide
  Sense strand starting at position 2924 of SEQ ID NO: 1560531
uugaaugggcgguaggaaa

SEQ ID NO: 1606414 - RNA, 19 nt, Artificial Sequence
  Description of Artificial Sequence: Synthetic oligonucleotide
  Antisense strand to SEQ ID NO: 1606413
uuuccuaccgcccauucaa

SEQ ID NO: 1606415 - RNA, 19 nt, Artificial Sequence
  Description of Artificial Sequence: Synthetic oligonucleotide
  Sense strand starting at position 3322 of SEQ ID NO: 1560531
cgucaagacugaggcaaua

SEQ ID NO: 1606416 - RNA, 19 nt, Artificial Sequence
  Description of Artificial Sequence: Synthetic oligonucleotide
  Antisense strand to SEQ ID NO: 1606415
uauugccucagucuugacg

SEQ ID NO: 1606417 - RNA, 19 nt, Artificial Sequence
  Description of Artificial Sequence: Synthetic oligonucleotide
  Sense strand starting at position 3718 of SEQ ID NO: 1560531
uuucucccuucuugaguau

SEQ ID NO: 1606418 - RNA, 19 nt, Artificial Sequence
  Description of Artificial Sequence: Synthetic oligonucleotide
  Antisense strand to SEQ ID NO: 1606417
auacucaagaagggagaaa

SEQ ID NO: 1606419 - RNA, 19 nt, Artificial Sequence
  Description of Artificial Sequence: Synthetic oligonucleotide
  Sense strand starting at position 3719 of SEQ ID NO: 1560531
uucucccuucuugaguauu

SEQ ID NO: 1606420 - RNA, 19 nt, Artificial Sequence
  Description of Artificial Sequence: Synthetic oligonucleotide
  Antisense strand to SEQ ID NO: 1606419
aauacucaagaagggagaa

SEQ ID NO: 1606421 - RNA, 19 nt, Artificial Sequence
  Description of Artificial Sequence: Synthetic oligonucleotide
  Sense strand starting at position 26 of SEQ ID NO: 1560532
aauugugauggcugcacaa

SEQ ID NO: 1606422 - RNA, 19 nt, Artificial Sequence
  Description of Artificial Sequence: Synthetic oligonucleotide
  Antisense strand to SEQ ID NO: 1606421
uugugcagccaucacaauu

SEQ ID NO: 1606423 - RNA, 19 nt, Artificial Sequence
  Description of Artificial Sequence: Synthetic oligonucleotide
  Sense strand starting at position 37 of SEQ ID NO: 1560532
cugcacaauugugaauaca

SEQ ID NO: 1606424 - RNA, 19 nt, Artificial Sequence
  Description of Artificial Sequence: Synthetic oligonucleotide
  Antisense strand to SEQ ID NO: 1606423
uguauucacaauugugcag

SEQ ID NO: 1606425 - RNA, 19 nt, Artificial Sequence
  Description of Artificial Sequence: Synthetic oligonucleotide
  Sense strand starting at position 67 of SEQ ID NO: 1560532
ugaauuguacccuguagug

SEQ ID NO: 1606426 - RNA, 19 nt, Artificial Sequence
  Description of Artificial Sequence: Synthetic oligonucleotide
  Antisense strand to SEQ ID NO: 1606425
cacuacaggguacaauuca

SEQ ID NO: 1606427 - RNA, 19 nt, Artificial Sequence
  Description of Artificial Sequence: Synthetic oligonucleotide
  Sense strand starting at position 76 of SEQ ID NO: 1560532
cccuguagugaguguauga

SEQ ID NO: 1606428 - RNA, 19 nt, Artificial Sequence
  Description of Artificial Sequence: Synthetic oligonucleotide
  Antisense strand to SEQ ID NO: 1606427
ucauacacucacuacaggg

SEQ ID NO: 1606429 - RNA, 19 nt, Artificial Sequence
  Description of Artificial Sequence: Synthetic oligonucleotide
  Sense strand starting at position 81 of SEQ ID NO: 1560532
uagugaguguaugauauga

SEQ ID NO: 1606430 - RNA, 19 nt, Artificial Sequence
  Description of Artificial Sequence: Synthetic oligonucleotide
  Antisense strand to SEQ ID NO: 1606429
ucauaucauacacucacua

SEQ ID NO: 1606431 - RNA, 19 nt, Artificial Sequence
  Description of Artificial Sequence: Synthetic oligonucleotide
  Sense strand starting at position 83 of SEQ ID NO: 1560532
gugaguguaugauaugaua

SEQ ID NO: 1606432 - RNA, 19 nt, Artificial Sequence
  Description of Artificial Sequence: Synthetic oligonucleotide
  Antisense strand to SEQ ID NO: 1606431
uaucauaucauacacucac

SEQ ID NO: 1606433 - RNA, 19 nt, Artificial Sequence
  Description of Artificial Sequence: Synthetic oligonucleotide
  Sense strand starting at position 85 of SEQ ID NO: 1560532
gaguguaugauaugauaug

SEQ ID NO: 1606434 - RNA, 19 nt, Artificial Sequence
  Description of Artificial Sequence: Synthetic oligonucleotide
  Antisense strand to SEQ ID NO: 1606433
cauaucauaucauacacuc

SEQ ID NO: 1606435 - RNA, 19 nt, Artificial Sequence
  Description of Artificial Sequence: Synthetic oligonucleotide
  Sense strand starting at position 159 of SEQ ID NO: 1560532
acccucugaucuuuggcaa

SEQ ID NO: 1606436 - RNA, 19 nt, Artificial Sequence
  Description of Artificial Sequence: Synthetic oligonucleotide
  Antisense strand to SEQ ID NO: 1606435
uugccaaagaucagagggu

SEQ ID NO: 1606437 - RNA, 19 nt, Artificial Sequence
  Description of Artificial Sequence: Synthetic oligonucleotide
  Sense strand starting at position 190 of SEQ ID NO: 1560532
cucgguuuccuccauugua

SEQ ID NO: 1606438 - RNA, 19 nt, Artificial Sequence
  Description of Artificial Sequence: Synthetic oligonucleotide
  Antisense strand to SEQ ID NO: 1606437
uacaauggaggaaaccgag

SEQ ID NO: 1606439 - RNA, 19 nt, Artificial Sequence
  Description of Artificial Sequence: Synthetic oligonucleotide
  Sense strand starting at position 247 of SEQ ID NO: 1560532
gccuucuuaccauauggau

SEQ ID NO: 1606440 - RNA, 19 nt, Artificial Sequence
  Description of Artificial Sequence: Synthetic oligonucleotide
  Antisense strand to SEQ ID NO: 1606439
auccauaugguaagaaggc

SEQ ID NO: 1606441 - RNA, 19 nt, Artificial Sequence
  Description of Artificial Sequence: Synthetic oligonucleotide
  Sense strand starting at position 308 of SEQ ID NO: 1560532
ugggaucucuggcuucuuu

SEQ ID NO: 1606442 - RNA, 19 nt, Artificial Sequence
  Description of Artificial Sequence: Synthetic oligonucleotide
  Antisense strand to SEQ ID NO: 1606441
aaagaagccagagauccca

SEQ ID NO: 1606443 - RNA, 19 nt, Artificial Sequence
  Description of Artificial Sequence: Synthetic oligonucleotide
  Sense strand starting at position 354 of SEQ ID NO: 1560532
uuacuaggugugugaugga

SEQ ID NO: 1606444 - RNA, 19 nt, Artificial Sequence
  Description of Artificial Sequence: Synthetic oligonucleotide
  Antisense strand to SEQ ID NO: 1606443
uccaucacacaccuaguaa

SEQ ID NO: 1606445 - RNA, 19 nt, Artificial Sequence
  Description of Artificial Sequence: Synthetic oligonucleotide
  Sense strand starting at position 359 of SEQ ID NO: 1560532
aggugugugauggaugaca

SEQ ID NO: 1606446 - RNA, 19 nt, Artificial Sequence
  Description of Artificial Sequence: Synthetic oligonucleotide
  Antisense strand to SEQ ID NO: 1606445
ugucauccaucacacaccu

SEQ ID NO: 1606447 - RNA, 19 nt, Artificial Sequence
  Description of Artificial Sequence: Synthetic oligonucleotide
  Sense strand starting at position 400 of SEQ ID NO: 1560532
cagcucucaucugugaaag

SEQ ID NO: 1606448 - RNA, 19 nt, Artificial Sequence
  Description of Artificial Sequence: Synthetic oligonucleotide
  Antisense strand to SEQ ID NO: 1606447
cuuucacagaugagagcug

SEQ ID NO: 1606449 - RNA, 19 nt, Artificial Sequence
  Description of Artificial Sequence: Synthetic oligonucleotide
  Sense strand starting at position 637 of SEQ ID NO: 1560532
gagcuaugaugcucuacca

SEQ ID NO: 1606450 - RNA, 19 nt, Artificial Sequence
  Description of Artificial Sequence: Synthetic oligonucleotide
  Antisense strand to SEQ ID NO: 1606449
ugguagagcaucauagcuc

SEQ ID NO: 1606451 - RNA, 19 nt, Artificial Sequence
  Description of Artificial Sequence: Synthetic oligonucleotide
  Sense strand starting at position 1050 of SEQ ID NO: 1560532
uuaaauaauuugugcugga

SEQ ID NO: 1606452 - RNA, 19 nt, Artificial Sequence
  Description of Artificial Sequence: Synthetic oligonucleotide
  Antisense strand to SEQ ID NO: 1606451
uccagcacaaauuauuuaa

SEQ ID NO: 1606453 - RNA, 19 nt, Artificial Sequence
  Description of Artificial Sequence: Synthetic oligonucleotide
  Sense strand starting at position 1107 of SEQ ID NO: 1560532
acacuccauuuggaaagaa

SEQ ID NO: 1606454 - RNA, 19 nt, Artificial Sequence
  Description of Artificial Sequence: Synthetic oligonucleotide
  Antisense strand to SEQ ID NO: 1606453
uucuuuccaaauggagugu

SEQ ID NO: 1606455 - RNA, 19 nt, Artificial Sequence
  Description of Artificial Sequence: Synthetic oligonucleotide
  Sense strand starting at position 1130 of SEQ ID NO: 1560532
augagacaaugucaaguuu

SEQ ID NO: 1606456 - RNA, 19 nt, Artificial Sequence
  Description of Artificial Sequence: Synthetic oligonucleotide
  Antisense strand to SEQ ID NO: 1606455
aaacuugacauugucucau

SEQ ID NO: 1606457 - RNA, 19 nt, Artificial Sequence
  Description of Artificial Sequence: Synthetic oligonucleotide
  Sense strand starting at position 1209 of SEQ ID NO: 1560532
gccauucgcgaggguucau

SEQ ID NO: 1606458 - RNA, 19 nt, Artificial Sequence
  Description of Artificial Sequence: Synthetic oligonucleotide
  Antisense strand to SEQ ID NO: 1606457
augaacccucgcgaauggc

SEQ ID NO: 1606459 - RNA, 19 nt, Artificial Sequence
  Description of Artificial Sequence: Synthetic oligonucleotide
  Sense strand starting at position 1323 of SEQ ID NO: 1560532
cugacaacccugcauguua

SEQ ID NO: 1606460 - RNA, 19 nt, Artificial Sequence
  Description of Artificial Sequence: Synthetic oligonucleotide
  Antisense strand to SEQ ID NO: 1606459
uaacaugcaggguugucag

SEQ ID NO: 1606461 - RNA, 19 nt, Artificial Sequence
  Description of Artificial Sequence: Synthetic oligonucleotide
  Sense strand starting at position 1338 of SEQ ID NO: 1560532
guuagagacuguucuccca

SEQ ID NO: 1606462 - RNA, 19 nt, Artificial Sequence
  Description of Artificial Sequence: Synthetic oligonucleotide
  Antisense strand to SEQ ID NO: 1606461
ugggagaacagucucuaac

SEQ ID NO: 1606463 - RNA, 19 nt, Artificial Sequence
  Description of Artificial Sequence: Synthetic oligonucleotide
  Sense strand starting at position 1578 of SEQ ID NO: 1560532
accaaagcccuuugaugaa

SEQ ID NO: 1606464 - RNA, 19 nt, Artificial Sequence
  Description of Artificial Sequence: Synthetic oligonucleotide
  Antisense strand to SEQ ID NO: 1606463
uucaucaaagggcuuuggu

SEQ ID NO: 1606465 - RNA, 19 nt, Artificial Sequence
  Description of Artificial Sequence: Synthetic oligonucleotide
  Sense strand starting at position 1634 of SEQ ID NO: 1560532
agguuagucccuugucgca

SEQ ID NO: 1606466 - RNA, 19 nt, Artificial Sequence
  Description of Artificial Sequence: Synthetic oligonucleotide
  Antisense strand to SEQ ID NO: 1606465
ugcgacaagggacuaaccu

SEQ ID NO: 1606467 - RNA, 19 nt, Artificial Sequence
  Description of Artificial Sequence: Synthetic oligonucleotide
  Sense strand starting at position 1734 of SEQ ID NO: 1560532
accacagucuucucaagag

SEQ ID NO: 1606468 - RNA, 19 nt, Artificial Sequence
  Description of Artificial Sequence: Synthetic oligonucleotide
  Antisense strand to SEQ ID NO: 1606467
cucuugagaagacuguggu

SEQ ID NO: 1606469 - RNA, 19 nt, Artificial Sequence
  Description of Artificial Sequence: Synthetic oligonucleotide
  Sense strand starting at position 1995 of SEQ ID NO: 1560532
gaguucugcccucgaaauc

SEQ ID NO: 1606470 - RNA, 19 nt, Artificial Sequence
  Description of Artificial Sequence: Synthetic oligonucleotide
  Antisense strand to SEQ ID NO: 1606469
gauuucgagggcagaacuc

SEQ ID NO: 1606471 - RNA, 19 nt, Artificial Sequence
  Description of Artificial Sequence: Synthetic oligonucleotide
  Sense strand starting at position 2045 of SEQ ID NO: 1560532
cccguugucuacuucccaa

SEQ ID NO: 1606472 - RNA, 19 nt, Artificial Sequence
  Description of Artificial Sequence: Synthetic oligonucleotide
  Antisense strand to SEQ ID NO: 1606471
uugggaaguagacaacggg

SEQ ID NO: 1606473 - RNA, 19 nt, Artificial Sequence
  Description of Artificial Sequence: Synthetic oligonucleotide
  Sense strand starting at position 2202 of SEQ ID NO: 1560532
gcgagagcagcuuaauguu

SEQ ID NO: 1606474 - RNA, 19 nt, Artificial Sequence
  Description of Artificial Sequence: Synthetic oligonucleotide
  Antisense strand to SEQ ID NO: 1606473
aacauuaagcugcucucgc

SEQ ID NO: 1606475 - RNA, 19 nt, Artificial Sequence
  Description of Artificial Sequence: Synthetic oligonucleotide
  Sense strand starting at position 2208 of SEQ ID NO: 1560532
gcagcuuaauguuuccaua

SEQ ID NO: 1606476 - RNA, 19 nt, Artificial Sequence
  Description of Artificial Sequence: Synthetic oligonucleotide
  Antisense strand to SEQ ID NO: 1606475
uauggaaacauuaagcugc

SEQ ID NO: 1606477 - RNA, 19 nt, Artificial Sequence
  Description of Artificial Sequence: Synthetic oligonucleotide
  Sense strand starting at position 2262 of SEQ ID NO: 1560532
gugucaaagucacugucua

SEQ ID NO: 1606478 - RNA, 19 nt, Artificial Sequence
  Description of Artificial Sequence: Synthetic oligonucleotide
  Antisense strand to SEQ ID NO: 1606477
uagacagugacuuugacac

SEQ ID NO: 1606479 - RNA, 19 nt, Artificial Sequence
  Description of Artificial Sequence: Synthetic oligonucleotide
  Sense strand starting at position 2263 of SEQ ID NO: 1560532
ugucaaagucacugucuaa

SEQ ID NO: 1606480 - RNA, 19 nt, Artificial Sequence
  Description of Artificial Sequence: Synthetic oligonucleotide
  Antisense strand to SEQ ID NO: 1606479
uuagacagugacuuugaca

SEQ ID NO: 1606481 - RNA, 19 nt, Artificial Sequence
  Description of Artificial Sequence: Synthetic oligonucleotide
  Sense strand starting at position 2625 of SEQ ID NO: 1560532
cagagaccuugagaggaua

SEQ ID NO: 1606482 - RNA, 19 nt, Artificial Sequence
  Description of Artificial Sequence: Synthetic oligonucleotide
  Antisense strand to SEQ ID NO: 1606481
uauccucucaaggucucug

SEQ ID NO: 1606483 - RNA, 19 nt, Artificial Sequence
  Description of Artificial Sequence: Synthetic oligonucleotide
  Sense strand starting at position 2791 of SEQ ID NO: 1560532
agaugaaauugugaagaca

SEQ ID NO: 1606484 - RNA, 19 nt, Artificial Sequence
  Description of Artificial Sequence: Synthetic oligonucleotide
  Antisense strand to SEQ ID NO: 1606483
ugucuucacaauuucaucu

SEQ ID NO: 1606485 - RNA, 19 nt, Artificial Sequence
  Description of Artificial Sequence: Synthetic oligonucleotide
  Sense strand starting at position 2876 of SEQ ID NO: 1560532
cugagaggguuucucugaa

SEQ ID NO: 1606486 - RNA, 19 nt, Artificial Sequence
  Description of Artificial Sequence: Synthetic oligonucleotide
  Antisense strand to SEQ ID NO: 1606485
uucagagaaacccucucag

SEQ ID NO: 1606487 - RNA, 19 nt, Artificial Sequence
  Description of Artificial Sequence: Synthetic oligonucleotide
  Sense strand starting at position 2880 of SEQ ID NO: 1560532
gaggguuucucugaaagga

SEQ ID NO: 1606488 - RNA, 19 nt, Artificial Sequence
  Description of Artificial Sequence: Synthetic oligonucleotide
  Antisense strand to SEQ ID NO: 1606487
uccuuucagagaaacccuc

SEQ ID NO: 1606489 - RNA, 19 nt, Artificial Sequence
  Description of Artificial Sequence: Synthetic oligonucleotide
  Sense strand starting at position 2884 of SEQ ID NO: 1560532
guuucucugaaaggaugga

SEQ ID NO: 1606490 - RNA, 19 nt, Artificial Sequence
  Description of Artificial Sequence: Synthetic oligonucleotide
  Antisense strand to SEQ ID NO: 1606489
uccauccuuucagagaaac

SEQ ID NO: 1606491 - RNA, 19 nt, Artificial Sequence
  Description of Artificial Sequence: Synthetic oligonucleotide
  Sense strand starting at position 2982 of SEQ ID NO: 1560532
gagccugucacugauggga

SEQ ID NO: 1606492 - RNA, 19 nt, Artificial Sequence
  Description of Artificial Sequence: Synthetic oligonucleotide
  Antisense strand to SEQ ID NO: 1606491
ucccaucagugacaggcuc

SEQ ID NO: 1606493 - RNA, 19 nt, Artificial Sequence
  Description of Artificial Sequence: Synthetic oligonucleotide
  Sense strand starting at position 3523 of SEQ ID NO: 1560532
gguccagaguucccugaga

SEQ ID NO: 1606494 - RNA, 19 nt, Artificial Sequence
  Description of Artificial Sequence: Synthetic oligonucleotide
  Antisense strand to SEQ ID NO: 1606493
ucucagggaacucuggacc

SEQ ID NO: 1606495 - RNA, 19 nt, Artificial Sequence
  Description of Artificial Sequence: Synthetic oligonucleotide
  Sense strand starting at position 3525 of SEQ ID NO: 1560532
uccagaguucccugagaug

SEQ ID NO: 1606496 - RNA, 19 nt, Artificial Sequence
  Description of Artificial Sequence: Synthetic oligonucleotide
  Antisense strand to SEQ ID NO: 1606495
caucucagggaacucugga

SEQ ID NO: 1606497 - RNA, 19 nt, Artificial Sequence
  Description of Artificial Sequence: Synthetic oligonucleotide
  Sense strand starting at position 3528 of SEQ ID NO: 1560532
agaguucccugagaugaag

SEQ ID NO: 1606498 - RNA, 19 nt, Artificial Sequence
  Description of Artificial Sequence: Synthetic oligonucleotide
  Antisense strand to SEQ ID NO: 1606497
cuucaucucagggaacucu

SEQ ID NO: 1606499 - RNA, 19 nt, Artificial Sequence
  Description of Artificial Sequence: Synthetic oligonucleotide
  Sense strand starting at position 3785 of SEQ ID NO: 1560532
ggaccagagucucaaauac

SEQ ID NO: 1606500 - RNA, 19 nt, Artificial Sequence
  Description of Artificial Sequence: Synthetic oligonucleotide
  Antisense strand to SEQ ID NO: 1606499
guauuugagacucuggucc

SEQ ID NO: 1606501 - RNA, 19 nt, Artificial Sequence
  Description of Artificial Sequence: Synthetic oligonucleotide
  Sense strand starting at position 176 of SEQ ID NO: 1560533
gaguuaggagucugggcua

SEQ ID NO: 1606502 - RNA, 19 nt, Artificial Sequence
  Description of Artificial Sequence: Synthetic oligonucleotide
  Antisense strand to SEQ ID NO: 1606501
uagcccagacuccuaacuc

SEQ ID NO: 1606503 - RNA, 19 nt, Artificial Sequence
  Description of Artificial Sequence: Synthetic oligonucleotide
  Sense strand starting at position 425 of SEQ ID NO: 1560533
ugucccuauugggaggaaa

SEQ ID NO: 1606504 - RNA, 19 nt, Artificial Sequence
  Description of Artificial Sequence: Synthetic oligonucleotide
  Antisense strand to SEQ ID NO: 1606503
uuuccucccaauagggaca

SEQ ID NO: 1606505 - RNA, 19 nt, Artificial Sequence
  Description of Artificial Sequence: Synthetic oligonucleotide
  Sense strand starting at position 621 of SEQ ID NO: 1560533
cagguccuugcugaggaau

SEQ ID NO: 1606506 - RNA, 19 nt, Artificial Sequence
  Description of Artificial Sequence: Synthetic oligonucleotide
  Antisense strand to SEQ ID NO: 1606505
auuccucagcaaggaccug

SEQ ID NO: 1606507 - RNA, 19 nt, Artificial Sequence
  Description of Artificial Sequence: Synthetic oligonucleotide
  Sense strand starting at position 632 of SEQ ID NO: 1560533
ugaggaaucucuguuggga

SEQ ID NO: 1606508 - RNA, 19 nt, Artificial Sequence
  Description of Artificial Sequence: Synthetic oligonucleotide
  Antisense strand to SEQ ID NO: 1606507
ucccaacagagauuccuca

SEQ ID NO: 1606509 - RNA, 19 nt, Artificial Sequence
  Description of Artificial Sequence: Synthetic oligonucleotide
  Sense strand starting at position 648 of SEQ ID NO: 1560533
ggagggaggucuuuaguga

SEQ ID NO: 1606510 - RNA, 19 nt, Artificial Sequence
  Description of Artificial Sequence: Synthetic oligonucleotide
  Antisense strand to SEQ ID NO: 1606509
ucacuaaagaccucccucc

SEQ ID NO: 1606511 - RNA, 19 nt, Artificial Sequence
  Description of Artificial Sequence: Synthetic oligonucleotide
  Sense strand starting at position 651 of SEQ ID NO: 1560533
gggaggucuuuagugagga

SEQ ID NO: 1606512 - RNA, 19 nt, Artificial Sequence
  Description of Artificial Sequence: Synthetic oligonucleotide
  Antisense strand to SEQ ID NO: 1606511
uccucacuaaagaccuccc

SEQ ID NO: 1606513 - RNA, 19 nt, Artificial Sequence
  Description of Artificial Sequence: Synthetic oligonucleotide
  Sense strand starting at position 652 of SEQ ID NO: 1560533
ggaggucuuuagugaggac

SEQ ID NO: 1606514 - RNA, 19 nt, Artificial Sequence
  Description of Artificial Sequence: Synthetic oligonucleotide
  Antisense strand to SEQ ID NO: 1606513
guccucacuaaagaccucc

SEQ ID NO: 1606515 - RNA, 19 nt, Artificial Sequence
  Description of Artificial Sequence: Synthetic oligonucleotide
  Sense strand starting at position 672 of SEQ ID NO: 1560533
cccugagaggucuggagau

SEQ ID NO: 1606516 - RNA, 19 nt, Artificial Sequence
  Description of Artificial Sequence: Synthetic oligonucleotide
  Antisense strand to SEQ ID NO: 1606515
aucuccagaccucucaggg

SEQ ID NO: 1606517 - RNA, 19 nt, Artificial Sequence
  Description of Artificial Sequence: Synthetic oligonucleotide
  Sense strand starting at position 688 of SEQ ID NO: 1560533
gauuuaggguccucgcuaa

SEQ ID NO: 1606518 - RNA, 19 nt, Artificial Sequence
  Description of Artificial Sequence: Synthetic oligonucleotide
  Antisense strand to SEQ ID NO: 1606517
uuagcgaggacccuaaauc

SEQ ID NO: 1606519 - RNA, 19 nt, Artificial Sequence
  Description of Artificial Sequence: Synthetic oligonucleotide
  Sense strand starting at position 839 of SEQ ID NO: 1560533
gguugaguucuggguccag

SEQ ID NO: 1606520 - RNA, 19 nt, Artificial Sequence
  Description of Artificial Sequence: Synthetic oligonucleotide
  Antisense strand to SEQ ID NO: 1606519
cuggacccagaacucaacc

SEQ ID NO: 1606521 - RNA, 19 nt, Artificial Sequence
  Description of Artificial Sequence: Synthetic oligonucleotide
  Sense strand starting at position 906 of SEQ ID NO: 1560533
ggaggucucugaggacagu

SEQ ID NO: 1606522 - RNA, 19 nt, Artificial Sequence
  Description of Artificial Sequence: Synthetic oligonucleotide
  Antisense strand to SEQ ID NO: 1606521
acuguccucagagaccucc

SEQ ID NO: 1606523 - RNA, 19 nt, Artificial Sequence
  Description of Artificial Sequence: Synthetic oligonucleotide
  Sense strand starting at position 915 of SEQ ID NO: 1560533
ugaggacaguccuaggcuu

SEQ ID NO: 1606524 - RNA, 19 nt, Artificial Sequence
  Description of Artificial Sequence: Synthetic oligonucleotide
  Antisense strand to SEQ ID NO: 1606523
aagccuaggacuguccuca

SEQ ID NO: 1606525 - RNA, 19 nt, Artificial Sequence
  Description of Artificial Sequence: Synthetic oligonucleotide
  Sense strand starting at position 952 of SEQ ID NO: 1560533
ccgggucaccaagaggauu

SEQ ID NO: 1606526 - RNA, 19 nt, Artificial Sequence
  Description of Artificial Sequence: Synthetic oligonucleotide
  Antisense strand to SEQ ID NO: 1606525
aauccucuuggugacccgg

SEQ ID NO: 1606527 - RNA, 19 nt, Artificial Sequence
  Description of Artificial Sequence: Synthetic oligonucleotide
  Sense strand starting at position 1250 of SEQ ID NO: 1560533
cagaguaagcccugucuca

SEQ ID NO: 1606528 - RNA, 19 nt, Artificial Sequence
  Description of Artificial Sequence: Synthetic oligonucleotide
  Antisense strand to SEQ ID NO: 1606527
ugagacagggcuuacucug

SEQ ID NO: 1606529 - RNA, 19 nt, Artificial Sequence
  Description of Artificial Sequence: Synthetic oligonucleotide
  Sense strand starting at position 1353 of SEQ ID NO: 1560533
gguguuuccuacuuaggag

SEQ ID NO: 1606530 - RNA, 19 nt, Artificial Sequence
  Description of Artificial Sequence: Synthetic oligonucleotide
  Antisense strand to SEQ ID NO: 1606529
cuccuaaguaggaaacacc

SEQ ID NO: 1606531 - RNA, 19 nt, Artificial Sequence
  Description of Artificial Sequence: Synthetic oligonucleotide
  Sense strand starting at position 1356 of SEQ ID NO: 1560533
guuuccuacuuaggaggaa

SEQ ID NO: 1606532 - RNA, 19 nt, Artificial Sequence
  Description of Artificial Sequence: Synthetic oligonucleotide
  Antisense strand to SEQ ID NO: 1606531
uuccuccuaaguaggaaac

SEQ ID NO: 1606533 - RNA, 19 nt, Artificial Sequence
  Description of Artificial Sequence: Synthetic oligonucleotide
  Sense strand starting at position 1476 of SEQ ID NO: 1560533
ggauaaggguauucgugag

SEQ ID NO: 1606534 - RNA, 19 nt, Artificial Sequence
  Description of Artificial Sequence: Synthetic oligonucleotide
  Antisense strand to SEQ ID NO: 1606533
cucacgaauacccuuaucc

SEQ ID NO: 1606535 - RNA, 19 nt, Artificial Sequence
  Description of Artificial Sequence: Synthetic oligonucleotide
  Sense strand starting at position 2098 of SEQ ID NO: 1560533
guguucguucggagagggu

SEQ ID NO: 1606536 - RNA, 19 nt, Artificial Sequence
  Description of Artificial Sequence: Synthetic oligonucleotide
  Antisense strand to SEQ ID NO: 1606535
acccucuccgaacgaacac

SEQ ID NO: 1606537 - RNA, 19 nt, Artificial Sequence
  Description of Artificial Sequence: Synthetic oligonucleotide
  Sense strand starting at position 2214 of SEQ ID NO: 1560533
gcugguucucuauguuaga

SEQ ID NO: 1606538 - RNA, 19 nt, Artificial Sequence
  Description of Artificial Sequence: Synthetic oligonucleotide
  Antisense strand to SEQ ID NO: 1606537
ucuaacauagagaaccagc

SEQ ID NO: 1606539 - RNA, 19 nt, Artificial Sequence
  Description of Artificial Sequence: Synthetic oligonucleotide
  Sense strand starting at position 2215 of SEQ ID NO: 1560533
cugguucucuauguuagaa

SEQ ID NO: 1606540 - RNA, 19 nt, Artificial Sequence
  Description of Artificial Sequence: Synthetic oligonucleotide
  Antisense strand to SEQ ID NO: 1606539
uucuaacauagagaaccag

SEQ ID NO: 1606541 - RNA, 19 nt, Artificial Sequence
  Description of Artificial Sequence: Synthetic oligonucleotide
  Sense strand starting at position 2217 of SEQ ID NO: 1560533
gguucucuauguuagaaga

SEQ ID NO: 1606542 - RNA, 19 nt, Artificial Sequence
  Description of Artificial Sequence: Synthetic oligonucleotide
  Antisense strand to SEQ ID NO: 1606541
ucuucuaacauagagaacc

SEQ ID NO: 1606543 - RNA, 19 nt, Artificial Sequence
  Description of Artificial Sequence: Synthetic oligonucleotide
  Sense strand starting at position 2219 of SEQ ID NO: 1560533
uucucuauguuagaagaau

SEQ ID NO: 1606544 - RNA, 19 nt, Artificial Sequence
  Description of Artificial Sequence: Synthetic oligonucleotide
  Antisense strand to SEQ ID NO: 1606543
auucuucuaacauagagaa

SEQ ID NO: 1606545 - RNA, 19 nt, Artificial Sequence
  Description of Artificial Sequence: Synthetic oligonucleotide
  Sense strand starting at position 2504 of SEQ ID NO: 1560533
gcuggaugauccuggagac

SEQ ID NO: 1606546 - RNA, 19 nt, Artificial Sequence
  Description of Artificial Sequence: Synthetic oligonucleotide
  Antisense strand to SEQ ID NO: 1606545
gucuccaggaucauccagc

SEQ ID NO: 1606547 - RNA, 19 nt, Artificial Sequence
  Description of Artificial Sequence: Synthetic oligonucleotide
  Sense strand starting at position 2514 of SEQ ID NO: 1560533
ccuggagacucaguaauga

SEQ ID NO: 1606548 - RNA, 19 nt, Artificial Sequence
  Description of Artificial Sequence: Synthetic oligonucleotide
  Antisense strand to SEQ ID NO: 1606547
ucauuacugagucuccagg

SEQ ID NO: 1606549 - RNA, 19 nt, Artificial Sequence
  Description of Artificial Sequence: Synthetic oligonucleotide
  Sense strand starting at position 2673 of SEQ ID NO: 1560533
gugagcuaugccugggaga

SEQ ID NO: 1606550 - RNA, 19 nt, Artificial Sequence
  Description of Artificial Sequence: Synthetic oligonucleotide
  Antisense strand to SEQ ID NO: 1606549
ucucccaggcauagcucac

SEQ ID NO: 1606551 - RNA, 19 nt, Artificial Sequence
  Description of Artificial Sequence: Synthetic oligonucleotide
  Sense strand starting at position 2674 of SEQ ID NO: 1560533
ugagcuaugccugggagag

SEQ ID NO: 1606552 - RNA, 19 nt, Artificial Sequence
  Description of Artificial Sequence: Synthetic oligonucleotide
  Antisense strand to SEQ ID NO: 1606551
cucucccaggcauagcuca

SEQ ID NO: 1606553 - RNA, 19 nt, Artificial Sequence
  Description of Artificial Sequence: Synthetic oligonucleotide
  Sense strand starting at position 2675 of SEQ ID NO: 1560533
gagcuaugccugggagaga

SEQ ID NO: 1606554 - RNA, 19 nt, Artificial Sequence
  Description of Artificial Sequence: Synthetic oligonucleotide
  Antisense strand to SEQ ID NO: 1606553
ucucucccaggcauagcuc

SEQ ID NO: 1606555 - RNA, 19 nt, Artificial Sequence
  Description of Artificial Sequence: Synthetic oligonucleotide
  Sense strand starting at position 2771 of SEQ ID NO: 1560533
augaucaagccuggaauca

SEQ ID NO: 1606556 - RNA, 19 nt, Artificial Sequence
  Description of Artificial Sequence: Synthetic oligonucleotide
  Antisense strand to SEQ ID NO: 1606555
ugauuccaggcuugaucau

SEQ ID NO: 1606557 - RNA, 19 nt, Artificial Sequence
  Description of Artificial Sequence: Synthetic oligonucleotide
  Sense strand starting at position 2932 of SEQ ID NO: 1560533
gccucuauuuaagaggaaa

SEQ ID NO: 1606558 - RNA, 19 nt, Artificial Sequence
  Description of Artificial Sequence: Synthetic oligonucleotide
  Antisense strand to SEQ ID NO: 1606557
uuuccucuuaaauagaggc

SEQ ID NO: 1606559 - RNA, 19 nt, Artificial Sequence
  Description of Artificial Sequence: Synthetic oligonucleotide
  Sense strand starting at position 3112 of SEQ ID NO: 1560533
cuauuaaagagcuggcaga

SEQ ID NO: 1606560 - RNA, 19 nt, Artificial Sequence
  Description of Artificial Sequence: Synthetic oligonucleotide
  Antisense strand to SEQ ID NO: 1606559
ucugccagcucuuuaauag

SEQ ID NO: 1606561 - RNA, 19 nt, Artificial Sequence
  Description of Artificial Sequence: Synthetic oligonucleotide
  Sense strand starting at position 3113 of SEQ ID NO: 1560533
uauuaaagagcuggcagau

SEQ ID NO: 1606562 - RNA, 19 nt, Artificial Sequence
  Description of Artificial Sequence: Synthetic oligonucleotide
  Antisense strand to SEQ ID NO: 1606561
aucugccagcucuuuaaua

SEQ ID NO: 1606563 - RNA, 19 nt, Artificial Sequence
  Description of Artificial Sequence: Synthetic oligonucleotide
  Sense strand starting at position 3169 of SEQ ID NO: 1560533
agcagaggcaccugauaau

SEQ ID NO: 1606564 - RNA, 19 nt, Artificial Sequence
  Description of Artificial Sequence: Synthetic oligonucleotide
  Antisense strand to SEQ ID NO: 1606563
auuaucaggugccucugcu

SEQ ID NO: 1606565 - RNA, 19 nt, Artificial Sequence
  Description of Artificial Sequence: Synthetic oligonucleotide
  Sense strand starting at position 3172 of SEQ ID NO: 1560533
agaggcaccugauaauaga

SEQ ID NO: 1606566 - RNA, 19 nt, Artificial Sequence
  Description of Artificial Sequence: Synthetic oligonucleotide
  Antisense strand to SEQ ID NO: 1606565
ucuauuaucaggugccucu

SEQ ID NO: 1606567 - RNA, 19 nt, Artificial Sequence
  Description of Artificial Sequence: Synthetic oligonucleotide
  Sense strand starting at position 3203 of SEQ ID NO: 1560533
auaggugccagugaucgaa

SEQ ID NO: 1606568 - RNA, 19 nt, Artificial Sequence
  Description of Artificial Sequence: Synthetic oligonucleotide
  Antisense strand to SEQ ID NO: 1606567
uucgaucacuggcaccuau

SEQ ID NO: 1606569 - RNA, 19 nt, Artificial Sequence
  Description of Artificial Sequence: Synthetic oligonucleotide
  Sense strand starting at position 3475 of SEQ ID NO: 1560533
uagagacugcaaugaguua

SEQ ID NO: 1606570 - RNA, 19 nt, Artificial Sequence
  Description of Artificial Sequence: Synthetic oligonucleotide
  Antisense strand to SEQ ID NO: 1606569
uaacucauugcagucucua

SEQ ID NO: 1606571 - RNA, 19 nt, Artificial Sequence
  Description of Artificial Sequence: Synthetic oligonucleotide
  Sense strand starting at position 3486 of SEQ ID NO: 1560533
augaguuauggucgcacca

SEQ ID NO: 1606572 - RNA, 19 nt, Artificial Sequence
  Description of Artificial Sequence: Synthetic oligonucleotide
  Antisense strand to SEQ ID NO: 1606571
uggugcgaccauaacucau

SEQ ID NO: 1606573 - RNA, 19 nt, Artificial Sequence
  Description of Artificial Sequence: Synthetic oligonucleotide
  Sense strand starting at position 3513 of SEQ ID NO: 1560533
caguaugggugauagagua

SEQ ID NO: 1606574 - RNA, 19 nt, Artificial Sequence
  Description of Artificial Sequence: Synthetic oligonucleotide
  Antisense strand to SEQ ID NO: 1606573
uacucuaucacccauacug

SEQ ID NO: 1606575 - RNA, 19 nt, Artificial Sequence
  Description of Artificial Sequence: Synthetic oligonucleotide
  Sense strand starting at position 3596 of SEQ ID NO: 1560533
gcaggaagccaaugaacua

SEQ ID NO: 1606576 - RNA, 19 nt, Artificial Sequence
  Description of Artificial Sequence: Synthetic oligonucleotide
  Antisense strand to SEQ ID NO: 1606575
uaguucauuggcuuccugc

SEQ ID NO: 1606577 - RNA, 19 nt, Artificial Sequence
  Description of Artificial Sequence: Synthetic oligonucleotide
  Sense strand starting at position 3842 of SEQ ID NO: 1560533
caaggauggucucaaacug

SEQ ID NO: 1606578 - RNA, 19 nt, Artificial Sequence
  Description of Artificial Sequence: Synthetic oligonucleotide
  Antisense strand to SEQ ID NO: 1606577
caguuugagaccauccuug

SEQ ID NO: 1606579 - RNA, 19 nt, Artificial Sequence
  Description of Artificial Sequence: Synthetic oligonucleotide
  Sense strand starting at position 3928 of SEQ ID NO: 1560533
ggcaguacuugcuuuauua

SEQ ID NO: 1606580 - RNA, 19 nt, Artificial Sequence
  Description of Artificial Sequence: Synthetic oligonucleotide
  Antisense strand to SEQ ID NO: 1606579
uaauaaagcaaguacugcc

SEQ ID NO: 1606581 - RNA, 19 nt, Artificial Sequence
  Description of Artificial Sequence: Synthetic oligonucleotide
  Sense strand starting at position 79 of SEQ ID NO: 1560534
gggauuuccuuugaugagg

SEQ ID NO: 1606582 - RNA, 19 nt, Artificial Sequence
  Description of Artificial Sequence: Synthetic oligonucleotide
  Antisense strand to SEQ ID NO: 1606581
ccucaucaaaggaaauccc

SEQ ID NO: 1606583 - RNA, 19 nt, Artificial Sequence
  Description of Artificial Sequence: Synthetic oligonucleotide
  Sense strand starting at position 211 of SEQ ID NO: 1560534
ggucucuagccagaggaga

SEQ ID NO: 1606584 - RNA, 19 nt, Artificial Sequence
  Description of Artificial Sequence: Synthetic oligonucleotide
  Antisense strand to SEQ ID NO: 1606583
ucuccucuggcuagagacc

SEQ ID NO: 1606585 - RNA, 19 nt, Artificial Sequence
  Description of Artificial Sequence: Synthetic oligonucleotide
  Sense strand starting at position 341 of SEQ ID NO: 1560534
ccgggauucguggaucuga

SEQ ID NO: 1606586 - RNA, 19 nt, Artificial Sequence
  Description of Artificial Sequence: Synthetic oligonucleotide
  Antisense strand to SEQ ID NO: 1606585
ucagauccacgaaucccgg

SEQ ID NO: 1606587 - RNA, 19 nt, Artificial Sequence
  Description of Artificial Sequence: Synthetic oligonucleotide
  Sense strand starting at position 392 of SEQ ID NO: 1560534
ugaccuugggcgaguggua

SEQ ID NO: 1606588 - RNA, 19 nt, Artificial Sequence
  Description of Artificial Sequence: Synthetic oligonucleotide
  Antisense strand to SEQ ID NO: 1606587
uaccacucgcccaagguca

SEQ ID NO: 1606589 - RNA, 19 nt, Artificial Sequence
  Description of Artificial Sequence: Synthetic oligonucleotide
  Sense strand starting at position 875 of SEQ ID NO: 1560534
cgggcaagcuuugaccaau

SEQ ID NO: 1606590 - RNA, 19 nt, Artificial Sequence
  Description of Artificial Sequence: Synthetic oligonucleotide
  Antisense strand to SEQ ID NO: 1606589
auuggucaaagcuugcccg

SEQ ID NO: 1606591 - RNA, 19 nt, Artificial Sequence
  Description of Artificial Sequence: Synthetic oligonucleotide
  Sense strand starting at position 1195 of SEQ ID NO: 1560534
aggcgucuccucuaaagca

SEQ ID NO: 1606592 - RNA, 19 nt, Artificial Sequence
  Description of Artificial Sequence: Synthetic oligonucleotide
  Antisense strand to SEQ ID NO: 1606591
ugcuuuagaggagacgccu

SEQ ID NO: 1606593 - RNA, 19 nt, Artificial Sequence
  Description of Artificial Sequence: Synthetic oligonucleotide
  Sense strand starting at position 1332 of SEQ ID NO: 1560534
gcccaaggugcucaucuua

SEQ ID NO: 1606594 - RNA, 19 nt, Artificial Sequence
  Description of Artificial Sequence: Synthetic oligonucleotide
  Antisense strand to SEQ ID NO: 1606593
uaagaugagcaccuugggc

SEQ ID NO: 1606595 - RNA, 19 nt, Artificial Sequence
  Description of Artificial Sequence: Synthetic oligonucleotide
  Sense strand starting at position 1450 of SEQ ID NO: 1560534
cucucucagcuccgggaaa

SEQ ID NO: 1606596 - RNA, 19 nt, Artificial Sequence
  Description of Artificial Sequence: Synthetic oligonucleotide
  Antisense strand to SEQ ID NO: 1606595
uuucccggagcugagagag

SEQ ID NO: 1606597 - RNA, 19 nt, Artificial Sequence
  Description of Artificial Sequence: Synthetic oligonucleotide
  Sense strand starting at position 1452 of SEQ ID NO: 1560534
cucucagcuccgggaaaga

SEQ ID NO: 1606598 - RNA, 19 nt, Artificial Sequence
  Description of Artificial Sequence: Synthetic oligonucleotide
  Antisense strand to SEQ ID NO: 1606597
ucuuucccggagcugagag

SEQ ID NO: 1606599 - RNA, 19 nt, Artificial Sequence
  Description of Artificial Sequence: Synthetic oligonucleotide
  Sense strand starting at position 1646 of SEQ ID NO: 1560534
cauuguugggcuggugaca

SEQ ID NO: 1606600 - RNA, 19 nt, Artificial Sequence
  Description of Artificial Sequence: Synthetic oligonucleotide
  Antisense strand to SEQ ID NO: 1606599
ugucaccagcccaacaaug

SEQ ID NO: 1606601 - RNA, 19 nt, Artificial Sequence
  Description of Artificial Sequence: Synthetic oligonucleotide
  Sense strand starting at position 1722 of SEQ ID NO: 1560534
guggcagaguugugaaggu

SEQ ID NO: 1606602 - RNA, 19 nt, Artificial Sequence
  Description of Artificial Sequence: Synthetic oligonucleotide
  Antisense strand to SEQ ID NO: 1606601
accuucacaacucugccac

SEQ ID NO: 1606603 - RNA, 19 nt, Artificial Sequence
  Description of Artificial Sequence: Synthetic oligonucleotide
  Sense strand starting at position 2000 of SEQ ID NO: 1560534
ccguguuccuccucgaagu

SEQ ID NO: 1606604 - RNA, 19 nt, Artificial Sequence
  Description of Artificial Sequence: Synthetic oligonucleotide
  Antisense strand to SEQ ID NO: 1606603
acuucgaggaggaacacgg

SEQ ID NO: 1606605 - RNA, 19 nt, Artificial Sequence
  Description of Artificial Sequence: Synthetic oligonucleotide
  Sense strand starting at position 2122 of SEQ ID NO: 1560534
cagggaggcuucuacaaac

SEQ ID NO: 1606606 - RNA, 19 nt, Artificial Sequence
  Description of Artificial Sequence: Synthetic oligonucleotide
  Antisense strand to SEQ ID NO: 1606605
guuuguagaagccucccug

SEQ ID NO: 1606607 - RNA, 19 nt, Artificial Sequence
  Description of Artificial Sequence: Synthetic oligonucleotide
  Sense strand starting at position 2233 of SEQ ID NO: 1560534
ggagccucucuggaaaggu

SEQ ID NO: 1606608 - RNA, 19 nt, Artificial Sequence
  Description of Artificial Sequence: Synthetic oligonucleotide
  Antisense strand to SEQ ID NO: 1606607
accuuuccagagaggcucc

SEQ ID NO: 1606609 - RNA, 19 nt, Artificial Sequence
  Description of Artificial Sequence: Synthetic oligonucleotide
  Sense strand starting at position 2562 of SEQ ID NO: 1560534
augcuuuagucagacacag

SEQ ID NO: 1606610 - RNA, 19 nt, Artificial Sequence
  Description of Artificial Sequence: Synthetic oligonucleotide
  Antisense strand to SEQ ID NO: 1606609
cugugucugacuaaagcau

SEQ ID NO: 1606611 - RNA, 19 nt, Artificial Sequence
  Description of Artificial Sequence: Synthetic oligonucleotide
  Sense strand starting at position 2564 of SEQ ID NO: 1560534
gcuuuagucagacacagug

SEQ ID NO: 1606612 - RNA, 19 nt, Artificial Sequence
  Description of Artificial Sequence: Synthetic oligonucleotide
  Antisense strand to SEQ ID NO: 1606611
cacugugucugacuaaagc

SEQ ID NO: 1606613 - RNA, 19 nt, Artificial Sequence
  Description of Artificial Sequence: Synthetic oligonucleotide
  Sense strand starting at position 2747 of SEQ ID NO: 1560534
aguccucacccgugugaca

SEQ ID NO: 1606614 - RNA, 19 nt, Artificial Sequence
  Description of Artificial Sequence: Synthetic oligonucleotide
  Antisense strand to SEQ ID NO: 1606613
ugucacacgggugaggacu

SEQ ID NO: 1606615 - RNA, 19 nt, Artificial Sequence
  Description of Artificial Sequence: Synthetic oligonucleotide
  Sense strand starting at position 3107 of SEQ ID NO: 1560534
cugguuuacuguucucacu

SEQ ID NO: 1606616 - RNA, 19 nt, Artificial Sequence
  Description of Artificial Sequence: Synthetic oligonucleotide
  Antisense strand to SEQ ID NO: 1606615
agugagaacaguaaaccag

SEQ ID NO: 1606617 - RNA, 19 nt, Artificial Sequence
  Description of Artificial Sequence: Synthetic oligonucleotide
  Sense strand starting at position 3140 of SEQ ID NO: 1560534
gugugaacuugcuugcucu

SEQ ID NO: 1606618 - RNA, 19 nt, Artificial Sequence
  Description of Artificial Sequence: Synthetic oligonucleotide
  Antisense strand to SEQ ID NO: 1606617
agagcaagcaaguucacac

SEQ ID NO: 1606619 - RNA, 19 nt, Artificial Sequence
  Description of Artificial Sequence: Synthetic oligonucleotide
  Sense strand starting at position 3141 of SEQ ID NO: 1560534
ugugaacuugcuugcucuu

SEQ ID NO: 1606620 - RNA, 19 nt, Artificial Sequence
  Description of Artificial Sequence: Synthetic oligonucleotide
  Antisense strand to SEQ ID NO: 1606619
aagagcaagcaaguucaca

SEQ ID NO: 1606621 - RNA, 19 nt, Artificial Sequence
  Description of Artificial Sequence: Synthetic oligonucleotide
  Sense strand starting at position 3202 of SEQ ID NO: 1560534
gcaacuugguccuagcuga

SEQ ID NO: 1606622 - RNA, 19 nt, Artificial Sequence
  Description of Artificial Sequence: Synthetic oligonucleotide
  Antisense strand to SEQ ID NO: 1606621
ucagcuaggaccaaguugc

SEQ ID NO: 1606623 - RNA, 19 nt, Artificial Sequence
  Description of Artificial Sequence: Synthetic oligonucleotide
  Sense strand starting at position 3259 of SEQ ID NO: 1560534
ggagcuaccuagcuccaaa

SEQ ID NO: 1606624 - RNA, 19 nt, Artificial Sequence
  Description of Artificial Sequence: Synthetic oligonucleotide
  Antisense strand to SEQ ID NO: 1606623
uuuggagcuagguagcucc

SEQ ID NO: 1606625 - RNA, 19 nt, Artificial Sequence
  Description of Artificial Sequence: Synthetic oligonucleotide
  Sense strand starting at position 3432 of SEQ ID NO: 1560534
uagcccguuuccggaauaa

SEQ ID NO: 1606626 - RNA, 19 nt, Artificial Sequence
  Description of Artificial Sequence: Synthetic oligonucleotide
  Antisense strand to SEQ ID NO: 1606625
uuauuccggaaacgggcua

SEQ ID NO: 1606627 - RNA, 19 nt, Artificial Sequence
  Description of Artificial Sequence: Synthetic oligonucleotide
  Sense strand starting at position 3436 of SEQ ID NO: 1560534
ccguuuccggaauaauaug

SEQ ID NO: 1606628 - RNA, 19 nt, Artificial Sequence
  Description of Artificial Sequence: Synthetic oligonucleotide
  Antisense strand to SEQ ID NO: 1606627
cauauuauuccggaaacgg

SEQ ID NO: 1606629 - RNA, 19 nt, Artificial Sequence
  Description of Artificial Sequence: Synthetic oligonucleotide
  Sense strand starting at position 3519 of SEQ ID NO: 1560534
gcgcaaauguuccaccguu

SEQ ID NO: 1606630 - RNA, 19 nt, Artificial Sequence
  Description of Artificial Sequence: Synthetic oligonucleotide
  Antisense strand to SEQ ID NO: 1606629
aacgguggaacauuugcgc

SEQ ID NO: 1606631 - RNA, 19 nt, Artificial Sequence
  Description of Artificial Sequence: Synthetic oligonucleotide
  Sense strand starting at position 3720 of SEQ ID NO: 1560534
aagggaaauugcuuuguug

SEQ ID NO: 1606632 - RNA, 19 nt, Artificial Sequence
  Description of Artificial Sequence: Synthetic oligonucleotide
  Antisense strand to SEQ ID NO: 1606631
caacaaagcaauuucccuu

SEQ ID NO: 1606633 - RNA, 19 nt, Artificial Sequence
  Description of Artificial Sequence: Synthetic oligonucleotide
  Sense strand starting at position 3722 of SEQ ID NO: 1560534
gggaaauugcuuuguugga

SEQ ID NO: 1606634 - RNA, 19 nt, Artificial Sequence
  Description of Artificial Sequence: Synthetic oligonucleotide
  Antisense strand to SEQ ID NO: 1606633
uccaacaaagcaauuuccc

SEQ ID NO: 1606635 - RNA, 19 nt, Artificial Sequence
  Description of Artificial Sequence: Synthetic oligonucleotide
  Sense strand starting at position 3723 of SEQ ID NO: 1560534
ggaaauugcuuuguuggag

SEQ ID NO: 1606636 - RNA, 19 nt, Artificial Sequence
  Description of Artificial Sequence: Synthetic oligonucleotide
  Antisense strand to SEQ ID NO: 1606635
cuccaacaaagcaauuucc

SEQ ID NO: 1606637 - RNA, 19 nt, Artificial Sequence
  Description of Artificial Sequence: Synthetic oligonucleotide
  Sense strand starting at position 3786 of SEQ ID NO: 1560534
cgcaguuguccgugucgag

SEQ ID NO: 1606638 - RNA, 19 nt, Artificial Sequence
  Description of Artificial Sequence: Synthetic oligonucleotide
  Antisense strand to SEQ ID NO: 1606637
cucgacacggacaacugcg

SEQ ID NO: 1606639 - RNA, 19 nt, Artificial Sequence
  Description of Artificial Sequence: Synthetic oligonucleotide
  Sense strand starting at position 3787 of SEQ ID NO: 1560534
gcaguuguccgugucgaga

SEQ ID NO: 1606640 - RNA, 19 nt, Artificial Sequence
  Description of Artificial Sequence: Synthetic oligonucleotide
  Antisense strand to SEQ ID NO: 1606639
ucucgacacggacaacugc

SEQ ID NO: 1606641 - RNA, 19 nt, Artificial Sequence
  Description of Artificial Sequence: Synthetic oligonucleotide
  Sense strand starting at position 3789 of SEQ ID NO: 1560534
aguuguccgugucgagaaa

SEQ ID NO: 1606642 - RNA, 19 nt, Artificial Sequence
  Description of Artificial Sequence: Synthetic oligonucleotide
  Antisense strand to SEQ ID NO: 1606641
uuucucgacacggacaacu

SEQ ID NO: 1606643 - RNA, 19 nt, Artificial Sequence
  Description of Artificial Sequence: Synthetic oligonucleotide
  Sense strand starting at position 3790 of SEQ ID NO: 1560534
guuguccgugucgagaaau

SEQ ID NO: 1606644 - RNA, 19 nt, Artificial Sequence
  Description of Artificial Sequence: Synthetic oligonucleotide
  Antisense strand to SEQ ID NO: 1606643
auuucucgacacggacaac

SEQ ID NO: 1606645 - RNA, 19 nt, Artificial Sequence
  Description of Artificial Sequence: Synthetic oligonucleotide
  Sense strand starting at position 3791 of SEQ ID NO: 1560534
uuguccgugucgagaaaug

SEQ ID NO: 1606646 - RNA, 19 nt, Artificial Sequence
  Description of Artificial Sequence: Synthetic oligonucleotide
  Antisense strand to SEQ ID NO: 1606645
cauuucucgacacggacaa

SEQ ID NO: 1606647 - RNA, 19 nt, Artificial Sequence
  Description of Artificial Sequence: Synthetic oligonucleotide
  Sense strand starting at position 3793 of SEQ ID NO: 1560534
guccgugucgagaaaugca

SEQ ID NO: 1606648 - RNA, 19 nt, Artificial Sequence
  Description of Artificial Sequence: Synthetic oligonucleotide
  Antisense strand to SEQ ID NO: 1606647
ugcauuucucgacacggac

SEQ ID NO: 1606649 - RNA, 19 nt, Artificial Sequence
  Description of Artificial Sequence: Synthetic oligonucleotide
  Sense strand starting at position 3935 of SEQ ID NO: 1560534
ccuggagguuccuggagaa

SEQ ID NO: 1606650 - RNA, 19 nt, Artificial Sequence
  Description of Artificial Sequence: Synthetic oligonucleotide
  Antisense strand to SEQ ID NO: 1606649
uucuccaggaaccuccagg

SEQ ID NO: 1606651 - RNA, 19 nt, Artificial Sequence
  Description of Artificial Sequence: Synthetic oligonucleotide
  Sense strand starting at position 3938 of SEQ ID NO: 1560534
ggagguuccuggagaagga

SEQ ID NO: 1606652 - RNA, 19 nt, Artificial Sequence
  Description of Artificial Sequence: Synthetic oligonucleotide
  Antisense strand to SEQ ID NO: 1606651
uccuucuccaggaaccucc

SEQ ID NO: 1606653 - RNA, 19 nt, Artificial Sequence
  Description of Artificial Sequence: Synthetic oligonucleotide
  Sense strand starting at position 633 of SEQ ID NO: 1560535
gggagaaauugagcuuguu

SEQ ID NO: 1606654 - RNA, 19 nt, Artificial Sequence
  Description of Artificial Sequence: Synthetic oligonucleotide
  Antisense strand to SEQ ID NO: 1606653
aacaagcucaauuucuccc

SEQ ID NO: 1606655 - RNA, 19 nt, Artificial Sequence
  Description of Artificial Sequence: Synthetic oligonucleotide
  Sense strand starting at position 636 of SEQ ID NO: 1560535
agaaauugagcuuguuaac

SEQ ID NO: 1606656 - RNA, 19 nt, Artificial Sequence
  Description of Artificial Sequence: Synthetic oligonucleotide
  Antisense strand to SEQ ID NO: 1606655
guuaacaagcucaauuucu

SEQ ID NO: 1606657 - RNA, 19 nt, Artificial Sequence
  Description of Artificial Sequence: Synthetic oligonucleotide
  Sense strand starting at position 645 of SEQ ID NO: 1560535
gcuuguuaacaguggagac

SEQ ID NO: 1606658 - RNA, 19 nt, Artificial Sequence
  Description of Artificial Sequence: Synthetic oligonucleotide
  Antisense strand to SEQ ID NO: 1606657
gucuccacuguuaacaagc

SEQ ID NO: 1606659 - RNA, 19 nt, Artificial Sequence
  Description of Artificial Sequence: Synthetic oligonucleotide
  Sense strand starting at position 646 of SEQ ID NO: 1560535
cuuguuaacaguggagacu

SEQ ID NO: 1606660 - RNA, 19 nt, Artificial Sequence
  Description of Artificial Sequence: Synthetic oligonucleotide
  Antisense strand to SEQ ID NO: 1606659
agucuccacuguuaacaag

SEQ ID NO: 1606661 - RNA, 19 nt, Artificial Sequence
  Description of Artificial Sequence: Synthetic oligonucleotide
  Sense strand starting at position 696 of SEQ ID NO: 1560535
gggagagguuuguuuccca

SEQ ID NO: 1606662 - RNA, 19 nt, Artificial Sequence
  Description of Artificial Sequence: Synthetic oligonucleotide
  Antisense strand to SEQ ID NO: 1606661
ugggaaacaaaccucuccc

SEQ ID NO: 1606663 - RNA, 19 nt, Artificial Sequence
  Description of Artificial Sequence: Synthetic oligonucleotide
  Sense strand starting at position 700 of SEQ ID NO: 1560535
gagguuuguuucccauuuc

SEQ ID NO: 1606664 - RNA, 19 nt, Artificial Sequence
  Description of Artificial Sequence: Synthetic oligonucleotide
  Antisense strand to SEQ ID NO: 1606663
gaaaugggaaacaaaccuc

SEQ ID NO: 1606665 - RNA, 19 nt, Artificial Sequence
  Description of Artificial Sequence: Synthetic oligonucleotide
  Sense strand starting at position 769 of SEQ ID NO: 1560535
ggguaaacauuagagguua

SEQ ID NO: 1606666 - RNA, 19 nt, Artificial Sequence
  Description of Artificial Sequence: Synthetic oligonucleotide
  Antisense strand to SEQ ID NO: 1606665
uaaccucuaauguuuaccc

SEQ ID NO: 1606667 - RNA, 19 nt, Artificial Sequence
  Description of Artificial Sequence: Synthetic oligonucleotide
  Sense strand starting at position 771 of SEQ ID NO: 1560535
guaaacauuagagguuaga

SEQ ID NO: 1606668 - RNA, 19 nt, Artificial Sequence
  Description of Artificial Sequence: Synthetic oligonucleotide
  Antisense strand to SEQ ID NO: 1606667
ucuaaccucuaauguuuac

SEQ ID NO: 1606669 - RNA, 19 nt, Artificial Sequence
  Description of Artificial Sequence: Synthetic oligonucleotide
  Sense strand starting at position 814 of SEQ ID NO: 1560535
cuggaagaacuuugucuuu

SEQ ID NO: 1606670 - RNA, 19 nt, Artificial Sequence
  Description of Artificial Sequence: Synthetic oligonucleotide
  Antisense strand to SEQ ID NO: 1606669
aaagacaaaguucuuccag

SEQ ID NO: 1606671 - RNA, 19 nt, Artificial Sequence
  Description of Artificial Sequence: Synthetic oligonucleotide
  Sense strand starting at position 889 of SEQ ID NO: 1560535
gggcuugagugucugauca

SEQ ID NO: 1606672 - RNA, 19 nt, Artificial Sequence
  Description of Artificial Sequence: Synthetic oligonucleotide
  Antisense strand to SEQ ID NO: 1606671
ugaucagacacucaagccc

SEQ ID NO: 1606673 - RNA, 19 nt, Artificial Sequence
  Description of Artificial Sequence: Synthetic oligonucleotide
  Sense strand starting at position 893 of SEQ ID NO: 1560535
uugagugucugaucagcca

SEQ ID NO: 1606674 - RNA, 19 nt, Artificial Sequence
  Description of Artificial Sequence: Synthetic oligonucleotide
  Antisense strand to SEQ ID NO: 1606673
uggcugaucagacacucaa

SEQ ID NO: 1606675 - RNA, 19 nt, Artificial Sequence
  Description of Artificial Sequence: Synthetic oligonucleotide
  Sense strand starting at position 1484 of SEQ ID NO: 1560535
ccaugaguccaaugccagu

SEQ ID NO: 1606676 - RNA, 19 nt, Artificial Sequence
  Description of Artificial Sequence: Synthetic oligonucleotide
  Antisense strand to SEQ ID NO: 1606675
acuggcauuggacucaugg

SEQ ID NO: 1606677 - RNA, 19 nt, Artificial Sequence
  Description of Artificial Sequence: Synthetic oligonucleotide
  Sense strand starting at position 1876 of SEQ ID NO: 1560535
gcaagaaagagacguccau

SEQ ID NO: 1606678 - RNA, 19 nt, Artificial Sequence
  Description of Artificial Sequence: Synthetic oligonucleotide
  Antisense strand to SEQ ID NO: 1606677
auggacgucucuuucuugc

SEQ ID NO: 1606679 - RNA, 19 nt, Artificial Sequence
  Description of Artificial Sequence: Synthetic oligonucleotide
  Sense strand starting at position 1888 of SEQ ID NO: 1560535
cguccauccacguggauaa

SEQ ID NO: 1606680 - RNA, 19 nt, Artificial Sequence
  Description of Artificial Sequence: Synthetic oligonucleotide
  Antisense strand to SEQ ID NO: 1606679
uuauccacguggauggacg

SEQ ID NO: 1606681 - RNA, 19 nt, Artificial Sequence
  Description of Artificial Sequence: Synthetic oligonucleotide
  Sense strand starting at position 1889 of SEQ ID NO: 1560535
guccauccacguggauaaa

SEQ ID NO: 1606682 - RNA, 19 nt, Artificial Sequence
  Description of Artificial Sequence: Synthetic oligonucleotide
  Antisense strand to SEQ ID NO: 1606681
uuuauccacguggauggac

SEQ ID NO: 1606683 - RNA, 19 nt, Artificial Sequence
  Description of Artificial Sequence: Synthetic oligonucleotide
  Sense strand starting at position 1940 of SEQ ID NO: 1560535
acacaauggucuguacuuu

SEQ ID NO: 1606684 - RNA, 19 nt, Artificial Sequence
  Description of Artificial Sequence: Synthetic oligonucleotide
  Antisense strand to SEQ ID NO: 1606683
aaaguacagaccauugugu

SEQ ID NO: 1606685 - RNA, 19 nt, Artificial Sequence
  Description of Artificial Sequence: Synthetic oligonucleotide
  Sense strand starting at position 1944 of SEQ ID NO: 1560535
aauggucuguacuuuguga

SEQ ID NO: 1606686 - RNA, 19 nt, Artificial Sequence
  Description of Artificial Sequence: Synthetic oligonucleotide
  Antisense strand to SEQ ID NO: 1606685
ucacaaaguacagaccauu

SEQ ID NO: 1606687 - RNA, 19 nt, Artificial Sequence
  Description of Artificial Sequence: Synthetic oligonucleotide
  Sense strand starting at position 1946 of SEQ ID NO: 1560535
uggucuguacuuugugaca

SEQ ID NO: 1606688 - RNA, 19 nt, Artificial Sequence
  Description of Artificial Sequence: Synthetic oligonucleotide
  Antisense strand to SEQ ID NO: 1606687
ugucacaaaguacagacca

SEQ ID NO: 1606689 - RNA, 19 nt, Artificial Sequence
  Description of Artificial Sequence: Synthetic oligonucleotide
  Sense strand starting at position 2149 of SEQ ID NO: 1560535
ggcaguaucccguggcaca

SEQ ID NO: 1606690 - RNA, 19 nt, Artificial Sequence
  Description of Artificial Sequence: Synthetic oligonucleotide
  Antisense strand to SEQ ID NO: 1606689
ugugccacgggauacugcc

SEQ ID NO: 1606691 - RNA, 19 nt, Artificial Sequence
  Description of Artificial Sequence: Synthetic oligonucleotide
  Sense strand starting at position 2211 of SEQ ID NO: 1560535
acucaaaguugucacaacu

SEQ ID NO: 1606692 - RNA, 19 nt, Artificial Sequence
  Description of Artificial Sequence: Synthetic oligonucleotide
  Antisense strand to SEQ ID NO: 1606691
aguugugacaacuuugagu

SEQ ID NO: 1606693 - RNA, 19 nt, Artificial Sequence
  Description of Artificial Sequence: Synthetic oligonucleotide
  Sense strand starting at position 2518 of SEQ ID NO: 1560535
gcgccuguugacucgaaca

SEQ ID NO: 1606694 - RNA, 19 nt, Artificial Sequence
  Description of Artificial Sequence: Synthetic oligonucleotide
  Antisense strand to SEQ ID NO: 1606693
uguucgagucaacaggcgc

SEQ ID NO: 1606695 - RNA, 19 nt, Artificial Sequence
  Description of Artificial Sequence: Synthetic oligonucleotide
  Sense strand starting at position 2520 of SEQ ID NO: 1560535
gccuguugacucgaacaca

SEQ ID NO: 1606696 - RNA, 19 nt, Artificial Sequence
  Description of Artificial Sequence: Synthetic oligonucleotide
  Antisense strand to SEQ ID NO: 1606695
uguguucgagucaacaggc

SEQ ID NO: 1606697 - RNA, 19 nt, Artificial Sequence
  Description of Artificial Sequence: Synthetic oligonucleotide
  Sense strand starting at position 2523 of SEQ ID NO: 1560535
uguugacucgaacacaagu

SEQ ID NO: 1606698 - RNA, 19 nt, Artificial Sequence
  Description of Artificial Sequence: Synthetic oligonucleotide
  Antisense strand to SEQ ID NO: 1606697
acuuguguucgagucaaca

SEQ ID NO: 1606699 - RNA, 19 nt, Artificial Sequence
  Description of Artificial Sequence: Synthetic oligonucleotide
  Sense strand starting at position 2538 of SEQ ID NO: 1560535
aagugcucgcagugaugau

SEQ ID NO: 1606700 - RNA, 19 nt, Artificial Sequence
  Description of Artificial Sequence: Synthetic oligonucleotide
  Antisense strand to SEQ ID NO: 1606699
aucaucacugcgagcacuu

SEQ ID NO: 1606701 - RNA, 19 nt, Artificial Sequence
  Description of Artificial Sequence: Synthetic oligonucleotide
  Sense strand starting at position 2539 of SEQ ID NO: 1560535
agugcucgcagugaugauu

SEQ ID NO: 1606702 - RNA, 19 nt, Artificial Sequence
  Description of Artificial Sequence: Synthetic oligonucleotide
  Antisense strand to SEQ ID NO: 1606701
aaucaucacugcgagcacu

SEQ ID NO: 1606703 - RNA, 19 nt, Artificial Sequence
  Description of Artificial Sequence: Synthetic oligonucleotide
  Sense strand starting at position 2542 of SEQ ID NO: 1560535
gcucgcagugaugauucaa

SEQ ID NO: 1606704 - RNA, 19 nt, Artificial Sequence
  Description of Artificial Sequence: Synthetic oligonucleotide
  Antisense strand to SEQ ID NO: 1606703
uugaaucaucacugcgagc

SEQ ID NO: 1606705 - RNA, 19 nt, Artificial Sequence
  Description of Artificial Sequence: Synthetic oligonucleotide
  Sense strand starting at position 2582 of SEQ ID NO: 1560535
cucugauguguggugcgau

SEQ ID NO: 1606706 - RNA, 19 nt, Artificial Sequence
  Description of Artificial Sequence: Synthetic oligonucleotide
  Antisense strand to SEQ ID NO: 1606705
aucgcaccacacaucagag

SEQ ID NO: 1606707 - RNA, 19 nt, Artificial Sequence
  Description of Artificial Sequence: Synthetic oligonucleotide
  Sense strand starting at position 2585 of SEQ ID NO: 1560535
ugauguguggugcgauuca

SEQ ID NO: 1606708 - RNA, 19 nt, Artificial Sequence
  Description of Artificial Sequence: Synthetic oligonucleotide
  Antisense strand to SEQ ID NO: 1606707
ugaaucgcaccacacauca

SEQ ID NO: 1606709 - RNA, 19 nt, Artificial Sequence
  Description of Artificial Sequence: Synthetic oligonucleotide
  Sense strand starting at position 2604 of SEQ ID NO: 1560535
aauguauggucagaggaca

SEQ ID NO: 1606710 - RNA, 19 nt, Artificial Sequence
  Description of Artificial Sequence: Synthetic oligonucleotide
  Antisense strand to SEQ ID NO: 1606709
uguccucugaccauacauu

SEQ ID NO: 1606711 - RNA, 19 nt, Artificial Sequence
  Description of Artificial Sequence: Synthetic oligonucleotide
  Sense strand starting at position 2697 of SEQ ID NO: 1560535
caagaugauucugguauau

SEQ ID NO: 1606712 - RNA, 19 nt, Artificial Sequence
  Description of Artificial Sequence: Synthetic oligonucleotide
  Antisense strand to SEQ ID NO: 1606711
auauaccagaaucaucuug

SEQ ID NO: 1606713 - RNA, 19 nt, Artificial Sequence
  Description of Artificial Sequence: Synthetic oligonucleotide
  Sense strand starting at position 2699 of SEQ ID NO: 1560535
agaugauucugguauauuc

SEQ ID NO: 1606714 - RNA, 19 nt, Artificial Sequence
  Description of Artificial Sequence: Synthetic oligonucleotide
  Antisense strand to SEQ ID NO: 1606713
gaauauaccagaaucaucu

SEQ ID NO: 1606715 - RNA, 19 nt, Artificial Sequence
  Description of Artificial Sequence: Synthetic oligonucleotide
  Sense strand starting at position 2709 of SEQ ID NO: 1560535
gguauauucuggccacaca

SEQ ID NO: 1606716 - RNA, 19 nt, Artificial Sequence
  Description of Artificial Sequence: Synthetic oligonucleotide
  Antisense strand to SEQ ID NO: 1606715
uguguggccagaauauacc

SEQ ID NO: 1606717 - RNA, 19 nt, Artificial Sequence
  Description of Artificial Sequence: Synthetic oligonucleotide
  Sense strand starting at position 3027 of SEQ ID NO: 1560535
guuauauuccaacaugcgu

SEQ ID NO: 1606718 - RNA, 19 nt, Artificial Sequence
  Description of Artificial Sequence: Synthetic oligonucleotide
  Antisense strand to SEQ ID NO: 1606717
acgcauguuggaauauaac

SEQ ID NO: 1606719 - RNA, 19 nt, Artificial Sequence
  Description of Artificial Sequence: Synthetic oligonucleotide
  Sense strand starting at position 3055 of SEQ ID NO: 1560535
acaacauacgcggaguaau

SEQ ID NO: 1606720 - RNA, 19 nt, Artificial Sequence
  Description of Artificial Sequence: Synthetic oligonucleotide
  Antisense strand to SEQ ID NO: 1606719
auuacuccgcguauguugu

SEQ ID NO: 1606721 - RNA, 19 nt, Artificial Sequence
  Description of Artificial Sequence: Synthetic oligonucleotide
  Sense strand starting at position 3239 of SEQ ID NO: 1560535
ggguguauccucugacaca

SEQ ID NO: 1606722 - RNA, 19 nt, Artificial Sequence
  Description of Artificial Sequence: Synthetic oligonucleotide
  Antisense strand to SEQ ID NO: 1606721
ugugucagaggauacaccc

SEQ ID NO: 1606723 - RNA, 19 nt, Artificial Sequence
  Description of Artificial Sequence: Synthetic oligonucleotide
  Sense strand starting at position 3240 of SEQ ID NO: 1560535
gguguauccucugacacaa

SEQ ID NO: 1606724 - RNA, 19 nt, Artificial Sequence
  Description of Artificial Sequence: Synthetic oligonucleotide
  Antisense strand to SEQ ID NO: 1606723
uugugucagaggauacacc

SEQ ID NO: 1606725 - RNA, 19 nt, Artificial Sequence
  Description of Artificial Sequence: Synthetic oligonucleotide
  Sense strand starting at position 3355 of SEQ ID NO: 1560535
uggacccugacgugagaua

SEQ ID NO: 1606726 - RNA, 19 nt, Artificial Sequence
  Description of Artificial Sequence: Synthetic oligonucleotide
  Antisense strand to SEQ ID NO: 1606725
uaucucacgucagggucca

SEQ ID NO: 1606727 - RNA, 19 nt, Artificial Sequence
  Description of Artificial Sequence: Synthetic oligonucleotide
  Sense strand starting at position 3362 of SEQ ID NO: 1560535
ugacgugagauacagcaaa

SEQ ID NO: 1606728 - RNA, 19 nt, Artificial Sequence
  Description of Artificial Sequence: Synthetic oligonucleotide
  Antisense strand to SEQ ID NO: 1606727
uuugcuguaucucacguca

SEQ ID NO: 1606729 - RNA, 19 nt, Artificial Sequence
  Description of Artificial Sequence: Synthetic oligonucleotide
  Sense strand starting at position 3449 of SEQ ID NO: 1560535
gcacgagccacucauggau

SEQ ID NO: 1606730 - RNA, 19 nt, Artificial Sequence
  Description of Artificial Sequence: Synthetic oligonucleotide
  Antisense strand to SEQ ID NO: 1606729
auccaugaguggcucgugc

SEQ ID NO: 1606731 - RNA, 19 nt, Artificial Sequence
  Description of Artificial Sequence: Synthetic oligonucleotide
  Sense strand starting at position 3700 of SEQ ID NO: 1560535
agacaugucugacugcaca

SEQ ID NO: 1606732 - RNA, 19 nt, Artificial Sequence
  Description of Artificial Sequence: Synthetic oligonucleotide
  Antisense strand to SEQ ID NO: 1606731
ugugcagucagacaugucu

SEQ ID NO: 1606733 - RNA, 19 nt, Artificial Sequence
  Description of Artificial Sequence: Synthetic oligonucleotide
  Sense strand starting at position 69 of SEQ ID NO: 1560536
ccagaaacuuaccguugga

SEQ ID NO: 1606734 - RNA, 19 nt, Artificial Sequence
  Description of Artificial Sequence: Synthetic oligonucleotide
  Antisense strand to SEQ ID NO: 1606733
uccaacgguaaguuucugg

SEQ ID NO: 1606735 - RNA, 19 nt, Artificial Sequence
  Description of Artificial Sequence: Synthetic oligonucleotide
  Sense strand starting at position 166 of SEQ ID NO: 1560536
uuccgagaccacugcuuaa

SEQ ID NO: 1606736 - RNA, 19 nt, Artificial Sequence
  Description of Artificial Sequence: Synthetic oligonucleotide
  Antisense strand to SEQ ID NO: 1606735
uuaagcaguggucucggaa

SEQ ID NO: 1606737 - RNA, 19 nt, Artificial Sequence
  Description of Artificial Sequence: Synthetic oligonucleotide
  Sense strand starting at position 170 of SEQ ID NO: 1560536
gagaccacugcuuaaguca

SEQ ID NO: 1606738 - RNA, 19 nt, Artificial Sequence
  Description of Artificial Sequence: Synthetic oligonucleotide
  Antisense strand to SEQ ID NO: 1606737
ugacuuaagcaguggucuc

SEQ ID NO: 1606739 - RNA, 19 nt, Artificial Sequence
  Description of Artificial Sequence: Synthetic oligonucleotide
  Sense strand starting at position 203 of SEQ ID NO: 1560536
ggugcagugagagauacaa

SEQ ID NO: 1606740 - RNA, 19 nt, Artificial Sequence
  Description of Artificial Sequence: Synthetic oligonucleotide
  Antisense strand to SEQ ID NO: 1606739
uuguaucucucacugcacc

SEQ ID NO: 1606741 - RNA, 19 nt, Artificial Sequence
  Description of Artificial Sequence: Synthetic oligonucleotide
  Sense strand starting at position 205 of SEQ ID NO: 1560536
ugcagugagagauacaagu

SEQ ID NO: 1606742 - RNA, 19 nt, Artificial Sequence
  Description of Artificial Sequence: Synthetic oligonucleotide
  Antisense strand to SEQ ID NO: 1606741
acuuguaucucucacugca

SEQ ID NO: 1606743 - RNA, 19 nt, Artificial Sequence
  Description of Artificial Sequence: Synthetic oligonucleotide
  Sense strand starting at position 430 of SEQ ID NO: 1560536
agcagaaugccacgcucau

SEQ ID NO: 1606744 - RNA, 19 nt, Artificial Sequence
  Description of Artificial Sequence: Synthetic oligonucleotide
  Antisense strand to SEQ ID NO: 1606743
augagcguggcauucugcu

SEQ ID NO: 1606745 - RNA, 19 nt, Artificial Sequence
  Description of Artificial Sequence: Synthetic oligonucleotide
  Sense strand starting at position 504 of SEQ ID NO: 1560536
gggugauuaaacuggcuga

SEQ ID NO: 1606746 - RNA, 19 nt, Artificial Sequence
  Description of Artificial Sequence: Synthetic oligonucleotide
  Antisense strand to SEQ ID NO: 1606745
ucagccaguuuaaucaccc

SEQ ID NO: 1606747 - RNA, 19 nt, Artificial Sequence
  Description of Artificial Sequence: Synthetic oligonucleotide
  Sense strand starting at position 507 of SEQ ID NO: 1560536
ugauuaaacuggcugagcu

SEQ ID NO: 1606748 - RNA, 19 nt, Artificial Sequence
  Description of Artificial Sequence: Synthetic oligonucleotide
  Antisense strand to SEQ ID NO: 1606747
agcucagccaguuuaauca

SEQ ID NO: 1606749 - RNA, 19 nt, Artificial Sequence
  Description of Artificial Sequence: Synthetic oligonucleotide
  Sense strand starting at position 548 of SEQ ID NO: 1560536
cuaaaucgcuucuucugaa

SEQ ID NO: 1606750 - RNA, 19 nt, Artificial Sequence
  Description of Artificial Sequence: Synthetic oligonucleotide
  Antisense strand to SEQ ID NO: 1606749
uucagaagaagcgauuuag

SEQ ID NO: 1606751 - RNA, 19 nt, Artificial Sequence
  Description of Artificial Sequence: Synthetic oligonucleotide
  Sense strand starting at position 563 of SEQ ID NO: 1560536
ugaagucgcuucuuugcua

SEQ ID NO: 1606752 - RNA, 19 nt, Artificial Sequence
  Description of Artificial Sequence: Synthetic oligonucleotide
  Antisense strand to SEQ ID NO: 1606751
uagcaaagaagcgacuuca

SEQ ID NO: 1606753 - RNA, 19 nt, Artificial Sequence
  Description of Artificial Sequence: Synthetic oligonucleotide
  Sense strand starting at position 564 of SEQ ID NO: 1560536
gaagucgcuucuuugcuaa

SEQ ID NO: 1606754 - RNA, 19 nt, Artificial Sequence
  Description of Artificial Sequence: Synthetic oligonucleotide
  Antisense strand to SEQ ID NO: 1606753
uuagcaaagaagcgacuuc

SEQ ID NO: 1606755 - RNA, 19 nt, Artificial Sequence
  Description of Artificial Sequence: Synthetic oligonucleotide
  Sense strand starting at position 951 of SEQ ID NO: 1560536
augggaagcucgccuaauu

SEQ ID NO: 1606756 - RNA, 19 nt, Artificial Sequence
  Description of Artificial Sequence: Synthetic oligonucleotide
  Antisense strand to SEQ ID NO: 1606755
aauuaggcgagcuucccau

SEQ ID NO: 1606757 - RNA, 19 nt, Artificial Sequence
  Description of Artificial Sequence: Synthetic oligonucleotide
  Sense strand starting at position 961 of SEQ ID NO: 1560536
cgccuaauuaaggacguaa

SEQ ID NO: 1606758 - RNA, 19 nt, Artificial Sequence
  Description of Artificial Sequence: Synthetic oligonucleotide
  Antisense strand to SEQ ID NO: 1606757
uuacguccuuaauuaggcg

SEQ ID NO: 1606759 - RNA, 19 nt, Artificial Sequence
  Description of Artificial Sequence: Synthetic oligonucleotide
  Sense strand starting at position 998 of SEQ ID NO: 1560536
aguuuauuguugccgggau

SEQ ID NO: 1606760 - RNA, 19 nt, Artificial Sequence
  Description of Artificial Sequence: Synthetic oligonucleotide
  Antisense strand to SEQ ID NO: 1606759
aucccggcaacaauaaacu

SEQ ID NO: 1606761 - RNA, 19 nt, Artificial Sequence
  Description of Artificial Sequence: Synthetic oligonucleotide
  Sense strand starting at position 1000 of SEQ ID NO: 1560536
uuuauuguugccgggauua

SEQ ID NO: 1606762 - RNA, 19 nt, Artificial Sequence
  Description of Artificial Sequence: Synthetic oligonucleotide
  Antisense strand to SEQ ID NO: 1606761
uaaucccggcaacaauaaa

SEQ ID NO: 1606763 - RNA, 19 nt, Artificial Sequence
  Description of Artificial Sequence: Synthetic oligonucleotide
  Sense strand starting at position 1002 of SEQ ID NO: 1560536
uauuguugccgggauuaaa

SEQ ID NO: 1606764 - RNA, 19 nt, Artificial Sequence
  Description of Artificial Sequence: Synthetic oligonucleotide
  Antisense strand to SEQ ID NO: 1606763
uuuaaucccggcaacaaua

SEQ ID NO: 1606765 - RNA, 19 nt, Artificial Sequence
  Description of Artificial Sequence: Synthetic oligonucleotide
  Sense strand starting at position 1044 of SEQ ID NO: 1560536
uguuauucacucgugcagu

SEQ ID NO: 1606766 - RNA, 19 nt, Artificial Sequence
  Description of Artificial Sequence: Synthetic oligonucleotide
  Antisense strand to SEQ ID NO: 1606765
acugcacgagugaauaaca

SEQ ID NO: 1606767 - RNA, 19 nt, Artificial Sequence
  Description of Artificial Sequence: Synthetic oligonucleotide
  Sense strand starting at position 1394 of SEQ ID NO: 1560536
acuggagacuuucucugau

SEQ ID NO: 1606768 - RNA, 19 nt, Artificial Sequence
  Description of Artificial Sequence: Synthetic oligonucleotide
  Antisense strand to SEQ ID NO: 1606767
aucagagaaagucuccagu

SEQ ID NO: 1606769 - RNA, 19 nt, Artificial Sequence
  Description of Artificial Sequence: Synthetic oligonucleotide
  Sense strand starting at position 1784 of SEQ ID NO: 1560536
cgacuuucucgguaucgca

SEQ ID NO: 1606770 - RNA, 19 nt, Artificial Sequence
  Description of Artificial Sequence: Synthetic oligonucleotide
  Antisense strand to SEQ ID NO: 1606769
ugcgauaccgagaaagucg

SEQ ID NO: 1606771 - RNA, 19 nt, Artificial Sequence
  Description of Artificial Sequence: Synthetic oligonucleotide
  Sense strand starting at position 2218 of SEQ ID NO: 1560536
ccucgauugcuggagagaa

SEQ ID NO: 1606772 - RNA, 19 nt, Artificial Sequence
  Description of Artificial Sequence: Synthetic oligonucleotide
  Antisense strand to SEQ ID NO: 1606771
uucucuccagcaaucgagg

SEQ ID NO: 1606773 - RNA, 19 nt, Artificial Sequence
  Description of Artificial Sequence: Synthetic oligonucleotide
  Sense strand starting at position 2382 of SEQ ID NO: 1560536
gaggauuagagucgcaauu

SEQ ID NO: 1606774 - RNA, 19 nt, Artificial Sequence
  Description of Artificial Sequence: Synthetic oligonucleotide
  Antisense strand to SEQ ID NO: 1606773
aauugcgacucuaauccuc

SEQ ID NO: 1606775 - RNA, 19 nt, Artificial Sequence
  Description of Artificial Sequence: Synthetic oligonucleotide
  Sense strand starting at position 2384 of SEQ ID NO: 1560536
ggauuagagucgcaauuag

SEQ ID NO: 1606776 - RNA, 19 nt, Artificial Sequence
  Description of Artificial Sequence: Synthetic oligonucleotide
  Antisense strand to SEQ ID NO: 1606775
cuaauugcgacucuaaucc

SEQ ID NO: 1606777 - RNA, 19 nt, Artificial Sequence
  Description of Artificial Sequence: Synthetic oligonucleotide
  Sense strand starting at position 2682 of SEQ ID NO: 1560536
gcgcuuucagcugggcaua

SEQ ID NO: 1606778 - RNA, 19 nt, Artificial Sequence
  Description of Artificial Sequence: Synthetic oligonucleotide
  Antisense strand to SEQ ID NO: 1606777
uaugcccagcugaaagcgc

SEQ ID NO: 1606779 - RNA, 19 nt, Artificial Sequence
  Description of Artificial Sequence: Synthetic oligonucleotide
  Sense strand starting at position 2728 of SEQ ID NO: 1560536
agggcacguuucucacauu

SEQ ID NO: 1606780 - RNA, 19 nt, Artificial Sequence
  Description of Artificial Sequence: Synthetic oligonucleotide
  Antisense strand to SEQ ID NO: 1606779
aaugugagaaacgugcccu

SEQ ID NO: 1606781 - RNA, 19 nt, Artificial Sequence
  Description of Artificial Sequence: Synthetic oligonucleotide
  Sense strand starting at position 2729 of SEQ ID NO: 1560536
gggcacguuucucacauuu

SEQ ID NO: 1606782 - RNA, 19 nt, Artificial Sequence
  Description of Artificial Sequence: Synthetic oligonucleotide
  Antisense strand to SEQ ID NO: 1606781
aaaugugagaaacgugccc

SEQ ID NO: 1606783 - RNA, 19 nt, Artificial Sequence
  Description of Artificial Sequence: Synthetic oligonucleotide
  Sense strand starting at position 2731 of SEQ ID NO: 1560536
gcacguuucucacauuucu

SEQ ID NO: 1606784 - RNA, 19 nt, Artificial Sequence
  Description of Artificial Sequence: Synthetic oligonucleotide
  Antisense strand to SEQ ID NO: 1606783
agaaaugugagaaacgugc

SEQ ID NO: 1606785 - RNA, 19 nt, Artificial Sequence
  Description of Artificial Sequence: Synthetic oligonucleotide
  Sense strand starting at position 2745 of SEQ ID NO: 1560536
uuucuugacuccucgguua

SEQ ID NO: 1606786 - RNA, 19 nt, Artificial Sequence
  Description of Artificial Sequence: Synthetic oligonucleotide
  Antisense strand to SEQ ID NO: 1606785
uaaccgaggagucaagaaa

SEQ ID NO: 1606787 - RNA, 19 nt, Artificial Sequence
  Description of Artificial Sequence: Synthetic oligonucleotide
  Sense strand starting at position 2747 of SEQ ID NO: 1560536
ucuugacuccucgguuaca

SEQ ID NO: 1606788 - RNA, 19 nt, Artificial Sequence
  Description of Artificial Sequence: Synthetic oligonucleotide
  Antisense strand to SEQ ID NO: 1606787
uguaaccgaggagucaaga

SEQ ID NO: 1606789 - RNA, 19 nt, Artificial Sequence
  Description of Artificial Sequence: Synthetic oligonucleotide
  Sense strand starting at position 2748 of SEQ ID NO: 1560536
cuugacuccucgguuacaa

SEQ ID NO: 1606790 - RNA, 19 nt, Artificial Sequence
  Description of Artificial Sequence: Synthetic oligonucleotide
  Antisense strand to SEQ ID NO: 1606789
uuguaaccgaggagucaag

SEQ ID NO: 1606791 - RNA, 19 nt, Artificial Sequence
  Description of Artificial Sequence: Synthetic oligonucleotide
  Sense strand starting at position 3542 of SEQ ID NO: 1560536
uaacuucuuuacgcgggaa

SEQ ID NO: 1606792 - RNA, 19 nt, Artificial Sequence
  Description of Artificial Sequence: Synthetic oligonucleotide
  Antisense strand to SEQ ID NO: 1606791
uucccgcguaaagaaguua

SEQ ID NO: 1606793 - RNA, 19 nt, Artificial Sequence
  Description of Artificial Sequence: Synthetic oligonucleotide
  Sense strand starting at position 3544 of SEQ ID NO: 1560536
acuucuuuacgcgggaauc

SEQ ID NO: 1606794 - RNA, 19 nt, Artificial Sequence
  Description of Artificial Sequence: Synthetic oligonucleotide
  Antisense strand to SEQ ID NO: 1606793
gauucccgcguaaagaagu

SEQ ID NO: 1606795 - RNA, 19 nt, Artificial Sequence
  Description of Artificial Sequence: Synthetic oligonucleotide
  Sense strand starting at position 3545 of SEQ ID NO: 1560536
cuucuuuacgcgggaauca

SEQ ID NO: 1606796 - RNA, 19 nt, Artificial Sequence
  Description of Artificial Sequence: Synthetic oligonucleotide
  Antisense strand to SEQ ID NO: 1606795
ugauucccgcguaaagaag

SEQ ID NO: 1606797 - RNA, 19 nt, Artificial Sequence
  Description of Artificial Sequence: Synthetic oligonucleotide
  Sense strand starting at position 3554 of SEQ ID NO: 1560536
gcgggaaucagccgaaacu

SEQ ID NO: 1606798 - RNA, 19 nt, Artificial Sequence
  Description of Artificial Sequence: Synthetic oligonucleotide
  Antisense strand to SEQ ID NO: 1606797
aguuucggcugauucccgc

SEQ ID NO: 1606799 - RNA, 19 nt, Artificial Sequence
  Description of Artificial Sequence: Synthetic oligonucleotide
  Sense strand starting at position 3555 of SEQ ID NO: 1560536
cgggaaucagccgaaacuu

SEQ ID NO: 1606800 - RNA, 19 nt, Artificial Sequence
  Description of Artificial Sequence: Synthetic oligonucleotide
  Antisense strand to SEQ ID NO: 1606799
aaguuucggcugauucccg

SEQ ID NO: 1606801 - RNA, 19 nt, Artificial Sequence
  Description of Artificial Sequence: Synthetic oligonucleotide
  Sense strand starting at position 3563 of SEQ ID NO: 1560536
agccgaaacuuuccuccua

SEQ ID NO: 1606802 - RNA, 19 nt, Artificial Sequence
  Description of Artificial Sequence: Synthetic oligonucleotide
  Antisense strand to SEQ ID NO: 1606801
uaggaggaaaguuucggcu

SEQ ID NO: 1606803 - RNA, 19 nt, Artificial Sequence
  Description of Artificial Sequence: Synthetic oligonucleotide
  Sense strand starting at position 3564 of SEQ ID NO: 1560536
gccgaaacuuuccuccuaa

SEQ ID NO: 1606804 - RNA, 19 nt, Artificial Sequence
  Description of Artificial Sequence: Synthetic oligonucleotide
  Antisense strand to SEQ ID NO: 1606803
uuaggaggaaaguuucggc

SEQ ID NO: 1606805 - RNA, 19 nt, Artificial Sequence
  Description of Artificial Sequence: Synthetic oligonucleotide
  Sense strand starting at position 3565 of SEQ ID NO: 1560536
ccgaaacuuuccuccuaag

SEQ ID NO: 1606806 - RNA, 19 nt, Artificial Sequence
  Description of Artificial Sequence: Synthetic oligonucleotide
  Antisense strand to SEQ ID NO: 1606805
cuuaggaggaaaguuucgg

SEQ ID NO: 1606807 - RNA, 19 nt, Artificial Sequence
  Description of Artificial Sequence: Synthetic oligonucleotide
  Sense strand starting at position 3610 of SEQ ID NO: 1560536
ucgaguucgaacuacagga

SEQ ID NO: 1606808 - RNA, 19 nt, Artificial Sequence
  Description of Artificial Sequence: Synthetic oligonucleotide
  Antisense strand to SEQ ID NO: 1606807
uccuguaguucgaacucga

SEQ ID NO: 1606809 - RNA, 19 nt, Artificial Sequence
  Description of Artificial Sequence: Synthetic oligonucleotide
  Sense strand starting at position 3795 of SEQ ID NO: 1560536
gaaagaagcccuggaagua

SEQ ID NO: 1606810 - RNA, 19 nt, Artificial Sequence
  Description of Artificial Sequence: Synthetic oligonucleotide
  Antisense strand to SEQ ID NO: 1606809
uacuuccagggcuucuuuc

SEQ ID NO: 1606811 - RNA, 19 nt, Artificial Sequence
  Description of Artificial Sequence: Synthetic oligonucleotide
  Sense strand starting at position 3807 of SEQ ID NO: 1560536
ggaaguaggucagggaucu

SEQ ID NO: 1606812 - RNA, 19 nt, Artificial Sequence
  Description of Artificial Sequence: Synthetic oligonucleotide
  Antisense strand to SEQ ID NO: 1606811
agaucccugaccuacuucc

SEQ ID NO: 1606813 - RNA, 19 nt, Artificial Sequence
  Description of Artificial Sequence: Synthetic oligonucleotide
  Sense strand starting at position 35 of SEQ ID NO: 1560537
ccagaauggcugugggaac

SEQ ID NO: 1606814 - RNA, 19 nt, Artificial Sequence
  Description of Artificial Sequence: Synthetic oligonucleotide
  Antisense strand to SEQ ID NO: 1606813
guucccacagccauucugg

SEQ ID NO: 1606815 - RNA, 19 nt, Artificial Sequence
  Description of Artificial Sequence: Synthetic oligonucleotide
  Sense strand starting at position 68 of SEQ ID NO: 1560537
cucugaacgugucaugguu

SEQ ID NO: 1606816 - RNA, 19 nt, Artificial Sequence
  Description of Artificial Sequence: Synthetic oligonucleotide
  Antisense strand to SEQ ID NO: 1606815
aaccaugacacguucagag

SEQ ID NO: 1606817 - RNA, 19 nt, Artificial Sequence
  Description of Artificial Sequence: Synthetic oligonucleotide
  Sense strand starting at position 76 of SEQ ID NO: 1560537
gugucaugguucccaucgu

SEQ ID NO: 1606818 - RNA, 19 nt, Artificial Sequence
  Description of Artificial Sequence: Synthetic oligonucleotide
  Antisense strand to SEQ ID NO: 1606817
acgaugggaaccaugacac

SEQ ID NO: 1606819 - RNA, 19 nt, Artificial Sequence
  Description of Artificial Sequence: Synthetic oligonucleotide
  Sense strand starting at position 77 of SEQ ID NO: 1560537
ugucaugguucccaucgua

SEQ ID NO: 1606820 - RNA, 19 nt, Artificial Sequence
  Description of Artificial Sequence: Synthetic oligonucleotide
  Antisense strand to SEQ ID NO: 1606819
uacgaugggaaccaugaca

SEQ ID NO: 1606821 - RNA, 19 nt, Artificial Sequence
  Description of Artificial Sequence: Synthetic oligonucleotide
  Sense strand starting at position 80 of SEQ ID NO: 1560537
caugguucccaucguaagu

SEQ ID NO: 1606822 - RNA, 19 nt, Artificial Sequence
  Description of Artificial Sequence: Synthetic oligonucleotide
  Antisense strand to SEQ ID NO: 1606821
acuuacgaugggaaccaug

SEQ ID NO: 1606823 - RNA, 19 nt, Artificial Sequence
  Description of Artificial Sequence: Synthetic oligonucleotide
  Sense strand starting at position 89 of SEQ ID NO: 1560537
caucguaaguagcuuugaa

SEQ ID NO: 1606824 - RNA, 19 nt, Artificial Sequence
  Description of Artificial Sequence: Synthetic oligonucleotide
  Antisense strand to SEQ ID NO: 1606823
uucaaagcuacuuacgaug

SEQ ID NO: 1606825 - RNA, 19 nt, Artificial Sequence
  Description of Artificial Sequence: Synthetic oligonucleotide
  Sense strand starting at position 880 of SEQ ID NO: 1560537
cguguuguagagugagaug

SEQ ID NO: 1606826 - RNA, 19 nt, Artificial Sequence
  Description of Artificial Sequence: Synthetic oligonucleotide
  Antisense strand to SEQ ID NO: 1606825
caucucacucuacaacacg

SEQ ID NO: 1606827 - RNA, 19 nt, Artificial Sequence
  Description of Artificial Sequence: Synthetic oligonucleotide
  Sense strand starting at position 891 of SEQ ID NO: 1560537
gugagauguaguuggugaa

SEQ ID NO: 1606828 - RNA, 19 nt, Artificial Sequence
  Description of Artificial Sequence: Synthetic oligonucleotide
  Antisense strand to SEQ ID NO: 1606827
uucaccaacuacaucucac

SEQ ID NO: 1606829 - RNA, 19 nt, Artificial Sequence
  Description of Artificial Sequence: Synthetic oligonucleotide
  Sense strand starting at position 894 of SEQ ID NO: 1560537
agauguaguuggugaagag

SEQ ID NO: 1606830 - RNA, 19 nt, Artificial Sequence
  Description of Artificial Sequence: Synthetic oligonucleotide
  Antisense strand to SEQ ID NO: 1606829
cucuucaccaacuacaucu

SEQ ID NO: 1606831 - RNA, 19 nt, Artificial Sequence
  Description of Artificial Sequence: Synthetic oligonucleotide
  Sense strand starting at position 915 of SEQ ID NO: 1560537
ccagauaucgggcagugaa

SEQ ID NO: 1606832 - RNA, 19 nt, Artificial Sequence
  Description of Artificial Sequence: Synthetic oligonucleotide
  Antisense strand to SEQ ID NO: 1606831
uucacugcccgauaucugg

SEQ ID NO: 1606833 - RNA, 19 nt, Artificial Sequence
  Description of Artificial Sequence: Synthetic oligonucleotide
  Sense strand starting at position 952 of SEQ ID NO: 1560537
cuggcucuucccugaaauu

SEQ ID NO: 1606834 - RNA, 19 nt, Artificial Sequence
  Description of Artificial Sequence: Synthetic oligonucleotide
  Antisense strand to SEQ ID NO: 1606833
aauuucagggaagagccag

SEQ ID NO: 1606835 - RNA, 19 nt, Artificial Sequence
  Description of Artificial Sequence: Synthetic oligonucleotide
  Sense strand starting at position 961 of SEQ ID NO: 1560537
cccugaaauuccugugguc

SEQ ID NO: 1606836 - RNA, 19 nt, Artificial Sequence
  Description of Artificial Sequence: Synthetic oligonucleotide
  Antisense strand to SEQ ID NO: 1606835
gaccacaggaauuucaggg

SEQ ID NO: 1606837 - RNA, 19 nt, Artificial Sequence
  Description of Artificial Sequence: Synthetic oligonucleotide
  Sense strand starting at position 963 of SEQ ID NO: 1560537
cugaaauuccuguggucca

SEQ ID NO: 1606838 - RNA, 19 nt, Artificial Sequence
  Description of Artificial Sequence: Synthetic oligonucleotide
  Antisense strand to SEQ ID NO: 1606837
uggaccacaggaauuucag

SEQ ID NO: 1606839 - RNA, 19 nt, Artificial Sequence
  Description of Artificial Sequence: Synthetic oligonucleotide
  Sense strand starting at position 1076 of SEQ ID NO: 1560537
cugcaugggcaauaaacua

SEQ ID NO: 1606840 - RNA, 19 nt, Artificial Sequence
  Description of Artificial Sequence: Synthetic oligonucleotide
  Antisense strand to SEQ ID NO: 1606839
uaguuuauugcccaugcag

SEQ ID NO: 1606841 - RNA, 19 nt, Artificial Sequence
  Description of Artificial Sequence: Synthetic oligonucleotide
  Sense strand starting at position 2200 of SEQ ID NO: 1560537
gucugugucucuggaagag

SEQ ID NO: 1606842 - RNA, 19 nt, Artificial Sequence
  Description of Artificial Sequence: Synthetic oligonucleotide
  Antisense strand to SEQ ID NO: 1606841
cucuuccagagacacagac

SEQ ID NO: 1606843 - RNA, 19 nt, Artificial Sequence
  Description of Artificial Sequence: Synthetic oligonucleotide
  Sense strand starting at position 2938 of SEQ ID NO: 1560537
gacgcuguuccuuggaacu

SEQ ID NO: 1606844 - RNA, 19 nt, Artificial Sequence
  Description of Artificial Sequence: Synthetic oligonucleotide
  Antisense strand to SEQ ID NO: 1606843
aguuccaaggaacagcguc

SEQ ID NO: 1606845 - RNA, 19 nt, Artificial Sequence
  Description of Artificial Sequence: Synthetic oligonucleotide
  Sense strand starting at position 2940 of SEQ ID NO: 1560537
cgcuguuccuuggaacuua

SEQ ID NO: 1606846 - RNA, 19 nt, Artificial Sequence
  Description of Artificial Sequence: Synthetic oligonucleotide
  Antisense strand to SEQ ID NO: 1606845
uaaguuccaaggaacagcg

SEQ ID NO: 1606847 - RNA, 19 nt, Artificial Sequence
  Description of Artificial Sequence: Synthetic oligonucleotide
  Sense strand starting at position 3382 of SEQ ID NO: 1560537
ucuggacuccugcaucuau

SEQ ID NO: 1606848 - RNA, 19 nt, Artificial Sequence
  Description of Artificial Sequence: Synthetic oligonucleotide
  Antisense strand to SEQ ID NO: 1606847
auagaugcaggaguccaga

SEQ ID NO: 1606849 - RNA, 19 nt, Artificial Sequence
  Description of Artificial Sequence: Synthetic oligonucleotide
  Sense strand starting at position 3480 of SEQ ID NO: 1560537
gggugcaggcguguugauu

SEQ ID NO: 1606850 - RNA, 19 nt, Artificial Sequence
  Description of Artificial Sequence: Synthetic oligonucleotide
  Antisense strand to SEQ ID NO: 1606849
aaucaacacgccugcaccc

SEQ ID NO: 1606851 - RNA, 19 nt, Artificial Sequence
  Description of Artificial Sequence: Synthetic oligonucleotide
  Sense strand starting at position 3488 of SEQ ID NO: 1560537
gcguguugauuucuucaga

SEQ ID NO: 1606852 - RNA, 19 nt, Artificial Sequence
  Description of Artificial Sequence: Synthetic oligonucleotide
  Antisense strand to SEQ ID NO: 1606851
ucugaagaaaucaacacgc

SEQ ID NO: 1606853 - RNA, 19 nt, Artificial Sequence
  Description of Artificial Sequence: Synthetic oligonucleotide
  Sense strand starting at position 3489 of SEQ ID NO: 1560537
cguguugauuucuucagag

SEQ ID NO: 1606854 - RNA, 19 nt, Artificial Sequence
  Description of Artificial Sequence: Synthetic oligonucleotide
  Antisense strand to SEQ ID NO: 1606853
cucugaagaaaucaacacg

SEQ ID NO: 1606855 - RNA, 19 nt, Artificial Sequence
  Description of Artificial Sequence: Synthetic oligonucleotide
  Sense strand starting at position 3531 of SEQ ID NO: 1560537
gggugacauccacgagucu

SEQ ID NO: 1606856 - RNA, 19 nt, Artificial Sequence
  Description of Artificial Sequence: Synthetic oligonucleotide
  Antisense strand to SEQ ID NO: 1606855
agacucguggaugucaccc

SEQ ID NO: 1606857 - RNA, 19 nt, Artificial Sequence
  Description of Artificial Sequence: Synthetic oligonucleotide
  Sense strand starting at position 3532 of SEQ ID NO: 1560537
ggugacauccacgagucuu

SEQ ID NO: 1606858 - RNA, 19 nt, Artificial Sequence
  Description of Artificial Sequence: Synthetic oligonucleotide
  Antisense strand to SEQ ID NO: 1606857
aagacucguggaugucacc

SEQ ID NO: 1606859 - RNA, 19 nt, Artificial Sequence
  Description of Artificial Sequence: Synthetic oligonucleotide
  Sense strand starting at position 3577 of SEQ ID NO: 1560537
ggagagucgggaugacuga

SEQ ID NO: 1606860 - RNA, 19 nt, Artificial Sequence
  Description of Artificial Sequence: Synthetic oligonucleotide
  Antisense strand to SEQ ID NO: 1606859
ucagucaucccgacucucc

SEQ ID NO: 1606861 - RNA, 19 nt, Artificial Sequence
  Description of Artificial Sequence: Synthetic oligonucleotide
  Sense strand starting at position 3584 of SEQ ID NO: 1560537
cgggaugacugaguccuua

SEQ ID NO: 1606862 - RNA, 19 nt, Artificial Sequence
  Description of Artificial Sequence: Synthetic oligonucleotide
  Antisense strand to SEQ ID NO: 1606861
uaaggacucagucaucccg

SEQ ID NO: 1606863 - RNA, 19 nt, Artificial Sequence
  Description of Artificial Sequence: Synthetic oligonucleotide
  Sense strand starting at position 3764 of SEQ ID NO: 1560537
ugggucuuaguguggcgaa

SEQ ID NO: 1606864 - RNA, 19 nt, Artificial Sequence
  Description of Artificial Sequence: Synthetic oligonucleotide
  Antisense strand to SEQ ID NO: 1606863
uucgccacacuaagaccca

SEQ ID NO: 1606865 - RNA, 19 nt, Artificial Sequence
  Description of Artificial Sequence: Synthetic oligonucleotide
  Sense strand starting at position 3858 of SEQ ID NO: 1560537
ccuggagucuagcucugaa

SEQ ID NO: 1606866 - RNA, 19 nt, Artificial Sequence
  Description of Artificial Sequence: Synthetic oligonucleotide
  Antisense strand to SEQ ID NO: 1606865
uucagagcuagacuccagg

SEQ ID NO: 1606867 - RNA, 19 nt, Artificial Sequence
  Description of Artificial Sequence: Synthetic oligonucleotide
  Sense strand starting at position 3861 of SEQ ID NO: 1560537
ggagucuagcucugaagcu

SEQ ID NO: 1606868 - RNA, 19 nt, Artificial Sequence
  Description of Artificial Sequence: Synthetic oligonucleotide
  Antisense strand to SEQ ID NO: 1606867
agcuucagagcuagacucc

SEQ ID NO: 1606869 - RNA, 19 nt, Artificial Sequence
  Description of Artificial Sequence: Synthetic oligonucleotide
  Sense strand starting at position 3873 of SEQ ID NO: 1560537
ugaagcuggugucuccaua

SEQ ID NO: 1606870 - RNA, 19 nt, Artificial Sequence
  Description of Artificial Sequence: Synthetic oligonucleotide
  Antisense strand to SEQ ID NO: 1606869
uauggagacaccagcuuca

SEQ ID NO: 1606871 - RNA, 19 nt, Artificial Sequence
  Description of Artificial Sequence: Synthetic oligonucleotide
  Sense strand starting at position 3963 of SEQ ID NO: 1560537
ucccuugucccaggaggaa

SEQ ID NO: 1606872 - RNA, 19 nt, Artificial Sequence
  Description of Artificial Sequence: Synthetic oligonucleotide
  Antisense strand to SEQ ID NO: 1606871
uuccuccugggacaaggga

SEQ ID NO: 1606873 - RNA, 19 nt, Artificial Sequence
  Description of Artificial Sequence: Synthetic oligonucleotide
  Sense strand starting at position 99 of SEQ ID NO: 1560538
cccgucugugcggcagaau

SEQ ID NO: 1606874 - RNA, 19 nt, Artificial Sequence
  Description of Artificial Sequence: Synthetic oligonucleotide
  Antisense strand to SEQ ID NO: 1606873
auucugccgcacagacggg

SEQ ID NO: 1606875 - RNA, 19 nt, Artificial Sequence
  Description of Artificial Sequence: Synthetic oligonucleotide
  Sense strand starting at position 262 of SEQ ID NO: 1560538
cccagaaauccucggcuca

SEQ ID NO: 1606876 - RNA, 19 nt, Artificial Sequence
  Description of Artificial Sequence: Synthetic oligonucleotide
  Antisense strand to SEQ ID NO: 1606875
ugagccgaggauuucuggg

SEQ ID NO: 1606877 - RNA, 19 nt, Artificial Sequence
  Description of Artificial Sequence: Synthetic oligonucleotide
  Sense strand starting at position 263 of SEQ ID NO: 1560538
ccagaaauccucggcucag

SEQ ID NO: 1606878 - RNA, 19 nt, Artificial Sequence
  Description of Artificial Sequence: Synthetic oligonucleotide
  Antisense strand to SEQ ID NO: 1606877
cugagccgaggauuucugg

SEQ ID NO: 1606879 - RNA, 19 nt, Artificial Sequence
  Description of Artificial Sequence: Synthetic oligonucleotide
  Sense strand starting at position 264 of SEQ ID NO: 1560538
cagaaauccucggcucaga

SEQ ID NO: 1606880 - RNA, 19 nt, Artificial Sequence
  Description of Artificial Sequence: Synthetic oligonucleotide
  Antisense strand to SEQ ID NO: 1606879
ucugagccgaggauuucug

SEQ ID NO: 1606881 - RNA, 19 nt, Artificial Sequence
  Description of Artificial Sequence: Synthetic oligonucleotide
  Sense strand starting at position 430 of SEQ ID NO: 1560538
uaaggaagcuauuauugga

SEQ ID NO: 1606882 - RNA, 19 nt, Artificial Sequence
  Description of Artificial Sequence: Synthetic oligonucleotide
  Antisense strand to SEQ ID NO: 1606881
uccaauaauagcuuccuua

SEQ ID NO: 1606883 - RNA, 19 nt, Artificial Sequence
  Description of Artificial Sequence: Synthetic oligonucleotide
  Sense strand starting at position 433 of SEQ ID NO: 1560538
ggaagcuauuauuggagaa

SEQ ID NO: 1606884 - RNA, 19 nt, Artificial Sequence
  Description of Artificial Sequence: Synthetic oligonucleotide
  Antisense strand to SEQ ID NO: 1606883
uucuccaauaauagcuucc

SEQ ID NO: 1606885 - RNA, 19 nt, Artificial Sequence
  Description of Artificial Sequence: Synthetic oligonucleotide
  Sense strand starting at position 456 of SEQ ID NO: 1560538
gggagucauuagcucccau

SEQ ID NO: 1606886 - RNA, 19 nt, Artificial Sequence
  Description of Artificial Sequence: Synthetic oligonucleotide
  Antisense strand to SEQ ID NO: 1606885
augggagcuaaugacuccc

SEQ ID NO: 1606887 - RNA, 19 nt, Artificial Sequence
  Description of Artificial Sequence: Synthetic oligonucleotide
  Sense strand starting at position 471 of SEQ ID NO: 1560538
ccauaacggcagugauaaa

SEQ ID NO: 1606888 - RNA, 19 nt, Artificial Sequence
  Description of Artificial Sequence: Synthetic oligonucleotide
  Antisense strand to SEQ ID NO: 1606887
uuuaucacugccguuaugg

SEQ ID NO: 1606889 - RNA, 19 nt, Artificial Sequence
  Description of Artificial Sequence: Synthetic oligonucleotide
  Sense strand starting at position 491 of SEQ ID NO: 1560538
gcccauaggagucgucuaa

SEQ ID NO: 1606890 - RNA, 19 nt, Artificial Sequence
  Description of Artificial Sequence: Synthetic oligonucleotide
  Antisense strand to SEQ ID NO: 1606889
uuagacgacuccuaugggc

SEQ ID NO: 1606891 - RNA, 19 nt, Artificial Sequence
  Description of Artificial Sequence: Synthetic oligonucleotide
  Sense strand starting at position 495 of SEQ ID NO: 1560538
auaggagucgucuaaugag

SEQ ID NO: 1606892 - RNA, 19 nt, Artificial Sequence
  Description of Artificial Sequence: Synthetic oligonucleotide
  Antisense strand to SEQ ID NO: 1606891
cucauuagacgacuccuau

SEQ ID NO: 1606893 - RNA, 19 nt, Artificial Sequence
  Description of Artificial Sequence: Synthetic oligonucleotide
  Sense strand starting at position 503 of SEQ ID NO: 1560538
cgucuaaugagccugcuuu

SEQ ID NO: 1606894 - RNA, 19 nt, Artificial Sequence
  Description of Artificial Sequence: Synthetic oligonucleotide
  Antisense strand to SEQ ID NO: 1606893
aaagcaggcucauuagacg

SEQ ID NO: 1606895 - RNA, 19 nt, Artificial Sequence
  Description of Artificial Sequence: Synthetic oligonucleotide
  Sense strand starting at position 504 of SEQ ID NO: 1560538
gucuaaugagccugcuuua

SEQ ID NO: 1606896 - RNA, 19 nt, Artificial Sequence
  Description of Artificial Sequence: Synthetic oligonucleotide
  Antisense strand to SEQ ID NO: 1606895
uaaagcaggcucauuagac

SEQ ID NO: 1606897 - RNA, 19 nt, Artificial Sequence
  Description of Artificial Sequence: Synthetic oligonucleotide
  Sense strand starting at position 507 of SEQ ID NO: 1560538
uaaugagccugcuuuagga

SEQ ID NO: 1606898 - RNA, 19 nt, Artificial Sequence
  Description of Artificial Sequence: Synthetic oligonucleotide
  Antisense strand to SEQ ID NO: 1606897
uccuaaagcaggcucauua

SEQ ID NO: 1606899 - RNA, 19 nt, Artificial Sequence
  Description of Artificial Sequence: Synthetic oligonucleotide
  Sense strand starting at position 559 of SEQ ID NO: 1560538
gggacauucugauaaaugg

SEQ ID NO: 1606900 - RNA, 19 nt, Artificial Sequence
  Description of Artificial Sequence: Synthetic oligonucleotide
  Antisense strand to SEQ ID NO: 1606899
ccauuuaucagaauguccc

SEQ ID NO: 1606901 - RNA, 19 nt, Artificial Sequence
  Description of Artificial Sequence: Synthetic oligonucleotide
  Sense strand starting at position 566 of SEQ ID NO: 1560538
ucugauaaauggccauuga

SEQ ID NO: 1606902 - RNA, 19 nt, Artificial Sequence
  Description of Artificial Sequence: Synthetic oligonucleotide
  Antisense strand to SEQ ID NO: 1606901
ucaauggccauuuaucaga

SEQ ID NO: 1606903 - RNA, 19 nt, Artificial Sequence
  Description of Artificial Sequence: Synthetic oligonucleotide
  Sense strand starting at position 1190 of SEQ ID NO: 1560538
ugccguugcauagcaagau

SEQ ID NO: 1606904 - RNA, 19 nt, Artificial Sequence
  Description of Artificial Sequence: Synthetic oligonucleotide
  Antisense strand to SEQ ID NO: 1606903
aucuugcuaugcaacggca

SEQ ID NO: 1606905 - RNA, 19 nt, Artificial Sequence
  Description of Artificial Sequence: Synthetic oligonucleotide
  Sense strand starting at position 1194 of SEQ ID NO: 1560538
guugcauagcaagaugauu

SEQ ID NO: 1606906 - RNA, 19 nt, Artificial Sequence
  Description of Artificial Sequence: Synthetic oligonucleotide
  Antisense strand to SEQ ID NO: 1606905
aaucaucuugcuaugcaac

SEQ ID NO: 1606907 - RNA, 19 nt, Artificial Sequence
  Description of Artificial Sequence: Synthetic oligonucleotide
  Sense strand starting at position 1499 of SEQ ID NO: 1560538
gaggcuugucccgggugau

SEQ ID NO: 1606908 - RNA, 19 nt, Artificial Sequence
  Description of Artificial Sequence: Synthetic oligonucleotide
  Antisense strand to SEQ ID NO: 1606907
aucacccgggacaagccuc

SEQ ID NO: 1606909 - RNA, 19 nt, Artificial Sequence
  Description of Artificial Sequence: Synthetic oligonucleotide
  Sense strand starting at position 1500 of SEQ ID NO: 1560538
aggcuugucccgggugaua

SEQ ID NO: 1606910 - RNA, 19 nt, Artificial Sequence
  Description of Artificial Sequence: Synthetic oligonucleotide
  Antisense strand to SEQ ID NO: 1606909
uaucacccgggacaagccu

SEQ ID NO: 1606911 - RNA, 19 nt, Artificial Sequence
  Description of Artificial Sequence: Synthetic oligonucleotide
  Sense strand starting at position 1502 of SEQ ID NO: 1560538
gcuugucccgggugauaaa

SEQ ID NO: 1606912 - RNA, 19 nt, Artificial Sequence
  Description of Artificial Sequence: Synthetic oligonucleotide
  Antisense strand to SEQ ID NO: 1606911
uuuaucacccgggacaagc

SEQ ID NO: 1606913 - RNA, 19 nt, Artificial Sequence
  Description of Artificial Sequence: Synthetic oligonucleotide
  Sense strand starting at position 2714 of SEQ ID NO: 1560538
gggcaaggccuucggaaua

SEQ ID NO: 1606914 - RNA, 19 nt, Artificial Sequence
  Description of Artificial Sequence: Synthetic oligonucleotide
  Antisense strand to SEQ ID NO: 1606913
uauuccgaaggccuugccc

SEQ ID NO: 1606915 - RNA, 19 nt, Artificial Sequence
  Description of Artificial Sequence: Synthetic oligonucleotide
  Sense strand starting at position 2779 of SEQ ID NO: 1560538
gagcuuuggugcuuucuga

SEQ ID NO: 1606916 - RNA, 19 nt, Artificial Sequence
  Description of Artificial Sequence: Synthetic oligonucleotide
  Antisense strand to SEQ ID NO: 1606915
ucagaaagcaccaaagcuc

SEQ ID NO: 1606917 - RNA, 19 nt, Artificial Sequence
  Description of Artificial Sequence: Synthetic oligonucleotide
  Sense strand starting at position 2786 of SEQ ID NO: 1560538
ggugcuuucugaccuggau

SEQ ID NO: 1606918 - RNA, 19 nt, Artificial Sequence
  Description of Artificial Sequence: Synthetic oligonucleotide
  Antisense strand to SEQ ID NO: 1606917
auccaggucagaaagcacc

SEQ ID NO: 1606919 - RNA, 19 nt, Artificial Sequence
  Description of Artificial Sequence: Synthetic oligonucleotide
  Sense strand starting at position 2835 of SEQ ID NO: 1560538
gugguugaccuccagcaaa

SEQ ID NO: 1606920 - RNA, 19 nt, Artificial Sequence
  Description of Artificial Sequence: Synthetic oligonucleotide
  Antisense strand to SEQ ID NO: 1606919
uuugcuggaggucaaccac

SEQ ID NO: 1606921 - RNA, 19 nt, Artificial Sequence
  Description of Artificial Sequence: Synthetic oligonucleotide
  Sense strand starting at position 2861 of SEQ ID NO: 1560538
cgcugagucuguuuccaac

SEQ ID NO: 1606922 - RNA, 19 nt, Artificial Sequence
  Description of Artificial Sequence: Synthetic oligonucleotide
  Antisense strand to SEQ ID NO: 1606921
guuggaaacagacucagcg

SEQ ID NO: 1606923 - RNA, 19 nt, Artificial Sequence
  Description of Artificial Sequence: Synthetic oligonucleotide
  Sense strand starting at position 2922 of SEQ ID NO: 1560538
gccucuugagaauguugca

SEQ ID NO: 1606924 - RNA, 19 nt, Artificial Sequence
  Description of Artificial Sequence: Synthetic oligonucleotide
  Antisense strand to SEQ ID NO: 1606923
ugcaacauucucaagaggc

SEQ ID NO: 1606925 - RNA, 19 nt, Artificial Sequence
  Description of Artificial Sequence: Synthetic oligonucleotide
  Sense strand starting at position 2927 of SEQ ID NO: 1560538
uugagaauguugcaaggau

SEQ ID NO: 1606926 - RNA, 19 nt, Artificial Sequence
  Description of Artificial Sequence: Synthetic oligonucleotide
  Antisense strand to SEQ ID NO: 1606925
auccuugcaacauucucaa

SEQ ID NO: 1606927 - RNA, 19 nt, Artificial Sequence
  Description of Artificial Sequence: Synthetic oligonucleotide
  Sense strand starting at position 3130 of SEQ ID NO: 1560538
caguucuuccuggagguga

SEQ ID NO: 1606928 - RNA, 19 nt, Artificial Sequence
  Description of Artificial Sequence: Synthetic oligonucleotide
  Antisense strand to SEQ ID NO: 1606927
ucaccuccaggaagaacug

SEQ ID NO: 1606929 - RNA, 19 nt, Artificial Sequence
  Description of Artificial Sequence: Synthetic oligonucleotide
  Sense strand starting at position 3206 of SEQ ID NO: 1560538
gucugcaacuguuuccaau

SEQ ID NO: 1606930 - RNA, 19 nt, Artificial Sequence
  Description of Artificial Sequence: Synthetic oligonucleotide
  Antisense strand to SEQ ID NO: 1606929
auuggaaacaguugcagac

SEQ ID NO: 1606931 - RNA, 19 nt, Artificial Sequence
  Description of Artificial Sequence: Synthetic oligonucleotide
  Sense strand starting at position 3273 of SEQ ID NO: 1560538
agcaaucaguacucuggaa

SEQ ID NO: 1606932 - RNA, 19 nt, Artificial Sequence
  Description of Artificial Sequence: Synthetic oligonucleotide
  Antisense strand to SEQ ID NO: 1606931
uuccagaguacugauugcu

SEQ ID NO: 1606933 - RNA, 19 nt, Artificial Sequence
  Description of Artificial Sequence: Synthetic oligonucleotide
  Sense strand starting at position 3286 of SEQ ID NO: 1560538
cuggaauacuuacuaugua

SEQ ID NO: 1606934 - RNA, 19 nt, Artificial Sequence
  Description of Artificial Sequence: Synthetic oligonucleotide
  Antisense strand to SEQ ID NO: 1606933
uacauaguaaguauuccag

SEQ ID NO: 1606935 - RNA, 19 nt, Artificial Sequence
  Description of Artificial Sequence: Synthetic oligonucleotide
  Sense strand starting at position 3534 of SEQ ID NO: 1560538
agucgagaucacugcacuu

SEQ ID NO: 1606936 - RNA, 19 nt, Artificial Sequence
  Description of Artificial Sequence: Synthetic oligonucleotide
  Antisense strand to SEQ ID NO: 1606935
aagugcagugaucucgacu

SEQ ID NO: 1606937 - RNA, 19 nt, Artificial Sequence
  Description of Artificial Sequence: Synthetic oligonucleotide
  Sense strand starting at position 3612 of SEQ ID NO: 1560538
ggccgaucuguuugcaaac

SEQ ID NO: 1606938 - RNA, 19 nt, Artificial Sequence
  Description of Artificial Sequence: Synthetic oligonucleotide
  Antisense strand to SEQ ID NO: 1606937
guuugcaaacagaucggcc

SEQ ID NO: 1606939 - RNA, 19 nt, Artificial Sequence
  Description of Artificial Sequence: Synthetic oligonucleotide
  Sense strand starting at position 3613 of SEQ ID NO: 1560538
gccgaucuguuugcaaaca

SEQ ID NO: 1606940 - RNA, 19 nt, Artificial Sequence
  Description of Artificial Sequence: Synthetic oligonucleotide
  Antisense strand to SEQ ID NO: 1606939
uguuugcaaacagaucggc

SEQ ID NO: 1606941 - RNA, 19 nt, Artificial Sequence
  Description of Artificial Sequence: Synthetic oligonucleotide
  Sense strand starting at position 3621 of SEQ ID NO: 1560538
guuugcaaacaugaaauau

SEQ ID NO: 1606942 - RNA, 19 nt, Artificial Sequence
  Description of Artificial Sequence: Synthetic oligonucleotide
  Antisense strand to SEQ ID NO: 1606941
auauuucauguuugcaaac

SEQ ID NO: 1606943 - RNA, 19 nt, Artificial Sequence
  Description of Artificial Sequence: Synthetic oligonucleotide
  Sense strand starting at position 3660 of SEQ ID NO: 1560538
gacagugguccagaauccu

SEQ ID NO: 1606944 - RNA, 19 nt, Artificial Sequence
  Description of Artificial Sequence: Synthetic oligonucleotide
  Antisense strand to SEQ ID NO: 1606943
aggauucuggaccacuguc

SEQ ID NO: 1606945 - RNA, 19 nt, Artificial Sequence
  Description of Artificial Sequence: Synthetic oligonucleotide
  Sense strand starting at position 3735 of SEQ ID NO: 1560538
agcacacaagcuugucaau

SEQ ID NO: 1606946 - RNA, 19 nt, Artificial Sequence
  Description of Artificial Sequence: Synthetic oligonucleotide
  Antisense strand to SEQ ID NO: 1606945
auugacaagcuugugugcu

SEQ ID NO: 1606947 - RNA, 19 nt, Artificial Sequence
  Description of Artificial Sequence: Synthetic oligonucleotide
  Sense strand starting at position 3852 of SEQ ID NO: 1560538
uaagaagcucuggguguuu

SEQ ID NO: 1606948 - RNA, 19 nt, Artificial Sequence
  Description of Artificial Sequence: Synthetic oligonucleotide
  Antisense strand to SEQ ID NO: 1606947
aaacacccagagcuucuua

SEQ ID NO: 1606949 - RNA, 19 nt, Artificial Sequence
  Description of Artificial Sequence: Synthetic oligonucleotide
  Sense strand starting at position 3900 of SEQ ID NO: 1560538
uccacauggaguugagauu

SEQ ID NO: 1606950 - RNA, 19 nt, Artificial Sequence
  Description of Artificial Sequence: Synthetic oligonucleotide
  Antisense strand to SEQ ID NO: 1606949
aaucucaacuccaugugga

SEQ ID NO: 1606951 - RNA, 19 nt, Artificial Sequence
  Description of Artificial Sequence: Synthetic oligonucleotide
  Sense strand starting at position 3924 of SEQ ID NO: 1560538
ucaggucaugccuggaauc

SEQ ID NO: 1606952 - RNA, 19 nt, Artificial Sequence
  Description of Artificial Sequence: Synthetic oligonucleotide
  Antisense strand to SEQ ID NO: 1606951
gauuccaggcaugaccuga

SEQ ID NO: 1606953 - RNA, 19 nt, Artificial Sequence
  Description of Artificial Sequence: Synthetic oligonucleotide
  Sense strand starting at position 223 of SEQ ID NO: 1560539
ugagguuggagcugagaca

SEQ ID NO: 1606954 - RNA, 19 nt, Artificial Sequence
  Description of Artificial Sequence: Synthetic oligonucleotide
  Antisense strand to SEQ ID NO: 1606953
ugucucagcuccaaccuca

SEQ ID NO: 1606955 - RNA, 19 nt, Artificial Sequence
  Description of Artificial Sequence: Synthetic oligonucleotide
  Sense strand starting at position 326 of SEQ ID NO: 1560539
gacagucaaucuggagaau

SEQ ID NO: 1606956 - RNA, 19 nt, Artificial Sequence
  Description of Artificial Sequence: Synthetic oligonucleotide
  Antisense strand to SEQ ID NO: 1606955
auucuccagauugacuguc

SEQ ID NO: 1606957 - RNA, 19 nt, Artificial Sequence
  Description of Artificial Sequence: Synthetic oligonucleotide
  Sense strand starting at position 417 of SEQ ID NO: 1560539
ggagaugaguuauguguuu

SEQ ID NO: 1606958 - RNA, 19 nt, Artificial Sequence
  Description of Artificial Sequence: Synthetic oligonucleotide
  Antisense strand to SEQ ID NO: 1606957
aaacacauaacucaucucc

SEQ ID NO: 1606959 - RNA, 19 nt, Artificial Sequence
  Description of Artificial Sequence: Synthetic oligonucleotide
  Sense strand starting at position 1037 of SEQ ID NO: 1560539
agacgugaguuacguuuca

SEQ ID NO: 1606960 - RNA, 19 nt, Artificial Sequence
  Description of Artificial Sequence: Synthetic oligonucleotide
  Antisense strand to SEQ ID NO: 1606959
ugaaacguaacucacgucu

SEQ ID NO: 1606961 - RNA, 19 nt, Artificial Sequence
  Description of Artificial Sequence: Synthetic oligonucleotide
  Sense strand starting at position 1087 of SEQ ID NO: 1560539
acaaguggaucugcaaguu

SEQ ID NO: 1606962 - RNA, 19 nt, Artificial Sequence
  Description of Artificial Sequence: Synthetic oligonucleotide
  Antisense strand to SEQ ID NO: 1606961
aacuugcagauccacuugu

SEQ ID NO: 1606963 - RNA, 19 nt, Artificial Sequence
  Description of Artificial Sequence: Synthetic oligonucleotide
  Sense strand starting at position 1113 of SEQ ID NO: 1560539
cccucuuucugggacucaa

SEQ ID NO: 1606964 - RNA, 19 nt, Artificial Sequence
  Description of Artificial Sequence: Synthetic oligonucleotide
  Antisense strand to SEQ ID NO: 1606963
uugagucccagaaagaggg

SEQ ID NO: 1606965 - RNA, 19 nt, Artificial Sequence
  Description of Artificial Sequence: Synthetic oligonucleotide
  Sense strand starting at position 1168 of SEQ ID NO: 1560539
ugcgcuugucaggaacuga

SEQ ID NO: 1606966 - RNA, 19 nt, Artificial Sequence
  Description of Artificial Sequence: Synthetic oligonucleotide
  Antisense strand to SEQ ID NO: 1606965
ucaguuccugacaagcgca

SEQ ID NO: 1606967 - RNA, 19 nt, Artificial Sequence
  Description of Artificial Sequence: Synthetic oligonucleotide
  Sense strand starting at position 1198 of SEQ ID NO: 1560539
uugcuugucuguugaucga

SEQ ID NO: 1606968 - RNA, 19 nt, Artificial Sequence
  Description of Artificial Sequence: Synthetic oligonucleotide
  Antisense strand to SEQ ID NO: 1606967
ucgaucaacagacaagcaa

SEQ ID NO: 1606969 - RNA, 19 nt, Artificial Sequence
  Description of Artificial Sequence: Synthetic oligonucleotide
  Sense strand starting at position 1252 of SEQ ID NO: 1560539
cagggagaccuauguaggu

SEQ ID NO: 1606970 - RNA, 19 nt, Artificial Sequence
  Description of Artificial Sequence: Synthetic oligonucleotide
  Antisense strand to SEQ ID NO: 1606969
accuacauaggucucccug

SEQ ID NO: 1606971 - RNA, 19 nt, Artificial Sequence
  Description of Artificial Sequence: Synthetic oligonucleotide
  Sense strand starting at position 1327 of SEQ ID NO: 1560539
ggucaauaaacgggugguu

SEQ ID NO: 1606972 - RNA, 19 nt, Artificial Sequence
  Description of Artificial Sequence: Synthetic oligonucleotide
  Antisense strand to SEQ ID NO: 1606971
aaccacccguuuauugacc

SEQ ID NO: 1606973 - RNA, 19 nt, Artificial Sequence
  Description of Artificial Sequence: Synthetic oligonucleotide
  Sense strand starting at position 1454 of SEQ ID NO: 1560539
uggccaaucggucaacaau

SEQ ID NO: 1606974 - RNA, 19 nt, Artificial Sequence
  Description of Artificial Sequence: Synthetic oligonucleotide
  Antisense strand to SEQ ID NO: 1606973
auuguugaccgauuggcca

SEQ ID NO: 1606975 - RNA, 19 nt, Artificial Sequence
  Description of Artificial Sequence: Synthetic oligonucleotide
  Sense strand starting at position 1711 of SEQ ID NO: 1560539
agaguugcgccguccaaca

SEQ ID NO: 1606976 - RNA, 19 nt, Artificial Sequence
  Description of Artificial Sequence: Synthetic oligonucleotide
  Antisense strand to SEQ ID NO: 1606975
uguuggacggcgcaacucu

SEQ ID NO: 1606977 - RNA, 19 nt, Artificial Sequence
  Description of Artificial Sequence: Synthetic oligonucleotide
  Sense strand starting at position 2009 of SEQ ID NO: 1560539
cccgccgugucacaauaaa

SEQ ID NO: 1606978 - RNA, 19 nt, Artificial Sequence
  Description of Artificial Sequence: Synthetic oligonucleotide
  Antisense strand to SEQ ID NO: 1606977
uuuauugugacacggcggg

SEQ ID NO: 1606979 - RNA, 19 nt, Artificial Sequence
  Description of Artificial Sequence: Synthetic oligonucleotide
  Sense strand starting at position 2407 of SEQ ID NO: 1560539
cgacccaguccaggagauu

SEQ ID NO: 1606980 - RNA, 19 nt, Artificial Sequence
  Description of Artificial Sequence: Synthetic oligonucleotide
  Antisense strand to SEQ ID NO: 1606979
aaucuccuggacugggucg

SEQ ID NO: 1606981 - RNA, 19 nt, Artificial Sequence
  Description of Artificial Sequence: Synthetic oligonucleotide
  Sense strand starting at position 2416 of SEQ ID NO: 1560539
ccaggagauuccugccuua

SEQ ID NO: 1606982 - RNA, 19 nt, Artificial Sequence
  Description of Artificial Sequence: Synthetic oligonucleotide
  Antisense strand to SEQ ID NO: 1606981
uaaggcaggaaucuccugg

SEQ ID NO: 1606983 - RNA, 19 nt, Artificial Sequence
  Description of Artificial Sequence: Synthetic oligonucleotide
  Sense strand starting at position 2419 of SEQ ID NO: 1560539
ggagauuccugccuuaccu

SEQ ID NO: 1606984 - RNA, 19 nt, Artificial Sequence
  Description of Artificial Sequence: Synthetic oligonucleotide
  Antisense strand to SEQ ID NO: 1606983
agguaaggcaggaaucucc

SEQ ID NO: 1606985 - RNA, 19 nt, Artificial Sequence
  Description of Artificial Sequence: Synthetic oligonucleotide
  Sense strand starting at position 2699 of SEQ ID NO: 1560539
ucccgauuucguugcugga

SEQ ID NO: 1606986 - RNA, 19 nt, Artificial Sequence
  Description of Artificial Sequence: Synthetic oligonucleotide
  Antisense strand to SEQ ID NO: 1606985
uccagcaacgaaaucggga

SEQ ID NO: 1606987 - RNA, 19 nt, Artificial Sequence
  Description of Artificial Sequence: Synthetic oligonucleotide
  Sense strand starting at position 2817 of SEQ ID NO: 1560539
uaucuaccucgcuagguuu

SEQ ID NO: 1606988 - RNA, 19 nt, Artificial Sequence
  Description of Artificial Sequence: Synthetic oligonucleotide
  Antisense strand to SEQ ID NO: 1606987
aaaccuagcgagguagaua

SEQ ID NO: 1606989 - RNA, 19 nt, Artificial Sequence
  Description of Artificial Sequence: Synthetic oligonucleotide
  Sense strand starting at position 3505 of SEQ ID NO: 1560539
cggccuuccuugucuuuau

SEQ ID NO: 1606990 - RNA, 19 nt, Artificial Sequence
  Description of Artificial Sequence: Synthetic oligonucleotide
  Antisense strand to SEQ ID NO: 1606989
auaaagacaaggaaggccg

SEQ ID NO: 1606991 - RNA, 19 nt, Artificial Sequence
  Description of Artificial Sequence: Synthetic oligonucleotide
  Sense strand starting at position 3506 of SEQ ID NO: 1560539
ggccuuccuugucuuuauu

SEQ ID NO: 1606992 - RNA, 19 nt, Artificial Sequence
  Description of Artificial Sequence: Synthetic oligonucleotide
  Antisense strand to SEQ ID NO: 1606991
aauaaagacaaggaaggcc

SEQ ID NO: 1606993 - RNA, 19 nt, Artificial Sequence
  Description of Artificial Sequence: Synthetic oligonucleotide
  Sense strand starting at position 3615 of SEQ ID NO: 1560539
gcgcuuacuuaguucucua

SEQ ID NO: 1606994 - RNA, 19 nt, Artificial Sequence
  Description of Artificial Sequence: Synthetic oligonucleotide
  Antisense strand to SEQ ID NO: 1606993
uagagaacuaaguaagcgc

SEQ ID NO: 1606995 - RNA, 19 nt, Artificial Sequence
  Description of Artificial Sequence: Synthetic oligonucleotide
  Sense strand starting at position 3619 of SEQ ID NO: 1560539
uuacuuaguucucuauggu

SEQ ID NO: 1606996 - RNA, 19 nt, Artificial Sequence
  Description of Artificial Sequence: Synthetic oligonucleotide
  Antisense strand to SEQ ID NO: 1606995
accauagagaacuaaguaa

SEQ ID NO: 1606997 - RNA, 19 nt, Artificial Sequence
  Description of Artificial Sequence: Synthetic oligonucleotide
  Sense strand starting at position 464 of SEQ ID NO: 1560540
agacgugaguuacguuuca

SEQ ID NO: 1606998 - RNA, 19 nt, Artificial Sequence
  Description of Artificial Sequence: Synthetic oligonucleotide
  Antisense strand to SEQ ID NO: 1606997
ugaaacguaacucacgucu

SEQ ID NO: 1606999 - RNA, 19 nt, Artificial Sequence
  Description of Artificial Sequence: Synthetic oligonucleotide
  Sense strand starting at position 514 of SEQ ID NO: 1560540
acaaguggaucugcaaguu

SEQ ID NO: 1607000 - RNA, 19 nt, Artificial Sequence
  Description of Artificial Sequence: Synthetic oligonucleotide
  Antisense strand to SEQ ID NO: 1606999
aacuugcagauccacuugu

SEQ ID NO: 1607001 - RNA, 19 nt, Artificial Sequence
  Description of Artificial Sequence: Synthetic oligonucleotide
  Sense strand starting at position 540 of SEQ ID NO: 1560540
cccucuuucugggacucaa

SEQ ID NO: 1607002 - RNA, 19 nt, Artificial Sequence
  Description of Artificial Sequence: Synthetic oligonucleotide
  Antisense strand to SEQ ID NO: 1607001
uugagucccagaaagaggg

SEQ ID NO: 1607003 - RNA, 19 nt, Artificial Sequence
  Description of Artificial Sequence: Synthetic oligonucleotide
  Sense strand starting at position 595 of SEQ ID NO: 1560540
ugcgcuugucaggaacuga

SEQ ID NO: 1607004 - RNA, 19 nt, Artificial Sequence
  Description of Artificial Sequence: Synthetic oligonucleotide
  Antisense strand to SEQ ID NO: 1607003
ucaguuccugacaagcgca

SEQ ID NO: 1607005 - RNA, 19 nt, Artificial Sequence
  Description of Artificial Sequence: Synthetic oligonucleotide
  Sense strand starting at position 625 of SEQ ID NO: 1560540
uugcuugucuguugaucga

SEQ ID NO: 1607006 - RNA, 19 nt, Artificial Sequence
  Description of Artificial Sequence: Synthetic oligonucleotide
  Antisense strand to SEQ ID NO: 1607005
ucgaucaacagacaagcaa

SEQ ID NO: 1607007 - RNA, 19 nt, Artificial Sequence
  Description of Artificial Sequence: Synthetic oligonucleotide
  Sense strand starting at position 679 of SEQ ID NO: 1560540
cagggagaccuauguaggu

SEQ ID NO: 1607008 - RNA, 19 nt, Artificial Sequence
  Description of Artificial Sequence: Synthetic oligonucleotide
  Antisense strand to SEQ ID NO: 1607007
accuacauaggucucccug

SEQ ID NO: 1607009 - RNA, 19 nt, Artificial Sequence
  Description of Artificial Sequence: Synthetic oligonucleotide
  Sense strand starting at position 754 of SEQ ID NO: 1560540
ggucaauaaacgggugguu

SEQ ID NO: 1607010 - RNA, 19 nt, Artificial Sequence
  Description of Artificial Sequence: Synthetic oligonucleotide
  Antisense strand to SEQ ID NO: 1607009
aaccacccguuuauugacc

SEQ ID NO: 1607011 - RNA, 19 nt, Artificial Sequence
  Description of Artificial Sequence: Synthetic oligonucleotide
  Sense strand starting at position 881 of SEQ ID NO: 1560540
uggccaaucggucaacaau

SEQ ID NO: 1607012 - RNA, 19 nt, Artificial Sequence
  Description of Artificial Sequence: Synthetic oligonucleotide
  Antisense strand to SEQ ID NO: 1607011
auuguugaccgauuggcca

SEQ ID NO: 1607013 - RNA, 19 nt, Artificial Sequence
  Description of Artificial Sequence: Synthetic oligonucleotide
  Sense strand starting at position 1138 of SEQ ID NO: 1560540
agaguugcgccguccaaca

SEQ ID NO: 1607014 - RNA, 19 nt, Artificial Sequence
  Description of Artificial Sequence: Synthetic oligonucleotide
  Antisense strand to SEQ ID NO: 1607013
uguuggacggcgcaacucu

SEQ ID NO: 1607015 - RNA, 19 nt, Artificial Sequence
  Description of Artificial Sequence: Synthetic oligonucleotide
  Sense strand starting at position 1436 of SEQ ID NO: 1560540
cccgccgugucacaauaaa

SEQ ID NO: 1607016 - RNA, 19 nt, Artificial Sequence
  Description of Artificial Sequence: Synthetic oligonucleotide
  Antisense strand to SEQ ID NO: 1607015
uuuauugugacacggcggg

SEQ ID NO: 1607017 - RNA, 19 nt, Artificial Sequence
  Description of Artificial Sequence: Synthetic oligonucleotide
  Sense strand starting at position 1834 of SEQ ID NO: 1560540
cgacccaguccaggagauu

SEQ ID NO: 1607018 - RNA, 19 nt, Artificial Sequence
  Description of Artificial Sequence: Synthetic oligonucleotide
  Antisense strand to SEQ ID NO: 1607017
aaucuccuggacugggucg

SEQ ID NO: 1607019 - RNA, 19 nt, Artificial Sequence
  Description of Artificial Sequence: Synthetic oligonucleotide
  Sense strand starting at position 1843 of SEQ ID NO: 1560540
ccaggagauuccugccuua

SEQ ID NO: 1607020 - RNA, 19 nt, Artificial Sequence
  Description of Artificial Sequence: Synthetic oligonucleotide
  Antisense strand to SEQ ID NO: 1607019
uaaggcaggaaucuccugg

SEQ ID NO: 1607021 - RNA, 19 nt, Artificial Sequence
  Description of Artificial Sequence: Synthetic oligonucleotide
  Sense strand starting at position 1846 of SEQ ID NO: 1560540
ggagauuccugccuuaccu

SEQ ID NO: 1607022 - RNA, 19 nt, Artificial Sequence
  Description of Artificial Sequence: Synthetic oligonucleotide
  Antisense strand to SEQ ID NO: 1607021
agguaaggcaggaaucucc

SEQ ID NO: 1607023 - RNA, 19 nt, Artificial Sequence
  Description of Artificial Sequence: Synthetic oligonucleotide
  Sense strand starting at position 2126 of SEQ ID NO: 1560540
ucccgauuucguugcugga

SEQ ID NO: 1607024 - RNA, 19 nt, Artificial Sequence
  Description of Artificial Sequence: Synthetic oligonucleotide
  Antisense strand to SEQ ID NO: 1607023
uccagcaacgaaaucggga

SEQ ID NO: 1607025 - RNA, 19 nt, Artificial Sequence
  Description of Artificial Sequence: Synthetic oligonucleotide
  Sense strand starting at position 2244 of SEQ ID NO: 1560540
uaucuaccucgcuagguuu

SEQ ID NO: 1607026 - RNA, 19 nt, Artificial Sequence
  Description of Artificial Sequence: Synthetic oligonucleotide
  Antisense strand to SEQ ID NO: 1607025
aaaccuagcgagguagaua

SEQ ID NO: 1607027 - RNA, 19 nt, Artificial Sequence
  Description of Artificial Sequence: Synthetic oligonucleotide
  Sense strand starting at position 2932 of SEQ ID NO: 1560540
cggccuuccuugucuuuau

SEQ ID NO: 1607028 - RNA, 19 nt, Artificial Sequence
  Description of Artificial Sequence: Synthetic oligonucleotide
  Antisense strand to SEQ ID NO: 1607027
auaaagacaaggaaggccg

SEQ ID NO: 1607029 - RNA, 19 nt, Artificial Sequence
  Description of Artificial Sequence: Synthetic oligonucleotide
  Sense strand starting at position 2933 of SEQ ID NO: 1560540
ggccuuccuugucuuuauu

SEQ ID NO: 1607030 - RNA, 19 nt, Artificial Sequence
  Description of Artificial Sequence: Synthetic oligonucleotide
  Antisense strand to SEQ ID NO: 1607029
aauaaagacaaggaaggcc

SEQ ID NO: 1607031 - RNA, 19 nt, Artificial Sequence
  Description of Artificial Sequence: Synthetic oligonucleotide
  Sense strand starting at position 3042 of SEQ ID NO: 1560540
gcgcuuacuuaguucucua

SEQ ID NO: 1607032 - RNA, 19 nt, Artificial Sequence
  Description of Artificial Sequence: Synthetic oligonucleotide
  Antisense strand to SEQ ID NO: 1607031
uagagaacuaaguaagcgc

SEQ ID NO: 1607033 - RNA, 19 nt, Artificial Sequence
  Description of Artificial Sequence: Synthetic oligonucleotide
  Sense strand starting at position 3046 of SEQ ID NO: 1560540
uuacuuaguucucuauggu

SEQ ID NO: 1607034 - RNA, 19 nt, Artificial Sequence
  Description of Artificial Sequence: Synthetic oligonucleotide
  Antisense strand to SEQ ID NO: 1607033
accauagagaacuaaguaa

SEQ ID NO: 1607035 - RNA, 19 nt, Artificial Sequence
  Description of Artificial Sequence: Synthetic oligonucleotide
  Sense strand starting at position 3462 of SEQ ID NO: 1560540
aaugcuggcucccaagaga

SEQ ID NO: 1607036 - RNA, 19 nt, Artificial Sequence
  Description of Artificial Sequence: Synthetic oligonucleotide
  Antisense strand to SEQ ID NO: 1607035
ucucuugggagccagcauu

SEQ ID NO: 1607037 - RNA, 19 nt, Artificial Sequence
  Description of Artificial Sequence: Synthetic oligonucleotide
  Sense strand starting at position 3514 of SEQ ID NO: 1560540
acugauuugucaugcacac

SEQ ID NO: 1607038 - RNA, 19 nt, Artificial Sequence
  Description of Artificial Sequence: Synthetic oligonucleotide
  Antisense strand to SEQ ID NO: 1607037
gugugcaugacaaaucagu

SEQ ID NO: 1607039 - RNA, 19 nt, Artificial Sequence
  Description of Artificial Sequence: Synthetic oligonucleotide
  Sense strand starting at position 3532 of SEQ ID NO: 1560540
ccguuuaucauguaacguu

SEQ ID NO: 1607040 - RNA, 19 nt, Artificial Sequence
  Description of Artificial Sequence: Synthetic oligonucleotide
  Antisense strand to SEQ ID NO: 1607039
aacguuacaugauaaacgg

SEQ ID NO: 1607041 - RNA, 19 nt, Artificial Sequence
  Description of Artificial Sequence: Synthetic oligonucleotide
  Sense strand starting at position 3824 of SEQ ID NO: 1560540
cagagaucgcgccaccaca

SEQ ID NO: 1607042 - RNA, 19 nt, Artificial Sequence
  Description of Artificial Sequence: Synthetic oligonucleotide
  Antisense strand to SEQ ID NO: 1607041
ugugguggcgcgaucucug

SEQ ID NO: 1607043 - RNA, 19 nt, Artificial Sequence
  Description of Artificial Sequence: Synthetic oligonucleotide
  Sense strand starting at position 274 of SEQ ID NO: 1560541
acuggcugacauggucaaa

SEQ ID NO: 1607044 - RNA, 19 nt, Artificial Sequence
  Description of Artificial Sequence: Synthetic oligonucleotide
  Antisense strand to SEQ ID NO: 1607043
uuugaccaugucagccagu

SEQ ID NO: 1607045 - RNA, 19 nt, Artificial Sequence
  Description of Artificial Sequence: Synthetic oligonucleotide
  Sense strand starting at position 443 of SEQ ID NO: 1560541
gggugauauugagacuguu

SEQ ID NO: 1607046 - RNA, 19 nt, Artificial Sequence
  Description of Artificial Sequence: Synthetic oligonucleotide
  Antisense strand to SEQ ID NO: 1607045
aacagucucaauaucaccc

SEQ ID NO: 1607047 - RNA, 19 nt, Artificial Sequence
  Description of Artificial Sequence: Synthetic oligonucleotide
  Sense strand starting at position 737 of SEQ ID NO: 1560541
gacgguuccaugggcaaua

SEQ ID NO: 1607048 - RNA, 19 nt, Artificial Sequence
  Description of Artificial Sequence: Synthetic oligonucleotide
  Antisense strand to SEQ ID NO: 1607047
uauugcccauggaaccguc

SEQ ID NO: 1607049 - RNA, 19 nt, Artificial Sequence
  Description of Artificial Sequence: Synthetic oligonucleotide
  Sense strand starting at position 738 of SEQ ID NO: 1560541
acgguuccaugggcaauaa

SEQ ID NO: 1607050 - RNA, 19 nt, Artificial Sequence
  Description of Artificial Sequence: Synthetic oligonucleotide
  Antisense strand to SEQ ID NO: 1607049
uuauugcccauggaaccgu

SEQ ID NO: 1607051 - RNA, 19 nt, Artificial Sequence
  Description of Artificial Sequence: Synthetic oligonucleotide
  Sense strand starting at position 906 of SEQ ID NO: 1560541
gcggcaaaguccucccauu

SEQ ID NO: 1607052 - RNA, 19 nt, Artificial Sequence
  Description of Artificial Sequence: Synthetic oligonucleotide
  Antisense strand to SEQ ID NO: 1607051
aaugggaggacuuugccgc

SEQ ID NO: 1607053 - RNA, 19 nt, Artificial Sequence
  Description of Artificial Sequence: Synthetic oligonucleotide
  Sense strand starting at position 995 of SEQ ID NO: 1560541
ugugacacuuccuugucau

SEQ ID NO: 1607054 - RNA, 19 nt, Artificial Sequence
  Description of Artificial Sequence: Synthetic oligonucleotide
  Antisense strand to SEQ ID NO: 1607053
augacaaggaagugucaca

SEQ ID NO: 1607055 - RNA, 19 nt, Artificial Sequence
  Description of Artificial Sequence: Synthetic oligonucleotide
  Sense strand starting at position 996 of SEQ ID NO: 1560541
gugacacuuccuugucauu

SEQ ID NO: 1607056 - RNA, 19 nt, Artificial Sequence
  Description of Artificial Sequence: Synthetic oligonucleotide
  Antisense strand to SEQ ID NO: 1607055
aaugacaaggaagugucac

SEQ ID NO: 1607057 - RNA, 19 nt, Artificial Sequence
  Description of Artificial Sequence: Synthetic oligonucleotide
  Sense strand starting at position 1009 of SEQ ID NO: 1560541
gucauuacgccucaauaca

SEQ ID NO: 1607058 - RNA, 19 nt, Artificial Sequence
  Description of Artificial Sequence: Synthetic oligonucleotide
  Antisense strand to SEQ ID NO: 1607057
uguauugaggcguaaugac

SEQ ID NO: 1607059 - RNA, 19 nt, Artificial Sequence
  Description of Artificial Sequence: Synthetic oligonucleotide
  Sense strand starting at position 1161 of SEQ ID NO: 1560541
auccacuuucccgacugaa

SEQ ID NO: 1607060 - RNA, 19 nt, Artificial Sequence
  Description of Artificial Sequence: Synthetic oligonucleotide
  Antisense strand to SEQ ID NO: 1607059
uucagucgggaaaguggau

SEQ ID NO: 1607061 - RNA, 19 nt, Artificial Sequence
  Description of Artificial Sequence: Synthetic oligonucleotide
  Sense strand starting at position 1211 of SEQ ID NO: 1560541
gucccuuucuccuagagag

SEQ ID NO: 1607062 - RNA, 19 nt, Artificial Sequence
  Description of Artificial Sequence: Synthetic oligonucleotide
  Antisense strand to SEQ ID NO: 1607061
cucucuaggagaaagggac

SEQ ID NO: 1607063 - RNA, 19 nt, Artificial Sequence
  Description of Artificial Sequence: Synthetic oligonucleotide
  Sense strand starting at position 1264 of SEQ ID NO: 1560541
ugcccuuugcccugauaug

SEQ ID NO: 1607064 - RNA, 19 nt, Artificial Sequence
  Description of Artificial Sequence: Synthetic oligonucleotide
  Antisense strand to SEQ ID NO: 1607063
cauaucagggcaaagggca

SEQ ID NO: 1607065 - RNA, 19 nt, Artificial Sequence
  Description of Artificial Sequence: Synthetic oligonucleotide
  Sense strand starting at position 2300 of SEQ ID NO: 1560541
ucagaauuagauugacggu

SEQ ID NO: 1607066 - RNA, 19 nt, Artificial Sequence
  Description of Artificial Sequence: Synthetic oligonucleotide
  Antisense strand to SEQ ID NO: 1607065
accgucaaucuaauucuga

SEQ ID NO: 1607067 - RNA, 19 nt, Artificial Sequence
  Description of Artificial Sequence: Synthetic oligonucleotide
  Sense strand starting at position 2354 of SEQ ID NO: 1560541
guggaagacuccuauggac

SEQ ID NO: 1607068 - RNA, 19 nt, Artificial Sequence
  Description of Artificial Sequence: Synthetic oligonucleotide
  Antisense strand to SEQ ID NO: 1607067
guccauaggagucuuccac

SEQ ID NO: 1607069 - RNA, 19 nt, Artificial Sequence
  Description of Artificial Sequence: Synthetic oligonucleotide
  Sense strand starting at position 2382 of SEQ ID NO: 1560541
gggcguuagguuugauagu

SEQ ID NO: 1607070 - RNA, 19 nt, Artificial Sequence
  Description of Artificial Sequence: Synthetic oligonucleotide
  Antisense strand to SEQ ID NO: 1607069
acuaucaaaccuaacgccc

SEQ ID NO: 1607071 - RNA, 19 nt, Artificial Sequence
  Description of Artificial Sequence: Synthetic oligonucleotide
  Sense strand starting at position 2388 of SEQ ID NO: 1560541
uagguuugauagucgugga

SEQ ID NO: 1607072 - RNA, 19 nt, Artificial Sequence
  Description of Artificial Sequence: Synthetic oligonucleotide
  Antisense strand to SEQ ID NO: 1607071
uccacgacuaucaaaccua

SEQ ID NO: 1607073 - RNA, 19 nt, Artificial Sequence
  Description of Artificial Sequence: Synthetic oligonucleotide
  Sense strand starting at position 2392 of SEQ ID NO: 1560541
uuugauagucguggacaca

SEQ ID NO: 1607074 - RNA, 19 nt, Artificial Sequence
  Description of Artificial Sequence: Synthetic oligonucleotide
  Antisense strand to SEQ ID NO: 1607073
uguguccacgacuaucaaa

SEQ ID NO: 1607075 - RNA, 19 nt, Artificial Sequence
  Description of Artificial Sequence: Synthetic oligonucleotide
  Sense strand starting at position 2393 of SEQ ID NO: 1560541
uugauagucguggacacaa

SEQ ID NO: 1607076 - RNA, 19 nt, Artificial Sequence
  Description of Artificial Sequence: Synthetic oligonucleotide
  Antisense strand to SEQ ID NO: 1607075
uuguguccacgacuaucaa

SEQ ID NO: 1607077 - RNA, 19 nt, Artificial Sequence
  Description of Artificial Sequence: Synthetic oligonucleotide
  Sense strand starting at position 2429 of SEQ ID NO: 1560541
agagguggugcuuguaaag

SEQ ID NO: 1607078 - RNA, 19 nt, Artificial Sequence
  Description of Artificial Sequence: Synthetic oligonucleotide
  Antisense strand to SEQ ID NO: 1607077
cuuuacaagcaccaccucu

SEQ ID NO: 1607079 - RNA, 19 nt, Artificial Sequence
  Description of Artificial Sequence: Synthetic oligonucleotide
  Sense strand starting at position 2432 of SEQ ID NO: 1560541
gguggugcuuguaaagaug

SEQ ID NO: 1607080 - RNA, 19 nt, Artificial Sequence
  Description of Artificial Sequence: Synthetic oligonucleotide
  Antisense strand to SEQ ID NO: 1607079
caucuuuacaagcaccacc

SEQ ID NO: 1607081 - RNA, 19 nt, Artificial Sequence
  Description of Artificial Sequence: Synthetic oligonucleotide
  Sense strand starting at position 2462 of SEQ ID NO: 1560541
aauccaauuccugacgagu

SEQ ID NO: 1607082 - RNA, 19 nt, Artificial Sequence
  Description of Artificial Sequence: Synthetic oligonucleotide
  Antisense strand to SEQ ID NO: 1607081
acucgucaggaauuggauu

SEQ ID NO: 1607083 - RNA, 19 nt, Artificial Sequence
  Description of Artificial Sequence: Synthetic oligonucleotide
  Sense strand starting at position 2473 of SEQ ID NO: 1560541
ugacgaguucugggugaug

SEQ ID NO: 1607084 - RNA, 19 nt, Artificial Sequence
  Description of Artificial Sequence: Synthetic oligonucleotide
  Antisense strand to SEQ ID NO: 1607083
caucacccagaacucguca

SEQ ID NO: 1607085 - RNA, 19 nt, Artificial Sequence
  Description of Artificial Sequence: Synthetic oligonucleotide
  Sense strand starting at position 2475 of SEQ ID NO: 1560541
acgaguucugggugaugag

SEQ ID NO: 1607086 - RNA, 19 nt, Artificial Sequence
  Description of Artificial Sequence: Synthetic oligonucleotide
  Antisense strand to SEQ ID NO: 1607085
cucaucacccagaacucgu

SEQ ID NO: 1607087 - RNA, 19 nt, Artificial Sequence
  Description of Artificial Sequence: Synthetic oligonucleotide
  Sense strand starting at position 2484 of SEQ ID NO: 1560541
gggugaugagguuggcuuu

SEQ ID NO: 1607088 - RNA, 19 nt, Artificial Sequence
  Description of Artificial Sequence: Synthetic oligonucleotide
  Antisense strand to SEQ ID NO: 1607087
aaagccaaccucaucaccc

SEQ ID NO: 1607089 - RNA, 19 nt, Artificial Sequence
  Description of Artificial Sequence: Synthetic oligonucleotide
  Sense strand starting at position 2579 of SEQ ID NO: 1560541
guggguguucggugacuga

SEQ ID NO: 1607090 - RNA, 19 nt, Artificial Sequence
  Description of Artificial Sequence: Synthetic oligonucleotide
  Antisense strand to SEQ ID NO: 1607089
ucagucaccgaacacccac

SEQ ID NO: 1607091 - RNA, 19 nt, Artificial Sequence
  Description of Artificial Sequence: Synthetic oligonucleotide
  Sense strand starting at position 2594 of SEQ ID NO: 1560541
cugacacuggucuggacaa

SEQ ID NO: 1607092 - RNA, 19 nt, Artificial Sequence
  Description of Artificial Sequence: Synthetic oligonucleotide
  Antisense strand to SEQ ID NO: 1607091
uuguccagaccagugucag

SEQ ID NO: 1607093 - RNA, 19 nt, Artificial Sequence
  Description of Artificial Sequence: Synthetic oligonucleotide
  Sense strand starting at position 2595 of SEQ ID NO: 1560541
ugacacuggucuggacaaa

SEQ ID NO: 1607094 - RNA, 19 nt, Artificial Sequence
  Description of Artificial Sequence: Synthetic oligonucleotide
  Antisense strand to SEQ ID NO: 1607093
uuuguccagaccaguguca

SEQ ID NO: 1607095 - RNA, 19 nt, Artificial Sequence
  Description of Artificial Sequence: Synthetic oligonucleotide
  Sense strand starting at position 2769 of SEQ ID NO: 1560541
aggccugaugucuggguua

SEQ ID NO: 1607096 - RNA, 19 nt, Artificial Sequence
  Description of Artificial Sequence: Synthetic oligonucleotide
  Antisense strand to SEQ ID NO: 1607095
uaacccagacaucaggccu

SEQ ID NO: 1607097 - RNA, 19 nt, Artificial Sequence
  Description of Artificial Sequence: Synthetic oligonucleotide
  Sense strand starting at position 2938 of SEQ ID NO: 1560541
guucucuugcaggacucaa

SEQ ID NO: 1607098 - RNA, 19 nt, Artificial Sequence
  Description of Artificial Sequence: Synthetic oligonucleotide
  Antisense strand to SEQ ID NO: 1607097
uugaguccugcaagagaac

SEQ ID NO: 1607099 - RNA, 19 nt, Artificial Sequence
  Description of Artificial Sequence: Synthetic oligonucleotide
  Sense strand starting at position 3247 of SEQ ID NO: 1560541
auuccuuguugugugacau

SEQ ID NO: 1607100 - RNA, 19 nt, Artificial Sequence
  Description of Artificial Sequence: Synthetic oligonucleotide
  Antisense strand to SEQ ID NO: 1607099
augucacacaacaaggaau

SEQ ID NO: 1607101 - RNA, 19 nt, Artificial Sequence
  Description of Artificial Sequence: Synthetic oligonucleotide
  Sense strand starting at position 3350 of SEQ ID NO: 1560541
gagggagucccaggaguuu

SEQ ID NO: 1607102 - RNA, 19 nt, Artificial Sequence
  Description of Artificial Sequence: Synthetic oligonucleotide
  Antisense strand to SEQ ID NO: 1607101
aaacuccugggacucccuc

SEQ ID NO: 1607103 - RNA, 19 nt, Artificial Sequence
  Description of Artificial Sequence: Synthetic oligonucleotide
  Sense strand starting at position 3413 of SEQ ID NO: 1560541
ucaggaaucuucugaccca

SEQ ID NO: 1607104 - RNA, 19 nt, Artificial Sequence
  Description of Artificial Sequence: Synthetic oligonucleotide
  Antisense strand to SEQ ID NO: 1607103
ugggucagaagauuccuga

SEQ ID NO: 1607105 - RNA, 19 nt, Artificial Sequence
  Description of Artificial Sequence: Synthetic oligonucleotide
  Sense strand starting at position 3557 of SEQ ID NO: 1560541
cugugucguccagcucaca

SEQ ID NO: 1607106 - RNA, 19 nt, Artificial Sequence
  Description of Artificial Sequence: Synthetic oligonucleotide
  Antisense strand to SEQ ID NO: 1607105
ugugagcuggacgacacag

SEQ ID NO: 1607107 - RNA, 19 nt, Artificial Sequence
  Description of Artificial Sequence: Synthetic oligonucleotide
  Sense strand starting at position 3873 of SEQ ID NO: 1560541
uuugaagagucuuagagga

SEQ ID NO: 1607108 - RNA, 19 nt, Artificial Sequence
  Description of Artificial Sequence: Synthetic oligonucleotide
  Antisense strand to SEQ ID NO: 1607107
uccucuaagacucuucaaa

SEQ ID NO: 1607109 - RNA, 19 nt, Artificial Sequence
  Description of Artificial Sequence: Synthetic oligonucleotide
  Sense strand starting at position 3875 of SEQ ID NO: 1560541
ugaagagucuuagaggaaa

SEQ ID NO: 1607110 - RNA, 19 nt, Artificial Sequence
  Description of Artificial Sequence: Synthetic oligonucleotide
  Antisense strand to SEQ ID NO: 1607109
uuuccucuaagacucuuca

SEQ ID NO: 1607111 - RNA, 19 nt, Artificial Sequence
  Description of Artificial Sequence: Synthetic oligonucleotide
  Sense strand starting at position 3886 of SEQ ID NO: 1560541
agaggaaauuggucaguuu

SEQ ID NO: 1607112 - RNA, 19 nt, Artificial Sequence
  Description of Artificial Sequence: Synthetic oligonucleotide
  Antisense strand to SEQ ID NO: 1607111
aaacugaccaauuuccucu

SEQ ID NO: 1607113 - RNA, 19 nt, Artificial Sequence
  Description of Artificial Sequence: Synthetic oligonucleotide
  Sense strand starting at position 3889 of SEQ ID NO: 1560541
ggaaauuggucaguuugag

SEQ ID NO: 1607114 - RNA, 19 nt, Artificial Sequence
  Description of Artificial Sequence: Synthetic oligonucleotide
  Antisense strand to SEQ ID NO: 1607113
cucaaacugaccaauuucc

SEQ ID NO: 1607115 - RNA, 19 nt, Artificial Sequence
  Description of Artificial Sequence: Synthetic oligonucleotide
  Sense strand starting at position 3896 of SEQ ID NO: 1560541
ggucaguuugaggaggagu

SEQ ID NO: 1607116 - RNA, 19 nt, Artificial Sequence
  Description of Artificial Sequence: Synthetic oligonucleotide
  Antisense strand to SEQ ID NO: 1607115
acuccuccucaaacugacc

SEQ ID NO: 1607117 - RNA, 19 nt, Artificial Sequence
  Description of Artificial Sequence: Synthetic oligonucleotide
  Sense strand starting at position 3917 of SEQ ID NO: 1560541
gggaguuucugaguaguag

SEQ ID NO: 1607118 - RNA, 19 nt, Artificial Sequence
  Description of Artificial Sequence: Synthetic oligonucleotide
  Antisense strand to SEQ ID NO: 1607117
cuacuacucagaaacuccc

SEQ ID NO: 1607119 - RNA, 19 nt, Artificial Sequence
  Description of Artificial Sequence: Synthetic oligonucleotide
  Sense strand starting at position 3918 of SEQ ID NO: 1560541
ggaguuucugaguaguagu

SEQ ID NO: 1607120 - RNA, 19 nt, Artificial Sequence
  Description of Artificial Sequence: Synthetic oligonucleotide
  Antisense strand to SEQ ID NO: 1607119
acuacuacucagaaacucc

SEQ ID NO: 1607121 - RNA, 19 nt, Artificial Sequence
  Description of Artificial Sequence: Synthetic oligonucleotide
  Sense strand starting at position 3928 of SEQ ID NO: 1560541
aguaguaguuaucaggauu

SEQ ID NO: 1607122 - RNA, 19 nt, Artificial Sequence
  Description of Artificial Sequence: Synthetic oligonucleotide
  Antisense strand to SEQ ID NO: 1607121
aauccugauaacuacuacu

SEQ ID NO: 1607123 - RNA, 19 nt, Artificial Sequence
  Description of Artificial Sequence: Synthetic oligonucleotide
  Sense strand starting at position 358 of SEQ ID NO: 1560542
guccaaauaugucaaagga

SEQ ID NO: 1607124 - RNA, 19 nt, Artificial Sequence
  Description of Artificial Sequence: Synthetic oligonucleotide
  Antisense strand to SEQ ID NO: 1607123
uccuuugacauauuuggac

SEQ ID NO: 1607125 - RNA, 19 nt, Artificial Sequence
  Description of Artificial Sequence: Synthetic oligonucleotide
  Sense strand starting at position 746 of SEQ ID NO: 1560542
acaaucagaccagguguaa

SEQ ID NO: 1607126 - RNA, 19 nt, Artificial Sequence
  Description of Artificial Sequence: Synthetic oligonucleotide
  Antisense strand to SEQ ID NO: 1607125
uuacaccuggucugauugu

SEQ ID NO: 1607127 - RNA, 19 nt, Artificial Sequence
  Description of Artificial Sequence: Synthetic oligonucleotide
  Sense strand starting at position 845 of SEQ ID NO: 1560542
gggcaacagucucuuauua

SEQ ID NO: 1607128 - RNA, 19 nt, Artificial Sequence
  Description of Artificial Sequence: Synthetic oligonucleotide
  Antisense strand to SEQ ID NO: 1607127
uaauaagagacuguugccc

SEQ ID NO: 1607129 - RNA, 19 nt, Artificial Sequence
  Description of Artificial Sequence: Synthetic oligonucleotide
  Sense strand starting at position 900 of SEQ ID NO: 1560542
ccggcagaauuguuuaucu

SEQ ID NO: 1607130 - RNA, 19 nt, Artificial Sequence
  Description of Artificial Sequence: Synthetic oligonucleotide
  Antisense strand to SEQ ID NO: 1607129
agauaaacaauucugccgg

SEQ ID NO: 1607131 - RNA, 19 nt, Artificial Sequence
  Description of Artificial Sequence: Synthetic oligonucleotide
  Sense strand starting at position 902 of SEQ ID NO: 1560542
ggcagaauuguuuaucuug

SEQ ID NO: 1607132 - RNA, 19 nt, Artificial Sequence
  Description of Artificial Sequence: Synthetic oligonucleotide
  Antisense strand to SEQ ID NO: 1607131
caagauaaacaauucugcc

SEQ ID NO: 1607133 - RNA, 19 nt, Artificial Sequence
  Description of Artificial Sequence: Synthetic oligonucleotide
  Sense strand starting at position 905 of SEQ ID NO: 1560542
agaauuguuuaucuuguga

SEQ ID NO: 1607134 - RNA, 19 nt, Artificial Sequence
  Description of Artificial Sequence: Synthetic oligonucleotide
  Antisense strand to SEQ ID NO: 1607133
ucacaagauaaacaauucu

SEQ ID NO: 1607135 - RNA, 19 nt, Artificial Sequence
  Description of Artificial Sequence: Synthetic oligonucleotide
  Sense strand starting at position 919 of SEQ ID NO: 1560542
ugugacaaauuggaaacua

SEQ ID NO: 1607136 - RNA, 19 nt, Artificial Sequence
  Description of Artificial Sequence: Synthetic oligonucleotide
  Antisense strand to SEQ ID NO: 1607135
uaguuuccaauuugucaca

SEQ ID NO: 1607137 - RNA, 19 nt, Artificial Sequence
  Description of Artificial Sequence: Synthetic oligonucleotide
  Sense strand starting at position 941 of SEQ ID NO: 1560542
caaugcucaucggugguua

SEQ ID NO: 1607138 - RNA, 19 nt, Artificial Sequence
  Description of Artificial Sequence: Synthetic oligonucleotide
  Antisense strand to SEQ ID NO: 1607137
uaaccaccgaugagcauug

SEQ ID NO: 1607139 - RNA, 19 nt, Artificial Sequence
  Description of Artificial Sequence: Synthetic oligonucleotide
  Sense strand starting at position 942 of SEQ ID NO: 1560542
aaugcucaucggugguuaa

SEQ ID NO: 1607140 - RNA, 19 nt, Artificial Sequence
  Description of Artificial Sequence: Synthetic oligonucleotide
  Antisense strand to SEQ ID NO: 1607139
uuaaccaccgaugagcauu

SEQ ID NO: 1607141 - RNA, 19 nt, Artificial Sequence
  Description of Artificial Sequence: Synthetic oligonucleotide
  Sense strand starting at position 943 of SEQ ID NO: 1560542
augcucaucggugguuaaa

SEQ ID NO: 1607142 - RNA, 19 nt, Artificial Sequence
  Description of Artificial Sequence: Synthetic oligonucleotide
  Antisense strand to SEQ ID NO: 1607141
uuuaaccaccgaugagcau

SEQ ID NO: 1607143 - RNA, 19 nt, Artificial Sequence
  Description of Artificial Sequence: Synthetic oligonucleotide
  Sense strand starting at position 945 of SEQ ID NO: 1560542
gcucaucggugguuaaauc

SEQ ID NO: 1607144 - RNA, 19 nt, Artificial Sequence
  Description of Artificial Sequence: Synthetic oligonucleotide
  Antisense strand to SEQ ID NO: 1607143
gauuuaaccaccgaugagc

SEQ ID NO: 1607145 - RNA, 19 nt, Artificial Sequence
  Description of Artificial Sequence: Synthetic oligonucleotide
  Sense strand starting at position 1022 of SEQ ID NO: 1560542
aaauguuagcagugguugu

SEQ ID NO: 1607146 - RNA, 19 nt, Artificial Sequence
  Description of Artificial Sequence: Synthetic oligonucleotide
  Antisense strand to SEQ ID NO: 1607145
acaaccacugcuaacauuu

SEQ ID NO: 1607147 - RNA, 19 nt, Artificial Sequence
  Description of Artificial Sequence: Synthetic oligonucleotide
  Sense strand starting at position 1033 of SEQ ID NO: 1560542
gugguugucacugaauggu

SEQ ID NO: 1607148 - RNA, 19 nt, Artificial Sequence
  Description of Artificial Sequence: Synthetic oligonucleotide
  Antisense strand to SEQ ID NO: 1607147
accauucagugacaaccac

SEQ ID NO: 1607149 - RNA, 19 nt, Artificial Sequence
  Description of Artificial Sequence: Synthetic oligonucleotide
  Sense strand starting at position 1036 of SEQ ID NO: 1560542
guugucacugaaugguaga

SEQ ID NO: 1607150 - RNA, 19 nt, Artificial Sequence
  Description of Artificial Sequence: Synthetic oligonucleotide
  Antisense strand to SEQ ID NO: 1607149
ucuaccauucagugacaac

SEQ ID NO: 1607151 - RNA, 19 nt, Artificial Sequence
  Description of Artificial Sequence: Synthetic oligonucleotide
  Sense strand starting at position 1055 of SEQ ID NO: 1560542
cuggcagaugacugucauu

SEQ ID NO: 1607152 - RNA, 19 nt, Artificial Sequence
  Description of Artificial Sequence: Synthetic oligonucleotide
  Antisense strand to SEQ ID NO: 1607151
aaugacagucaucugccag

SEQ ID NO: 1607153 - RNA, 19 nt, Artificial Sequence
  Description of Artificial Sequence: Synthetic oligonucleotide
  Sense strand starting at position 2234 of SEQ ID NO: 1560542
cugcguccuccuggauuua

SEQ ID NO: 1607154 - RNA, 19 nt, Artificial Sequence
  Description of Artificial Sequence: Synthetic oligonucleotide
  Antisense strand to SEQ ID NO: 1607153
uaaauccaggaggacgcag

SEQ ID NO: 1607155 - RNA, 19 nt, Artificial Sequence
  Description of Artificial Sequence: Synthetic oligonucleotide
  Sense strand starting at position 2235 of SEQ ID NO: 1560542
ugcguccuccuggauuuau

SEQ ID NO: 1607156 - RNA, 19 nt, Artificial Sequence
  Description of Artificial Sequence: Synthetic oligonucleotide
  Antisense strand to SEQ ID NO: 1607155
auaaauccaggaggacgca

SEQ ID NO: 1607157 - RNA, 19 nt, Artificial Sequence
  Description of Artificial Sequence: Synthetic oligonucleotide
  Sense strand starting at position 2273 of SEQ ID NO: 1560542
cgauuacuggcguauggag

SEQ ID NO: 1607158 - RNA, 19 nt, Artificial Sequence
  Description of Artificial Sequence: Synthetic oligonucleotide
  Antisense strand to SEQ ID NO: 1607157
cuccauacgccaguaaucg

SEQ ID NO: 1607159 - RNA, 19 nt, Artificial Sequence
  Description of Artificial Sequence: Synthetic oligonucleotide
  Sense strand starting at position 2285 of SEQ ID NO: 1560542
uauggaguguuuccuagau

SEQ ID NO: 1607160 - RNA, 19 nt, Artificial Sequence
  Description of Artificial Sequence: Synthetic oligonucleotide
  Antisense strand to SEQ ID NO: 1607159
aucuaggaaacacuccaua

SEQ ID NO: 1607161 - RNA, 19 nt, Artificial Sequence
  Description of Artificial Sequence: Synthetic oligonucleotide
  Sense strand starting at position 2289 of SEQ ID NO: 1560542
gaguguuuccuagaugcca

SEQ ID NO: 1607162 - RNA, 19 nt, Artificial Sequence
  Description of Artificial Sequence: Synthetic oligonucleotide
  Antisense strand to SEQ ID NO: 1607161
uggcaucuaggaaacacuc

SEQ ID NO: 1607163 - RNA, 19 nt, Artificial Sequence
  Description of Artificial Sequence: Synthetic oligonucleotide
  Sense strand starting at position 2353 of SEQ ID NO: 1560542
aaguuuauuccuuaguggu

SEQ ID NO: 1607164 - RNA, 19 nt, Artificial Sequence
  Description of Artificial Sequence: Synthetic oligonucleotide
  Antisense strand to SEQ ID NO: 1607163
accacuaaggaauaaacuu

SEQ ID NO: 1607165 - RNA, 19 nt, Artificial Sequence
  Description of Artificial Sequence: Synthetic oligonucleotide
  Sense strand starting at position 2355 of SEQ ID NO: 1560542
guuuauuccuuagugguaa

SEQ ID NO: 1607166 - RNA, 19 nt, Artificial Sequence
  Description of Artificial Sequence: Synthetic oligonucleotide
  Antisense strand to SEQ ID NO: 1607165
uuaccacuaaggaauaaac

SEQ ID NO: 1607167 - RNA, 19 nt, Artificial Sequence
  Description of Artificial Sequence: Synthetic oligonucleotide
  Sense strand starting at position 2389 of SEQ ID NO: 1560542
gucacauauccgggugaua

SEQ ID NO: 1607168 - RNA, 19 nt, Artificial Sequence
  Description of Artificial Sequence: Synthetic oligonucleotide
  Antisense strand to SEQ ID NO: 1607167
uaucacccggauaugugac

SEQ ID NO: 1607169 - RNA, 19 nt, Artificial Sequence
  Description of Artificial Sequence: Synthetic oligonucleotide
  Sense strand starting at position 2391 of SEQ ID NO: 1560542
cacauauccgggugauaau

SEQ ID NO: 1607170 - RNA, 19 nt, Artificial Sequence
  Description of Artificial Sequence: Synthetic oligonucleotide
  Antisense strand to SEQ ID NO: 1607169
auuaucacccggauaugug

SEQ ID NO: 1607171 - RNA, 19 nt, Artificial Sequence
  Description of Artificial Sequence: Synthetic oligonucleotide
  Sense strand starting at position 2459 of SEQ ID NO: 1560542
gagagaguacccugaccua

SEQ ID NO: 1607172 - RNA, 19 nt, Artificial Sequence
  Description of Artificial Sequence: Synthetic oligonucleotide
  Antisense strand to SEQ ID NO: 1607171
uaggucaggguacucucuc

SEQ ID NO: 1607173 - RNA, 19 nt, Artificial Sequence
  Description of Artificial Sequence: Synthetic oligonucleotide
  Sense strand starting at position 2462 of SEQ ID NO: 1560542
agaguacccugaccuagua

SEQ ID NO: 1607174 - RNA, 19 nt, Artificial Sequence
  Description of Artificial Sequence: Synthetic oligonucleotide
  Antisense strand to SEQ ID NO: 1607173
uacuaggucaggguacucu

SEQ ID NO: 1607175 - RNA, 19 nt, Artificial Sequence
  Description of Artificial Sequence: Synthetic oligonucleotide
  Sense strand starting at position 2482 of SEQ ID NO: 1560542
aggagagugauccggaauu

SEQ ID NO: 1607176 - RNA, 19 nt, Artificial Sequence
  Description of Artificial Sequence: Synthetic oligonucleotide
  Antisense strand to SEQ ID NO: 1607175
aauuccggaucacucuccu

SEQ ID NO: 1607177 - RNA, 19 nt, Artificial Sequence
  Description of Artificial Sequence: Synthetic oligonucleotide
  Sense strand starting at position 2484 of SEQ ID NO: 1560542
gagagugauccggaauucc

SEQ ID NO: 1607178 - RNA, 19 nt, Artificial Sequence
  Description of Artificial Sequence: Synthetic oligonucleotide
  Antisense strand to SEQ ID NO: 1607177
ggaauuccggaucacucuc

SEQ ID NO: 1607179 - RNA, 19 nt, Artificial Sequence
  Description of Artificial Sequence: Synthetic oligonucleotide
  Sense strand starting at position 2599 of SEQ ID NO: 1560542
cagcaagggucuuccaguu

SEQ ID NO: 1607180 - RNA, 19 nt, Artificial Sequence
  Description of Artificial Sequence: Synthetic oligonucleotide
  Antisense strand to SEQ ID NO: 1607179
aacuggaagacccuugcug

SEQ ID NO: 1607181 - RNA, 19 nt, Artificial Sequence
  Description of Artificial Sequence: Synthetic oligonucleotide
  Sense strand starting at position 2926 of SEQ ID NO: 1560542
aaaucagaguggugagaag

SEQ ID NO: 1607182 - RNA, 19 nt, Artificial Sequence
  Description of Artificial Sequence: Synthetic oligonucleotide
  Antisense strand to SEQ ID NO: 1607181
cuucucaccacucugauuu

SEQ ID NO: 1607183 - RNA, 19 nt, Artificial Sequence
  Description of Artificial Sequence: Synthetic oligonucleotide
  Sense strand starting at position 2937 of SEQ ID NO: 1560542
gugagaaguuaggucuuac

SEQ ID NO: 1607184 - RNA, 19 nt, Artificial Sequence
  Description of Artificial Sequence: Synthetic oligonucleotide
  Antisense strand to SEQ ID NO: 1607183
guaagaccuaacuucucac

SEQ ID NO: 1607185 - RNA, 19 nt, Artificial Sequence
  Description of Artificial Sequence: Synthetic oligonucleotide
  Sense strand starting at position 3004 of SEQ ID NO: 1560542
cauacuugagaguguaaag

SEQ ID NO: 1607186 - RNA, 19 nt, Artificial Sequence
  Description of Artificial Sequence: Synthetic oligonucleotide
  Antisense strand to SEQ ID NO: 1607185
cuuuacacucucaaguaug

SEQ ID NO: 1607187 - RNA, 19 nt, Artificial Sequence
  Description of Artificial Sequence: Synthetic oligonucleotide
  Sense strand starting at position 3066 of SEQ ID NO: 1560542
ggaggcaagaguggauaua

SEQ ID NO: 1607188 - RNA, 19 nt, Artificial Sequence
  Description of Artificial Sequence: Synthetic oligonucleotide
  Antisense strand to SEQ ID NO: 1607187
uauauccacucuugccucc

SEQ ID NO: 1607189 - RNA, 19 nt, Artificial Sequence
  Description of Artificial Sequence: Synthetic oligonucleotide
  Sense strand starting at position 3133 of SEQ ID NO: 1560542
uguccauccacgggugaau

SEQ ID NO: 1607190 - RNA, 19 nt, Artificial Sequence
  Description of Artificial Sequence: Synthetic oligonucleotide
  Antisense strand to SEQ ID NO: 1607189
auucacccguggauggaca

SEQ ID NO: 1607191 - RNA, 19 nt, Artificial Sequence
  Description of Artificial Sequence: Synthetic oligonucleotide
  Sense strand starting at position 3182 of SEQ ID NO: 1560542
auagaauauuacucagcgu

SEQ ID NO: 1607192 - RNA, 19 nt, Artificial Sequence
  Description of Artificial Sequence: Synthetic oligonucleotide
  Antisense strand to SEQ ID NO: 1607191
acgcugaguaauauucuau

SEQ ID NO: 1607193 - RNA, 19 nt, Artificial Sequence
  Description of Artificial Sequence: Synthetic oligonucleotide
  Sense strand starting at position 3185 of SEQ ID NO: 1560542
gaauauuacucagcguuga

SEQ ID NO: 1607194 - RNA, 19 nt, Artificial Sequence
  Description of Artificial Sequence: Synthetic oligonucleotide
  Antisense strand to SEQ ID NO: 1607193
ucaacgcugaguaauauuc

SEQ ID NO: 1607195 - RNA, 19 nt, Artificial Sequence
  Description of Artificial Sequence: Synthetic oligonucleotide
  Sense strand starting at position 3186 of SEQ ID NO: 1560542
aauauuacucagcguugaa

SEQ ID NO: 1607196 - RNA, 19 nt, Artificial Sequence
  Description of Artificial Sequence: Synthetic oligonucleotide
  Antisense strand to SEQ ID NO: 1607195
uucaacgcugaguaauauu

SEQ ID NO: 1607197 - RNA, 19 nt, Artificial Sequence
  Description of Artificial Sequence: Synthetic oligonucleotide
  Sense strand starting at position 3189 of SEQ ID NO: 1560542
auuacucagcguugaagga

SEQ ID NO: 1607198 - RNA, 19 nt, Artificial Sequence
  Description of Artificial Sequence: Synthetic oligonucleotide
  Antisense strand to SEQ ID NO: 1607197
uccuucaacgcugaguaau

SEQ ID NO: 1607199 - RNA, 19 nt, Artificial Sequence
  Description of Artificial Sequence: Synthetic oligonucleotide
  Sense strand starting at position 3383 of SEQ ID NO: 1560542
gcaaauagaugagcuuuga

SEQ ID NO: 1607200 - RNA, 19 nt, Artificial Sequence
  Description of Artificial Sequence: Synthetic oligonucleotide
  Antisense strand to SEQ ID NO: 1607199
ucaaagcucaucuauuugc

SEQ ID NO: 1607201 - RNA, 19 nt, Artificial Sequence
  Description of Artificial Sequence: Synthetic oligonucleotide
  Sense strand starting at position 3387 of SEQ ID NO: 1560542
auagaugagcuuugaagau

SEQ ID NO: 1607202 - RNA, 19 nt, Artificial Sequence
  Description of Artificial Sequence: Synthetic oligonucleotide
  Antisense strand to SEQ ID NO: 1607201
aucuucaaagcucaucuau

SEQ ID NO: 1607203 - RNA, 19 nt, Artificial Sequence
  Description of Artificial Sequence: Synthetic oligonucleotide
  Sense strand starting at position 68 of SEQ ID NO: 1560543
agcgcccucuauugagaaa

SEQ ID NO: 1607204 - RNA, 19 nt, Artificial Sequence
  Description of Artificial Sequence: Synthetic oligonucleotide
  Antisense strand to SEQ ID NO: 1607203
uuucucaauagagggcgcu

SEQ ID NO: 1607205 - RNA, 19 nt, Artificial Sequence
  Description of Artificial Sequence: Synthetic oligonucleotide
  Sense strand starting at position 69 of SEQ ID NO: 1560543
gcgcccucuauugagaaau

SEQ ID NO: 1607206 - RNA, 19 nt, Artificial Sequence
  Description of Artificial Sequence: Synthetic oligonucleotide
  Antisense strand to SEQ ID NO: 1607205
auuucucaauagagggcgc

SEQ ID NO: 1607207 - RNA, 19 nt, Artificial Sequence
  Description of Artificial Sequence: Synthetic oligonucleotide
  Sense strand starting at position 71 of SEQ ID NO: 1560543
gcccucuauugagaaaucu

SEQ ID NO: 1607208 - RNA, 19 nt, Artificial Sequence
  Description of Artificial Sequence: Synthetic oligonucleotide
  Antisense strand to SEQ ID NO: 1607207
agauuucucaauagagggc

SEQ ID NO: 1607209 - RNA, 19 nt, Artificial Sequence
  Description of Artificial Sequence: Synthetic oligonucleotide
  Sense strand starting at position 80 of SEQ ID NO: 1560543
ugagaaaucuuagcauugu

SEQ ID NO: 1607210 - RNA, 19 nt, Artificial Sequence
  Description of Artificial Sequence: Synthetic oligonucleotide
  Antisense strand to SEQ ID NO: 1607209
acaaugcuaagauuucuca

SEQ ID NO: 1607211 - RNA, 19 nt, Artificial Sequence
  Description of Artificial Sequence: Synthetic oligonucleotide
  Sense strand starting at position 81 of SEQ ID NO: 1560543
gagaaaucuuagcauugug

SEQ ID NO: 1607212 - RNA, 19 nt, Artificial Sequence
  Description of Artificial Sequence: Synthetic oligonucleotide
  Antisense strand to SEQ ID NO: 1607211
cacaaugcuaagauuucuc

SEQ ID NO: 1607213 - RNA, 19 nt, Artificial Sequence
  Description of Artificial Sequence: Synthetic oligonucleotide
  Sense strand starting at position 89 of SEQ ID NO: 1560543
uuagcauugugcucacuuu

SEQ ID NO: 1607214 - RNA, 19 nt, Artificial Sequence
  Description of Artificial Sequence: Synthetic oligonucleotide
  Antisense strand to SEQ ID NO: 1607213
aaagugagcacaaugcuaa

SEQ ID NO: 1607215 - RNA, 19 nt, Artificial Sequence
  Description of Artificial Sequence: Synthetic oligonucleotide
  Sense strand starting at position 298 of SEQ ID NO: 1560543
ucacuaugcuagccaggau

SEQ ID NO: 1607216 - RNA, 19 nt, Artificial Sequence
  Description of Artificial Sequence: Synthetic oligonucleotide
  Antisense strand to SEQ ID NO: 1607215
auccuggcuagcauaguga

SEQ ID NO: 1607217 - RNA, 19 nt, Artificial Sequence
  Description of Artificial Sequence: Synthetic oligonucleotide
  Sense strand starting at position 400 of SEQ ID NO: 1560543
cgagcauugugcucacuuu

SEQ ID NO: 1607218 - RNA, 19 nt, Artificial Sequence
  Description of Artificial Sequence: Synthetic oligonucleotide
  Antisense strand to SEQ ID NO: 1607217
aaagugagcacaaugcucg

SEQ ID NO: 1607219 - RNA, 19 nt, Artificial Sequence
  Description of Artificial Sequence: Synthetic oligonucleotide
  Sense strand starting at position 401 of SEQ ID NO: 1560543
gagcauugugcucacuuua

SEQ ID NO: 1607220 - RNA, 19 nt, Artificial Sequence
  Description of Artificial Sequence: Synthetic oligonucleotide
  Antisense strand to SEQ ID NO: 1607219
uaaagugagcacaaugcuc

SEQ ID NO: 1607221 - RNA, 19 nt, Artificial Sequence
  Description of Artificial Sequence: Synthetic oligonucleotide
  Sense strand starting at position 444 of SEQ ID NO: 1560543
cuuuguuuaucacauauug

SEQ ID NO: 1607222 - RNA, 19 nt, Artificial Sequence
  Description of Artificial Sequence: Synthetic oligonucleotide
  Antisense strand to SEQ ID NO: 1607221
caauaugugauaaacaaag

SEQ ID NO: 1607223 - RNA, 19 nt, Artificial Sequence
  Description of Artificial Sequence: Synthetic oligonucleotide
  Sense strand starting at position 483 of SEQ ID NO: 1560543
agaggcaaugcauggauaa

SEQ ID NO: 1607224 - RNA, 19 nt, Artificial Sequence
  Description of Artificial Sequence: Synthetic oligonucleotide
  Antisense strand to SEQ ID NO: 1607223
uuauccaugcauugccucu

SEQ ID NO: 1607225 - RNA, 19 nt, Artificial Sequence
  Description of Artificial Sequence: Synthetic oligonucleotide
  Sense strand starting at position 484 of SEQ ID NO: 1560543
gaggcaaugcauggauaau

SEQ ID NO: 1607226 - RNA, 19 nt, Artificial Sequence
  Description of Artificial Sequence: Synthetic oligonucleotide
  Antisense strand to SEQ ID NO: 1607225
auuauccaugcauugccuc

SEQ ID NO: 1607227 - RNA, 19 nt, Artificial Sequence
  Description of Artificial Sequence: Synthetic oligonucleotide
  Sense strand starting at position 494 of SEQ ID NO: 1560543
auggauaauugacacacau

SEQ ID NO: 1607228 - RNA, 19 nt, Artificial Sequence
  Description of Artificial Sequence: Synthetic oligonucleotide
  Antisense strand to SEQ ID NO: 1607227
augugugucaauuauccau

SEQ ID NO: 1607229 - RNA, 19 nt, Artificial Sequence
  Description of Artificial Sequence: Synthetic oligonucleotide
  Sense strand starting at position 833 of SEQ ID NO: 1560543
uauuauucucuuugagacg

SEQ ID NO: 1607230 - RNA, 19 nt, Artificial Sequence
  Description of Artificial Sequence: Synthetic oligonucleotide
  Antisense strand to SEQ ID NO: 1607229
cgucucaaagagaauaaua

SEQ ID NO: 1607231 - RNA, 19 nt, Artificial Sequence
  Description of Artificial Sequence: Synthetic oligonucleotide
  Sense strand starting at position 836 of SEQ ID NO: 1560543
uauucucuuugagacggaa

SEQ ID NO: 1607232 - RNA, 19 nt, Artificial Sequence
  Description of Artificial Sequence: Synthetic oligonucleotide
  Antisense strand to SEQ ID NO: 1607231
uuccgucucaaagagaaua

SEQ ID NO: 1607233 - RNA, 19 nt, Artificial Sequence
  Description of Artificial Sequence: Synthetic oligonucleotide
  Sense strand starting at position 838 of SEQ ID NO: 1560543
uucucuuugagacggaauu

SEQ ID NO: 1607234 - RNA, 19 nt, Artificial Sequence
  Description of Artificial Sequence: Synthetic oligonucleotide
  Antisense strand to SEQ ID NO: 1607233
aauuccgucucaaagagaa

SEQ ID NO: 1607235 - RNA, 19 nt, Artificial Sequence
  Description of Artificial Sequence: Synthetic oligonucleotide
  Sense strand starting at position 1275 of SEQ ID NO: 1560543
ggugcagcucuuuagagga

SEQ ID NO: 1607236 - RNA, 19 nt, Artificial Sequence
  Description of Artificial Sequence: Synthetic oligonucleotide
  Antisense strand to SEQ ID NO: 1607235
uccucuaaagagcugcacc

SEQ ID NO: 1607237 - RNA, 19 nt, Artificial Sequence
  Description of Artificial Sequence: Synthetic oligonucleotide
  Sense strand starting at position 1370 of SEQ ID NO: 1560543
aagcgacuggcucgguaau

SEQ ID NO: 1607238 - RNA, 19 nt, Artificial Sequence
  Description of Artificial Sequence: Synthetic oligonucleotide
  Antisense strand to SEQ ID NO: 1607237
auuaccgagccagucgcuu

SEQ ID NO: 1607239 - RNA, 19 nt, Artificial Sequence
  Description of Artificial Sequence: Synthetic oligonucleotide
  Sense strand starting at position 1371 of SEQ ID NO: 1560543
agcgacuggcucgguaauu

SEQ ID NO: 1607240 - RNA, 19 nt, Artificial Sequence
  Description of Artificial Sequence: Synthetic oligonucleotide
  Antisense strand to SEQ ID NO: 1607239
aauuaccgagccagucgcu

SEQ ID NO: 1607241 - RNA, 19 nt, Artificial Sequence
  Description of Artificial Sequence: Synthetic oligonucleotide
  Sense strand starting at position 1372 of SEQ ID NO: 1560543
gcgacuggcucgguaauuu

SEQ ID NO: 1607242 - RNA, 19 nt, Artificial Sequence
  Description of Artificial Sequence: Synthetic oligonucleotide
  Antisense strand to SEQ ID NO: 1607241
aaauuaccgagccagucgc

SEQ ID NO: 1607243 - RNA, 19 nt, Artificial Sequence
  Description of Artificial Sequence: Synthetic oligonucleotide
  Sense strand starting at position 1616 of SEQ ID NO: 1560543
auaacaggcucuccaugau

SEQ ID NO: 1607244 - RNA, 19 nt, Artificial Sequence
  Description of Artificial Sequence: Synthetic oligonucleotide
  Antisense strand to SEQ ID NO: 1607243
aucauggagagccuguuau

SEQ ID NO: 1607245 - RNA, 19 nt, Artificial Sequence
  Description of Artificial Sequence: Synthetic oligonucleotide
  Sense strand starting at position 1662 of SEQ ID NO: 1560543
ccaucaaggcuuuagaggu

SEQ ID NO: 1607246 - RNA, 19 nt, Artificial Sequence
  Description of Artificial Sequence: Synthetic oligonucleotide
  Antisense strand to SEQ ID NO: 1607245
accucuaaagccuugaugg

SEQ ID NO: 1607247 - RNA, 19 nt, Artificial Sequence
  Description of Artificial Sequence: Synthetic oligonucleotide
  Sense strand starting at position 1953 of SEQ ID NO: 1560543
gcagcuuugugacucaaag

SEQ ID NO: 1607248 - RNA, 19 nt, Artificial Sequence
  Description of Artificial Sequence: Synthetic oligonucleotide
  Antisense strand to SEQ ID NO: 1607247
cuuugagucacaaagcugc

SEQ ID NO: 1607249 - RNA, 19 nt, Artificial Sequence
  Description of Artificial Sequence: Synthetic oligonucleotide
  Sense strand starting at position 2060 of SEQ ID NO: 1560543
gccaaaggucauggugguu

SEQ ID NO: 1607250 - RNA, 19 nt, Artificial Sequence
  Description of Artificial Sequence: Synthetic oligonucleotide
  Antisense strand to SEQ ID NO: 1607249
aaccaccaugaccuuuggc

SEQ ID NO: 1607251 - RNA, 19 nt, Artificial Sequence
  Description of Artificial Sequence: Synthetic oligonucleotide
  Sense strand starting at position 2089 of SEQ ID NO: 1560543
ccggcucauccugaguaca

SEQ ID NO: 1607252 - RNA, 19 nt, Artificial Sequence
  Description of Artificial Sequence: Synthetic oligonucleotide
  Antisense strand to SEQ ID NO: 1607251
uguacucaggaugagccgg

SEQ ID NO: 1607253 - RNA, 19 nt, Artificial Sequence
  Description of Artificial Sequence: Synthetic oligonucleotide
  Sense strand starting at position 2091 of SEQ ID NO: 1560543
ggcucauccugaguacaaa

SEQ ID NO: 1607254 - RNA, 19 nt, Artificial Sequence
  Description of Artificial Sequence: Synthetic oligonucleotide
  Antisense strand to SEQ ID NO: 1607253
uuuguacucaggaugagcc

SEQ ID NO: 1607255 - RNA, 19 nt, Artificial Sequence
  Description of Artificial Sequence: Synthetic oligonucleotide
  Sense strand starting at position 2200 of SEQ ID NO: 1560543
ccuacuauaugcuggaauu

SEQ ID NO: 1607256 - RNA, 19 nt, Artificial Sequence
  Description of Artificial Sequence: Synthetic oligonucleotide
  Antisense strand to SEQ ID NO: 1607255
aauuccagcauauaguagg

SEQ ID NO: 1607257 - RNA, 19 nt, Artificial Sequence
  Description of Artificial Sequence: Synthetic oligonucleotide
  Sense strand starting at position 2313 of SEQ ID NO: 1560543
caggguucucacugauguc

SEQ ID NO: 1607258 - RNA, 19 nt, Artificial Sequence
  Description of Artificial Sequence: Synthetic oligonucleotide
  Antisense strand to SEQ ID NO: 1607257
gacaucagugagaacccug

SEQ ID NO: 1607259 - RNA, 19 nt, Artificial Sequence
  Description of Artificial Sequence: Synthetic oligonucleotide
  Sense strand starting at position 2373 of SEQ ID NO: 1560543
cggacuugaucucuuggga

SEQ ID NO: 1607260 - RNA, 19 nt, Artificial Sequence
  Description of Artificial Sequence: Synthetic oligonucleotide
  Antisense strand to SEQ ID NO: 1607259
ucccaagagaucaaguccg

SEQ ID NO: 1607261 - RNA, 19 nt, Artificial Sequence
  Description of Artificial Sequence: Synthetic oligonucleotide
  Sense strand starting at position 2698 of SEQ ID NO: 1560543
gggugugacuuuggacaaa

SEQ ID NO: 1607262 - RNA, 19 nt, Artificial Sequence
  Description of Artificial Sequence: Synthetic oligonucleotide
  Antisense strand to SEQ ID NO: 1607261
uuuguccaaagucacaccc

SEQ ID NO: 1607263 - RNA, 19 nt, Artificial Sequence
  Description of Artificial Sequence: Synthetic oligonucleotide
  Sense strand starting at position 2747 of SEQ ID NO: 1560543
ggguuuauauccuuugucu

SEQ ID NO: 1607264 - RNA, 19 nt, Artificial Sequence
  Description of Artificial Sequence: Synthetic oligonucleotide
  Antisense strand to SEQ ID NO: 1607263
agacaaaggauauaaaccc

SEQ ID NO: 1607265 - RNA, 19 nt, Artificial Sequence
  Description of Artificial Sequence: Synthetic oligonucleotide
  Sense strand starting at position 3090 of SEQ ID NO: 1560543
cugugcugucaacgagcua

SEQ ID NO: 1607266 - RNA, 19 nt, Artificial Sequence
  Description of Artificial Sequence: Synthetic oligonucleotide
  Antisense strand to SEQ ID NO: 1607265
uagcucguugacagcacag

SEQ ID NO: 1607267 - RNA, 19 nt, Artificial Sequence
  Description of Artificial Sequence: Synthetic oligonucleotide
  Sense strand starting at position 3091 of SEQ ID NO: 1560543
ugugcugucaacgagcuaa

SEQ ID NO: 1607268 - RNA, 19 nt, Artificial Sequence
  Description of Artificial Sequence: Synthetic oligonucleotide
  Antisense strand to SEQ ID NO: 1607267
uuagcucguugacagcaca

SEQ ID NO: 1607269 - RNA, 19 nt, Artificial Sequence
  Description of Artificial Sequence: Synthetic oligonucleotide
  Sense strand starting at position 3119 of SEQ ID NO: 1560543
gggaguucucagggcaauu

SEQ ID NO: 1607270 - RNA, 19 nt, Artificial Sequence
  Description of Artificial Sequence: Synthetic oligonucleotide
  Antisense strand to SEQ ID NO: 1607269
aauugcccugagaacuccc

SEQ ID NO: 1607271 - RNA, 19 nt, Artificial Sequence
  Description of Artificial Sequence: Synthetic oligonucleotide
  Sense strand starting at position 3310 of SEQ ID NO: 1560543
gcaggauauugggaauuug

SEQ ID NO: 1607272 - RNA, 19 nt, Artificial Sequence
  Description of Artificial Sequence: Synthetic oligonucleotide
  Antisense strand to SEQ ID NO: 1607271
caaauucccaauauccugc

SEQ ID NO: 1607273 - RNA, 19 nt, Artificial Sequence
  Description of Artificial Sequence: Synthetic oligonucleotide
  Sense strand starting at position 3410 of SEQ ID NO: 1560543
aggagucagaucugugauu

SEQ ID NO: 1607274 - RNA, 19 nt, Artificial Sequence
  Description of Artificial Sequence: Synthetic oligonucleotide
  Antisense strand to SEQ ID NO: 1607273
aaucacagaucugacuccu

SEQ ID NO: 1607275 - RNA, 19 nt, Artificial Sequence
  Description of Artificial Sequence: Synthetic oligonucleotide
  Sense strand starting at position 3495 of SEQ ID NO: 1560543
ucaacuaggugucaauaaa

SEQ ID NO: 1607276 - RNA, 19 nt, Artificial Sequence
  Description of Artificial Sequence: Synthetic oligonucleotide
  Antisense strand to SEQ ID NO: 1607275
uuuauugacaccuaguuga

SEQ ID NO: 1607277 - RNA, 19 nt, Artificial Sequence
  Description of Artificial Sequence: Synthetic oligonucleotide
  Sense strand starting at position 3530 of SEQ ID NO: 1560543
cgcgaugguucaugccuau

SEQ ID NO: 1607278 - RNA, 19 nt, Artificial Sequence
  Description of Artificial Sequence: Synthetic oligonucleotide
  Antisense strand to SEQ ID NO: 1607277
auaggcaugaaccaucgcg

SEQ ID NO: 1607279 - RNA, 19 nt, Artificial Sequence
  Description of Artificial Sequence: Synthetic oligonucleotide
  Sense strand starting at position 3834 of SEQ ID NO: 1560543
cgaguacaguggcucaaua

SEQ ID NO: 1607280 - RNA, 19 nt, Artificial Sequence
  Description of Artificial Sequence: Synthetic oligonucleotide
  Antisense strand to SEQ ID NO: 1607279
uauugagccacuguacucg

SEQ ID NO: 1607281 - RNA, 19 nt, Artificial Sequence
  Description of Artificial Sequence: Synthetic oligonucleotide
  Sense strand starting at position 740 of SEQ ID NO: 1560544
cuggaaugucagggucaug

SEQ ID NO: 1607282 - RNA, 19 nt, Artificial Sequence
  Description of Artificial Sequence: Synthetic oligonucleotide
  Antisense strand to SEQ ID NO: 1607281
caugacccugacauuccag

SEQ ID NO: 1607283 - RNA, 19 nt, Artificial Sequence
  Description of Artificial Sequence: Synthetic oligonucleotide
  Sense strand starting at position 743 of SEQ ID NO: 1560544
gaaugucagggucaugacu

SEQ ID NO: 1607284 - RNA, 19 nt, Artificial Sequence
  Description of Artificial Sequence: Synthetic oligonucleotide
  Antisense strand to SEQ ID NO: 1607283
agucaugacccugacauuc

SEQ ID NO: 1607285 - RNA, 19 nt, Artificial Sequence
  Description of Artificial Sequence: Synthetic oligonucleotide
  Sense strand starting at position 770 of SEQ ID NO: 1560544
cccaccucuuagguagaau

SEQ ID NO: 1607286 - RNA, 19 nt, Artificial Sequence
  Description of Artificial Sequence: Synthetic oligonucleotide
  Antisense strand to SEQ ID NO: 1607285
auucuaccuaagagguggg

SEQ ID NO: 1607287 - RNA, 19 nt, Artificial Sequence
  Description of Artificial Sequence: Synthetic oligonucleotide
  Sense strand starting at position 835 of SEQ ID NO: 1560544
gugugaguuaugcucuugu

SEQ ID NO: 1607288 - RNA, 19 nt, Artificial Sequence
  Description of Artificial Sequence: Synthetic oligonucleotide
  Antisense strand to SEQ ID NO: 1607287
acaagagcauaacucacac

SEQ ID NO: 1607289 - RNA, 19 nt, Artificial Sequence
  Description of Artificial Sequence: Synthetic oligonucleotide
  Sense strand starting at position 2081 of SEQ ID NO: 1560544
ggcuauuucuaccuugcau

SEQ ID NO: 1607290 - RNA, 19 nt, Artificial Sequence
  Description of Artificial Sequence: Synthetic oligonucleotide
  Antisense strand to SEQ ID NO: 1607289
augcaagguagaaauagcc

SEQ ID NO: 1607291 - RNA, 19 nt, Artificial Sequence
  Description of Artificial Sequence: Synthetic oligonucleotide
  Sense strand starting at position 2140 of SEQ ID NO: 1560544
ccuggaaauuguuccaacu

SEQ ID NO: 1607292 - RNA, 19 nt, Artificial Sequence
  Description of Artificial Sequence: Synthetic oligonucleotide
  Antisense strand to SEQ ID NO: 1607291
aguuggaacaauuuccagg

SEQ ID NO: 1607293 - RNA, 19 nt, Artificial Sequence
  Description of Artificial Sequence: Synthetic oligonucleotide
  Sense strand starting at position 2744 of SEQ ID NO: 1560544
guaugugugcguuuauaua

SEQ ID NO: 1607294 - RNA, 19 nt, Artificial Sequence
  Description of Artificial Sequence: Synthetic oligonucleotide
  Antisense strand to SEQ ID NO: 1607293
uauauaaacgcacacauac

SEQ ID NO: 1607295 - RNA, 19 nt, Artificial Sequence
  Description of Artificial Sequence: Synthetic oligonucleotide
  Sense strand starting at position 2864 of SEQ ID NO: 1560544
ucucacauuuguguuucua

SEQ ID NO: 1607296 - RNA, 19 nt, Artificial Sequence
  Description of Artificial Sequence: Synthetic oligonucleotide
  Antisense strand to SEQ ID NO: 1607295
uagaaacacaaaugugaga

SEQ ID NO: 1607297 - RNA, 19 nt, Artificial Sequence
  Description of Artificial Sequence: Synthetic oligonucleotide
  Sense strand starting at position 2866 of SEQ ID NO: 1560544
ucacauuuguguuucuaug

SEQ ID NO: 1607298 - RNA, 19 nt, Artificial Sequence
  Description of Artificial Sequence: Synthetic oligonucleotide
  Antisense strand to SEQ ID NO: 1607297
cauagaaacacaaauguga

SEQ ID NO: 1607299 - RNA, 19 nt, Artificial Sequence
  Description of Artificial Sequence: Synthetic oligonucleotide
  Sense strand starting at position 2928 of SEQ ID NO: 1560544
uggauugcaguuuaauagu

SEQ ID NO: 1607300 - RNA, 19 nt, Artificial Sequence
  Description of Artificial Sequence: Synthetic oligonucleotide
  Antisense strand to SEQ ID NO: 1607299
acuauuaaacugcaaucca

SEQ ID NO: 1607301 - RNA, 19 nt, Artificial Sequence
  Description of Artificial Sequence: Synthetic oligonucleotide
  Sense strand starting at position 2936 of SEQ ID NO: 1560544
aguuuaauaguccauacau

SEQ ID NO: 1607302 - RNA, 19 nt, Artificial Sequence
  Description of Artificial Sequence: Synthetic oligonucleotide
  Antisense strand to SEQ ID NO: 1607301
auguauggacuauuaaacu

SEQ ID NO: 1607303 - RNA, 19 nt, Artificial Sequence
  Description of Artificial Sequence: Synthetic oligonucleotide
  Sense strand starting at position 3093 of SEQ ID NO: 1560544
auauuuaccuaggaaugaa

SEQ ID NO: 1607304 - RNA, 19 nt, Artificial Sequence
  Description of Artificial Sequence: Synthetic oligonucleotide
  Antisense strand to SEQ ID NO: 1607303
uucauuccuagguaaauau

SEQ ID NO: 1607305 - RNA, 19 nt, Artificial Sequence
  Description of Artificial Sequence: Synthetic oligonucleotide
  Sense strand starting at position 3177 of SEQ ID NO: 1560544
gaccaaauguggccuggaa

SEQ ID NO: 1607306 - RNA, 19 nt, Artificial Sequence
  Description of Artificial Sequence: Synthetic oligonucleotide
  Antisense strand to SEQ ID NO: 1607305
uuccaggccacauuugguc

SEQ ID NO: 1607307 - RNA, 19 nt, Artificial Sequence
  Description of Artificial Sequence: Synthetic oligonucleotide
  Sense strand starting at position 3179 of SEQ ID NO: 1560544
ccaaauguggccuggaaag

SEQ ID NO: 1607308 - RNA, 19 nt, Artificial Sequence
  Description of Artificial Sequence: Synthetic oligonucleotide
  Antisense strand to SEQ ID NO: 1607307
cuuuccaggccacauuugg

SEQ ID NO: 1607309 - RNA, 19 nt, Artificial Sequence
  Description of Artificial Sequence: Synthetic oligonucleotide
  Sense strand starting at position 3181 of SEQ ID NO: 1560544
aaauguggccuggaaaguu

SEQ ID NO: 1607310 - RNA, 19 nt, Artificial Sequence
  Description of Artificial Sequence: Synthetic oligonucleotide
  Antisense strand to SEQ ID NO: 1607309
aacuuuccaggccacauuu

SEQ ID NO: 1607311 - RNA, 19 nt, Artificial Sequence
  Description of Artificial Sequence: Synthetic oligonucleotide
  Sense strand starting at position 3257 of SEQ ID NO: 1560544
cuguccuguuugucauuua

SEQ ID NO: 1607312 - RNA, 19 nt, Artificial Sequence
  Description of Artificial Sequence: Synthetic oligonucleotide
  Antisense strand to SEQ ID NO: 1607311
uaaaugacaaacaggacag

SEQ ID NO: 1607313 - RNA, 19 nt, Artificial Sequence
  Description of Artificial Sequence: Synthetic oligonucleotide
  Sense strand starting at position 3260 of SEQ ID NO: 1560544
uccuguuugucauuuauga

SEQ ID NO: 1607314 - RNA, 19 nt, Artificial Sequence
  Description of Artificial Sequence: Synthetic oligonucleotide
  Antisense strand to SEQ ID NO: 1607313
ucauaaaugacaaacagga

SEQ ID NO: 1607315 - RNA, 19 nt, Artificial Sequence
  Description of Artificial Sequence: Synthetic oligonucleotide
  Sense strand starting at position 3297 of SEQ ID NO: 1560544
guauauauuugcuugccau

SEQ ID NO: 1607316 - RNA, 19 nt, Artificial Sequence
  Description of Artificial Sequence: Synthetic oligonucleotide
  Antisense strand to SEQ ID NO: 1607315
auggcaagcaaauauauac

SEQ ID NO: 1607317 - RNA, 19 nt, Artificial Sequence
  Description of Artificial Sequence: Synthetic oligonucleotide
  Sense strand starting at position 3361 of SEQ ID NO: 1560544
guaguauuucugcaagcga

SEQ ID NO: 1607318 - RNA, 19 nt, Artificial Sequence
  Description of Artificial Sequence: Synthetic oligonucleotide
  Antisense strand to SEQ ID NO: 1607317
ucgcuugcagaaauacuac

SEQ ID NO: 1607319 - RNA, 19 nt, Artificial Sequence
  Description of Artificial Sequence: Synthetic oligonucleotide
  Sense strand starting at position 3465 of SEQ ID NO: 1560544
cccagucauuugccgagau

SEQ ID NO: 1607320 - RNA, 19 nt, Artificial Sequence
  Description of Artificial Sequence: Synthetic oligonucleotide
  Antisense strand to SEQ ID NO: 1607319
aucucggcaaaugacuggg

SEQ ID NO: 1607321 - RNA, 19 nt, Artificial Sequence
  Description of Artificial Sequence: Synthetic oligonucleotide
  Sense strand starting at position 3467 of SEQ ID NO: 1560544
cagucauuugccgagaugu

SEQ ID NO: 1607322 - RNA, 19 nt, Artificial Sequence
  Description of Artificial Sequence: Synthetic oligonucleotide
  Antisense strand to SEQ ID NO: 1607321
acaucucggcaaaugacug

SEQ ID NO: 1607323 - RNA, 19 nt, Artificial Sequence
  Description of Artificial Sequence: Synthetic oligonucleotide
  Sense strand starting at position 3469 of SEQ ID NO: 1560544
gucauuugccgagaugugu

SEQ ID NO: 1607324 - RNA, 19 nt, Artificial Sequence
  Description of Artificial Sequence: Synthetic oligonucleotide
  Antisense strand to SEQ ID NO: 1607323
acacaucucggcaaaugac

SEQ ID NO: 1607325 - RNA, 19 nt, Artificial Sequence
  Description of Artificial Sequence: Synthetic oligonucleotide
  Sense strand starting at position 3602 of SEQ ID NO: 1560544
agcauuuccuuguuguaca

SEQ ID NO: 1607326 - RNA, 19 nt, Artificial Sequence
  Description of Artificial Sequence: Synthetic oligonucleotide
  Antisense strand to SEQ ID NO: 1607325
uguacaacaaggaaaugcu

SEQ ID NO: 1607327 - RNA, 19 nt, Artificial Sequence
  Description of Artificial Sequence: Synthetic oligonucleotide
  Sense strand starting at position 3707 of SEQ ID NO: 1560544
cuagacaaguuuguggauu

SEQ ID NO: 1607328 - RNA, 19 nt, Artificial Sequence
  Description of Artificial Sequence: Synthetic oligonucleotide
  Antisense strand to SEQ ID NO: 1607327
aauccacaaacuugucuag

SEQ ID NO: 1607329 - RNA, 19 nt, Artificial Sequence
  Description of Artificial Sequence: Synthetic oligonucleotide
  Sense strand starting at position 3748 of SEQ ID NO: 1560544
uucuaaaugucaguuaaga

SEQ ID NO: 1607330 - RNA, 19 nt, Artificial Sequence
  Description of Artificial Sequence: Synthetic oligonucleotide
  Antisense strand to SEQ ID NO: 1607329
ucuuaacugacauuuagaa

SEQ ID NO: 1607331 - RNA, 19 nt, Artificial Sequence
  Description of Artificial Sequence: Synthetic oligonucleotide
  Sense strand starting at position 3886 of SEQ ID NO: 1560544
gugcuaggauuauugaaau

SEQ ID NO: 1607332 - RNA, 19 nt, Artificial Sequence
  Description of Artificial Sequence: Synthetic oligonucleotide
  Antisense strand to SEQ ID NO: 1607331
auuucaauaauccuagcac

SEQ ID NO: 1607333 - RNA, 19 nt, Artificial Sequence
  Description of Artificial Sequence: Synthetic oligonucleotide
  Sense strand starting at position 39 of SEQ ID NO: 1560545
gcuguuccagaauauuaug

SEQ ID NO: 1607334 - RNA, 19 nt, Artificial Sequence
  Description of Artificial Sequence: Synthetic oligonucleotide
  Antisense strand to SEQ ID NO: 1607333
cauaauauucuggaacagc

SEQ ID NO: 1607335 - RNA, 19 nt, Artificial Sequence
  Description of Artificial Sequence: Synthetic oligonucleotide
  Sense strand starting at position 826 of SEQ ID NO: 1560545
uucuuccuaguuuaugaga

SEQ ID NO: 1607336 - RNA, 19 nt, Artificial Sequence
  Description of Artificial Sequence: Synthetic oligonucleotide
  Antisense strand to SEQ ID NO: 1607335
ucucauaaacuaggaagaa

SEQ ID NO: 1607337 - RNA, 19 nt, Artificial Sequence
  Description of Artificial Sequence: Synthetic oligonucleotide
  Sense strand starting at position 1700 of SEQ ID NO: 1560545
ggcccagaucuccacuaca

SEQ ID NO: 1607338 - RNA, 19 nt, Artificial Sequence
  Description of Artificial Sequence: Synthetic oligonucleotide
  Antisense strand to SEQ ID NO: 1607337
uguaguggagaucugggcc

SEQ ID NO: 1607339 - RNA, 19 nt, Artificial Sequence
  Description of Artificial Sequence: Synthetic oligonucleotide
  Sense strand starting at position 2478 of SEQ ID NO: 1560545
agaauuguacuuuaucagu

SEQ ID NO: 1607340 - RNA, 19 nt, Artificial Sequence
  Description of Artificial Sequence: Synthetic oligonucleotide
  Antisense strand to SEQ ID NO: 1607339
acugauaaaguacaauucu

SEQ ID NO: 1607341 - RNA, 19 nt, Artificial Sequence
  Description of Artificial Sequence: Synthetic oligonucleotide
  Sense strand starting at position 2959 of SEQ ID NO: 1560545
gagagcucuggcuacuaaa

SEQ ID NO: 1607342 - RNA, 19 nt, Artificial Sequence
  Description of Artificial Sequence: Synthetic oligonucleotide
  Antisense strand to SEQ ID NO: 1607341
uuuaguagccagagcucuc

SEQ ID NO: 1607343 - RNA, 19 nt, Artificial Sequence
  Description of Artificial Sequence: Synthetic oligonucleotide
  Sense strand starting at position 3047 of SEQ ID NO: 1560545
cagaaacagugucuaaagu

SEQ ID NO: 1607344 - RNA, 19 nt, Artificial Sequence
  Description of Artificial Sequence: Synthetic oligonucleotide
  Antisense strand to SEQ ID NO: 1607343
acuuuagacacuguuucug

SEQ ID NO: 1607345 - RNA, 19 nt, Artificial Sequence
  Description of Artificial Sequence: Synthetic oligonucleotide
  Sense strand starting at position 3432 of SEQ ID NO: 1560545
cuuauaauuccugaugcag

SEQ ID NO: 1607346 - RNA, 19 nt, Artificial Sequence
  Description of Artificial Sequence: Synthetic oligonucleotide
  Antisense strand to SEQ ID NO: 1607345
cugcaucaggaauuauaag

SEQ ID NO: 1607347 - RNA, 19 nt, Artificial Sequence
  Description of Artificial Sequence: Synthetic oligonucleotide
  Sense strand starting at position 3505 of SEQ ID NO: 1560545
uguggauacuuucucugaa

SEQ ID NO: 1607348 - RNA, 19 nt, Artificial Sequence
  Description of Artificial Sequence: Synthetic oligonucleotide
  Antisense strand to SEQ ID NO: 1607347
uucagagaaaguauccaca

SEQ ID NO: 1607349 - RNA, 19 nt, Artificial Sequence
  Description of Artificial Sequence: Synthetic oligonucleotide
  Sense strand starting at position 3506 of SEQ ID NO: 1560545
guggauacuuucucugaau

SEQ ID NO: 1607350 - RNA, 19 nt, Artificial Sequence
  Description of Artificial Sequence: Synthetic oligonucleotide
  Antisense strand to SEQ ID NO: 1607349
auucagagaaaguauccac

SEQ ID NO: 1607351 - RNA, 19 nt, Artificial Sequence
  Description of Artificial Sequence: Synthetic oligonucleotide
  Sense strand starting at position 3507 of SEQ ID NO: 1560545
uggauacuuucucugaaua

SEQ ID NO: 1607352 - RNA, 19 nt, Artificial Sequence
  Description of Artificial Sequence: Synthetic oligonucleotide
  Antisense strand to SEQ ID NO: 1607351
uauucagagaaaguaucca

SEQ ID NO: 1607353 - RNA, 19 nt, Artificial Sequence
  Description of Artificial Sequence: Synthetic oligonucleotide
  Sense strand starting at position 3508 of SEQ ID NO: 1560545
ggauacuuucucugaauau

SEQ ID NO: 1607354 - RNA, 19 nt, Artificial Sequence
  Description of Artificial Sequence: Synthetic oligonucleotide
  Antisense strand to SEQ ID NO: 1607353
auauucagagaaaguaucc

SEQ ID NO: 1607355 - RNA, 19 nt, Artificial Sequence
  Description of Artificial Sequence: Synthetic oligonucleotide
  Sense strand starting at position 3626 of SEQ ID NO: 1560545
cccuguguagaugagacua

SEQ ID NO: 1607356 - RNA, 19 nt, Artificial Sequence
  Description of Artificial Sequence: Synthetic oligonucleotide
  Antisense strand to SEQ ID NO: 1607355
uagucucaucuacacaggg

SEQ ID NO: 1607357 - RNA, 19 nt, Artificial Sequence
  Description of Artificial Sequence: Synthetic oligonucleotide
  Sense strand starting at position 3676 of SEQ ID NO: 1560545
uuggaaugacucugccaga

SEQ ID NO: 1607358 - RNA, 19 nt, Artificial Sequence
  Description of Artificial Sequence: Synthetic oligonucleotide
  Antisense strand to SEQ ID NO: 1607357
ucuggcagagucauuccaa

SEQ ID NO: 1607359 - RNA, 19 nt, Artificial Sequence
  Description of Artificial Sequence: Synthetic oligonucleotide
  Sense strand starting at position 3677 of SEQ ID NO: 1560545
uggaaugacucugccagau

SEQ ID NO: 1607360 - RNA, 19 nt, Artificial Sequence
  Description of Artificial Sequence: Synthetic oligonucleotide
  Antisense strand to SEQ ID NO: 1607359
aucuggcagagucauucca

SEQ ID NO: 1607361 - RNA, 19 nt, Artificial Sequence
  Description of Artificial Sequence: Synthetic oligonucleotide
  Sense strand starting at position 82 of SEQ ID NO: 1560546
aaggcuguuccagaauauu

SEQ ID NO: 1607362 - RNA, 19 nt, Artificial Sequence
  Description of Artificial Sequence: Synthetic oligonucleotide
  Antisense strand to SEQ ID NO: 1607361
aauauucuggaacagccuu

SEQ ID NO: 1607363 - RNA, 19 nt, Artificial Sequence
  Description of Artificial Sequence: Synthetic oligonucleotide
  Sense strand starting at position 179 of SEQ ID NO: 1560546
cgaagaaugacauguccua

SEQ ID NO: 1607364 - RNA, 19 nt, Artificial Sequence
  Description of Artificial Sequence: Synthetic oligonucleotide
  Antisense strand to SEQ ID NO: 1607363
uaggacaugucauucuucg

SEQ ID NO: 1607365 - RNA, 19 nt, Artificial Sequence
  Description of Artificial Sequence: Synthetic oligonucleotide
  Sense strand starting at position 314 of SEQ ID NO: 1560546
agaagauucuccucgcuuu

SEQ ID NO: 1607366 - RNA, 19 nt, Artificial Sequence
  Description of Artificial Sequence: Synthetic oligonucleotide
  Antisense strand to SEQ ID NO: 1607365
aaagcgaggagaaucuucu

SEQ ID NO: 1607367 - RNA, 19 nt, Artificial Sequence
  Description of Artificial Sequence: Synthetic oligonucleotide
  Sense strand starting at position 403 of SEQ ID NO: 1560546
ggugucucccuacaacaaa

SEQ ID NO: 1607368 - RNA, 19 nt, Artificial Sequence
  Description of Artificial Sequence: Synthetic oligonucleotide
  Antisense strand to SEQ ID NO: 1607367
uuuguuguagggagacacc

SEQ ID NO: 1607369 - RNA, 19 nt, Artificial Sequence
  Description of Artificial Sequence: Synthetic oligonucleotide
  Sense strand starting at position 440 of SEQ ID NO: 1560546
ugagcaagugcugaguaaa

SEQ ID NO: 1607370 - RNA, 19 nt, Artificial Sequence
  Description of Artificial Sequence: Synthetic oligonucleotide
  Antisense strand to SEQ ID NO: 1607369
uuuacucagcacuugcuca

SEQ ID NO: 1607371 - RNA, 19 nt, Artificial Sequence
  Description of Artificial Sequence: Synthetic oligonucleotide
  Sense strand starting at position 443 of SEQ ID NO: 1560546
gcaagugcugaguaaagag

SEQ ID NO: 1607372 - RNA, 19 nt, Artificial Sequence
  Description of Artificial Sequence: Synthetic oligonucleotide
  Antisense strand to SEQ ID NO: 1607371
cucuuuacucagcacuugc

SEQ ID NO: 1607373 - RNA, 19 nt, Artificial Sequence
  Description of Artificial Sequence: Synthetic oligonucleotide
  Sense strand starting at position 527 of SEQ ID NO: 1560546
gagggcauguccuuuguga

SEQ ID NO: 1607374 - RNA, 19 nt, Artificial Sequence
  Description of Artificial Sequence: Synthetic oligonucleotide
  Antisense strand to SEQ ID NO: 1607373
ucacaaaggacaugcccuc

SEQ ID NO: 1607375 - RNA, 19 nt, Artificial Sequence
  Description of Artificial Sequence: Synthetic oligonucleotide
  Sense strand starting at position 535 of SEQ ID NO: 1560546
guccuuugugaauggauau

SEQ ID NO: 1607376 - RNA, 19 nt, Artificial Sequence
  Description of Artificial Sequence: Synthetic oligonucleotide
  Antisense strand to SEQ ID NO: 1607375
auauccauucacaaaggac

SEQ ID NO: 1607377 - RNA, 19 nt, Artificial Sequence
  Description of Artificial Sequence: Synthetic oligonucleotide
  Sense strand starting at position 867 of SEQ ID NO: 1560546
guccucucuuccuaguuua

SEQ ID NO: 1607378 - RNA, 19 nt, Artificial Sequence
  Description of Artificial Sequence: Synthetic oligonucleotide
  Antisense strand to SEQ ID NO: 1607377
uaaacuaggaagagaggac

SEQ ID NO: 1607379 - RNA, 19 nt, Artificial Sequence
  Description of Artificial Sequence: Synthetic oligonucleotide
  Sense strand starting at position 870 of SEQ ID NO: 1560546
cucucuuccuaguuuauga

SEQ ID NO: 1607380 - RNA, 19 nt, Artificial Sequence
  Description of Artificial Sequence: Synthetic oligonucleotide
  Antisense strand to SEQ ID NO: 1607379
ucauaaacuaggaagagag

SEQ ID NO: 1607381 - RNA, 19 nt, Artificial Sequence
  Description of Artificial Sequence: Synthetic oligonucleotide
  Sense strand starting at position 1228 of SEQ ID NO: 1560546
ggcugauauuuccacccua

SEQ ID NO: 1607382 - RNA, 19 nt, Artificial Sequence
  Description of Artificial Sequence: Synthetic oligonucleotide
  Antisense strand to SEQ ID NO: 1607381
uaggguggaaauaucagcc

SEQ ID NO: 1607383 - RNA, 19 nt, Artificial Sequence
  Description of Artificial Sequence: Synthetic oligonucleotide
  Sense strand starting at position 1266 of SEQ ID NO: 1560546
ggcucagaucuccacccua

SEQ ID NO: 1607384 - RNA, 19 nt, Artificial Sequence
  Description of Artificial Sequence: Synthetic oligonucleotide
  Antisense strand to SEQ ID NO: 1607383
uaggguggagaucugagcc

SEQ ID NO: 1607385 - RNA, 19 nt, Artificial Sequence
  Description of Artificial Sequence: Synthetic oligonucleotide
  Sense strand starting at position 1710 of SEQ ID NO: 1560546
ggcccaugucuccacuaca

SEQ ID NO: 1607386 - RNA, 19 nt, Artificial Sequence
  Description of Artificial Sequence: Synthetic oligonucleotide
  Antisense strand to SEQ ID NO: 1607385
uguaguggagacaugggcc

SEQ ID NO: 1607387 - RNA, 19 nt, Artificial Sequence
  Description of Artificial Sequence: Synthetic oligonucleotide
  Sense strand starting at position 2162 of SEQ ID NO: 1560546
uuguucucacuagaauuga

SEQ ID NO: 1607388 - RNA, 19 nt, Artificial Sequence
  Description of Artificial Sequence: Synthetic oligonucleotide
  Antisense strand to SEQ ID NO: 1607387
ucaauucuagugagaacaa

SEQ ID NO: 1607389 - RNA, 19 nt, Artificial Sequence
  Description of Artificial Sequence: Synthetic oligonucleotide
  Sense strand starting at position 2235 of SEQ ID NO: 1560546
ucauacacgagaugauuga

SEQ ID NO: 1607390 - RNA, 19 nt, Artificial Sequence
  Description of Artificial Sequence: Synthetic oligonucleotide
  Antisense strand to SEQ ID NO: 1607389
ucaaucaucucguguauga

SEQ ID NO: 1607391 - RNA, 19 nt, Artificial Sequence
  Description of Artificial Sequence: Synthetic oligonucleotide
  Sense strand starting at position 2239 of SEQ ID NO: 1560546
acacgagaugauugaauuc

SEQ ID NO: 1607392 - RNA, 19 nt, Artificial Sequence
  Description of Artificial Sequence: Synthetic oligonucleotide
  Antisense strand to SEQ ID NO: 1607391
gaauucaaucaucucgugu

SEQ ID NO: 1607393 - RNA, 19 nt, Artificial Sequence
  Description of Artificial Sequence: Synthetic oligonucleotide
  Sense strand starting at position 2246 of SEQ ID NO: 1560546
augauugaauucugugcuu

SEQ ID NO: 1607394 - RNA, 19 nt, Artificial Sequence
  Description of Artificial Sequence: Synthetic oligonucleotide
  Antisense strand to SEQ ID NO: 1607393
aagcacagaauucaaucau

SEQ ID NO: 1607395 - RNA, 19 nt, Artificial Sequence
  Description of Artificial Sequence: Synthetic oligonucleotide
  Sense strand starting at position 2257 of SEQ ID NO: 1560546
cugugcuuacauuaaagau

SEQ ID NO: 1607396 - RNA, 19 nt, Artificial Sequence
  Description of Artificial Sequence: Synthetic oligonucleotide
  Antisense strand to SEQ ID NO: 1607395
aucuuuaauguaagcacag

SEQ ID NO: 1607397 - RNA, 19 nt, Artificial Sequence
  Description of Artificial Sequence: Synthetic oligonucleotide
  Sense strand starting at position 2363 of SEQ ID NO: 1560546
cagaguaauugugacaaga

SEQ ID NO: 1607398 - RNA, 19 nt, Artificial Sequence
  Description of Artificial Sequence: Synthetic oligonucleotide
  Antisense strand to SEQ ID NO: 1607397
ucuugucacaauuacucug

SEQ ID NO: 1607399 - RNA, 19 nt, Artificial Sequence
  Description of Artificial Sequence: Synthetic oligonucleotide
  Sense strand starting at position 2365 of SEQ ID NO: 1560546
gaguaauugugacaagaag

SEQ ID NO: 1607400 - RNA, 19 nt, Artificial Sequence
  Description of Artificial Sequence: Synthetic oligonucleotide
  Antisense strand to SEQ ID NO: 1607399
cuucuugucacaauuacuc

SEQ ID NO: 1607401 - RNA, 19 nt, Artificial Sequence
  Description of Artificial Sequence: Synthetic oligonucleotide
  Sense strand starting at position 2571 of SEQ ID NO: 1560546
ggacucagguuaccaaauu

SEQ ID NO: 1607402 - RNA, 19 nt, Artificial Sequence
  Description of Artificial Sequence: Synthetic oligonucleotide
  Antisense strand to SEQ ID NO: 1607401
aauuugguaaccugagucc

SEQ ID NO: 1607403 - RNA, 19 nt, Artificial Sequence
  Description of Artificial Sequence: Synthetic oligonucleotide
  Sense strand starting at position 2911 of SEQ ID NO: 1560546
ucacuauaccugggugauu

SEQ ID NO: 1607404 - RNA, 19 nt, Artificial Sequence
  Description of Artificial Sequence: Synthetic oligonucleotide
  Antisense strand to SEQ ID NO: 1607403
aaucacccagguauaguga

SEQ ID NO: 1607405 - RNA, 19 nt, Artificial Sequence
  Description of Artificial Sequence: Synthetic oligonucleotide
  Sense strand starting at position 3527 of SEQ ID NO: 1560546
gugacugucuauuuauagu

SEQ ID NO: 1607406 - RNA, 19 nt, Artificial Sequence
  Description of Artificial Sequence: Synthetic oligonucleotide
  Antisense strand to SEQ ID NO: 1607405
acuauaaauagacagucac

SEQ ID NO: 1607407 - RNA, 19 nt, Artificial Sequence
  Description of Artificial Sequence: Synthetic oligonucleotide
  Sense strand starting at position 3533 of SEQ ID NO: 1560546
gucuauuuauaguaguaug

SEQ ID NO: 1607408 - RNA, 19 nt, Artificial Sequence
  Description of Artificial Sequence: Synthetic oligonucleotide
  Antisense strand to SEQ ID NO: 1607407
cauacuacuauaaauagac

SEQ ID NO: 1607409 - RNA, 19 nt, Artificial Sequence
  Description of Artificial Sequence: Synthetic oligonucleotide
  Sense strand starting at position 3554 of SEQ ID NO: 1560546
agaugauguguugauacgu

SEQ ID NO: 1607410 - RNA, 19 nt, Artificial Sequence
  Description of Artificial Sequence: Synthetic oligonucleotide
  Antisense strand to SEQ ID NO: 1607409
acguaucaacacaucaucu

SEQ ID NO: 1607411 - RNA, 19 nt, Artificial Sequence
  Description of Artificial Sequence: Synthetic oligonucleotide
  Sense strand starting at position 3562 of SEQ ID NO: 1560546
uguugauacgugucccugu

SEQ ID NO: 1607412 - RNA, 19 nt, Artificial Sequence
  Description of Artificial Sequence: Synthetic oligonucleotide
  Antisense strand to SEQ ID NO: 1607411
acagggacacguaucaaca

SEQ ID NO: 1607413 - RNA, 19 nt, Artificial Sequence
  Description of Artificial Sequence: Synthetic oligonucleotide
  Sense strand starting at position 3646 of SEQ ID NO: 1560546
uccagaucugcagagagua

SEQ ID NO: 1607414 - RNA, 19 nt, Artificial Sequence
  Description of Artificial Sequence: Synthetic oligonucleotide
  Antisense strand to SEQ ID NO: 1607413
uacucucugcagaucugga

SEQ ID NO: 1607415 - RNA, 19 nt, Artificial Sequence
  Description of Artificial Sequence: Synthetic oligonucleotide
  Sense strand starting at position 3972 of SEQ ID NO: 1560546
gaaagauacucugaggaaa

SEQ ID NO: 1607416 - RNA, 19 nt, Artificial Sequence
  Description of Artificial Sequence: Synthetic oligonucleotide
  Antisense strand to SEQ ID NO: 1607415
uuuccucagaguaucuuuc

SEQ ID NO: 1607417 - RNA, 19 nt, Artificial Sequence
  Description of Artificial Sequence: Synthetic oligonucleotide
  Sense strand starting at position 171 of SEQ ID NO: 1560547
cgaagaaugacauguccua

SEQ ID NO: 1607418 - RNA, 19 nt, Artificial Sequence
  Description of Artificial Sequence: Synthetic oligonucleotide
  Antisense strand to SEQ ID NO: 1607417
uaggacaugucauucuucg

SEQ ID NO: 1607419 - RNA, 19 nt, Artificial Sequence
  Description of Artificial Sequence: Synthetic oligonucleotide
  Sense strand starting at position 306 of SEQ ID NO: 1560547
agaagauucuccucgcuuu

SEQ ID NO: 1607420 - RNA, 19 nt, Artificial Sequence
  Description of Artificial Sequence: Synthetic oligonucleotide
  Antisense strand to SEQ ID NO: 1607419
aaagcgaggagaaucuucu

SEQ ID NO: 1607421 - RNA, 19 nt, Artificial Sequence
  Description of Artificial Sequence: Synthetic oligonucleotide
  Sense strand starting at position 432 of SEQ ID NO: 1560547
ugagcaagugcugaguaaa

SEQ ID NO: 1607422 - RNA, 19 nt, Artificial Sequence
  Description of Artificial Sequence: Synthetic oligonucleotide
  Antisense strand to SEQ ID NO: 1607421
uuuacucagcacuugcuca

SEQ ID NO: 1607423 - RNA, 19 nt, Artificial Sequence
  Description of Artificial Sequence: Synthetic oligonucleotide
  Sense strand starting at position 435 of SEQ ID NO: 1560547
gcaagugcugaguaaagag

SEQ ID NO: 1607424 - RNA, 19 nt, Artificial Sequence
  Description of Artificial Sequence: Synthetic oligonucleotide
  Antisense strand to SEQ ID NO: 1607423
cucuuuacucagcacuugc

SEQ ID NO: 1607425 - RNA, 19 nt, Artificial Sequence
  Description of Artificial Sequence: Synthetic oligonucleotide
  Sense strand starting at position 519 of SEQ ID NO: 1560547
gagggcauguccuuuguga

SEQ ID NO: 1607426 - RNA, 19 nt, Artificial Sequence
  Description of Artificial Sequence: Synthetic oligonucleotide
  Antisense strand to SEQ ID NO: 1607425
ucacaaaggacaugcccuc

SEQ ID NO: 1607427 - RNA, 19 nt, Artificial Sequence
  Description of Artificial Sequence: Synthetic oligonucleotide
  Sense strand starting at position 527 of SEQ ID NO: 1560547
guccuuugugaauggauau

SEQ ID NO: 1607428 - RNA, 19 nt, Artificial Sequence
  Description of Artificial Sequence: Synthetic oligonucleotide
  Antisense strand to SEQ ID NO: 1607427
auauccauucacaaaggac

SEQ ID NO: 1607429 - RNA, 19 nt, Artificial Sequence
  Description of Artificial Sequence: Synthetic oligonucleotide
  Sense strand starting at position 862 of SEQ ID NO: 1560547
cucucuuccuaguuuauga

SEQ ID NO: 1607430 - RNA, 19 nt, Artificial Sequence
  Description of Artificial Sequence: Synthetic oligonucleotide
  Antisense strand to SEQ ID NO: 1607429
ucauaaacuaggaagagag

SEQ ID NO: 1607431 - RNA, 19 nt, Artificial Sequence
  Description of Artificial Sequence: Synthetic oligonucleotide
  Sense strand starting at position 1220 of SEQ ID NO: 1560547
ggcugauauuuccacccua

SEQ ID NO: 1607432 - RNA, 19 nt, Artificial Sequence
  Description of Artificial Sequence: Synthetic oligonucleotide
  Antisense strand to SEQ ID NO: 1607431
uaggguggaaauaucagcc

SEQ ID NO: 1607433 - RNA, 19 nt, Artificial Sequence
  Description of Artificial Sequence: Synthetic oligonucleotide
  Sense strand starting at position 1258 of SEQ ID NO: 1560547
ggcucagaucuccacccua

SEQ ID NO: 1607434 - RNA, 19 nt, Artificial Sequence
  Description of Artificial Sequence: Synthetic oligonucleotide
  Antisense strand to SEQ ID NO: 1607433
uaggguggagaucugagcc

SEQ ID NO: 1607435 - RNA, 19 nt, Artificial Sequence
  Description of Artificial Sequence: Synthetic oligonucleotide
  Sense strand starting at position 1702 of SEQ ID NO: 1560547
ggcccaugucuccacuaca

SEQ ID NO: 1607436 - RNA, 19 nt, Artificial Sequence
  Description of Artificial Sequence: Synthetic oligonucleotide
  Antisense strand to SEQ ID NO: 1607435
uguaguggagacaugggcc

SEQ ID NO: 1607437 - RNA, 19 nt, Artificial Sequence
  Description of Artificial Sequence: Synthetic oligonucleotide
  Sense strand starting at position 2154 of SEQ ID NO: 1560547
uuguucucacuagaauuga

SEQ ID NO: 1607438 - RNA, 19 nt, Artificial Sequence
  Description of Artificial Sequence: Synthetic oligonucleotide
  Antisense strand to SEQ ID NO: 1607437
ucaauucuagugagaacaa

SEQ ID NO: 1607439 - RNA, 19 nt, Artificial Sequence
  Description of Artificial Sequence: Synthetic oligonucleotide
  Sense strand starting at position 2227 of SEQ ID NO: 1560547
ucauacacgagaugauuga

SEQ ID NO: 1607440 - RNA, 19 nt, Artificial Sequence
  Description of Artificial Sequence: Synthetic oligonucleotide
  Antisense strand to SEQ ID NO: 1607439
ucaaucaucucguguauga

SEQ ID NO: 1607441 - RNA, 19 nt, Artificial Sequence
  Description of Artificial Sequence: Synthetic oligonucleotide
  Sense strand starting at position 2231 of SEQ ID NO: 1560547
acacgagaugauugaauuc

SEQ ID NO: 1607442 - RNA, 19 nt, Artificial Sequence
  Description of Artificial Sequence: Synthetic oligonucleotide
  Antisense strand to SEQ ID NO: 1607441
gaauucaaucaucucgugu

SEQ ID NO: 1607443 - RNA, 19 nt, Artificial Sequence
  Description of Artificial Sequence: Synthetic oligonucleotide
  Sense strand starting at position 2249 of SEQ ID NO: 1560547
cugugcuuacauuaaagau

SEQ ID NO: 1607444 - RNA, 19 nt, Artificial Sequence
  Description of Artificial Sequence: Synthetic oligonucleotide
  Antisense strand to SEQ ID NO: 1607443
aucuuuaauguaagcacag

SEQ ID NO: 1607445 - RNA, 19 nt, Artificial Sequence
  Description of Artificial Sequence: Synthetic oligonucleotide
  Sense strand starting at position 2563 of SEQ ID NO: 1560547
ggacucagguuaccaaauu

SEQ ID NO: 1607446 - RNA, 19 nt, Artificial Sequence
  Description of Artificial Sequence: Synthetic oligonucleotide
  Antisense strand to SEQ ID NO: 1607445
aauuugguaaccugagucc

SEQ ID NO: 1607447 - RNA, 19 nt, Artificial Sequence
  Description of Artificial Sequence: Synthetic oligonucleotide
  Sense strand starting at position 2903 of SEQ ID NO: 1560547
ucacuauaccugggugauu

SEQ ID NO: 1607448 - RNA, 19 nt, Artificial Sequence
  Description of Artificial Sequence: Synthetic oligonucleotide
  Antisense strand to SEQ ID NO: 1607447
aaucacccagguauaguga

SEQ ID NO: 1607449 - RNA, 19 nt, Artificial Sequence
  Description of Artificial Sequence: Synthetic oligonucleotide
  Sense strand starting at position 3519 of SEQ ID NO: 1560547
gugacugucuauuuauagu

SEQ ID NO: 1607450 - RNA, 19 nt, Artificial Sequence
  Description of Artificial Sequence: Synthetic oligonucleotide
  Antisense strand to SEQ ID NO: 1607449
acuauaaauagacagucac

SEQ ID NO: 1607451 - RNA, 19 nt, Artificial Sequence
  Description of Artificial Sequence: Synthetic oligonucleotide
  Sense strand starting at position 3546 of SEQ ID NO: 1560547
agaugauguguugauacgu

SEQ ID NO: 1607452 - RNA, 19 nt, Artificial Sequence
  Description of Artificial Sequence: Synthetic oligonucleotide
  Antisense strand to SEQ ID NO: 1607451
acguaucaacacaucaucu

SEQ ID NO: 1607453 - RNA, 19 nt, Artificial Sequence
  Description of Artificial Sequence: Synthetic oligonucleotide
  Sense strand starting at position 3554 of SEQ ID NO: 1560547
uguugauacgugucccugu

SEQ ID NO: 1607454 - RNA, 19 nt, Artificial Sequence
  Description of Artificial Sequence: Synthetic oligonucleotide
  Antisense strand to SEQ ID NO: 1607453
acagggacacguaucaaca

SEQ ID NO: 1607455 - RNA, 19 nt, Artificial Sequence
  Description of Artificial Sequence: Synthetic oligonucleotide
  Sense strand starting at position 3638 of SEQ ID NO: 1560547
uccagaucugcagagagua

SEQ ID NO: 1607456 - RNA, 19 nt, Artificial Sequence
  Description of Artificial Sequence: Synthetic oligonucleotide
  Antisense strand to SEQ ID NO: 1607455
uacucucugcagaucugga

SEQ ID NO: 1607457 - RNA, 19 nt, Artificial Sequence
  Description of Artificial Sequence: Synthetic oligonucleotide
  Sense strand starting at position 3964 of SEQ ID NO: 1560547
gaaagauacucugaggaaa

SEQ ID NO: 1607458 - RNA, 19 nt, Artificial Sequence
  Description of Artificial Sequence: Synthetic oligonucleotide
  Antisense strand to SEQ ID NO: 1607457
uuuccucagaguaucuuuc

SEQ ID NO: 1607459 - RNA, 19 nt, Artificial Sequence
  Description of Artificial Sequence: Synthetic oligonucleotide
  Sense strand starting at position 44 of SEQ ID NO: 1560548
cgaagaaucacauguccug

SEQ ID NO: 1607460 - RNA, 19 nt, Artificial Sequence
  Description of Artificial Sequence: Synthetic oligonucleotide
  Antisense strand to SEQ ID NO: 1607459
caggacaugugauucuucg

SEQ ID NO: 1607461 - RNA, 19 nt, Artificial Sequence
  Description of Artificial Sequence: Synthetic oligonucleotide
  Sense strand starting at position 391 of SEQ ID NO: 1560548
gagggcaugucuuugagaa

SEQ ID NO: 1607462 - RNA, 19 nt, Artificial Sequence
  Description of Artificial Sequence: Synthetic oligonucleotide
  Antisense strand to SEQ ID NO: 1607461
uucucaaagacaugcccuc

SEQ ID NO: 1607463 - RNA, 19 nt, Artificial Sequence
  Description of Artificial Sequence: Synthetic oligonucleotide
  Sense strand starting at position 392 of SEQ ID NO: 1560548
agggcaugucuuugagaau

SEQ ID NO: 1607464 - RNA, 19 nt, Artificial Sequence
  Description of Artificial Sequence: Synthetic oligonucleotide
  Antisense strand to SEQ ID NO: 1607463
auucucaaagacaugcccu

SEQ ID NO: 1607465 - RNA, 19 nt, Artificial Sequence
  Description of Artificial Sequence: Synthetic oligonucleotide
  Sense strand starting at position 398 of SEQ ID NO: 1560548
ugucuuugagaauggaaua

SEQ ID NO: 1607466 - RNA, 19 nt, Artificial Sequence
  Description of Artificial Sequence: Synthetic oligonucleotide
  Antisense strand to SEQ ID NO: 1607465
uauuccauucucaaagaca

SEQ ID NO: 1607467 - RNA, 19 nt, Artificial Sequence
  Description of Artificial Sequence: Synthetic oligonucleotide
  Sense strand starting at position 399 of SEQ ID NO: 1560548
gucuuugagaauggaauau

SEQ ID NO: 1607468 - RNA, 19 nt, Artificial Sequence
  Description of Artificial Sequence: Synthetic oligonucleotide
  Antisense strand to SEQ ID NO: 1607467
auauuccauucucaaagac

SEQ ID NO: 1607469 - RNA, 19 nt, Artificial Sequence
  Description of Artificial Sequence: Synthetic oligonucleotide
  Sense strand starting at position 417 of SEQ ID NO: 1560548
ucagcagaugccugaauga

SEQ ID NO: 1607470 - RNA, 19 nt, Artificial Sequence
  Description of Artificial Sequence: Synthetic oligonucleotide
  Antisense strand to SEQ ID NO: 1607469
ucauucaggcaucugcuga

SEQ ID NO: 1607471 - RNA, 19 nt, Artificial Sequence
  Description of Artificial Sequence: Synthetic oligonucleotide
  Sense strand starting at position 498 of SEQ ID NO: 1560548
accucuucugguggaguga

SEQ ID NO: 1607472 - RNA, 19 nt, Artificial Sequence
  Description of Artificial Sequence: Synthetic oligonucleotide
  Antisense strand to SEQ ID NO: 1607471
ucacuccaccagaagaggu

SEQ ID NO: 1607473 - RNA, 19 nt, Artificial Sequence
  Description of Artificial Sequence: Synthetic oligonucleotide
  Sense strand starting at position 550 of SEQ ID NO: 1560548
aacgcugaagugugaguaa

SEQ ID NO: 1607474 - RNA, 19 nt, Artificial Sequence
  Description of Artificial Sequence: Synthetic oligonucleotide
  Antisense strand to SEQ ID NO: 1607473
uuacucacacuucagcguu

SEQ ID NO: 1607475 - RNA, 19 nt, Artificial Sequence
  Description of Artificial Sequence: Synthetic oligonucleotide
  Sense strand starting at position 1166 of SEQ ID NO: 1560548
ggccgauauuuccaucaua

SEQ ID NO: 1607476 - RNA, 19 nt, Artificial Sequence
  Description of Artificial Sequence: Synthetic oligonucleotide
  Antisense strand to SEQ ID NO: 1607475
uaugauggaaauaucggcc

SEQ ID NO: 1607477 - RNA, 19 nt, Artificial Sequence
  Description of Artificial Sequence: Synthetic oligonucleotide
  Sense strand starting at position 1223 of SEQ ID NO: 1560548
ggccaagaucuccacugua

SEQ ID NO: 1607478 - RNA, 19 nt, Artificial Sequence
  Description of Artificial Sequence: Synthetic oligonucleotide
  Antisense strand to SEQ ID NO: 1607477
uacaguggagaucuuggcc

SEQ ID NO: 1607479 - RNA, 19 nt, Artificial Sequence
  Description of Artificial Sequence: Synthetic oligonucleotide
  Sense strand starting at position 1280 of SEQ ID NO: 1560548
ggcucagaucuccaaccua

SEQ ID NO: 1607480 - RNA, 19 nt, Artificial Sequence
  Description of Artificial Sequence: Synthetic oligonucleotide
  Antisense strand to SEQ ID NO: 1607479
uagguuggagaucugagcc

SEQ ID NO: 1607481 - RNA, 19 nt, Artificial Sequence
  Description of Artificial Sequence: Synthetic oligonucleotide
  Sense strand starting at position 1598 of SEQ ID NO: 1560548
ccacucuaggcccagauau

SEQ ID NO: 1607482 - RNA, 19 nt, Artificial Sequence
  Description of Artificial Sequence: Synthetic oligonucleotide
  Antisense strand to SEQ ID NO: 1607481
auaucugggccuagagugg

SEQ ID NO: 1607483 - RNA, 19 nt, Artificial Sequence
  Description of Artificial Sequence: Synthetic oligonucleotide
  Sense strand starting at position 2087 of SEQ ID NO: 1560548
ggcucauucuaccuugcau

SEQ ID NO: 1607484 - RNA, 19 nt, Artificial Sequence
  Description of Artificial Sequence: Synthetic oligonucleotide
  Antisense strand to SEQ ID NO: 1607483
augcaagguagaaugagcc

SEQ ID NO: 1607485 - RNA, 19 nt, Artificial Sequence
  Description of Artificial Sequence: Synthetic oligonucleotide
  Sense strand starting at position 3493 of SEQ ID NO: 1560548
uuuggaacucuguggauau

SEQ ID NO: 1607486 - RNA, 19 nt, Artificial Sequence
  Description of Artificial Sequence: Synthetic oligonucleotide
  Antisense strand to SEQ ID NO: 1607485
auauccacagaguuccaaa

SEQ ID NO: 1607487 - RNA, 19 nt, Artificial Sequence
  Description of Artificial Sequence: Synthetic oligonucleotide
  Sense strand starting at position 3572 of SEQ ID NO: 1560548
cggaggagugaccguauau

SEQ ID NO: 1607488 - RNA, 19 nt, Artificial Sequence
  Description of Artificial Sequence: Synthetic oligonucleotide
  Antisense strand to SEQ ID NO: 1607487
auauacggucacuccuccg

SEQ ID NO: 1607489 - RNA, 19 nt, Artificial Sequence
  Description of Artificial Sequence: Synthetic oligonucleotide
  Sense strand starting at position 3700 of SEQ ID NO: 1560548
gucugcagagaguaacaau

SEQ ID NO: 1607490 - RNA, 19 nt, Artificial Sequence
  Description of Artificial Sequence: Synthetic oligonucleotide
  Antisense strand to SEQ ID NO: 1607489
auuguuacucucugcagac

SEQ ID NO: 1607491 - RNA, 19 nt, Artificial Sequence
  Description of Artificial Sequence: Synthetic oligonucleotide
  Sense strand starting at position 3711 of SEQ ID NO: 1560548
guaacaaugucacuuguuc

SEQ ID NO: 1607492 - RNA, 19 nt, Artificial Sequence
  Description of Artificial Sequence: Synthetic oligonucleotide
  Antisense strand to SEQ ID NO: 1607491
gaacaagugacauuguuac

SEQ ID NO: 1607493 - RNA, 19 nt, Artificial Sequence
  Description of Artificial Sequence: Synthetic oligonucleotide
  Sense strand starting at position 3840 of SEQ ID NO: 1560548
gugagaacccgguggagaa

SEQ ID NO: 1607494 - RNA, 19 nt, Artificial Sequence
  Description of Artificial Sequence: Synthetic oligonucleotide
  Antisense strand to SEQ ID NO: 1607493
uucuccaccggguucucac

SEQ ID NO: 1607495 - RNA, 19 nt, Artificial Sequence
  Description of Artificial Sequence: Synthetic oligonucleotide
  Sense strand starting at position 3854 of SEQ ID NO: 1560548
gagaacagaugggauuaua

SEQ ID NO: 1607496 - RNA, 19 nt, Artificial Sequence
  Description of Artificial Sequence: Synthetic oligonucleotide
  Antisense strand to SEQ ID NO: 1607495
uauaaucccaucuguucuc

SEQ ID NO: 1607497 - RNA, 19 nt, Artificial Sequence
  Description of Artificial Sequence: Synthetic oligonucleotide
  Sense strand starting at position 20 of SEQ ID NO: 1560549
uguucuuccugggcuacaa

SEQ ID NO: 1607498 - RNA, 19 nt, Artificial Sequence
  Description of Artificial Sequence: Synthetic oligonucleotide
  Antisense strand to SEQ ID NO: 1607497
uuguagcccaggaagaaca

SEQ ID NO: 1607499 - RNA, 19 nt, Artificial Sequence
  Description of Artificial Sequence: Synthetic oligonucleotide
  Sense strand starting at position 75 of SEQ ID NO: 1560549
ucgggagaaucaguuccau

SEQ ID NO: 1607500 - RNA, 19 nt, Artificial Sequence
  Description of Artificial Sequence: Synthetic oligonucleotide
  Antisense strand to SEQ ID NO: 1607499
auggaacugauucucccga

SEQ ID NO: 1607501 - RNA, 19 nt, Artificial Sequence
  Description of Artificial Sequence: Synthetic oligonucleotide
  Sense strand starting at position 79 of SEQ ID NO: 1560549
gagaaucaguuccauugau

SEQ ID NO: 1607502 - RNA, 19 nt, Artificial Sequence
  Description of Artificial Sequence: Synthetic oligonucleotide
  Antisense strand to SEQ ID NO: 1607501
aucaauggaacugauucuc

SEQ ID NO: 1607503 - RNA, 19 nt, Artificial Sequence
  Description of Artificial Sequence: Synthetic oligonucleotide
  Sense strand starting at position 157 of SEQ ID NO: 1560549
uggaguaucccacgaugcu

SEQ ID NO: 1607504 - RNA, 19 nt, Artificial Sequence
  Description of Artificial Sequence: Synthetic oligonucleotide
  Antisense strand to SEQ ID NO: 1607503
agcaucgugggauacucca

SEQ ID NO: 1607505 - RNA, 19 nt, Artificial Sequence
  Description of Artificial Sequence: Synthetic oligonucleotide
  Sense strand starting at position 166 of SEQ ID NO: 1560549
ccacgaugcugcucuaauc

SEQ ID NO: 1607506 - RNA, 19 nt, Artificial Sequence
  Description of Artificial Sequence: Synthetic oligonucleotide
  Antisense strand to SEQ ID NO: 1607505
gauuagagcagcaucgugg

SEQ ID NO: 1607507 - RNA, 19 nt, Artificial Sequence
  Description of Artificial Sequence: Synthetic oligonucleotide
  Sense strand starting at position 350 of SEQ ID NO: 1560549
uuacaauguggccaucgau

SEQ ID NO: 1607508 - RNA, 19 nt, Artificial Sequence
  Description of Artificial Sequence: Synthetic oligonucleotide
  Antisense strand to SEQ ID NO: 1607507
aucgauggccacauuguaa

SEQ ID NO: 1607509 - RNA, 19 nt, Artificial Sequence
  Description of Artificial Sequence: Synthetic oligonucleotide
  Sense strand starting at position 973 of SEQ ID NO: 1560549
ggcgucucccuacaacaaa

SEQ ID NO: 1607510 - RNA, 19 nt, Artificial Sequence
  Description of Artificial Sequence: Synthetic oligonucleotide
  Antisense strand to SEQ ID NO: 1607509
uuuguuguagggagacgcc

SEQ ID NO: 1607511 - RNA, 19 nt, Artificial Sequence
  Description of Artificial Sequence: Synthetic oligonucleotide
  Sense strand starting at position 1025 of SEQ ID NO: 1560549
agggacucuuacuagauuu

SEQ ID NO: 1607512 - RNA, 19 nt, Artificial Sequence
  Description of Artificial Sequence: Synthetic oligonucleotide
  Antisense strand to SEQ ID NO: 1607511
aaaucuaguaagagucccu

SEQ ID NO: 1607513 - RNA, 19 nt, Artificial Sequence
  Description of Artificial Sequence: Synthetic oligonucleotide
  Sense strand starting at position 1043 of SEQ ID NO: 1560549
uuaauacugcaagauuagu

SEQ ID NO: 1607514 - RNA, 19 nt, Artificial Sequence
  Description of Artificial Sequence: Synthetic oligonucleotide
  Antisense strand to SEQ ID NO: 1607513
acuaaucuugcaguauuaa

SEQ ID NO: 1607515 - RNA, 19 nt, Artificial Sequence
  Description of Artificial Sequence: Synthetic oligonucleotide
  Sense strand starting at position 1096 of SEQ ID NO: 1560549
ggguaugaccuuugugaau

SEQ ID NO: 1607516 - RNA, 19 nt, Artificial Sequence
  Description of Artificial Sequence: Synthetic oligonucleotide
  Antisense strand to SEQ ID NO: 1607515
auucacaaaggucauaccc

SEQ ID NO: 1607517 - RNA, 19 nt, Artificial Sequence
  Description of Artificial Sequence: Synthetic oligonucleotide
  Sense strand starting at position 1102 of SEQ ID NO: 1560549
gaccuuugugaauggaaua

SEQ ID NO: 1607518 - RNA, 19 nt, Artificial Sequence
  Description of Artificial Sequence: Synthetic oligonucleotide
  Antisense strand to SEQ ID NO: 1607517
uauuccauucacaaagguc

SEQ ID NO: 1607519 - RNA, 19 nt, Artificial Sequence
  Description of Artificial Sequence: Synthetic oligonucleotide
  Sense strand starting at position 1121 of SEQ ID NO: 1560549
uuagcuaaugccugaacca

SEQ ID NO: 1607520 - RNA, 19 nt, Artificial Sequence
  Description of Artificial Sequence: Synthetic oligonucleotide
  Antisense strand to SEQ ID NO: 1607519
ugguucaggcauuagcuaa

SEQ ID NO: 1607521 - RNA, 19 nt, Artificial Sequence
  Description of Artificial Sequence: Synthetic oligonucleotide
  Sense strand starting at position 1275 of SEQ ID NO: 1560549
cccucuuguccucagagga

SEQ ID NO: 1607522 - RNA, 19 nt, Artificial Sequence
  Description of Artificial Sequence: Synthetic oligonucleotide
  Antisense strand to SEQ ID NO: 1607521
uccucugaggacaagaggg

SEQ ID NO: 1607523 - RNA, 19 nt, Artificial Sequence
  Description of Artificial Sequence: Synthetic oligonucleotide
  Sense strand starting at position 2083 of SEQ ID NO: 1560549
aggcuucuucuacgucaua

SEQ ID NO: 1607524 - RNA, 19 nt, Artificial Sequence
  Description of Artificial Sequence: Synthetic oligonucleotide
  Antisense strand to SEQ ID NO: 1607523
uaugacguagaagaagccu

SEQ ID NO: 1607525 - RNA, 19 nt, Artificial Sequence
  Description of Artificial Sequence: Synthetic oligonucleotide
  Sense strand starting at position 2084 of SEQ ID NO: 1560549
ggcuucuucuacgucauau

SEQ ID NO: 1607526 - RNA, 19 nt, Artificial Sequence
  Description of Artificial Sequence: Synthetic oligonucleotide
  Antisense strand to SEQ ID NO: 1607525
auaugacguagaagaagcc

SEQ ID NO: 1607527 - RNA, 19 nt, Artificial Sequence
  Description of Artificial Sequence: Synthetic oligonucleotide
  Sense strand starting at position 2086 of SEQ ID NO: 1560549
cuucuucuacgucauauga

SEQ ID NO: 1607528 - RNA, 19 nt, Artificial Sequence
  Description of Artificial Sequence: Synthetic oligonucleotide
  Antisense strand to SEQ ID NO: 1607527
ucauaugacguagaagaag

SEQ ID NO: 1607529 - RNA, 19 nt, Artificial Sequence
  Description of Artificial Sequence: Synthetic oligonucleotide
  Sense strand starting at position 2090 of SEQ ID NO: 1560549
uucuacgucauaugagguu

SEQ ID NO: 1607530 - RNA, 19 nt, Artificial Sequence
  Description of Artificial Sequence: Synthetic oligonucleotide
  Antisense strand to SEQ ID NO: 1607529
aaccucauaugacguagaa

SEQ ID NO: 1607531 - RNA, 19 nt, Artificial Sequence
  Description of Artificial Sequence: Synthetic oligonucleotide
  Sense strand starting at position 2156 of SEQ ID NO: 1560549
agacuagacuugucacuuc

SEQ ID NO: 1607532 - RNA, 19 nt, Artificial Sequence
  Description of Artificial Sequence: Synthetic oligonucleotide
  Antisense strand to SEQ ID NO: 1607531
gaagugacaagucuagucu

SEQ ID NO: 1607533 - RNA, 19 nt, Artificial Sequence
  Description of Artificial Sequence: Synthetic oligonucleotide
  Sense strand starting at position 2280 of SEQ ID NO: 1560549
uuguuucuaccugagauuc

SEQ ID NO: 1607534 - RNA, 19 nt, Artificial Sequence
  Description of Artificial Sequence: Synthetic oligonucleotide
  Antisense strand to SEQ ID NO: 1607533
gaaucucagguagaaacaa

SEQ ID NO: 1607535 - RNA, 19 nt, Artificial Sequence
  Description of Artificial Sequence: Synthetic oligonucleotide
  Sense strand starting at position 2429 of SEQ ID NO: 1560549
ugauuuaaaucccaguaga

SEQ ID NO: 1607536 - RNA, 19 nt, Artificial Sequence
  Description of Artificial Sequence: Synthetic oligonucleotide
  Antisense strand to SEQ ID NO: 1607535
ucuacugggauuuaaauca

SEQ ID NO: 1607537 - RNA, 19 nt, Artificial Sequence
  Description of Artificial Sequence: Synthetic oligonucleotide
  Sense strand starting at position 2452 of SEQ ID NO: 1560549
acuauauaguuauuucgca

SEQ ID NO: 1607538 - RNA, 19 nt, Artificial Sequence
  Description of Artificial Sequence: Synthetic oligonucleotide
  Antisense strand to SEQ ID NO: 1607537
ugcgaaauaacuauauagu

SEQ ID NO: 1607539 - RNA, 19 nt, Artificial Sequence
  Description of Artificial Sequence: Synthetic oligonucleotide
  Sense strand starting at position 2453 of SEQ ID NO: 1560549
cuauauaguuauuucgcau

SEQ ID NO: 1607540 - RNA, 19 nt, Artificial Sequence
  Description of Artificial Sequence: Synthetic oligonucleotide
  Antisense strand to SEQ ID NO: 1607539
augcgaaauaacuauauag

SEQ ID NO: 1607541 - RNA, 19 nt, Artificial Sequence
  Description of Artificial Sequence: Synthetic oligonucleotide
  Sense strand starting at position 2457 of SEQ ID NO: 1560549
auaguuauuucgcaucaua

SEQ ID NO: 1607542 - RNA, 19 nt, Artificial Sequence
  Description of Artificial Sequence: Synthetic oligonucleotide
  Antisense strand to SEQ ID NO: 1607541
uaugaugcgaaauaacuau

SEQ ID NO: 1607543 - RNA, 19 nt, Artificial Sequence
  Description of Artificial Sequence: Synthetic oligonucleotide
  Sense strand starting at position 2516 of SEQ ID NO: 1560549
aggucuggucguguuaucu

SEQ ID NO: 1607544 - RNA, 19 nt, Artificial Sequence
  Description of Artificial Sequence: Synthetic oligonucleotide
  Antisense strand to SEQ ID NO: 1607543
agauaacacgaccagaccu

SEQ ID NO: 1607545 - RNA, 19 nt, Artificial Sequence
  Description of Artificial Sequence: Synthetic oligonucleotide
  Sense strand starting at position 2520 of SEQ ID NO: 1560549
cuggucguguuaucuagaa

SEQ ID NO: 1607546 - RNA, 19 nt, Artificial Sequence
  Description of Artificial Sequence: Synthetic oligonucleotide
  Antisense strand to SEQ ID NO: 1607545
uucuagauaacacgaccag

SEQ ID NO: 1607547 - RNA, 19 nt, Artificial Sequence
  Description of Artificial Sequence: Synthetic oligonucleotide
  Sense strand starting at position 2522 of SEQ ID NO: 1560549
ggucguguuaucuagaauu

SEQ ID NO: 1607548 - RNA, 19 nt, Artificial Sequence
  Description of Artificial Sequence: Synthetic oligonucleotide
  Antisense strand to SEQ ID NO: 1607547
aauucuagauaacacgacc

SEQ ID NO: 1607549 - RNA, 19 nt, Artificial Sequence
  Description of Artificial Sequence: Synthetic oligonucleotide
  Sense strand starting at position 2698 of SEQ ID NO: 1560549
acuggaauauugcaauaac

SEQ ID NO: 1607550 - RNA, 19 nt, Artificial Sequence
  Description of Artificial Sequence: Synthetic oligonucleotide
  Antisense strand to SEQ ID NO: 1607549
guuauugcaauauuccagu

SEQ ID NO: 1607551 - RNA, 19 nt, Artificial Sequence
  Description of Artificial Sequence: Synthetic oligonucleotide
  Sense strand starting at position 2709 of SEQ ID NO: 1560549
gcaauaacugaagguugaa

SEQ ID NO: 1607552 - RNA, 19 nt, Artificial Sequence
  Description of Artificial Sequence: Synthetic oligonucleotide
  Antisense strand to SEQ ID NO: 1607551
uucaaccuucaguuauugc

SEQ ID NO: 1607553 - RNA, 19 nt, Artificial Sequence
  Description of Artificial Sequence: Synthetic oligonucleotide
  Sense strand starting at position 2774 of SEQ ID NO: 1560549
acaccuaucuuucuggagu

SEQ ID NO: 1607554 - RNA, 19 nt, Artificial Sequence
  Description of Artificial Sequence: Synthetic oligonucleotide
  Antisense strand to SEQ ID NO: 1607553
acuccagaaagauaggugu

SEQ ID NO: 1607555 - RNA, 19 nt, Artificial Sequence
  Description of Artificial Sequence: Synthetic oligonucleotide
  Sense strand starting at position 2782 of SEQ ID NO: 1560549
cuuucuggaguuuguaaga

SEQ ID NO: 1607556 - RNA, 19 nt, Artificial Sequence
  Description of Artificial Sequence: Synthetic oligonucleotide
  Antisense strand to SEQ ID NO: 1607555
ucuuacaaacuccagaaag

SEQ ID NO: 1607557 - RNA, 19 nt, Artificial Sequence
  Description of Artificial Sequence: Synthetic oligonucleotide
  Sense strand starting at position 2900 of SEQ ID NO: 1560549
cuggcaucacccugauacu

SEQ ID NO: 1607558 - RNA, 19 nt, Artificial Sequence
  Description of Artificial Sequence: Synthetic oligonucleotide
  Antisense strand to SEQ ID NO: 1607557
aguaucagggugaugccag

SEQ ID NO: 1607559 - RNA, 19 nt, Artificial Sequence
  Description of Artificial Sequence: Synthetic oligonucleotide
  Sense strand starting at position 2901 of SEQ ID NO: 1560549
uggcaucacccugauacua

SEQ ID NO: 1607560 - RNA, 19 nt, Artificial Sequence
  Description of Artificial Sequence: Synthetic oligonucleotide
  Antisense strand to SEQ ID NO: 1607559
uaguaucagggugaugcca

SEQ ID NO: 1607561 - RNA, 19 nt, Artificial Sequence
  Description of Artificial Sequence: Synthetic oligonucleotide
  Sense strand starting at position 3070 of SEQ ID NO: 1560549
gugcaagguugguugaaca

SEQ ID NO: 1607562 - RNA, 19 nt, Artificial Sequence
  Description of Artificial Sequence: Synthetic oligonucleotide
  Antisense strand to SEQ ID NO: 1607561
uguucaaccaaccuugcac

SEQ ID NO: 1607563 - RNA, 19 nt, Artificial Sequence
  Description of Artificial Sequence: Synthetic oligonucleotide
  Sense strand starting at position 3401 of SEQ ID NO: 1560549
gagaaagaauuauaaggca

SEQ ID NO: 1607564 - RNA, 19 nt, Artificial Sequence
  Description of Artificial Sequence: Synthetic oligonucleotide
  Antisense strand to SEQ ID NO: 1607563
ugccuuauaauucuuucuc

SEQ ID NO: 1607565 - RNA, 19 nt, Artificial Sequence
  Description of Artificial Sequence: Synthetic oligonucleotide
  Sense strand starting at position 3457 of SEQ ID NO: 1560549
auuaccucuguuugaagau

SEQ ID NO: 1607566 - RNA, 19 nt, Artificial Sequence
  Description of Artificial Sequence: Synthetic oligonucleotide
  Antisense strand to SEQ ID NO: 1607565
aucuucaaacagagguaau

SEQ ID NO: 1607567 - RNA, 19 nt, Artificial Sequence
  Description of Artificial Sequence: Synthetic oligonucleotide
  Sense strand starting at position 3463 of SEQ ID NO: 1560549
ucuguuugaagaugagaua

SEQ ID NO: 1607568 - RNA, 19 nt, Artificial Sequence
  Description of Artificial Sequence: Synthetic oligonucleotide
  Antisense strand to SEQ ID NO: 1607567
uaucucaucuucaaacaga

SEQ ID NO: 1607569 - RNA, 19 nt, Artificial Sequence
  Description of Artificial Sequence: Synthetic oligonucleotide
  Sense strand starting at position 3466 of SEQ ID NO: 1560549
guuugaagaugagauaauu

SEQ ID NO: 1607570 - RNA, 19 nt, Artificial Sequence
  Description of Artificial Sequence: Synthetic oligonucleotide
  Antisense strand to SEQ ID NO: 1607569
aauuaucucaucuucaaac

SEQ ID NO: 1607571 - RNA, 19 nt, Artificial Sequence
  Description of Artificial Sequence: Synthetic oligonucleotide
  Sense strand starting at position 3560 of SEQ ID NO: 1560549
gcagaaagucaauguacag

SEQ ID NO: 1607572 - RNA, 19 nt, Artificial Sequence
  Description of Artificial Sequence: Synthetic oligonucleotide
  Antisense strand to SEQ ID NO: 1607571
cuguacauugacuuucugc

SEQ ID NO: 1607573 - RNA, 19 nt, Artificial Sequence
  Description of Artificial Sequence: Synthetic oligonucleotide
  Sense strand starting at position 3589 of SEQ ID NO: 1560549
gugucucagccugaaaucu

SEQ ID NO: 1607574 - RNA, 19 nt, Artificial Sequence
  Description of Artificial Sequence: Synthetic oligonucleotide
  Antisense strand to SEQ ID NO: 1607573
agauuucaggcugagacac

SEQ ID NO: 1607575 - RNA, 19 nt, Artificial Sequence
  Description of Artificial Sequence: Synthetic oligonucleotide
  Sense strand starting at position 3903 of SEQ ID NO: 1560549
ugugguguccaucaugaug

SEQ ID NO: 1607576 - RNA, 19 nt, Artificial Sequence
  Description of Artificial Sequence: Synthetic oligonucleotide
  Antisense strand to SEQ ID NO: 1607575
caucaugauggacaccaca

SEQ ID NO: 1607577 - RNA, 19 nt, Artificial Sequence
  Description of Artificial Sequence: Synthetic oligonucleotide
  Sense strand starting at position 68 of SEQ ID NO: 1560550
cgaagaaucacauguccug

SEQ ID NO: 1607578 - RNA, 19 nt, Artificial Sequence
  Description of Artificial Sequence: Synthetic oligonucleotide
  Antisense strand to SEQ ID NO: 1607577
caggacaugugauucuucg

SEQ ID NO: 1607579 - RNA, 19 nt, Artificial Sequence
  Description of Artificial Sequence: Synthetic oligonucleotide
  Sense strand starting at position 191 of SEQ ID NO: 1560550
cucccugugcucugaagau

SEQ ID NO: 1607580 - RNA, 19 nt, Artificial Sequence
  Description of Artificial Sequence: Synthetic oligonucleotide
  Antisense strand to SEQ ID NO: 1607579
aucuucagagcacagggag

SEQ ID NO: 1607581 - RNA, 19 nt, Artificial Sequence
  Description of Artificial Sequence: Synthetic oligonucleotide
  Sense strand starting at position 203 of SEQ ID NO: 1560550
ugaagauucuccucgcuuu

SEQ ID NO: 1607582 - RNA, 19 nt, Artificial Sequence
  Description of Artificial Sequence: Synthetic oligonucleotide
  Antisense strand to SEQ ID NO: 1607581
aaagcgaggagaaucuuca

SEQ ID NO: 1607583 - RNA, 19 nt, Artificial Sequence
  Description of Artificial Sequence: Synthetic oligonucleotide
  Sense strand starting at position 332 of SEQ ID NO: 1560550
gcaagugcugaguaagaga

SEQ ID NO: 1607584 - RNA, 19 nt, Artificial Sequence
  Description of Artificial Sequence: Synthetic oligonucleotide
  Antisense strand to SEQ ID NO: 1607583
ucucuuacucagcacuugc

SEQ ID NO: 1607585 - RNA, 19 nt, Artificial Sequence
  Description of Artificial Sequence: Synthetic oligonucleotide
  Sense strand starting at position 343 of SEQ ID NO: 1560550
guaagagacuccuacuaga

SEQ ID NO: 1607586 - RNA, 19 nt, Artificial Sequence
  Description of Artificial Sequence: Synthetic oligonucleotide
  Antisense strand to SEQ ID NO: 1607585
ucuaguaggagucucuuac

SEQ ID NO: 1607587 - RNA, 19 nt, Artificial Sequence
  Description of Artificial Sequence: Synthetic oligonucleotide
  Sense strand starting at position 415 of SEQ ID NO: 1560550
gagggcaugucuuugagaa

SEQ ID NO: 1607588 - RNA, 19 nt, Artificial Sequence
  Description of Artificial Sequence: Synthetic oligonucleotide
  Antisense strand to SEQ ID NO: 1607587
uucucaaagacaugcccuc

SEQ ID NO: 1607589 - RNA, 19 nt, Artificial Sequence
  Description of Artificial Sequence: Synthetic oligonucleotide
  Sense strand starting at position 416 of SEQ ID NO: 1560550
agggcaugucuuugagaau

SEQ ID NO: 1607590 - RNA, 19 nt, Artificial Sequence
  Description of Artificial Sequence: Synthetic oligonucleotide
  Antisense strand to SEQ ID NO: 1607589
auucucaaagacaugcccu

SEQ ID NO: 1607591 - RNA, 19 nt, Artificial Sequence
  Description of Artificial Sequence: Synthetic oligonucleotide
  Sense strand starting at position 422 of SEQ ID NO: 1560550
ugucuuugagaauggaaua

SEQ ID NO: 1607592 - RNA, 19 nt, Artificial Sequence
  Description of Artificial Sequence: Synthetic oligonucleotide
  Antisense strand to SEQ ID NO: 1607591
uauuccauucucaaagaca

SEQ ID NO: 1607593 - RNA, 19 nt, Artificial Sequence
  Description of Artificial Sequence: Synthetic oligonucleotide
  Sense strand starting at position 423 of SEQ ID NO: 1560550
gucuuugagaauggaauau

SEQ ID NO: 1607594 - RNA, 19 nt, Artificial Sequence
  Description of Artificial Sequence: Synthetic oligonucleotide
  Antisense strand to SEQ ID NO: 1607593
auauuccauucucaaagac

SEQ ID NO: 1607595 - RNA, 19 nt, Artificial Sequence
  Description of Artificial Sequence: Synthetic oligonucleotide
  Sense strand starting at position 441 of SEQ ID NO: 1560550
ucagcagaugccugaauga

SEQ ID NO: 1607596 - RNA, 19 nt, Artificial Sequence
  Description of Artificial Sequence: Synthetic oligonucleotide
  Antisense strand to SEQ ID NO: 1607595
ucauucaggcaucugcuga

SEQ ID NO: 1607597 - RNA, 19 nt, Artificial Sequence
  Description of Artificial Sequence: Synthetic oligonucleotide
  Sense strand starting at position 522 of SEQ ID NO: 1560550
accucuucugguggaguga

SEQ ID NO: 1607598 - RNA, 19 nt, Artificial Sequence
  Description of Artificial Sequence: Synthetic oligonucleotide
  Antisense strand to SEQ ID NO: 1607597
ucacuccaccagaagaggu

SEQ ID NO: 1607599 - RNA, 19 nt, Artificial Sequence
  Description of Artificial Sequence: Synthetic oligonucleotide
  Sense strand starting at position 574 of SEQ ID NO: 1560550
aacgcugaagugugaguaa

SEQ ID NO: 1607600 - RNA, 19 nt, Artificial Sequence
  Description of Artificial Sequence: Synthetic oligonucleotide
  Antisense strand to SEQ ID NO: 1607599
uuacucacacuucagcguu

SEQ ID NO: 1607601 - RNA, 19 nt, Artificial Sequence
  Description of Artificial Sequence: Synthetic oligonucleotide
  Sense strand starting at position 835 of SEQ ID NO: 1560550
cacccuaagguuuggagaa

SEQ ID NO: 1607602 - RNA, 19 nt, Artificial Sequence
  Description of Artificial Sequence: Synthetic oligonucleotide
  Antisense strand to SEQ ID NO: 1607601
uucuccaaaccuuagggug

SEQ ID NO: 1607603 - RNA, 19 nt, Artificial Sequence
  Description of Artificial Sequence: Synthetic oligonucleotide
  Sense strand starting at position 905 of SEQ ID NO: 1560550
gaaagaucaugauggacga

SEQ ID NO: 1607604 - RNA, 19 nt, Artificial Sequence
  Description of Artificial Sequence: Synthetic oligonucleotide
  Antisense strand to SEQ ID NO: 1607603
ucguccaucaugaucuuuc

SEQ ID NO: 1607605 - RNA, 19 nt, Artificial Sequence
  Description of Artificial Sequence: Synthetic oligonucleotide
  Sense strand starting at position 968 of SEQ ID NO: 1560550
cugugagucuugguaggca

SEQ ID NO: 1607606 - RNA, 19 nt, Artificial Sequence
  Description of Artificial Sequence: Synthetic oligonucleotide
  Antisense strand to SEQ ID NO: 1607605
ugccuaccaagacucacag

SEQ ID NO: 1607607 - RNA, 19 nt, Artificial Sequence
  Description of Artificial Sequence: Synthetic oligonucleotide
  Sense strand starting at position 1190 of SEQ ID NO: 1560550
ggccgauauuuccaucaua

SEQ ID NO: 1607608 - RNA, 19 nt, Artificial Sequence
  Description of Artificial Sequence: Synthetic oligonucleotide
  Antisense strand to SEQ ID NO: 1607607
uaugauggaaauaucggcc

SEQ ID NO: 1607609 - RNA, 19 nt, Artificial Sequence
  Description of Artificial Sequence: Synthetic oligonucleotide
  Sense strand starting at position 1247 of SEQ ID NO: 1560550
ggccaagaucuccacugua

SEQ ID NO: 1607610 - RNA, 19 nt, Artificial Sequence
  Description of Artificial Sequence: Synthetic oligonucleotide
  Antisense strand to SEQ ID NO: 1607609
uacaguggagaucuuggcc

SEQ ID NO: 1607611 - RNA, 19 nt, Artificial Sequence
  Description of Artificial Sequence: Synthetic oligonucleotide
  Sense strand starting at position 1304 of SEQ ID NO: 1560550
ggcucagaucuccaaccua

SEQ ID NO: 1607612 - RNA, 19 nt, Artificial Sequence
  Description of Artificial Sequence: Synthetic oligonucleotide
  Antisense strand to SEQ ID NO: 1607611
uagguuggagaucugagcc

SEQ ID NO: 1607613 - RNA, 19 nt, Artificial Sequence
  Description of Artificial Sequence: Synthetic oligonucleotide
  Sense strand starting at position 1622 of SEQ ID NO: 1560550
ccacucuaggcccagauau

SEQ ID NO: 1607614 - RNA, 19 nt, Artificial Sequence
  Description of Artificial Sequence: Synthetic oligonucleotide
  Antisense strand to SEQ ID NO: 1607613
auaucugggccuagagugg

SEQ ID NO: 1607615 - RNA, 19 nt, Artificial Sequence
  Description of Artificial Sequence: Synthetic oligonucleotide
  Sense strand starting at position 2111 of SEQ ID NO: 1560550
ggcucauucuaccuugcau

SEQ ID NO: 1607616 - RNA, 19 nt, Artificial Sequence
  Description of Artificial Sequence: Synthetic oligonucleotide
  Antisense strand to SEQ ID NO: 1607615
augcaagguagaaugagcc

SEQ ID NO: 1607617 - RNA, 19 nt, Artificial Sequence
  Description of Artificial Sequence: Synthetic oligonucleotide
  Sense strand starting at position 2381 of SEQ ID NO: 1560550
cagagucauugugacuaau

SEQ ID NO: 1607618 - RNA, 19 nt, Artificial Sequence
  Description of Artificial Sequence: Synthetic oligonucleotide
  Antisense strand to SEQ ID NO: 1607617
auuagucacaaugacucug

SEQ ID NO: 1607619 - RNA, 19 nt, Artificial Sequence
  Description of Artificial Sequence: Synthetic oligonucleotide
  Sense strand starting at position 2383 of SEQ ID NO: 1560550
gagucauugugacuaauaa

SEQ ID NO: 1607620 - RNA, 19 nt, Artificial Sequence
  Description of Artificial Sequence: Synthetic oligonucleotide
  Antisense strand to SEQ ID NO: 1607619
uuauuagucacaaugacuc

SEQ ID NO: 1607621 - RNA, 19 nt, Artificial Sequence
  Description of Artificial Sequence: Synthetic oligonucleotide
  Sense strand starting at position 2418 of SEQ ID NO: 1560550
augcuuguauuucuaguau

SEQ ID NO: 1607622 - RNA, 19 nt, Artificial Sequence
  Description of Artificial Sequence: Synthetic oligonucleotide
  Antisense strand to SEQ ID NO: 1607621
auacuagaaauacaagcau

SEQ ID NO: 1607623 - RNA, 19 nt, Artificial Sequence
  Description of Artificial Sequence: Synthetic oligonucleotide
  Sense strand starting at position 2471 of SEQ ID NO: 1560550
agggaaggauuaugcaauu

SEQ ID NO: 1607624 - RNA, 19 nt, Artificial Sequence
  Description of Artificial Sequence: Synthetic oligonucleotide
  Antisense strand to SEQ ID NO: 1607623
aauugcauaauccuucccu

SEQ ID NO: 1607625 - RNA, 19 nt, Artificial Sequence
  Description of Artificial Sequence: Synthetic oligonucleotide
  Sense strand starting at position 2664 of SEQ ID NO: 1560550
guaacauaaugcuauagaa

SEQ ID NO: 1607626 - RNA, 19 nt, Artificial Sequence
  Description of Artificial Sequence: Synthetic oligonucleotide
  Antisense strand to SEQ ID NO: 1607625
uucuauagcauuauguuac

SEQ ID NO: 1607627 - RNA, 19 nt, Artificial Sequence
  Description of Artificial Sequence: Synthetic oligonucleotide
  Sense strand starting at position 2985 of SEQ ID NO: 1560550
gagggcucuggcuacuaaa

SEQ ID NO: 1607628 - RNA, 19 nt, Artificial Sequence
  Description of Artificial Sequence: Synthetic oligonucleotide
  Antisense strand to SEQ ID NO: 1607627
uuuaguagccagagcccuc

SEQ ID NO: 1607629 - RNA, 19 nt, Artificial Sequence
  Description of Artificial Sequence: Synthetic oligonucleotide
  Sense strand starting at position 2988 of SEQ ID NO: 1560550
ggcucuggcuacuaaauuu

SEQ ID NO: 1607630 - RNA, 19 nt, Artificial Sequence
  Description of Artificial Sequence: Synthetic oligonucleotide
  Antisense strand to SEQ ID NO: 1607629
aaauuuaguagccagagcc

SEQ ID NO: 1607631 - RNA, 19 nt, Artificial Sequence
  Description of Artificial Sequence: Synthetic oligonucleotide
  Sense strand starting at position 3012 of SEQ ID NO: 1560550
guucuauaaggcuacauaa

SEQ ID NO: 1607632 - RNA, 19 nt, Artificial Sequence
  Description of Artificial Sequence: Synthetic oligonucleotide
  Antisense strand to SEQ ID NO: 1607631
uuauguagccuuauagaac

SEQ ID NO: 1607633 - RNA, 19 nt, Artificial Sequence
  Description of Artificial Sequence: Synthetic oligonucleotide
  Sense strand starting at position 3135 of SEQ ID NO: 1560550
ugugguuuaagguggcaua

SEQ ID NO: 1607634 - RNA, 19 nt, Artificial Sequence
  Description of Artificial Sequence: Synthetic oligonucleotide
  Antisense strand to SEQ ID NO: 1607633
uaugccaccuuaaaccaca

SEQ ID NO: 1607635 - RNA, 19 nt, Artificial Sequence
  Description of Artificial Sequence: Synthetic oligonucleotide
  Sense strand starting at position 3148 of SEQ ID NO: 1560550
ggcauagaaugucuucuca

SEQ ID NO: 1607636 - RNA, 19 nt, Artificial Sequence
  Description of Artificial Sequence: Synthetic oligonucleotide
  Antisense strand to SEQ ID NO: 1607635
ugagaagacauucuaugcc

SEQ ID NO: 1607637 - RNA, 19 nt, Artificial Sequence
  Description of Artificial Sequence: Synthetic oligonucleotide
  Sense strand starting at position 3293 of SEQ ID NO: 1560550
gucauauacggucauccuu

SEQ ID NO: 1607638 - RNA, 19 nt, Artificial Sequence
  Description of Artificial Sequence: Synthetic oligonucleotide
  Antisense strand to SEQ ID NO: 1607637
aaggaugaccguauaugac

SEQ ID NO: 1607639 - RNA, 19 nt, Artificial Sequence
  Description of Artificial Sequence: Synthetic oligonucleotide
  Sense strand starting at position 3310 of SEQ ID NO: 1560550
uucacuauucgugggugau

SEQ ID NO: 1607640 - RNA, 19 nt, Artificial Sequence
  Description of Artificial Sequence: Synthetic oligonucleotide
  Antisense strand to SEQ ID NO: 1607639
aucacccacgaauagugaa

SEQ ID NO: 1607641 - RNA, 19 nt, Artificial Sequence
  Description of Artificial Sequence: Synthetic oligonucleotide
  Sense strand starting at position 3311 of SEQ ID NO: 1560550
ucacuauucgugggugauu

SEQ ID NO: 1607642 - RNA, 19 nt, Artificial Sequence
  Description of Artificial Sequence: Synthetic oligonucleotide
  Antisense strand to SEQ ID NO: 1607641
aaucacccacgaauaguga

SEQ ID NO: 1607643 - RNA, 19 nt, Artificial Sequence
  Description of Artificial Sequence: Synthetic oligonucleotide
  Sense strand starting at position 3517 of SEQ ID NO: 1560550
uuuggaacucuguggauau

SEQ ID NO: 1607644 - RNA, 19 nt, Artificial Sequence
  Description of Artificial Sequence: Synthetic oligonucleotide
  Antisense strand to SEQ ID NO: 1607643
auauccacagaguuccaaa

SEQ ID NO: 1607645 - RNA, 19 nt, Artificial Sequence
  Description of Artificial Sequence: Synthetic oligonucleotide
  Sense strand starting at position 3596 of SEQ ID NO: 1560550
cggaggagugaccguauau

SEQ ID NO: 1607646 - RNA, 19 nt, Artificial Sequence
  Description of Artificial Sequence: Synthetic oligonucleotide
  Antisense strand to SEQ ID NO: 1607645
auauacggucacuccuccg

SEQ ID NO: 1607647 - RNA, 19 nt, Artificial Sequence
  Description of Artificial Sequence: Synthetic oligonucleotide
  Sense strand starting at position 3724 of SEQ ID NO: 1560550
gucugcagagaguaacaau

SEQ ID NO: 1607648 - RNA, 19 nt, Artificial Sequence
  Description of Artificial Sequence: Synthetic oligonucleotide
  Antisense strand to SEQ ID NO: 1607647
auuguuacucucugcagac

SEQ ID NO: 1607649 - RNA, 19 nt, Artificial Sequence
  Description of Artificial Sequence: Synthetic oligonucleotide
  Sense strand starting at position 3735 of SEQ ID NO: 1560550
guaacaaugucacuuguuc

SEQ ID NO: 1607650 - RNA, 19 nt, Artificial Sequence
  Description of Artificial Sequence: Synthetic oligonucleotide
  Antisense strand to SEQ ID NO: 1607649
gaacaagugacauuguuac

SEQ ID NO: 1607651 - RNA, 19 nt, Artificial Sequence
  Description of Artificial Sequence: Synthetic oligonucleotide
  Sense strand starting at position 3864 of SEQ ID NO: 1560550
gugagaacccgguggagaa

SEQ ID NO: 1607652 - RNA, 19 nt, Artificial Sequence
  Description of Artificial Sequence: Synthetic oligonucleotide
  Antisense strand to SEQ ID NO: 1607651
uucuccaccggguucucac

SEQ ID NO: 1607653 - RNA, 19 nt, Artificial Sequence
  Description of Artificial Sequence: Synthetic oligonucleotide
  Sense strand starting at position 3878 of SEQ ID NO: 1560550
gagaacagaugggauuaua

SEQ ID NO: 1607654 - RNA, 19 nt, Artificial Sequence
  Description of Artificial Sequence: Synthetic oligonucleotide
  Antisense strand to SEQ ID NO: 1607653
uauaaucccaucuguucuc

SEQ ID NO: 1607655 - RNA, 19 nt, Artificial Sequence
  Description of Artificial Sequence: Synthetic oligonucleotide
  Sense strand starting at position 3886 of SEQ ID NO: 1560550
augggauuauauggacaug

SEQ ID NO: 1607656 - RNA, 19 nt, Artificial Sequence
  Description of Artificial Sequence: Synthetic oligonucleotide
  Antisense strand to SEQ ID NO: 1607655
cauguccauauaaucccau

SEQ ID NO: 1607657 - RNA, 19 nt, Artificial Sequence
  Description of Artificial Sequence: Synthetic oligonucleotide
  Sense strand starting at position 76 of SEQ ID NO: 1560551
aaggcuguuccagaauauu

SEQ ID NO: 1607658 - RNA, 19 nt, Artificial Sequence
  Description of Artificial Sequence: Synthetic oligonucleotide
  Antisense strand to SEQ ID NO: 1607657
aauauucuggaacagccuu

SEQ ID NO: 1607659 - RNA, 19 nt, Artificial Sequence
  Description of Artificial Sequence: Synthetic oligonucleotide
  Sense strand starting at position 173 of SEQ ID NO: 1560551
cgaagaaugacauguccua

SEQ ID NO: 1607660 - RNA, 19 nt, Artificial Sequence
  Description of Artificial Sequence: Synthetic oligonucleotide
  Antisense strand to SEQ ID NO: 1607659
uaggacaugucauucuucg

SEQ ID NO: 1607661 - RNA, 19 nt, Artificial Sequence
  Description of Artificial Sequence: Synthetic oligonucleotide
  Sense strand starting at position 308 of SEQ ID NO: 1560551
agaagauucuccucgcuuu

SEQ ID NO: 1607662 - RNA, 19 nt, Artificial Sequence
  Description of Artificial Sequence: Synthetic oligonucleotide
  Antisense strand to SEQ ID NO: 1607661
aaagcgaggagaaucuucu

SEQ ID NO: 1607663 - RNA, 19 nt, Artificial Sequence
  Description of Artificial Sequence: Synthetic oligonucleotide
  Sense strand starting at position 397 of SEQ ID NO: 1560551
ggugucucccuacaacaaa

SEQ ID NO: 1607664 - RNA, 19 nt, Artificial Sequence
  Description of Artificial Sequence: Synthetic oligonucleotide
  Antisense strand to SEQ ID NO: 1607663
uuuguuguagggagacacc

SEQ ID NO: 1607665 - RNA, 19 nt, Artificial Sequence
  Description of Artificial Sequence: Synthetic oligonucleotide
  Sense strand starting at position 433 of SEQ ID NO: 1560551
uugagcaagugcugaguaa

SEQ ID NO: 1607666 - RNA, 19 nt, Artificial Sequence
  Description of Artificial Sequence: Synthetic oligonucleotide
  Antisense strand to SEQ ID NO: 1607665
uuacucagcacuugcucaa

SEQ ID NO: 1607667 - RNA, 19 nt, Artificial Sequence
  Description of Artificial Sequence: Synthetic oligonucleotide
  Sense strand starting at position 434 of SEQ ID NO: 1560551
ugagcaagugcugaguaaa

SEQ ID NO: 1607668 - RNA, 19 nt, Artificial Sequence
  Description of Artificial Sequence: Synthetic oligonucleotide
  Antisense strand to SEQ ID NO: 1607667
uuuacucagcacuugcuca

SEQ ID NO: 1607669 - RNA, 19 nt, Artificial Sequence
  Description of Artificial Sequence: Synthetic oligonucleotide
  Sense strand starting at position 437 of SEQ ID NO: 1560551
gcaagugcugaguaaagag

SEQ ID NO: 1607670 - RNA, 19 nt, Artificial Sequence
  Description of Artificial Sequence: Synthetic oligonucleotide
  Antisense strand to SEQ ID NO: 1607669
cucuuuacucagcacuugc

SEQ ID NO: 1607671 - RNA, 19 nt, Artificial Sequence
  Description of Artificial Sequence: Synthetic oligonucleotide
  Sense strand starting at position 452 of SEQ ID NO: 1560551
agagacuccuacuagauuu

SEQ ID NO: 1607672 - RNA, 19 nt, Artificial Sequence
  Description of Artificial Sequence: Synthetic oligonucleotide
  Antisense strand to SEQ ID NO: 1607671
aaaucuaguaggagucucu

SEQ ID NO: 1607673 - RNA, 19 nt, Artificial Sequence
  Description of Artificial Sequence: Synthetic oligonucleotide
  Sense strand starting at position 521 of SEQ ID NO: 1560551
gagggcauguccuuuguga

SEQ ID NO: 1607674 - RNA, 19 nt, Artificial Sequence
  Description of Artificial Sequence: Synthetic oligonucleotide
  Antisense strand to SEQ ID NO: 1607673
ucacaaaggacaugcccuc

SEQ ID NO: 1607675 - RNA, 19 nt, Artificial Sequence
  Description of Artificial Sequence: Synthetic oligonucleotide
  Sense strand starting at position 529 of SEQ ID NO: 1560551
guccuuugugaauggauau

SEQ ID NO: 1607676 - RNA, 19 nt, Artificial Sequence
  Description of Artificial Sequence: Synthetic oligonucleotide
  Antisense strand to SEQ ID NO: 1607675
auauccauucacaaaggac

SEQ ID NO: 1607677 - RNA, 19 nt, Artificial Sequence
  Description of Artificial Sequence: Synthetic oligonucleotide
  Sense strand starting at position 625 of SEQ ID NO: 1560551
cccaccucuucugguagaa

SEQ ID NO: 1607678 - RNA, 19 nt, Artificial Sequence
  Description of Artificial Sequence: Synthetic oligonucleotide
  Antisense strand to SEQ ID NO: 1607677
uucuaccagaagagguggg

SEQ ID NO: 1607679 - RNA, 19 nt, Artificial Sequence
  Description of Artificial Sequence: Synthetic oligonucleotide
  Sense strand starting at position 627 of SEQ ID NO: 1560551
caccucuucugguagaaug

SEQ ID NO: 1607680 - RNA, 19 nt, Artificial Sequence
  Description of Artificial Sequence: Synthetic oligonucleotide
  Antisense strand to SEQ ID NO: 1607679
cauucuaccagaagaggug

SEQ ID NO: 1607681 - RNA, 19 nt, Artificial Sequence
  Description of Artificial Sequence: Synthetic oligonucleotide
  Sense strand starting at position 682 of SEQ ID NO: 1560551
cgcugaagugugugaguaa

SEQ ID NO: 1607682 - RNA, 19 nt, Artificial Sequence
  Description of Artificial Sequence: Synthetic oligonucleotide
  Antisense strand to SEQ ID NO: 1607681
uuacucacacacuucagcg

SEQ ID NO: 1607683 - RNA, 19 nt, Artificial Sequence
  Description of Artificial Sequence: Synthetic oligonucleotide
  Sense strand starting at position 683 of SEQ ID NO: 1560551
gcugaagugugugaguaac

SEQ ID NO: 1607684 - RNA, 19 nt, Artificial Sequence
  Description of Artificial Sequence: Synthetic oligonucleotide
  Antisense strand to SEQ ID NO: 1607683
guuacucacacacuucagc

SEQ ID NO: 1607685 - RNA, 19 nt, Artificial Sequence
  Description of Artificial Sequence: Synthetic oligonucleotide
  Sense strand starting at position 701 of SEQ ID NO: 1560551
caccuuuguccucagagga

SEQ ID NO: 1607686 - RNA, 19 nt, Artificial Sequence
  Description of Artificial Sequence: Synthetic oligonucleotide
  Antisense strand to SEQ ID NO: 1607685
uccucugaggacaaaggug

SEQ ID NO: 1607687 - RNA, 19 nt, Artificial Sequence
  Description of Artificial Sequence: Synthetic oligonucleotide
  Sense strand starting at position 861 of SEQ ID NO: 1560551
guccucucuuccuaguuua

SEQ ID NO: 1607688 - RNA, 19 nt, Artificial Sequence
  Description of Artificial Sequence: Synthetic oligonucleotide
  Antisense strand to SEQ ID NO: 1607687
uaaacuaggaagagaggac

SEQ ID NO: 1607689 - RNA, 19 nt, Artificial Sequence
  Description of Artificial Sequence: Synthetic oligonucleotide
  Sense strand starting at position 864 of SEQ ID NO: 1560551
cucucuuccuaguuuauga

SEQ ID NO: 1607690 - RNA, 19 nt, Artificial Sequence
  Description of Artificial Sequence: Synthetic oligonucleotide
  Antisense strand to SEQ ID NO: 1607689
ucauaaacuaggaagagag

SEQ ID NO: 1607691 - RNA, 19 nt, Artificial Sequence
  Description of Artificial Sequence: Synthetic oligonucleotide
  Sense strand starting at position 1013 of SEQ ID NO: 1560551
gaaagaucaugauggacca

SEQ ID NO: 1607692 - RNA, 19 nt, Artificial Sequence
  Description of Artificial Sequence: Synthetic oligonucleotide
  Antisense strand to SEQ ID NO: 1607691
ugguccaucaugaucuuuc

SEQ ID NO: 1607693 - RNA, 19 nt, Artificial Sequence
  Description of Artificial Sequence: Synthetic oligonucleotide
  Sense strand starting at position 1222 of SEQ ID NO: 1560551
ggcugauauuuccacccua

SEQ ID NO: 1607694 - RNA, 19 nt, Artificial Sequence
  Description of Artificial Sequence: Synthetic oligonucleotide
  Antisense strand to SEQ ID NO: 1607693
uaggguggaaauaucagcc

SEQ ID NO: 1607695 - RNA, 19 nt, Artificial Sequence
  Description of Artificial Sequence: Synthetic oligonucleotide
  Sense strand starting at position 1260 of SEQ ID NO: 1560551
ggcucagaucuccacccua

SEQ ID NO: 1607696 - RNA, 19 nt, Artificial Sequence
  Description of Artificial Sequence: Synthetic oligonucleotide
  Antisense strand to SEQ ID NO: 1607695
uaggguggagaucugagcc

SEQ ID NO: 1607697 - RNA, 19 nt, Artificial Sequence
  Description of Artificial Sequence: Synthetic oligonucleotide
  Sense strand starting at position 1490 of SEQ ID NO: 1560551
ggcccauaucucuacugca

SEQ ID NO: 1607698 - RNA, 19 nt, Artificial Sequence
  Description of Artificial Sequence: Synthetic oligonucleotide
  Antisense strand to SEQ ID NO: 1607697
ugcaguagagauaugggcc

SEQ ID NO: 1607699 - RNA, 19 nt, Artificial Sequence
  Description of Artificial Sequence: Synthetic oligonucleotide
  Sense strand starting at position 1704 of SEQ ID NO: 1560551
ggcccaugucuccacuaca

SEQ ID NO: 1607700 - RNA, 19 nt, Artificial Sequence
  Description of Artificial Sequence: Synthetic oligonucleotide
  Antisense strand to SEQ ID NO: 1607699
uguaguggagacaugggcc

SEQ ID NO: 1607701 - RNA, 19 nt, Artificial Sequence
  Description of Artificial Sequence: Synthetic oligonucleotide
  Sense strand starting at position 2150 of SEQ ID NO: 1560551
uggaaauuguucucacuag

SEQ ID NO: 1607702 - RNA, 19 nt, Artificial Sequence
  Description of Artificial Sequence: Synthetic oligonucleotide
  Antisense strand to SEQ ID NO: 1607701
cuagugagaacaauuucca

SEQ ID NO: 1607703 - RNA, 19 nt, Artificial Sequence
  Description of Artificial Sequence: Synthetic oligonucleotide
  Sense strand starting at position 2151 of SEQ ID NO: 1560551
ggaaauuguucucacuaga

SEQ ID NO: 1607704 - RNA, 19 nt, Artificial Sequence
  Description of Artificial Sequence: Synthetic oligonucleotide
  Antisense strand to SEQ ID NO: 1607703
ucuagugagaacaauuucc

SEQ ID NO: 1607705 - RNA, 19 nt, Artificial Sequence
  Description of Artificial Sequence: Synthetic oligonucleotide
  Sense strand starting at position 2156 of SEQ ID NO: 1560551
uuguucucacuagaauuga

SEQ ID NO: 1607706 - RNA, 19 nt, Artificial Sequence
  Description of Artificial Sequence: Synthetic oligonucleotide
  Antisense strand to SEQ ID NO: 1607705
ucaauucuagugagaacaa

SEQ ID NO: 1607707 - RNA, 19 nt, Artificial Sequence
  Description of Artificial Sequence: Synthetic oligonucleotide
  Sense strand starting at position 2229 of SEQ ID NO: 1560551
ucauacacgagaugauuga

SEQ ID NO: 1607708 - RNA, 19 nt, Artificial Sequence
  Description of Artificial Sequence: Synthetic oligonucleotide
  Antisense strand to SEQ ID NO: 1607707
ucaaucaucucguguauga

SEQ ID NO: 1607709 - RNA, 19 nt, Artificial Sequence
  Description of Artificial Sequence: Synthetic oligonucleotide
  Sense strand starting at position 2233 of SEQ ID NO: 1560551
acacgagaugauugaauuc

SEQ ID NO: 1607710 - RNA, 19 nt, Artificial Sequence
  Description of Artificial Sequence: Synthetic oligonucleotide
  Antisense strand to SEQ ID NO: 1607709
gaauucaaucaucucgugu

SEQ ID NO: 1607711 - RNA, 19 nt, Artificial Sequence
  Description of Artificial Sequence: Synthetic oligonucleotide
  Sense strand starting at position 2240 of SEQ ID NO: 1560551
augauugaauucugugcuu

SEQ ID NO: 1607712 - RNA, 19 nt, Artificial Sequence
  Description of Artificial Sequence: Synthetic oligonucleotide
  Antisense strand to SEQ ID NO: 1607711
aagcacagaauucaaucau

SEQ ID NO: 1607713 - RNA, 19 nt, Artificial Sequence
  Description of Artificial Sequence: Synthetic oligonucleotide
  Sense strand starting at position 2251 of SEQ ID NO: 1560551
cugugcuuacauuaaagau

SEQ ID NO: 1607714 - RNA, 19 nt, Artificial Sequence
  Description of Artificial Sequence: Synthetic oligonucleotide
  Antisense strand to SEQ ID NO: 1607713
aucuuuaauguaagcacag

SEQ ID NO: 1607715 - RNA, 19 nt, Artificial Sequence
  Description of Artificial Sequence: Synthetic oligonucleotide
  Sense strand starting at position 2357 of SEQ ID NO: 1560551
cagaguaauugugacaaga

SEQ ID NO: 1607716 - RNA, 19 nt, Artificial Sequence
  Description of Artificial Sequence: Synthetic oligonucleotide
  Antisense strand to SEQ ID NO: 1607715
ucuugucacaauuacucug

SEQ ID NO: 1607717 - RNA, 19 nt, Artificial Sequence
  Description of Artificial Sequence: Synthetic oligonucleotide
  Sense strand starting at position 2359 of SEQ ID NO: 1560551
gaguaauugugacaagaag

SEQ ID NO: 1607718 - RNA, 19 nt, Artificial Sequence
  Description of Artificial Sequence: Synthetic oligonucleotide
  Antisense strand to SEQ ID NO: 1607717
cuucuugucacaauuacuc

SEQ ID NO: 1607719 - RNA, 19 nt, Artificial Sequence
  Description of Artificial Sequence: Synthetic oligonucleotide
  Sense strand starting at position 2565 of SEQ ID NO: 1560551
ggacucagguuaccaaauu

SEQ ID NO: 1607720 - RNA, 19 nt, Artificial Sequence
  Description of Artificial Sequence: Synthetic oligonucleotide
  Antisense strand to SEQ ID NO: 1607719
aauuugguaaccugagucc

SEQ ID NO: 1607721 - RNA, 19 nt, Artificial Sequence
  Description of Artificial Sequence: Synthetic oligonucleotide
  Sense strand starting at position 2905 of SEQ ID NO: 1560551
ucacuauaccugggugauu

SEQ ID NO: 1607722 - RNA, 19 nt, Artificial Sequence
  Description of Artificial Sequence: Synthetic oligonucleotide
  Antisense strand to SEQ ID NO: 1607721
aaucacccagguauaguga

SEQ ID NO: 1607723 - RNA, 19 nt, Artificial Sequence
  Description of Artificial Sequence: Synthetic oligonucleotide
  Sense strand starting at position 3521 of SEQ ID NO: 1560551
gugacugucuauuuauagu

SEQ ID NO: 1607724 - RNA, 19 nt, Artificial Sequence
  Description of Artificial Sequence: Synthetic oligonucleotide
  Antisense strand to SEQ ID NO: 1607723
acuauaaauagacagucac

SEQ ID NO: 1607725 - RNA, 19 nt, Artificial Sequence
  Description of Artificial Sequence: Synthetic oligonucleotide
  Sense strand starting at position 3527 of SEQ ID NO: 1560551
gucuauuuauaguaguaug

SEQ ID NO: 1607726 - RNA, 19 nt, Artificial Sequence
  Description of Artificial Sequence: Synthetic oligonucleotide
  Antisense strand to SEQ ID NO: 1607725
cauacuacuauaaauagac

SEQ ID NO: 1607727 - RNA, 19 nt, Artificial Sequence
  Description of Artificial Sequence: Synthetic oligonucleotide
  Sense strand starting at position 3545 of SEQ ID NO: 1560551
gaaagaugauguguugaua

SEQ ID NO: 1607728 - RNA, 19 nt, Artificial Sequence
  Description of Artificial Sequence: Synthetic oligonucleotide
  Antisense strand to SEQ ID NO: 1607727
uaucaacacaucaucuuuc

SEQ ID NO: 1607729 - RNA, 19 nt, Artificial Sequence
  Description of Artificial Sequence: Synthetic oligonucleotide
  Sense strand starting at position 3548 of SEQ ID NO: 1560551
agaugauguguugauacgu

SEQ ID NO: 1607730 - RNA, 19 nt, Artificial Sequence
  Description of Artificial Sequence: Synthetic oligonucleotide
  Antisense strand to SEQ ID NO: 1607729
acguaucaacacaucaucu

SEQ ID NO: 1607731 - RNA, 19 nt, Artificial Sequence
  Description of Artificial Sequence: Synthetic oligonucleotide
  Sense strand starting at position 3556 of SEQ ID NO: 1560551
uguugauacgugucccugu

SEQ ID NO: 1607732 - RNA, 19 nt, Artificial Sequence
  Description of Artificial Sequence: Synthetic oligonucleotide
  Antisense strand to SEQ ID NO: 1607731
acagggacacguaucaaca

SEQ ID NO: 1607733 - RNA, 19 nt, Artificial Sequence
  Description of Artificial Sequence: Synthetic oligonucleotide
  Sense strand starting at position 3640 of SEQ ID NO: 1560551
uccagaucugcagagagua

SEQ ID NO: 1607734 - RNA, 19 nt, Artificial Sequence
  Description of Artificial Sequence: Synthetic oligonucleotide
  Antisense strand to SEQ ID NO: 1607733
uacucucugcagaucugga

SEQ ID NO: 1607735 - RNA, 19 nt, Artificial Sequence
  Description of Artificial Sequence: Synthetic oligonucleotide
  Sense strand starting at position 3966 of SEQ ID NO: 1560551
gaaagauacucugaggaaa

SEQ ID NO: 1607736 - RNA, 19 nt, Artificial Sequence
  Description of Artificial Sequence: Synthetic oligonucleotide
  Antisense strand to SEQ ID NO: 1607735
uuuccucagaguaucuuuc

SEQ ID NO: 1607737 - RNA, 19 nt, Artificial Sequence
  Description of Artificial Sequence: Synthetic oligonucleotide
  Sense strand starting at position 599 of SEQ ID NO: 1560552
cagcaagugucagcugaga

SEQ ID NO: 1607738 - RNA, 19 nt, Artificial Sequence
  Description of Artificial Sequence: Synthetic oligonucleotide
  Antisense strand to SEQ ID NO: 1607737
ucucagcugacacuugcug

SEQ ID NO: 1607739 - RNA, 19 nt, Artificial Sequence
  Description of Artificial Sequence: Synthetic oligonucleotide
  Sense strand starting at position 601 of SEQ ID NO: 1560552
gcaagugucagcugagaac

SEQ ID NO: 1607740 - RNA, 19 nt, Artificial Sequence
  Description of Artificial Sequence: Synthetic oligonucleotide
  Antisense strand to SEQ ID NO: 1607739
guucucagcugacacuugc

SEQ ID NO: 1607741 - RNA, 19 nt, Artificial Sequence
  Description of Artificial Sequence: Synthetic oligonucleotide
  Sense strand starting at position 767 of SEQ ID NO: 1560552
cuggaaugucagggucaug

SEQ ID NO: 1607742 - RNA, 19 nt, Artificial Sequence
  Description of Artificial Sequence: Synthetic oligonucleotide
  Antisense strand to SEQ ID NO: 1607741
caugacccugacauuccag

SEQ ID NO: 1607743 - RNA, 19 nt, Artificial Sequence
  Description of Artificial Sequence: Synthetic oligonucleotide
  Sense strand starting at position 770 of SEQ ID NO: 1560552
gaaugucagggucaugacu

SEQ ID NO: 1607744 - RNA, 19 nt, Artificial Sequence
  Description of Artificial Sequence: Synthetic oligonucleotide
  Antisense strand to SEQ ID NO: 1607743
agucaugacccugacauuc

SEQ ID NO: 1607745 - RNA, 19 nt, Artificial Sequence
  Description of Artificial Sequence: Synthetic oligonucleotide
  Sense strand starting at position 797 of SEQ ID NO: 1560552
cccaccucuuagguagaau

SEQ ID NO: 1607746 - RNA, 19 nt, Artificial Sequence
  Description of Artificial Sequence: Synthetic oligonucleotide
  Antisense strand to SEQ ID NO: 1607745
auucuaccuaagagguggg

SEQ ID NO: 1607747 - RNA, 19 nt, Artificial Sequence
  Description of Artificial Sequence: Synthetic oligonucleotide
  Sense strand starting at position 862 of SEQ ID NO: 1560552
gugugaguuaugcucuugu

SEQ ID NO: 1607748 - RNA, 19 nt, Artificial Sequence
  Description of Artificial Sequence: Synthetic oligonucleotide
  Antisense strand to SEQ ID NO: 1607747
acaagagcauaacucacac

SEQ ID NO: 1607749 - RNA, 19 nt, Artificial Sequence
  Description of Artificial Sequence: Synthetic oligonucleotide
  Sense strand starting at position 869 of SEQ ID NO: 1560552
uuaugcucuuguccucaga

SEQ ID NO: 1607750 - RNA, 19 nt, Artificial Sequence
  Description of Artificial Sequence: Synthetic oligonucleotide
  Antisense strand to SEQ ID NO: 1607749
ucugaggacaagagcauaa

SEQ ID NO: 1607751 - RNA, 19 nt, Artificial Sequence
  Description of Artificial Sequence: Synthetic oligonucleotide
  Sense strand starting at position 1245 of SEQ ID NO: 1560552
aaagaaagaucaugaugga

SEQ ID NO: 1607752 - RNA, 19 nt, Artificial Sequence
  Description of Artificial Sequence: Synthetic oligonucleotide
  Antisense strand to SEQ ID NO: 1607751
uccaucaugaucuuucuuu

SEQ ID NO: 1607753 - RNA, 19 nt, Artificial Sequence
  Description of Artificial Sequence: Synthetic oligonucleotide
  Sense strand starting at position 1248 of SEQ ID NO: 1560552
gaaagaucaugauggauga

SEQ ID NO: 1607754 - RNA, 19 nt, Artificial Sequence
  Description of Artificial Sequence: Synthetic oligonucleotide
  Antisense strand to SEQ ID NO: 1607753
ucauccaucaugaucuuuc

SEQ ID NO: 1607755 - RNA, 19 nt, Artificial Sequence
  Description of Artificial Sequence: Synthetic oligonucleotide
  Sense strand starting at position 2108 of SEQ ID NO: 1560552
ggcuauuucuaccuugcau

SEQ ID NO: 1607756 - RNA, 19 nt, Artificial Sequence
  Description of Artificial Sequence: Synthetic oligonucleotide
  Antisense strand to SEQ ID NO: 1607755
augcaagguagaaauagcc

SEQ ID NO: 1607757 - RNA, 19 nt, Artificial Sequence
  Description of Artificial Sequence: Synthetic oligonucleotide
  Sense strand starting at position 2167 of SEQ ID NO: 1560552
ccuggaaauuguuccaacu

SEQ ID NO: 1607758 - RNA, 19 nt, Artificial Sequence
  Description of Artificial Sequence: Synthetic oligonucleotide
  Antisense strand to SEQ ID NO: 1607757
aguuggaacaauuuccagg

SEQ ID NO: 1607759 - RNA, 19 nt, Artificial Sequence
  Description of Artificial Sequence: Synthetic oligonucleotide
  Sense strand starting at position 2261 of SEQ ID NO: 1560552
acugaaugcuuggcuuaca

SEQ ID NO: 1607760 - RNA, 19 nt, Artificial Sequence
  Description of Artificial Sequence: Synthetic oligonucleotide
  Antisense strand to SEQ ID NO: 1607759
uguaagccaagcauucagu

SEQ ID NO: 1607761 - RNA, 19 nt, Artificial Sequence
  Description of Artificial Sequence: Synthetic oligonucleotide
  Sense strand starting at position 2262 of SEQ ID NO: 1560552
cugaaugcuuggcuuacau

SEQ ID NO: 1607762 - RNA, 19 nt, Artificial Sequence
  Description of Artificial Sequence: Synthetic oligonucleotide
  Antisense strand to SEQ ID NO: 1607761
auguaagccaagcauucag

SEQ ID NO: 1607763 - RNA, 19 nt, Artificial Sequence
  Description of Artificial Sequence: Synthetic oligonucleotide
  Sense strand starting at position 2750 of SEQ ID NO: 1560552
cgggacauucuauaugugu

SEQ ID NO: 1607764 - RNA, 19 nt, Artificial Sequence
  Description of Artificial Sequence: Synthetic oligonucleotide
  Antisense strand to SEQ ID NO: 1607763
acacauauagaaugucccg

SEQ ID NO: 1607765 - RNA, 19 nt, Artificial Sequence
  Description of Artificial Sequence: Synthetic oligonucleotide
  Sense strand starting at position 2771 of SEQ ID NO: 1560552
guaugugugcguuuauaua

SEQ ID NO: 1607766 - RNA, 19 nt, Artificial Sequence
  Description of Artificial Sequence: Synthetic oligonucleotide
  Antisense strand to SEQ ID NO: 1607765
uauauaaacgcacacauac

SEQ ID NO: 1607767 - RNA, 19 nt, Artificial Sequence
  Description of Artificial Sequence: Synthetic oligonucleotide
  Sense strand starting at position 2891 of SEQ ID NO: 1560552
ucucacauuuguguuucua

SEQ ID NO: 1607768 - RNA, 19 nt, Artificial Sequence
  Description of Artificial Sequence: Synthetic oligonucleotide
  Antisense strand to SEQ ID NO: 1607767
uagaaacacaaaugugaga

SEQ ID NO: 1607769 - RNA, 19 nt, Artificial Sequence
  Description of Artificial Sequence: Synthetic oligonucleotide
  Sense strand starting at position 2893 of SEQ ID NO: 1560552
ucacauuuguguuucuaug

SEQ ID NO: 1607770 - RNA, 19 nt, Artificial Sequence
  Description of Artificial Sequence: Synthetic oligonucleotide
  Antisense strand to SEQ ID NO: 1607769
cauagaaacacaaauguga

SEQ ID NO: 1607771 - RNA, 19 nt, Artificial Sequence
  Description of Artificial Sequence: Synthetic oligonucleotide
  Sense strand starting at position 2955 of SEQ ID NO: 1560552
uggauugcaguuuaauagu

SEQ ID NO: 1607772 - RNA, 19 nt, Artificial Sequence
  Description of Artificial Sequence: Synthetic oligonucleotide
  Antisense strand to SEQ ID NO: 1607771
acuauuaaacugcaaucca

SEQ ID NO: 1607773 - RNA, 19 nt, Artificial Sequence
  Description of Artificial Sequence: Synthetic oligonucleotide
  Sense strand starting at position 2961 of SEQ ID NO: 1560552
gcaguuuaauaguccauac

SEQ ID NO: 1607774 - RNA, 19 nt, Artificial Sequence
  Description of Artificial Sequence: Synthetic oligonucleotide
  Antisense strand to SEQ ID NO: 1607773
guauggacuauuaaacugc

SEQ ID NO: 1607775 - RNA, 19 nt, Artificial Sequence
  Description of Artificial Sequence: Synthetic oligonucleotide
  Sense strand starting at position 2963 of SEQ ID NO: 1560552
aguuuaauaguccauacau

SEQ ID NO: 1607776 - RNA, 19 nt, Artificial Sequence
  Description of Artificial Sequence: Synthetic oligonucleotide
  Antisense strand to SEQ ID NO: 1607775
auguauggacuauuaaacu

SEQ ID NO: 1607777 - RNA, 19 nt, Artificial Sequence
  Description of Artificial Sequence: Synthetic oligonucleotide
  Sense strand starting at position 3054 of SEQ ID NO: 1560552
uaacucgggccuugauaau

SEQ ID NO: 1607778 - RNA, 19 nt, Artificial Sequence
  Description of Artificial Sequence: Synthetic oligonucleotide
  Antisense strand to SEQ ID NO: 1607777
auuaucaaggcccgaguua

SEQ ID NO: 1607779 - RNA, 19 nt, Artificial Sequence
  Description of Artificial Sequence: Synthetic oligonucleotide
  Sense strand starting at position 3120 of SEQ ID NO: 1560552
auauuuaccuaggaaugaa

SEQ ID NO: 1607780 - RNA, 19 nt, Artificial Sequence
  Description of Artificial Sequence: Synthetic oligonucleotide
  Antisense strand to SEQ ID NO: 1607779
uucauuccuagguaaauau

SEQ ID NO: 1607781 - RNA, 19 nt, Artificial Sequence
  Description of Artificial Sequence: Synthetic oligonucleotide
  Sense strand starting at position 3204 of SEQ ID NO: 1560552
gaccaaauguggccuggaa

SEQ ID NO: 1607782 - RNA, 19 nt, Artificial Sequence
  Description of Artificial Sequence: Synthetic oligonucleotide
  Antisense strand to SEQ ID NO: 1607781
uuccaggccacauuugguc

SEQ ID NO: 1607783 - RNA, 19 nt, Artificial Sequence
  Description of Artificial Sequence: Synthetic oligonucleotide
  Sense strand starting at position 3206 of SEQ ID NO: 1560552
ccaaauguggccuggaaag

SEQ ID NO: 1607784 - RNA, 19 nt, Artificial Sequence
  Description of Artificial Sequence: Synthetic oligonucleotide
  Antisense strand to SEQ ID NO: 1607783
cuuuccaggccacauuugg

SEQ ID NO: 1607785 - RNA, 19 nt, Artificial Sequence
  Description of Artificial Sequence: Synthetic oligonucleotide
  Sense strand starting at position 3208 of SEQ ID NO: 1560552
aaauguggccuggaaaguu

SEQ ID NO: 1607786 - RNA, 19 nt, Artificial Sequence
  Description of Artificial Sequence: Synthetic oligonucleotide
  Antisense strand to SEQ ID NO: 1607785
aacuuuccaggccacauuu

SEQ ID NO: 1607787 - RNA, 19 nt, Artificial Sequence
  Description of Artificial Sequence: Synthetic oligonucleotide
  Sense strand starting at position 3284 of SEQ ID NO: 1560552
cuguccuguuugucauuua

SEQ ID NO: 1607788 - RNA, 19 nt, Artificial Sequence
  Description of Artificial Sequence: Synthetic oligonucleotide
  Antisense strand to SEQ ID NO: 1607787
uaaaugacaaacaggacag

SEQ ID NO: 1607789 - RNA, 19 nt, Artificial Sequence
  Description of Artificial Sequence: Synthetic oligonucleotide
  Sense strand starting at position 3287 of SEQ ID NO: 1560552
uccuguuugucauuuauga

SEQ ID NO: 1607790 - RNA, 19 nt, Artificial Sequence
  Description of Artificial Sequence: Synthetic oligonucleotide
  Antisense strand to SEQ ID NO: 1607789
ucauaaaugacaaacagga

SEQ ID NO: 1607791 - RNA, 19 nt, Artificial Sequence
  Description of Artificial Sequence: Synthetic oligonucleotide
  Sense strand starting at position 3323 of SEQ ID NO: 1560552
cguauauauuugcuugcca

SEQ ID NO: 1607792 - RNA, 19 nt, Artificial Sequence
  Description of Artificial Sequence: Synthetic oligonucleotide
  Antisense strand to SEQ ID NO: 1607791
uggcaagcaaauauauacg

SEQ ID NO: 1607793 - RNA, 19 nt, Artificial Sequence
  Description of Artificial Sequence: Synthetic oligonucleotide
  Sense strand starting at position 3324 of SEQ ID NO: 1560552
guauauauuugcuugccau

SEQ ID NO: 1607794 - RNA, 19 nt, Artificial Sequence
  Description of Artificial Sequence: Synthetic oligonucleotide
  Antisense strand to SEQ ID NO: 1607793
auggcaagcaaauauauac

SEQ ID NO: 1607795 - RNA, 19 nt, Artificial Sequence
  Description of Artificial Sequence: Synthetic oligonucleotide
  Sense strand starting at position 3377 of SEQ ID NO: 1560552
uuugcugauguguaguauu

SEQ ID NO: 1607796 - RNA, 19 nt, Artificial Sequence
  Description of Artificial Sequence: Synthetic oligonucleotide
  Antisense strand to SEQ ID NO: 1607795
aauacuacacaucagcaaa

SEQ ID NO: 1607797 - RNA, 19 nt, Artificial Sequence
  Description of Artificial Sequence: Synthetic oligonucleotide
  Sense strand starting at position 3388 of SEQ ID NO: 1560552
guaguauuucugcaagcga

SEQ ID NO: 1607798 - RNA, 19 nt, Artificial Sequence
  Description of Artificial Sequence: Synthetic oligonucleotide
  Antisense strand to SEQ ID NO: 1607797
ucgcuugcagaaauacuac

SEQ ID NO: 1607799 - RNA, 19 nt, Artificial Sequence
  Description of Artificial Sequence: Synthetic oligonucleotide
  Sense strand starting at position 3445 of SEQ ID NO: 1560552
acagacauuugaggcuuau

SEQ ID NO: 1607800 - RNA, 19 nt, Artificial Sequence
  Description of Artificial Sequence: Synthetic oligonucleotide
  Antisense strand to SEQ ID NO: 1607799
auaagccucaaaugucugu

SEQ ID NO: 1607801 - RNA, 19 nt, Artificial Sequence
  Description of Artificial Sequence: Synthetic oligonucleotide
  Sense strand starting at position 3492 of SEQ ID NO: 1560552
cccagucauuugccgagau

SEQ ID NO: 1607802 - RNA, 19 nt, Artificial Sequence
  Description of Artificial Sequence: Synthetic oligonucleotide
  Antisense strand to SEQ ID NO: 1607801
aucucggcaaaugacuggg

SEQ ID NO: 1607803 - RNA, 19 nt, Artificial Sequence
  Description of Artificial Sequence: Synthetic oligonucleotide
  Sense strand starting at position 3494 of SEQ ID NO: 1560552
cagucauuugccgagaugu

SEQ ID NO: 1607804 - RNA, 19 nt, Artificial Sequence
  Description of Artificial Sequence: Synthetic oligonucleotide
  Antisense strand to SEQ ID NO: 1607803
acaucucggcaaaugacug

SEQ ID NO: 1607805 - RNA, 19 nt, Artificial Sequence
  Description of Artificial Sequence: Synthetic oligonucleotide
  Sense strand starting at position 3496 of SEQ ID NO: 1560552
gucauuugccgagaugugu

SEQ ID NO: 1607806 - RNA, 19 nt, Artificial Sequence
  Description of Artificial Sequence: Synthetic oligonucleotide
  Antisense strand to SEQ ID NO: 1607805
acacaucucggcaaaugac

SEQ ID NO: 1607807 - RNA, 19 nt, Artificial Sequence
  Description of Artificial Sequence: Synthetic oligonucleotide
  Sense strand starting at position 3629 of SEQ ID NO: 1560552
agcauuuccuuguuguaca

SEQ ID NO: 1607808 - RNA, 19 nt, Artificial Sequence
  Description of Artificial Sequence: Synthetic oligonucleotide
  Antisense strand to SEQ ID NO: 1607807
uguacaacaaggaaaugcu

SEQ ID NO: 1607809 - RNA, 19 nt, Artificial Sequence
  Description of Artificial Sequence: Synthetic oligonucleotide
  Sense strand starting at position 3733 of SEQ ID NO: 1560552
gcuagacaaguuuguggau

SEQ ID NO: 1607810 - RNA, 19 nt, Artificial Sequence
  Description of Artificial Sequence: Synthetic oligonucleotide
  Antisense strand to SEQ ID NO: 1607809
auccacaaacuugucuagc

SEQ ID NO: 1607811 - RNA, 19 nt, Artificial Sequence
  Description of Artificial Sequence: Synthetic oligonucleotide
  Sense strand starting at position 3734 of SEQ ID NO: 1560552
cuagacaaguuuguggauu

SEQ ID NO: 1607812 - RNA, 19 nt, Artificial Sequence
  Description of Artificial Sequence: Synthetic oligonucleotide
  Antisense strand to SEQ ID NO: 1607811
aauccacaaacuugucuag

SEQ ID NO: 1607813 - RNA, 19 nt, Artificial Sequence
  Description of Artificial Sequence: Synthetic oligonucleotide
  Sense strand starting at position 3775 of SEQ ID NO: 1560552
uucuaaaugucaguuaaga

SEQ ID NO: 1607814 - RNA, 19 nt, Artificial Sequence
  Description of Artificial Sequence: Synthetic oligonucleotide
  Antisense strand to SEQ ID NO: 1607813
ucuuaacugacauuuagaa

SEQ ID NO: 1607815 - RNA, 19 nt, Artificial Sequence
  Description of Artificial Sequence: Synthetic oligonucleotide
  Sense strand starting at position 3913 of SEQ ID NO: 1560552
gugcuaggauuauugaaau

SEQ ID NO: 1607816 - RNA, 19 nt, Artificial Sequence
  Description of Artificial Sequence: Synthetic oligonucleotide
  Antisense strand to SEQ ID NO: 1607815
auuucaauaauccuagcac

SEQ ID NO: 1607817 - RNA, 19 nt, Artificial Sequence
  Description of Artificial Sequence: Synthetic oligonucleotide
  Sense strand starting at position 178 of SEQ ID NO: 1560553
ggcccauaucuccaccgua

SEQ ID NO: 1607818 - RNA, 19 nt, Artificial Sequence
  Description of Artificial Sequence: Synthetic oligonucleotide
  Antisense strand to SEQ ID NO: 1607817
uacgguggagauaugggcc

SEQ ID NO: 1607819 - RNA, 19 nt, Artificial Sequence
  Description of Artificial Sequence: Synthetic oligonucleotide
  Sense strand starting at position 2491 of SEQ ID NO: 1560553
uuugucucaugacucaaga

SEQ ID NO: 1607820 - RNA, 19 nt, Artificial Sequence
  Description of Artificial Sequence: Synthetic oligonucleotide
  Antisense strand to SEQ ID NO: 1607819
ucuugagucaugagacaaa

SEQ ID NO: 1607821 - RNA, 19 nt, Artificial Sequence
  Description of Artificial Sequence: Synthetic oligonucleotide
  Sense strand starting at position 2886 of SEQ ID NO: 1560553
gcaaguagccuauaauaac

SEQ ID NO: 1607822 - RNA, 19 nt, Artificial Sequence
  Description of Artificial Sequence: Synthetic oligonucleotide
  Antisense strand to SEQ ID NO: 1607821
guuauuauaggcuacuugc

SEQ ID NO: 1607823 - RNA, 19 nt, Artificial Sequence
  Description of Artificial Sequence: Synthetic oligonucleotide
  Sense strand starting at position 3076 of SEQ ID NO: 1560553
ggcauagaaugucuucuua

SEQ ID NO: 1607824 - RNA, 19 nt, Artificial Sequence
  Description of Artificial Sequence: Synthetic oligonucleotide
  Antisense strand to SEQ ID NO: 1607823
uaagaagacauucuaugcc

SEQ ID NO: 1607825 - RNA, 19 nt, Artificial Sequence
  Description of Artificial Sequence: Synthetic oligonucleotide
  Sense strand starting at position 3240 of SEQ ID NO: 1560553
acggucauccuuuacuauu

SEQ ID NO: 1607826 - RNA, 19 nt, Artificial Sequence
  Description of Artificial Sequence: Synthetic oligonucleotide
  Antisense strand to SEQ ID NO: 1607825
aauaguaaaggaugaccgu

SEQ ID NO: 1607827 - RNA, 19 nt, Artificial Sequence
  Description of Artificial Sequence: Synthetic oligonucleotide
  Sense strand starting at position 3249 of SEQ ID NO: 1560553
cuuuacuauucguggguga

SEQ ID NO: 1607828 - RNA, 19 nt, Artificial Sequence
  Description of Artificial Sequence: Synthetic oligonucleotide
  Antisense strand to SEQ ID NO: 1607827
ucacccacgaauaguaaag

SEQ ID NO: 1607829 - RNA, 19 nt, Artificial Sequence
  Description of Artificial Sequence: Synthetic oligonucleotide
  Sense strand starting at position 3250 of SEQ ID NO: 1560553
uuuacuauucgugggugau

SEQ ID NO: 1607830 - RNA, 19 nt, Artificial Sequence
  Description of Artificial Sequence: Synthetic oligonucleotide
  Antisense strand to SEQ ID NO: 1607829
aucacccacgaauaguaaa

SEQ ID NO: 1607831 - RNA, 19 nt, Artificial Sequence
  Description of Artificial Sequence: Synthetic oligonucleotide
  Sense strand starting at position 3251 of SEQ ID NO: 1560553
uuacuauucgugggugauu

SEQ ID NO: 1607832 - RNA, 19 nt, Artificial Sequence
  Description of Artificial Sequence: Synthetic oligonucleotide
  Antisense strand to SEQ ID NO: 1607831
aaucacccacgaauaguaa

SEQ ID NO: 1607833 - RNA, 19 nt, Artificial Sequence
  Description of Artificial Sequence: Synthetic oligonucleotide
  Sense strand starting at position 3331 of SEQ ID NO: 1560553
gacacagcauuuggauaua

SEQ ID NO: 1607834 - RNA, 19 nt, Artificial Sequence
  Description of Artificial Sequence: Synthetic oligonucleotide
  Antisense strand to SEQ ID NO: 1607833
uauauccaaaugcuguguc

SEQ ID NO: 1607835 - RNA, 19 nt, Artificial Sequence
  Description of Artificial Sequence: Synthetic oligonucleotide
  Sense strand starting at position 3457 of SEQ ID NO: 1560553
uuugaaacuuuguggacau

SEQ ID NO: 1607836 - RNA, 19 nt, Artificial Sequence
  Description of Artificial Sequence: Synthetic oligonucleotide
  Antisense strand to SEQ ID NO: 1607835
auguccacaaaguuucaaa

SEQ ID NO: 1607837 - RNA, 19 nt, Artificial Sequence
  Description of Artificial Sequence: Synthetic oligonucleotide
  Sense strand starting at position 3458 of SEQ ID NO: 1560553
uugaaacuuuguggacauu

SEQ ID NO: 1607838 - RNA, 19 nt, Artificial Sequence
  Description of Artificial Sequence: Synthetic oligonucleotide
  Antisense strand to SEQ ID NO: 1607837
aauguccacaaaguuucaa

SEQ ID NO: 1607839 - RNA, 19 nt, Artificial Sequence
  Description of Artificial Sequence: Synthetic oligonucleotide
  Sense strand starting at position 3561 of SEQ ID NO: 1560553
uaugaaauaugauguguug

SEQ ID NO: 1607840 - RNA, 19 nt, Artificial Sequence
  Description of Artificial Sequence: Synthetic oligonucleotide
  Antisense strand to SEQ ID NO: 1607839
caacacaucauauuucaua

SEQ ID NO: 1607841 - RNA, 19 nt, Artificial Sequence
  Description of Artificial Sequence: Synthetic oligonucleotide
  Sense strand starting at position 3563 of SEQ ID NO: 1560553
ugaaauaugauguguugau

SEQ ID NO: 1607842 - RNA, 19 nt, Artificial Sequence
  Description of Artificial Sequence: Synthetic oligonucleotide
  Antisense strand to SEQ ID NO: 1607841
aucaacacaucauauuuca

SEQ ID NO: 1607843 - RNA, 19 nt, Artificial Sequence
  Description of Artificial Sequence: Synthetic oligonucleotide
  Sense strand starting at position 3564 of SEQ ID NO: 1560553
gaaauaugauguguugaua

SEQ ID NO: 1607844 - RNA, 19 nt, Artificial Sequence
  Description of Artificial Sequence: Synthetic oligonucleotide
  Antisense strand to SEQ ID NO: 1607843
uaucaacacaucauauuuc

SEQ ID NO: 1607845 - RNA, 19 nt, Artificial Sequence
  Description of Artificial Sequence: Synthetic oligonucleotide
  Sense strand starting at position 3567 of SEQ ID NO: 1560553
auaugauguguugauaugu

SEQ ID NO: 1607846 - RNA, 19 nt, Artificial Sequence
  Description of Artificial Sequence: Synthetic oligonucleotide
  Antisense strand to SEQ ID NO: 1607845
acauaucaacacaucauau

SEQ ID NO: 1607847 - RNA, 19 nt, Artificial Sequence
  Description of Artificial Sequence: Synthetic oligonucleotide
  Sense strand starting at position 3611 of SEQ ID NO: 1560553
ggcuuaugacucuacaaau

SEQ ID NO: 1607848 - RNA, 19 nt, Artificial Sequence
  Description of Artificial Sequence: Synthetic oligonucleotide
  Antisense strand to SEQ ID NO: 1607847
auuuguagagucauaagcc

SEQ ID NO: 1607849 - RNA, 19 nt, Artificial Sequence
  Description of Artificial Sequence: Synthetic oligonucleotide
  Sense strand starting at position 3663 of SEQ ID NO: 1560553
gguugcagagaguaagaau

SEQ ID NO: 1607850 - RNA, 19 nt, Artificial Sequence
  Description of Artificial Sequence: Synthetic oligonucleotide
  Antisense strand to SEQ ID NO: 1607849
auucuuacucucugcaacc

SEQ ID NO: 1607851 - RNA, 19 nt, Artificial Sequence
  Description of Artificial Sequence: Synthetic oligonucleotide
  Sense strand starting at position 3867 of SEQ ID NO: 1560553
cagcgaauacagugucaca

SEQ ID NO: 1607852 - RNA, 19 nt, Artificial Sequence
  Description of Artificial Sequence: Synthetic oligonucleotide
  Antisense strand to SEQ ID NO: 1607851
ugugacacuguauucgcug

SEQ ID NO: 1607853 - RNA, 19 nt, Artificial Sequence
  Description of Artificial Sequence: Synthetic oligonucleotide
  Sense strand starting at position 3870 of SEQ ID NO: 1560553
cgaauacagugucacauua

SEQ ID NO: 1607854 - RNA, 19 nt, Artificial Sequence
  Description of Artificial Sequence: Synthetic oligonucleotide
  Antisense strand to SEQ ID NO: 1607853
uaaugugacacuguauucg

SEQ ID NO: 1607855 - RNA, 19 nt, Artificial Sequence
  Description of Artificial Sequence: Synthetic oligonucleotide
  Sense strand starting at position 214 of SEQ ID NO: 1560554
ucacuauaccugggugauu

SEQ ID NO: 1607856 - RNA, 19 nt, Artificial Sequence
  Description of Artificial Sequence: Synthetic oligonucleotide
  Antisense strand to SEQ ID NO: 1607855
aaucacccagguauaguga

SEQ ID NO: 1607857 - RNA, 19 nt, Artificial Sequence
  Description of Artificial Sequence: Synthetic oligonucleotide
  Sense strand starting at position 830 of SEQ ID NO: 1560554
gugacugucuauuuauagu

SEQ ID NO: 1607858 - RNA, 19 nt, Artificial Sequence
  Description of Artificial Sequence: Synthetic oligonucleotide
  Antisense strand to SEQ ID NO: 1607857
acuauaaauagacagucac

SEQ ID NO: 1607859 - RNA, 19 nt, Artificial Sequence
  Description of Artificial Sequence: Synthetic oligonucleotide
  Sense strand starting at position 836 of SEQ ID NO: 1560554
gucuauuuauaguaguaug

SEQ ID NO: 1607860 - RNA, 19 nt, Artificial Sequence
  Description of Artificial Sequence: Synthetic oligonucleotide
  Antisense strand to SEQ ID NO: 1607859
cauacuacuauaaauagac

SEQ ID NO: 1607861 - RNA, 19 nt, Artificial Sequence
  Description of Artificial Sequence: Synthetic oligonucleotide
  Sense strand starting at position 857 of SEQ ID NO: 1560554
agaugauguguugauacgu

SEQ ID NO: 1607862 - RNA, 19 nt, Artificial Sequence
  Description of Artificial Sequence: Synthetic oligonucleotide
  Antisense strand to SEQ ID NO: 1607861
acguaucaacacaucaucu

SEQ ID NO: 1607863 - RNA, 19 nt, Artificial Sequence
  Description of Artificial Sequence: Synthetic oligonucleotide
  Sense strand starting at position 865 of SEQ ID NO: 1560554
uguugauacgugucccugu

SEQ ID NO: 1607864 - RNA, 19 nt, Artificial Sequence
  Description of Artificial Sequence: Synthetic oligonucleotide
  Antisense strand to SEQ ID NO: 1607863
acagggacacguaucaaca

SEQ ID NO: 1607865 - RNA, 19 nt, Artificial Sequence
  Description of Artificial Sequence: Synthetic oligonucleotide
  Sense strand starting at position 949 of SEQ ID NO: 1560554
uccagaucugcagagagua

SEQ ID NO: 1607866 - RNA, 19 nt, Artificial Sequence
  Description of Artificial Sequence: Synthetic oligonucleotide
  Antisense strand to SEQ ID NO: 1607865
uacucucugcagaucugga

SEQ ID NO: 1607867 - RNA, 19 nt, Artificial Sequence
  Description of Artificial Sequence: Synthetic oligonucleotide
  Sense strand starting at position 1275 of SEQ ID NO: 1560554
gaaagauacucugaggaaa

SEQ ID NO: 1607868 - RNA, 19 nt, Artificial Sequence
  Description of Artificial Sequence: Synthetic oligonucleotide
  Antisense strand to SEQ ID NO: 1607867
uuuccucagaguaucuuuc

SEQ ID NO: 1607869 - RNA, 19 nt, Artificial Sequence
  Description of Artificial Sequence: Synthetic oligonucleotide
  Sense strand starting at position 2139 of SEQ ID NO: 1560554
ucucucugagcucaaggau

SEQ ID NO: 1607870 - RNA, 19 nt, Artificial Sequence
  Description of Artificial Sequence: Synthetic oligonucleotide
  Antisense strand to SEQ ID NO: 1607869
auccuugagcucagagaga

SEQ ID NO: 1607871 - RNA, 19 nt, Artificial Sequence
  Description of Artificial Sequence: Synthetic oligonucleotide
  Sense strand starting at position 2154 of SEQ ID NO: 1560554
ggauccaucccauguauag

SEQ ID NO: 1607872 - RNA, 19 nt, Artificial Sequence
  Description of Artificial Sequence: Synthetic oligonucleotide
  Antisense strand to SEQ ID NO: 1607871
cuauacaugggauggaucc

SEQ ID NO: 1607873 - RNA, 19 nt, Artificial Sequence
  Description of Artificial Sequence: Synthetic oligonucleotide
  Sense strand starting at position 2164 of SEQ ID NO: 1560554
cauguauagcucugaguuc

SEQ ID NO: 1607874 - RNA, 19 nt, Artificial Sequence
  Description of Artificial Sequence: Synthetic oligonucleotide
  Antisense strand to SEQ ID NO: 1607873
gaacucagagcuauacaug

SEQ ID NO: 1607875 - RNA, 19 nt, Artificial Sequence
  Description of Artificial Sequence: Synthetic oligonucleotide
  Sense strand starting at position 2371 of SEQ ID NO: 1560554
ccauccagucugugaggaa

SEQ ID NO: 1607876 - RNA, 19 nt, Artificial Sequence
  Description of Artificial Sequence: Synthetic oligonucleotide
  Antisense strand to SEQ ID NO: 1607875
uuccucacagacuggaugg

SEQ ID NO: 1607877 - RNA, 19 nt, Artificial Sequence
  Description of Artificial Sequence: Synthetic oligonucleotide
  Sense strand starting at position 2440 of SEQ ID NO: 1560554
uggcuucugcuucgugaga

SEQ ID NO: 1607878 - RNA, 19 nt, Artificial Sequence
  Description of Artificial Sequence: Synthetic oligonucleotide
  Antisense strand to SEQ ID NO: 1607877
ucucacgaagcagaagcca

SEQ ID NO: 1607879 - RNA, 19 nt, Artificial Sequence
  Description of Artificial Sequence: Synthetic oligonucleotide
  Sense strand starting at position 2558 of SEQ ID NO: 1560554
ucuggaguuaccuggagga

SEQ ID NO: 1607880 - RNA, 19 nt, Artificial Sequence
  Description of Artificial Sequence: Synthetic oligonucleotide
  Antisense strand to SEQ ID NO: 1607879
uccuccagguaacuccaga

SEQ ID NO: 1607881 - RNA, 19 nt, Artificial Sequence
  Description of Artificial Sequence: Synthetic oligonucleotide
  Sense strand starting at position 2561 of SEQ ID NO: 1560554
ggaguuaccuggaggaaga

SEQ ID NO: 1607882 - RNA, 19 nt, Artificial Sequence
  Description of Artificial Sequence: Synthetic oligonucleotide
  Antisense strand to SEQ ID NO: 1607881
ucuuccuccagguaacucc

SEQ ID NO: 1607883 - RNA, 19 nt, Artificial Sequence
  Description of Artificial Sequence: Synthetic oligonucleotide
  Sense strand starting at position 2607 of SEQ ID NO: 1560554
gcaguuccucuauaugaau

SEQ ID NO: 1607884 - RNA, 19 nt, Artificial Sequence
  Description of Artificial Sequence: Synthetic oligonucleotide
  Antisense strand to SEQ ID NO: 1607883
auucauauagaggaacugc

SEQ ID NO: 1607885 - RNA, 19 nt, Artificial Sequence
  Description of Artificial Sequence: Synthetic oligonucleotide
  Sense strand starting at position 2711 of SEQ ID NO: 1560554
cugcuuucucaguuguagu

SEQ ID NO: 1607886 - RNA, 19 nt, Artificial Sequence
  Description of Artificial Sequence: Synthetic oligonucleotide
  Antisense strand to SEQ ID NO: 1607885
acuacaacugagaaagcag

SEQ ID NO: 1607887 - RNA, 19 nt, Artificial Sequence
  Description of Artificial Sequence: Synthetic oligonucleotide
  Sense strand starting at position 2712 of SEQ ID NO: 1560554
ugcuuucucaguuguagua

SEQ ID NO: 1607888 - RNA, 19 nt, Artificial Sequence
  Description of Artificial Sequence: Synthetic oligonucleotide
  Antisense strand to SEQ ID NO: 1607887
uacuacaacugagaaagca

SEQ ID NO: 1607889 - RNA, 19 nt, Artificial Sequence
  Description of Artificial Sequence: Synthetic oligonucleotide
  Sense strand starting at position 2748 of SEQ ID NO: 1560554
ggauacaacugcuuuaguu

SEQ ID NO: 1607890 - RNA, 19 nt, Artificial Sequence
  Description of Artificial Sequence: Synthetic oligonucleotide
  Antisense strand to SEQ ID NO: 1607889
aacuaaagcaguuguaucc

SEQ ID NO: 1607891 - RNA, 19 nt, Artificial Sequence
  Description of Artificial Sequence: Synthetic oligonucleotide
  Sense strand starting at position 2752 of SEQ ID NO: 1560554
acaacugcuuuaguuuaga

SEQ ID NO: 1607892 - RNA, 19 nt, Artificial Sequence
  Description of Artificial Sequence: Synthetic oligonucleotide
  Antisense strand to SEQ ID NO: 1607891
ucuaaacuaaagcaguugu

SEQ ID NO: 1607893 - RNA, 19 nt, Artificial Sequence
  Description of Artificial Sequence: Synthetic oligonucleotide
  Sense strand starting at position 2824 of SEQ ID NO: 1560554
gggccucuugggaguuguu

SEQ ID NO: 1607894 - RNA, 19 nt, Artificial Sequence
  Description of Artificial Sequence: Synthetic oligonucleotide
  Antisense strand to SEQ ID NO: 1607893
aacaacucccaagaggccc

SEQ ID NO: 1607895 - RNA, 19 nt, Artificial Sequence
  Description of Artificial Sequence: Synthetic oligonucleotide
  Sense strand starting at position 2867 of SEQ ID NO: 1560554
ugaacagaucaaugcuguu

SEQ ID NO: 1607896 - RNA, 19 nt, Artificial Sequence
  Description of Artificial Sequence: Synthetic oligonucleotide
  Antisense strand to SEQ ID NO: 1607895
aacagcauugaucuguuca

SEQ ID NO: 1607897 - RNA, 19 nt, Artificial Sequence
  Description of Artificial Sequence: Synthetic oligonucleotide
  Sense strand starting at position 2916 of SEQ ID NO: 1560554
cuauuaguuccuggagaac

SEQ ID NO: 1607898 - RNA, 19 nt, Artificial Sequence
  Description of Artificial Sequence: Synthetic oligonucleotide
  Antisense strand to SEQ ID NO: 1607897
guucuccaggaacuaauag

SEQ ID NO: 1607899 - RNA, 19 nt, Artificial Sequence
  Description of Artificial Sequence: Synthetic oligonucleotide
  Sense strand starting at position 3215 of SEQ ID NO: 1560554
ggaggaacaucccagaaca

SEQ ID NO: 1607900 - RNA, 19 nt, Artificial Sequence
  Description of Artificial Sequence: Synthetic oligonucleotide
  Antisense strand to SEQ ID NO: 1607899
uguucugggauguuccucc

SEQ ID NO: 1607901 - RNA, 19 nt, Artificial Sequence
  Description of Artificial Sequence: Synthetic oligonucleotide
  Sense strand starting at position 3522 of SEQ ID NO: 1560554
agugauaggaauugguaua

SEQ ID NO: 1607902 - RNA, 19 nt, Artificial Sequence
  Description of Artificial Sequence: Synthetic oligonucleotide
  Antisense strand to SEQ ID NO: 1607901
uauaccaauuccuaucacu

SEQ ID NO: 1607903 - RNA, 19 nt, Artificial Sequence
  Description of Artificial Sequence: Synthetic oligonucleotide
  Sense strand starting at position 3523 of SEQ ID NO: 1560554
gugauaggaauugguauag

SEQ ID NO: 1607904 - RNA, 19 nt, Artificial Sequence
  Description of Artificial Sequence: Synthetic oligonucleotide
  Antisense strand to SEQ ID NO: 1607903
cuauaccaauuccuaucac

SEQ ID NO: 1607905 - RNA, 19 nt, Artificial Sequence
  Description of Artificial Sequence: Synthetic oligonucleotide
  Sense strand starting at position 3547 of SEQ ID NO: 1560554
ggugcauuccaggaggugu

SEQ ID NO: 1607906 - RNA, 19 nt, Artificial Sequence
  Description of Artificial Sequence: Synthetic oligonucleotide
  Antisense strand to SEQ ID NO: 1607905
acaccuccuggaaugcacc

SEQ ID NO: 1607907 - RNA, 19 nt, Artificial Sequence
  Description of Artificial Sequence: Synthetic oligonucleotide
  Sense strand starting at position 3555 of SEQ ID NO: 1560554
ccaggagguguuuagaauc

SEQ ID NO: 1607908 - RNA, 19 nt, Artificial Sequence
  Description of Artificial Sequence: Synthetic oligonucleotide
  Antisense strand to SEQ ID NO: 1607907
gauucuaaacaccuccugg

SEQ ID NO: 1607909 - RNA, 19 nt, Artificial Sequence
  Description of Artificial Sequence: Synthetic oligonucleotide
  Sense strand starting at position 3565 of SEQ ID NO: 1560554
uuuagaaucuucucuggga

SEQ ID NO: 1607910 - RNA, 19 nt, Artificial Sequence
  Description of Artificial Sequence: Synthetic oligonucleotide
  Antisense strand to SEQ ID NO: 1607909
ucccagagaagauucuaaa

SEQ ID NO: 1607911 - RNA, 19 nt, Artificial Sequence
  Description of Artificial Sequence: Synthetic oligonucleotide
  Sense strand starting at position 3568 of SEQ ID NO: 1560554
agaaucuucucugggaaga

SEQ ID NO: 1607912 - RNA, 19 nt, Artificial Sequence
  Description of Artificial Sequence: Synthetic oligonucleotide
  Antisense strand to SEQ ID NO: 1607911
ucuucccagagaagauucu

SEQ ID NO: 1607913 - RNA, 19 nt, Artificial Sequence
  Description of Artificial Sequence: Synthetic oligonucleotide
  Sense strand starting at position 3606 of SEQ ID NO: 1560554
cagcgaaugugcuuuacag

SEQ ID NO: 1607914 - RNA, 19 nt, Artificial Sequence
  Description of Artificial Sequence: Synthetic oligonucleotide
  Antisense strand to SEQ ID NO: 1607913
cuguaaagcacauucgcug

SEQ ID NO: 1607915 - RNA, 19 nt, Artificial Sequence
  Description of Artificial Sequence: Synthetic oligonucleotide
  Sense strand starting at position 3608 of SEQ ID NO: 1560554
gcgaaugugcuuuacaguu

SEQ ID NO: 1607916 - RNA, 19 nt, Artificial Sequence
  Description of Artificial Sequence: Synthetic oligonucleotide
  Antisense strand to SEQ ID NO: 1607915
aacuguaaagcacauucgc

SEQ ID NO: 1607917 - RNA, 19 nt, Artificial Sequence
  Description of Artificial Sequence: Synthetic oligonucleotide
  Sense strand starting at position 3747 of SEQ ID NO: 1560554
ugauguagcccaggaacaa

SEQ ID NO: 1607918 - RNA, 19 nt, Artificial Sequence
  Description of Artificial Sequence: Synthetic oligonucleotide
  Antisense strand to SEQ ID NO: 1607917
uuguuccugggcuacauca

SEQ ID NO: 1607919 - RNA, 19 nt, Artificial Sequence
  Description of Artificial Sequence: Synthetic oligonucleotide
  Sense strand starting at position 3777 of SEQ ID NO: 1560554
uugugaucugcugagacau

SEQ ID NO: 1607920 - RNA, 19 nt, Artificial Sequence
  Description of Artificial Sequence: Synthetic oligonucleotide
  Antisense strand to SEQ ID NO: 1607919
augucucagcagaucacaa

SEQ ID NO: 1607921 - RNA, 19 nt, Artificial Sequence
  Description of Artificial Sequence: Synthetic oligonucleotide
  Sense strand starting at position 3791 of SEQ ID NO: 1560554
gacauauauuaggcugcua

SEQ ID NO: 1607922 - RNA, 19 nt, Artificial Sequence
  Description of Artificial Sequence: Synthetic oligonucleotide
  Antisense strand to SEQ ID NO: 1607921
uagcagccuaauauauguc

SEQ ID NO: 1607923 - RNA, 19 nt, Artificial Sequence
  Description of Artificial Sequence: Synthetic oligonucleotide
  Sense strand starting at position 3805 of SEQ ID NO: 1560554
ugcuauuccacccgagaag

SEQ ID NO: 1607924 - RNA, 19 nt, Artificial Sequence
  Description of Artificial Sequence: Synthetic oligonucleotide
  Antisense strand to SEQ ID NO: 1607923
cuucucggguggaauagca

SEQ ID NO: 1607925 - RNA, 19 nt, Artificial Sequence
  Description of Artificial Sequence: Synthetic oligonucleotide
  Sense strand starting at position 3838 of SEQ ID NO: 1560554
gcccucuccgucguuuauu

SEQ ID NO: 1607926 - RNA, 19 nt, Artificial Sequence
  Description of Artificial Sequence: Synthetic oligonucleotide
  Antisense strand to SEQ ID NO: 1607925
aauaaacgacggagagggc

SEQ ID NO: 1607927 - RNA, 19 nt, Artificial Sequence
  Description of Artificial Sequence: Synthetic oligonucleotide
  Sense strand starting at position 3872 of SEQ ID NO: 1560554
guccuucugugaguuagua

SEQ ID NO: 1607928 - RNA, 19 nt, Artificial Sequence
  Description of Artificial Sequence: Synthetic oligonucleotide
  Antisense strand to SEQ ID NO: 1607927
uacuaacucacagaaggac

SEQ ID NO: 1607929 - RNA, 19 nt, Artificial Sequence
  Description of Artificial Sequence: Synthetic oligonucleotide
  Sense strand starting at position 3876 of SEQ ID NO: 1560554
uucugugaguuaguacgaa

SEQ ID NO: 1607930 - RNA, 19 nt, Artificial Sequence
  Description of Artificial Sequence: Synthetic oligonucleotide
  Antisense strand to SEQ ID NO: 1607929
uucguacuaacucacagaa

SEQ ID NO: 1607931 - RNA, 19 nt, Artificial Sequence
  Description of Artificial Sequence: Synthetic oligonucleotide
  Sense strand starting at position 3952 of SEQ ID NO: 1560554
caaagaguauuaguguuua

SEQ ID NO: 1607932 - RNA, 19 nt, Artificial Sequence
  Description of Artificial Sequence: Synthetic oligonucleotide
  Antisense strand to SEQ ID NO: 1607931
uaaacacuaauacucuuug

SEQ ID NO: 1607933 - RNA, 19 nt, Artificial Sequence
  Description of Artificial Sequence: Synthetic oligonucleotide
  Sense strand starting at position 3956 of SEQ ID NO: 1560554
gaguauuaguguuuaccuc

SEQ ID NO: 1607934 - RNA, 19 nt, Artificial Sequence
  Description of Artificial Sequence: Synthetic oligonucleotide
  Antisense strand to SEQ ID NO: 1607933
gagguaaacacuaauacuc

SEQ ID NO: 1607935 - RNA, 19 nt, Artificial Sequence
  Description of Artificial Sequence: Synthetic oligonucleotide
  Sense strand starting at position 119 of SEQ ID NO: 1560555
gccucugaccugugaccau

SEQ ID NO: 1607936 - RNA, 19 nt, Artificial Sequence
  Description of Artificial Sequence: Synthetic oligonucleotide
  Antisense strand to SEQ ID NO: 1607935
auggucacaggucagaggc

SEQ ID NO: 1607937 - RNA, 19 nt, Artificial Sequence
  Description of Artificial Sequence: Synthetic oligonucleotide
  Sense strand starting at position 465 of SEQ ID NO: 1560555
ccucccugugcucagaaga

SEQ ID NO: 1607938 - RNA, 19 nt, Artificial Sequence
  Description of Artificial Sequence: Synthetic oligonucleotide
  Antisense strand to SEQ ID NO: 1607937
ucuucugagcacagggagg

SEQ ID NO: 1607939 - RNA, 19 nt, Artificial Sequence
  Description of Artificial Sequence: Synthetic oligonucleotide
  Sense strand starting at position 577 of SEQ ID NO: 1560555
cagcaagugucagcugaga

SEQ ID NO: 1607940 - RNA, 19 nt, Artificial Sequence
  Description of Artificial Sequence: Synthetic oligonucleotide
  Antisense strand to SEQ ID NO: 1607939
ucucagcugacacuugcug

SEQ ID NO: 1607941 - RNA, 19 nt, Artificial Sequence
  Description of Artificial Sequence: Synthetic oligonucleotide
  Sense strand starting at position 745 of SEQ ID NO: 1560555
cuggaaugucagggucaug

SEQ ID NO: 1607942 - RNA, 19 nt, Artificial Sequence
  Description of Artificial Sequence: Synthetic oligonucleotide
  Antisense strand to SEQ ID NO: 1607941
caugacccugacauuccag

SEQ ID NO: 1607943 - RNA, 19 nt, Artificial Sequence
  Description of Artificial Sequence: Synthetic oligonucleotide
  Sense strand starting at position 748 of SEQ ID NO: 1560555
gaaugucagggucaugacu

SEQ ID NO: 1607944 - RNA, 19 nt, Artificial Sequence
  Description of Artificial Sequence: Synthetic oligonucleotide
  Antisense strand to SEQ ID NO: 1607943
agucaugacccugacauuc

SEQ ID NO: 1607945 - RNA, 19 nt, Artificial Sequence
  Description of Artificial Sequence: Synthetic oligonucleotide
  Sense strand starting at position 775 of SEQ ID NO: 1560555
cccaccucuuagguagaau

SEQ ID NO: 1607946 - RNA, 19 nt, Artificial Sequence
  Description of Artificial Sequence: Synthetic oligonucleotide
  Antisense strand to SEQ ID NO: 1607945
auucuaccuaagagguggg

SEQ ID NO: 1607947 - RNA, 19 nt, Artificial Sequence
  Description of Artificial Sequence: Synthetic oligonucleotide
  Sense strand starting at position 840 of SEQ ID NO: 1560555
gugugaguuaugcucuugu

SEQ ID NO: 1607948 - RNA, 19 nt, Artificial Sequence
  Description of Artificial Sequence: Synthetic oligonucleotide
  Antisense strand to SEQ ID NO: 1607947
acaagagcauaacucacac

SEQ ID NO: 1607949 - RNA, 19 nt, Artificial Sequence
  Description of Artificial Sequence: Synthetic oligonucleotide
  Sense strand starting at position 1223 of SEQ ID NO: 1560555
aaagaaagaucaugaugga

SEQ ID NO: 1607950 - RNA, 19 nt, Artificial Sequence
  Description of Artificial Sequence: Synthetic oligonucleotide
  Antisense strand to SEQ ID NO: 1607949
uccaucaugaucuuucuuu

SEQ ID NO: 1607951 - RNA, 19 nt, Artificial Sequence
  Description of Artificial Sequence: Synthetic oligonucleotide
  Sense strand starting at position 2086 of SEQ ID NO: 1560555
ggcuauuucuaccuugcau

SEQ ID NO: 1607952 - RNA, 19 nt, Artificial Sequence
  Description of Artificial Sequence: Synthetic oligonucleotide
  Antisense strand to SEQ ID NO: 1607951
augcaagguagaaauagcc

SEQ ID NO: 1607953 - RNA, 19 nt, Artificial Sequence
  Description of Artificial Sequence: Synthetic oligonucleotide
  Sense strand starting at position 2134 of SEQ ID NO: 1560555
gaacauggcuuccuggaaa

SEQ ID NO: 1607954 - RNA, 19 nt, Artificial Sequence
  Description of Artificial Sequence: Synthetic oligonucleotide
  Antisense strand to SEQ ID NO: 1607953
uuuccaggaagccauguuc

SEQ ID NO: 1607955 - RNA, 19 nt, Artificial Sequence
  Description of Artificial Sequence: Synthetic oligonucleotide
  Sense strand starting at position 2137 of SEQ ID NO: 1560555
cauggcuuccuggaaauug

SEQ ID NO: 1607956 - RNA, 19 nt, Artificial Sequence
  Description of Artificial Sequence: Synthetic oligonucleotide
  Antisense strand to SEQ ID NO: 1607955
caauuuccaggaagccaug

SEQ ID NO: 1607957 - RNA, 19 nt, Artificial Sequence
  Description of Artificial Sequence: Synthetic oligonucleotide
  Sense strand starting at position 2145 of SEQ ID NO: 1560555
ccuggaaauuguuccaacu

SEQ ID NO: 1607958 - RNA, 19 nt, Artificial Sequence
  Description of Artificial Sequence: Synthetic oligonucleotide
  Antisense strand to SEQ ID NO: 1607957
aguuggaacaauuuccagg

SEQ ID NO: 1607959 - RNA, 19 nt, Artificial Sequence
  Description of Artificial Sequence: Synthetic oligonucleotide
  Sense strand starting at position 2239 of SEQ ID NO: 1560555
acugaaugcuuggcuuaca

SEQ ID NO: 1607960 - RNA, 19 nt, Artificial Sequence
  Description of Artificial Sequence: Synthetic oligonucleotide
  Antisense strand to SEQ ID NO: 1607959
uguaagccaagcauucagu

SEQ ID NO: 1607961 - RNA, 19 nt, Artificial Sequence
  Description of Artificial Sequence: Synthetic oligonucleotide
  Sense strand starting at position 2240 of SEQ ID NO: 1560555
cugaaugcuuggcuuacau

SEQ ID NO: 1607962 - RNA, 19 nt, Artificial Sequence
  Description of Artificial Sequence: Synthetic oligonucleotide
  Antisense strand to SEQ ID NO: 1607961
auguaagccaagcauucag

SEQ ID NO: 1607963 - RNA, 19 nt, Artificial Sequence
  Description of Artificial Sequence: Synthetic oligonucleotide
  Sense strand starting at position 2728 of SEQ ID NO: 1560555
cgggacauucuauaugugu

SEQ ID NO: 1607964 - RNA, 19 nt, Artificial Sequence
  Description of Artificial Sequence: Synthetic oligonucleotide
  Antisense strand to SEQ ID NO: 1607963
acacauauagaaugucccg

SEQ ID NO: 1607965 - RNA, 19 nt, Artificial Sequence
  Description of Artificial Sequence: Synthetic oligonucleotide
  Sense strand starting at position 2749 of SEQ ID NO: 1560555
guaugugugcguuuauaua

SEQ ID NO: 1607966 - RNA, 19 nt, Artificial Sequence
  Description of Artificial Sequence: Synthetic oligonucleotide
  Antisense strand to SEQ ID NO: 1607965
uauauaaacgcacacauac

SEQ ID NO: 1607967 - RNA, 19 nt, Artificial Sequence
  Description of Artificial Sequence: Synthetic oligonucleotide
  Sense strand starting at position 2869 of SEQ ID NO: 1560555
ucucacauuuguguuucua

SEQ ID NO: 1607968 - RNA, 19 nt, Artificial Sequence
  Description of Artificial Sequence: Synthetic oligonucleotide
  Antisense strand to SEQ ID NO: 1607967
uagaaacacaaaugugaga

SEQ ID NO: 1607969 - RNA, 19 nt, Artificial Sequence
  Description of Artificial Sequence: Synthetic oligonucleotide
  Sense strand starting at position 2871 of SEQ ID NO: 1560555
ucacauuuguguuucuaug

SEQ ID NO: 1607970 - RNA, 19 nt, Artificial Sequence
  Description of Artificial Sequence: Synthetic oligonucleotide
  Antisense strand to SEQ ID NO: 1607969
cauagaaacacaaauguga

SEQ ID NO: 1607971 - RNA, 19 nt, Artificial Sequence
  Description of Artificial Sequence: Synthetic oligonucleotide
  Sense strand starting at position 2933 of SEQ ID NO: 1560555
uggauugcaguuuaauagu

SEQ ID NO: 1607972 - RNA, 19 nt, Artificial Sequence
  Description of Artificial Sequence: Synthetic oligonucleotide
  Antisense strand to SEQ ID NO: 1607971
acuauuaaacugcaaucca

SEQ ID NO: 1607973 - RNA, 19 nt, Artificial Sequence
  Description of Artificial Sequence: Synthetic oligonucleotide
  Sense strand starting at position 2939 of SEQ ID NO: 1560555
gcaguuuaauaguccauac

SEQ ID NO: 1607974 - RNA, 19 nt, Artificial Sequence
  Description of Artificial Sequence: Synthetic oligonucleotide
  Antisense strand to SEQ ID NO: 1607973
guauggacuauuaaacugc

SEQ ID NO: 1607975 - RNA, 19 nt, Artificial Sequence
  Description of Artificial Sequence: Synthetic oligonucleotide
  Sense strand starting at position 2941 of SEQ ID NO: 1560555
aguuuaauaguccauacau

SEQ ID NO: 1607976 - RNA, 19 nt, Artificial Sequence
  Description of Artificial Sequence: Synthetic oligonucleotide
  Antisense strand to SEQ ID NO: 1607975
auguauggacuauuaaacu

SEQ ID NO: 1607977 - RNA, 19 nt, Artificial Sequence
  Description of Artificial Sequence: Synthetic oligonucleotide
  Sense strand starting at position 3032 of SEQ ID NO: 1560555
uaacucgggccuugauaau

SEQ ID NO: 1607978 - RNA, 19 nt, Artificial Sequence
  Description of Artificial Sequence: Synthetic oligonucleotide
  Antisense strand to SEQ ID NO: 1607977
auuaucaaggcccgaguua

SEQ ID NO: 1607979 - RNA, 19 nt, Artificial Sequence
  Description of Artificial Sequence: Synthetic oligonucleotide
  Sense strand starting at position 3098 of SEQ ID NO: 1560555
auauuuaccuaggaaugaa

SEQ ID NO: 1607980 - RNA, 19 nt, Artificial Sequence
  Description of Artificial Sequence: Synthetic oligonucleotide
  Antisense strand to SEQ ID NO: 1607979
uucauuccuagguaaauau

SEQ ID NO: 1607981 - RNA, 19 nt, Artificial Sequence
  Description of Artificial Sequence: Synthetic oligonucleotide
  Sense strand starting at position 3182 of SEQ ID NO: 1560555
gaccaaauguggccuggaa

SEQ ID NO: 1607982 - RNA, 19 nt, Artificial Sequence
  Description of Artificial Sequence: Synthetic oligonucleotide
  Antisense strand to SEQ ID NO: 1607981
uuccaggccacauuugguc

SEQ ID NO: 1607983 - RNA, 19 nt, Artificial Sequence
  Description of Artificial Sequence: Synthetic oligonucleotide
  Sense strand starting at position 3184 of SEQ ID NO: 1560555
ccaaauguggccuggaaag

SEQ ID NO: 1607984 - RNA, 19 nt, Artificial Sequence
  Description of Artificial Sequence: Synthetic oligonucleotide
  Antisense strand to SEQ ID NO: 1607983
cuuuccaggccacauuugg

SEQ ID NO: 1607985 - RNA, 19 nt, Artificial Sequence
  Description of Artificial Sequence: Synthetic oligonucleotide
  Sense strand starting at position 3186 of SEQ ID NO: 1560555
aaauguggccuggaaaguu

SEQ ID NO: 1607986 - RNA, 19 nt, Artificial Sequence
  Description of Artificial Sequence: Synthetic oligonucleotide
  Antisense strand to SEQ ID NO: 1607985
aacuuuccaggccacauuu

SEQ ID NO: 1607987 - RNA, 19 nt, Artificial Sequence
  Description of Artificial Sequence: Synthetic oligonucleotide
  Sense strand starting at position 3262 of SEQ ID NO: 1560555
cuguccuguuugucauuua

SEQ ID NO: 1607988 - RNA, 19 nt, Artificial Sequence
  Description of Artificial Sequence: Synthetic oligonucleotide
  Antisense strand to SEQ ID NO: 1607987
uaaaugacaaacaggacag

SEQ ID NO: 1607989 - RNA, 19 nt, Artificial Sequence
  Description of Artificial Sequence: Synthetic oligonucleotide
  Sense strand starting at position 3265 of SEQ ID NO: 1560555
uccuguuugucauuuauga

SEQ ID NO: 1607990 - RNA, 19 nt, Artificial Sequence
  Description of Artificial Sequence: Synthetic oligonucleotide
  Antisense strand to SEQ ID NO: 1607989
ucauaaaugacaaacagga

SEQ ID NO: 1607991 - RNA, 19 nt, Artificial Sequence
  Description of Artificial Sequence: Synthetic oligonucleotide
  Sense strand starting at position 3301 of SEQ ID NO: 1560555
cguauauauuugcuugcca

SEQ ID NO: 1607992 - RNA, 19 nt, Artificial Sequence
  Description of Artificial Sequence: Synthetic oligonucleotide
  Antisense strand to SEQ ID NO: 1607991
uggcaagcaaauauauacg

SEQ ID NO: 1607993 - RNA, 19 nt, Artificial Sequence
  Description of Artificial Sequence: Synthetic oligonucleotide
  Sense strand starting at position 3302 of SEQ ID NO: 1560555
guauauauuugcuugccau

SEQ ID NO: 1607994 - RNA, 19 nt, Artificial Sequence
  Description of Artificial Sequence: Synthetic oligonucleotide
  Antisense strand to SEQ ID NO: 1607993
auggcaagcaaauauauac

SEQ ID NO: 1607995 - RNA, 19 nt, Artificial Sequence
  Description of Artificial Sequence: Synthetic oligonucleotide
  Sense strand starting at position 3366 of SEQ ID NO: 1560555
guaguauuucugcaagcga

SEQ ID NO: 1607996 - RNA, 19 nt, Artificial Sequence
  Description of Artificial Sequence: Synthetic oligonucleotide
  Antisense strand to SEQ ID NO: 1607995
ucgcuugcagaaauacuac

SEQ ID NO: 1607997 - RNA, 19 nt, Artificial Sequence
  Description of Artificial Sequence: Synthetic oligonucleotide
  Sense strand starting at position 3423 of SEQ ID NO: 1560555
acagacauuugaggcuuau

SEQ ID NO: 1607998 - RNA, 19 nt, Artificial Sequence
  Description of Artificial Sequence: Synthetic oligonucleotide
  Antisense strand to SEQ ID NO: 1607997
auaagccucaaaugucugu

SEQ ID NO: 1607999 - RNA, 19 nt, Artificial Sequence
  Description of Artificial Sequence: Synthetic oligonucleotide
  Sense strand starting at position 3470 of SEQ ID NO: 1560555
cccagucauuugccgagau

SEQ ID NO: 1608000 - RNA, 19 nt, Artificial Sequence
  Description of Artificial Sequence: Synthetic oligonucleotide
  Antisense strand to SEQ ID NO: 1607999
aucucggcaaaugacuggg

SEQ ID NO: 1608001 - RNA, 19 nt, Artificial Sequence
  Description of Artificial Sequence: Synthetic oligonucleotide
  Sense strand starting at position 3472 of SEQ ID NO: 1560555
cagucauuugccgagaugu

SEQ ID NO: 1608002 - RNA, 19 nt, Artificial Sequence
  Description of Artificial Sequence: Synthetic oligonucleotide
  Antisense strand to SEQ ID NO: 1608001
acaucucggcaaaugacug

SEQ ID NO: 1608003 - RNA, 19 nt, Artificial Sequence
  Description of Artificial Sequence: Synthetic oligonucleotide
  Sense strand starting at position 3474 of SEQ ID NO: 1560555
gucauuugccgagaugugu

SEQ ID NO: 1608004 - RNA, 19 nt, Artificial Sequence
  Description of Artificial Sequence: Synthetic oligonucleotide
  Antisense strand to SEQ ID NO: 1608003
acacaucucggcaaaugac

SEQ ID NO: 1608005 - RNA, 19 nt, Artificial Sequence
  Description of Artificial Sequence: Synthetic oligonucleotide
  Sense strand starting at position 3607 of SEQ ID NO: 1560555
agcauuuccuuguuguaca

SEQ ID NO: 1608006 - RNA, 19 nt, Artificial Sequence
  Description of Artificial Sequence: Synthetic oligonucleotide
  Antisense strand to SEQ ID NO: 1608005
uguacaacaaggaaaugcu

SEQ ID NO: 1608007 - RNA, 19 nt, Artificial Sequence
  Description of Artificial Sequence: Synthetic oligonucleotide
  Sense strand starting at position 3711 of SEQ ID NO: 1560555
gcuagacaaguuuguggau

SEQ ID NO: 1608008 - RNA, 19 nt, Artificial Sequence
  Description of Artificial Sequence: Synthetic oligonucleotide
  Antisense strand to SEQ ID NO: 1608007
auccacaaacuugucuagc

SEQ ID NO: 1608009 - RNA, 19 nt, Artificial Sequence
  Description of Artificial Sequence: Synthetic oligonucleotide
  Sense strand starting at position 3712 of SEQ ID NO: 1560555
cuagacaaguuuguggauu

SEQ ID NO: 1608010 - RNA, 19 nt, Artificial Sequence
  Description of Artificial Sequence: Synthetic oligonucleotide
  Antisense strand to SEQ ID NO: 1608009
aauccacaaacuugucuag

SEQ ID NO: 1608011 - RNA, 19 nt, Artificial Sequence
  Description of Artificial Sequence: Synthetic oligonucleotide
  Sense strand starting at position 3753 of SEQ ID NO: 1560555
uucuaaaugucaguuaaga

SEQ ID NO: 1608012 - RNA, 19 nt, Artificial Sequence
  Description of Artificial Sequence: Synthetic oligonucleotide
  Antisense strand to SEQ ID NO: 1608011
ucuuaacugacauuuagaa

SEQ ID NO: 1608013 - RNA, 19 nt, Artificial Sequence
  Description of Artificial Sequence: Synthetic oligonucleotide
  Sense strand starting at position 3891 of SEQ ID NO: 1560555
gugcuaggauuauugaaau

SEQ ID NO: 1608014 - RNA, 19 nt, Artificial Sequence
  Description of Artificial Sequence: Synthetic oligonucleotide
  Antisense strand to SEQ ID NO: 1608013
auuucaauaauccuagcac

SEQ ID NO: 1608015 - RNA, 19 nt, Artificial Sequence
  Description of Artificial Sequence: Synthetic oligonucleotide
  Sense strand starting at position 303 of SEQ ID NO: 1560556
ugagaacuuugagcaaguu

SEQ ID NO: 1608016 - RNA, 19 nt, Artificial Sequence
  Description of Artificial Sequence: Synthetic oligonucleotide
  Antisense strand to SEQ ID NO: 1608015
aacuugcucaaaguucuca

SEQ ID NO: 1608017 - RNA, 19 nt, Artificial Sequence
  Description of Artificial Sequence: Synthetic oligonucleotide
  Sense strand starting at position 327 of SEQ ID NO: 1560556
agaagcaacucuuacuaga

SEQ ID NO: 1608018 - RNA, 19 nt, Artificial Sequence
  Description of Artificial Sequence: Synthetic oligonucleotide
  Antisense strand to SEQ ID NO: 1608017
ucuaguaagaguugcuucu

SEQ ID NO: 1608019 - RNA, 19 nt, Artificial Sequence
  Description of Artificial Sequence: Synthetic oligonucleotide
  Sense strand starting at position 399 of SEQ ID NO: 1560556
gagggcaaguccuauguga

SEQ ID NO: 1608020 - RNA, 19 nt, Artificial Sequence
  Description of Artificial Sequence: Synthetic oligonucleotide
  Antisense strand to SEQ ID NO: 1608019
ucacauaggacuugcccuc

SEQ ID NO: 1608021 - RNA, 19 nt, Artificial Sequence
  Description of Artificial Sequence: Synthetic oligonucleotide
  Sense strand starting at position 401 of SEQ ID NO: 1560556
gggcaaguccuaugugaau

SEQ ID NO: 1608022 - RNA, 19 nt, Artificial Sequence
  Description of Artificial Sequence: Synthetic oligonucleotide
  Antisense strand to SEQ ID NO: 1608021
auucacauaggacuugccc

SEQ ID NO: 1608023 - RNA, 19 nt, Artificial Sequence
  Description of Artificial Sequence: Synthetic oligonucleotide
  Sense strand starting at position 556 of SEQ ID NO: 1560556
gggugugaguuacaccuuu

SEQ ID NO: 1608024 - RNA, 19 nt, Artificial Sequence
  Description of Artificial Sequence: Synthetic oligonucleotide
  Antisense strand to SEQ ID NO: 1608023
aaagguguaacucacaccc

SEQ ID NO: 1608025 - RNA, 19 nt, Artificial Sequence
  Description of Artificial Sequence: Synthetic oligonucleotide
  Sense strand starting at position 725 of SEQ ID NO: 1560556
aaggcaaggucagaaaugu

SEQ ID NO: 1608026 - RNA, 19 nt, Artificial Sequence
  Description of Artificial Sequence: Synthetic oligonucleotide
  Antisense strand to SEQ ID NO: 1608025
acauuucugaccuugccuu

SEQ ID NO: 1608027 - RNA, 19 nt, Artificial Sequence
  Description of Artificial Sequence: Synthetic oligonucleotide
  Sense strand starting at position 764 of SEQ ID NO: 1560556
cccucuuccuaguguauga

SEQ ID NO: 1608028 - RNA, 19 nt, Artificial Sequence
  Description of Artificial Sequence: Synthetic oligonucleotide
  Antisense strand to SEQ ID NO: 1608027
ucauacacuaggaagaggg

SEQ ID NO: 1608029 - RNA, 19 nt, Artificial Sequence
  Description of Artificial Sequence: Synthetic oligonucleotide
  Sense strand starting at position 766 of SEQ ID NO: 1560556
cucuuccuaguguaugaga

SEQ ID NO: 1608030 - RNA, 19 nt, Artificial Sequence
  Description of Artificial Sequence: Synthetic oligonucleotide
  Antisense strand to SEQ ID NO: 1608029
ucucauacacuaggaagag

SEQ ID NO: 1608031 - RNA, 19 nt, Artificial Sequence
  Description of Artificial Sequence: Synthetic oligonucleotide
  Sense strand starting at position 768 of SEQ ID NO: 1560556
cuuccuaguguaugagaga

SEQ ID NO: 1608032 - RNA, 19 nt, Artificial Sequence
  Description of Artificial Sequence: Synthetic oligonucleotide
  Antisense strand to SEQ ID NO: 1608031
ucucucauacacuaggaag

SEQ ID NO: 1608033 - RNA, 19 nt, Artificial Sequence
  Description of Artificial Sequence: Synthetic oligonucleotide
  Sense strand starting at position 2331 of SEQ ID NO: 1560556
cagagcaauugugacaaua

SEQ ID NO: 1608034 - RNA, 19 nt, Artificial Sequence
  Description of Artificial Sequence: Synthetic oligonucleotide
  Antisense strand to SEQ ID NO: 1608033
uauugucacaauugcucug

SEQ ID NO: 1608035 - RNA, 19 nt, Artificial Sequence
  Description of Artificial Sequence: Synthetic oligonucleotide
  Sense strand starting at position 2519 of SEQ ID NO: 1560556
ugucucaugucccaagauu

SEQ ID NO: 1608036 - RNA, 19 nt, Artificial Sequence
  Description of Artificial Sequence: Synthetic oligonucleotide
  Antisense strand to SEQ ID NO: 1608035
aaucuugggacaugagaca

SEQ ID NO: 1608037 - RNA, 19 nt, Artificial Sequence
  Description of Artificial Sequence: Synthetic oligonucleotide
  Sense strand starting at position 2527 of SEQ ID NO: 1560556
gucccaagauuccagaguu

SEQ ID NO: 1608038 - RNA, 19 nt, Artificial Sequence
  Description of Artificial Sequence: Synthetic oligonucleotide
  Antisense strand to SEQ ID NO: 1608037
aacucuggaaucuugggac

SEQ ID NO: 1608039 - RNA, 19 nt, Artificial Sequence
  Description of Artificial Sequence: Synthetic oligonucleotide
  Sense strand starting at position 2656 of SEQ ID NO: 1560556
agccgaggugagugaucaa

SEQ ID NO: 1608040 - RNA, 19 nt, Artificial Sequence
  Description of Artificial Sequence: Synthetic oligonucleotide
  Antisense strand to SEQ ID NO: 1608039
uugaucacucaccucggcu

SEQ ID NO: 1608041 - RNA, 19 nt, Artificial Sequence
  Description of Artificial Sequence: Synthetic oligonucleotide
  Sense strand starting at position 2665 of SEQ ID NO: 1560556
gagugaucaaccgagguca

SEQ ID NO: 1608042 - RNA, 19 nt, Artificial Sequence
  Description of Artificial Sequence: Synthetic oligonucleotide
  Antisense strand to SEQ ID NO: 1608041
ugaccucgguugaucacuc

SEQ ID NO: 1608043 - RNA, 19 nt, Artificial Sequence
  Description of Artificial Sequence: Synthetic oligonucleotide
  Sense strand starting at position 2757 of SEQ ID NO: 1560556
guagcaggcacuuguaaug

SEQ ID NO: 1608044 - RNA, 19 nt, Artificial Sequence
  Description of Artificial Sequence: Synthetic oligonucleotide
  Antisense strand to SEQ ID NO: 1608043
cauuacaagugccugcuac

SEQ ID NO: 1608045 - RNA, 19 nt, Artificial Sequence
  Description of Artificial Sequence: Synthetic oligonucleotide
  Sense strand starting at position 2965 of SEQ ID NO: 1560556
guuguauaaggcugcauaa

SEQ ID NO: 1608046 - RNA, 19 nt, Artificial Sequence
  Description of Artificial Sequence: Synthetic oligonucleotide
  Antisense strand to SEQ ID NO: 1608045
uuaugcagccuuauacaac

SEQ ID NO: 1608047 - RNA, 19 nt, Artificial Sequence
  Description of Artificial Sequence: Synthetic oligonucleotide
  Sense strand starting at position 2988 of SEQ ID NO: 1560556
cagcauucucaagagagug

SEQ ID NO: 1608048 - RNA, 19 nt, Artificial Sequence
  Description of Artificial Sequence: Synthetic oligonucleotide
  Antisense strand to SEQ ID NO: 1608047
cacucucuugagaaugcug

SEQ ID NO: 1608049 - RNA, 19 nt, Artificial Sequence
  Description of Artificial Sequence: Synthetic oligonucleotide
  Sense strand starting at position 3093 of SEQ ID NO: 1560556
ugugguuuaagguggaaua

SEQ ID NO: 1608050 - RNA, 19 nt, Artificial Sequence
  Description of Artificial Sequence: Synthetic oligonucleotide
  Antisense strand to SEQ ID NO: 1608049
uauuccaccuuaaaccaca

SEQ ID NO: 1608051 - RNA, 19 nt, Artificial Sequence
  Description of Artificial Sequence: Synthetic oligonucleotide
  Sense strand starting at position 3276 of SEQ ID NO: 1560556
ccucacuauucguggguga

SEQ ID NO: 1608052 - RNA, 19 nt, Artificial Sequence
  Description of Artificial Sequence: Synthetic oligonucleotide
  Antisense strand to SEQ ID NO: 1608051
ucacccacgaauagugagg

SEQ ID NO: 1608053 - RNA, 19 nt, Artificial Sequence
  Description of Artificial Sequence: Synthetic oligonucleotide
  Sense strand starting at position 3277 of SEQ ID NO: 1560556
cucacuauucgugggugau

SEQ ID NO: 1608054 - RNA, 19 nt, Artificial Sequence
  Description of Artificial Sequence: Synthetic oligonucleotide
  Antisense strand to SEQ ID NO: 1608053
aucacccacgaauagugag

SEQ ID NO: 1608055 - RNA, 19 nt, Artificial Sequence
  Description of Artificial Sequence: Synthetic oligonucleotide
  Sense strand starting at position 3336 of SEQ ID NO: 1560556
gcucaagccucuuacauga

SEQ ID NO: 1608056 - RNA, 19 nt, Artificial Sequence
  Description of Artificial Sequence: Synthetic oligonucleotide
  Antisense strand to SEQ ID NO: 1608055
ucauguaagaggcuugagc

SEQ ID NO: 1608057 - RNA, 19 nt, Artificial Sequence
  Description of Artificial Sequence: Synthetic oligonucleotide
  Sense strand starting at position 3388 of SEQ ID NO: 1560556
uccuccuguguacaugaaa

SEQ ID NO: 1608058 - RNA, 19 nt, Artificial Sequence
  Description of Artificial Sequence: Synthetic oligonucleotide
  Antisense strand to SEQ ID NO: 1608057
uuucauguacacaggagga

SEQ ID NO: 1608059 - RNA, 19 nt, Artificial Sequence
  Description of Artificial Sequence: Synthetic oligonucleotide
  Sense strand starting at position 3570 of SEQ ID NO: 1560556
ccgacuguauauuuauagu

SEQ ID NO: 1608060 - RNA, 19 nt, Artificial Sequence
  Description of Artificial Sequence: Synthetic oligonucleotide
  Antisense strand to SEQ ID NO: 1608059
acuauaaauauacagucgg

SEQ ID NO: 1608061 - RNA, 19 nt, Artificial Sequence
  Description of Artificial Sequence: Synthetic oligonucleotide
  Sense strand starting at position 3843 of SEQ ID NO: 1560556
uggagaacaguuggaguua

SEQ ID NO: 1608062 - RNA, 19 nt, Artificial Sequence
  Description of Artificial Sequence: Synthetic oligonucleotide
  Antisense strand to SEQ ID NO: 1608061
uaacuccaacuguucucca

SEQ ID NO: 1608063 - RNA, 19 nt, Artificial Sequence
  Description of Artificial Sequence: Synthetic oligonucleotide
  Sense strand starting at position 3844 of SEQ ID NO: 1560556
ggagaacaguuggaguuau

SEQ ID NO: 1608064 - RNA, 19 nt, Artificial Sequence
  Description of Artificial Sequence: Synthetic oligonucleotide
  Antisense strand to SEQ ID NO: 1608063
auaacuccaacuguucucc

SEQ ID NO: 1608065 - RNA, 19 nt, Artificial Sequence
  Description of Artificial Sequence: Synthetic oligonucleotide
  Sense strand starting at position 632 of SEQ ID NO: 1560557
uugagcaagugcugaauaa

SEQ ID NO: 1608066 - RNA, 19 nt, Artificial Sequence
  Description of Artificial Sequence: Synthetic oligonucleotide
  Antisense strand to SEQ ID NO: 1608065
uuauucagcacuugcucaa

SEQ ID NO: 1608067 - RNA, 19 nt, Artificial Sequence
  Description of Artificial Sequence: Synthetic oligonucleotide
  Sense strand starting at position 636 of SEQ ID NO: 1560557
gcaagugcugaauaaguga

SEQ ID NO: 1608068 - RNA, 19 nt, Artificial Sequence
  Description of Artificial Sequence: Synthetic oligonucleotide
  Antisense strand to SEQ ID NO: 1608067
ucacuuauucagcacuugc

SEQ ID NO: 1608069 - RNA, 19 nt, Artificial Sequence
  Description of Artificial Sequence: Synthetic oligonucleotide
  Sense strand starting at position 647 of SEQ ID NO: 1560557
auaagugacucuuacuaga

SEQ ID NO: 1608070 - RNA, 19 nt, Artificial Sequence
  Description of Artificial Sequence: Synthetic oligonucleotide
  Antisense strand to SEQ ID NO: 1608069
ucuaguaagagucacuuau

SEQ ID NO: 1608071 - RNA, 19 nt, Artificial Sequence
  Description of Artificial Sequence: Synthetic oligonucleotide
  Sense strand starting at position 650 of SEQ ID NO: 1560557
agugacucuuacuagauuu

SEQ ID NO: 1608072 - RNA, 19 nt, Artificial Sequence
  Description of Artificial Sequence: Synthetic oligonucleotide
  Antisense strand to SEQ ID NO: 1608071
aaaucuaguaagagucacu

SEQ ID NO: 1608073 - RNA, 19 nt, Artificial Sequence
  Description of Artificial Sequence: Synthetic oligonucleotide
  Sense strand starting at position 719 of SEQ ID NO: 1560557
gagggcauguccuauguga

SEQ ID NO: 1608074 - RNA, 19 nt, Artificial Sequence
  Description of Artificial Sequence: Synthetic oligonucleotide
  Antisense strand to SEQ ID NO: 1608073
ucacauaggacaugcccuc

SEQ ID NO: 1608075 - RNA, 19 nt, Artificial Sequence
  Description of Artificial Sequence: Synthetic oligonucleotide
  Sense strand starting at position 721 of SEQ ID NO: 1560557
gggcauguccuaugugaau

SEQ ID NO: 1608076 - RNA, 19 nt, Artificial Sequence
  Description of Artificial Sequence: Synthetic oligonucleotide
  Antisense strand to SEQ ID NO: 1608075
auucacauaggacaugccc

SEQ ID NO: 1608077 - RNA, 19 nt, Artificial Sequence
  Description of Artificial Sequence: Synthetic oligonucleotide
  Sense strand starting at position 868 of SEQ ID NO: 1560557
gcuggagggugucaguuau

SEQ ID NO: 1608078 - RNA, 19 nt, Artificial Sequence
  Description of Artificial Sequence: Synthetic oligonucleotide
  Antisense strand to SEQ ID NO: 1608077
auaacugacacccuccagc

SEQ ID NO: 1608079 - RNA, 19 nt, Artificial Sequence
  Description of Artificial Sequence: Synthetic oligonucleotide
  Sense strand starting at position 872 of SEQ ID NO: 1560557
gagggugucaguuauaccu

SEQ ID NO: 1608080 - RNA, 19 nt, Artificial Sequence
  Description of Artificial Sequence: Synthetic oligonucleotide
  Antisense strand to SEQ ID NO: 1608079
agguauaacugacacccuc

SEQ ID NO: 1608081 - RNA, 19 nt, Artificial Sequence
  Description of Artificial Sequence: Synthetic oligonucleotide
  Sense strand starting at position 874 of SEQ ID NO: 1560557
gggugucaguuauaccuuu

SEQ ID NO: 1608082 - RNA, 19 nt, Artificial Sequence
  Description of Artificial Sequence: Synthetic oligonucleotide
  Antisense strand to SEQ ID NO: 1608081
aaagguauaacugacaccc

SEQ ID NO: 1608083 - RNA, 19 nt, Artificial Sequence
  Description of Artificial Sequence: Synthetic oligonucleotide
  Sense strand starting at position 881 of SEQ ID NO: 1560557
aguuauaccuuuguccuca

SEQ ID NO: 1608084 - RNA, 19 nt, Artificial Sequence
  Description of Artificial Sequence: Synthetic oligonucleotide
  Antisense strand to SEQ ID NO: 1608083
ugaggacaaagguauaacu

SEQ ID NO: 1608085 - RNA, 19 nt, Artificial Sequence
  Description of Artificial Sequence: Synthetic oligonucleotide
  Sense strand starting at position 886 of SEQ ID NO: 1560557
uaccuuuguccucagagga

SEQ ID NO: 1608086 - RNA, 19 nt, Artificial Sequence
  Description of Artificial Sequence: Synthetic oligonucleotide
  Antisense strand to SEQ ID NO: 1608085
uccucugaggacaaaggua

SEQ ID NO: 1608087 - RNA, 19 nt, Artificial Sequence
  Description of Artificial Sequence: Synthetic oligonucleotide
  Sense strand starting at position 1055 of SEQ ID NO: 1560557
agaaaugugggccgaguau

SEQ ID NO: 1608088 - RNA, 19 nt, Artificial Sequence
  Description of Artificial Sequence: Synthetic oligonucleotide
  Antisense strand to SEQ ID NO: 1608087
auacucggcccacauuucu

SEQ ID NO: 1608089 - RNA, 19 nt, Artificial Sequence
  Description of Artificial Sequence: Synthetic oligonucleotide
  Sense strand starting at position 1232 of SEQ ID NO: 1560557
gaaagaucaugauagacga

SEQ ID NO: 1608090 - RNA, 19 nt, Artificial Sequence
  Description of Artificial Sequence: Synthetic oligonucleotide
  Antisense strand to SEQ ID NO: 1608089
ucgucuaucaugaucuuuc

SEQ ID NO: 1608091 - RNA, 19 nt, Artificial Sequence
  Description of Artificial Sequence: Synthetic oligonucleotide
  Sense strand starting at position 1371 of SEQ ID NO: 1560557
gcucucagcuguggagaga

SEQ ID NO: 1608092 - RNA, 19 nt, Artificial Sequence
  Description of Artificial Sequence: Synthetic oligonucleotide
  Antisense strand to SEQ ID NO: 1608091
ucucuccacagcugagagc

SEQ ID NO: 1608093 - RNA, 19 nt, Artificial Sequence
  Description of Artificial Sequence: Synthetic oligonucleotide
  Sense strand starting at position 2150 of SEQ ID NO: 1560557
ccuggaaauuguugugacu

SEQ ID NO: 1608094 - RNA, 19 nt, Artificial Sequence
  Description of Artificial Sequence: Synthetic oligonucleotide
  Antisense strand to SEQ ID NO: 1608093
agucacaacaauuuccagg

SEQ ID NO: 1608095 - RNA, 19 nt, Artificial Sequence
  Description of Artificial Sequence: Synthetic oligonucleotide
  Sense strand starting at position 2152 of SEQ ID NO: 1560557
uggaaauuguugugacuac

SEQ ID NO: 1608096 - RNA, 19 nt, Artificial Sequence
  Description of Artificial Sequence: Synthetic oligonucleotide
  Antisense strand to SEQ ID NO: 1608095
guagucacaacaauuucca

SEQ ID NO: 1608097 - RNA, 19 nt, Artificial Sequence
  Description of Artificial Sequence: Synthetic oligonucleotide
  Sense strand starting at position 2153 of SEQ ID NO: 1560557
ggaaauuguugugacuaca

SEQ ID NO: 1608098 - RNA, 19 nt, Artificial Sequence
  Description of Artificial Sequence: Synthetic oligonucleotide
  Antisense strand to SEQ ID NO: 1608097
uguagucacaacaauuucc

SEQ ID NO: 1608099 - RNA, 19 nt, Artificial Sequence
  Description of Artificial Sequence: Synthetic oligonucleotide
  Sense strand starting at position 2231 of SEQ ID NO: 1560557
ucacacaugaggugauuga

SEQ ID NO: 1608100 - RNA, 19 nt, Artificial Sequence
  Description of Artificial Sequence: Synthetic oligonucleotide
  Antisense strand to SEQ ID NO: 1608099
ucaaucaccucauguguga

SEQ ID NO: 1608101 - RNA, 19 nt, Artificial Sequence
  Description of Artificial Sequence: Synthetic oligonucleotide
  Sense strand starting at position 2235 of SEQ ID NO: 1560557
acaugaggugauugaauuc

SEQ ID NO: 1608102 - RNA, 19 nt, Artificial Sequence
  Description of Artificial Sequence: Synthetic oligonucleotide
  Antisense strand to SEQ ID NO: 1608101
gaauucaaucaccucaugu

SEQ ID NO: 1608103 - RNA, 19 nt, Artificial Sequence
  Description of Artificial Sequence: Synthetic oligonucleotide
  Sense strand starting at position 2242 of SEQ ID NO: 1560557
gugauugaauucugugcuu

SEQ ID NO: 1608104 - RNA, 19 nt, Artificial Sequence
  Description of Artificial Sequence: Synthetic oligonucleotide
  Antisense strand to SEQ ID NO: 1608103
aagcacagaauucaaucac

SEQ ID NO: 1608105 - RNA, 19 nt, Artificial Sequence
  Description of Artificial Sequence: Synthetic oligonucleotide
  Sense strand starting at position 2393 of SEQ ID NO: 1560557
ccugaugaguuucuaguac

SEQ ID NO: 1608106 - RNA, 19 nt, Artificial Sequence
  Description of Artificial Sequence: Synthetic oligonucleotide
  Antisense strand to SEQ ID NO: 1608105
guacuagaaacucaucagg

SEQ ID NO: 1608107 - RNA, 19 nt, Artificial Sequence
  Description of Artificial Sequence: Synthetic oligonucleotide
  Sense strand starting at position 2397 of SEQ ID NO: 1560557
augaguuucuaguacuaaa

SEQ ID NO: 1608108 - RNA, 19 nt, Artificial Sequence
  Description of Artificial Sequence: Synthetic oligonucleotide
  Antisense strand to SEQ ID NO: 1608107
uuuaguacuagaaacucau

SEQ ID NO: 1608109 - RNA, 19 nt, Artificial Sequence
  Description of Artificial Sequence: Synthetic oligonucleotide
  Sense strand starting at position 2835 of SEQ ID NO: 1560557
uuaucuuguuguuguaaac

SEQ ID NO: 1608110 - RNA, 19 nt, Artificial Sequence
  Description of Artificial Sequence: Synthetic oligonucleotide
  Antisense strand to SEQ ID NO: 1608109
guuuacaacaacaagauaa

SEQ ID NO: 1608111 - RNA, 19 nt, Artificial Sequence
  Description of Artificial Sequence: Synthetic oligonucleotide
  Sense strand starting at position 2907 of SEQ ID NO: 1560557
ucacuauuccugggugauu

SEQ ID NO: 1608112 - RNA, 19 nt, Artificial Sequence
  Description of Artificial Sequence: Synthetic oligonucleotide
  Antisense strand to SEQ ID NO: 1608111
aaucacccaggaauaguga

SEQ ID NO: 1608113 - RNA, 19 nt, Artificial Sequence
  Description of Artificial Sequence: Synthetic oligonucleotide
  Sense strand starting at position 2908 of SEQ ID NO: 1560557
cacuauuccugggugauug

SEQ ID NO: 1608114 - RNA, 19 nt, Artificial Sequence
  Description of Artificial Sequence: Synthetic oligonucleotide
  Antisense strand to SEQ ID NO: 1608113
caaucacccaggaauagug

SEQ ID NO: 1608115 - RNA, 19 nt, Artificial Sequence
  Description of Artificial Sequence: Synthetic oligonucleotide
  Sense strand starting at position 2979 of SEQ ID NO: 1560557
caugaaauggcauagcgaa

SEQ ID NO: 1608116 - RNA, 19 nt, Artificial Sequence
  Description of Artificial Sequence: Synthetic oligonucleotide
  Antisense strand to SEQ ID NO: 1608115
uucgcuaugccauuucaug

SEQ ID NO: 1608117 - RNA, 19 nt, Artificial Sequence
  Description of Artificial Sequence: Synthetic oligonucleotide
  Sense strand starting at position 3548 of SEQ ID NO: 1560557
augauauguugauaugugu

SEQ ID NO: 1608118 - RNA, 19 nt, Artificial Sequence
  Description of Artificial Sequence: Synthetic oligonucleotide
  Antisense strand to SEQ ID NO: 1608117
acacauaucaacauaucau

SEQ ID NO: 1608119 - RNA, 19 nt, Artificial Sequence
  Description of Artificial Sequence: Synthetic oligonucleotide
  Sense strand starting at position 3697 of SEQ ID NO: 1560557
uccuaugugcuguaucuuu

SEQ ID NO: 1608120 - RNA, 19 nt, Artificial Sequence
  Description of Artificial Sequence: Synthetic oligonucleotide
  Antisense strand to SEQ ID NO: 1608119
aaagauacagcacauagga

SEQ ID NO: 1608121 - RNA, 19 nt, Artificial Sequence
  Description of Artificial Sequence: Synthetic oligonucleotide
  Sense strand starting at position 3704 of SEQ ID NO: 1560557
ugcuguaucuuuggaugga

SEQ ID NO: 1608122 - RNA, 19 nt, Artificial Sequence
  Description of Artificial Sequence: Synthetic oligonucleotide
  Antisense strand to SEQ ID NO: 1608121
uccauccaaagauacagca

SEQ ID NO: 1608123 - RNA, 19 nt, Artificial Sequence
  Description of Artificial Sequence: Synthetic oligonucleotide
  Sense strand starting at position 3705 of SEQ ID NO: 1560557
gcuguaucuuuggauggaa

SEQ ID NO: 1608124 - RNA, 19 nt, Artificial Sequence
  Description of Artificial Sequence: Synthetic oligonucleotide
  Antisense strand to SEQ ID NO: 1608123
uuccauccaaagauacagc

SEQ ID NO: 1608125 - RNA, 19 nt, Artificial Sequence
  Description of Artificial Sequence: Synthetic oligonucleotide
  Sense strand starting at position 3707 of SEQ ID NO: 1560557
uguaucuuuggauggaaau

SEQ ID NO: 1608126 - RNA, 19 nt, Artificial Sequence
  Description of Artificial Sequence: Synthetic oligonucleotide
  Antisense strand to SEQ ID NO: 1608125
auuuccauccaaagauaca

SEQ ID NO: 1608127 - RNA, 19 nt, Artificial Sequence
  Description of Artificial Sequence: Synthetic oligonucleotide
  Sense strand starting at position 3708 of SEQ ID NO: 1560557
guaucuuuggauggaaauu

SEQ ID NO: 1608128 - RNA, 19 nt, Artificial Sequence
  Description of Artificial Sequence: Synthetic oligonucleotide
  Antisense strand to SEQ ID NO: 1608127
aauuuccauccaaagauac

SEQ ID NO: 1608129 - RNA, 19 nt, Artificial Sequence
  Description of Artificial Sequence: Synthetic oligonucleotide
  Sense strand starting at position 3748 of SEQ ID NO: 1560557
gcuccauucugcuuccaga

SEQ ID NO: 1608130 - RNA, 19 nt, Artificial Sequence
  Description of Artificial Sequence: Synthetic oligonucleotide
  Antisense strand to SEQ ID NO: 1608129
ucuggaagcagaauggagc

SEQ ID NO: 1608131 - RNA, 19 nt, Artificial Sequence
  Description of Artificial Sequence: Synthetic oligonucleotide
  Sense strand starting at position 592 of SEQ ID NO: 1560558
cagcaagugucagcugaga

SEQ ID NO: 1608132 - RNA, 19 nt, Artificial Sequence
  Description of Artificial Sequence: Synthetic oligonucleotide
  Antisense strand to SEQ ID NO: 1608131
ucucagcugacacuugcug

SEQ ID NO: 1608133 - RNA, 19 nt, Artificial Sequence
  Description of Artificial Sequence: Synthetic oligonucleotide
  Sense strand starting at position 594 of SEQ ID NO: 1560558
gcaagugucagcugagaac

SEQ ID NO: 1608134 - RNA, 19 nt, Artificial Sequence
  Description of Artificial Sequence: Synthetic oligonucleotide
  Antisense strand to SEQ ID NO: 1608133
guucucagcugacacuugc

SEQ ID NO: 1608135 - RNA, 19 nt, Artificial Sequence
  Description of Artificial Sequence: Synthetic oligonucleotide
  Sense strand starting at position 760 of SEQ ID NO: 1560558
cuggaaugucagggucaug

SEQ ID NO: 1608136 - RNA, 19 nt, Artificial Sequence
  Description of Artificial Sequence: Synthetic oligonucleotide
  Antisense strand to SEQ ID NO: 1608135
caugacccugacauuccag

SEQ ID NO: 1608137 - RNA, 19 nt, Artificial Sequence
  Description of Artificial Sequence: Synthetic oligonucleotide
  Sense strand starting at position 763 of SEQ ID NO: 1560558
gaaugucagggucaugacu

SEQ ID NO: 1608138 - RNA, 19 nt, Artificial Sequence
  Description of Artificial Sequence: Synthetic oligonucleotide
  Antisense strand to SEQ ID NO: 1608137
agucaugacccugacauuc

SEQ ID NO: 1608139 - RNA, 19 nt, Artificial Sequence
  Description of Artificial Sequence: Synthetic oligonucleotide
  Sense strand starting at position 790 of SEQ ID NO: 1560558
cccaccucuuagguagaau

SEQ ID NO: 1608140 - RNA, 19 nt, Artificial Sequence
  Description of Artificial Sequence: Synthetic oligonucleotide
  Antisense strand to SEQ ID NO: 1608139
auucuaccuaagagguggg

SEQ ID NO: 1608141 - RNA, 19 nt, Artificial Sequence
  Description of Artificial Sequence: Synthetic oligonucleotide
  Sense strand starting at position 855 of SEQ ID NO: 1560558
gugugaguuaugcucuugu

SEQ ID NO: 1608142 - RNA, 19 nt, Artificial Sequence
  Description of Artificial Sequence: Synthetic oligonucleotide
  Antisense strand to SEQ ID NO: 1608141
acaagagcauaacucacac

SEQ ID NO: 1608143 - RNA, 19 nt, Artificial Sequence
  Description of Artificial Sequence: Synthetic oligonucleotide
  Sense strand starting at position 862 of SEQ ID NO: 1560558
uuaugcucuuguccucaga

SEQ ID NO: 1608144 - RNA, 19 nt, Artificial Sequence
  Description of Artificial Sequence: Synthetic oligonucleotide
  Antisense strand to SEQ ID NO: 1608143
ucugaggacaagagcauaa

SEQ ID NO: 1608145 - RNA, 19 nt, Artificial Sequence
  Description of Artificial Sequence: Synthetic oligonucleotide
  Sense strand starting at position 2101 of SEQ ID NO: 1560558
ggcuauuucuaccuugcau

SEQ ID NO: 1608146 - RNA, 19 nt, Artificial Sequence
  Description of Artificial Sequence: Synthetic oligonucleotide
  Antisense strand to SEQ ID NO: 1608145
augcaagguagaaauagcc

SEQ ID NO: 1608147 - RNA, 19 nt, Artificial Sequence
  Description of Artificial Sequence: Synthetic oligonucleotide
  Sense strand starting at position 2127 of SEQ ID NO: 1560558
aguggcuguuuggucaaga

SEQ ID NO: 1608148 - RNA, 19 nt, Artificial Sequence
  Description of Artificial Sequence: Synthetic oligonucleotide
  Antisense strand to SEQ ID NO: 1608147
ucuugaccaaacagccacu

SEQ ID NO: 1608149 - RNA, 19 nt, Artificial Sequence
  Description of Artificial Sequence: Synthetic oligonucleotide
  Sense strand starting at position 2160 of SEQ ID NO: 1560558
ccuggaaauuguuccaacu

SEQ ID NO: 1608150 - RNA, 19 nt, Artificial Sequence
  Description of Artificial Sequence: Synthetic oligonucleotide
  Antisense strand to SEQ ID NO: 1608149
aguuggaacaauuuccagg

SEQ ID NO: 1608151 - RNA, 19 nt, Artificial Sequence
  Description of Artificial Sequence: Synthetic oligonucleotide
  Sense strand starting at position 2254 of SEQ ID NO: 1560558
acugaaugcuuggcuuaca

SEQ ID NO: 1608152 - RNA, 19 nt, Artificial Sequence
  Description of Artificial Sequence: Synthetic oligonucleotide
  Antisense strand to SEQ ID NO: 1608151
uguaagccaagcauucagu

SEQ ID NO: 1608153 - RNA, 19 nt, Artificial Sequence
  Description of Artificial Sequence: Synthetic oligonucleotide
  Sense strand starting at position 2255 of SEQ ID NO: 1560558
cugaaugcuuggcuuacau

SEQ ID NO: 1608154 - RNA, 19 nt, Artificial Sequence
  Description of Artificial Sequence: Synthetic oligonucleotide
  Antisense strand to SEQ ID NO: 1608153
auguaagccaagcauucag

SEQ ID NO: 1608155 - RNA, 19 nt, Artificial Sequence
  Description of Artificial Sequence: Synthetic oligonucleotide
  Sense strand starting at position 2501 of SEQ ID NO: 1560558
uggugagaccucggcucau

SEQ ID NO: 1608156 - RNA, 19 nt, Artificial Sequence
  Description of Artificial Sequence: Synthetic oligonucleotide
  Antisense strand to SEQ ID NO: 1608155
augagccgaggucucacca

SEQ ID NO: 1608157 - RNA, 19 nt, Artificial Sequence
  Description of Artificial Sequence: Synthetic oligonucleotide
  Sense strand starting at position 2743 of SEQ ID NO: 1560558
cgggacauucuauaugugu

SEQ ID NO: 1608158 - RNA, 19 nt, Artificial Sequence
  Description of Artificial Sequence: Synthetic oligonucleotide
  Antisense strand to SEQ ID NO: 1608157
acacauauagaaugucccg

SEQ ID NO: 1608159 - RNA, 19 nt, Artificial Sequence
  Description of Artificial Sequence: Synthetic oligonucleotide
  Sense strand starting at position 2764 of SEQ ID NO: 1560558
guaugugugcguuuauaua

SEQ ID NO: 1608160 - RNA, 19 nt, Artificial Sequence
  Description of Artificial Sequence: Synthetic oligonucleotide
  Antisense strand to SEQ ID NO: 1608159
uauauaaacgcacacauac

SEQ ID NO: 1608161 - RNA, 19 nt, Artificial Sequence
  Description of Artificial Sequence: Synthetic oligonucleotide
  Sense strand starting at position 2884 of SEQ ID NO: 1560558
ucucacauuuguguuucua

SEQ ID NO: 1608162 - RNA, 19 nt, Artificial Sequence
  Description of Artificial Sequence: Synthetic oligonucleotide
  Antisense strand to SEQ ID NO: 1608161
uagaaacacaaaugugaga

SEQ ID NO: 1608163 - RNA, 19 nt, Artificial Sequence
  Description of Artificial Sequence: Synthetic oligonucleotide
  Sense strand starting at position 2886 of SEQ ID NO: 1560558
ucacauuuguguuucuaug

SEQ ID NO: 1608164 - RNA, 19 nt, Artificial Sequence
  Description of Artificial Sequence: Synthetic oligonucleotide
  Antisense strand to SEQ ID NO: 1608163
cauagaaacacaaauguga

SEQ ID NO: 1608165 - RNA, 19 nt, Artificial Sequence
  Description of Artificial Sequence: Synthetic oligonucleotide
  Sense strand starting at position 2948 of SEQ ID NO: 1560558
uggauugcaguuuaauagu

SEQ ID NO: 1608166 - RNA, 19 nt, Artificial Sequence
  Description of Artificial Sequence: Synthetic oligonucleotide
  Antisense strand to SEQ ID NO: 1608165
acuauuaaacugcaaucca

SEQ ID NO: 1608167 - RNA, 19 nt, Artificial Sequence
  Description of Artificial Sequence: Synthetic oligonucleotide
  Sense strand starting at position 2954 of SEQ ID NO: 1560558
gcaguuuaauaguccauac

SEQ ID NO: 1608168 - RNA, 19 nt, Artificial Sequence
  Description of Artificial Sequence: Synthetic oligonucleotide
  Antisense strand to SEQ ID NO: 1608167
guauggacuauuaaacugc

SEQ ID NO: 1608169 - RNA, 19 nt, Artificial Sequence
  Description of Artificial Sequence: Synthetic oligonucleotide
  Sense strand starting at position 2956 of SEQ ID NO: 1560558
aguuuaauaguccauacau

SEQ ID NO: 1608170 - RNA, 19 nt, Artificial Sequence
  Description of Artificial Sequence: Synthetic oligonucleotide
  Antisense strand to SEQ ID NO: 1608169
auguauggacuauuaaacu

SEQ ID NO: 1608171 - RNA, 19 nt, Artificial Sequence
  Description of Artificial Sequence: Synthetic oligonucleotide
  Sense strand starting at position 3047 of SEQ ID NO: 1560558
uaacucgggccuugauaau

SEQ ID NO: 1608172 - RNA, 19 nt, Artificial Sequence
  Description of Artificial Sequence: Synthetic oligonucleotide
  Antisense strand to SEQ ID NO: 1608171
auuaucaaggcccgaguua

SEQ ID NO: 1608173 - RNA, 19 nt, Artificial Sequence
  Description of Artificial Sequence: Synthetic oligonucleotide
  Sense strand starting at position 3113 of SEQ ID NO: 1560558
auauuuaccuaggaaugaa

SEQ ID NO: 1608174 - RNA, 19 nt, Artificial Sequence
  Description of Artificial Sequence: Synthetic oligonucleotide
  Antisense strand to SEQ ID NO: 1608173
uucauuccuagguaaauau

SEQ ID NO: 1608175 - RNA, 19 nt, Artificial Sequence
  Description of Artificial Sequence: Synthetic oligonucleotide
  Sense strand starting at position 3197 of SEQ ID NO: 1560558
gaccaaauguggccuggaa

SEQ ID NO: 1608176 - RNA, 19 nt, Artificial Sequence
  Description of Artificial Sequence: Synthetic oligonucleotide
  Antisense strand to SEQ ID NO: 1608175
uuccaggccacauuugguc

SEQ ID NO: 1608177 - RNA, 19 nt, Artificial Sequence
  Description of Artificial Sequence: Synthetic oligonucleotide
  Sense strand starting at position 3199 of SEQ ID NO: 1560558
ccaaauguggccuggaaag

SEQ ID NO: 1608178 - RNA, 19 nt, Artificial Sequence
  Description of Artificial Sequence: Synthetic oligonucleotide
  Antisense strand to SEQ ID NO: 1608177
cuuuccaggccacauuugg

SEQ ID NO: 1608179 - RNA, 19 nt, Artificial Sequence
  Description of Artificial Sequence: Synthetic oligonucleotide
  Sense strand starting at position 3201 of SEQ ID NO: 1560558
aaauguggccuggaaaguu

SEQ ID NO: 1608180 - RNA, 19 nt, Artificial Sequence
  Description of Artificial Sequence: Synthetic oligonucleotide
  Antisense strand to SEQ ID NO: 1608179
aacuuuccaggccacauuu

SEQ ID NO: 1608181 - RNA, 19 nt, Artificial Sequence
  Description of Artificial Sequence: Synthetic oligonucleotide
  Sense strand starting at position 3277 of SEQ ID NO: 1560558
cuguccuguuugucauuua

SEQ ID NO: 1608182 - RNA, 19 nt, Artificial Sequence
  Description of Artificial Sequence: Synthetic oligonucleotide
  Antisense strand to SEQ ID NO: 1608181
uaaaugacaaacaggacag

SEQ ID NO: 1608183 - RNA, 19 nt, Artificial Sequence
  Description of Artificial Sequence: Synthetic oligonucleotide
  Sense strand starting at position 3280 of SEQ ID NO: 1560558
uccuguuugucauuuauga

SEQ ID NO: 1608184 - RNA, 19 nt, Artificial Sequence
  Description of Artificial Sequence: Synthetic oligonucleotide
  Antisense strand to SEQ ID NO: 1608183
ucauaaaugacaaacagga

SEQ ID NO: 1608185 - RNA, 19 nt, Artificial Sequence
  Description of Artificial Sequence: Synthetic oligonucleotide
  Sense strand starting at position 3316 of SEQ ID NO: 1560558
cguauauauuugcuugcca

SEQ ID NO: 1608186 - RNA, 19 nt, Artificial Sequence
  Description of Artificial Sequence: Synthetic oligonucleotide
  Antisense strand to SEQ ID NO: 1608185
uggcaagcaaauauauacg

SEQ ID NO: 1608187 - RNA, 19 nt, Artificial Sequence
  Description of Artificial Sequence: Synthetic oligonucleotide
  Sense strand starting at position 3317 of SEQ ID NO: 1560558
guauauauuugcuugccau

SEQ ID NO: 1608188 - RNA, 19 nt, Artificial Sequence
  Description of Artificial Sequence: Synthetic oligonucleotide
  Antisense strand to SEQ ID NO: 1608187
auggcaagcaaauauauac

SEQ ID NO: 1608189 - RNA, 19 nt, Artificial Sequence
  Description of Artificial Sequence: Synthetic oligonucleotide
  Sense strand starting at position 3370 of SEQ ID NO: 1560558
uuugcugauguguaguauu

SEQ ID NO: 1608190 - RNA, 19 nt, Artificial Sequence
  Description of Artificial Sequence: Synthetic oligonucleotide
  Antisense strand to SEQ ID NO: 1608189
aauacuacacaucagcaaa

SEQ ID NO: 1608191 - RNA, 19 nt, Artificial Sequence
  Description of Artificial Sequence: Synthetic oligonucleotide
  Sense strand starting at position 3381 of SEQ ID NO: 1560558
guaguauuucugcaagcga

SEQ ID NO: 1608192 - RNA, 19 nt, Artificial Sequence
  Description of Artificial Sequence: Synthetic oligonucleotide
  Antisense strand to SEQ ID NO: 1608191
ucgcuugcagaaauacuac

SEQ ID NO: 1608193 - RNA, 19 nt, Artificial Sequence
  Description of Artificial Sequence: Synthetic oligonucleotide
  Sense strand starting at position 3438 of SEQ ID NO: 1560558
acagacauuugaggcuuau

SEQ ID NO: 1608194 - RNA, 19 nt, Artificial Sequence
  Description of Artificial Sequence: Synthetic oligonucleotide
  Antisense strand to SEQ ID NO: 1608193
auaagccucaaaugucugu

SEQ ID NO: 1608195 - RNA, 19 nt, Artificial Sequence
  Description of Artificial Sequence: Synthetic oligonucleotide
  Sense strand starting at position 3485 of SEQ ID NO: 1560558
cccagucauuugccgagau

SEQ ID NO: 1608196 - RNA, 19 nt, Artificial Sequence
  Description of Artificial Sequence: Synthetic oligonucleotide
  Antisense strand to SEQ ID NO: 1608195
aucucggcaaaugacuggg

SEQ ID NO: 1608197 - RNA, 19 nt, Artificial Sequence
  Description of Artificial Sequence: Synthetic oligonucleotide
  Sense strand starting at position 3487 of SEQ ID NO: 1560558
cagucauuugccgagaugu

SEQ ID NO: 1608198 - RNA, 19 nt, Artificial Sequence
  Description of Artificial Sequence: Synthetic oligonucleotide
  Antisense strand to SEQ ID NO: 1608197
acaucucggcaaaugacug

SEQ ID NO: 1608199 - RNA, 19 nt, Artificial Sequence
  Description of Artificial Sequence: Synthetic oligonucleotide
  Sense strand starting at position 3489 of SEQ ID NO: 1560558
gucauuugccgagaugugu

SEQ ID NO: 1608200 - RNA, 19 nt, Artificial Sequence
  Description of Artificial Sequence: Synthetic oligonucleotide
  Antisense strand to SEQ ID NO: 1608199
acacaucucggcaaaugac

SEQ ID NO: 1608201 - RNA, 19 nt, Artificial Sequence
  Description of Artificial Sequence: Synthetic oligonucleotide
  Sense strand starting at position 3622 of SEQ ID NO: 1560558
agcauuuccuuguuguaca

SEQ ID NO: 1608202 - RNA, 19 nt, Artificial Sequence
  Description of Artificial Sequence: Synthetic oligonucleotide
  Antisense strand to SEQ ID NO: 1608201
uguacaacaaggaaaugcu

SEQ ID NO: 1608203 - RNA, 19 nt, Artificial Sequence
  Description of Artificial Sequence: Synthetic oligonucleotide
  Sense strand starting at position 3726 of SEQ ID NO: 1560558
gcuagacaaguuuguggau

SEQ ID NO: 1608204 - RNA, 19 nt, Artificial Sequence
  Description of Artificial Sequence: Synthetic oligonucleotide
  Antisense strand to SEQ ID NO: 1608203
auccacaaacuugucuagc

SEQ ID NO: 1608205 - RNA, 19 nt, Artificial Sequence
  Description of Artificial Sequence: Synthetic oligonucleotide
  Sense strand starting at position 3727 of SEQ ID NO: 1560558
cuagacaaguuuguggauu

SEQ ID NO: 1608206 - RNA, 19 nt, Artificial Sequence
  Description of Artificial Sequence: Synthetic oligonucleotide
  Antisense strand to SEQ ID NO: 1608205
aauccacaaacuugucuag

SEQ ID NO: 1608207 - RNA, 19 nt, Artificial Sequence
  Description of Artificial Sequence: Synthetic oligonucleotide
  Sense strand starting at position 3768 of SEQ ID NO: 1560558
uucuaaaugucaguuaaga

SEQ ID NO: 1608208 - RNA, 19 nt, Artificial Sequence
  Description of Artificial Sequence: Synthetic oligonucleotide
  Antisense strand to SEQ ID NO: 1608207
ucuuaacugacauuuagaa

SEQ ID NO: 1608209 - RNA, 19 nt, Artificial Sequence
  Description of Artificial Sequence: Synthetic oligonucleotide
  Sense strand starting at position 3906 of SEQ ID NO: 1560558
gugcuaggauuauugaaau

SEQ ID NO: 1608210 - RNA, 19 nt, Artificial Sequence
  Description of Artificial Sequence: Synthetic oligonucleotide
  Antisense strand to SEQ ID NO: 1608209
auuucaauaauccuagcac

SEQ ID NO: 1608211 - RNA, 19 nt, Artificial Sequence
  Description of Artificial Sequence: Synthetic oligonucleotide
  Sense strand starting at position 315 of SEQ ID NO: 1560559
caacaagugucagcugaga

SEQ ID NO: 1608212 - RNA, 19 nt, Artificial Sequence
  Description of Artificial Sequence: Synthetic oligonucleotide
  Antisense strand to SEQ ID NO: 1608211
ucucagcugacacuuguug

SEQ ID NO: 1608213 - RNA, 19 nt, Artificial Sequence
  Description of Artificial Sequence: Synthetic oligonucleotide
  Sense strand starting at position 317 of SEQ ID NO: 1560559
acaagugucagcugagaac

SEQ ID NO: 1608214 - RNA, 19 nt, Artificial Sequence
  Description of Artificial Sequence: Synthetic oligonucleotide
  Antisense strand to SEQ ID NO: 1608213
guucucagcugacacuugu

SEQ ID NO: 1608215 - RNA, 19 nt, Artificial Sequence
  Description of Artificial Sequence: Synthetic oligonucleotide
  Sense strand starting at position 329 of SEQ ID NO: 1560559
ugagaacuuugagcaaguu

SEQ ID NO: 1608216 - RNA, 19 nt, Artificial Sequence
  Description of Artificial Sequence: Synthetic oligonucleotide
  Antisense strand to SEQ ID NO: 1608215
aacuugcucaaaguucuca

SEQ ID NO: 1608217 - RNA, 19 nt, Artificial Sequence
  Description of Artificial Sequence: Synthetic oligonucleotide
  Sense strand starting at position 353 of SEQ ID NO: 1560559
agaagcaacucuuacuaga

SEQ ID NO: 1608218 - RNA, 19 nt, Artificial Sequence
  Description of Artificial Sequence: Synthetic oligonucleotide
  Antisense strand to SEQ ID NO: 1608217
ucuaguaagaguugcuucu

SEQ ID NO: 1608219 - RNA, 19 nt, Artificial Sequence
  Description of Artificial Sequence: Synthetic oligonucleotide
  Sense strand starting at position 425 of SEQ ID NO: 1560559
gagggcaaguccuauguga

SEQ ID NO: 1608220 - RNA, 19 nt, Artificial Sequence
  Description of Artificial Sequence: Synthetic oligonucleotide
  Antisense strand to SEQ ID NO: 1608219
ucacauaggacuugcccuc

SEQ ID NO: 1608221 - RNA, 19 nt, Artificial Sequence
  Description of Artificial Sequence: Synthetic oligonucleotide
  Sense strand starting at position 427 of SEQ ID NO: 1560559
gggcaaguccuaugugaau

SEQ ID NO: 1608222 - RNA, 19 nt, Artificial Sequence
  Description of Artificial Sequence: Synthetic oligonucleotide
  Antisense strand to SEQ ID NO: 1608221
auucacauaggacuugccc

SEQ ID NO: 1608223 - RNA, 19 nt, Artificial Sequence
  Description of Artificial Sequence: Synthetic oligonucleotide
  Sense strand starting at position 433 of SEQ ID NO: 1560559
guccuaugugaauggaaua

SEQ ID NO: 1608224 - RNA, 19 nt, Artificial Sequence
  Description of Artificial Sequence: Synthetic oligonucleotide
  Antisense strand to SEQ ID NO: 1608223
uauuccauucacauaggac

SEQ ID NO: 1608225 - RNA, 19 nt, Artificial Sequence
  Description of Artificial Sequence: Synthetic oligonucleotide
  Sense strand starting at position 582 of SEQ ID NO: 1560559
gggugugaguuacaccuuu

SEQ ID NO: 1608226 - RNA, 19 nt, Artificial Sequence
  Description of Artificial Sequence: Synthetic oligonucleotide
  Antisense strand to SEQ ID NO: 1608225
aaagguguaacucacaccc

SEQ ID NO: 1608227 - RNA, 19 nt, Artificial Sequence
  Description of Artificial Sequence: Synthetic oligonucleotide
  Sense strand starting at position 751 of SEQ ID NO: 1560559
aaggcaaggucagaaaugu

SEQ ID NO: 1608228 - RNA, 19 nt, Artificial Sequence
  Description of Artificial Sequence: Synthetic oligonucleotide
  Antisense strand to SEQ ID NO: 1608227
acauuucugaccuugccuu

SEQ ID NO: 1608229 - RNA, 19 nt, Artificial Sequence
  Description of Artificial Sequence: Synthetic oligonucleotide
  Sense strand starting at position 790 of SEQ ID NO: 1560559
cccucuuccuaguguauga

SEQ ID NO: 1608230 - RNA, 19 nt, Artificial Sequence
  Description of Artificial Sequence: Synthetic oligonucleotide
  Antisense strand to SEQ ID NO: 1608229
ucauacacuaggaagaggg

SEQ ID NO: 1608231 - RNA, 19 nt, Artificial Sequence
  Description of Artificial Sequence: Synthetic oligonucleotide
  Sense strand starting at position 792 of SEQ ID NO: 1560559
cucuuccuaguguaugaga

SEQ ID NO: 1608232 - RNA, 19 nt, Artificial Sequence
  Description of Artificial Sequence: Synthetic oligonucleotide
  Antisense strand to SEQ ID NO: 1608231
ucucauacacuaggaagag

SEQ ID NO: 1608233 - RNA, 19 nt, Artificial Sequence
  Description of Artificial Sequence: Synthetic oligonucleotide
  Sense strand starting at position 794 of SEQ ID NO: 1560559
cuuccuaguguaugagaga

SEQ ID NO: 1608234 - RNA, 19 nt, Artificial Sequence
  Description of Artificial Sequence: Synthetic oligonucleotide
  Antisense strand to SEQ ID NO: 1608233
ucucucauacacuaggaag

SEQ ID NO: 1608235 - RNA, 19 nt, Artificial Sequence
  Description of Artificial Sequence: Synthetic oligonucleotide
  Sense strand starting at position 2146 of SEQ ID NO: 1560559
ccuggaaauugcucucacu

SEQ ID NO: 1608236 - RNA, 19 nt, Artificial Sequence
  Description of Artificial Sequence: Synthetic oligonucleotide
  Antisense strand to SEQ ID NO: 1608235
agugagagcaauuuccagg

SEQ ID NO: 1608237 - RNA, 19 nt, Artificial Sequence
  Description of Artificial Sequence: Synthetic oligonucleotide
  Sense strand starting at position 2149 of SEQ ID NO: 1560559
ggaaauugcucucacuaga

SEQ ID NO: 1608238 - RNA, 19 nt, Artificial Sequence
  Description of Artificial Sequence: Synthetic oligonucleotide
  Antisense strand to SEQ ID NO: 1608237
ucuagugagagcaauuucc

SEQ ID NO: 1608239 - RNA, 19 nt, Artificial Sequence
  Description of Artificial Sequence: Synthetic oligonucleotide
  Sense strand starting at position 2154 of SEQ ID NO: 1560559
uugcucucacuagaauuga

SEQ ID NO: 1608240 - RNA, 19 nt, Artificial Sequence
  Description of Artificial Sequence: Synthetic oligonucleotide
  Antisense strand to SEQ ID NO: 1608239
ucaauucuagugagagcaa

SEQ ID NO: 1608241 - RNA, 19 nt, Artificial Sequence
  Description of Artificial Sequence: Synthetic oligonucleotide
  Sense strand starting at position 2357 of SEQ ID NO: 1560559
cagagcaauugugacaaua

SEQ ID NO: 1608242 - RNA, 19 nt, Artificial Sequence
  Description of Artificial Sequence: Synthetic oligonucleotide
  Antisense strand to SEQ ID NO: 1608241
uauugucacaauugcucug

SEQ ID NO: 1608243 - RNA, 19 nt, Artificial Sequence
  Description of Artificial Sequence: Synthetic oligonucleotide
  Sense strand starting at position 2506 of SEQ ID NO: 1560559
acauguaaauucuggauuu

SEQ ID NO: 1608244 - RNA, 19 nt, Artificial Sequence
  Description of Artificial Sequence: Synthetic oligonucleotide
  Antisense strand to SEQ ID NO: 1608243
aaauccagaauuuacaugu

SEQ ID NO: 1608245 - RNA, 19 nt, Artificial Sequence
  Description of Artificial Sequence: Synthetic oligonucleotide
  Sense strand starting at position 2545 of SEQ ID NO: 1560559
ugucucaugucccaagauu

SEQ ID NO: 1608246 - RNA, 19 nt, Artificial Sequence
  Description of Artificial Sequence: Synthetic oligonucleotide
  Antisense strand to SEQ ID NO: 1608245
aaucuugggacaugagaca

SEQ ID NO: 1608247 - RNA, 19 nt, Artificial Sequence
  Description of Artificial Sequence: Synthetic oligonucleotide
  Sense strand starting at position 2553 of SEQ ID NO: 1560559
gucccaagauuccagaguu

SEQ ID NO: 1608248 - RNA, 19 nt, Artificial Sequence
  Description of Artificial Sequence: Synthetic oligonucleotide
  Antisense strand to SEQ ID NO: 1608247
aacucuggaaucuugggac

SEQ ID NO: 1608249 - RNA, 19 nt, Artificial Sequence
  Description of Artificial Sequence: Synthetic oligonucleotide
  Sense strand starting at position 2682 of SEQ ID NO: 1560559
agccgaggugagugaucaa

SEQ ID NO: 1608250 - RNA, 19 nt, Artificial Sequence
  Description of Artificial Sequence: Synthetic oligonucleotide
  Antisense strand to SEQ ID NO: 1608249
uugaucacucaccucggcu

SEQ ID NO: 1608251 - RNA, 19 nt, Artificial Sequence
  Description of Artificial Sequence: Synthetic oligonucleotide
  Sense strand starting at position 2691 of SEQ ID NO: 1560559
gagugaucaaccgagguca

SEQ ID NO: 1608252 - RNA, 19 nt, Artificial Sequence
  Description of Artificial Sequence: Synthetic oligonucleotide
  Antisense strand to SEQ ID NO: 1608251
ugaccucgguugaucacuc

SEQ ID NO: 1608253 - RNA, 19 nt, Artificial Sequence
  Description of Artificial Sequence: Synthetic oligonucleotide
  Sense strand starting at position 2783 of SEQ ID NO: 1560559
guagcaggcacuuguaaug

SEQ ID NO: 1608254 - RNA, 19 nt, Artificial Sequence
  Description of Artificial Sequence: Synthetic oligonucleotide
  Antisense strand to SEQ ID NO: 1608253
cauuacaagugccugcuac

SEQ ID NO: 1608255 - RNA, 19 nt, Artificial Sequence
  Description of Artificial Sequence: Synthetic oligonucleotide
  Sense strand starting at position 2991 of SEQ ID NO: 1560559
guuguauaaggcugcauaa

SEQ ID NO: 1608256 - RNA, 19 nt, Artificial Sequence
  Description of Artificial Sequence: Synthetic oligonucleotide
  Antisense strand to SEQ ID NO: 1608255
uuaugcagccuuauacaac

SEQ ID NO: 1608257 - RNA, 19 nt, Artificial Sequence
  Description of Artificial Sequence: Synthetic oligonucleotide
  Sense strand starting at position 3014 of SEQ ID NO: 1560559
cagcauucucaagagagug

SEQ ID NO: 1608258 - RNA, 19 nt, Artificial Sequence
  Description of Artificial Sequence: Synthetic oligonucleotide
  Antisense strand to SEQ ID NO: 1608257
cacucucuugagaaugcug

SEQ ID NO: 1608259 - RNA, 19 nt, Artificial Sequence
  Description of Artificial Sequence: Synthetic oligonucleotide
  Sense strand starting at position 3119 of SEQ ID NO: 1560559
ugugguuuaagguggaaua

SEQ ID NO: 1608260 - RNA, 19 nt, Artificial Sequence
  Description of Artificial Sequence: Synthetic oligonucleotide
  Antisense strand to SEQ ID NO: 1608259
uauuccaccuuaaaccaca

SEQ ID NO: 1608261 - RNA, 19 nt, Artificial Sequence
  Description of Artificial Sequence: Synthetic oligonucleotide
  Sense strand starting at position 3302 of SEQ ID NO: 1560559
ccucacuauucguggguga

SEQ ID NO: 1608262 - RNA, 19 nt, Artificial Sequence
  Description of Artificial Sequence: Synthetic oligonucleotide
  Antisense strand to SEQ ID NO: 1608261
ucacccacgaauagugagg

SEQ ID NO: 1608263 - RNA, 19 nt, Artificial Sequence
  Description of Artificial Sequence: Synthetic oligonucleotide
  Sense strand starting at position 3303 of SEQ ID NO: 1560559
cucacuauucgugggugau

SEQ ID NO: 1608264 - RNA, 19 nt, Artificial Sequence
  Description of Artificial Sequence: Synthetic oligonucleotide
  Antisense strand to SEQ ID NO: 1608263
aucacccacgaauagugag

SEQ ID NO: 1608265 - RNA, 19 nt, Artificial Sequence
  Description of Artificial Sequence: Synthetic oligonucleotide
  Sense strand starting at position 3316 of SEQ ID NO: 1560559
ggugauugguuucaggauc

SEQ ID NO: 1608266 - RNA, 19 nt, Artificial Sequence
  Description of Artificial Sequence: Synthetic oligonucleotide
  Antisense strand to SEQ ID NO: 1608265
gauccugaaaccaaucacc

SEQ ID NO: 1608267 - RNA, 19 nt, Artificial Sequence
  Description of Artificial Sequence: Synthetic oligonucleotide
  Sense strand starting at position 3362 of SEQ ID NO: 1560559
gcucaagccucuuacauga

SEQ ID NO: 1608268 - RNA, 19 nt, Artificial Sequence
  Description of Artificial Sequence: Synthetic oligonucleotide
  Antisense strand to SEQ ID NO: 1608267
ucauguaagaggcuugagc

SEQ ID NO: 1608269 - RNA, 19 nt, Artificial Sequence
  Description of Artificial Sequence: Synthetic oligonucleotide
  Sense strand starting at position 3414 of SEQ ID NO: 1560559
uccuccuguguacaugaaa

SEQ ID NO: 1608270 - RNA, 19 nt, Artificial Sequence
  Description of Artificial Sequence: Synthetic oligonucleotide
  Antisense strand to SEQ ID NO: 1608269
uuucauguacacaggagga

SEQ ID NO: 1608271 - RNA, 19 nt, Artificial Sequence
  Description of Artificial Sequence: Synthetic oligonucleotide
  Sense strand starting at position 3596 of SEQ ID NO: 1560559
ccgacuguauauuuauagu

SEQ ID NO: 1608272 - RNA, 19 nt, Artificial Sequence
  Description of Artificial Sequence: Synthetic oligonucleotide
  Antisense strand to SEQ ID NO: 1608271
acuauaaauauacagucgg

SEQ ID NO: 1608273 - RNA, 19 nt, Artificial Sequence
  Description of Artificial Sequence: Synthetic oligonucleotide
  Sense strand starting at position 3869 of SEQ ID NO: 1560559
uggagaacaguuggaguua

SEQ ID NO: 1608274 - RNA, 19 nt, Artificial Sequence
  Description of Artificial Sequence: Synthetic oligonucleotide
  Antisense strand to SEQ ID NO: 1608273
uaacuccaacuguucucca

SEQ ID NO: 1608275 - RNA, 19 nt, Artificial Sequence
  Description of Artificial Sequence: Synthetic oligonucleotide
  Sense strand starting at position 3870 of SEQ ID NO: 1560559
ggagaacaguuggaguuau

SEQ ID NO: 1608276 - RNA, 19 nt, Artificial Sequence
  Description of Artificial Sequence: Synthetic oligonucleotide
  Antisense strand to SEQ ID NO: 1608275
auaacuccaacuguucucc

SEQ ID NO: 1608277 - RNA, 19 nt, Artificial Sequence
  Description of Artificial Sequence: Synthetic oligonucleotide
  Sense strand starting at position 24 of SEQ ID NO: 1560560
guagucuggcccuagaauc

SEQ ID NO: 1608278 - RNA, 19 nt, Artificial Sequence
  Description of Artificial Sequence: Synthetic oligonucleotide
  Antisense strand to SEQ ID NO: 1608277
gauucuagggccagacuac

SEQ ID NO: 1608279 - RNA, 19 nt, Artificial Sequence
  Description of Artificial Sequence: Synthetic oligonucleotide
  Sense strand starting at position 97 of SEQ ID NO: 1560560
gucuucuucucuucuggau

SEQ ID NO: 1608280 - RNA, 19 nt, Artificial Sequence
  Description of Artificial Sequence: Synthetic oligonucleotide
  Antisense strand to SEQ ID NO: 1608279
auccagaagagaagaagac

SEQ ID NO: 1608281 - RNA, 19 nt, Artificial Sequence
  Description of Artificial Sequence: Synthetic oligonucleotide
  Sense strand starting at position 118 of SEQ ID NO: 1560560
gccuguggucagaguguaa

SEQ ID NO: 1608282 - RNA, 19 nt, Artificial Sequence
  Description of Artificial Sequence: Synthetic oligonucleotide
  Antisense strand to SEQ ID NO: 1608281
uuacacucugaccacaggc

SEQ ID NO: 1608283 - RNA, 19 nt, Artificial Sequence
  Description of Artificial Sequence: Synthetic oligonucleotide
  Sense strand starting at position 372 of SEQ ID NO: 1560560
gauggauccugaucuucuc

SEQ ID NO: 1608284 - RNA, 19 nt, Artificial Sequence
  Description of Artificial Sequence: Synthetic oligonucleotide
  Antisense strand to SEQ ID NO: 1608283
gagaagaucaggauccauc

SEQ ID NO: 1608285 - RNA, 19 nt, Artificial Sequence
  Description of Artificial Sequence: Synthetic oligonucleotide
  Sense strand starting at position 679 of SEQ ID NO: 1560560
uucugaaauccuggccuca

SEQ ID NO: 1608286 - RNA, 19 nt, Artificial Sequence
  Description of Artificial Sequence: Synthetic oligonucleotide
  Antisense strand to SEQ ID NO: 1608285
ugaggccaggauuucagaa

SEQ ID NO: 1608287 - RNA, 19 nt, Artificial Sequence
  Description of Artificial Sequence: Synthetic oligonucleotide
  Sense strand starting at position 739 of SEQ ID NO: 1560560
cacauuuggugguaagaca

SEQ ID NO: 1608288 - RNA, 19 nt, Artificial Sequence
  Description of Artificial Sequence: Synthetic oligonucleotide
  Antisense strand to SEQ ID NO: 1608287
ugucuuaccaccaaaugug

SEQ ID NO: 1608289 - RNA, 19 nt, Artificial Sequence
  Description of Artificial Sequence: Synthetic oligonucleotide
  Sense strand starting at position 880 of SEQ ID NO: 1560560
guuagauacuacuucugga

SEQ ID NO: 1608290 - RNA, 19 nt, Artificial Sequence
  Description of Artificial Sequence: Synthetic oligonucleotide
  Antisense strand to SEQ ID NO: 1608289
uccagaaguaguaucuaac

SEQ ID NO: 1608291 - RNA, 19 nt, Artificial Sequence
  Description of Artificial Sequence: Synthetic oligonucleotide
  Sense strand starting at position 947 of SEQ ID NO: 1560560
gggagcuagcaauggacuu

SEQ ID NO: 1608292 - RNA, 19 nt, Artificial Sequence
  Description of Artificial Sequence: Synthetic oligonucleotide
  Antisense strand to SEQ ID NO: 1608291
aaguccauugcuagcuccc

SEQ ID NO: 1608293 - RNA, 19 nt, Artificial Sequence
  Description of Artificial Sequence: Synthetic oligonucleotide
  Sense strand starting at position 1544 of SEQ ID NO: 1560560
agaacacucuuaccuggua

SEQ ID NO: 1608294 - RNA, 19 nt, Artificial Sequence
  Description of Artificial Sequence: Synthetic oligonucleotide
  Antisense strand to SEQ ID NO: 1608293
uaccagguaagaguguucu

SEQ ID NO: 1608295 - RNA, 19 nt, Artificial Sequence
  Description of Artificial Sequence: Synthetic oligonucleotide
  Sense strand starting at position 1789 of SEQ ID NO: 1560560
cucccuucucgcuagugaa

SEQ ID NO: 1608296 - RNA, 19 nt, Artificial Sequence
  Description of Artificial Sequence: Synthetic oligonucleotide
  Antisense strand to SEQ ID NO: 1608295
uucacuagcgagaagggag

SEQ ID NO: 1608297 - RNA, 19 nt, Artificial Sequence
  Description of Artificial Sequence: Synthetic oligonucleotide
  Sense strand starting at position 2201 of SEQ ID NO: 1560560
cgcccucuucccguugaga

SEQ ID NO: 1608298 - RNA, 19 nt, Artificial Sequence
  Description of Artificial Sequence: Synthetic oligonucleotide
  Antisense strand to SEQ ID NO: 1608297
ucucaacgggaagagggcg

SEQ ID NO: 1608299 - RNA, 19 nt, Artificial Sequence
  Description of Artificial Sequence: Synthetic oligonucleotide
  Sense strand starting at position 2203 of SEQ ID NO: 1560560
cccucuucccguugagaaa

SEQ ID NO: 1608300 - RNA, 19 nt, Artificial Sequence
  Description of Artificial Sequence: Synthetic oligonucleotide
  Antisense strand to SEQ ID NO: 1608299
uuucucaacgggaagaggg

SEQ ID NO: 1608301 - RNA, 19 nt, Artificial Sequence
  Description of Artificial Sequence: Synthetic oligonucleotide
  Sense strand starting at position 2229 of SEQ ID NO: 1560560
ggcugagacgcggaugaau

SEQ ID NO: 1608302 - RNA, 19 nt, Artificial Sequence
  Description of Artificial Sequence: Synthetic oligonucleotide
  Antisense strand to SEQ ID NO: 1608301
auucauccgcgucucagcc

SEQ ID NO: 1608303 - RNA, 19 nt, Artificial Sequence
  Description of Artificial Sequence: Synthetic oligonucleotide
  Sense strand starting at position 2461 of SEQ ID NO: 1560560
aguggaaacugagcuauaa

SEQ ID NO: 1608304 - RNA, 19 nt, Artificial Sequence
  Description of Artificial Sequence: Synthetic oligonucleotide
  Antisense strand to SEQ ID NO: 1608303
uuauagcucaguuuccacu

SEQ ID NO: 1608305 - RNA, 19 nt, Artificial Sequence
  Description of Artificial Sequence: Synthetic oligonucleotide
  Sense strand starting at position 2652 of SEQ ID NO: 1560560
uuguuauugcugcaaacua

SEQ ID NO: 1608306 - RNA, 19 nt, Artificial Sequence
  Description of Artificial Sequence: Synthetic oligonucleotide
  Antisense strand to SEQ ID NO: 1608305
uaguuugcagcaauaacaa

SEQ ID NO: 1608307 - RNA, 19 nt, Artificial Sequence
  Description of Artificial Sequence: Synthetic oligonucleotide
  Sense strand starting at position 2676 of SEQ ID NO: 1560560
cguccuaagacccaggaau

SEQ ID NO: 1608308 - RNA, 19 nt, Artificial Sequence
  Description of Artificial Sequence: Synthetic oligonucleotide
  Antisense strand to SEQ ID NO: 1608307
auuccugggucuuaggacg

SEQ ID NO: 1608309 - RNA, 19 nt, Artificial Sequence
  Description of Artificial Sequence: Synthetic oligonucleotide
  Sense strand starting at position 2956 of SEQ ID NO: 1560560
gggacccugaucugacauu

SEQ ID NO: 1608310 - RNA, 19 nt, Artificial Sequence
  Description of Artificial Sequence: Synthetic oligonucleotide
  Antisense strand to SEQ ID NO: 1608309
aaugucagaucaggguccc

SEQ ID NO: 1608311 - RNA, 19 nt, Artificial Sequence
  Description of Artificial Sequence: Synthetic oligonucleotide
  Sense strand starting at position 3016 of SEQ ID NO: 1560560
cacuguucuuaggcucaga

SEQ ID NO: 1608312 - RNA, 19 nt, Artificial Sequence
  Description of Artificial Sequence: Synthetic oligonucleotide
  Antisense strand to SEQ ID NO: 1608311
ucugagccuaagaacagug

SEQ ID NO: 1608313 - RNA, 19 nt, Artificial Sequence
  Description of Artificial Sequence: Synthetic oligonucleotide
  Sense strand starting at position 3075 of SEQ ID NO: 1560560
guuggacuuacaggguuau

SEQ ID NO: 1608314 - RNA, 19 nt, Artificial Sequence
  Description of Artificial Sequence: Synthetic oligonucleotide
  Antisense strand to SEQ ID NO: 1608313
auaacccuguaaguccaac

SEQ ID NO: 1608315 - RNA, 19 nt, Artificial Sequence
  Description of Artificial Sequence: Synthetic oligonucleotide
  Sense strand starting at position 3076 of SEQ ID NO: 1560560
uuggacuuacaggguuaua

SEQ ID NO: 1608316 - RNA, 19 nt, Artificial Sequence
  Description of Artificial Sequence: Synthetic oligonucleotide
  Antisense strand to SEQ ID NO: 1608315
uauaacccuguaaguccaa

SEQ ID NO: 1608317 - RNA, 19 nt, Artificial Sequence
  Description of Artificial Sequence: Synthetic oligonucleotide
  Sense strand starting at position 3220 of SEQ ID NO: 1560560
cagaauaucuggucuuaag

SEQ ID NO: 1608318 - RNA, 19 nt, Artificial Sequence
  Description of Artificial Sequence: Synthetic oligonucleotide
  Antisense strand to SEQ ID NO: 1608317
cuuaagaccagauauucug

SEQ ID NO: 1608319 - RNA, 19 nt, Artificial Sequence
  Description of Artificial Sequence: Synthetic oligonucleotide
  Sense strand starting at position 3237 of SEQ ID NO: 1560560
agucuuaagagucggugga

SEQ ID NO: 1608320 - RNA, 19 nt, Artificial Sequence
  Description of Artificial Sequence: Synthetic oligonucleotide
  Antisense strand to SEQ ID NO: 1608319
uccaccgacucuuaagacu

SEQ ID NO: 1608321 - RNA, 19 nt, Artificial Sequence
  Description of Artificial Sequence: Synthetic oligonucleotide
  Sense strand starting at position 3238 of SEQ ID NO: 1560560
gucuuaagagucgguggau

SEQ ID NO: 1608322 - RNA, 19 nt, Artificial Sequence
  Description of Artificial Sequence: Synthetic oligonucleotide
  Antisense strand to SEQ ID NO: 1608321
auccaccgacucuuaagac

SEQ ID NO: 1608323 - RNA, 19 nt, Artificial Sequence
  Description of Artificial Sequence: Synthetic oligonucleotide
  Sense strand starting at position 3239 of SEQ ID NO: 1560560
ucuuaagagucgguggauc

SEQ ID NO: 1608324 - RNA, 19 nt, Artificial Sequence
  Description of Artificial Sequence: Synthetic oligonucleotide
  Antisense strand to SEQ ID NO: 1608323
gauccaccgacucuuaaga

SEQ ID NO: 1608325 - RNA, 19 nt, Artificial Sequence
  Description of Artificial Sequence: Synthetic oligonucleotide
  Sense strand starting at position 3241 of SEQ ID NO: 1560560
uuaagagucgguggaucua

SEQ ID NO: 1608326 - RNA, 19 nt, Artificial Sequence
  Description of Artificial Sequence: Synthetic oligonucleotide
  Antisense strand to SEQ ID NO: 1608325
uagauccaccgacucuuaa

SEQ ID NO: 1608327 - RNA, 19 nt, Artificial Sequence
  Description of Artificial Sequence: Synthetic oligonucleotide
  Sense strand starting at position 3250 of SEQ ID NO: 1560560
gguggaucuaucugccaau

SEQ ID NO: 1608328 - RNA, 19 nt, Artificial Sequence
  Description of Artificial Sequence: Synthetic oligonucleotide
  Antisense strand to SEQ ID NO: 1608327
auuggcagauagauccacc

SEQ ID NO: 1608329 - RNA, 19 nt, Artificial Sequence
  Description of Artificial Sequence: Synthetic oligonucleotide
  Sense strand starting at position 3291 of SEQ ID NO: 1560560
ccaggaggauuuggaaauc

SEQ ID NO: 1608330 - RNA, 19 nt, Artificial Sequence
  Description of Artificial Sequence: Synthetic oligonucleotide
  Antisense strand to SEQ ID NO: 1608329
gauuuccaaauccuccugg

SEQ ID NO: 1608331 - RNA, 19 nt, Artificial Sequence
  Description of Artificial Sequence: Synthetic oligonucleotide
  Sense strand starting at position 3302 of SEQ ID NO: 1560560
uggaaaucagaccgugaac

SEQ ID NO: 1608332 - RNA, 19 nt, Artificial Sequence
  Description of Artificial Sequence: Synthetic oligonucleotide
  Antisense strand to SEQ ID NO: 1608331
guucacggucugauuucca

SEQ ID NO: 1608333 - RNA, 19 nt, Artificial Sequence
  Description of Artificial Sequence: Synthetic oligonucleotide
  Sense strand starting at position 3304 of SEQ ID NO: 1560560
gaaaucagaccgugaacau

SEQ ID NO: 1608334 - RNA, 19 nt, Artificial Sequence
  Description of Artificial Sequence: Synthetic oligonucleotide
  Antisense strand to SEQ ID NO: 1608333
auguucacggucugauuuc

SEQ ID NO: 1608335 - RNA, 19 nt, Artificial Sequence
  Description of Artificial Sequence: Synthetic oligonucleotide
  Sense strand starting at position 3313 of SEQ ID NO: 1560560
ccgugaacaucuguccuaa

SEQ ID NO: 1608336 - RNA, 19 nt, Artificial Sequence
  Description of Artificial Sequence: Synthetic oligonucleotide
  Antisense strand to SEQ ID NO: 1608335
uuaggacagauguucacgg

SEQ ID NO: 1608337 - RNA, 19 nt, Artificial Sequence
  Description of Artificial Sequence: Synthetic oligonucleotide
  Sense strand starting at position 3315 of SEQ ID NO: 1560560
gugaacaucuguccuaagu

SEQ ID NO: 1608338 - RNA, 19 nt, Artificial Sequence
  Description of Artificial Sequence: Synthetic oligonucleotide
  Antisense strand to SEQ ID NO: 1608337
acuuaggacagauguucac

SEQ ID NO: 1608339 - RNA, 19 nt, Artificial Sequence
  Description of Artificial Sequence: Synthetic oligonucleotide
  Sense strand starting at position 3415 of SEQ ID NO: 1560560
guaguguggccaggaggau

SEQ ID NO: 1608340 - RNA, 19 nt, Artificial Sequence
  Description of Artificial Sequence: Synthetic oligonucleotide
  Antisense strand to SEQ ID NO: 1608339
auccuccuggccacacuac

SEQ ID NO: 1608341 - RNA, 19 nt, Artificial Sequence
  Description of Artificial Sequence: Synthetic oligonucleotide
  Sense strand starting at position 3447 of SEQ ID NO: 1560560
ucccgaguccuuggagaga

SEQ ID NO: 1608342 - RNA, 19 nt, Artificial Sequence
  Description of Artificial Sequence: Synthetic oligonucleotide
  Antisense strand to SEQ ID NO: 1608341
ucucuccaaggacucggga

SEQ ID NO: 1608343 - RNA, 19 nt, Artificial Sequence
  Description of Artificial Sequence: Synthetic oligonucleotide
  Sense strand starting at position 3449 of SEQ ID NO: 1560560
ccgaguccuuggagagaag

SEQ ID NO: 1608344 - RNA, 19 nt, Artificial Sequence
  Description of Artificial Sequence: Synthetic oligonucleotide
  Antisense strand to SEQ ID NO: 1608343
cuucucuccaaggacucgg

SEQ ID NO: 1608345 - RNA, 19 nt, Artificial Sequence
  Description of Artificial Sequence: Synthetic oligonucleotide
  Sense strand starting at position 3573 of SEQ ID NO: 1560560
gcuggaacuccugagucuu

SEQ ID NO: 1608346 - RNA, 19 nt, Artificial Sequence
  Description of Artificial Sequence: Synthetic oligonucleotide
  Antisense strand to SEQ ID NO: 1608345
aagacucaggaguuccagc

SEQ ID NO: 1608347 - RNA, 19 nt, Artificial Sequence
  Description of Artificial Sequence: Synthetic oligonucleotide
  Sense strand starting at position 3739 of SEQ ID NO: 1560560
gaagguuugugcuuauuaa

SEQ ID NO: 1608348 - RNA, 19 nt, Artificial Sequence
  Description of Artificial Sequence: Synthetic oligonucleotide
  Antisense strand to SEQ ID NO: 1608347
uuaauaagcacaaaccuuc

SEQ ID NO: 1608349 - RNA, 19 nt, Artificial Sequence
  Description of Artificial Sequence: Synthetic oligonucleotide
  Sense strand starting at position 3740 of SEQ ID NO: 1560560
aagguuugugcuuauuaaa

SEQ ID NO: 1608350 - RNA, 19 nt, Artificial Sequence
  Description of Artificial Sequence: Synthetic oligonucleotide
  Antisense strand to SEQ ID NO: 1608349
uuuaauaagcacaaaccuu

SEQ ID NO: 1608351 - RNA, 19 nt, Artificial Sequence
  Description of Artificial Sequence: Synthetic oligonucleotide
  Sense strand starting at position 3912 of SEQ ID NO: 1560560
gagucaagcaugugaggga

SEQ ID NO: 1608352 - RNA, 19 nt, Artificial Sequence
  Description of Artificial Sequence: Synthetic oligonucleotide
  Antisense strand to SEQ ID NO: 1608351
ucccucacaugcuugacuc

SEQ ID NO: 1608353 - RNA, 19 nt, Artificial Sequence
  Description of Artificial Sequence: Synthetic oligonucleotide
  Sense strand starting at position 3916 of SEQ ID NO: 1560560
caagcaugugagggaagau

SEQ ID NO: 1608354 - RNA, 19 nt, Artificial Sequence
  Description of Artificial Sequence: Synthetic oligonucleotide
  Antisense strand to SEQ ID NO: 1608353
aucuucccucacaugcuug

SEQ ID NO: 1608355 - RNA, 19 nt, Artificial Sequence
  Description of Artificial Sequence: Synthetic oligonucleotide
  Sense strand starting at position 3972 of SEQ ID NO: 1560560
ccagaugccucaucuuguu

SEQ ID NO: 1608356 - RNA, 19 nt, Artificial Sequence
  Description of Artificial Sequence: Synthetic oligonucleotide
  Antisense strand to SEQ ID NO: 1608355
aacaagaugaggcaucugg

SEQ ID NO: 1608357 - RNA, 19 nt, Artificial Sequence
  Description of Artificial Sequence: Synthetic oligonucleotide
  Sense strand starting at position 230 of SEQ ID NO: 1560561
gauggauccugaucuucuc

SEQ ID NO: 1608358 - RNA, 19 nt, Artificial Sequence
  Description of Artificial Sequence: Synthetic oligonucleotide
  Antisense strand to SEQ ID NO: 1608357
gagaagaucaggauccauc

SEQ ID NO: 1608359 - RNA, 19 nt, Artificial Sequence
  Description of Artificial Sequence: Synthetic oligonucleotide
  Sense strand starting at position 537 of SEQ ID NO: 1560561
uucugaaauccuggccuca

SEQ ID NO: 1608360 - RNA, 19 nt, Artificial Sequence
  Description of Artificial Sequence: Synthetic oligonucleotide
  Antisense strand to SEQ ID NO: 1608359
ugaggccaggauuucagaa

SEQ ID NO: 1608361 - RNA, 19 nt, Artificial Sequence
  Description of Artificial Sequence: Synthetic oligonucleotide
  Sense strand starting at position 597 of SEQ ID NO: 1560561
cacauuuggugguaagaca

SEQ ID NO: 1608362 - RNA, 19 nt, Artificial Sequence
  Description of Artificial Sequence: Synthetic oligonucleotide
  Antisense strand to SEQ ID NO: 1608361
ugucuuaccaccaaaugug

SEQ ID NO: 1608363 - RNA, 19 nt, Artificial Sequence
  Description of Artificial Sequence: Synthetic oligonucleotide
  Sense strand starting at position 738 of SEQ ID NO: 1560561
guuagauacuacuucugga

SEQ ID NO: 1608364 - RNA, 19 nt, Artificial Sequence
  Description of Artificial Sequence: Synthetic oligonucleotide
  Antisense strand to SEQ ID NO: 1608363
uccagaaguaguaucuaac

SEQ ID NO: 1608365 - RNA, 19 nt, Artificial Sequence
  Description of Artificial Sequence: Synthetic oligonucleotide
  Sense strand starting at position 805 of SEQ ID NO: 1560561
gggagcuagcaauggacuu

SEQ ID NO: 1608366 - RNA, 19 nt, Artificial Sequence
  Description of Artificial Sequence: Synthetic oligonucleotide
  Antisense strand to SEQ ID NO: 1608365
aaguccauugcuagcuccc

SEQ ID NO: 1608367 - RNA, 19 nt, Artificial Sequence
  Description of Artificial Sequence: Synthetic oligonucleotide
  Sense strand starting at position 1402 of SEQ ID NO: 1560561
agaacacucuuaccuggua

SEQ ID NO: 1608368 - RNA, 19 nt, Artificial Sequence
  Description of Artificial Sequence: Synthetic oligonucleotide
  Antisense strand to SEQ ID NO: 1608367
uaccagguaagaguguucu

SEQ ID NO: 1608369 - RNA, 19 nt, Artificial Sequence
  Description of Artificial Sequence: Synthetic oligonucleotide
  Sense strand starting at position 1647 of SEQ ID NO: 1560561
cucccuucucgcuagugaa

SEQ ID NO: 1608370 - RNA, 19 nt, Artificial Sequence
  Description of Artificial Sequence: Synthetic oligonucleotide
  Antisense strand to SEQ ID NO: 1608369
uucacuagcgagaagggag

SEQ ID NO: 1608371 - RNA, 19 nt, Artificial Sequence
  Description of Artificial Sequence: Synthetic oligonucleotide
  Sense strand starting at position 2059 of SEQ ID NO: 1560561
cgcccucuucccguugaga

SEQ ID NO: 1608372 - RNA, 19 nt, Artificial Sequence
  Description of Artificial Sequence: Synthetic oligonucleotide
  Antisense strand to SEQ ID NO: 1608371
ucucaacgggaagagggcg

SEQ ID NO: 1608373 - RNA, 19 nt, Artificial Sequence
  Description of Artificial Sequence: Synthetic oligonucleotide
  Sense strand starting at position 2061 of SEQ ID NO: 1560561
cccucuucccguugagaaa

SEQ ID NO: 1608374 - RNA, 19 nt, Artificial Sequence
  Description of Artificial Sequence: Synthetic oligonucleotide
  Antisense strand to SEQ ID NO: 1608373
uuucucaacgggaagaggg

SEQ ID NO: 1608375 - RNA, 19 nt, Artificial Sequence
  Description of Artificial Sequence: Synthetic oligonucleotide
  Sense strand starting at position 2087 of SEQ ID NO: 1560561
ggcugagacgcggaugaau

SEQ ID NO: 1608376 - RNA, 19 nt, Artificial Sequence
  Description of Artificial Sequence: Synthetic oligonucleotide
  Antisense strand to SEQ ID NO: 1608375
auucauccgcgucucagcc

SEQ ID NO: 1608377 - RNA, 19 nt, Artificial Sequence
  Description of Artificial Sequence: Synthetic oligonucleotide
  Sense strand starting at position 2319 of SEQ ID NO: 1560561
aguggaaacugagcuauaa

SEQ ID NO: 1608378 - RNA, 19 nt, Artificial Sequence
  Description of Artificial Sequence: Synthetic oligonucleotide
  Antisense strand to SEQ ID NO: 1608377
uuauagcucaguuuccacu

SEQ ID NO: 1608379 - RNA, 19 nt, Artificial Sequence
  Description of Artificial Sequence: Synthetic oligonucleotide
  Sense strand starting at position 2510 of SEQ ID NO: 1560561
uuguuauugcugcaaacua

SEQ ID NO: 1608380 - RNA, 19 nt, Artificial Sequence
  Description of Artificial Sequence: Synthetic oligonucleotide
  Antisense strand to SEQ ID NO: 1608379
uaguuugcagcaauaacaa

SEQ ID NO: 1608381 - RNA, 19 nt, Artificial Sequence
  Description of Artificial Sequence: Synthetic oligonucleotide
  Sense strand starting at position 2534 of SEQ ID NO: 1560561
cguccuaagacccaggaau

SEQ ID NO: 1608382 - RNA, 19 nt, Artificial Sequence
  Description of Artificial Sequence: Synthetic oligonucleotide
  Antisense strand to SEQ ID NO: 1608381
auuccugggucuuaggacg

SEQ ID NO: 1608383 - RNA, 19 nt, Artificial Sequence
  Description of Artificial Sequence: Synthetic oligonucleotide
  Sense strand starting at position 2814 of SEQ ID NO: 1560561
gggacccugaucugacauu

SEQ ID NO: 1608384 - RNA, 19 nt, Artificial Sequence
  Description of Artificial Sequence: Synthetic oligonucleotide
  Antisense strand to SEQ ID NO: 1608383
aaugucagaucaggguccc

SEQ ID NO: 1608385 - RNA, 19 nt, Artificial Sequence
  Description of Artificial Sequence: Synthetic oligonucleotide
  Sense strand starting at position 2874 of SEQ ID NO: 1560561
cacuguucuuaggcucaga

SEQ ID NO: 1608386 - RNA, 19 nt, Artificial Sequence
  Description of Artificial Sequence: Synthetic oligonucleotide
  Antisense strand to SEQ ID NO: 1608385
ucugagccuaagaacagug

SEQ ID NO: 1608387 - RNA, 19 nt, Artificial Sequence
  Description of Artificial Sequence: Synthetic oligonucleotide
  Sense strand starting at position 2933 of SEQ ID NO: 1560561
guuggacuuacaggguuau

SEQ ID NO: 1608388 - RNA, 19 nt, Artificial Sequence
  Description of Artificial Sequence: Synthetic oligonucleotide
  Antisense strand to SEQ ID NO: 1608387
auaacccuguaaguccaac

SEQ ID NO: 1608389 - RNA, 19 nt, Artificial Sequence
  Description of Artificial Sequence: Synthetic oligonucleotide
  Sense strand starting at position 2934 of SEQ ID NO: 1560561
uuggacuuacaggguuaua

SEQ ID NO: 1608390 - RNA, 19 nt, Artificial Sequence
  Description of Artificial Sequence: Synthetic oligonucleotide
  Antisense strand to SEQ ID NO: 1608389
uauaacccuguaaguccaa

SEQ ID NO: 1608391 - RNA, 19 nt, Artificial Sequence
  Description of Artificial Sequence: Synthetic oligonucleotide
  Sense strand starting at position 3078 of SEQ ID NO: 1560561
cagaauaucuggucuuaag

SEQ ID NO: 1608392 - RNA, 19 nt, Artificial Sequence
  Description of Artificial Sequence: Synthetic oligonucleotide
  Antisense strand to SEQ ID NO: 1608391
cuuaagaccagauauucug

SEQ ID NO: 1608393 - RNA, 19 nt, Artificial Sequence
  Description of Artificial Sequence: Synthetic oligonucleotide
  Sense strand starting at position 3095 of SEQ ID NO: 1560561
agucuuaagagucggugga

SEQ ID NO: 1608394 - RNA, 19 nt, Artificial Sequence
  Description of Artificial Sequence: Synthetic oligonucleotide
  Antisense strand to SEQ ID NO: 1608393
uccaccgacucuuaagacu

SEQ ID NO: 1608395 - RNA, 19 nt, Artificial Sequence
  Description of Artificial Sequence: Synthetic oligonucleotide
  Sense strand starting at position 3097 of SEQ ID NO: 1560561
ucuuaagagucgguggauc

SEQ ID NO: 1608396 - RNA, 19 nt, Artificial Sequence
  Description of Artificial Sequence: Synthetic oligonucleotide
  Antisense strand to SEQ ID NO: 1608395
gauccaccgacucuuaaga

SEQ ID NO: 1608397 - RNA, 19 nt, Artificial Sequence
  Description of Artificial Sequence: Synthetic oligonucleotide
  Sense strand starting at position 3099 of SEQ ID NO: 1560561
uuaagagucgguggaucua

SEQ ID NO: 1608398 - RNA, 19 nt, Artificial Sequence
  Description of Artificial Sequence: Synthetic oligonucleotide
  Antisense strand to SEQ ID NO: 1608397
uagauccaccgacucuuaa

SEQ ID NO: 1608399 - RNA, 19 nt, Artificial Sequence
  Description of Artificial Sequence: Synthetic oligonucleotide
  Sense strand starting at position 3108 of SEQ ID NO: 1560561
gguggaucuaucugccaau

SEQ ID NO: 1608400 - RNA, 19 nt, Artificial Sequence
  Description of Artificial Sequence: Synthetic oligonucleotide
  Antisense strand to SEQ ID NO: 1608399
auuggcagauagauccacc

SEQ ID NO: 1608401 - RNA, 19 nt, Artificial Sequence
  Description of Artificial Sequence: Synthetic oligonucleotide
  Sense strand starting at position 3149 of SEQ ID NO: 1560561
ccaggaggauuuggaaauc

SEQ ID NO: 1608402 - RNA, 19 nt, Artificial Sequence
  Description of Artificial Sequence: Synthetic oligonucleotide
  Antisense strand to SEQ ID NO: 1608401
gauuuccaaauccuccugg

SEQ ID NO: 1608403 - RNA, 19 nt, Artificial Sequence
  Description of Artificial Sequence: Synthetic oligonucleotide
  Sense strand starting at position 3160 of SEQ ID NO: 1560561
uggaaaucagaccgugaac

SEQ ID NO: 1608404 - RNA, 19 nt, Artificial Sequence
  Description of Artificial Sequence: Synthetic oligonucleotide
  Antisense strand to SEQ ID NO: 1608403
guucacggucugauuucca

SEQ ID NO: 1608405 - RNA, 19 nt, Artificial Sequence
  Description of Artificial Sequence: Synthetic oligonucleotide
  Sense strand starting at position 3162 of SEQ ID NO: 1560561
gaaaucagaccgugaacau

SEQ ID NO: 1608406 - RNA, 19 nt, Artificial Sequence
  Description of Artificial Sequence: Synthetic oligonucleotide
  Antisense strand to SEQ ID NO: 1608405
auguucacggucugauuuc

SEQ ID NO: 1608407 - RNA, 19 nt, Artificial Sequence
  Description of Artificial Sequence: Synthetic oligonucleotide
  Sense strand starting at position 3171 of SEQ ID NO: 1560561
ccgugaacaucuguccuaa

SEQ ID NO: 1608408 - RNA, 19 nt, Artificial Sequence
  Description of Artificial Sequence: Synthetic oligonucleotide
  Antisense strand to SEQ ID NO: 1608407
uuaggacagauguucacgg

SEQ ID NO: 1608409 - RNA, 19 nt, Artificial Sequence
  Description of Artificial Sequence: Synthetic oligonucleotide
  Sense strand starting at position 3173 of SEQ ID NO: 1560561
gugaacaucuguccuaagu

SEQ ID NO: 1608410 - RNA, 19 nt, Artificial Sequence
  Description of Artificial Sequence: Synthetic oligonucleotide
  Antisense strand to SEQ ID NO: 1608409
acuuaggacagauguucac

SEQ ID NO: 1608411 - RNA, 19 nt, Artificial Sequence
  Description of Artificial Sequence: Synthetic oligonucleotide
  Sense strand starting at position 3273 of SEQ ID NO: 1560561
guaguguggccaggaggau

SEQ ID NO: 1608412 - RNA, 19 nt, Artificial Sequence
  Description of Artificial Sequence: Synthetic oligonucleotide
  Antisense strand to SEQ ID NO: 1608411
auccuccuggccacacuac

SEQ ID NO: 1608413 - RNA, 19 nt, Artificial Sequence
  Description of Artificial Sequence: Synthetic oligonucleotide
  Sense strand starting at position 3305 of SEQ ID NO: 1560561
ucccgaguccuuggagaga

SEQ ID NO: 1608414 - RNA, 19 nt, Artificial Sequence
  Description of Artificial Sequence: Synthetic oligonucleotide
  Antisense strand to SEQ ID NO: 1608413
ucucuccaaggacucggga

SEQ ID NO: 1608415 - RNA, 19 nt, Artificial Sequence
  Description of Artificial Sequence: Synthetic oligonucleotide
  Sense strand starting at position 3307 of SEQ ID NO: 1560561
ccgaguccuuggagagaag

SEQ ID NO: 1608416 - RNA, 19 nt, Artificial Sequence
  Description of Artificial Sequence: Synthetic oligonucleotide
  Antisense strand to SEQ ID NO: 1608415
cuucucuccaaggacucgg

SEQ ID NO: 1608417 - RNA, 19 nt, Artificial Sequence
  Description of Artificial Sequence: Synthetic oligonucleotide
  Sense strand starting at position 3431 of SEQ ID NO: 1560561
gcuggaacuccugagucuu

SEQ ID NO: 1608418 - RNA, 19 nt, Artificial Sequence
  Description of Artificial Sequence: Synthetic oligonucleotide
  Antisense strand to SEQ ID NO: 1608417
aagacucaggaguuccagc

SEQ ID NO: 1608419 - RNA, 19 nt, Artificial Sequence
  Description of Artificial Sequence: Synthetic oligonucleotide
  Sense strand starting at position 3597 of SEQ ID NO: 1560561
gaagguuugugcuuauuaa

SEQ ID NO: 1608420 - RNA, 19 nt, Artificial Sequence
  Description of Artificial Sequence: Synthetic oligonucleotide
  Antisense strand to SEQ ID NO: 1608419
uuaauaagcacaaaccuuc

SEQ ID NO: 1608421 - RNA, 19 nt, Artificial Sequence
  Description of Artificial Sequence: Synthetic oligonucleotide
  Sense strand starting at position 3598 of SEQ ID NO: 1560561
aagguuugugcuuauuaaa

SEQ ID NO: 1608422 - RNA, 19 nt, Artificial Sequence
  Description of Artificial Sequence: Synthetic oligonucleotide
  Antisense strand to SEQ ID NO: 1608421
uuuaauaagcacaaaccuu

SEQ ID NO: 1608423 - RNA, 19 nt, Artificial Sequence
  Description of Artificial Sequence: Synthetic oligonucleotide
  Sense strand starting at position 3770 of SEQ ID NO: 1560561
gagucaagcaugugaggga

SEQ ID NO: 1608424 - RNA, 19 nt, Artificial Sequence
  Description of Artificial Sequence: Synthetic oligonucleotide
  Antisense strand to SEQ ID NO: 1608423
ucccucacaugcuugacuc

SEQ ID NO: 1608425 - RNA, 19 nt, Artificial Sequence
  Description of Artificial Sequence: Synthetic oligonucleotide
  Sense strand starting at position 3774 of SEQ ID NO: 1560561
caagcaugugagggaagau

SEQ ID NO: 1608426 - RNA, 19 nt, Artificial Sequence
  Description of Artificial Sequence: Synthetic oligonucleotide
  Antisense strand to SEQ ID NO: 1608425
aucuucccucacaugcuug

SEQ ID NO: 1608427 - RNA, 19 nt, Artificial Sequence
  Description of Artificial Sequence: Synthetic oligonucleotide
  Sense strand starting at position 3845 of SEQ ID NO: 1560561
uguuccugggaacgauauu

SEQ ID NO: 1608428 - RNA, 19 nt, Artificial Sequence
  Description of Artificial Sequence: Synthetic oligonucleotide
  Antisense strand to SEQ ID NO: 1608427
aauaucguucccaggaaca

SEQ ID NO: 1608429 - RNA, 19 nt, Artificial Sequence
  Description of Artificial Sequence: Synthetic oligonucleotide
  Sense strand starting at position 3901 of SEQ ID NO: 1560561
uuccaauucccgcaggaga

SEQ ID NO: 1608430 - RNA, 19 nt, Artificial Sequence
  Description of Artificial Sequence: Synthetic oligonucleotide
  Antisense strand to SEQ ID NO: 1608429
ucuccugcgggaauuggaa

SEQ ID NO: 1608431 - RNA, 19 nt, Artificial Sequence
  Description of Artificial Sequence: Synthetic oligonucleotide
  Sense strand starting at position 3903 of SEQ ID NO: 1560561
ccaauucccgcaggagaua

SEQ ID NO: 1608432 - RNA, 19 nt, Artificial Sequence
  Description of Artificial Sequence: Synthetic oligonucleotide
  Antisense strand to SEQ ID NO: 1608431
uaucuccugcgggaauugg

SEQ ID NO: 1608433 - RNA, 19 nt, Artificial Sequence
  Description of Artificial Sequence: Synthetic oligonucleotide
  Sense strand starting at position 3934 of SEQ ID NO: 1560561
aagcuuaucccaggcaagu

SEQ ID NO: 1608434 - RNA, 19 nt, Artificial Sequence
  Description of Artificial Sequence: Synthetic oligonucleotide
  Antisense strand to SEQ ID NO: 1608433
acuugccugggauaagcuu

SEQ ID NO: 1608435 - RNA, 19 nt, Artificial Sequence
  Description of Artificial Sequence: Synthetic oligonucleotide
  Sense strand starting at position 3980 of SEQ ID NO: 1560561
accagcauaugguuauaaa

SEQ ID NO: 1608436 - RNA, 19 nt, Artificial Sequence
  Description of Artificial Sequence: Synthetic oligonucleotide
  Antisense strand to SEQ ID NO: 1608435
uuuauaaccauaugcuggu

SEQ ID NO: 1608437 - RNA, 19 nt, Artificial Sequence
  Description of Artificial Sequence: Synthetic oligonucleotide
  Sense strand starting at position 1019 of SEQ ID NO: 1560562
cucggauuuccuggccauu

SEQ ID NO: 1608438 - RNA, 19 nt, Artificial Sequence
  Description of Artificial Sequence: Synthetic oligonucleotide
  Antisense strand to SEQ ID NO: 1608437
aauggccaggaaauccgag

SEQ ID NO: 1608439 - RNA, 19 nt, Artificial Sequence
  Description of Artificial Sequence: Synthetic oligonucleotide
  Sense strand starting at position 1588 of SEQ ID NO: 1560562
cgcacucaccgauguagaa

SEQ ID NO: 1608440 - RNA, 19 nt, Artificial Sequence
  Description of Artificial Sequence: Synthetic oligonucleotide
  Antisense strand to SEQ ID NO: 1608439
uucuacaucggugagugcg

SEQ ID NO: 1608441 - RNA, 19 nt, Artificial Sequence
  Description of Artificial Sequence: Synthetic oligonucleotide
  Sense strand starting at position 2311 of SEQ ID NO: 1560562
cucuaaggccugugaauau

SEQ ID NO: 1608442 - RNA, 19 nt, Artificial Sequence
  Description of Artificial Sequence: Synthetic oligonucleotide
  Antisense strand to SEQ ID NO: 1608441
auauucacaggccuuagag

SEQ ID NO: 1608443 - RNA, 19 nt, Artificial Sequence
  Description of Artificial Sequence: Synthetic oligonucleotide
  Sense strand starting at position 2419 of SEQ ID NO: 1560562
gaggauagcuuggguuugu

SEQ ID NO: 1608444 - RNA, 19 nt, Artificial Sequence
  Description of Artificial Sequence: Synthetic oligonucleotide
  Antisense strand to SEQ ID NO: 1608443
acaaacccaagcuauccuc

SEQ ID NO: 1608445 - RNA, 19 nt, Artificial Sequence
  Description of Artificial Sequence: Synthetic oligonucleotide
  Sense strand starting at position 2497 of SEQ ID NO: 1560562
gugguuugggacugaaugu

SEQ ID NO: 1608446 - RNA, 19 nt, Artificial Sequence
  Description of Artificial Sequence: Synthetic oligonucleotide
  Antisense strand to SEQ ID NO: 1608445
acauucagucccaaaccac

SEQ ID NO: 1608447 - RNA, 19 nt, Artificial Sequence
  Description of Artificial Sequence: Synthetic oligonucleotide
  Sense strand starting at position 2506 of SEQ ID NO: 1560562
gacugaaugugucccacau

SEQ ID NO: 1608448 - RNA, 19 nt, Artificial Sequence
  Description of Artificial Sequence: Synthetic oligonucleotide
  Antisense strand to SEQ ID NO: 1608447
augugggacacauucaguc

SEQ ID NO: 1608449 - RNA, 19 nt, Artificial Sequence
  Description of Artificial Sequence: Synthetic oligonucleotide
  Sense strand starting at position 2508 of SEQ ID NO: 1560562
cugaaugugucccacauga

SEQ ID NO: 1608450 - RNA, 19 nt, Artificial Sequence
  Description of Artificial Sequence: Synthetic oligonucleotide
  Antisense strand to SEQ ID NO: 1608449
ucaugugggacacauucag

SEQ ID NO: 1608451 - RNA, 19 nt, Artificial Sequence
  Description of Artificial Sequence: Synthetic oligonucleotide
  Sense strand starting at position 2510 of SEQ ID NO: 1560562
gaaugugucccacaugacu

SEQ ID NO: 1608452 - RNA, 19 nt, Artificial Sequence
  Description of Artificial Sequence: Synthetic oligonucleotide
  Antisense strand to SEQ ID NO: 1608451
agucaugugggacacauuc

SEQ ID NO: 1608453 - RNA, 19 nt, Artificial Sequence
  Description of Artificial Sequence: Synthetic oligonucleotide
  Sense strand starting at position 2594 of SEQ ID NO: 1560562
acgccacagccucauuauu

SEQ ID NO: 1608454 - RNA, 19 nt, Artificial Sequence
  Description of Artificial Sequence: Synthetic oligonucleotide
  Antisense strand to SEQ ID NO: 1608453
aauaaugaggcuguggcgu

SEQ ID NO: 1608455 - RNA, 19 nt, Artificial Sequence
  Description of Artificial Sequence: Synthetic oligonucleotide
  Sense strand starting at position 2655 of SEQ ID NO: 1560562
gacagaguuucgcucaggu

SEQ ID NO: 1608456 - RNA, 19 nt, Artificial Sequence
  Description of Artificial Sequence: Synthetic oligonucleotide
  Antisense strand to SEQ ID NO: 1608455
accugagcgaaacucuguc

SEQ ID NO: 1608457 - RNA, 19 nt, Artificial Sequence
  Description of Artificial Sequence: Synthetic oligonucleotide
  Sense strand starting at position 3642 of SEQ ID NO: 1560562
ggaugacauccaggagguu

SEQ ID NO: 1608458 - RNA, 19 nt, Artificial Sequence
  Description of Artificial Sequence: Synthetic oligonucleotide
  Antisense strand to SEQ ID NO: 1608457
aaccuccuggaugucaucc

SEQ ID NO: 1608459 - RNA, 19 nt, Artificial Sequence
  Description of Artificial Sequence: Synthetic oligonucleotide
  Sense strand starting at position 3696 of SEQ ID NO: 1560562
uuuggucaucauggaguaa

SEQ ID NO: 1608460 - RNA, 19 nt, Artificial Sequence
  Description of Artificial Sequence: Synthetic oligonucleotide
  Antisense strand to SEQ ID NO: 1608459
uuacuccaugaugaccaaa

SEQ ID NO: 1608461 - RNA, 19 nt, Artificial Sequence
  Description of Artificial Sequence: Synthetic oligonucleotide
  Sense strand starting at position 3697 of SEQ ID NO: 1560562
uuggucaucauggaguaau

SEQ ID NO: 1608462 - RNA, 19 nt, Artificial Sequence
  Description of Artificial Sequence: Synthetic oligonucleotide
  Antisense strand to SEQ ID NO: 1608461
auuacuccaugaugaccaa

SEQ ID NO: 1608463 - RNA, 19 nt, Artificial Sequence
  Description of Artificial Sequence: Synthetic oligonucleotide
  Sense strand starting at position 3707 of SEQ ID NO: 1560562
uggaguaauacacagcgaa

SEQ ID NO: 1608464 - RNA, 19 nt, Artificial Sequence
  Description of Artificial Sequence: Synthetic oligonucleotide
  Antisense strand to SEQ ID NO: 1608463
uucgcuguguauuacucca

SEQ ID NO: 1608465 - RNA, 19 nt, Artificial Sequence
  Description of Artificial Sequence: Synthetic oligonucleotide
  Sense strand starting at position 3710 of SEQ ID NO: 1560562
aguaauacacagcgaagaa

SEQ ID NO: 1608466 - RNA, 19 nt, Artificial Sequence
  Description of Artificial Sequence: Synthetic oligonucleotide
  Antisense strand to SEQ ID NO: 1608465
uucuucgcuguguauuacu

SEQ ID NO: 1608467 - RNA, 19 nt, Artificial Sequence
  Description of Artificial Sequence: Synthetic oligonucleotide
  Sense strand starting at position 3733 of SEQ ID NO: 1560562
gugcuuccauuugcauaaa

SEQ ID NO: 1608468 - RNA, 19 nt, Artificial Sequence
  Description of Artificial Sequence: Synthetic oligonucleotide
  Antisense strand to SEQ ID NO: 1608467
uuuaugcaaauggaagcac

SEQ ID NO: 1608469 - RNA, 19 nt, Artificial Sequence
  Description of Artificial Sequence: Synthetic oligonucleotide
  Sense strand starting at position 439 of SEQ ID NO: 1560563
aucugugugcuuguguaua

SEQ ID NO: 1608470 - RNA, 19 nt, Artificial Sequence
  Description of Artificial Sequence: Synthetic oligonucleotide
  Antisense strand to SEQ ID NO: 1608469
uauacacaagcacacagau

SEQ ID NO: 1608471 - RNA, 19 nt, Artificial Sequence
  Description of Artificial Sequence: Synthetic oligonucleotide
  Sense strand starting at position 444 of SEQ ID NO: 1560563
ugugcuuguguauaucaca

SEQ ID NO: 1608472 - RNA, 19 nt, Artificial Sequence
  Description of Artificial Sequence: Synthetic oligonucleotide
  Antisense strand to SEQ ID NO: 1608471
ugugauauacacaagcaca

SEQ ID NO: 1608473 - RNA, 19 nt, Artificial Sequence
  Description of Artificial Sequence: Synthetic oligonucleotide
  Sense strand starting at position 751 of SEQ ID NO: 1560563
ugauaaucauaggcacagu

SEQ ID NO: 1608474 - RNA, 19 nt, Artificial Sequence
  Description of Artificial Sequence: Synthetic oligonucleotide
  Antisense strand to SEQ ID NO: 1608473
acugugccuaugauuauca

SEQ ID NO: 1608475 - RNA, 19 nt, Artificial Sequence
  Description of Artificial Sequence: Synthetic oligonucleotide
  Sense strand starting at position 899 of SEQ ID NO: 1560563
acgguaucaaugcagauca

SEQ ID NO: 1608476 - RNA, 19 nt, Artificial Sequence
  Description of Artificial Sequence: Synthetic oligonucleotide
  Antisense strand to SEQ ID NO: 1608475
ugaucugcauugauaccgu

SEQ ID NO: 1608477 - RNA, 19 nt, Artificial Sequence
  Description of Artificial Sequence: Synthetic oligonucleotide
  Sense strand starting at position 901 of SEQ ID NO: 1560563
gguaucaaugcagaucaca

SEQ ID NO: 1608478 - RNA, 19 nt, Artificial Sequence
  Description of Artificial Sequence: Synthetic oligonucleotide
  Antisense strand to SEQ ID NO: 1608477
ugugaucugcauugauacc

SEQ ID NO: 1608479 - RNA, 19 nt, Artificial Sequence
  Description of Artificial Sequence: Synthetic oligonucleotide
  Sense strand starting at position 1075 of SEQ ID NO: 1560563
gcaccaucacagugacaca

SEQ ID NO: 1608480 - RNA, 19 nt, Artificial Sequence
  Description of Artificial Sequence: Synthetic oligonucleotide
  Antisense strand to SEQ ID NO: 1608479
ugugucacugugauggugc

SEQ ID NO: 1608481 - RNA, 19 nt, Artificial Sequence
  Description of Artificial Sequence: Synthetic oligonucleotide
  Sense strand starting at position 1102 of SEQ ID NO: 1560563
agucaaucauagucaccua

SEQ ID NO: 1608482 - RNA, 19 nt, Artificial Sequence
  Description of Artificial Sequence: Synthetic oligonucleotide
  Antisense strand to SEQ ID NO: 1608481
uaggugacuaugauugacu

SEQ ID NO: 1608483 - RNA, 19 nt, Artificial Sequence
  Description of Artificial Sequence: Synthetic oligonucleotide
  Sense strand starting at position 1113 of SEQ ID NO: 1560563
gucaccuaucacugaucca

SEQ ID NO: 1608484 - RNA, 19 nt, Artificial Sequence
  Description of Artificial Sequence: Synthetic oligonucleotide
  Antisense strand to SEQ ID NO: 1608483
uggaucagugauaggugac

SEQ ID NO: 1608485 - RNA, 19 nt, Artificial Sequence
  Description of Artificial Sequence: Synthetic oligonucleotide
  Sense strand starting at position 1335 of SEQ ID NO: 1560563
acuagcucuuggucguaaa

SEQ ID NO: 1608486 - RNA, 19 nt, Artificial Sequence
  Description of Artificial Sequence: Synthetic oligonucleotide
  Antisense strand to SEQ ID NO: 1608485
uuuacgaccaagagcuagu

SEQ ID NO: 1608487 - RNA, 19 nt, Artificial Sequence
  Description of Artificial Sequence: Synthetic oligonucleotide
  Sense strand starting at position 1446 of SEQ ID NO: 1560563
gucccaucacaggguuaca

SEQ ID NO: 1608488 - RNA, 19 nt, Artificial Sequence
  Description of Artificial Sequence: Synthetic oligonucleotide
  Antisense strand to SEQ ID NO: 1608487
uguaacccugugaugggac

SEQ ID NO: 1608489 - RNA, 19 nt, Artificial Sequence
  Description of Artificial Sequence: Synthetic oligonucleotide
  Sense strand starting at position 2151 of SEQ ID NO: 1560563
cucgaaucagggugauugu

SEQ ID NO: 1608490 - RNA, 19 nt, Artificial Sequence
  Description of Artificial Sequence: Synthetic oligonucleotide
  Antisense strand to SEQ ID NO: 1608489
acaaucacccugauucgag

SEQ ID NO: 1608491 - RNA, 19 nt, Artificial Sequence
  Description of Artificial Sequence: Synthetic oligonucleotide
  Sense strand starting at position 2152 of SEQ ID NO: 1560563
ucgaaucagggugauugua

SEQ ID NO: 1608492 - RNA, 19 nt, Artificial Sequence
  Description of Artificial Sequence: Synthetic oligonucleotide
  Antisense strand to SEQ ID NO: 1608491
uacaaucacccugauucga

SEQ ID NO: 1608493 - RNA, 19 nt, Artificial Sequence
  Description of Artificial Sequence: Synthetic oligonucleotide
  Sense strand starting at position 2279 of SEQ ID NO: 1560563
cgaucucucuucccacaga

SEQ ID NO: 1608494 - RNA, 19 nt, Artificial Sequence
  Description of Artificial Sequence: Synthetic oligonucleotide
  Antisense strand to SEQ ID NO: 1608493
ucugugggaagagagaucg

SEQ ID NO: 1608495 - RNA, 19 nt, Artificial Sequence
  Description of Artificial Sequence: Synthetic oligonucleotide
  Sense strand starting at position 2305 of SEQ ID NO: 1560563
gucuuuaggucucuucuca

SEQ ID NO: 1608496 - RNA, 19 nt, Artificial Sequence
  Description of Artificial Sequence: Synthetic oligonucleotide
  Antisense strand to SEQ ID NO: 1608495
ugagaagagaccuaaagac

SEQ ID NO: 1608497 - RNA, 19 nt, Artificial Sequence
  Description of Artificial Sequence: Synthetic oligonucleotide
  Sense strand starting at position 2793 of SEQ ID NO: 1560563
uguuauuggcaagggaaug

SEQ ID NO: 1608498 - RNA, 19 nt, Artificial Sequence
  Description of Artificial Sequence: Synthetic oligonucleotide
  Antisense strand to SEQ ID NO: 1608497
cauucccuugccaauaaca

SEQ ID NO: 1608499 - RNA, 19 nt, Artificial Sequence
  Description of Artificial Sequence: Synthetic oligonucleotide
  Sense strand starting at position 2798 of SEQ ID NO: 1560563
uuggcaagggaaugugaua

SEQ ID NO: 1608500 - RNA, 19 nt, Artificial Sequence
  Description of Artificial Sequence: Synthetic oligonucleotide
  Antisense strand to SEQ ID NO: 1608499
uaucacauucccuugccaa

SEQ ID NO: 1608501 - RNA, 19 nt, Artificial Sequence
  Description of Artificial Sequence: Synthetic oligonucleotide
  Sense strand starting at position 2803 of SEQ ID NO: 1560563
aagggaaugugauaucuaa

SEQ ID NO: 1608502 - RNA, 19 nt, Artificial Sequence
  Description of Artificial Sequence: Synthetic oligonucleotide
  Antisense strand to SEQ ID NO: 1608501
uuagauaucacauucccuu

SEQ ID NO: 1608503 - RNA, 19 nt, Artificial Sequence
  Description of Artificial Sequence: Synthetic oligonucleotide
  Sense strand starting at position 2820 of SEQ ID NO: 1560563
aagaauugggcucaggguu

SEQ ID NO: 1608504 - RNA, 19 nt, Artificial Sequence
  Description of Artificial Sequence: Synthetic oligonucleotide
  Antisense strand to SEQ ID NO: 1608503
aacccugagcccaauucuu

SEQ ID NO: 1608505 - RNA, 19 nt, Artificial Sequence
  Description of Artificial Sequence: Synthetic oligonucleotide
  Sense strand starting at position 2901 of SEQ ID NO: 1560563
gccucaguuucccuaguca

SEQ ID NO: 1608506 - RNA, 19 nt, Artificial Sequence
  Description of Artificial Sequence: Synthetic oligonucleotide
  Antisense strand to SEQ ID NO: 1608505
ugacuagggaaacugaggc

SEQ ID NO: 1608507 - RNA, 19 nt, Artificial Sequence
  Description of Artificial Sequence: Synthetic oligonucleotide
  Sense strand starting at position 2925 of SEQ ID NO: 1560563
auauaaauagucuaaggcu

SEQ ID NO: 1608508 - RNA, 19 nt, Artificial Sequence
  Description of Artificial Sequence: Synthetic oligonucleotide
  Antisense strand to SEQ ID NO: 1608507
agccuuagacuauuuauau

SEQ ID NO: 1608509 - RNA, 19 nt, Artificial Sequence
  Description of Artificial Sequence: Synthetic oligonucleotide
  Sense strand starting at position 2933 of SEQ ID NO: 1560563
agucuaaggcuuugagaau

SEQ ID NO: 1608510 - RNA, 19 nt, Artificial Sequence
  Description of Artificial Sequence: Synthetic oligonucleotide
  Antisense strand to SEQ ID NO: 1608509
auucucaaagccuuagacu

SEQ ID NO: 1608511 - RNA, 19 nt, Artificial Sequence
  Description of Artificial Sequence: Synthetic oligonucleotide
  Sense strand starting at position 2940 of SEQ ID NO: 1560563
ggcuuugagaauugaaugu

SEQ ID NO: 1608512 - RNA, 19 nt, Artificial Sequence
  Description of Artificial Sequence: Synthetic oligonucleotide
  Antisense strand to SEQ ID NO: 1608511
acauucaauucucaaagcc

SEQ ID NO: 1608513 - RNA, 19 nt, Artificial Sequence
  Description of Artificial Sequence: Synthetic oligonucleotide
  Sense strand starting at position 2944 of SEQ ID NO: 1560563
uugagaauugaauguuaac

SEQ ID NO: 1608514 - RNA, 19 nt, Artificial Sequence
  Description of Artificial Sequence: Synthetic oligonucleotide
  Antisense strand to SEQ ID NO: 1608513
guuaacauucaauucucaa

SEQ ID NO: 1608515 - RNA, 19 nt, Artificial Sequence
  Description of Artificial Sequence: Synthetic oligonucleotide
  Sense strand starting at position 3037 of SEQ ID NO: 1560563
guacaauggcgcuaucuua

SEQ ID NO: 1608516 - RNA, 19 nt, Artificial Sequence
  Description of Artificial Sequence: Synthetic oligonucleotide
  Antisense strand to SEQ ID NO: 1608515
uaagauagcgccauuguac

SEQ ID NO: 1608517 - RNA, 19 nt, Artificial Sequence
  Description of Artificial Sequence: Synthetic oligonucleotide
  Sense strand starting at position 3296 of SEQ ID NO: 1560563
uuaucagggccucgcaaau

SEQ ID NO: 1608518 - RNA, 19 nt, Artificial Sequence
  Description of Artificial Sequence: Synthetic oligonucleotide
  Antisense strand to SEQ ID NO: 1608517
auuugcgaggcccugauaa

SEQ ID NO: 1608519 - RNA, 19 nt, Artificial Sequence
  Description of Artificial Sequence: Synthetic oligonucleotide
  Sense strand starting at position 3326 of SEQ ID NO: 1560563
aguaaauacucgcuacuga

SEQ ID NO: 1608520 - RNA, 19 nt, Artificial Sequence
  Description of Artificial Sequence: Synthetic oligonucleotide
  Antisense strand to SEQ ID NO: 1608519
ucaguagcgaguauuuacu

SEQ ID NO: 1608521 - RNA, 19 nt, Artificial Sequence
  Description of Artificial Sequence: Synthetic oligonucleotide
  Sense strand starting at position 3327 of SEQ ID NO: 1560563
guaaauacucgcuacugac

SEQ ID NO: 1608522 - RNA, 19 nt, Artificial Sequence
  Description of Artificial Sequence: Synthetic oligonucleotide
  Antisense strand to SEQ ID NO: 1608521
gucaguagcgaguauuuac

SEQ ID NO: 1608523 - RNA, 19 nt, Artificial Sequence
  Description of Artificial Sequence: Synthetic oligonucleotide
  Sense strand starting at position 3336 of SEQ ID NO: 1560563
cgcuacugacuguauauua

SEQ ID NO: 1608524 - RNA, 19 nt, Artificial Sequence
  Description of Artificial Sequence: Synthetic oligonucleotide
  Antisense strand to SEQ ID NO: 1608523
uaauauacagucaguagcg

SEQ ID NO: 1608525 - RNA, 19 nt, Artificial Sequence
  Description of Artificial Sequence: Synthetic oligonucleotide
  Sense strand starting at position 3401 of SEQ ID NO: 1560563
uguauauugucagcacugu

SEQ ID NO: 1608526 - RNA, 19 nt, Artificial Sequence
  Description of Artificial Sequence: Synthetic oligonucleotide
  Antisense strand to SEQ ID NO: 1608525
acagugcugacaauauaca

SEQ ID NO: 1608527 - RNA, 19 nt, Artificial Sequence
  Description of Artificial Sequence: Synthetic oligonucleotide
  Sense strand starting at position 3402 of SEQ ID NO: 1560563
guauauugucagcacuguu

SEQ ID NO: 1608528 - RNA, 19 nt, Artificial Sequence
  Description of Artificial Sequence: Synthetic oligonucleotide
  Antisense strand to SEQ ID NO: 1608527
aacagugcugacaauauac

SEQ ID NO: 1608529 - RNA, 19 nt, Artificial Sequence
  Description of Artificial Sequence: Synthetic oligonucleotide
  Sense strand starting at position 3426 of SEQ ID NO: 1560563
cagcaagagcuugaugcaa

SEQ ID NO: 1608530 - RNA, 19 nt, Artificial Sequence
  Description of Artificial Sequence: Synthetic oligonucleotide
  Antisense strand to SEQ ID NO: 1608529
uugcaucaagcucuugcug

SEQ ID NO: 1608531 - RNA, 19 nt, Artificial Sequence
  Description of Artificial Sequence: Synthetic oligonucleotide
  Sense strand starting at position 3439 of SEQ ID NO: 1560563
augcaaagucggugcucaa

SEQ ID NO: 1608532 - RNA, 19 nt, Artificial Sequence
  Description of Artificial Sequence: Synthetic oligonucleotide
  Antisense strand to SEQ ID NO: 1608531
uugagcaccgacuuugcau

SEQ ID NO: 1608533 - RNA, 19 nt, Artificial Sequence
  Description of Artificial Sequence: Synthetic oligonucleotide
  Sense strand starting at position 3442 of SEQ ID NO: 1560563
caaagucggugcucaauaa

SEQ ID NO: 1608534 - RNA, 19 nt, Artificial Sequence
  Description of Artificial Sequence: Synthetic oligonucleotide
  Antisense strand to SEQ ID NO: 1608533
uuauugagcaccgacuuug

SEQ ID NO: 1608535 - RNA, 19 nt, Artificial Sequence
  Description of Artificial Sequence: Synthetic oligonucleotide
  Sense strand starting at position 3443 of SEQ ID NO: 1560563
aaagucggugcucaauaaa

SEQ ID NO: 1608536 - RNA, 19 nt, Artificial Sequence
  Description of Artificial Sequence: Synthetic oligonucleotide
  Antisense strand to SEQ ID NO: 1608535
uuuauugagcaccgacuuu

SEQ ID NO: 1608537 - RNA, 19 nt, Artificial Sequence
  Description of Artificial Sequence: Synthetic oligonucleotide
  Sense strand starting at position 3446 of SEQ ID NO: 1560563
gucggugcucaauaaauug

SEQ ID NO: 1608538 - RNA, 19 nt, Artificial Sequence
  Description of Artificial Sequence: Synthetic oligonucleotide
  Antisense strand to SEQ ID NO: 1608537
caauuuauugagcaccgac

SEQ ID NO: 1608539 - RNA, 19 nt, Artificial Sequence
  Description of Artificial Sequence: Synthetic oligonucleotide
  Sense strand starting at position 3477 of SEQ ID NO: 1560563
ggaaucaaguccuagaaua

SEQ ID NO: 1608540 - RNA, 19 nt, Artificial Sequence
  Description of Artificial Sequence: Synthetic oligonucleotide
  Antisense strand to SEQ ID NO: 1608539
uauucuaggacuugauucc

SEQ ID NO: 1608541 - RNA, 19 nt, Artificial Sequence
  Description of Artificial Sequence: Synthetic oligonucleotide
  Sense strand starting at position 3490 of SEQ ID NO: 1560563
agaauaguaagcuggccaa

SEQ ID NO: 1608542 - RNA, 19 nt, Artificial Sequence
  Description of Artificial Sequence: Synthetic oligonucleotide
  Antisense strand to SEQ ID NO: 1608541
uuggccagcuuacuauucu

SEQ ID NO: 1608543 - RNA, 19 nt, Artificial Sequence
  Description of Artificial Sequence: Synthetic oligonucleotide
  Sense strand starting at position 3516 of SEQ ID NO: 1560563
aggacacgauucuaauaua

SEQ ID NO: 1608544 - RNA, 19 nt, Artificial Sequence
  Description of Artificial Sequence: Synthetic oligonucleotide
  Antisense strand to SEQ ID NO: 1608543
uauauuagaaucguguccu

SEQ ID NO: 1608545 - RNA, 19 nt, Artificial Sequence
  Description of Artificial Sequence: Synthetic oligonucleotide
  Sense strand starting at position 3873 of SEQ ID NO: 1560563
cggucacuacacuaugaaa

SEQ ID NO: 1608546 - RNA, 19 nt, Artificial Sequence
  Description of Artificial Sequence: Synthetic oligonucleotide
  Antisense strand to SEQ ID NO: 1608545
uuucauaguguagugaccg

SEQ ID NO: 1608547 - RNA, 19 nt, Artificial Sequence
  Description of Artificial Sequence: Synthetic oligonucleotide
  Sense strand starting at position 3875 of SEQ ID NO: 1560563
gucacuacacuaugaaaug

SEQ ID NO: 1608548 - RNA, 19 nt, Artificial Sequence
  Description of Artificial Sequence: Synthetic oligonucleotide
  Antisense strand to SEQ ID NO: 1608547
cauuucauaguguagugac

SEQ ID NO: 1608549 - RNA, 19 nt, Artificial Sequence
  Description of Artificial Sequence: Synthetic oligonucleotide
  Sense strand starting at position 629 of SEQ ID NO: 1560564
gagugauccuccgaaccca

SEQ ID NO: 1608550 - RNA, 19 nt, Artificial Sequence
  Description of Artificial Sequence: Synthetic oligonucleotide
  Antisense strand to SEQ ID NO: 1608549
uggguucggaggaucacuc

SEQ ID NO: 1608551 - RNA, 19 nt, Artificial Sequence
  Description of Artificial Sequence: Synthetic oligonucleotide
  Sense strand starting at position 1252 of SEQ ID NO: 1560564
ggaugccagccuugacuua

SEQ ID NO: 1608552 - RNA, 19 nt, Artificial Sequence
  Description of Artificial Sequence: Synthetic oligonucleotide
  Antisense strand to SEQ ID NO: 1608551
uaagucaaggcuggcaucc

SEQ ID NO: 1608553 - RNA, 19 nt, Artificial Sequence
  Description of Artificial Sequence: Synthetic oligonucleotide
  Sense strand starting at position 1352 of SEQ ID NO: 1560564
cucaucauuucccgcugau

SEQ ID NO: 1608554 - RNA, 19 nt, Artificial Sequence
  Description of Artificial Sequence: Synthetic oligonucleotide
  Antisense strand to SEQ ID NO: 1608553
aucagcgggaaaugaugag

SEQ ID NO: 1608555 - RNA, 19 nt, Artificial Sequence
  Description of Artificial Sequence: Synthetic oligonucleotide
  Sense strand starting at position 1355 of SEQ ID NO: 1560564
aucauuucccgcugauauc

SEQ ID NO: 1608556 - RNA, 19 nt, Artificial Sequence
  Description of Artificial Sequence: Synthetic oligonucleotide
  Antisense strand to SEQ ID NO: 1608555
gauaucagcgggaaaugau

SEQ ID NO: 1608557 - RNA, 19 nt, Artificial Sequence
  Description of Artificial Sequence: Synthetic oligonucleotide
  Sense strand starting at position 1362 of SEQ ID NO: 1560564
cccgcugauaucuggaaga

SEQ ID NO: 1608558 - RNA, 19 nt, Artificial Sequence
  Description of Artificial Sequence: Synthetic oligonucleotide
  Antisense strand to SEQ ID NO: 1608557
ucuuccagauaucagcggg

SEQ ID NO: 1608559 - RNA, 19 nt, Artificial Sequence
  Description of Artificial Sequence: Synthetic oligonucleotide
  Sense strand starting at position 1364 of SEQ ID NO: 1560564
cgcugauaucuggaagauu

SEQ ID NO: 1608560 - RNA, 19 nt, Artificial Sequence
  Description of Artificial Sequence: Synthetic oligonucleotide
  Antisense strand to SEQ ID NO: 1608559
aaucuuccagauaucagcg

SEQ ID NO: 1608561 - RNA, 19 nt, Artificial Sequence
  Description of Artificial Sequence: Synthetic oligonucleotide
  Sense strand starting at position 1372 of SEQ ID NO: 1560564
ucuggaagauugucuguga

SEQ ID NO: 1608562 - RNA, 19 nt, Artificial Sequence
  Description of Artificial Sequence: Synthetic oligonucleotide
  Antisense strand to SEQ ID NO: 1608561
ucacagacaaucuuccaga

SEQ ID NO: 1608563 - RNA, 19 nt, Artificial Sequence
  Description of Artificial Sequence: Synthetic oligonucleotide
  Sense strand starting at position 1376 of SEQ ID NO: 1560564
gaagauugucugugagccu

SEQ ID NO: 1608564 - RNA, 19 nt, Artificial Sequence
  Description of Artificial Sequence: Synthetic oligonucleotide
  Antisense strand to SEQ ID NO: 1608563
aggcucacagacaaucuuc

SEQ ID NO: 1608565 - RNA, 19 nt, Artificial Sequence
  Description of Artificial Sequence: Synthetic oligonucleotide
  Sense strand starting at position 1377 of SEQ ID NO: 1560564
aagauugucugugagccua

SEQ ID NO: 1608566 - RNA, 19 nt, Artificial Sequence
  Description of Artificial Sequence: Synthetic oligonucleotide
  Antisense strand to SEQ ID NO: 1608565
uaggcucacagacaaucuu

SEQ ID NO: 1608567 - RNA, 19 nt, Artificial Sequence
  Description of Artificial Sequence: Synthetic oligonucleotide
  Sense strand starting at position 1379 of SEQ ID NO: 1560564
gauugucugugagccuaga

SEQ ID NO: 1608568 - RNA, 19 nt, Artificial Sequence
  Description of Artificial Sequence: Synthetic oligonucleotide
  Antisense strand to SEQ ID NO: 1608567
ucuaggcucacagacaauc

SEQ ID NO: 1608569 - RNA, 19 nt, Artificial Sequence
  Description of Artificial Sequence: Synthetic oligonucleotide
  Sense strand starting at position 1486 of SEQ ID NO: 1560564
uuaaucuccugggcucuaa

SEQ ID NO: 1608570 - RNA, 19 nt, Artificial Sequence
  Description of Artificial Sequence: Synthetic oligonucleotide
  Antisense strand to SEQ ID NO: 1608569
uuagagcccaggagauuaa

SEQ ID NO: 1608571 - RNA, 19 nt, Artificial Sequence
  Description of Artificial Sequence: Synthetic oligonucleotide
  Sense strand starting at position 1741 of SEQ ID NO: 1560564
cugguuaagucucuugauu

SEQ ID NO: 1608572 - RNA, 19 nt, Artificial Sequence
  Description of Artificial Sequence: Synthetic oligonucleotide
  Antisense strand to SEQ ID NO: 1608571
aaucaagagacuuaaccag

SEQ ID NO: 1608573 - RNA, 19 nt, Artificial Sequence
  Description of Artificial Sequence: Synthetic oligonucleotide
  Sense strand starting at position 1743 of SEQ ID NO: 1560564
gguuaagucucuugauuuc

SEQ ID NO: 1608574 - RNA, 19 nt, Artificial Sequence
  Description of Artificial Sequence: Synthetic oligonucleotide
  Antisense strand to SEQ ID NO: 1608573
gaaaucaagagacuuaacc

SEQ ID NO: 1608575 - RNA, 19 nt, Artificial Sequence
  Description of Artificial Sequence: Synthetic oligonucleotide
  Sense strand starting at position 1992 of SEQ ID NO: 1560564
gaacucugaggcugugaua

SEQ ID NO: 1608576 - RNA, 19 nt, Artificial Sequence
  Description of Artificial Sequence: Synthetic oligonucleotide
  Antisense strand to SEQ ID NO: 1608575
uaucacagccucagaguuc

SEQ ID NO: 1608577 - RNA, 19 nt, Artificial Sequence
  Description of Artificial Sequence: Synthetic oligonucleotide
  Sense strand starting at position 2145 of SEQ ID NO: 1560564
agacuaacccuguguccaa

SEQ ID NO: 1608578 - RNA, 19 nt, Artificial Sequence
  Description of Artificial Sequence: Synthetic oligonucleotide
  Antisense strand to SEQ ID NO: 1608577
uuggacacaggguuagucu

SEQ ID NO: 1608579 - RNA, 19 nt, Artificial Sequence
  Description of Artificial Sequence: Synthetic oligonucleotide
  Sense strand starting at position 2229 of SEQ ID NO: 1560564
gacauugggucuccaaaga

SEQ ID NO: 1608580 - RNA, 19 nt, Artificial Sequence
  Description of Artificial Sequence: Synthetic oligonucleotide
  Antisense strand to SEQ ID NO: 1608579
ucuuuggagacccaauguc

SEQ ID NO: 1608581 - RNA, 19 nt, Artificial Sequence
  Description of Artificial Sequence: Synthetic oligonucleotide
  Sense strand starting at position 2262 of SEQ ID NO: 1560564
ggucuucccucaguuaacu

SEQ ID NO: 1608582 - RNA, 19 nt, Artificial Sequence
  Description of Artificial Sequence: Synthetic oligonucleotide
  Antisense strand to SEQ ID NO: 1608581
aguuaacugagggaagacc

SEQ ID NO: 1608583 - RNA, 19 nt, Artificial Sequence
  Description of Artificial Sequence: Synthetic oligonucleotide
  Sense strand starting at position 2271 of SEQ ID NO: 1560564
ucaguuaacuuuccuggaa

SEQ ID NO: 1608584 - RNA, 19 nt, Artificial Sequence
  Description of Artificial Sequence: Synthetic oligonucleotide
  Antisense strand to SEQ ID NO: 1608583
uuccaggaaaguuaacuga

SEQ ID NO: 1608585 - RNA, 19 nt, Artificial Sequence
  Description of Artificial Sequence: Synthetic oligonucleotide
  Sense strand starting at position 2299 of SEQ ID NO: 1560564
aggguauucugggaagaag

SEQ ID NO: 1608586 - RNA, 19 nt, Artificial Sequence
  Description of Artificial Sequence: Synthetic oligonucleotide
  Antisense strand to SEQ ID NO: 1608585
cuucuucccagaauacccu

SEQ ID NO: 1608587 - RNA, 19 nt, Artificial Sequence
  Description of Artificial Sequence: Synthetic oligonucleotide
  Sense strand starting at position 2418 of SEQ ID NO: 1560564
cgccaagcauuaucagaca

SEQ ID NO: 1608588 - RNA, 19 nt, Artificial Sequence
  Description of Artificial Sequence: Synthetic oligonucleotide
  Antisense strand to SEQ ID NO: 1608587
ugucugauaaugcuuggcg

SEQ ID NO: 1608589 - RNA, 19 nt, Artificial Sequence
  Description of Artificial Sequence: Synthetic oligonucleotide
  Sense strand starting at position 2484 of SEQ ID NO: 1560564
agcucuguccuccggugaa

SEQ ID NO: 1608590 - RNA, 19 nt, Artificial Sequence
  Description of Artificial Sequence: Synthetic oligonucleotide
  Antisense strand to SEQ ID NO: 1608589
uucaccggaggacagagcu

SEQ ID NO: 1608591 - RNA, 19 nt, Artificial Sequence
  Description of Artificial Sequence: Synthetic oligonucleotide
  Sense strand starting at position 2514 of SEQ ID NO: 1560564
ggaguugggucuucaaauu

SEQ ID NO: 1608592 - RNA, 19 nt, Artificial Sequence
  Description of Artificial Sequence: Synthetic oligonucleotide
  Antisense strand to SEQ ID NO: 1608591
aauuugaagacccaacucc

SEQ ID NO: 1608593 - RNA, 19 nt, Artificial Sequence
  Description of Artificial Sequence: Synthetic oligonucleotide
  Sense strand starting at position 2817 of SEQ ID NO: 1560564
cuugauucugcccaacaug

SEQ ID NO: 1608594 - RNA, 19 nt, Artificial Sequence
  Description of Artificial Sequence: Synthetic oligonucleotide
  Antisense strand to SEQ ID NO: 1608593
cauguugggcagaaucaag

SEQ ID NO: 1608595 - RNA, 19 nt, Artificial Sequence
  Description of Artificial Sequence: Synthetic oligonucleotide
  Sense strand starting at position 2842 of SEQ ID NO: 1560564
ggaucugaguuucuacaac

SEQ ID NO: 1608596 - RNA, 19 nt, Artificial Sequence
  Description of Artificial Sequence: Synthetic oligonucleotide
  Antisense strand to SEQ ID NO: 1608595
guuguagaaacucagaucc

SEQ ID NO: 1608597 - RNA, 19 nt, Artificial Sequence
  Description of Artificial Sequence: Synthetic oligonucleotide
  Sense strand starting at position 2898 of SEQ ID NO: 1560564
gggacauggauacguauua

SEQ ID NO: 1608598 - RNA, 19 nt, Artificial Sequence
  Description of Artificial Sequence: Synthetic oligonucleotide
  Antisense strand to SEQ ID NO: 1608597
uaauacguauccauguccc

SEQ ID NO: 1608599 - RNA, 19 nt, Artificial Sequence
  Description of Artificial Sequence: Synthetic oligonucleotide
  Sense strand starting at position 2930 of SEQ ID NO: 1560564
cauagucacucauuggaag

SEQ ID NO: 1608600 - RNA, 19 nt, Artificial Sequence
  Description of Artificial Sequence: Synthetic oligonucleotide
  Antisense strand to SEQ ID NO: 1608599
cuuccaaugagugacuaug

SEQ ID NO: 1608601 - RNA, 19 nt, Artificial Sequence
  Description of Artificial Sequence: Synthetic oligonucleotide
  Sense strand starting at position 2931 of SEQ ID NO: 1560564
auagucacucauuggaaga

SEQ ID NO: 1608602 - RNA, 19 nt, Artificial Sequence
  Description of Artificial Sequence: Synthetic oligonucleotide
  Antisense strand to SEQ ID NO: 1608601
ucuuccaaugagugacuau

SEQ ID NO: 1608603 - RNA, 19 nt, Artificial Sequence
  Description of Artificial Sequence: Synthetic oligonucleotide
  Sense strand starting at position 2933 of SEQ ID NO: 1560564
agucacucauuggaagacu

SEQ ID NO: 1608604 - RNA, 19 nt, Artificial Sequence
  Description of Artificial Sequence: Synthetic oligonucleotide
  Antisense strand to SEQ ID NO: 1608603
agucuuccaaugagugacu

SEQ ID NO: 1608605 - RNA, 19 nt, Artificial Sequence
  Description of Artificial Sequence: Synthetic oligonucleotide
  Sense strand starting at position 3162 of SEQ ID NO: 1560564
aagacucugucgcuggaaa

SEQ ID NO: 1608606 - RNA, 19 nt, Artificial Sequence
  Description of Artificial Sequence: Synthetic oligonucleotide
  Antisense strand to SEQ ID NO: 1608605
uuuccagcgacagagucuu

SEQ ID NO: 1608607 - RNA, 19 nt, Artificial Sequence
  Description of Artificial Sequence: Synthetic oligonucleotide
  Sense strand starting at position 3201 of SEQ ID NO: 1560564
aucuuuauuccuggcagau

SEQ ID NO: 1608608 - RNA, 19 nt, Artificial Sequence
  Description of Artificial Sequence: Synthetic oligonucleotide
  Antisense strand to SEQ ID NO: 1608607
aucugccaggaauaaagau

SEQ ID NO: 1608609 - RNA, 19 nt, Artificial Sequence
  Description of Artificial Sequence: Synthetic oligonucleotide
  Sense strand starting at position 3203 of SEQ ID NO: 1560564
cuuuauuccuggcagauca

SEQ ID NO: 1608610 - RNA, 19 nt, Artificial Sequence
  Description of Artificial Sequence: Synthetic oligonucleotide
  Antisense strand to SEQ ID NO: 1608609
ugaucugccaggaauaaag

SEQ ID NO: 1608611 - RNA, 19 nt, Artificial Sequence
  Description of Artificial Sequence: Synthetic oligonucleotide
  Sense strand starting at position 3213 of SEQ ID NO: 1560564
ggcagaucaaccuggguga

SEQ ID NO: 1608612 - RNA, 19 nt, Artificial Sequence
  Description of Artificial Sequence: Synthetic oligonucleotide
  Antisense strand to SEQ ID NO: 1608611
ucacccagguugaucugcc

SEQ ID NO: 1608613 - RNA, 19 nt, Artificial Sequence
  Description of Artificial Sequence: Synthetic oligonucleotide
  Sense strand starting at position 3443 of SEQ ID NO: 1560564
gguugaaacuuggaggcau

SEQ ID NO: 1608614 - RNA, 19 nt, Artificial Sequence
  Description of Artificial Sequence: Synthetic oligonucleotide
  Antisense strand to SEQ ID NO: 1608613
augccuccaaguuucaacc

SEQ ID NO: 1608615 - RNA, 19 nt, Artificial Sequence
  Description of Artificial Sequence: Synthetic oligonucleotide
  Sense strand starting at position 3474 of SEQ ID NO: 1560564
aguagcucacgcuaguaau

SEQ ID NO: 1608616 - RNA, 19 nt, Artificial Sequence
  Description of Artificial Sequence: Synthetic oligonucleotide
  Antisense strand to SEQ ID NO: 1608615
auuacuagcgugagcuacu

SEQ ID NO: 1608617 - RNA, 19 nt, Artificial Sequence
  Description of Artificial Sequence: Synthetic oligonucleotide
  Sense strand starting at position 3929 of SEQ ID NO: 1560564
auuacauaaugacaugagu

SEQ ID NO: 1608618 - RNA, 19 nt, Artificial Sequence
  Description of Artificial Sequence: Synthetic oligonucleotide
  Antisense strand to SEQ ID NO: 1608617
acucaugucauuauguaau

SEQ ID NO: 1608619 - RNA, 19 nt, Artificial Sequence
  Description of Artificial Sequence: Synthetic oligonucleotide
  Sense strand starting at position 3942 of SEQ ID NO: 1560564
augaguuccuguucccuca

SEQ ID NO: 1608620 - RNA, 19 nt, Artificial Sequence
  Description of Artificial Sequence: Synthetic oligonucleotide
  Antisense strand to SEQ ID NO: 1608619
ugagggaacaggaacucau

SEQ ID NO: 1608621 - RNA, 19 nt, Artificial Sequence
  Description of Artificial Sequence: Synthetic oligonucleotide
  Sense strand starting at position 3970 of SEQ ID NO: 1560564
aucauauaauccgugcaca

SEQ ID NO: 1608622 - RNA, 19 nt, Artificial Sequence
  Description of Artificial Sequence: Synthetic oligonucleotide
  Antisense strand to SEQ ID NO: 1608621
ugugcacggauuauaugau

SEQ ID NO: 1608623 - RNA, 19 nt, Artificial Sequence
  Description of Artificial Sequence: Synthetic oligonucleotide
  Sense strand starting at position 3971 of SEQ ID NO: 1560564
ucauauaauccgugcacau

SEQ ID NO: 1608624 - RNA, 19 nt, Artificial Sequence
  Description of Artificial Sequence: Synthetic oligonucleotide
  Antisense strand to SEQ ID NO: 1608623
augugcacggauuauauga

SEQ ID NO: 1608625 - RNA, 19 nt, Artificial Sequence
  Description of Artificial Sequence: Synthetic oligonucleotide
  Sense strand starting at position 3973 of SEQ ID NO: 1560564
auauaauccgugcacauau

SEQ ID NO: 1608626 - RNA, 19 nt, Artificial Sequence
  Description of Artificial Sequence: Synthetic oligonucleotide
  Antisense strand to SEQ ID NO: 1608625
auaugugcacggauuauau

SEQ ID NO: 1608627 - RNA, 19 nt, Artificial Sequence
  Description of Artificial Sequence: Synthetic oligonucleotide
  Sense strand starting at position 3975 of SEQ ID NO: 1560564
auaauccgugcacauauaa

SEQ ID NO: 1608628 - RNA, 19 nt, Artificial Sequence
  Description of Artificial Sequence: Synthetic oligonucleotide
  Antisense strand to SEQ ID NO: 1608627
uuauaugugcacggauuau

SEQ ID NO: 1608629 - RNA, 19 nt, Artificial Sequence
  Description of Artificial Sequence: Synthetic oligonucleotide
  Sense strand starting at position 243 of SEQ ID NO: 1560565
ucaauucuuccgcaaggca

SEQ ID NO: 1608630 - RNA, 19 nt, Artificial Sequence
  Description of Artificial Sequence: Synthetic oligonucleotide
  Antisense strand to SEQ ID NO: 1608629
ugccuugcggaagaauuga

SEQ ID NO: 1608631 - RNA, 19 nt, Artificial Sequence
  Description of Artificial Sequence: Synthetic oligonucleotide
  Sense strand starting at position 321 of SEQ ID NO: 1560565
cuccacgugucccuacaau

SEQ ID NO: 1608632 - RNA, 19 nt, Artificial Sequence
  Description of Artificial Sequence: Synthetic oligonucleotide
  Antisense strand to SEQ ID NO: 1608631
auuguagggacacguggag

SEQ ID NO: 1608633 - RNA, 19 nt, Artificial Sequence
  Description of Artificial Sequence: Synthetic oligonucleotide
  Sense strand starting at position 390 of SEQ ID NO: 1560565
caccgcuauggcuaugaaa

SEQ ID NO: 1608634 - RNA, 19 nt, Artificial Sequence
  Description of Artificial Sequence: Synthetic oligonucleotide
  Antisense strand to SEQ ID NO: 1608633
uuucauagccauagcggug

SEQ ID NO: 1608635 - RNA, 19 nt, Artificial Sequence
  Description of Artificial Sequence: Synthetic oligonucleotide
  Sense strand starting at position 392 of SEQ ID NO: 1560565
ccgcuauggcuaugaaaua

SEQ ID NO: 1608636 - RNA, 19 nt, Artificial Sequence
  Description of Artificial Sequence: Synthetic oligonucleotide
  Antisense strand to SEQ ID NO: 1608635
uauuucauagccauagcgg

SEQ ID NO: 1608637 - RNA, 19 nt, Artificial Sequence
  Description of Artificial Sequence: Synthetic oligonucleotide
  Sense strand starting at position 393 of SEQ ID NO: 1560565
cgcuauggcuaugaaauag

SEQ ID NO: 1608638 - RNA, 19 nt, Artificial Sequence
  Description of Artificial Sequence: Synthetic oligonucleotide
  Antisense strand to SEQ ID NO: 1608637
cuauuucauagccauagcg

SEQ ID NO: 1608639 - RNA, 19 nt, Artificial Sequence
  Description of Artificial Sequence: Synthetic oligonucleotide
  Sense strand starting at position 420 of SEQ ID NO: 1560565
ucgcacucuugauagaaau

SEQ ID NO: 1608640 - RNA, 19 nt, Artificial Sequence
  Description of Artificial Sequence: Synthetic oligonucleotide
  Antisense strand to SEQ ID NO: 1608639
auuucuaucaagagugcga

SEQ ID NO: 1608641 - RNA, 19 nt, Artificial Sequence
  Description of Artificial Sequence: Synthetic oligonucleotide
  Sense strand starting at position 837 of SEQ ID NO: 1560565
ccucgaggguccuccaaua

SEQ ID NO: 1608642 - RNA, 19 nt, Artificial Sequence
  Description of Artificial Sequence: Synthetic oligonucleotide
  Antisense strand to SEQ ID NO: 1608641
uauuggaggacccucgagg

SEQ ID NO: 1608643 - RNA, 19 nt, Artificial Sequence
  Description of Artificial Sequence: Synthetic oligonucleotide
  Sense strand starting at position 3176 of SEQ ID NO: 1560565
aggccaacuuguuaaauau

SEQ ID NO: 1608644 - RNA, 19 nt, Artificial Sequence
  Description of Artificial Sequence: Synthetic oligonucleotide
  Antisense strand to SEQ ID NO: 1608643
auauuuaacaaguuggccu

SEQ ID NO: 1608645 - RNA, 19 nt, Artificial Sequence
  Description of Artificial Sequence: Synthetic oligonucleotide
  Sense strand starting at position 3744 of SEQ ID NO: 1560565
ggccucuguugucuuugaa

SEQ ID NO: 1608646 - RNA, 19 nt, Artificial Sequence
  Description of Artificial Sequence: Synthetic oligonucleotide
  Antisense strand to SEQ ID NO: 1608645
uucaaagacaacagaggcc

SEQ ID NO: 1608647 - RNA, 19 nt, Artificial Sequence
  Description of Artificial Sequence: Synthetic oligonucleotide
  Sense strand starting at position 3757 of SEQ ID NO: 1560565
uuugaacuucuaggacgau

SEQ ID NO: 1608648 - RNA, 19 nt, Artificial Sequence
  Description of Artificial Sequence: Synthetic oligonucleotide
  Antisense strand to SEQ ID NO: 1608647
aucguccuagaaguucaaa

SEQ ID NO: 1608649 - RNA, 19 nt, Artificial Sequence
  Description of Artificial Sequence: Synthetic oligonucleotide
  Sense strand starting at position 3890 of SEQ ID NO: 1560565
ccaugcgucuuccacugau

SEQ ID NO: 1608650 - RNA, 19 nt, Artificial Sequence
  Description of Artificial Sequence: Synthetic oligonucleotide
  Antisense strand to SEQ ID NO: 1608649
aucaguggaagacgcaugg

SEQ ID NO: 1608651 - RNA, 19 nt, Artificial Sequence
  Description of Artificial Sequence: Synthetic oligonucleotide
  Sense strand starting at position 3893 of SEQ ID NO: 1560565
ugcgucuuccacugauguu

SEQ ID NO: 1608652 - RNA, 19 nt, Artificial Sequence
  Description of Artificial Sequence: Synthetic oligonucleotide
  Antisense strand to SEQ ID NO: 1608651
aacaucaguggaagacgca

SEQ ID NO: 1608653 - RNA, 19 nt, Artificial Sequence
  Description of Artificial Sequence: Synthetic oligonucleotide
  Sense strand starting at position 3894 of SEQ ID NO: 1560565
gcgucuuccacugauguuu

SEQ ID NO: 1608654 - RNA, 19 nt, Artificial Sequence
  Description of Artificial Sequence: Synthetic oligonucleotide
  Antisense strand to SEQ ID NO: 1608653
aaacaucaguggaagacgc

SEQ ID NO: 1608655 - RNA, 19 nt, Artificial Sequence
  Description of Artificial Sequence: Synthetic oligonucleotide
  Sense strand starting at position 3903 of SEQ ID NO: 1560565
acugauguuuccugggcuu

SEQ ID NO: 1608656 - RNA, 19 nt, Artificial Sequence
  Description of Artificial Sequence: Synthetic oligonucleotide
  Antisense strand to SEQ ID NO: 1608655
aagcccaggaaacaucagu

SEQ ID NO: 1608657 - RNA, 19 nt, Artificial Sequence
  Description of Artificial Sequence: Synthetic oligonucleotide
  Sense strand starting at position 3905 of SEQ ID NO: 1560565
ugauguuuccugggcuuag

SEQ ID NO: 1608658 - RNA, 19 nt, Artificial Sequence
  Description of Artificial Sequence: Synthetic oligonucleotide
  Antisense strand to SEQ ID NO: 1608657
cuaagcccaggaaacauca

SEQ ID NO: 1608659 - RNA, 19 nt, Artificial Sequence
  Description of Artificial Sequence: Synthetic oligonucleotide
  Sense strand starting at position 3906 of SEQ ID NO: 1560565
gauguuuccugggcuuaga

SEQ ID NO: 1608660 - RNA, 19 nt, Artificial Sequence
  Description of Artificial Sequence: Synthetic oligonucleotide
  Antisense strand to SEQ ID NO: 1608659
ucuaagcccaggaaacauc

SEQ ID NO: 1608661 - RNA, 19 nt, Artificial Sequence
  Description of Artificial Sequence: Synthetic oligonucleotide
  Sense strand starting at position 3960 of SEQ ID NO: 1560565
aguuguaacugggaggcua

SEQ ID NO: 1608662 - RNA, 19 nt, Artificial Sequence
  Description of Artificial Sequence: Synthetic oligonucleotide
  Antisense strand to SEQ ID NO: 1608661
uagccucccaguuacaacu

SEQ ID NO: 1608663 - RNA, 19 nt, Artificial Sequence
  Description of Artificial Sequence: Synthetic oligonucleotide
  Sense strand starting at position 114 of SEQ ID NO: 1560566
gagggauccuugcccuaca

SEQ ID NO: 1608664 - RNA, 19 nt, Artificial Sequence
  Description of Artificial Sequence: Synthetic oligonucleotide
  Antisense strand to SEQ ID NO: 1608663
uguagggcaaggaucccuc

SEQ ID NO: 1608665 - RNA, 19 nt, Artificial Sequence
  Description of Artificial Sequence: Synthetic oligonucleotide
  Sense strand starting at position 115 of SEQ ID NO: 1560566
agggauccuugcccuacau

SEQ ID NO: 1608666 - RNA, 19 nt, Artificial Sequence
  Description of Artificial Sequence: Synthetic oligonucleotide
  Antisense strand to SEQ ID NO: 1608665
auguagggcaaggaucccu

SEQ ID NO: 1608667 - RNA, 19 nt, Artificial Sequence
  Description of Artificial Sequence: Synthetic oligonucleotide
  Sense strand starting at position 264 of SEQ ID NO: 1560566
cacggaaucucucaagguu

SEQ ID NO: 1608668 - RNA, 19 nt, Artificial Sequence
  Description of Artificial Sequence: Synthetic oligonucleotide
  Antisense strand to SEQ ID NO: 1608667
aaccuugagagauuccgug

SEQ ID NO: 1608669 - RNA, 19 nt, Artificial Sequence
  Description of Artificial Sequence: Synthetic oligonucleotide
  Sense strand starting at position 277 of SEQ ID NO: 1560566
aagguuucccagcgaacac

SEQ ID NO: 1608670 - RNA, 19 nt, Artificial Sequence
  Description of Artificial Sequence: Synthetic oligonucleotide
  Antisense strand to SEQ ID NO: 1608669
guguucgcugggaaaccuu

SEQ ID NO: 1608671 - RNA, 19 nt, Artificial Sequence
  Description of Artificial Sequence: Synthetic oligonucleotide
  Sense strand starting at position 278 of SEQ ID NO: 1560566
agguuucccagcgaacacu

SEQ ID NO: 1608672 - RNA, 19 nt, Artificial Sequence
  Description of Artificial Sequence: Synthetic oligonucleotide
  Antisense strand to SEQ ID NO: 1608671
aguguucgcugggaaaccu

SEQ ID NO: 1608673 - RNA, 19 nt, Artificial Sequence
  Description of Artificial Sequence: Synthetic oligonucleotide
  Sense strand starting at position 596 of SEQ ID NO: 1560566
gaucacacuuccuuaggga

SEQ ID NO: 1608674 - RNA, 19 nt, Artificial Sequence
  Description of Artificial Sequence: Synthetic oligonucleotide
  Antisense strand to SEQ ID NO: 1608673
ucccuaaggaagugugauc

SEQ ID NO: 1608675 - RNA, 19 nt, Artificial Sequence
  Description of Artificial Sequence: Synthetic oligonucleotide
  Sense strand starting at position 2125 of SEQ ID NO: 1560566
ccuaaauuuagccgcggua

SEQ ID NO: 1608676 - RNA, 19 nt, Artificial Sequence
  Description of Artificial Sequence: Synthetic oligonucleotide
  Antisense strand to SEQ ID NO: 1608675
uaccgcggcuaaauuuagg

SEQ ID NO: 1608677 - RNA, 19 nt, Artificial Sequence
  Description of Artificial Sequence: Synthetic oligonucleotide
  Sense strand starting at position 2127 of SEQ ID NO: 1560566
uaaauuuagccgcgguaua

SEQ ID NO: 1608678 - RNA, 19 nt, Artificial Sequence
  Description of Artificial Sequence: Synthetic oligonucleotide
  Antisense strand to SEQ ID NO: 1608677
uauaccgcggcuaaauuua

SEQ ID NO: 1608679 - RNA, 19 nt, Artificial Sequence
  Description of Artificial Sequence: Synthetic oligonucleotide
  Sense strand starting at position 2128 of SEQ ID NO: 1560566
aaauuuagccgcgguauau

SEQ ID NO: 1608680 - RNA, 19 nt, Artificial Sequence
  Description of Artificial Sequence: Synthetic oligonucleotide
  Antisense strand to SEQ ID NO: 1608679
auauaccgcggcuaaauuu

SEQ ID NO: 1608681 - RNA, 19 nt, Artificial Sequence
  Description of Artificial Sequence: Synthetic oligonucleotide
  Sense strand starting at position 2434 of SEQ ID NO: 1560566
cccggaucccuugacggaa

SEQ ID NO: 1608682 - RNA, 19 nt, Artificial Sequence
  Description of Artificial Sequence: Synthetic oligonucleotide
  Antisense strand to SEQ ID NO: 1608681
uuccgucaagggauccggg

SEQ ID NO: 1608683 - RNA, 19 nt, Artificial Sequence
  Description of Artificial Sequence: Synthetic oligonucleotide
  Sense strand starting at position 3215 of SEQ ID NO: 1560566
ugucacuccuguuacaacu

SEQ ID NO: 1608684 - RNA, 19 nt, Artificial Sequence
  Description of Artificial Sequence: Synthetic oligonucleotide
  Antisense strand to SEQ ID NO: 1608683
aguuguaacaggagugaca

SEQ ID NO: 1608685 - RNA, 19 nt, Artificial Sequence
  Description of Artificial Sequence: Synthetic oligonucleotide
  Sense strand starting at position 3304 of SEQ ID NO: 1560566
ccuccacuuuagugaagga

SEQ ID NO: 1608686 - RNA, 19 nt, Artificial Sequence
  Description of Artificial Sequence: Synthetic oligonucleotide
  Antisense strand to SEQ ID NO: 1608685
uccuucacuaaaguggagg

SEQ ID NO: 1608687 - RNA, 19 nt, Artificial Sequence
  Description of Artificial Sequence: Synthetic oligonucleotide
  Sense strand starting at position 3693 of SEQ ID NO: 1560566
cuagaaagugagugugaga

SEQ ID NO: 1608688 - RNA, 19 nt, Artificial Sequence
  Description of Artificial Sequence: Synthetic oligonucleotide
  Antisense strand to SEQ ID NO: 1608687
ucucacacucacuuucuag

SEQ ID NO: 1608689 - RNA, 19 nt, Artificial Sequence
  Description of Artificial Sequence: Synthetic oligonucleotide
  Sense strand starting at position 3696 of SEQ ID NO: 1560566
gaaagugagugugagauga

SEQ ID NO: 1608690 - RNA, 19 nt, Artificial Sequence
  Description of Artificial Sequence: Synthetic oligonucleotide
  Antisense strand to SEQ ID NO: 1608689
ucaucucacacucacuuuc

SEQ ID NO: 1608691 - RNA, 19 nt, Artificial Sequence
  Description of Artificial Sequence: Synthetic oligonucleotide
  Sense strand starting at position 3761 of SEQ ID NO: 1560566
ggugaaaugugagcuaaug

SEQ ID NO: 1608692 - RNA, 19 nt, Artificial Sequence
  Description of Artificial Sequence: Synthetic oligonucleotide
  Antisense strand to SEQ ID NO: 1608691
cauuagcucacauuucacc

SEQ ID NO: 1608693 - RNA, 19 nt, Artificial Sequence
  Description of Artificial Sequence: Synthetic oligonucleotide
  Sense strand starting at position 3763 of SEQ ID NO: 1560566
ugaaaugugagcuaaugug

SEQ ID NO: 1608694 - RNA, 19 nt, Artificial Sequence
  Description of Artificial Sequence: Synthetic oligonucleotide
  Antisense strand to SEQ ID NO: 1608693
cacauuagcucacauuuca

SEQ ID NO: 1608695 - RNA, 19 nt, Artificial Sequence
  Description of Artificial Sequence: Synthetic oligonucleotide
  Sense strand starting at position 3888 of SEQ ID NO: 1560566
cucucagccucugcagaaa

SEQ ID NO: 1608696 - RNA, 19 nt, Artificial Sequence
  Description of Artificial Sequence: Synthetic oligonucleotide
  Antisense strand to SEQ ID NO: 1608695
uuucugcagaggcugagag

SEQ ID NO: 1608697 - RNA, 19 nt, Artificial Sequence
  Description of Artificial Sequence: Synthetic oligonucleotide
  Sense strand starting at position 283 of SEQ ID NO: 1560567
ccuagauaccugggugaca

SEQ ID NO: 1608698 - RNA, 19 nt, Artificial Sequence
  Description of Artificial Sequence: Synthetic oligonucleotide
  Antisense strand to SEQ ID NO: 1608697
ugucacccagguaucuagg

SEQ ID NO: 1608699 - RNA, 19 nt, Artificial Sequence
  Description of Artificial Sequence: Synthetic oligonucleotide
  Sense strand starting at position 446 of SEQ ID NO: 1560567
cuggccacucccugaauau

SEQ ID NO: 1608700 - RNA, 19 nt, Artificial Sequence
  Description of Artificial Sequence: Synthetic oligonucleotide
  Antisense strand to SEQ ID NO: 1608699
auauucagggaguggccag

SEQ ID NO: 1608701 - RNA, 19 nt, Artificial Sequence
  Description of Artificial Sequence: Synthetic oligonucleotide
  Sense strand starting at position 713 of SEQ ID NO: 1560567
augcguguuccauucagua

SEQ ID NO: 1608702 - RNA, 19 nt, Artificial Sequence
  Description of Artificial Sequence: Synthetic oligonucleotide
  Antisense strand to SEQ ID NO: 1608701
uacugaauggaacacgcau

SEQ ID NO: 1608703 - RNA, 19 nt, Artificial Sequence
  Description of Artificial Sequence: Synthetic oligonucleotide
  Sense strand starting at position 800 of SEQ ID NO: 1560567
gcacguaaguaucaaacaa

SEQ ID NO: 1608704 - RNA, 19 nt, Artificial Sequence
  Description of Artificial Sequence: Synthetic oligonucleotide
  Antisense strand to SEQ ID NO: 1608703
uuguuugauacuuacgugc

SEQ ID NO: 1608705 - RNA, 19 nt, Artificial Sequence
  Description of Artificial Sequence: Synthetic oligonucleotide
  Sense strand starting at position 827 of SEQ ID NO: 1560567
uuuaucauguugccugaaa

SEQ ID NO: 1608706 - RNA, 19 nt, Artificial Sequence
  Description of Artificial Sequence: Synthetic oligonucleotide
  Antisense strand to SEQ ID NO: 1608705
uuucaggcaacaugauaaa

SEQ ID NO: 1608707 - RNA, 19 nt, Artificial Sequence
  Description of Artificial Sequence: Synthetic oligonucleotide
  Sense strand starting at position 828 of SEQ ID NO: 1560567
uuaucauguugccugaaau

SEQ ID NO: 1608708 - RNA, 19 nt, Artificial Sequence
  Description of Artificial Sequence: Synthetic oligonucleotide
  Antisense strand to SEQ ID NO: 1608707
auuucaggcaacaugauaa

SEQ ID NO: 1608709 - RNA, 19 nt, Artificial Sequence
  Description of Artificial Sequence: Synthetic oligonucleotide
  Sense strand starting at position 946 of SEQ ID NO: 1560567
ggcuuugcccaauaggaaa

SEQ ID NO: 1608710 - RNA, 19 nt, Artificial Sequence
  Description of Artificial Sequence: Synthetic oligonucleotide
  Antisense strand to SEQ ID NO: 1608709
uuuccuauugggcaaagcc

SEQ ID NO: 1608711 - RNA, 19 nt, Artificial Sequence
  Description of Artificial Sequence: Synthetic oligonucleotide
  Sense strand starting at position 991 of SEQ ID NO: 1560567
agguguucuuucccucuga

SEQ ID NO: 1608712 - RNA, 19 nt, Artificial Sequence
  Description of Artificial Sequence: Synthetic oligonucleotide
  Antisense strand to SEQ ID NO: 1608711
ucagagggaaagaacaccu

SEQ ID NO: 1608713 - RNA, 19 nt, Artificial Sequence
  Description of Artificial Sequence: Synthetic oligonucleotide
  Sense strand starting at position 1248 of SEQ ID NO: 1560567
agaagaacccucuguaugu

SEQ ID NO: 1608714 - RNA, 19 nt, Artificial Sequence
  Description of Artificial Sequence: Synthetic oligonucleotide
  Antisense strand to SEQ ID NO: 1608713
acauacagaggguucuucu

SEQ ID NO: 1608715 - RNA, 19 nt, Artificial Sequence
  Description of Artificial Sequence: Synthetic oligonucleotide
  Sense strand starting at position 1249 of SEQ ID NO: 1560567
gaagaacccucuguauguu

SEQ ID NO: 1608716 - RNA, 19 nt, Artificial Sequence
  Description of Artificial Sequence: Synthetic oligonucleotide
  Antisense strand to SEQ ID NO: 1608715
aacauacagaggguucuuc

SEQ ID NO: 1608717 - RNA, 19 nt, Artificial Sequence
  Description of Artificial Sequence: Synthetic oligonucleotide
  Sense strand starting at position 1257 of SEQ ID NO: 1560567
cucuguauguucuuuauaa

SEQ ID NO: 1608718 - RNA, 19 nt, Artificial Sequence
  Description of Artificial Sequence: Synthetic oligonucleotide
  Antisense strand to SEQ ID NO: 1608717
uuauaaagaacauacagag

SEQ ID NO: 1608719 - RNA, 19 nt, Artificial Sequence
  Description of Artificial Sequence: Synthetic oligonucleotide
  Sense strand starting at position 1259 of SEQ ID NO: 1560567
cuguauguucuuuauaaac

SEQ ID NO: 1608720 - RNA, 19 nt, Artificial Sequence
  Description of Artificial Sequence: Synthetic oligonucleotide
  Antisense strand to SEQ ID NO: 1608719
guuuauaaagaacauacag

SEQ ID NO: 1608721 - RNA, 19 nt, Artificial Sequence
  Description of Artificial Sequence: Synthetic oligonucleotide
  Sense strand starting at position 1760 of SEQ ID NO: 1560567
aguccaaauucucagcgaa

SEQ ID NO: 1608722 - RNA, 19 nt, Artificial Sequence
  Description of Artificial Sequence: Synthetic oligonucleotide
  Antisense strand to SEQ ID NO: 1608721
uucgcugagaauuuggacu

SEQ ID NO: 1608723 - RNA, 19 nt, Artificial Sequence
  Description of Artificial Sequence: Synthetic oligonucleotide
  Sense strand starting at position 1762 of SEQ ID NO: 1560567
uccaaauucucagcgaaag

SEQ ID NO: 1608724 - RNA, 19 nt, Artificial Sequence
  Description of Artificial Sequence: Synthetic oligonucleotide
  Antisense strand to SEQ ID NO: 1608723
cuuucgcugagaauuugga

SEQ ID NO: 1608725 - RNA, 19 nt, Artificial Sequence
  Description of Artificial Sequence: Synthetic oligonucleotide
  Sense strand starting at position 1763 of SEQ ID NO: 1560567
ccaaauucucagcgaaaga

SEQ ID NO: 1608726 - RNA, 19 nt, Artificial Sequence
  Description of Artificial Sequence: Synthetic oligonucleotide
  Antisense strand to SEQ ID NO: 1608725
ucuuucgcugagaauuugg

SEQ ID NO: 1608727 - RNA, 19 nt, Artificial Sequence
  Description of Artificial Sequence: Synthetic oligonucleotide
  Sense strand starting at position 1837 of SEQ ID NO: 1560567
cagguuuccugggcuccaa

SEQ ID NO: 1608728 - RNA, 19 nt, Artificial Sequence
  Description of Artificial Sequence: Synthetic oligonucleotide
  Antisense strand to SEQ ID NO: 1608727
uuggagcccaggaaaccug

SEQ ID NO: 1608729 - RNA, 19 nt, Artificial Sequence
  Description of Artificial Sequence: Synthetic oligonucleotide
  Sense strand starting at position 2288 of SEQ ID NO: 1560567
gggcguauugucuguggau

SEQ ID NO: 1608730 - RNA, 19 nt, Artificial Sequence
  Description of Artificial Sequence: Synthetic oligonucleotide
  Antisense strand to SEQ ID NO: 1608729
auccacagacaauacgccc

SEQ ID NO: 1608731 - RNA, 19 nt, Artificial Sequence
  Description of Artificial Sequence: Synthetic oligonucleotide
  Sense strand starting at position 2289 of SEQ ID NO: 1560567
ggcguauugucuguggaua

SEQ ID NO: 1608732 - RNA, 19 nt, Artificial Sequence
  Description of Artificial Sequence: Synthetic oligonucleotide
  Antisense strand to SEQ ID NO: 1608731
uauccacagacaauacgcc

SEQ ID NO: 1608733 - RNA, 19 nt, Artificial Sequence
  Description of Artificial Sequence: Synthetic oligonucleotide
  Sense strand starting at position 2290 of SEQ ID NO: 1560567
gcguauugucuguggauag

SEQ ID NO: 1608734 - RNA, 19 nt, Artificial Sequence
  Description of Artificial Sequence: Synthetic oligonucleotide
  Antisense strand to SEQ ID NO: 1608733
cuauccacagacaauacgc

SEQ ID NO: 1608735 - RNA, 19 nt, Artificial Sequence
  Description of Artificial Sequence: Synthetic oligonucleotide
  Sense strand starting at position 2536 of SEQ ID NO: 1560567
agaagaugggucugagguu

SEQ ID NO: 1608736 - RNA, 19 nt, Artificial Sequence
  Description of Artificial Sequence: Synthetic oligonucleotide
  Antisense strand to SEQ ID NO: 1608735
aaccucagacccaucuucu

SEQ ID NO: 1608737 - RNA, 19 nt, Artificial Sequence
  Description of Artificial Sequence: Synthetic oligonucleotide
  Sense strand starting at position 2590 of SEQ ID NO: 1560567
gauggauguggucaagcga

SEQ ID NO: 1608738 - RNA, 19 nt, Artificial Sequence
  Description of Artificial Sequence: Synthetic oligonucleotide
  Antisense strand to SEQ ID NO: 1608737
ucgcuugaccacauccauc

SEQ ID NO: 1608739 - RNA, 19 nt, Artificial Sequence
  Description of Artificial Sequence: Synthetic oligonucleotide
  Sense strand starting at position 2650 of SEQ ID NO: 1560567
gguggagucugguuggaag

SEQ ID NO: 1608740 - RNA, 19 nt, Artificial Sequence
  Description of Artificial Sequence: Synthetic oligonucleotide
  Antisense strand to SEQ ID NO: 1608739
cuuccaaccagacuccacc

SEQ ID NO: 1608741 - RNA, 19 nt, Artificial Sequence
  Description of Artificial Sequence: Synthetic oligonucleotide
  Sense strand starting at position 2804 of SEQ ID NO: 1560567
gguguuaaggagugucugu

SEQ ID NO: 1608742 - RNA, 19 nt, Artificial Sequence
  Description of Artificial Sequence: Synthetic oligonucleotide
  Antisense strand to SEQ ID NO: 1608741
acagacacuccuuaacacc

SEQ ID NO: 1608743 - RNA, 19 nt, Artificial Sequence
  Description of Artificial Sequence: Synthetic oligonucleotide
  Sense strand starting at position 2865 of SEQ ID NO: 1560567
gggcgugguuauacuuuga

SEQ ID NO: 1608744 - RNA, 19 nt, Artificial Sequence
  Description of Artificial Sequence: Synthetic oligonucleotide
  Antisense strand to SEQ ID NO: 1608743
ucaaaguauaaccacgccc

SEQ ID NO: 1608745 - RNA, 19 nt, Artificial Sequence
  Description of Artificial Sequence: Synthetic oligonucleotide
  Sense strand starting at position 2900 of SEQ ID NO: 1560567
ggaagugaguuauagguag

SEQ ID NO: 1608746 - RNA, 19 nt, Artificial Sequence
  Description of Artificial Sequence: Synthetic oligonucleotide
  Antisense strand to SEQ ID NO: 1608745
cuaccuauaacucacuucc

SEQ ID NO: 1608747 - RNA, 19 nt, Artificial Sequence
  Description of Artificial Sequence: Synthetic oligonucleotide
  Sense strand starting at position 2948 of SEQ ID NO: 1560567
agaaaugggucucuaagcu

SEQ ID NO: 1608748 - RNA, 19 nt, Artificial Sequence
  Description of Artificial Sequence: Synthetic oligonucleotide
  Antisense strand to SEQ ID NO: 1608747
agcuuagagacccauuucu

SEQ ID NO: 1608749 - RNA, 19 nt, Artificial Sequence
  Description of Artificial Sequence: Synthetic oligonucleotide
  Sense strand starting at position 2956 of SEQ ID NO: 1560567
gucucuaagcucugagaac

SEQ ID NO: 1608750 - RNA, 19 nt, Artificial Sequence
  Description of Artificial Sequence: Synthetic oligonucleotide
  Antisense strand to SEQ ID NO: 1608749
guucucagagcuuagagac

SEQ ID NO: 1608751 - RNA, 19 nt, Artificial Sequence
  Description of Artificial Sequence: Synthetic oligonucleotide
  Sense strand starting at position 3394 of SEQ ID NO: 1560567
ucuauaggcgucuaugaag

SEQ ID NO: 1608752 - RNA, 19 nt, Artificial Sequence
  Description of Artificial Sequence: Synthetic oligonucleotide
  Antisense strand to SEQ ID NO: 1608751
cuucauagacgccuauaga

SEQ ID NO: 1608753 - RNA, 19 nt, Artificial Sequence
  Description of Artificial Sequence: Synthetic oligonucleotide
  Sense strand starting at position 3539 of SEQ ID NO: 1560567
cagucuugggcagaaagca

SEQ ID NO: 1608754 - RNA, 19 nt, Artificial Sequence
  Description of Artificial Sequence: Synthetic oligonucleotide
  Antisense strand to SEQ ID NO: 1608753
ugcuuucugcccaagacug

SEQ ID NO: 1608755 - RNA, 19 nt, Artificial Sequence
  Description of Artificial Sequence: Synthetic oligonucleotide
  Sense strand starting at position 3547 of SEQ ID NO: 1560567
ggcagaaagcagugaucca

SEQ ID NO: 1608756 - RNA, 19 nt, Artificial Sequence
  Description of Artificial Sequence: Synthetic oligonucleotide
  Antisense strand to SEQ ID NO: 1608755
uggaucacugcuuucugcc

SEQ ID NO: 1608757 - RNA, 19 nt, Artificial Sequence
  Description of Artificial Sequence: Synthetic oligonucleotide
  Sense strand starting at position 3588 of SEQ ID NO: 1560567
cccgucagugcuggaagaa

SEQ ID NO: 1608758 - RNA, 19 nt, Artificial Sequence
  Description of Artificial Sequence: Synthetic oligonucleotide
  Antisense strand to SEQ ID NO: 1608757
uucuuccagcacugacggg

SEQ ID NO: 1608759 - RNA, 19 nt, Artificial Sequence
  Description of Artificial Sequence: Synthetic oligonucleotide
  Sense strand starting at position 3589 of SEQ ID NO: 1560567
ccgucagugcuggaagaag

SEQ ID NO: 1608760 - RNA, 19 nt, Artificial Sequence
  Description of Artificial Sequence: Synthetic oligonucleotide
  Antisense strand to SEQ ID NO: 1608759
cuucuuccagcacugacgg

SEQ ID NO: 1608761 - RNA, 19 nt, Artificial Sequence
  Description of Artificial Sequence: Synthetic oligonucleotide
  Sense strand starting at position 3726 of SEQ ID NO: 1560567
cgugcucaaucguuacaca

SEQ ID NO: 1608762 - RNA, 19 nt, Artificial Sequence
  Description of Artificial Sequence: Synthetic oligonucleotide
  Antisense strand to SEQ ID NO: 1608761
uguguaacgauugagcacg

SEQ ID NO: 1608763 - RNA, 19 nt, Artificial Sequence
  Description of Artificial Sequence: Synthetic oligonucleotide
  Sense strand starting at position 3727 of SEQ ID NO: 1560567
gugcucaaucguuacacaa

SEQ ID NO: 1608764 - RNA, 19 nt, Artificial Sequence
  Description of Artificial Sequence: Synthetic oligonucleotide
  Antisense strand to SEQ ID NO: 1608763
uuguguaacgauugagcac

SEQ ID NO: 1608765 - RNA, 19 nt, Artificial Sequence
  Description of Artificial Sequence: Synthetic oligonucleotide
  Sense strand starting at position 3752 of SEQ ID NO: 1560567
cucagaugacccugugcaa

SEQ ID NO: 1608766 - RNA, 19 nt, Artificial Sequence
  Description of Artificial Sequence: Synthetic oligonucleotide
  Antisense strand to SEQ ID NO: 1608765
uugcacagggucaucugag

SEQ ID NO: 1608767 - RNA, 19 nt, Artificial Sequence
  Description of Artificial Sequence: Synthetic oligonucleotide
  Sense strand starting at position 3821 of SEQ ID NO: 1560567
guaagcacucugcaaaugu

SEQ ID NO: 1608768 - RNA, 19 nt, Artificial Sequence
  Description of Artificial Sequence: Synthetic oligonucleotide
  Antisense strand to SEQ ID NO: 1608767
acauuugcagagugcuuac

SEQ ID NO: 1608769 - RNA, 19 nt, Artificial Sequence
  Description of Artificial Sequence: Synthetic oligonucleotide
  Sense strand starting at position 3838 of SEQ ID NO: 1560567
guugaaugcacgcgugcau

SEQ ID NO: 1608770 - RNA, 19 nt, Artificial Sequence
  Description of Artificial Sequence: Synthetic oligonucleotide
  Antisense strand to SEQ ID NO: 1608769
augcacgcgugcauucaac

SEQ ID NO: 1608771 - RNA, 19 nt, Artificial Sequence
  Description of Artificial Sequence: Synthetic oligonucleotide
  Sense strand starting at position 3930 of SEQ ID NO: 1560567
aggagucuuuguuccagac

SEQ ID NO: 1608772 - RNA, 19 nt, Artificial Sequence
  Description of Artificial Sequence: Synthetic oligonucleotide
  Antisense strand to SEQ ID NO: 1608771
gucuggaacaaagacuccu

SEQ ID NO: 1608773 - RNA, 19 nt, Artificial Sequence
  Description of Artificial Sequence: Synthetic oligonucleotide
  Sense strand starting at position 3932 of SEQ ID NO: 1560567
gagucuuuguuccagacga

SEQ ID NO: 1608774 - RNA, 19 nt, Artificial Sequence
  Description of Artificial Sequence: Synthetic oligonucleotide
  Antisense strand to SEQ ID NO: 1608773
ucgucuggaacaaagacuc

SEQ ID NO: 1608775 - RNA, 19 nt, Artificial Sequence
  Description of Artificial Sequence: Synthetic oligonucleotide
  Sense strand starting at position 3934 of SEQ ID NO: 1560567
gucuuuguuccagacgaac

SEQ ID NO: 1608776 - RNA, 19 nt, Artificial Sequence
  Description of Artificial Sequence: Synthetic oligonucleotide
  Antisense strand to SEQ ID NO: 1608775
guucgucuggaacaaagac

SEQ ID NO: 1608777 - RNA, 19 nt, Artificial Sequence
  Description of Artificial Sequence: Synthetic oligonucleotide
  Sense strand starting at position 24 of SEQ ID NO: 1560568
ugggaaugcugcucacacu

SEQ ID NO: 1608778 - RNA, 19 nt, Artificial Sequence
  Description of Artificial Sequence: Synthetic oligonucleotide
  Antisense strand to SEQ ID NO: 1608777
agugugagcagcauuccca

SEQ ID NO: 1608779 - RNA, 19 nt, Artificial Sequence
  Description of Artificial Sequence: Synthetic oligonucleotide
  Sense strand starting at position 595 of SEQ ID NO: 1560568
ccaggucugagagguaaag

SEQ ID NO: 1608780 - RNA, 19 nt, Artificial Sequence
  Description of Artificial Sequence: Synthetic oligonucleotide
  Antisense strand to SEQ ID NO: 1608779
cuuuaccucucagaccugg

SEQ ID NO: 1608781 - RNA, 19 nt, Artificial Sequence
  Description of Artificial Sequence: Synthetic oligonucleotide
  Sense strand starting at position 727 of SEQ ID NO: 1560568
aagaaagggcuaugguuaa

SEQ ID NO: 1608782 - RNA, 19 nt, Artificial Sequence
  Description of Artificial Sequence: Synthetic oligonucleotide
  Antisense strand to SEQ ID NO: 1608781
uuaaccauagcccuuucuu

SEQ ID NO: 1608783 - RNA, 19 nt, Artificial Sequence
  Description of Artificial Sequence: Synthetic oligonucleotide
  Sense strand starting at position 754 of SEQ ID NO: 1560568
gugggcuuccgagagguuu

SEQ ID NO: 1608784 - RNA, 19 nt, Artificial Sequence
  Description of Artificial Sequence: Synthetic oligonucleotide
  Antisense strand to SEQ ID NO: 1608783
aaaccucucggaagcccac

SEQ ID NO: 1608785 - RNA, 19 nt, Artificial Sequence
  Description of Artificial Sequence: Synthetic oligonucleotide
  Sense strand starting at position 775 of SEQ ID NO: 1560568
ggguccuuccugugaacca

SEQ ID NO: 1608786 - RNA, 19 nt, Artificial Sequence
  Description of Artificial Sequence: Synthetic oligonucleotide
  Antisense strand to SEQ ID NO: 1608785
ugguucacaggaaggaccc

SEQ ID NO: 1608787 - RNA, 19 nt, Artificial Sequence
  Description of Artificial Sequence: Synthetic oligonucleotide
  Sense strand starting at position 909 of SEQ ID NO: 1560568
augggaucuucguuucuca

SEQ ID NO: 1608788 - RNA, 19 nt, Artificial Sequence
  Description of Artificial Sequence: Synthetic oligonucleotide
  Antisense strand to SEQ ID NO: 1608787
ugagaaacgaagaucccau

SEQ ID NO: 1608789 - RNA, 19 nt, Artificial Sequence
  Description of Artificial Sequence: Synthetic oligonucleotide
  Sense strand starting at position 937 of SEQ ID NO: 1560568
gguucauggucugagggua

SEQ ID NO: 1608790 - RNA, 19 nt, Artificial Sequence
  Description of Artificial Sequence: Synthetic oligonucleotide
  Antisense strand to SEQ ID NO: 1608789
uacccucagaccaugaacc

SEQ ID NO: 1608791 - RNA, 19 nt, Artificial Sequence
  Description of Artificial Sequence: Synthetic oligonucleotide
  Sense strand starting at position 1162 of SEQ ID NO: 1560568
agagcuguguaggaacaau

SEQ ID NO: 1608792 - RNA, 19 nt, Artificial Sequence
  Description of Artificial Sequence: Synthetic oligonucleotide
  Antisense strand to SEQ ID NO: 1608791
auuguuccuacacagcucu

SEQ ID NO: 1608793 - RNA, 19 nt, Artificial Sequence
  Description of Artificial Sequence: Synthetic oligonucleotide
  Sense strand starting at position 1636 of SEQ ID NO: 1560568
gggcguuggcuagggaaga

SEQ ID NO: 1608794 - RNA, 19 nt, Artificial Sequence
  Description of Artificial Sequence: Synthetic oligonucleotide
  Antisense strand to SEQ ID NO: 1608793
ucuucccuagccaacgccc

SEQ ID NO: 1608795 - RNA, 19 nt, Artificial Sequence
  Description of Artificial Sequence: Synthetic oligonucleotide
  Sense strand starting at position 1701 of SEQ ID NO: 1560568
gagugagcacuaugacaac

SEQ ID NO: 1608796 - RNA, 19 nt, Artificial Sequence
  Description of Artificial Sequence: Synthetic oligonucleotide
  Antisense strand to SEQ ID NO: 1608795
guugucauagugcucacuc

SEQ ID NO: 1608797 - RNA, 19 nt, Artificial Sequence
  Description of Artificial Sequence: Synthetic oligonucleotide
  Sense strand starting at position 2493 of SEQ ID NO: 1560568
ucagaaugcccugguucuu

SEQ ID NO: 1608798 - RNA, 19 nt, Artificial Sequence
  Description of Artificial Sequence: Synthetic oligonucleotide
  Antisense strand to SEQ ID NO: 1608797
aagaaccagggcauucuga

SEQ ID NO: 1608799 - RNA, 19 nt, Artificial Sequence
  Description of Artificial Sequence: Synthetic oligonucleotide
  Sense strand starting at position 2636 of SEQ ID NO: 1560568
caggguaaguucuuuagca

SEQ ID NO: 1608800 - RNA, 19 nt, Artificial Sequence
  Description of Artificial Sequence: Synthetic oligonucleotide
  Antisense strand to SEQ ID NO: 1608799
ugcuaaagaacuuacccug

SEQ ID NO: 1608801 - RNA, 19 nt, Artificial Sequence
  Description of Artificial Sequence: Synthetic oligonucleotide
  Sense strand starting at position 2637 of SEQ ID NO: 1560568
aggguaaguucuuuagcau

SEQ ID NO: 1608802 - RNA, 19 nt, Artificial Sequence
  Description of Artificial Sequence: Synthetic oligonucleotide
  Antisense strand to SEQ ID NO: 1608801
augcuaaagaacuuacccu

SEQ ID NO: 1608803 - RNA, 19 nt, Artificial Sequence
  Description of Artificial Sequence: Synthetic oligonucleotide
  Sense strand starting at position 2640 of SEQ ID NO: 1560568
guaaguucuuuagcauuac

SEQ ID NO: 1608804 - RNA, 19 nt, Artificial Sequence
  Description of Artificial Sequence: Synthetic oligonucleotide
  Antisense strand to SEQ ID NO: 1608803
guaaugcuaaagaacuuac

SEQ ID NO: 1608805 - RNA, 19 nt, Artificial Sequence
  Description of Artificial Sequence: Synthetic oligonucleotide
  Sense strand starting at position 2718 of SEQ ID NO: 1560568
cccaguuaugggugcucaa

SEQ ID NO: 1608806 - RNA, 19 nt, Artificial Sequence
  Description of Artificial Sequence: Synthetic oligonucleotide
  Antisense strand to SEQ ID NO: 1608805
uugagcacccauaacuggg

SEQ ID NO: 1608807 - RNA, 19 nt, Artificial Sequence
  Description of Artificial Sequence: Synthetic oligonucleotide
  Sense strand starting at position 2721 of SEQ ID NO: 1560568
aguuaugggugcucaacgu

SEQ ID NO: 1608808 - RNA, 19 nt, Artificial Sequence
  Description of Artificial Sequence: Synthetic oligonucleotide
  Antisense strand to SEQ ID NO: 1608807
acguugagcacccauaacu

SEQ ID NO: 1608809 - RNA, 19 nt, Artificial Sequence
  Description of Artificial Sequence: Synthetic oligonucleotide
  Sense strand starting at position 2753 of SEQ ID NO: 1560568
gucccagagaucuggacaa

SEQ ID NO: 1608810 - RNA, 19 nt, Artificial Sequence
  Description of Artificial Sequence: Synthetic oligonucleotide
  Antisense strand to SEQ ID NO: 1608809
uuguccagaucucugggac

SEQ ID NO: 1608811 - RNA, 19 nt, Artificial Sequence
  Description of Artificial Sequence: Synthetic oligonucleotide
  Sense strand starting at position 2836 of SEQ ID NO: 1560568
guacaauauuuaggucuca

SEQ ID NO: 1608812 - RNA, 19 nt, Artificial Sequence
  Description of Artificial Sequence: Synthetic oligonucleotide
  Antisense strand to SEQ ID NO: 1608811
ugagaccuaaauauuguac

SEQ ID NO: 1608813 - RNA, 19 nt, Artificial Sequence
  Description of Artificial Sequence: Synthetic oligonucleotide
  Sense strand starting at position 2906 of SEQ ID NO: 1560568
guggucucugaagauaauu

SEQ ID NO: 1608814 - RNA, 19 nt, Artificial Sequence
  Description of Artificial Sequence: Synthetic oligonucleotide
  Antisense strand to SEQ ID NO: 1608813
aauuaucuucagagaccac

SEQ ID NO: 1608815 - RNA, 19 nt, Artificial Sequence
  Description of Artificial Sequence: Synthetic oligonucleotide
  Sense strand starting at position 2914 of SEQ ID NO: 1560568
ugaagauaauuaggaacua

SEQ ID NO: 1608816 - RNA, 19 nt, Artificial Sequence
  Description of Artificial Sequence: Synthetic oligonucleotide
  Antisense strand to SEQ ID NO: 1608815
uaguuccuaauuaucuuca

SEQ ID NO: 1608817 - RNA, 19 nt, Artificial Sequence
  Description of Artificial Sequence: Synthetic oligonucleotide
  Sense strand starting at position 2949 of SEQ ID NO: 1560568
augguaaacccauaggcuu

SEQ ID NO: 1608818 - RNA, 19 nt, Artificial Sequence
  Description of Artificial Sequence: Synthetic oligonucleotide
  Antisense strand to SEQ ID NO: 1608817
aagccuauggguuuaccau

SEQ ID NO: 1608819 - RNA, 19 nt, Artificial Sequence
  Description of Artificial Sequence: Synthetic oligonucleotide
  Sense strand starting at position 3435 of SEQ ID NO: 1560568
agccauucuugguaaucua

SEQ ID NO: 1608820 - RNA, 19 nt, Artificial Sequence
  Description of Artificial Sequence: Synthetic oligonucleotide
  Antisense strand to SEQ ID NO: 1608819
uagauuaccaagaauggcu

SEQ ID NO: 1608821 - RNA, 19 nt, Artificial Sequence
  Description of Artificial Sequence: Synthetic oligonucleotide
  Sense strand starting at position 3448 of SEQ ID NO: 1560568
aaucuagugucuguuaggu

SEQ ID NO: 1608822 - RNA, 19 nt, Artificial Sequence
  Description of Artificial Sequence: Synthetic oligonucleotide
  Antisense strand to SEQ ID NO: 1608821
accuaacagacacuagauu

SEQ ID NO: 1608823 - RNA, 19 nt, Artificial Sequence
  Description of Artificial Sequence: Synthetic oligonucleotide
  Sense strand starting at position 3457 of SEQ ID NO: 1560568
ucuguuagguccuuuaacu

SEQ ID NO: 1608824 - RNA, 19 nt, Artificial Sequence
  Description of Artificial Sequence: Synthetic oligonucleotide
  Antisense strand to SEQ ID NO: 1608823
aguuaaaggaccuaacaga

SEQ ID NO: 1608825 - RNA, 19 nt, Artificial Sequence
  Description of Artificial Sequence: Synthetic oligonucleotide
  Sense strand starting at position 3465 of SEQ ID NO: 1560568
guccuuuaacugggaucca

SEQ ID NO: 1608826 - RNA, 19 nt, Artificial Sequence
  Description of Artificial Sequence: Synthetic oligonucleotide
  Antisense strand to SEQ ID NO: 1608825
uggaucccaguuaaaggac

SEQ ID NO: 1608827 - RNA, 19 nt, Artificial Sequence
  Description of Artificial Sequence: Synthetic oligonucleotide
  Sense strand starting at position 3494 of SEQ ID NO: 1560568
guauuuacucagugccaga

SEQ ID NO: 1608828 - RNA, 19 nt, Artificial Sequence
  Description of Artificial Sequence: Synthetic oligonucleotide
  Antisense strand to SEQ ID NO: 1608827
ucuggcacugaguaaauac

SEQ ID NO: 1608829 - RNA, 19 nt, Artificial Sequence
  Description of Artificial Sequence: Synthetic oligonucleotide
  Sense strand starting at position 3529 of SEQ ID NO: 1560568
ucagacgaaucaucucauu

SEQ ID NO: 1608830 - RNA, 19 nt, Artificial Sequence
  Description of Artificial Sequence: Synthetic oligonucleotide
  Antisense strand to SEQ ID NO: 1608829
aaugagaugauucgucuga

SEQ ID NO: 1608831 - RNA, 19 nt, Artificial Sequence
  Description of Artificial Sequence: Synthetic oligonucleotide
  Sense strand starting at position 3576 of SEQ ID NO: 1560568
gcaauaagauggucucauu

SEQ ID NO: 1608832 - RNA, 19 nt, Artificial Sequence
  Description of Artificial Sequence: Synthetic oligonucleotide
  Antisense strand to SEQ ID NO: 1608831
aaugagaccaucuuauugc

SEQ ID NO: 1608833 - RNA, 19 nt, Artificial Sequence
  Description of Artificial Sequence: Synthetic oligonucleotide
  Sense strand starting at position 3651 of SEQ ID NO: 1560568
ggguggucauguguguuga

SEQ ID NO: 1608834 - RNA, 19 nt, Artificial Sequence
  Description of Artificial Sequence: Synthetic oligonucleotide
  Antisense strand to SEQ ID NO: 1608833
ucaacacacaugaccaccc

SEQ ID NO: 1608835 - RNA, 19 nt, Artificial Sequence
  Description of Artificial Sequence: Synthetic oligonucleotide
  Sense strand starting at position 3652 of SEQ ID NO: 1560568
gguggucauguguguugaa

SEQ ID NO: 1608836 - RNA, 19 nt, Artificial Sequence
  Description of Artificial Sequence: Synthetic oligonucleotide
  Antisense strand to SEQ ID NO: 1608835
uucaacacacaugaccacc

SEQ ID NO: 1608837 - RNA, 19 nt, Artificial Sequence
  Description of Artificial Sequence: Synthetic oligonucleotide
  Sense strand starting at position 3653 of SEQ ID NO: 1560568
guggucauguguguugaau

SEQ ID NO: 1608838 - RNA, 19 nt, Artificial Sequence
  Description of Artificial Sequence: Synthetic oligonucleotide
  Antisense strand to SEQ ID NO: 1608837
auucaacacacaugaccac

SEQ ID NO: 1608839 - RNA, 19 nt, Artificial Sequence
  Description of Artificial Sequence: Synthetic oligonucleotide
  Sense strand starting at position 3806 of SEQ ID NO: 1560568
ggaucagcgcuuuguuauc

SEQ ID NO: 1608840 - RNA, 19 nt, Artificial Sequence
  Description of Artificial Sequence: Synthetic oligonucleotide
  Antisense strand to SEQ ID NO: 1608839
gauaacaaagcgcugaucc

SEQ ID NO: 1608841 - RNA, 19 nt, Artificial Sequence
  Description of Artificial Sequence: Synthetic oligonucleotide
  Sense strand starting at position 3813 of SEQ ID NO: 1560568
cgcuuuguuaucuuggcau

SEQ ID NO: 1608842 - RNA, 19 nt, Artificial Sequence
  Description of Artificial Sequence: Synthetic oligonucleotide
  Antisense strand to SEQ ID NO: 1608841
augccaagauaacaaagcg

SEQ ID NO: 1608843 - RNA, 19 nt, Artificial Sequence
  Description of Artificial Sequence: Synthetic oligonucleotide
  Sense strand starting at position 3815 of SEQ ID NO: 1560568
cuuuguuaucuuggcauua

SEQ ID NO: 1608844 - RNA, 19 nt, Artificial Sequence
  Description of Artificial Sequence: Synthetic oligonucleotide
  Antisense strand to SEQ ID NO: 1608843
uaaugccaagauaacaaag

SEQ ID NO: 1608845 - RNA, 19 nt, Artificial Sequence
  Description of Artificial Sequence: Synthetic oligonucleotide
  Sense strand starting at position 3816 of SEQ ID NO: 1560568
uuuguuaucuuggcauuaa

SEQ ID NO: 1608846 - RNA, 19 nt, Artificial Sequence
  Description of Artificial Sequence: Synthetic oligonucleotide
  Antisense strand to SEQ ID NO: 1608845
uuaaugccaagauaacaaa

SEQ ID NO: 1608847 - RNA, 19 nt, Artificial Sequence
  Description of Artificial Sequence: Synthetic oligonucleotide
  Sense strand starting at position 3817 of SEQ ID NO: 1560568
uuguuaucuuggcauuaaa

SEQ ID NO: 1608848 - RNA, 19 nt, Artificial Sequence
  Description of Artificial Sequence: Synthetic oligonucleotide
  Antisense strand to SEQ ID NO: 1608847
uuuaaugccaagauaacaa

SEQ ID NO: 1608849 - RNA, 19 nt, Artificial Sequence
  Description of Artificial Sequence: Synthetic oligonucleotide
  Sense strand starting at position 3869 of SEQ ID NO: 1560568
ugggacaaguccuuggcua

SEQ ID NO: 1608850 - RNA, 19 nt, Artificial Sequence
  Description of Artificial Sequence: Synthetic oligonucleotide
  Antisense strand to SEQ ID NO: 1608849
uagccaaggacuuguccca

SEQ ID NO: 1608851 - RNA, 19 nt, Artificial Sequence
  Description of Artificial Sequence: Synthetic oligonucleotide
  Sense strand starting at position 3870 of SEQ ID NO: 1560568
gggacaaguccuuggcuaa

SEQ ID NO: 1608852 - RNA, 19 nt, Artificial Sequence
  Description of Artificial Sequence: Synthetic oligonucleotide
  Antisense strand to SEQ ID NO: 1608851
uuagccaaggacuuguccc

SEQ ID NO: 1608853 - RNA, 19 nt, Artificial Sequence
  Description of Artificial Sequence: Synthetic oligonucleotide
  Sense strand starting at position 3871 of SEQ ID NO: 1560568
ggacaaguccuuggcuaac

SEQ ID NO: 1608854 - RNA, 19 nt, Artificial Sequence
  Description of Artificial Sequence: Synthetic oligonucleotide
  Antisense strand to SEQ ID NO: 1608853
guuagccaaggacuugucc

SEQ ID NO: 1608855 - RNA, 19 nt, Artificial Sequence
  Description of Artificial Sequence: Synthetic oligonucleotide
  Sense strand starting at position 3873 of SEQ ID NO: 1560568
acaaguccuuggcuaacau

SEQ ID NO: 1608856 - RNA, 19 nt, Artificial Sequence
  Description of Artificial Sequence: Synthetic oligonucleotide
  Antisense strand to SEQ ID NO: 1608855
auguuagccaaggacuugu

SEQ ID NO: 1608857 - RNA, 19 nt, Artificial Sequence
  Description of Artificial Sequence: Synthetic oligonucleotide
  Sense strand starting at position 229 of SEQ ID NO: 1560569
aggcaagacucaggauaaa

SEQ ID NO: 1608858 - RNA, 19 nt, Artificial Sequence
  Description of Artificial Sequence: Synthetic oligonucleotide
  Antisense strand to SEQ ID NO: 1608857
uuuauccugagucuugccu

SEQ ID NO: 1608859 - RNA, 19 nt, Artificial Sequence
  Description of Artificial Sequence: Synthetic oligonucleotide
  Sense strand starting at position 994 of SEQ ID NO: 1560569
aacagaugcuccguuagag

SEQ ID NO: 1608860 - RNA, 19 nt, Artificial Sequence
  Description of Artificial Sequence: Synthetic oligonucleotide
  Antisense strand to SEQ ID NO: 1608859
cucuaacggagcaucuguu

SEQ ID NO: 1608861 - RNA, 19 nt, Artificial Sequence
  Description of Artificial Sequence: Synthetic oligonucleotide
  Sense strand starting at position 1110 of SEQ ID NO: 1560569
ggagauucgggcuggaaca

SEQ ID NO: 1608862 - RNA, 19 nt, Artificial Sequence
  Description of Artificial Sequence: Synthetic oligonucleotide
  Antisense strand to SEQ ID NO: 1608861
uguuccagcccgaaucucc

SEQ ID NO: 1608863 - RNA, 19 nt, Artificial Sequence
  Description of Artificial Sequence: Synthetic oligonucleotide
  Sense strand starting at position 1128 of SEQ ID NO: 1560569
agcgguaaugggcacaauu

SEQ ID NO: 1608864 - RNA, 19 nt, Artificial Sequence
  Description of Artificial Sequence: Synthetic oligonucleotide
  Antisense strand to SEQ ID NO: 1608863
aauugugcccauuaccgcu

SEQ ID NO: 1608865 - RNA, 19 nt, Artificial Sequence
  Description of Artificial Sequence: Synthetic oligonucleotide
  Sense strand starting at position 1297 of SEQ ID NO: 1560569
gugggagccucuuucucaa

SEQ ID NO: 1608866 - RNA, 19 nt, Artificial Sequence
  Description of Artificial Sequence: Synthetic oligonucleotide
  Antisense strand to SEQ ID NO: 1608865
uugagaaagaggcucccac

SEQ ID NO: 1608867 - RNA, 19 nt, Artificial Sequence
  Description of Artificial Sequence: Synthetic oligonucleotide
  Sense strand starting at position 1635 of SEQ ID NO: 1560569
cuaauuguaccguggguga

SEQ ID NO: 1608868 - RNA, 19 nt, Artificial Sequence
  Description of Artificial Sequence: Synthetic oligonucleotide
  Antisense strand to SEQ ID NO: 1608867
ucacccacgguacaauuag

SEQ ID NO: 1608869 - RNA, 19 nt, Artificial Sequence
  Description of Artificial Sequence: Synthetic oligonucleotide
  Sense strand starting at position 1672 of SEQ ID NO: 1560569
ccagauuccugcucuggga

SEQ ID NO: 1608870 - RNA, 19 nt, Artificial Sequence
  Description of Artificial Sequence: Synthetic oligonucleotide
  Antisense strand to SEQ ID NO: 1608869
ucccagagcaggaaucugg

SEQ ID NO: 1608871 - RNA, 19 nt, Artificial Sequence
  Description of Artificial Sequence: Synthetic oligonucleotide
  Sense strand starting at position 1887 of SEQ ID NO: 1560569
gcauaccuagagugacaau

SEQ ID NO: 1608872 - RNA, 19 nt, Artificial Sequence
  Description of Artificial Sequence: Synthetic oligonucleotide
  Antisense strand to SEQ ID NO: 1608871
auugucacucuagguaugc

SEQ ID NO: 1608873 - RNA, 19 nt, Artificial Sequence
  Description of Artificial Sequence: Synthetic oligonucleotide
  Sense strand starting at position 1971 of SEQ ID NO: 1560569
gacagaggcuggcuugaaa

SEQ ID NO: 1608874 - RNA, 19 nt, Artificial Sequence
  Description of Artificial Sequence: Synthetic oligonucleotide
  Antisense strand to SEQ ID NO: 1608873
uuucaagccagccucuguc

SEQ ID NO: 1608875 - RNA, 19 nt, Artificial Sequence
  Description of Artificial Sequence: Synthetic oligonucleotide
  Sense strand starting at position 1991 of SEQ ID NO: 1560569
gggagauuguaacaaacca

SEQ ID NO: 1608876 - RNA, 19 nt, Artificial Sequence
  Description of Artificial Sequence: Synthetic oligonucleotide
  Antisense strand to SEQ ID NO: 1608875
ugguuuguuacaaucuccc

SEQ ID NO: 1608877 - RNA, 19 nt, Artificial Sequence
  Description of Artificial Sequence: Synthetic oligonucleotide
  Sense strand starting at position 2133 of SEQ ID NO: 1560569
ccgugagugagcucugugu

SEQ ID NO: 1608878 - RNA, 19 nt, Artificial Sequence
  Description of Artificial Sequence: Synthetic oligonucleotide
  Antisense strand to SEQ ID NO: 1608877
acacagagcucacucacgg

SEQ ID NO: 1608879 - RNA, 19 nt, Artificial Sequence
  Description of Artificial Sequence: Synthetic oligonucleotide
  Sense strand starting at position 2135 of SEQ ID NO: 1560569
gugagugagcucugugugu

SEQ ID NO: 1608880 - RNA, 19 nt, Artificial Sequence
  Description of Artificial Sequence: Synthetic oligonucleotide
  Antisense strand to SEQ ID NO: 1608879
acacacagagcucacucac

SEQ ID NO: 1608881 - RNA, 19 nt, Artificial Sequence
  Description of Artificial Sequence: Synthetic oligonucleotide
  Sense strand starting at position 2269 of SEQ ID NO: 1560569
cccugaaucauaggagguc

SEQ ID NO: 1608882 - RNA, 19 nt, Artificial Sequence
  Description of Artificial Sequence: Synthetic oligonucleotide
  Antisense strand to SEQ ID NO: 1608881
gaccuccuaugauucaggg

SEQ ID NO: 1608883 - RNA, 19 nt, Artificial Sequence
  Description of Artificial Sequence: Synthetic oligonucleotide
  Sense strand starting at position 2449 of SEQ ID NO: 1560569
ccacuucugcgaggugaac

SEQ ID NO: 1608884 - RNA, 19 nt, Artificial Sequence
  Description of Artificial Sequence: Synthetic oligonucleotide
  Antisense strand to SEQ ID NO: 1608883
guucaccucgcagaagugg

SEQ ID NO: 1608885 - RNA, 19 nt, Artificial Sequence
  Description of Artificial Sequence: Synthetic oligonucleotide
  Sense strand starting at position 2806 of SEQ ID NO: 1560569
cuggauucucuccguggga

SEQ ID NO: 1608886 - RNA, 19 nt, Artificial Sequence
  Description of Artificial Sequence: Synthetic oligonucleotide
  Antisense strand to SEQ ID NO: 1608885
ucccacggagagaauccag

SEQ ID NO: 1608887 - RNA, 19 nt, Artificial Sequence
  Description of Artificial Sequence: Synthetic oligonucleotide
  Sense strand starting at position 2808 of SEQ ID NO: 1560569
ggauucucuccgugggaca

SEQ ID NO: 1608888 - RNA, 19 nt, Artificial Sequence
  Description of Artificial Sequence: Synthetic oligonucleotide
  Antisense strand to SEQ ID NO: 1608887
ugucccacggagagaaucc

SEQ ID NO: 1608889 - RNA, 19 nt, Artificial Sequence
  Description of Artificial Sequence: Synthetic oligonucleotide
  Sense strand starting at position 2809 of SEQ ID NO: 1560569
gauucucuccgugggacau

SEQ ID NO: 1608890 - RNA, 19 nt, Artificial Sequence
  Description of Artificial Sequence: Synthetic oligonucleotide
  Antisense strand to SEQ ID NO: 1608889
augucccacggagagaauc

SEQ ID NO: 1608891 - RNA, 19 nt, Artificial Sequence
  Description of Artificial Sequence: Synthetic oligonucleotide
  Sense strand starting at position 2862 of SEQ ID NO: 1560569
gcugaacuuucugcaguga

SEQ ID NO: 1608892 - RNA, 19 nt, Artificial Sequence
  Description of Artificial Sequence: Synthetic oligonucleotide
  Antisense strand to SEQ ID NO: 1608891
ucacugcagaaaguucagc

SEQ ID NO: 1608893 - RNA, 19 nt, Artificial Sequence
  Description of Artificial Sequence: Synthetic oligonucleotide
  Sense strand starting at position 2866 of SEQ ID NO: 1560569
aacuuucugcagugauguu

SEQ ID NO: 1608894 - RNA, 19 nt, Artificial Sequence
  Description of Artificial Sequence: Synthetic oligonucleotide
  Antisense strand to SEQ ID NO: 1608893
aacaucacugcagaaaguu

SEQ ID NO: 1608895 - RNA, 19 nt, Artificial Sequence
  Description of Artificial Sequence: Synthetic oligonucleotide
  Sense strand starting at position 2926 of SEQ ID NO: 1560569
gcuauccagccuuggagau

SEQ ID NO: 1608896 - RNA, 19 nt, Artificial Sequence
  Description of Artificial Sequence: Synthetic oligonucleotide
  Antisense strand to SEQ ID NO: 1608895
aucuccaaggcuggauagc

SEQ ID NO: 1608897 - RNA, 19 nt, Artificial Sequence
  Description of Artificial Sequence: Synthetic oligonucleotide
  Sense strand starting at position 2927 of SEQ ID NO: 1560569
cuauccagccuuggagaua

SEQ ID NO: 1608898 - RNA, 19 nt, Artificial Sequence
  Description of Artificial Sequence: Synthetic oligonucleotide
  Antisense strand to SEQ ID NO: 1608897
uaucuccaaggcuggauag

SEQ ID NO: 1608899 - RNA, 19 nt, Artificial Sequence
  Description of Artificial Sequence: Synthetic oligonucleotide
  Sense strand starting at position 2928 of SEQ ID NO: 1560569
uauccagccuuggagauau

SEQ ID NO: 1608900 - RNA, 19 nt, Artificial Sequence
  Description of Artificial Sequence: Synthetic oligonucleotide
  Antisense strand to SEQ ID NO: 1608899
auaucuccaaggcuggaua

SEQ ID NO: 1608901 - RNA, 19 nt, Artificial Sequence
  Description of Artificial Sequence: Synthetic oligonucleotide
  Sense strand starting at position 2963 of SEQ ID NO: 1560569
gaguuacauuucuggcuuu

SEQ ID NO: 1608902 - RNA, 19 nt, Artificial Sequence
  Description of Artificial Sequence: Synthetic oligonucleotide
  Antisense strand to SEQ ID NO: 1608901
aaagccagaaauguaacuc

SEQ ID NO: 1608903 - RNA, 19 nt, Artificial Sequence
  Description of Artificial Sequence: Synthetic oligonucleotide
  Sense strand starting at position 2964 of SEQ ID NO: 1560569
aguuacauuucuggcuuua

SEQ ID NO: 1608904 - RNA, 19 nt, Artificial Sequence
  Description of Artificial Sequence: Synthetic oligonucleotide
  Antisense strand to SEQ ID NO: 1608903
uaaagccagaaauguaacu

SEQ ID NO: 1608905 - RNA, 19 nt, Artificial Sequence
  Description of Artificial Sequence: Synthetic oligonucleotide
  Sense strand starting at position 3009 of SEQ ID NO: 1560569
gcgguuaguggcuaccaua

SEQ ID NO: 1608906 - RNA, 19 nt, Artificial Sequence
  Description of Artificial Sequence: Synthetic oligonucleotide
  Antisense strand to SEQ ID NO: 1608905
uaugguagccacuaaccgc

SEQ ID NO: 1608907 - RNA, 19 nt, Artificial Sequence
  Description of Artificial Sequence: Synthetic oligonucleotide
  Sense strand starting at position 3055 of SEQ ID NO: 1560569
auuaccuaucauggaaguu

SEQ ID NO: 1608908 - RNA, 19 nt, Artificial Sequence
  Description of Artificial Sequence: Synthetic oligonucleotide
  Antisense strand to SEQ ID NO: 1608907
aacuuccaugauagguaau

SEQ ID NO: 1608909 - RNA, 19 nt, Artificial Sequence
  Description of Artificial Sequence: Synthetic oligonucleotide
  Sense strand starting at position 3082 of SEQ ID NO: 1560569
acaauaagcuccuuugguu

SEQ ID NO: 1608910 - RNA, 19 nt, Artificial Sequence
  Description of Artificial Sequence: Synthetic oligonucleotide
  Antisense strand to SEQ ID NO: 1608909
aaccaaaggagcuuauugu

SEQ ID NO: 1608911 - RNA, 19 nt, Artificial Sequence
  Description of Artificial Sequence: Synthetic oligonucleotide
  Sense strand starting at position 3131 of SEQ ID NO: 1560569
cuuuacuuacuguguuaua

SEQ ID NO: 1608912 - RNA, 19 nt, Artificial Sequence
  Description of Artificial Sequence: Synthetic oligonucleotide
  Antisense strand to SEQ ID NO: 1608911
uauaacacaguaaguaaag

SEQ ID NO: 1608913 - RNA, 19 nt, Artificial Sequence
  Description of Artificial Sequence: Synthetic oligonucleotide
  Sense strand starting at position 3132 of SEQ ID NO: 1560569
uuuacuuacuguguuauac

SEQ ID NO: 1608914 - RNA, 19 nt, Artificial Sequence
  Description of Artificial Sequence: Synthetic oligonucleotide
  Antisense strand to SEQ ID NO: 1608913
guauaacacaguaaguaaa

SEQ ID NO: 1608915 - RNA, 19 nt, Artificial Sequence
  Description of Artificial Sequence: Synthetic oligonucleotide
  Sense strand starting at position 3189 of SEQ ID NO: 1560569
agccuuacuccaggaacau

SEQ ID NO: 1608916 - RNA, 19 nt, Artificial Sequence
  Description of Artificial Sequence: Synthetic oligonucleotide
  Antisense strand to SEQ ID NO: 1608915
auguuccuggaguaaggcu

SEQ ID NO: 1608917 - RNA, 19 nt, Artificial Sequence
  Description of Artificial Sequence: Synthetic oligonucleotide
  Sense strand starting at position 3190 of SEQ ID NO: 1560569
gccuuacuccaggaacauc

SEQ ID NO: 1608918 - RNA, 19 nt, Artificial Sequence
  Description of Artificial Sequence: Synthetic oligonucleotide
  Antisense strand to SEQ ID NO: 1608917
gauguuccuggaguaaggc

SEQ ID NO: 1608919 - RNA, 19 nt, Artificial Sequence
  Description of Artificial Sequence: Synthetic oligonucleotide
  Sense strand starting at position 3198 of SEQ ID NO: 1560569
ccaggaacaucacuuggua

SEQ ID NO: 1608920 - RNA, 19 nt, Artificial Sequence
  Description of Artificial Sequence: Synthetic oligonucleotide
  Antisense strand to SEQ ID NO: 1608919
uaccaagugauguuccugg

SEQ ID NO: 1608921 - RNA, 19 nt, Artificial Sequence
  Description of Artificial Sequence: Synthetic oligonucleotide
  Sense strand starting at position 3201 of SEQ ID NO: 1560569
ggaacaucacuugguaauu

SEQ ID NO: 1608922 - RNA, 19 nt, Artificial Sequence
  Description of Artificial Sequence: Synthetic oligonucleotide
  Antisense strand to SEQ ID NO: 1608921
aauuaccaagugauguucc

SEQ ID NO: 1608923 - RNA, 19 nt, Artificial Sequence
  Description of Artificial Sequence: Synthetic oligonucleotide
  Sense strand starting at position 3353 of SEQ ID NO: 1560569
ggauuaaguugauacauuu

SEQ ID NO: 1608924 - RNA, 19 nt, Artificial Sequence
  Description of Artificial Sequence: Synthetic oligonucleotide
  Antisense strand to SEQ ID NO: 1608923
aaauguaucaacuuaaucc

SEQ ID NO: 1608925 - RNA, 19 nt, Artificial Sequence
  Description of Artificial Sequence: Synthetic oligonucleotide
  Sense strand starting at position 3489 of SEQ ID NO: 1560569
agaccucugucucuacgaa

SEQ ID NO: 1608926 - RNA, 19 nt, Artificial Sequence
  Description of Artificial Sequence: Synthetic oligonucleotide
  Antisense strand to SEQ ID NO: 1608925
uucguagagacagaggucu

SEQ ID NO: 1608927 - RNA, 19 nt, Artificial Sequence
  Description of Artificial Sequence: Synthetic oligonucleotide
  Sense strand starting at position 3490 of SEQ ID NO: 1560569
gaccucugucucuacgaaa

SEQ ID NO: 1608928 - RNA, 19 nt, Artificial Sequence
  Description of Artificial Sequence: Synthetic oligonucleotide
  Antisense strand to SEQ ID NO: 1608927
uuucguagagacagagguc

SEQ ID NO: 1608929 - RNA, 19 nt, Artificial Sequence
  Description of Artificial Sequence: Synthetic oligonucleotide
  Sense strand starting at position 3599 of SEQ ID NO: 1560569
uugagauugccgugagcug

SEQ ID NO: 1608930 - RNA, 19 nt, Artificial Sequence
  Description of Artificial Sequence: Synthetic oligonucleotide
  Antisense strand to SEQ ID NO: 1608929
cagcucacggcaaucucaa

SEQ ID NO: 1608931 - RNA, 19 nt, Artificial Sequence
  Description of Artificial Sequence: Synthetic oligonucleotide
  Sense strand starting at position 3610 of SEQ ID NO: 1560569
gugagcugugauuguuacu

SEQ ID NO: 1608932 - RNA, 19 nt, Artificial Sequence
  Description of Artificial Sequence: Synthetic oligonucleotide
  Antisense strand to SEQ ID NO: 1608931
aguaacaaucacagcucac

SEQ ID NO: 1608933 - RNA, 19 nt, Artificial Sequence
  Description of Artificial Sequence: Synthetic oligonucleotide
  Sense strand starting at position 3615 of SEQ ID NO: 1560569
cugugauuguuacugcacu

SEQ ID NO: 1608934 - RNA, 19 nt, Artificial Sequence
  Description of Artificial Sequence: Synthetic oligonucleotide
  Antisense strand to SEQ ID NO: 1608933
agugcaguaacaaucacag

SEQ ID NO: 1608935 - RNA, 19 nt, Artificial Sequence
  Description of Artificial Sequence: Synthetic oligonucleotide
  Sense strand starting at position 3651 of SEQ ID NO: 1560569
gcaagacugucuccuaaau

SEQ ID NO: 1608936 - RNA, 19 nt, Artificial Sequence
  Description of Artificial Sequence: Synthetic oligonucleotide
  Antisense strand to SEQ ID NO: 1608935
auuuaggagacagucuugc

SEQ ID NO: 1608937 - RNA, 19 nt, Artificial Sequence
  Description of Artificial Sequence: Synthetic oligonucleotide
  Sense strand starting at position 86 of SEQ ID NO: 1560570
cucugauugggccacugua

SEQ ID NO: 1608938 - RNA, 19 nt, Artificial Sequence
  Description of Artificial Sequence: Synthetic oligonucleotide
  Antisense strand to SEQ ID NO: 1608937
uacaguggcccaaucagag

SEQ ID NO: 1608939 - RNA, 19 nt, Artificial Sequence
  Description of Artificial Sequence: Synthetic oligonucleotide
  Sense strand starting at position 378 of SEQ ID NO: 1560570
aggcaagacucaggauaaa

SEQ ID NO: 1608940 - RNA, 19 nt, Artificial Sequence
  Description of Artificial Sequence: Synthetic oligonucleotide
  Antisense strand to SEQ ID NO: 1608939
uuuauccugagucuugccu

SEQ ID NO: 1608941 - RNA, 19 nt, Artificial Sequence
  Description of Artificial Sequence: Synthetic oligonucleotide
  Sense strand starting at position 1143 of SEQ ID NO: 1560570
aacagaugcuccguuagag

SEQ ID NO: 1608942 - RNA, 19 nt, Artificial Sequence
  Description of Artificial Sequence: Synthetic oligonucleotide
  Antisense strand to SEQ ID NO: 1608941
cucuaacggagcaucuguu

SEQ ID NO: 1608943 - RNA, 19 nt, Artificial Sequence
  Description of Artificial Sequence: Synthetic oligonucleotide
  Sense strand starting at position 1259 of SEQ ID NO: 1560570
ggagauucgggcuggaaca

SEQ ID NO: 1608944 - RNA, 19 nt, Artificial Sequence
  Description of Artificial Sequence: Synthetic oligonucleotide
  Antisense strand to SEQ ID NO: 1608943
uguuccagcccgaaucucc

SEQ ID NO: 1608945 - RNA, 19 nt, Artificial Sequence
  Description of Artificial Sequence: Synthetic oligonucleotide
  Sense strand starting at position 1277 of SEQ ID NO: 1560570
agcgguaaugggcacaauu

SEQ ID NO: 1608946 - RNA, 19 nt, Artificial Sequence
  Description of Artificial Sequence: Synthetic oligonucleotide
  Antisense strand to SEQ ID NO: 1608945
aauugugcccauuaccgcu

SEQ ID NO: 1608947 - RNA, 19 nt, Artificial Sequence
  Description of Artificial Sequence: Synthetic oligonucleotide
  Sense strand starting at position 1446 of SEQ ID NO: 1560570
gugggagccucuuucucaa

SEQ ID NO: 1608948 - RNA, 19 nt, Artificial Sequence
  Description of Artificial Sequence: Synthetic oligonucleotide
  Antisense strand to SEQ ID NO: 1608947
uugagaaagaggcucccac

SEQ ID NO: 1608949 - RNA, 19 nt, Artificial Sequence
  Description of Artificial Sequence: Synthetic oligonucleotide
  Sense strand starting at position 1784 of SEQ ID NO: 1560570
cuaauuguaccguggguga

SEQ ID NO: 1608950 - RNA, 19 nt, Artificial Sequence
  Description of Artificial Sequence: Synthetic oligonucleotide
  Antisense strand to SEQ ID NO: 1608949
ucacccacgguacaauuag

SEQ ID NO: 1608951 - RNA, 19 nt, Artificial Sequence
  Description of Artificial Sequence: Synthetic oligonucleotide
  Sense strand starting at position 1821 of SEQ ID NO: 1560570
ccagauuccugcucuggga

SEQ ID NO: 1608952 - RNA, 19 nt, Artificial Sequence
  Description of Artificial Sequence: Synthetic oligonucleotide
  Antisense strand to SEQ ID NO: 1608951
ucccagagcaggaaucugg

SEQ ID NO: 1608953 - RNA, 19 nt, Artificial Sequence
  Description of Artificial Sequence: Synthetic oligonucleotide
  Sense strand starting at position 2036 of SEQ ID NO: 1560570
gcauaccuagagugacaau

SEQ ID NO: 1608954 - RNA, 19 nt, Artificial Sequence
  Description of Artificial Sequence: Synthetic oligonucleotide
  Antisense strand to SEQ ID NO: 1608953
auugucacucuagguaugc

SEQ ID NO: 1608955 - RNA, 19 nt, Artificial Sequence
  Description of Artificial Sequence: Synthetic oligonucleotide
  Sense strand starting at position 2120 of SEQ ID NO: 1560570
gacagaggcuggcuugaaa

SEQ ID NO: 1608956 - RNA, 19 nt, Artificial Sequence
  Description of Artificial Sequence: Synthetic oligonucleotide
  Antisense strand to SEQ ID NO: 1608955
uuucaagccagccucuguc

SEQ ID NO: 1608957 - RNA, 19 nt, Artificial Sequence
  Description of Artificial Sequence: Synthetic oligonucleotide
  Sense strand starting at position 2140 of SEQ ID NO: 1560570
gggagauuguaacaaacca

SEQ ID NO: 1608958 - RNA, 19 nt, Artificial Sequence
  Description of Artificial Sequence: Synthetic oligonucleotide
  Antisense strand to SEQ ID NO: 1608957
ugguuuguuacaaucuccc

SEQ ID NO: 1608959 - RNA, 19 nt, Artificial Sequence
  Description of Artificial Sequence: Synthetic oligonucleotide
  Sense strand starting at position 2282 of SEQ ID NO: 1560570
ccgugagugagcucugugu

SEQ ID NO: 1608960 - RNA, 19 nt, Artificial Sequence
  Description of Artificial Sequence: Synthetic oligonucleotide
  Antisense strand to SEQ ID NO: 1608959
acacagagcucacucacgg

SEQ ID NO: 1608961 - RNA, 19 nt, Artificial Sequence
  Description of Artificial Sequence: Synthetic oligonucleotide
  Sense strand starting at position 2418 of SEQ ID NO: 1560570
cccugaaucauaggagguc

SEQ ID NO: 1608962 - RNA, 19 nt, Artificial Sequence
  Description of Artificial Sequence: Synthetic oligonucleotide
  Antisense strand to SEQ ID NO: 1608961
gaccuccuaugauucaggg

SEQ ID NO: 1608963 - RNA, 19 nt, Artificial Sequence
  Description of Artificial Sequence: Synthetic oligonucleotide
  Sense strand starting at position 2598 of SEQ ID NO: 1560570
ccacuucugcgaggugaac

SEQ ID NO: 1608964 - RNA, 19 nt, Artificial Sequence
  Description of Artificial Sequence: Synthetic oligonucleotide
  Antisense strand to SEQ ID NO: 1608963
guucaccucgcagaagugg

SEQ ID NO: 1608965 - RNA, 19 nt, Artificial Sequence
  Description of Artificial Sequence: Synthetic oligonucleotide
  Sense strand starting at position 2955 of SEQ ID NO: 1560570
cuggauucucuccguggga

SEQ ID NO: 1608966 - RNA, 19 nt, Artificial Sequence
  Description of Artificial Sequence: Synthetic oligonucleotide
  Antisense strand to SEQ ID NO: 1608965
ucccacggagagaauccag

SEQ ID NO: 1608967 - RNA, 19 nt, Artificial Sequence
  Description of Artificial Sequence: Synthetic oligonucleotide
  Sense strand starting at position 2957 of SEQ ID NO: 1560570
ggauucucuccgugggaca

SEQ ID NO: 1608968 - RNA, 19 nt, Artificial Sequence
  Description of Artificial Sequence: Synthetic oligonucleotide
  Antisense strand to SEQ ID NO: 1608967
ugucccacggagagaaucc

SEQ ID NO: 1608969 - RNA, 19 nt, Artificial Sequence
  Description of Artificial Sequence: Synthetic oligonucleotide
  Sense strand starting at position 2958 of SEQ ID NO: 1560570
gauucucuccgugggacau

SEQ ID NO: 1608970 - RNA, 19 nt, Artificial Sequence
  Description of Artificial Sequence: Synthetic oligonucleotide
  Antisense strand to SEQ ID NO: 1608969
augucccacggagagaauc

SEQ ID NO: 1608971 - RNA, 19 nt, Artificial Sequence
  Description of Artificial Sequence: Synthetic oligonucleotide
  Sense strand starting at position 3011 of SEQ ID NO: 1560570
gcugaacuuucugcaguga

SEQ ID NO: 1608972 - RNA, 19 nt, Artificial Sequence
  Description of Artificial Sequence: Synthetic oligonucleotide
  Antisense strand to SEQ ID NO: 1608971
ucacugcagaaaguucagc

SEQ ID NO: 1608973 - RNA, 19 nt, Artificial Sequence
  Description of Artificial Sequence: Synthetic oligonucleotide
  Sense strand starting at position 3015 of SEQ ID NO: 1560570
aacuuucugcagugauguu

SEQ ID NO: 1608974 - RNA, 19 nt, Artificial Sequence
  Description of Artificial Sequence: Synthetic oligonucleotide
  Antisense strand to SEQ ID NO: 1608973
aacaucacugcagaaaguu

SEQ ID NO: 1608975 - RNA, 19 nt, Artificial Sequence
  Description of Artificial Sequence: Synthetic oligonucleotide
  Sense strand starting at position 3075 of SEQ ID NO: 1560570
gcuauccagccuuggagau

SEQ ID NO: 1608976 - RNA, 19 nt, Artificial Sequence
  Description of Artificial Sequence: Synthetic oligonucleotide
  Antisense strand to SEQ ID NO: 1608975
aucuccaaggcuggauagc

SEQ ID NO: 1608977 - RNA, 19 nt, Artificial Sequence
  Description of Artificial Sequence: Synthetic oligonucleotide
  Sense strand starting at position 3076 of SEQ ID NO: 1560570
cuauccagccuuggagaua

SEQ ID NO: 1608978 - RNA, 19 nt, Artificial Sequence
  Description of Artificial Sequence: Synthetic oligonucleotide
  Antisense strand to SEQ ID NO: 1608977
uaucuccaaggcuggauag

SEQ ID NO: 1608979 - RNA, 19 nt, Artificial Sequence
  Description of Artificial Sequence: Synthetic oligonucleotide
  Sense strand starting at position 3077 of SEQ ID NO: 1560570
uauccagccuuggagauau

SEQ ID NO: 1608980 - RNA, 19 nt, Artificial Sequence
  Description of Artificial Sequence: Synthetic oligonucleotide
  Antisense strand to SEQ ID NO: 1608979
auaucuccaaggcuggaua

SEQ ID NO: 1608981 - RNA, 19 nt, Artificial Sequence
  Description of Artificial Sequence: Synthetic oligonucleotide
  Sense strand starting at position 3112 of SEQ ID NO: 1560570
gaguuacauuucuggcuuu

SEQ ID NO: 1608982 - RNA, 19 nt, Artificial Sequence
  Description of Artificial Sequence: Synthetic oligonucleotide
  Antisense strand to SEQ ID NO: 1608981
aaagccagaaauguaacuc

SEQ ID NO: 1608983 - RNA, 19 nt, Artificial Sequence
  Description of Artificial Sequence: Synthetic oligonucleotide
  Sense strand starting at position 3113 of SEQ ID NO: 1560570
aguuacauuucuggcuuua

SEQ ID NO: 1608984 - RNA, 19 nt, Artificial Sequence
  Description of Artificial Sequence: Synthetic oligonucleotide
  Antisense strand to SEQ ID NO: 1608983
uaaagccagaaauguaacu

SEQ ID NO: 1608985 - RNA, 19 nt, Artificial Sequence
  Description of Artificial Sequence: Synthetic oligonucleotide
  Sense strand starting at position 3158 of SEQ ID NO: 1560570
gcgguuaguggcuaccaua

SEQ ID NO: 1608986 - RNA, 19 nt, Artificial Sequence
  Description of Artificial Sequence: Synthetic oligonucleotide
  Antisense strand to SEQ ID NO: 1608985
uaugguagccacuaaccgc

SEQ ID NO: 1608987 - RNA, 19 nt, Artificial Sequence
  Description of Artificial Sequence: Synthetic oligonucleotide
  Sense strand starting at position 3204 of SEQ ID NO: 1560570
auuaccuaucauggaaguu

SEQ ID NO: 1608988 - RNA, 19 nt, Artificial Sequence
  Description of Artificial Sequence: Synthetic oligonucleotide
  Antisense strand to SEQ ID NO: 1608987
aacuuccaugauagguaau

SEQ ID NO: 1608989 - RNA, 19 nt, Artificial Sequence
  Description of Artificial Sequence: Synthetic oligonucleotide
  Sense strand starting at position 3231 of SEQ ID NO: 1560570
acaauaagcuccuuugguu

SEQ ID NO: 1608990 - RNA, 19 nt, Artificial Sequence
  Description of Artificial Sequence: Synthetic oligonucleotide
  Antisense strand to SEQ ID NO: 1608989
aaccaaaggagcuuauugu

SEQ ID NO: 1608991 - RNA, 19 nt, Artificial Sequence
  Description of Artificial Sequence: Synthetic oligonucleotide
  Sense strand starting at position 3280 of SEQ ID NO: 1560570
cuuuacuuacuguguuaua

SEQ ID NO: 1608992 - RNA, 19 nt, Artificial Sequence
  Description of Artificial Sequence: Synthetic oligonucleotide
  Antisense strand to SEQ ID NO: 1608991
uauaacacaguaaguaaag

SEQ ID NO: 1608993 - RNA, 19 nt, Artificial Sequence
  Description of Artificial Sequence: Synthetic oligonucleotide
  Sense strand starting at position 3281 of SEQ ID NO: 1560570
uuuacuuacuguguuauac

SEQ ID NO: 1608994 - RNA, 19 nt, Artificial Sequence
  Description of Artificial Sequence: Synthetic oligonucleotide
  Antisense strand to SEQ ID NO: 1608993
guauaacacaguaaguaaa

SEQ ID NO: 1608995 - RNA, 19 nt, Artificial Sequence
  Description of Artificial Sequence: Synthetic oligonucleotide
  Sense strand starting at position 3338 of SEQ ID NO: 1560570
agccuuacuccaggaacau

SEQ ID NO: 1608996 - RNA, 19 nt, Artificial Sequence
  Description of Artificial Sequence: Synthetic oligonucleotide
  Antisense strand to SEQ ID NO: 1608995
auguuccuggaguaaggcu

SEQ ID NO: 1608997 - RNA, 19 nt, Artificial Sequence
  Description of Artificial Sequence: Synthetic oligonucleotide
  Sense strand starting at position 3339 of SEQ ID NO: 1560570
gccuuacuccaggaacauc

SEQ ID NO: 1608998 - RNA, 19 nt, Artificial Sequence
  Description of Artificial Sequence: Synthetic oligonucleotide
  Antisense strand to SEQ ID NO: 1608997
gauguuccuggaguaaggc

SEQ ID NO: 1608999 - RNA, 19 nt, Artificial Sequence
  Description of Artificial Sequence: Synthetic oligonucleotide
  Sense strand starting at position 3347 of SEQ ID NO: 1560570
ccaggaacaucacuuggua

SEQ ID NO: 1609000 - RNA, 19 nt, Artificial Sequence
  Description of Artificial Sequence: Synthetic oligonucleotide
  Antisense strand to SEQ ID NO: 1608999
uaccaagugauguuccugg

SEQ ID NO: 1609001 - RNA, 19 nt, Artificial Sequence
  Description of Artificial Sequence: Synthetic oligonucleotide
  Sense strand starting at position 3350 of SEQ ID NO: 1560570
ggaacaucacuugguaauu

SEQ ID NO: 1609002 - RNA, 19 nt, Artificial Sequence
  Description of Artificial Sequence: Synthetic oligonucleotide
  Antisense strand to SEQ ID NO: 1609001
aauuaccaagugauguucc

SEQ ID NO: 1609003 - RNA, 19 nt, Artificial Sequence
  Description of Artificial Sequence: Synthetic oligonucleotide
  Sense strand starting at position 3502 of SEQ ID NO: 1560570
ggauuaaguugauacauuu

SEQ ID NO: 1609004 - RNA, 19 nt, Artificial Sequence
  Description of Artificial Sequence: Synthetic oligonucleotide
  Antisense strand to SEQ ID NO: 1609003
aaauguaucaacuuaaucc

SEQ ID NO: 1609005 - RNA, 19 nt, Artificial Sequence
  Description of Artificial Sequence: Synthetic oligonucleotide
  Sense strand starting at position 3638 of SEQ ID NO: 1560570
agaccucugucucuacgaa

SEQ ID NO: 1609006 - RNA, 19 nt, Artificial Sequence
  Description of Artificial Sequence: Synthetic oligonucleotide
  Antisense strand to SEQ ID NO: 1609005
uucguagagacagaggucu

SEQ ID NO: 1609007 - RNA, 19 nt, Artificial Sequence
  Description of Artificial Sequence: Synthetic oligonucleotide
  Sense strand starting at position 3639 of SEQ ID NO: 1560570
gaccucugucucuacgaaa

SEQ ID NO: 1609008 - RNA, 19 nt, Artificial Sequence
  Description of Artificial Sequence: Synthetic oligonucleotide
  Antisense strand to SEQ ID NO: 1609007
uuucguagagacagagguc

SEQ ID NO: 1609009 - RNA, 19 nt, Artificial Sequence
  Description of Artificial Sequence: Synthetic oligonucleotide
  Sense strand starting at position 3748 of SEQ ID NO: 1560570
uugagauugccgugagcug

SEQ ID NO: 1609010 - RNA, 19 nt, Artificial Sequence
  Description of Artificial Sequence: Synthetic oligonucleotide
  Antisense strand to SEQ ID NO: 1609009
cagcucacggcaaucucaa

SEQ ID NO: 1609011 - RNA, 19 nt, Artificial Sequence
  Description of Artificial Sequence: Synthetic oligonucleotide
  Sense strand starting at position 3759 of SEQ ID NO: 1560570
gugagcugugauuguuacu

SEQ ID NO: 1609012 - RNA, 19 nt, Artificial Sequence
  Description of Artificial Sequence: Synthetic oligonucleotide
  Antisense strand to SEQ ID NO: 1609011
aguaacaaucacagcucac

SEQ ID NO: 1609013 - RNA, 19 nt, Artificial Sequence
  Description of Artificial Sequence: Synthetic oligonucleotide
  Sense strand starting at position 3764 of SEQ ID NO: 1560570
cugugauuguuacugcacu

SEQ ID NO: 1609014 - RNA, 19 nt, Artificial Sequence
  Description of Artificial Sequence: Synthetic oligonucleotide
  Antisense strand to SEQ ID NO: 1609013
agugcaguaacaaucacag

SEQ ID NO: 1609015 - RNA, 19 nt, Artificial Sequence
  Description of Artificial Sequence: Synthetic oligonucleotide
  Sense strand starting at position 3800 of SEQ ID NO: 1560570
gcaagacugucuccuaaau

SEQ ID NO: 1609016 - RNA, 19 nt, Artificial Sequence
  Description of Artificial Sequence: Synthetic oligonucleotide
  Antisense strand to SEQ ID NO: 1609015
auuuaggagacagucuugc

SEQ ID NO: 1609017 - RNA, 19 nt, Artificial Sequence
  Description of Artificial Sequence: Synthetic oligonucleotide
  Sense strand starting at position 63 of SEQ ID NO: 1560571
accgcuugagcucgggaau

SEQ ID NO: 1609018 - RNA, 19 nt, Artificial Sequence
  Description of Artificial Sequence: Synthetic oligonucleotide
  Antisense strand to SEQ ID NO: 1609017
auucccgagcucaagcggu

SEQ ID NO: 1609019 - RNA, 19 nt, Artificial Sequence
  Description of Artificial Sequence: Synthetic oligonucleotide
  Sense strand starting at position 64 of SEQ ID NO: 1560571
ccgcuugagcucgggaauu

SEQ ID NO: 1609020 - RNA, 19 nt, Artificial Sequence
  Description of Artificial Sequence: Synthetic oligonucleotide
  Antisense strand to SEQ ID NO: 1609019
aauucccgagcucaagcgg

SEQ ID NO: 1609021 - RNA, 19 nt, Artificial Sequence
  Description of Artificial Sequence: Synthetic oligonucleotide
  Sense strand starting at position 155 of SEQ ID NO: 1560571
aaaguagucgcggaggcau

SEQ ID NO: 1609022 - RNA, 19 nt, Artificial Sequence
  Description of Artificial Sequence: Synthetic oligonucleotide
  Antisense strand to SEQ ID NO: 1609021
augccuccgcgacuacuuu

SEQ ID NO: 1609023 - RNA, 19 nt, Artificial Sequence
  Description of Artificial Sequence: Synthetic oligonucleotide
  Sense strand starting at position 414 of SEQ ID NO: 1560571
cucugauugggccacugua

SEQ ID NO: 1609024 - RNA, 19 nt, Artificial Sequence
  Description of Artificial Sequence: Synthetic oligonucleotide
  Antisense strand to SEQ ID NO: 1609023
uacaguggcccaaucagag

SEQ ID NO: 1609025 - RNA, 19 nt, Artificial Sequence
  Description of Artificial Sequence: Synthetic oligonucleotide
  Sense strand starting at position 706 of SEQ ID NO: 1560571
aggcaagacucaggauaaa

SEQ ID NO: 1609026 - RNA, 19 nt, Artificial Sequence
  Description of Artificial Sequence: Synthetic oligonucleotide
  Antisense strand to SEQ ID NO: 1609025
uuuauccugagucuugccu

SEQ ID NO: 1609027 - RNA, 19 nt, Artificial Sequence
  Description of Artificial Sequence: Synthetic oligonucleotide
  Sense strand starting at position 1471 of SEQ ID NO: 1560571
aacagaugcuccguuagag

SEQ ID NO: 1609028 - RNA, 19 nt, Artificial Sequence
  Description of Artificial Sequence: Synthetic oligonucleotide
  Antisense strand to SEQ ID NO: 1609027
cucuaacggagcaucuguu

SEQ ID NO: 1609029 - RNA, 19 nt, Artificial Sequence
  Description of Artificial Sequence: Synthetic oligonucleotide
  Sense strand starting at position 1587 of SEQ ID NO: 1560571
ggagauucgggcuggaaca

SEQ ID NO: 1609030 - RNA, 19 nt, Artificial Sequence
  Description of Artificial Sequence: Synthetic oligonucleotide
  Antisense strand to SEQ ID NO: 1609029
uguuccagcccgaaucucc

SEQ ID NO: 1609031 - RNA, 19 nt, Artificial Sequence
  Description of Artificial Sequence: Synthetic oligonucleotide
  Sense strand starting at position 1605 of SEQ ID NO: 1560571
agcgguaaugggcacaauu

SEQ ID NO: 1609032 - RNA, 19 nt, Artificial Sequence
  Description of Artificial Sequence: Synthetic oligonucleotide
  Antisense strand to SEQ ID NO: 1609031
aauugugcccauuaccgcu

SEQ ID NO: 1609033 - RNA, 19 nt, Artificial Sequence
  Description of Artificial Sequence: Synthetic oligonucleotide
  Sense strand starting at position 1774 of SEQ ID NO: 1560571
gugggagccucuuucucaa

SEQ ID NO: 1609034 - RNA, 19 nt, Artificial Sequence
  Description of Artificial Sequence: Synthetic oligonucleotide
  Antisense strand to SEQ ID NO: 1609033
uugagaaagaggcucccac

SEQ ID NO: 1609035 - RNA, 19 nt, Artificial Sequence
  Description of Artificial Sequence: Synthetic oligonucleotide
  Sense strand starting at position 2112 of SEQ ID NO: 1560571
cuaauuguaccguggguga

SEQ ID NO: 1609036 - RNA, 19 nt, Artificial Sequence
  Description of Artificial Sequence: Synthetic oligonucleotide
  Antisense strand to SEQ ID NO: 1609035
ucacccacgguacaauuag

SEQ ID NO: 1609037 - RNA, 19 nt, Artificial Sequence
  Description of Artificial Sequence: Synthetic oligonucleotide
  Sense strand starting at position 2149 of SEQ ID NO: 1560571
ccagauuccugcucuggga

SEQ ID NO: 1609038 - RNA, 19 nt, Artificial Sequence
  Description of Artificial Sequence: Synthetic oligonucleotide
  Antisense strand to SEQ ID NO: 1609037
ucccagagcaggaaucugg

SEQ ID NO: 1609039 - RNA, 19 nt, Artificial Sequence
  Description of Artificial Sequence: Synthetic oligonucleotide
  Sense strand starting at position 2364 of SEQ ID NO: 1560571
gcauaccuagagugacaau

SEQ ID NO: 1609040 - RNA, 19 nt, Artificial Sequence
  Description of Artificial Sequence: Synthetic oligonucleotide
  Antisense strand to SEQ ID NO: 1609039
auugucacucuagguaugc

SEQ ID NO: 1609041 - RNA, 19 nt, Artificial Sequence
  Description of Artificial Sequence: Synthetic oligonucleotide
  Sense strand starting at position 2448 of SEQ ID NO: 1560571
gacagaggcuggcuugaaa

SEQ ID NO: 1609042 - RNA, 19 nt, Artificial Sequence
  Description of Artificial Sequence: Synthetic oligonucleotide
  Antisense strand to SEQ ID NO: 1609041
uuucaagccagccucuguc

SEQ ID NO: 1609043 - RNA, 19 nt, Artificial Sequence
  Description of Artificial Sequence: Synthetic oligonucleotide
  Sense strand starting at position 2468 of SEQ ID NO: 1560571
gggagauuguaacaaacca

SEQ ID NO: 1609044 - RNA, 19 nt, Artificial Sequence
  Description of Artificial Sequence: Synthetic oligonucleotide
  Antisense strand to SEQ ID NO: 1609043
ugguuuguuacaaucuccc

SEQ ID NO: 1609045 - RNA, 19 nt, Artificial Sequence
  Description of Artificial Sequence: Synthetic oligonucleotide
  Sense strand starting at position 2610 of SEQ ID NO: 1560571
ccgugagugagcucugugu

SEQ ID NO: 1609046 - RNA, 19 nt, Artificial Sequence
  Description of Artificial Sequence: Synthetic oligonucleotide
  Antisense strand to SEQ ID NO: 1609045
acacagagcucacucacgg

SEQ ID NO: 1609047 - RNA, 19 nt, Artificial Sequence
  Description of Artificial Sequence: Synthetic oligonucleotide
  Sense strand starting at position 2612 of SEQ ID NO: 1560571
gugagugagcucugugugu

SEQ ID NO: 1609048 - RNA, 19 nt, Artificial Sequence
  Description of Artificial Sequence: Synthetic oligonucleotide
  Antisense strand to SEQ ID NO: 1609047
acacacagagcucacucac

SEQ ID NO: 1609049 - RNA, 19 nt, Artificial Sequence
  Description of Artificial Sequence: Synthetic oligonucleotide
  Sense strand starting at position 2746 of SEQ ID NO: 1560571
cccugaaucauaggagguc

SEQ ID NO: 1609050 - RNA, 19 nt, Artificial Sequence
  Description of Artificial Sequence: Synthetic oligonucleotide
  Antisense strand to SEQ ID NO: 1609049
gaccuccuaugauucaggg

SEQ ID NO: 1609051 - RNA, 19 nt, Artificial Sequence
  Description of Artificial Sequence: Synthetic oligonucleotide
  Sense strand starting at position 2926 of SEQ ID NO: 1560571
ccacuucugcgaggugaac

SEQ ID NO: 1609052 - RNA, 19 nt, Artificial Sequence
  Description of Artificial Sequence: Synthetic oligonucleotide
  Antisense strand to SEQ ID NO: 1609051
guucaccucgcagaagugg

SEQ ID NO: 1609053 - RNA, 19 nt, Artificial Sequence
  Description of Artificial Sequence: Synthetic oligonucleotide
  Sense strand starting at position 3283 of SEQ ID NO: 1560571
cuggauucucuccguggga

SEQ ID NO: 1609054 - RNA, 19 nt, Artificial Sequence
  Description of Artificial Sequence: Synthetic oligonucleotide
  Antisense strand to SEQ ID NO: 1609053
ucccacggagagaauccag

SEQ ID NO: 1609055 - RNA, 19 nt, Artificial Sequence
  Description of Artificial Sequence: Synthetic oligonucleotide
  Sense strand starting at position 3285 of SEQ ID NO: 1560571
ggauucucuccgugggaca

SEQ ID NO: 1609056 - RNA, 19 nt, Artificial Sequence
  Description of Artificial Sequence: Synthetic oligonucleotide
  Antisense strand to SEQ ID NO: 1609055
ugucccacggagagaaucc

SEQ ID NO: 1609057 - RNA, 19 nt, Artificial Sequence
  Description of Artificial Sequence: Synthetic oligonucleotide
  Sense strand starting at position 3286 of SEQ ID NO: 1560571
gauucucuccgugggacau

SEQ ID NO: 1609058 - RNA, 19 nt, Artificial Sequence
  Description of Artificial Sequence: Synthetic oligonucleotide
  Antisense strand to SEQ ID NO: 1609057
augucccacggagagaauc

SEQ ID NO: 1609059 - RNA, 19 nt, Artificial Sequence
  Description of Artificial Sequence: Synthetic oligonucleotide
  Sense strand starting at position 3339 of SEQ ID NO: 1560571
gcugaacuuucugcaguga

SEQ ID NO: 1609060 - RNA, 19 nt, Artificial Sequence
  Description of Artificial Sequence: Synthetic oligonucleotide
  Antisense strand to SEQ ID NO: 1609059
ucacugcagaaaguucagc

SEQ ID NO: 1609061 - RNA, 19 nt, Artificial Sequence
  Description of Artificial Sequence: Synthetic oligonucleotide
  Sense strand starting at position 3343 of SEQ ID NO: 1560571
aacuuucugcagugauguu

SEQ ID NO: 1609062 - RNA, 19 nt, Artificial Sequence
  Description of Artificial Sequence: Synthetic oligonucleotide
  Antisense strand to SEQ ID NO: 1609061
aacaucacugcagaaaguu

SEQ ID NO: 1609063 - RNA, 19 nt, Artificial Sequence
  Description of Artificial Sequence: Synthetic oligonucleotide
  Sense strand starting at position 3403 of SEQ ID NO: 1560571
gcuauccagccuuggagau

SEQ ID NO: 1609064 - RNA, 19 nt, Artificial Sequence
  Description of Artificial Sequence: Synthetic oligonucleotide
  Antisense strand to SEQ ID NO: 1609063
aucuccaaggcuggauagc

SEQ ID NO: 1609065 - RNA, 19 nt, Artificial Sequence
  Description of Artificial Sequence: Synthetic oligonucleotide
  Sense strand starting at position 3404 of SEQ ID NO: 1560571
cuauccagccuuggagaua

SEQ ID NO: 1609066 - RNA, 19 nt, Artificial Sequence
  Description of Artificial Sequence: Synthetic oligonucleotide
  Antisense strand to SEQ ID NO: 1609065
uaucuccaaggcuggauag

SEQ ID NO: 1609067 - RNA, 19 nt, Artificial Sequence
  Description of Artificial Sequence: Synthetic oligonucleotide
  Sense strand starting at position 3405 of SEQ ID NO: 1560571
uauccagccuuggagauau

SEQ ID NO: 1609068 - RNA, 19 nt, Artificial Sequence
  Description of Artificial Sequence: Synthetic oligonucleotide
  Antisense strand to SEQ ID NO: 1609067
auaucuccaaggcuggaua

SEQ ID NO: 1609069 - RNA, 19 nt, Artificial Sequence
  Description of Artificial Sequence: Synthetic oligonucleotide
  Sense strand starting at position 3440 of SEQ ID NO: 1560571
gaguuacauuucuggcuuu

SEQ ID NO: 1609070 - RNA, 19 nt, Artificial Sequence
  Description of Artificial Sequence: Synthetic oligonucleotide
  Antisense strand to SEQ ID NO: 1609069
aaagccagaaauguaacuc

SEQ ID NO: 1609071 - RNA, 19 nt, Artificial Sequence
  Description of Artificial Sequence: Synthetic oligonucleotide
  Sense strand starting at position 3441 of SEQ ID NO: 1560571
aguuacauuucuggcuuua

SEQ ID NO: 1609072 - RNA, 19 nt, Artificial Sequence
  Description of Artificial Sequence: Synthetic oligonucleotide
  Antisense strand to SEQ ID NO: 1609071
uaaagccagaaauguaacu

SEQ ID NO: 1609073 - RNA, 19 nt, Artificial Sequence
  Description of Artificial Sequence: Synthetic oligonucleotide
  Sense strand starting at position 3486 of SEQ ID NO: 1560571
gcgguuaguggcuaccaua

SEQ ID NO: 1609074 - RNA, 19 nt, Artificial Sequence
  Description of Artificial Sequence: Synthetic oligonucleotide
  Antisense strand to SEQ ID NO: 1609073
uaugguagccacuaaccgc

SEQ ID NO: 1609075 - RNA, 19 nt, Artificial Sequence
  Description of Artificial Sequence: Synthetic oligonucleotide
  Sense strand starting at position 3532 of SEQ ID NO: 1560571
auuaccuaucauggaaguu

SEQ ID NO: 1609076 - RNA, 19 nt, Artificial Sequence
  Description of Artificial Sequence: Synthetic oligonucleotide
  Antisense strand to SEQ ID NO: 1609075
aacuuccaugauagguaau

SEQ ID NO: 1609077 - RNA, 19 nt, Artificial Sequence
  Description of Artificial Sequence: Synthetic oligonucleotide
  Sense strand starting at position 3559 of SEQ ID NO: 1560571
acaauaagcuccuuugguu

SEQ ID NO: 1609078 - RNA, 19 nt, Artificial Sequence
  Description of Artificial Sequence: Synthetic oligonucleotide
  Antisense strand to SEQ ID NO: 1609077
aaccaaaggagcuuauugu

SEQ ID NO: 1609079 - RNA, 19 nt, Artificial Sequence
  Description of Artificial Sequence: Synthetic oligonucleotide
  Sense strand starting at position 3608 of SEQ ID NO: 1560571
cuuuacuuacuguguuaua

SEQ ID NO: 1609080 - RNA, 19 nt, Artificial Sequence
  Description of Artificial Sequence: Synthetic oligonucleotide
  Antisense strand to SEQ ID NO: 1609079
uauaacacaguaaguaaag

SEQ ID NO: 1609081 - RNA, 19 nt, Artificial Sequence
  Description of Artificial Sequence: Synthetic oligonucleotide
  Sense strand starting at position 3609 of SEQ ID NO: 1560571
uuuacuuacuguguuauac

SEQ ID NO: 1609082 - RNA, 19 nt, Artificial Sequence
  Description of Artificial Sequence: Synthetic oligonucleotide
  Antisense strand to SEQ ID NO: 1609081
guauaacacaguaaguaaa

SEQ ID NO: 1609083 - RNA, 19 nt, Artificial Sequence
  Description of Artificial Sequence: Synthetic oligonucleotide
  Sense strand starting at position 3666 of SEQ ID NO: 1560571
agccuuacuccaggaacau

SEQ ID NO: 1609084 - RNA, 19 nt, Artificial Sequence
  Description of Artificial Sequence: Synthetic oligonucleotide
  Antisense strand to SEQ ID NO: 1609083
auguuccuggaguaaggcu

SEQ ID NO: 1609085 - RNA, 19 nt, Artificial Sequence
  Description of Artificial Sequence: Synthetic oligonucleotide
  Sense strand starting at position 3667 of SEQ ID NO: 1560571
gccuuacuccaggaacauc

SEQ ID NO: 1609086 - RNA, 19 nt, Artificial Sequence
  Description of Artificial Sequence: Synthetic oligonucleotide
  Antisense strand to SEQ ID NO: 1609085
gauguuccuggaguaaggc

SEQ ID NO: 1609087 - RNA, 19 nt, Artificial Sequence
  Description of Artificial Sequence: Synthetic oligonucleotide
  Sense strand starting at position 3675 of SEQ ID NO: 1560571
ccaggaacaucacuuggua

SEQ ID NO: 1609088 - RNA, 19 nt, Artificial Sequence
  Description of Artificial Sequence: Synthetic oligonucleotide
  Antisense strand to SEQ ID NO: 1609087
uaccaagugauguuccugg

SEQ ID NO: 1609089 - RNA, 19 nt, Artificial Sequence
  Description of Artificial Sequence: Synthetic oligonucleotide
  Sense strand starting at position 3678 of SEQ ID NO: 1560571
ggaacaucacuugguaauu

SEQ ID NO: 1609090 - RNA, 19 nt, Artificial Sequence
  Description of Artificial Sequence: Synthetic oligonucleotide
  Antisense strand to SEQ ID NO: 1609089
aauuaccaagugauguucc

SEQ ID NO: 1609091 - RNA, 19 nt, Artificial Sequence
  Description of Artificial Sequence: Synthetic oligonucleotide
  Sense strand starting at position 3830 of SEQ ID NO: 1560571
ggauuaaguugauacauuu

SEQ ID NO: 1609092 - RNA, 19 nt, Artificial Sequence
  Description of Artificial Sequence: Synthetic oligonucleotide
  Antisense strand to SEQ ID NO: 1609091
aaauguaucaacuuaaucc

SEQ ID NO: 1609093 - RNA, 19 nt, Artificial Sequence
  Description of Artificial Sequence: Synthetic oligonucleotide
  Sense strand starting at position 3966 of SEQ ID NO: 1560571
agaccucugucucuacgaa

SEQ ID NO: 1609094 - RNA, 19 nt, Artificial Sequence
  Description of Artificial Sequence: Synthetic oligonucleotide
  Antisense strand to SEQ ID NO: 1609093
uucguagagacagaggucu

SEQ ID NO: 1609095 - RNA, 19 nt, Artificial Sequence
  Description of Artificial Sequence: Synthetic oligonucleotide
  Sense strand starting at position 3967 of SEQ ID NO: 1560571
gaccucugucucuacgaaa

SEQ ID NO: 1609096 - RNA, 19 nt, Artificial Sequence
  Description of Artificial Sequence: Synthetic oligonucleotide
  Antisense strand to SEQ ID NO: 1609095
uuucguagagacagagguc

SEQ ID NO: 1609097 - RNA, 19 nt, Artificial Sequence
  Description of Artificial Sequence: Synthetic oligonucleotide
  Sense strand starting at position 328 of SEQ ID NO: 1560572
ucggguauuaaaggaugaa

SEQ ID NO: 1609098 - RNA, 19 nt, Artificial Sequence
  Description of Artificial Sequence: Synthetic oligonucleotide
  Antisense strand to SEQ ID NO: 1609097
uucauccuuuaauacccga

SEQ ID NO: 1609099 - RNA, 19 nt, Artificial Sequence
  Description of Artificial Sequence: Synthetic oligonucleotide
  Sense strand starting at position 668 of SEQ ID NO: 1560572
aggaaauacuuccauacug

SEQ ID NO: 1609100 - RNA, 19 nt, Artificial Sequence
  Description of Artificial Sequence: Synthetic oligonucleotide
  Antisense strand to SEQ ID NO: 1609099
caguauggaaguauuuccu

SEQ ID NO: 1609101 - RNA, 19 nt, Artificial Sequence
  Description of Artificial Sequence: Synthetic oligonucleotide
  Sense strand starting at position 676 of SEQ ID NO: 1560572
cuuccauacugguugguca

SEQ ID NO: 1609102 - RNA, 19 nt, Artificial Sequence
  Description of Artificial Sequence: Synthetic oligonucleotide
  Antisense strand to SEQ ID NO: 1609101
ugaccaaccaguauggaag

SEQ ID NO: 1609103 - RNA, 19 nt, Artificial Sequence
  Description of Artificial Sequence: Synthetic oligonucleotide
  Sense strand starting at position 864 of SEQ ID NO: 1560572
auggguuguucuguaauuu

SEQ ID NO: 1609104 - RNA, 19 nt, Artificial Sequence
  Description of Artificial Sequence: Synthetic oligonucleotide
  Antisense strand to SEQ ID NO: 1609103
aaauuacagaacaacccau

SEQ ID NO: 1609105 - RNA, 19 nt, Artificial Sequence
  Description of Artificial Sequence: Synthetic oligonucleotide
  Sense strand starting at position 882 of SEQ ID NO: 1560572
uggaaucagcccugucacu

SEQ ID NO: 1609106 - RNA, 19 nt, Artificial Sequence
  Description of Artificial Sequence: Synthetic oligonucleotide
  Antisense strand to SEQ ID NO: 1609105
agugacagggcugauucca

SEQ ID NO: 1609107 - RNA, 19 nt, Artificial Sequence
  Description of Artificial Sequence: Synthetic oligonucleotide
  Sense strand starting at position 968 of SEQ ID NO: 1560572
cugcguaccuguugccaga

SEQ ID NO: 1609108 - RNA, 19 nt, Artificial Sequence
  Description of Artificial Sequence: Synthetic oligonucleotide
  Antisense strand to SEQ ID NO: 1609107
ucuggcaacagguacgcag

SEQ ID NO: 1609109 - RNA, 19 nt, Artificial Sequence
  Description of Artificial Sequence: Synthetic oligonucleotide
  Sense strand starting at position 1041 of SEQ ID NO: 1560572
ccagguuccucugggaaca

SEQ ID NO: 1609110 - RNA, 19 nt, Artificial Sequence
  Description of Artificial Sequence: Synthetic oligonucleotide
  Antisense strand to SEQ ID NO: 1609109
uguucccagaggaaccugg

SEQ ID NO: 1609111 - RNA, 19 nt, Artificial Sequence
  Description of Artificial Sequence: Synthetic oligonucleotide
  Sense strand starting at position 1042 of SEQ ID NO: 1560572
cagguuccucugggaacaa

SEQ ID NO: 1609112 - RNA, 19 nt, Artificial Sequence
  Description of Artificial Sequence: Synthetic oligonucleotide
  Antisense strand to SEQ ID NO: 1609111
uuguucccagaggaaccug

SEQ ID NO: 1609113 - RNA, 19 nt, Artificial Sequence
  Description of Artificial Sequence: Synthetic oligonucleotide
  Sense strand starting at position 1268 of SEQ ID NO: 1560572
gcuagaagcuuccgagaua

SEQ ID NO: 1609114 - RNA, 19 nt, Artificial Sequence
  Description of Artificial Sequence: Synthetic oligonucleotide
  Antisense strand to SEQ ID NO: 1609113
uaucucggaagcuucuagc

SEQ ID NO: 1609115 - RNA, 19 nt, Artificial Sequence
  Description of Artificial Sequence: Synthetic oligonucleotide
  Sense strand starting at position 1269 of SEQ ID NO: 1560572
cuagaagcuuccgagauac

SEQ ID NO: 1609116 - RNA, 19 nt, Artificial Sequence
  Description of Artificial Sequence: Synthetic oligonucleotide
  Antisense strand to SEQ ID NO: 1609115
guaucucggaagcuucuag

SEQ ID NO: 1609117 - RNA, 19 nt, Artificial Sequence
  Description of Artificial Sequence: Synthetic oligonucleotide
  Sense strand starting at position 1271 of SEQ ID NO: 1560572
agaagcuuccgagauacca

SEQ ID NO: 1609118 - RNA, 19 nt, Artificial Sequence
  Description of Artificial Sequence: Synthetic oligonucleotide
  Antisense strand to SEQ ID NO: 1609117
ugguaucucggaagcuucu

SEQ ID NO: 1609119 - RNA, 19 nt, Artificial Sequence
  Description of Artificial Sequence: Synthetic oligonucleotide
  Sense strand starting at position 1287 of SEQ ID NO: 1560572
ccaagaaccauguggaagu

SEQ ID NO: 1609120 - RNA, 19 nt, Artificial Sequence
  Description of Artificial Sequence: Synthetic oligonucleotide
  Antisense strand to SEQ ID NO: 1609119
acuuccacaugguucuugg

SEQ ID NO: 1609121 - RNA, 19 nt, Artificial Sequence
  Description of Artificial Sequence: Synthetic oligonucleotide
  Sense strand starting at position 1335 of SEQ ID NO: 1560572
augguucggcccuguucaa

SEQ ID NO: 1609122 - RNA, 19 nt, Artificial Sequence
  Description of Artificial Sequence: Synthetic oligonucleotide
  Antisense strand to SEQ ID NO: 1609121
uugaacagggccgaaccau

SEQ ID NO: 1609123 - RNA, 19 nt, Artificial Sequence
  Description of Artificial Sequence: Synthetic oligonucleotide
  Sense strand starting at position 1375 of SEQ ID NO: 1560572
gcacaugucagaggauguu

SEQ ID NO: 1609124 - RNA, 19 nt, Artificial Sequence
  Description of Artificial Sequence: Synthetic oligonucleotide
  Antisense strand to SEQ ID NO: 1609123
aacauccucugacaugugc

SEQ ID NO: 1609125 - RNA, 19 nt, Artificial Sequence
  Description of Artificial Sequence: Synthetic oligonucleotide
  Sense strand starting at position 1720 of SEQ ID NO: 1560572
agcugaagccauggagauu

SEQ ID NO: 1609126 - RNA, 19 nt, Artificial Sequence
  Description of Artificial Sequence: Synthetic oligonucleotide
  Antisense strand to SEQ ID NO: 1609125
aaucuccauggcuucagcu

SEQ ID NO: 1609127 - RNA, 19 nt, Artificial Sequence
  Description of Artificial Sequence: Synthetic oligonucleotide
  Sense strand starting at position 1721 of SEQ ID NO: 1560572
gcugaagccauggagauua

SEQ ID NO: 1609128 - RNA, 19 nt, Artificial Sequence
  Description of Artificial Sequence: Synthetic oligonucleotide
  Antisense strand to SEQ ID NO: 1609127
uaaucuccauggcuucagc

SEQ ID NO: 1609129 - RNA, 19 nt, Artificial Sequence
  Description of Artificial Sequence: Synthetic oligonucleotide
  Sense strand starting at position 2252 of SEQ ID NO: 1560572
gaaucugugucucguucua

SEQ ID NO: 1609130 - RNA, 19 nt, Artificial Sequence
  Description of Artificial Sequence: Synthetic oligonucleotide
  Antisense strand to SEQ ID NO: 1609129
uagaacgagacacagauuc

SEQ ID NO: 1609131 - RNA, 19 nt, Artificial Sequence
  Description of Artificial Sequence: Synthetic oligonucleotide
  Sense strand starting at position 2259 of SEQ ID NO: 1560572
ugucucguucuauguguca

SEQ ID NO: 1609132 - RNA, 19 nt, Artificial Sequence
  Description of Artificial Sequence: Synthetic oligonucleotide
  Antisense strand to SEQ ID NO: 1609131
ugacacauagaacgagaca

SEQ ID NO: 1609133 - RNA, 19 nt, Artificial Sequence
  Description of Artificial Sequence: Synthetic oligonucleotide
  Sense strand starting at position 2261 of SEQ ID NO: 1560572
ucucguucuaugugucauu

SEQ ID NO: 1609134 - RNA, 19 nt, Artificial Sequence
  Description of Artificial Sequence: Synthetic oligonucleotide
  Antisense strand to SEQ ID NO: 1609133
aaugacacauagaacgaga

SEQ ID NO: 1609135 - RNA, 19 nt, Artificial Sequence
  Description of Artificial Sequence: Synthetic oligonucleotide
  Sense strand starting at position 2270 of SEQ ID NO: 1560572
augugucauucccugucau

SEQ ID NO: 1609136 - RNA, 19 nt, Artificial Sequence
  Description of Artificial Sequence: Synthetic oligonucleotide
  Antisense strand to SEQ ID NO: 1609135
augacagggaaugacacau

SEQ ID NO: 1609137 - RNA, 19 nt, Artificial Sequence
  Description of Artificial Sequence: Synthetic oligonucleotide
  Sense strand starting at position 2271 of SEQ ID NO: 1560572
ugugucauucccugucauu

SEQ ID NO: 1609138 - RNA, 19 nt, Artificial Sequence
  Description of Artificial Sequence: Synthetic oligonucleotide
  Antisense strand to SEQ ID NO: 1609137
aaugacagggaaugacaca

SEQ ID NO: 1609139 - RNA, 19 nt, Artificial Sequence
  Description of Artificial Sequence: Synthetic oligonucleotide
  Sense strand starting at position 2293 of SEQ ID NO: 1560572
uaauucugacuuuguguga

SEQ ID NO: 1609140 - RNA, 19 nt, Artificial Sequence
  Description of Artificial Sequence: Synthetic oligonucleotide
  Antisense strand to SEQ ID NO: 1609139
ucacacaaagucagaauua

SEQ ID NO: 1609141 - RNA, 19 nt, Artificial Sequence
  Description of Artificial Sequence: Synthetic oligonucleotide
  Sense strand starting at position 2294 of SEQ ID NO: 1560572
aauucugacuuugugugau

SEQ ID NO: 1609142 - RNA, 19 nt, Artificial Sequence
  Description of Artificial Sequence: Synthetic oligonucleotide
  Antisense strand to SEQ ID NO: 1609141
aucacacaaagucagaauu

SEQ ID NO: 1609143 - RNA, 19 nt, Artificial Sequence
  Description of Artificial Sequence: Synthetic oligonucleotide
  Sense strand starting at position 2296 of SEQ ID NO: 1560572
uucugacuuugugugauuu

SEQ ID NO: 1609144 - RNA, 19 nt, Artificial Sequence
  Description of Artificial Sequence: Synthetic oligonucleotide
  Antisense strand to SEQ ID NO: 1609143
aaaucacacaaagucagaa

SEQ ID NO: 1609145 - RNA, 19 nt, Artificial Sequence
  Description of Artificial Sequence: Synthetic oligonucleotide
  Sense strand starting at position 2467 of SEQ ID NO: 1560572
ggcaauuugucuugaaauc

SEQ ID NO: 1609146 - RNA, 19 nt, Artificial Sequence
  Description of Artificial Sequence: Synthetic oligonucleotide
  Antisense strand to SEQ ID NO: 1609145
gauuucaagacaaauugcc

SEQ ID NO: 1609147 - RNA, 19 nt, Artificial Sequence
  Description of Artificial Sequence: Synthetic oligonucleotide
  Sense strand starting at position 3308 of SEQ ID NO: 1560572
gggagauggucucuccuca

SEQ ID NO: 1609148 - RNA, 19 nt, Artificial Sequence
  Description of Artificial Sequence: Synthetic oligonucleotide
  Antisense strand to SEQ ID NO: 1609147
ugaggagagaccaucuccc

SEQ ID NO: 1609149 - RNA, 19 nt, Artificial Sequence
  Description of Artificial Sequence: Synthetic oligonucleotide
  Sense strand starting at position 3385 of SEQ ID NO: 1560572
ggcugagcucuccugcuuu

SEQ ID NO: 1609150 - RNA, 19 nt, Artificial Sequence
  Description of Artificial Sequence: Synthetic oligonucleotide
  Antisense strand to SEQ ID NO: 1609149
aaagcaggagagcucagcc

SEQ ID NO: 1609151 - RNA, 19 nt, Artificial Sequence
  Description of Artificial Sequence: Synthetic oligonucleotide
  Sense strand starting at position 3420 of SEQ ID NO: 1560572
cccuucgucuuauuagaac

SEQ ID NO: 1609152 - RNA, 19 nt, Artificial Sequence
  Description of Artificial Sequence: Synthetic oligonucleotide
  Antisense strand to SEQ ID NO: 1609151
guucuaauaagacgaaggg

SEQ ID NO: 1609153 - RNA, 19 nt, Artificial Sequence
  Description of Artificial Sequence: Synthetic oligonucleotide
  Sense strand starting at position 3423 of SEQ ID NO: 1560572
uucgucuuauuagaacaaa

SEQ ID NO: 1609154 - RNA, 19 nt, Artificial Sequence
  Description of Artificial Sequence: Synthetic oligonucleotide
  Antisense strand to SEQ ID NO: 1609153
uuuguucuaauaagacgaa

SEQ ID NO: 1609155 - RNA, 19 nt, Artificial Sequence
  Description of Artificial Sequence: Synthetic oligonucleotide
  Sense strand starting at position 3441 of SEQ ID NO: 1560572
agccacgucccacauuaaa

SEQ ID NO: 1609156 - RNA, 19 nt, Artificial Sequence
  Description of Artificial Sequence: Synthetic oligonucleotide
  Antisense strand to SEQ ID NO: 1609155
uuuaaugugggacguggcu

SEQ ID NO: 1609157 - RNA, 19 nt, Artificial Sequence
  Description of Artificial Sequence: Synthetic oligonucleotide
  Sense strand starting at position 3495 of SEQ ID NO: 1560572
gcaguuggcuaguggaaag

SEQ ID NO: 1609158 - RNA, 19 nt, Artificial Sequence
  Description of Artificial Sequence: Synthetic oligonucleotide
  Antisense strand to SEQ ID NO: 1609157
cuuuccacuagccaacugc

SEQ ID NO: 1609159 - RNA, 19 nt, Artificial Sequence
  Description of Artificial Sequence: Synthetic oligonucleotide
  Sense strand starting at position 3507 of SEQ ID NO: 1560572
uggaaagaaugcuacguuu

SEQ ID NO: 1609160 - RNA, 19 nt, Artificial Sequence
  Description of Artificial Sequence: Synthetic oligonucleotide
  Antisense strand to SEQ ID NO: 1609159
aaacguagcauucuuucca

SEQ ID NO: 1609161 - RNA, 19 nt, Artificial Sequence
  Description of Artificial Sequence: Synthetic oligonucleotide
  Sense strand starting at position 3545 of SEQ ID NO: 1560572
ggucauaaauguugacuuu

SEQ ID NO: 1609162 - RNA, 19 nt, Artificial Sequence
  Description of Artificial Sequence: Synthetic oligonucleotide
  Antisense strand to SEQ ID NO: 1609161
aaagucaacauuuaugacc

SEQ ID NO: 1609163 - RNA, 19 nt, Artificial Sequence
  Description of Artificial Sequence: Synthetic oligonucleotide
  Sense strand starting at position 3658 of SEQ ID NO: 1560572
uuucuauuaugccagauga

SEQ ID NO: 1609164 - RNA, 19 nt, Artificial Sequence
  Description of Artificial Sequence: Synthetic oligonucleotide
  Antisense strand to SEQ ID NO: 1609163
ucaucuggcauaauagaaa

SEQ ID NO: 1609165 - RNA, 19 nt, Artificial Sequence
  Description of Artificial Sequence: Synthetic oligonucleotide
  Sense strand starting at position 3675 of SEQ ID NO: 1560572
gaagaaacaugugucuuau

SEQ ID NO: 1609166 - RNA, 19 nt, Artificial Sequence
  Description of Artificial Sequence: Synthetic oligonucleotide
  Antisense strand to SEQ ID NO: 1609165
auaagacacauguuucuuc

SEQ ID NO: 1609167 - RNA, 19 nt, Artificial Sequence
  Description of Artificial Sequence: Synthetic oligonucleotide
  Sense strand starting at position 3685 of SEQ ID NO: 1560572
gugucuuauuuauauugcu

SEQ ID NO: 1609168 - RNA, 19 nt, Artificial Sequence
  Description of Artificial Sequence: Synthetic oligonucleotide
  Antisense strand to SEQ ID NO: 1609167
agcaauauaaauaagacac

SEQ ID NO: 1609169 - RNA, 19 nt, Artificial Sequence
  Description of Artificial Sequence: Synthetic oligonucleotide
  Sense strand starting at position 3916 of SEQ ID NO: 1560572
cucgaaaucugagcucaag

SEQ ID NO: 1609170 - RNA, 19 nt, Artificial Sequence
  Description of Artificial Sequence: Synthetic oligonucleotide
  Antisense strand to SEQ ID NO: 1609169
cuugagcucagauuucgag

SEQ ID NO: 1609171 - RNA, 19 nt, Artificial Sequence
  Description of Artificial Sequence: Synthetic oligonucleotide
  Sense strand starting at position 302 of SEQ ID NO: 1560573
agcugaagccauggagauu

SEQ ID NO: 1609172 - RNA, 19 nt, Artificial Sequence
  Description of Artificial Sequence: Synthetic oligonucleotide
  Antisense strand to SEQ ID NO: 1609171
aaucuccauggcuucagcu

SEQ ID NO: 1609173 - RNA, 19 nt, Artificial Sequence
  Description of Artificial Sequence: Synthetic oligonucleotide
  Sense strand starting at position 303 of SEQ ID NO: 1560573
gcugaagccauggagauua

SEQ ID NO: 1609174 - RNA, 19 nt, Artificial Sequence
  Description of Artificial Sequence: Synthetic oligonucleotide
  Antisense strand to SEQ ID NO: 1609173
uaaucuccauggcuucagc

SEQ ID NO: 1609175 - RNA, 19 nt, Artificial Sequence
  Description of Artificial Sequence: Synthetic oligonucleotide
  Sense strand starting at position 843 of SEQ ID NO: 1560573
ucucguucuaugugucauu

SEQ ID NO: 1609176 - RNA, 19 nt, Artificial Sequence
  Description of Artificial Sequence: Synthetic oligonucleotide
  Antisense strand to SEQ ID NO: 1609175
aaugacacauagaacgaga

SEQ ID NO: 1609177 - RNA, 19 nt, Artificial Sequence
  Description of Artificial Sequence: Synthetic oligonucleotide
  Sense strand starting at position 852 of SEQ ID NO: 1560573
augugucauucccugucau

SEQ ID NO: 1609178 - RNA, 19 nt, Artificial Sequence
  Description of Artificial Sequence: Synthetic oligonucleotide
  Antisense strand to SEQ ID NO: 1609177
augacagggaaugacacau

SEQ ID NO: 1609179 - RNA, 19 nt, Artificial Sequence
  Description of Artificial Sequence: Synthetic oligonucleotide
  Sense strand starting at position 853 of SEQ ID NO: 1560573
ugugucauucccugucauu

SEQ ID NO: 1609180 - RNA, 19 nt, Artificial Sequence
  Description of Artificial Sequence: Synthetic oligonucleotide
  Antisense strand to SEQ ID NO: 1609179
aaugacagggaaugacaca

SEQ ID NO: 1609181 - RNA, 19 nt, Artificial Sequence
  Description of Artificial Sequence: Synthetic oligonucleotide
  Sense strand starting at position 875 of SEQ ID NO: 1560573
uaauucugacuuuguguga

SEQ ID NO: 1609182 - RNA, 19 nt, Artificial Sequence
  Description of Artificial Sequence: Synthetic oligonucleotide
  Antisense strand to SEQ ID NO: 1609181
ucacacaaagucagaauua

SEQ ID NO: 1609183 - RNA, 19 nt, Artificial Sequence
  Description of Artificial Sequence: Synthetic oligonucleotide
  Sense strand starting at position 876 of SEQ ID NO: 1560573
aauucugacuuugugugau

SEQ ID NO: 1609184 - RNA, 19 nt, Artificial Sequence
  Description of Artificial Sequence: Synthetic oligonucleotide
  Antisense strand to SEQ ID NO: 1609183
aucacacaaagucagaauu

SEQ ID NO: 1609185 - RNA, 19 nt, Artificial Sequence
  Description of Artificial Sequence: Synthetic oligonucleotide
  Sense strand starting at position 878 of SEQ ID NO: 1560573
uucugacuuugugugauuu

SEQ ID NO: 1609186 - RNA, 19 nt, Artificial Sequence
  Description of Artificial Sequence: Synthetic oligonucleotide
  Antisense strand to SEQ ID NO: 1609185
aaaucacacaaagucagaa

SEQ ID NO: 1609187 - RNA, 19 nt, Artificial Sequence
  Description of Artificial Sequence: Synthetic oligonucleotide
  Sense strand starting at position 1049 of SEQ ID NO: 1560573
ggcaauuugucuugaaauc

SEQ ID NO: 1609188 - RNA, 19 nt, Artificial Sequence
  Description of Artificial Sequence: Synthetic oligonucleotide
  Antisense strand to SEQ ID NO: 1609187
gauuucaagacaaauugcc

SEQ ID NO: 1609189 - RNA, 19 nt, Artificial Sequence
  Description of Artificial Sequence: Synthetic oligonucleotide
  Sense strand starting at position 1890 of SEQ ID NO: 1560573
gggagauggucucuccuca

SEQ ID NO: 1609190 - RNA, 19 nt, Artificial Sequence
  Description of Artificial Sequence: Synthetic oligonucleotide
  Antisense strand to SEQ ID NO: 1609189
ugaggagagaccaucuccc

SEQ ID NO: 1609191 - RNA, 19 nt, Artificial Sequence
  Description of Artificial Sequence: Synthetic oligonucleotide
  Sense strand starting at position 1967 of SEQ ID NO: 1560573
ggcugagcucuccugcuuu

SEQ ID NO: 1609192 - RNA, 19 nt, Artificial Sequence
  Description of Artificial Sequence: Synthetic oligonucleotide
  Antisense strand to SEQ ID NO: 1609191
aaagcaggagagcucagcc

SEQ ID NO: 1609193 - RNA, 19 nt, Artificial Sequence
  Description of Artificial Sequence: Synthetic oligonucleotide
  Sense strand starting at position 2002 of SEQ ID NO: 1560573
cccuucgucuuauuagaac

SEQ ID NO: 1609194 - RNA, 19 nt, Artificial Sequence
  Description of Artificial Sequence: Synthetic oligonucleotide
  Antisense strand to SEQ ID NO: 1609193
guucuaauaagacgaaggg

SEQ ID NO: 1609195 - RNA, 19 nt, Artificial Sequence
  Description of Artificial Sequence: Synthetic oligonucleotide
  Sense strand starting at position 2023 of SEQ ID NO: 1560573
agccacgucccacauuaaa

SEQ ID NO: 1609196 - RNA, 19 nt, Artificial Sequence
  Description of Artificial Sequence: Synthetic oligonucleotide
  Antisense strand to SEQ ID NO: 1609195
uuuaaugugggacguggcu

SEQ ID NO: 1609197 - RNA, 19 nt, Artificial Sequence
  Description of Artificial Sequence: Synthetic oligonucleotide
  Sense strand starting at position 2257 of SEQ ID NO: 1560573
gaagaaacaugugucuuau

SEQ ID NO: 1609198 - RNA, 19 nt, Artificial Sequence
  Description of Artificial Sequence: Synthetic oligonucleotide
  Antisense strand to SEQ ID NO: 1609197
auaagacacauguuucuuc

SEQ ID NO: 1609199 - RNA, 19 nt, Artificial Sequence
  Description of Artificial Sequence: Synthetic oligonucleotide
  Sense strand starting at position 2267 of SEQ ID NO: 1560573
gugucuuauuuauauugcu

SEQ ID NO: 1609200 - RNA, 19 nt, Artificial Sequence
  Description of Artificial Sequence: Synthetic oligonucleotide
  Antisense strand to SEQ ID NO: 1609199
agcaauauaaauaagacac

SEQ ID NO: 1609201 - RNA, 19 nt, Artificial Sequence
  Description of Artificial Sequence: Synthetic oligonucleotide
  Sense strand starting at position 2498 of SEQ ID NO: 1560573
cucgaaaucugagcucaag

SEQ ID NO: 1609202 - RNA, 19 nt, Artificial Sequence
  Description of Artificial Sequence: Synthetic oligonucleotide
  Antisense strand to SEQ ID NO: 1609201
cuugagcucagauuucgag

SEQ ID NO: 1609203 - RNA, 19 nt, Artificial Sequence
  Description of Artificial Sequence: Synthetic oligonucleotide
  Sense strand starting at position 2570 of SEQ ID NO: 1560573
gcacccggccuauauuauu

SEQ ID NO: 1609204 - RNA, 19 nt, Artificial Sequence
  Description of Artificial Sequence: Synthetic oligonucleotide
  Antisense strand to SEQ ID NO: 1609203
aauaauauaggccgggugc

SEQ ID NO: 1609205 - RNA, 19 nt, Artificial Sequence
  Description of Artificial Sequence: Synthetic oligonucleotide
  Sense strand starting at position 2614 of SEQ ID NO: 1560573
cugaguaacuacucaggga

SEQ ID NO: 1609206 - RNA, 19 nt, Artificial Sequence
  Description of Artificial Sequence: Synthetic oligonucleotide
  Antisense strand to SEQ ID NO: 1609205
ucccugaguaguuacucag

SEQ ID NO: 1609207 - RNA, 19 nt, Artificial Sequence
  Description of Artificial Sequence: Synthetic oligonucleotide
  Sense strand starting at position 2617 of SEQ ID NO: 1560573
aguaacuacucagggaaga

SEQ ID NO: 1609208 - RNA, 19 nt, Artificial Sequence
  Description of Artificial Sequence: Synthetic oligonucleotide
  Antisense strand to SEQ ID NO: 1609207
ucuucccugaguaguuacu

SEQ ID NO: 1609209 - RNA, 19 nt, Artificial Sequence
  Description of Artificial Sequence: Synthetic oligonucleotide
  Sense strand starting at position 2630 of SEQ ID NO: 1560573
ggaagacccucauccuauu

SEQ ID NO: 1609210 - RNA, 19 nt, Artificial Sequence
  Description of Artificial Sequence: Synthetic oligonucleotide
  Antisense strand to SEQ ID NO: 1609209
aauaggaugagggucuucc

SEQ ID NO: 1609211 - RNA, 19 nt, Artificial Sequence
  Description of Artificial Sequence: Synthetic oligonucleotide
  Sense strand starting at position 2958 of SEQ ID NO: 1560573
ggccuuauuugagcucugu

SEQ ID NO: 1609212 - RNA, 19 nt, Artificial Sequence
  Description of Artificial Sequence: Synthetic oligonucleotide
  Antisense strand to SEQ ID NO: 1609211
acagagcucaaauaaggcc

SEQ ID NO: 1609213 - RNA, 19 nt, Artificial Sequence
  Description of Artificial Sequence: Synthetic oligonucleotide
  Sense strand starting at position 2962 of SEQ ID NO: 1560573
uuauuugagcucuguuucu

SEQ ID NO: 1609214 - RNA, 19 nt, Artificial Sequence
  Description of Artificial Sequence: Synthetic oligonucleotide
  Antisense strand to SEQ ID NO: 1609213
agaaacagagcucaaauaa

SEQ ID NO: 1609215 - RNA, 19 nt, Artificial Sequence
  Description of Artificial Sequence: Synthetic oligonucleotide
  Sense strand starting at position 3129 of SEQ ID NO: 1560573
gcuggcaggaguuaaaguu

SEQ ID NO: 1609216 - RNA, 19 nt, Artificial Sequence
  Description of Artificial Sequence: Synthetic oligonucleotide
  Antisense strand to SEQ ID NO: 1609215
aacuuuaacuccugccagc

SEQ ID NO: 1609217 - RNA, 19 nt, Artificial Sequence
  Description of Artificial Sequence: Synthetic oligonucleotide
  Sense strand starting at position 3137 of SEQ ID NO: 1560573
gaguuaaaguuccaagaag

SEQ ID NO: 1609218 - RNA, 19 nt, Artificial Sequence
  Description of Artificial Sequence: Synthetic oligonucleotide
  Antisense strand to SEQ ID NO: 1609217
cuucuuggaacuuuaacuc

SEQ ID NO: 1609219 - RNA, 19 nt, Artificial Sequence
  Description of Artificial Sequence: Synthetic oligonucleotide
  Sense strand starting at position 3267 of SEQ ID NO: 1560573
gucaguuguuccucaugau

SEQ ID NO: 1609220 - RNA, 19 nt, Artificial Sequence
  Description of Artificial Sequence: Synthetic oligonucleotide
  Antisense strand to SEQ ID NO: 1609219
aucaugaggaacaacugac

SEQ ID NO: 1609221 - RNA, 19 nt, Artificial Sequence
  Description of Artificial Sequence: Synthetic oligonucleotide
  Sense strand starting at position 3268 of SEQ ID NO: 1560573
ucaguuguuccucaugauc

SEQ ID NO: 1609222 - RNA, 19 nt, Artificial Sequence
  Description of Artificial Sequence: Synthetic oligonucleotide
  Antisense strand to SEQ ID NO: 1609221
gaucaugaggaacaacuga

SEQ ID NO: 1609223 - RNA, 19 nt, Artificial Sequence
  Description of Artificial Sequence: Synthetic oligonucleotide
  Sense strand starting at position 3291 of SEQ ID NO: 1560573
ggauccaguccacauacuu

SEQ ID NO: 1609224 - RNA, 19 nt, Artificial Sequence
  Description of Artificial Sequence: Synthetic oligonucleotide
  Antisense strand to SEQ ID NO: 1609223
aaguauguggacuggaucc

SEQ ID NO: 1609225 - RNA, 19 nt, Artificial Sequence
  Description of Artificial Sequence: Synthetic oligonucleotide
  Sense strand starting at position 3308 of SEQ ID NO: 1560573
uugcaaauauagguguaga

SEQ ID NO: 1609226 - RNA, 19 nt, Artificial Sequence
  Description of Artificial Sequence: Synthetic oligonucleotide
  Antisense strand to SEQ ID NO: 1609225
ucuacaccuauauuugcaa

SEQ ID NO: 1609227 - RNA, 19 nt, Artificial Sequence
  Description of Artificial Sequence: Synthetic oligonucleotide
  Sense strand starting at position 3319 of SEQ ID NO: 1560573
gguguagacuccagggaug

SEQ ID NO: 1609228 - RNA, 19 nt, Artificial Sequence
  Description of Artificial Sequence: Synthetic oligonucleotide
  Antisense strand to SEQ ID NO: 1609227
caucccuggagucuacacc

SEQ ID NO: 1609229 - RNA, 19 nt, Artificial Sequence
  Description of Artificial Sequence: Synthetic oligonucleotide
  Sense strand starting at position 3519 of SEQ ID NO: 1560573
cuccaagucuggucauuag

SEQ ID NO: 1609230 - RNA, 19 nt, Artificial Sequence
  Description of Artificial Sequence: Synthetic oligonucleotide
  Antisense strand to SEQ ID NO: 1609229
cuaaugaccagacuuggag

SEQ ID NO: 1609231 - RNA, 19 nt, Artificial Sequence
  Description of Artificial Sequence: Synthetic oligonucleotide
  Sense strand starting at position 3522 of SEQ ID NO: 1560573
caagucuggucauuagaca

SEQ ID NO: 1609232 - RNA, 19 nt, Artificial Sequence
  Description of Artificial Sequence: Synthetic oligonucleotide
  Antisense strand to SEQ ID NO: 1609231
ugucuaaugaccagacuug

SEQ ID NO: 1609233 - RNA, 19 nt, Artificial Sequence
  Description of Artificial Sequence: Synthetic oligonucleotide
  Sense strand starting at position 3553 of SEQ ID NO: 1560573
cacuuucccggaggacaau

SEQ ID NO: 1609234 - RNA, 19 nt, Artificial Sequence
  Description of Artificial Sequence: Synthetic oligonucleotide
  Antisense strand to SEQ ID NO: 1609233
auuguccuccgggaaagug

SEQ ID NO: 1609235 - RNA, 19 nt, Artificial Sequence
  Description of Artificial Sequence: Synthetic oligonucleotide
  Sense strand starting at position 3611 of SEQ ID NO: 1560573
gggccaaucccagggaaga

SEQ ID NO: 1609236 - RNA, 19 nt, Artificial Sequence
  Description of Artificial Sequence: Synthetic oligonucleotide
  Antisense strand to SEQ ID NO: 1609235
ucuucccugggauuggccc

SEQ ID NO: 1609237 - RNA, 19 nt, Artificial Sequence
  Description of Artificial Sequence: Synthetic oligonucleotide
  Sense strand starting at position 3654 of SEQ ID NO: 1560573
agguucucucaaggacaau

SEQ ID NO: 1609238 - RNA, 19 nt, Artificial Sequence
  Description of Artificial Sequence: Synthetic oligonucleotide
  Antisense strand to SEQ ID NO: 1609237
auuguccuugagagaaccu

SEQ ID NO: 1609239 - RNA, 19 nt, Artificial Sequence
  Description of Artificial Sequence: Synthetic oligonucleotide
  Sense strand starting at position 3700 of SEQ ID NO: 1560573
agagcacagucauuaauga

SEQ ID NO: 1609240 - RNA, 19 nt, Artificial Sequence
  Description of Artificial Sequence: Synthetic oligonucleotide
  Antisense strand to SEQ ID NO: 1609239
ucauuaaugacugugcucu

SEQ ID NO: 1609241 - RNA, 19 nt, Artificial Sequence
  Description of Artificial Sequence: Synthetic oligonucleotide
  Sense strand starting at position 3746 of SEQ ID NO: 1560573
acauaaagagucgagcauu

SEQ ID NO: 1609242 - RNA, 19 nt, Artificial Sequence
  Description of Artificial Sequence: Synthetic oligonucleotide
  Antisense strand to SEQ ID NO: 1609241
aaugcucgacucuuuaugu

SEQ ID NO: 1609243 - RNA, 19 nt, Artificial Sequence
  Description of Artificial Sequence: Synthetic oligonucleotide
  Sense strand starting at position 3760 of SEQ ID NO: 1560573
gcauucucucaaggacaau

SEQ ID NO: 1609244 - RNA, 19 nt, Artificial Sequence
  Description of Artificial Sequence: Synthetic oligonucleotide
  Antisense strand to SEQ ID NO: 1609243
auuguccuugagagaaugc

SEQ ID NO: 1609245 - RNA, 19 nt, Artificial Sequence
  Description of Artificial Sequence: Synthetic oligonucleotide
  Sense strand starting at position 3906 of SEQ ID NO: 1560573
gggagagagugccaucaaa

SEQ ID NO: 1609246 - RNA, 19 nt, Artificial Sequence
  Description of Artificial Sequence: Synthetic oligonucleotide
  Antisense strand to SEQ ID NO: 1609245
uuugauggcacucucuccc

SEQ ID NO: 1609247 - RNA, 19 nt, Artificial Sequence
  Description of Artificial Sequence: Synthetic oligonucleotide
  Sense strand starting at position 3965 of SEQ ID NO: 1560573
agcacagaguucucucaag

SEQ ID NO: 1609248 - RNA, 19 nt, Artificial Sequence
  Description of Artificial Sequence: Synthetic oligonucleotide
  Antisense strand to SEQ ID NO: 1609247
cuugagagaacucugugcu

SEQ ID NO: 1609249 - RNA, 19 nt, Artificial Sequence
  Description of Artificial Sequence: Synthetic oligonucleotide
  Sense strand starting at position 3971 of SEQ ID NO: 1560573
gaguucucucaaggacaau

SEQ ID NO: 1609250 - RNA, 19 nt, Artificial Sequence
  Description of Artificial Sequence: Synthetic oligonucleotide
  Antisense strand to SEQ ID NO: 1609249
auuguccuugagagaacuc

SEQ ID NO: 1609251 - RNA, 19 nt, Artificial Sequence
  Description of Artificial Sequence: Synthetic oligonucleotide
  Sense strand starting at position 29 of SEQ ID NO: 1560574
cagguuccucugggaacaa

SEQ ID NO: 1609252 - RNA, 19 nt, Artificial Sequence
  Description of Artificial Sequence: Synthetic oligonucleotide
  Antisense strand to SEQ ID NO: 1609251
uuguucccagaggaaccug

SEQ ID NO: 1609253 - RNA, 19 nt, Artificial Sequence
  Description of Artificial Sequence: Synthetic oligonucleotide
  Sense strand starting at position 258 of SEQ ID NO: 1560574
agaagcuuccgagauacca

SEQ ID NO: 1609254 - RNA, 19 nt, Artificial Sequence
  Description of Artificial Sequence: Synthetic oligonucleotide
  Antisense strand to SEQ ID NO: 1609253
ugguaucucggaagcuucu

SEQ ID NO: 1609255 - RNA, 19 nt, Artificial Sequence
  Description of Artificial Sequence: Synthetic oligonucleotide
  Sense strand starting at position 274 of SEQ ID NO: 1560574
ccaagaaccauguggaagu

SEQ ID NO: 1609256 - RNA, 19 nt, Artificial Sequence
  Description of Artificial Sequence: Synthetic oligonucleotide
  Antisense strand to SEQ ID NO: 1609255
acuuccacaugguucuugg

SEQ ID NO: 1609257 - RNA, 19 nt, Artificial Sequence
  Description of Artificial Sequence: Synthetic oligonucleotide
  Sense strand starting at position 322 of SEQ ID NO: 1560574
augguucggcccuguucaa

SEQ ID NO: 1609258 - RNA, 19 nt, Artificial Sequence
  Description of Artificial Sequence: Synthetic oligonucleotide
  Antisense strand to SEQ ID NO: 1609257
uugaacagggccgaaccau

SEQ ID NO: 1609259 - RNA, 19 nt, Artificial Sequence
  Description of Artificial Sequence: Synthetic oligonucleotide
  Sense strand starting at position 362 of SEQ ID NO: 1560574
gcacaugucagaggauguu

SEQ ID NO: 1609260 - RNA, 19 nt, Artificial Sequence
  Description of Artificial Sequence: Synthetic oligonucleotide
  Antisense strand to SEQ ID NO: 1609259
aacauccucugacaugugc

SEQ ID NO: 1609261 - RNA, 19 nt, Artificial Sequence
  Description of Artificial Sequence: Synthetic oligonucleotide
  Sense strand starting at position 707 of SEQ ID NO: 1560574
agcugaagccauggagauu

SEQ ID NO: 1609262 - RNA, 19 nt, Artificial Sequence
  Description of Artificial Sequence: Synthetic oligonucleotide
  Antisense strand to SEQ ID NO: 1609261
aaucuccauggcuucagcu

SEQ ID NO: 1609263 - RNA, 19 nt, Artificial Sequence
  Description of Artificial Sequence: Synthetic oligonucleotide
  Sense strand starting at position 708 of SEQ ID NO: 1560574
gcugaagccauggagauua

SEQ ID NO: 1609264 - RNA, 19 nt, Artificial Sequence
  Description of Artificial Sequence: Synthetic oligonucleotide
  Antisense strand to SEQ ID NO: 1609263
uaaucuccauggcuucagc

SEQ ID NO: 1609265 - RNA, 19 nt, Artificial Sequence
  Description of Artificial Sequence: Synthetic oligonucleotide
  Sense strand starting at position 1248 of SEQ ID NO: 1560574
ucucguucuaugugucauu

SEQ ID NO: 1609266 - RNA, 19 nt, Artificial Sequence
  Description of Artificial Sequence: Synthetic oligonucleotide
  Antisense strand to SEQ ID NO: 1609265
aaugacacauagaacgaga

SEQ ID NO: 1609267 - RNA, 19 nt, Artificial Sequence
  Description of Artificial Sequence: Synthetic oligonucleotide
  Sense strand starting at position 1257 of SEQ ID NO: 1560574
augugucauucccugucau

SEQ ID NO: 1609268 - RNA, 19 nt, Artificial Sequence
  Description of Artificial Sequence: Synthetic oligonucleotide
  Antisense strand to SEQ ID NO: 1609267
augacagggaaugacacau

SEQ ID NO: 1609269 - RNA, 19 nt, Artificial Sequence
  Description of Artificial Sequence: Synthetic oligonucleotide
  Sense strand starting at position 1258 of SEQ ID NO: 1560574
ugugucauucccugucauu

SEQ ID NO: 1609270 - RNA, 19 nt, Artificial Sequence
  Description of Artificial Sequence: Synthetic oligonucleotide
  Antisense strand to SEQ ID NO: 1609269
aaugacagggaaugacaca

SEQ ID NO: 1609271 - RNA, 19 nt, Artificial Sequence
  Description of Artificial Sequence: Synthetic oligonucleotide
  Sense strand starting at position 1280 of SEQ ID NO: 1560574
uaauucugacuuuguguga

SEQ ID NO: 1609272 - RNA, 19 nt, Artificial Sequence
  Description of Artificial Sequence: Synthetic oligonucleotide
  Antisense strand to SEQ ID NO: 1609271
ucacacaaagucagaauua

SEQ ID NO: 1609273 - RNA, 19 nt, Artificial Sequence
  Description of Artificial Sequence: Synthetic oligonucleotide
  Sense strand starting at position 1281 of SEQ ID NO: 1560574
aauucugacuuugugugau

SEQ ID NO: 1609274 - RNA, 19 nt, Artificial Sequence
  Description of Artificial Sequence: Synthetic oligonucleotide
  Antisense strand to SEQ ID NO: 1609273
aucacacaaagucagaauu

SEQ ID NO: 1609275 - RNA, 19 nt, Artificial Sequence
  Description of Artificial Sequence: Synthetic oligonucleotide
  Sense strand starting at position 1283 of SEQ ID NO: 1560574
uucugacuuugugugauuu

SEQ ID NO: 1609276 - RNA, 19 nt, Artificial Sequence
  Description of Artificial Sequence: Synthetic oligonucleotide
  Antisense strand to SEQ ID NO: 1609275
aaaucacacaaagucagaa

SEQ ID NO: 1609277 - RNA, 19 nt, Artificial Sequence
  Description of Artificial Sequence: Synthetic oligonucleotide
  Sense strand starting at position 1454 of SEQ ID NO: 1560574
ggcaauuugucuugaaauc

SEQ ID NO: 1609278 - RNA, 19 nt, Artificial Sequence
  Description of Artificial Sequence: Synthetic oligonucleotide
  Antisense strand to SEQ ID NO: 1609277
gauuucaagacaaauugcc

SEQ ID NO: 1609279 - RNA, 19 nt, Artificial Sequence
  Description of Artificial Sequence: Synthetic oligonucleotide
  Sense strand starting at position 2295 of SEQ ID NO: 1560574
gggagauggucucuccuca

SEQ ID NO: 1609280 - RNA, 19 nt, Artificial Sequence
  Description of Artificial Sequence: Synthetic oligonucleotide
  Antisense strand to SEQ ID NO: 1609279
ugaggagagaccaucuccc

SEQ ID NO: 1609281 - RNA, 19 nt, Artificial Sequence
  Description of Artificial Sequence: Synthetic oligonucleotide
  Sense strand starting at position 2372 of SEQ ID NO: 1560574
ggcugagcucuccugcuuu

SEQ ID NO: 1609282 - RNA, 19 nt, Artificial Sequence
  Description of Artificial Sequence: Synthetic oligonucleotide
  Antisense strand to SEQ ID NO: 1609281
aaagcaggagagcucagcc

SEQ ID NO: 1609283 - RNA, 19 nt, Artificial Sequence
  Description of Artificial Sequence: Synthetic oligonucleotide
  Sense strand starting at position 2407 of SEQ ID NO: 1560574
cccuucgucuuauuagaac

SEQ ID NO: 1609284 - RNA, 19 nt, Artificial Sequence
  Description of Artificial Sequence: Synthetic oligonucleotide
  Antisense strand to SEQ ID NO: 1609283
guucuaauaagacgaaggg

SEQ ID NO: 1609285 - RNA, 19 nt, Artificial Sequence
  Description of Artificial Sequence: Synthetic oligonucleotide
  Sense strand starting at position 2410 of SEQ ID NO: 1560574
uucgucuuauuagaacaaa

SEQ ID NO: 1609286 - RNA, 19 nt, Artificial Sequence
  Description of Artificial Sequence: Synthetic oligonucleotide
  Antisense strand to SEQ ID NO: 1609285
uuuguucuaauaagacgaa

SEQ ID NO: 1609287 - RNA, 19 nt, Artificial Sequence
  Description of Artificial Sequence: Synthetic oligonucleotide
  Sense strand starting at position 2428 of SEQ ID NO: 1560574
agccacgucccacauuaaa

SEQ ID NO: 1609288 - RNA, 19 nt, Artificial Sequence
  Description of Artificial Sequence: Synthetic oligonucleotide
  Antisense strand to SEQ ID NO: 1609287
uuuaaugugggacguggcu

SEQ ID NO: 1609289 - RNA, 19 nt, Artificial Sequence
  Description of Artificial Sequence: Synthetic oligonucleotide
  Sense strand starting at position 2645 of SEQ ID NO: 1560574
uuucuauuaugccagauga

SEQ ID NO: 1609290 - RNA, 19 nt, Artificial Sequence
  Description of Artificial Sequence: Synthetic oligonucleotide
  Antisense strand to SEQ ID NO: 1609289
ucaucuggcauaauagaaa

SEQ ID NO: 1609291 - RNA, 19 nt, Artificial Sequence
  Description of Artificial Sequence: Synthetic oligonucleotide
  Sense strand starting at position 2662 of SEQ ID NO: 1560574
gaagaaacaugugucuuau

SEQ ID NO: 1609292 - RNA, 19 nt, Artificial Sequence
  Description of Artificial Sequence: Synthetic oligonucleotide
  Antisense strand to SEQ ID NO: 1609291
auaagacacauguuucuuc

SEQ ID NO: 1609293 - RNA, 19 nt, Artificial Sequence
  Description of Artificial Sequence: Synthetic oligonucleotide
  Sense strand starting at position 2672 of SEQ ID NO: 1560574
gugucuuauuuauauugcu

SEQ ID NO: 1609294 - RNA, 19 nt, Artificial Sequence
  Description of Artificial Sequence: Synthetic oligonucleotide
  Antisense strand to SEQ ID NO: 1609293
agcaauauaaauaagacac

SEQ ID NO: 1609295 - RNA, 19 nt, Artificial Sequence
  Description of Artificial Sequence: Synthetic oligonucleotide
  Sense strand starting at position 2903 of SEQ ID NO: 1560574
cucgaaaucugagcucaag

SEQ ID NO: 1609296 - RNA, 19 nt, Artificial Sequence
  Description of Artificial Sequence: Synthetic oligonucleotide
  Antisense strand to SEQ ID NO: 1609295
cuugagcucagauuucgag

SEQ ID NO: 1609297 - RNA, 19 nt, Artificial Sequence
  Description of Artificial Sequence: Synthetic oligonucleotide
  Sense strand starting at position 2975 of SEQ ID NO: 1560574
gcacccggccuauauuauu

SEQ ID NO: 1609298 - RNA, 19 nt, Artificial Sequence
  Description of Artificial Sequence: Synthetic oligonucleotide
  Antisense strand to SEQ ID NO: 1609297
aauaauauaggccgggugc

SEQ ID NO: 1609299 - RNA, 19 nt, Artificial Sequence
  Description of Artificial Sequence: Synthetic oligonucleotide
  Sense strand starting at position 3019 of SEQ ID NO: 1560574
cugaguaacuacucaggga

SEQ ID NO: 1609300 - RNA, 19 nt, Artificial Sequence
  Description of Artificial Sequence: Synthetic oligonucleotide
  Antisense strand to SEQ ID NO: 1609299
ucccugaguaguuacucag

SEQ ID NO: 1609301 - RNA, 19 nt, Artificial Sequence
  Description of Artificial Sequence: Synthetic oligonucleotide
  Sense strand starting at position 3022 of SEQ ID NO: 1560574
aguaacuacucagggaaga

SEQ ID NO: 1609302 - RNA, 19 nt, Artificial Sequence
  Description of Artificial Sequence: Synthetic oligonucleotide
  Antisense strand to SEQ ID NO: 1609301
ucuucccugaguaguuacu

SEQ ID NO: 1609303 - RNA, 19 nt, Artificial Sequence
  Description of Artificial Sequence: Synthetic oligonucleotide
  Sense strand starting at position 3035 of SEQ ID NO: 1560574
ggaagacccucauccuauu

SEQ ID NO: 1609304 - RNA, 19 nt, Artificial Sequence
  Description of Artificial Sequence: Synthetic oligonucleotide
  Antisense strand to SEQ ID NO: 1609303
aauaggaugagggucuucc

SEQ ID NO: 1609305 - RNA, 19 nt, Artificial Sequence
  Description of Artificial Sequence: Synthetic oligonucleotide
  Sense strand starting at position 3363 of SEQ ID NO: 1560574
ggccuuauuugagcucugu

SEQ ID NO: 1609306 - RNA, 19 nt, Artificial Sequence
  Description of Artificial Sequence: Synthetic oligonucleotide
  Antisense strand to SEQ ID NO: 1609305
acagagcucaaauaaggcc

SEQ ID NO: 1609307 - RNA, 19 nt, Artificial Sequence
  Description of Artificial Sequence: Synthetic oligonucleotide
  Sense strand starting at position 3367 of SEQ ID NO: 1560574
uuauuugagcucuguuucu

SEQ ID NO: 1609308 - RNA, 19 nt, Artificial Sequence
  Description of Artificial Sequence: Synthetic oligonucleotide
  Antisense strand to SEQ ID NO: 1609307
agaaacagagcucaaauaa

SEQ ID NO: 1609309 - RNA, 19 nt, Artificial Sequence
  Description of Artificial Sequence: Synthetic oligonucleotide
  Sense strand starting at position 3379 of SEQ ID NO: 1560574
uguuucuacuccuaugaga

SEQ ID NO: 1609310 - RNA, 19 nt, Artificial Sequence
  Description of Artificial Sequence: Synthetic oligonucleotide
  Antisense strand to SEQ ID NO: 1609309
ucucauaggaguagaaaca

SEQ ID NO: 1609311 - RNA, 19 nt, Artificial Sequence
  Description of Artificial Sequence: Synthetic oligonucleotide
  Sense strand starting at position 3534 of SEQ ID NO: 1560574
gcuggcaggaguuaaaguu

SEQ ID NO: 1609312 - RNA, 19 nt, Artificial Sequence
  Description of Artificial Sequence: Synthetic oligonucleotide
  Antisense strand to SEQ ID NO: 1609311
aacuuuaacuccugccagc

SEQ ID NO: 1609313 - RNA, 19 nt, Artificial Sequence
  Description of Artificial Sequence: Synthetic oligonucleotide
  Sense strand starting at position 3542 of SEQ ID NO: 1560574
gaguuaaaguuccaagaag

SEQ ID NO: 1609314 - RNA, 19 nt, Artificial Sequence
  Description of Artificial Sequence: Synthetic oligonucleotide
  Antisense strand to SEQ ID NO: 1609313
cuucuuggaacuuuaacuc

SEQ ID NO: 1609315 - RNA, 19 nt, Artificial Sequence
  Description of Artificial Sequence: Synthetic oligonucleotide
  Sense strand starting at position 3672 of SEQ ID NO: 1560574
gucaguuguuccucaugau

SEQ ID NO: 1609316 - RNA, 19 nt, Artificial Sequence
  Description of Artificial Sequence: Synthetic oligonucleotide
  Antisense strand to SEQ ID NO: 1609315
aucaugaggaacaacugac

SEQ ID NO: 1609317 - RNA, 19 nt, Artificial Sequence
  Description of Artificial Sequence: Synthetic oligonucleotide
  Sense strand starting at position 3673 of SEQ ID NO: 1560574
ucaguuguuccucaugauc

SEQ ID NO: 1609318 - RNA, 19 nt, Artificial Sequence
  Description of Artificial Sequence: Synthetic oligonucleotide
  Antisense strand to SEQ ID NO: 1609317
gaucaugaggaacaacuga

SEQ ID NO: 1609319 - RNA, 19 nt, Artificial Sequence
  Description of Artificial Sequence: Synthetic oligonucleotide
  Sense strand starting at position 3696 of SEQ ID NO: 1560574
ggauccaguccacauacuu

SEQ ID NO: 1609320 - RNA, 19 nt, Artificial Sequence
  Description of Artificial Sequence: Synthetic oligonucleotide
  Antisense strand to SEQ ID NO: 1609319
aaguauguggacuggaucc

SEQ ID NO: 1609321 - RNA, 19 nt, Artificial Sequence
  Description of Artificial Sequence: Synthetic oligonucleotide
  Sense strand starting at position 3713 of SEQ ID NO: 1560574
uugcaaauauagguguaga

SEQ ID NO: 1609322 - RNA, 19 nt, Artificial Sequence
  Description of Artificial Sequence: Synthetic oligonucleotide
  Antisense strand to SEQ ID NO: 1609321
ucuacaccuauauuugcaa

SEQ ID NO: 1609323 - RNA, 19 nt, Artificial Sequence
  Description of Artificial Sequence: Synthetic oligonucleotide
  Sense strand starting at position 3724 of SEQ ID NO: 1560574
gguguagacuccagggaug

SEQ ID NO: 1609324 - RNA, 19 nt, Artificial Sequence
  Description of Artificial Sequence: Synthetic oligonucleotide
  Antisense strand to SEQ ID NO: 1609323
caucccuggagucuacacc

SEQ ID NO: 1609325 - RNA, 19 nt, Artificial Sequence
  Description of Artificial Sequence: Synthetic oligonucleotide
  Sense strand starting at position 3924 of SEQ ID NO: 1560574
cuccaagucuggucauuag

SEQ ID NO: 1609326 - RNA, 19 nt, Artificial Sequence
  Description of Artificial Sequence: Synthetic oligonucleotide
  Antisense strand to SEQ ID NO: 1609325
cuaaugaccagacuuggag

SEQ ID NO: 1609327 - RNA, 19 nt, Artificial Sequence
  Description of Artificial Sequence: Synthetic oligonucleotide
  Sense strand starting at position 3927 of SEQ ID NO: 1560574
caagucuggucauuagaca

SEQ ID NO: 1609328 - RNA, 19 nt, Artificial Sequence
  Description of Artificial Sequence: Synthetic oligonucleotide
  Antisense strand to SEQ ID NO: 1609327
ugucuaaugaccagacuug

SEQ ID NO: 1609329 - RNA, 19 nt, Artificial Sequence
  Description of Artificial Sequence: Synthetic oligonucleotide
  Sense strand starting at position 3958 of SEQ ID NO: 1560574
cacuuucccggaggacaau

SEQ ID NO: 1609330 - RNA, 19 nt, Artificial Sequence
  Description of Artificial Sequence: Synthetic oligonucleotide
  Antisense strand to SEQ ID NO: 1609329
auuguccuccgggaaagug

SEQ ID NO: 1609331 - RNA, 19 nt, Artificial Sequence
  Description of Artificial Sequence: Synthetic oligonucleotide
  Sense strand starting at position 391 of SEQ ID NO: 1560575
agaggugccaggcauagau

SEQ ID NO: 1609332 - RNA, 19 nt, Artificial Sequence
  Description of Artificial Sequence: Synthetic oligonucleotide
  Antisense strand to SEQ ID NO: 1609331
aucuaugccuggcaccucu

SEQ ID NO: 1609333 - RNA, 19 nt, Artificial Sequence
  Description of Artificial Sequence: Synthetic oligonucleotide
  Sense strand starting at position 400 of SEQ ID NO: 1560575
aggcauagauucugaaguu

SEQ ID NO: 1609334 - RNA, 19 nt, Artificial Sequence
  Description of Artificial Sequence: Synthetic oligonucleotide
  Antisense strand to SEQ ID NO: 1609333
aacuucagaaucuaugccu

SEQ ID NO: 1609335 - RNA, 19 nt, Artificial Sequence
  Description of Artificial Sequence: Synthetic oligonucleotide
  Sense strand starting at position 422 of SEQ ID NO: 1560575
caaagaguuugggucaugu

SEQ ID NO: 1609336 - RNA, 19 nt, Artificial Sequence
  Description of Artificial Sequence: Synthetic oligonucleotide
  Antisense strand to SEQ ID NO: 1609335
acaugacccaaacucuuug

SEQ ID NO: 1609337 - RNA, 19 nt, Artificial Sequence
  Description of Artificial Sequence: Synthetic oligonucleotide
  Sense strand starting at position 424 of SEQ ID NO: 1560575
aagaguuugggucauguug

SEQ ID NO: 1609338 - RNA, 19 nt, Artificial Sequence
  Description of Artificial Sequence: Synthetic oligonucleotide
  Antisense strand to SEQ ID NO: 1609337
caacaugacccaaacucuu

SEQ ID NO: 1609339 - RNA, 19 nt, Artificial Sequence
  Description of Artificial Sequence: Synthetic oligonucleotide
  Sense strand starting at position 816 of SEQ ID NO: 1560575
gaugucauauaggaaagaa

SEQ ID NO: 1609340 - RNA, 19 nt, Artificial Sequence
  Description of Artificial Sequence: Synthetic oligonucleotide
  Antisense strand to SEQ ID NO: 1609339
uucuuuccuauaugacauc

SEQ ID NO: 1609341 - RNA, 19 nt, Artificial Sequence
  Description of Artificial Sequence: Synthetic oligonucleotide
  Sense strand starting at position 947 of SEQ ID NO: 1560575
aguuccacuccuggucuaa

SEQ ID NO: 1609342 - RNA, 19 nt, Artificial Sequence
  Description of Artificial Sequence: Synthetic oligonucleotide
  Antisense strand to SEQ ID NO: 1609341
uuagaccaggaguggaacu

SEQ ID NO: 1609343 - RNA, 19 nt, Artificial Sequence
  Description of Artificial Sequence: Synthetic oligonucleotide
  Sense strand starting at position 1035 of SEQ ID NO: 1560575
cagcgcuugccuucccaua

SEQ ID NO: 1609344 - RNA, 19 nt, Artificial Sequence
  Description of Artificial Sequence: Synthetic oligonucleotide
  Antisense strand to SEQ ID NO: 1609343
uaugggaaggcaagcgcug

SEQ ID NO: 1609345 - RNA, 19 nt, Artificial Sequence
  Description of Artificial Sequence: Synthetic oligonucleotide
  Sense strand starting at position 1037 of SEQ ID NO: 1560575
gcgcuugccuucccauagu

SEQ ID NO: 1609346 - RNA, 19 nt, Artificial Sequence
  Description of Artificial Sequence: Synthetic oligonucleotide
  Antisense strand to SEQ ID NO: 1609345
acuaugggaaggcaagcgc

SEQ ID NO: 1609347 - RNA, 19 nt, Artificial Sequence
  Description of Artificial Sequence: Synthetic oligonucleotide
  Sense strand starting at position 1115 of SEQ ID NO: 1560575
acccaccuguggucaauaa

SEQ ID NO: 1609348 - RNA, 19 nt, Artificial Sequence
  Description of Artificial Sequence: Synthetic oligonucleotide
  Antisense strand to SEQ ID NO: 1609347
uuauugaccacaggugggu

SEQ ID NO: 1609349 - RNA, 19 nt, Artificial Sequence
  Description of Artificial Sequence: Synthetic oligonucleotide
  Sense strand starting at position 1177 of SEQ ID NO: 1560575
cugccacggcugugaguua

SEQ ID NO: 1609350 - RNA, 19 nt, Artificial Sequence
  Description of Artificial Sequence: Synthetic oligonucleotide
  Antisense strand to SEQ ID NO: 1609349
uaacucacagccguggcag

SEQ ID NO: 1609351 - RNA, 19 nt, Artificial Sequence
  Description of Artificial Sequence: Synthetic oligonucleotide
  Sense strand starting at position 1532 of SEQ ID NO: 1560575
cccugagagcugcagguaa

SEQ ID NO: 1609352 - RNA, 19 nt, Artificial Sequence
  Description of Artificial Sequence: Synthetic oligonucleotide
  Antisense strand to SEQ ID NO: 1609351
uuaccugcagcucucaggg

SEQ ID NO: 1609353 - RNA, 19 nt, Artificial Sequence
  Description of Artificial Sequence: Synthetic oligonucleotide
  Sense strand starting at position 1534 of SEQ ID NO: 1560575
cugagagcugcagguaaau

SEQ ID NO: 1609354 - RNA, 19 nt, Artificial Sequence
  Description of Artificial Sequence: Synthetic oligonucleotide
  Antisense strand to SEQ ID NO: 1609353
auuuaccugcagcucucag

SEQ ID NO: 1609355 - RNA, 19 nt, Artificial Sequence
  Description of Artificial Sequence: Synthetic oligonucleotide
  Sense strand starting at position 1916 of SEQ ID NO: 1560575
ugucucuuugucugccaga

SEQ ID NO: 1609356 - RNA, 19 nt, Artificial Sequence
  Description of Artificial Sequence: Synthetic oligonucleotide
  Antisense strand to SEQ ID NO: 1609355
ucuggcagacaaagagaca

SEQ ID NO: 1609357 - RNA, 19 nt, Artificial Sequence
  Description of Artificial Sequence: Synthetic oligonucleotide
  Sense strand starting at position 1917 of SEQ ID NO: 1560575
gucucuuugucugccagau

SEQ ID NO: 1609358 - RNA, 19 nt, Artificial Sequence
  Description of Artificial Sequence: Synthetic oligonucleotide
  Antisense strand to SEQ ID NO: 1609357
aucuggcagacaaagagac

SEQ ID NO: 1609359 - RNA, 19 nt, Artificial Sequence
  Description of Artificial Sequence: Synthetic oligonucleotide
  Sense strand starting at position 2156 of SEQ ID NO: 1560575
cauccaguuuccggguuaa

SEQ ID NO: 1609360 - RNA, 19 nt, Artificial Sequence
  Description of Artificial Sequence: Synthetic oligonucleotide
  Antisense strand to SEQ ID NO: 1609359
uuaacccggaaacuggaug

SEQ ID NO: 1609361 - RNA, 19 nt, Artificial Sequence
  Description of Artificial Sequence: Synthetic oligonucleotide
  Sense strand starting at position 2206 of SEQ ID NO: 1560575
gugcucuaauucugcagaa

SEQ ID NO: 1609362 - RNA, 19 nt, Artificial Sequence
  Description of Artificial Sequence: Synthetic oligonucleotide
  Antisense strand to SEQ ID NO: 1609361
uucugcagaauuagagcac

SEQ ID NO: 1609363 - RNA, 19 nt, Artificial Sequence
  Description of Artificial Sequence: Synthetic oligonucleotide
  Sense strand starting at position 2207 of SEQ ID NO: 1560575
ugcucuaauucugcagaaa

SEQ ID NO: 1609364 - RNA, 19 nt, Artificial Sequence
  Description of Artificial Sequence: Synthetic oligonucleotide
  Antisense strand to SEQ ID NO: 1609363
uuucugcagaauuagagca

SEQ ID NO: 1609365 - RNA, 19 nt, Artificial Sequence
  Description of Artificial Sequence: Synthetic oligonucleotide
  Sense strand starting at position 2208 of SEQ ID NO: 1560575
gcucuaauucugcagaaac

SEQ ID NO: 1609366 - RNA, 19 nt, Artificial Sequence
  Description of Artificial Sequence: Synthetic oligonucleotide
  Antisense strand to SEQ ID NO: 1609365
guuucugcagaauuagagc

SEQ ID NO: 1609367 - RNA, 19 nt, Artificial Sequence
  Description of Artificial Sequence: Synthetic oligonucleotide
  Sense strand starting at position 2391 of SEQ ID NO: 1560575
uccugacuccagugacaaa

SEQ ID NO: 1609368 - RNA, 19 nt, Artificial Sequence
  Description of Artificial Sequence: Synthetic oligonucleotide
  Antisense strand to SEQ ID NO: 1609367
uuugucacuggagucagga

SEQ ID NO: 1609369 - RNA, 19 nt, Artificial Sequence
  Description of Artificial Sequence: Synthetic oligonucleotide
  Sense strand starting at position 2562 of SEQ ID NO: 1560575
ggaacagacuuccaaauag

SEQ ID NO: 1609370 - RNA, 19 nt, Artificial Sequence
  Description of Artificial Sequence: Synthetic oligonucleotide
  Antisense strand to SEQ ID NO: 1609369
cuauuuggaagucuguucc

SEQ ID NO: 1609371 - RNA, 19 nt, Artificial Sequence
  Description of Artificial Sequence: Synthetic oligonucleotide
  Sense strand starting at position 2599 of SEQ ID NO: 1560575
aagagaguuucugaacuga

SEQ ID NO: 1609372 - RNA, 19 nt, Artificial Sequence
  Description of Artificial Sequence: Synthetic oligonucleotide
  Antisense strand to SEQ ID NO: 1609371
ucaguucagaaacucucuu

SEQ ID NO: 1609373 - RNA, 19 nt, Artificial Sequence
  Description of Artificial Sequence: Synthetic oligonucleotide
  Sense strand starting at position 2628 of SEQ ID NO: 1560575
guacauaugaaguggauca

SEQ ID NO: 1609374 - RNA, 19 nt, Artificial Sequence
  Description of Artificial Sequence: Synthetic oligonucleotide
  Antisense strand to SEQ ID NO: 1609373
ugauccacuucauauguac

SEQ ID NO: 1609375 - RNA, 19 nt, Artificial Sequence
  Description of Artificial Sequence: Synthetic oligonucleotide
  Sense strand starting at position 2756 of SEQ ID NO: 1560575
gagaaugagucacaggaca

SEQ ID NO: 1609376 - RNA, 19 nt, Artificial Sequence
  Description of Artificial Sequence: Synthetic oligonucleotide
  Antisense strand to SEQ ID NO: 1609375
uguccugugacucauucuc

SEQ ID NO: 1609377 - RNA, 19 nt, Artificial Sequence
  Description of Artificial Sequence: Synthetic oligonucleotide
  Sense strand starting at position 2774 of SEQ ID NO: 1560575
aagggaacuuugugcuguu

SEQ ID NO: 1609378 - RNA, 19 nt, Artificial Sequence
  Description of Artificial Sequence: Synthetic oligonucleotide
  Antisense strand to SEQ ID NO: 1609377
aacagcacaaaguucccuu

SEQ ID NO: 1609379 - RNA, 19 nt, Artificial Sequence
  Description of Artificial Sequence: Synthetic oligonucleotide
  Sense strand starting at position 2775 of SEQ ID NO: 1560575
agggaacuuugugcuguuu

SEQ ID NO: 1609380 - RNA, 19 nt, Artificial Sequence
  Description of Artificial Sequence: Synthetic oligonucleotide
  Antisense strand to SEQ ID NO: 1609379
aaacagcacaaaguucccu

SEQ ID NO: 1609381 - RNA, 19 nt, Artificial Sequence
  Description of Artificial Sequence: Synthetic oligonucleotide
  Sense strand starting at position 3054 of SEQ ID NO: 1560575
uggccucugugcugguuua

SEQ ID NO: 1609382 - RNA, 19 nt, Artificial Sequence
  Description of Artificial Sequence: Synthetic oligonucleotide
  Antisense strand to SEQ ID NO: 1609381
uaaaccagcacagaggcca

SEQ ID NO: 1609383 - RNA, 19 nt, Artificial Sequence
  Description of Artificial Sequence: Synthetic oligonucleotide
  Sense strand starting at position 3055 of SEQ ID NO: 1560575
ggccucugugcugguuuau

SEQ ID NO: 1609384 - RNA, 19 nt, Artificial Sequence
  Description of Artificial Sequence: Synthetic oligonucleotide
  Antisense strand to SEQ ID NO: 1609383
auaaaccagcacagaggcc

SEQ ID NO: 1609385 - RNA, 19 nt, Artificial Sequence
  Description of Artificial Sequence: Synthetic oligonucleotide
  Sense strand starting at position 3697 of SEQ ID NO: 1560575
uugauuugcucuuagaaac

SEQ ID NO: 1609386 - RNA, 19 nt, Artificial Sequence
  Description of Artificial Sequence: Synthetic oligonucleotide
  Antisense strand to SEQ ID NO: 1609385
guuucuaagagcaaaucaa

SEQ ID NO: 1609387 - RNA, 19 nt, Artificial Sequence
  Description of Artificial Sequence: Synthetic oligonucleotide
  Sense strand starting at position 3715 of SEQ ID NO: 1560575
cgaccuaacugcuuuaacu

SEQ ID NO: 1609388 - RNA, 19 nt, Artificial Sequence
  Description of Artificial Sequence: Synthetic oligonucleotide
  Antisense strand to SEQ ID NO: 1609387
aguuaaagcaguuaggucg

SEQ ID NO: 1609389 - RNA, 19 nt, Artificial Sequence
  Description of Artificial Sequence: Synthetic oligonucleotide
  Sense strand starting at position 3725 of SEQ ID NO: 1560575
gcuuuaacucaucauuggu

SEQ ID NO: 1609390 - RNA, 19 nt, Artificial Sequence
  Description of Artificial Sequence: Synthetic oligonucleotide
  Antisense strand to SEQ ID NO: 1609389
accaaugaugaguuaaagc

SEQ ID NO: 1609391 - RNA, 19 nt, Artificial Sequence
  Description of Artificial Sequence: Synthetic oligonucleotide
  Sense strand starting at position 3746 of SEQ ID NO: 1560575
gcgcgacuggcguugauaa

SEQ ID NO: 1609392 - RNA, 19 nt, Artificial Sequence
  Description of Artificial Sequence: Synthetic oligonucleotide
  Antisense strand to SEQ ID NO: 1609391
uuaucaacgccagucgcgc

SEQ ID NO: 1609393 - RNA, 19 nt, Artificial Sequence
  Description of Artificial Sequence: Synthetic oligonucleotide
  Sense strand starting at position 3762 of SEQ ID NO: 1560575
uaacgcuggucccuacaaa

SEQ ID NO: 1609394 - RNA, 19 nt, Artificial Sequence
  Description of Artificial Sequence: Synthetic oligonucleotide
  Antisense strand to SEQ ID NO: 1609393
uuuguagggaccagcguua

SEQ ID NO: 1609395 - RNA, 19 nt, Artificial Sequence
  Description of Artificial Sequence: Synthetic oligonucleotide
  Sense strand starting at position 3841 of SEQ ID NO: 1560575
gacuguccuuucucuggaa

SEQ ID NO: 1609396 - RNA, 19 nt, Artificial Sequence
  Description of Artificial Sequence: Synthetic oligonucleotide
  Antisense strand to SEQ ID NO: 1609395
uuccagagaaaggacaguc

SEQ ID NO: 1609397 - RNA, 19 nt, Artificial Sequence
  Description of Artificial Sequence: Synthetic oligonucleotide
  Sense strand starting at position 3842 of SEQ ID NO: 1560575
acuguccuuucucuggaaa

SEQ ID NO: 1609398 - RNA, 19 nt, Artificial Sequence
  Description of Artificial Sequence: Synthetic oligonucleotide
  Antisense strand to SEQ ID NO: 1609397
uuuccagagaaaggacagu

SEQ ID NO: 1609399 - RNA, 19 nt, Artificial Sequence
  Description of Artificial Sequence: Synthetic oligonucleotide
  Sense strand starting at position 3843 of SEQ ID NO: 1560575
cuguccuuucucuggaaag

SEQ ID NO: 1609400 - RNA, 19 nt, Artificial Sequence
  Description of Artificial Sequence: Synthetic oligonucleotide
  Antisense strand to SEQ ID NO: 1609399
cuuuccagagaaaggacag

SEQ ID NO: 1609401 - RNA, 19 nt, Artificial Sequence
  Description of Artificial Sequence: Synthetic oligonucleotide
  Sense strand starting at position 331 of SEQ ID NO: 1560576
gccucaaguccaggauaug

SEQ ID NO: 1609402 - RNA, 19 nt, Artificial Sequence
  Description of Artificial Sequence: Synthetic oligonucleotide
  Antisense strand to SEQ ID NO: 1609401
cauauccuggacuugaggc

SEQ ID NO: 1609403 - RNA, 19 nt, Artificial Sequence
  Description of Artificial Sequence: Synthetic oligonucleotide
  Sense strand starting at position 384 of SEQ ID NO: 1560576
caggcaucgccggugucau

SEQ ID NO: 1609404 - RNA, 19 nt, Artificial Sequence
  Description of Artificial Sequence: Synthetic oligonucleotide
  Antisense strand to SEQ ID NO: 1609403
augacaccggcgaugccug

SEQ ID NO: 1609405 - RNA, 19 nt, Artificial Sequence
  Description of Artificial Sequence: Synthetic oligonucleotide
  Sense strand starting at position 422 of SEQ ID NO: 1560576
cuuugaguccuagguuucu

SEQ ID NO: 1609406 - RNA, 19 nt, Artificial Sequence
  Description of Artificial Sequence: Synthetic oligonucleotide
  Antisense strand to SEQ ID NO: 1609405
agaaaccuaggacucaaag

SEQ ID NO: 1609407 - RNA, 19 nt, Artificial Sequence
  Description of Artificial Sequence: Synthetic oligonucleotide
  Sense strand starting at position 431 of SEQ ID NO: 1560576
cuagguuucucugccauga

SEQ ID NO: 1609408 - RNA, 19 nt, Artificial Sequence
  Description of Artificial Sequence: Synthetic oligonucleotide
  Antisense strand to SEQ ID NO: 1609407
ucauggcagagaaaccuag

SEQ ID NO: 1609409 - RNA, 19 nt, Artificial Sequence
  Description of Artificial Sequence: Synthetic oligonucleotide
  Sense strand starting at position 435 of SEQ ID NO: 1560576
guuucucugccaugaaauu

SEQ ID NO: 1609410 - RNA, 19 nt, Artificial Sequence
  Description of Artificial Sequence: Synthetic oligonucleotide
  Antisense strand to SEQ ID NO: 1609409
aauuucauggcagagaaac

SEQ ID NO: 1609411 - RNA, 19 nt, Artificial Sequence
  Description of Artificial Sequence: Synthetic oligonucleotide
  Sense strand starting at position 441 of SEQ ID NO: 1560576
cugccaugaaauuggagua

SEQ ID NO: 1609412 - RNA, 19 nt, Artificial Sequence
  Description of Artificial Sequence: Synthetic oligonucleotide
  Antisense strand to SEQ ID NO: 1609411
uacuccaauuucauggcag

SEQ ID NO: 1609413 - RNA, 19 nt, Artificial Sequence
  Description of Artificial Sequence: Synthetic oligonucleotide
  Sense strand starting at position 442 of SEQ ID NO: 1560576
ugccaugaaauuggaguaa

SEQ ID NO: 1609414 - RNA, 19 nt, Artificial Sequence
  Description of Artificial Sequence: Synthetic oligonucleotide
  Antisense strand to SEQ ID NO: 1609413
uuacuccaauuucauggca

SEQ ID NO: 1609415 - RNA, 19 nt, Artificial Sequence
  Description of Artificial Sequence: Synthetic oligonucleotide
  Sense strand starting at position 554 of SEQ ID NO: 1560576
gggcaugaauccagggagu

SEQ ID NO: 1609416 - RNA, 19 nt, Artificial Sequence
  Description of Artificial Sequence: Synthetic oligonucleotide
  Antisense strand to SEQ ID NO: 1609415
acucccuggauucaugccc

SEQ ID NO: 1609417 - RNA, 19 nt, Artificial Sequence
  Description of Artificial Sequence: Synthetic oligonucleotide
  Sense strand starting at position 556 of SEQ ID NO: 1560576
gcaugaauccagggagugu

SEQ ID NO: 1609418 - RNA, 19 nt, Artificial Sequence
  Description of Artificial Sequence: Synthetic oligonucleotide
  Antisense strand to SEQ ID NO: 1609417
acacucccuggauucaugc

SEQ ID NO: 1609419 - RNA, 19 nt, Artificial Sequence
  Description of Artificial Sequence: Synthetic oligonucleotide
  Sense strand starting at position 727 of SEQ ID NO: 1560576
uggcuuggcuccuugaagu

SEQ ID NO: 1609420 - RNA, 19 nt, Artificial Sequence
  Description of Artificial Sequence: Synthetic oligonucleotide
  Antisense strand to SEQ ID NO: 1609419
acuucaaggagccaagcca

SEQ ID NO: 1609421 - RNA, 19 nt, Artificial Sequence
  Description of Artificial Sequence: Synthetic oligonucleotide
  Sense strand starting at position 784 of SEQ ID NO: 1560576
ggauaauuguuugaauaac

SEQ ID NO: 1609422 - RNA, 19 nt, Artificial Sequence
  Description of Artificial Sequence: Synthetic oligonucleotide
  Antisense strand to SEQ ID NO: 1609421
guuauucaaacaauuaucc

SEQ ID NO: 1609423 - RNA, 19 nt, Artificial Sequence
  Description of Artificial Sequence: Synthetic oligonucleotide
  Sense strand starting at position 796 of SEQ ID NO: 1560576
gaauaacaucugcgucugu

SEQ ID NO: 1609424 - RNA, 19 nt, Artificial Sequence
  Description of Artificial Sequence: Synthetic oligonucleotide
  Antisense strand to SEQ ID NO: 1609423
acagacgcagauguuauuc

SEQ ID NO: 1609425 - RNA, 19 nt, Artificial Sequence
  Description of Artificial Sequence: Synthetic oligonucleotide
  Sense strand starting at position 845 of SEQ ID NO: 1560576
gacugugucucugcuugua

SEQ ID NO: 1609426 - RNA, 19 nt, Artificial Sequence
  Description of Artificial Sequence: Synthetic oligonucleotide
  Antisense strand to SEQ ID NO: 1609425
uacaagcagagacacaguc

SEQ ID NO: 1609427 - RNA, 19 nt, Artificial Sequence
  Description of Artificial Sequence: Synthetic oligonucleotide
  Sense strand starting at position 874 of SEQ ID NO: 1560576
cacaguggccgguguuuaa

SEQ ID NO: 1609428 - RNA, 19 nt, Artificial Sequence
  Description of Artificial Sequence: Synthetic oligonucleotide
  Antisense strand to SEQ ID NO: 1609427
uuaaacaccggccacugug

SEQ ID NO: 1609429 - RNA, 19 nt, Artificial Sequence
  Description of Artificial Sequence: Synthetic oligonucleotide
  Sense strand starting at position 883 of SEQ ID NO: 1560576
cgguguuuaauagcuguuu

SEQ ID NO: 1609430 - RNA, 19 nt, Artificial Sequence
  Description of Artificial Sequence: Synthetic oligonucleotide
  Antisense strand to SEQ ID NO: 1609429
aaacagcuauuaaacaccg

SEQ ID NO: 1609431 - RNA, 19 nt, Artificial Sequence
  Description of Artificial Sequence: Synthetic oligonucleotide
  Sense strand starting at position 888 of SEQ ID NO: 1560576
uuuaauagcuguuuguuga

SEQ ID NO: 1609432 - RNA, 19 nt, Artificial Sequence
  Description of Artificial Sequence: Synthetic oligonucleotide
  Antisense strand to SEQ ID NO: 1609431
ucaacaaacagcuauuaaa

SEQ ID NO: 1609433 - RNA, 19 nt, Artificial Sequence
  Description of Artificial Sequence: Synthetic oligonucleotide
  Sense strand starting at position 889 of SEQ ID NO: 1560576
uuaauagcuguuuguugaa

SEQ ID NO: 1609434 - RNA, 19 nt, Artificial Sequence
  Description of Artificial Sequence: Synthetic oligonucleotide
  Antisense strand to SEQ ID NO: 1609433
uucaacaaacagcuauuaa

SEQ ID NO: 1609435 - RNA, 19 nt, Artificial Sequence
  Description of Artificial Sequence: Synthetic oligonucleotide
  Sense strand starting at position 1155 of SEQ ID NO: 1560576
gcuacuugaaguuagaagu

SEQ ID NO: 1609436 - RNA, 19 nt, Artificial Sequence
  Description of Artificial Sequence: Synthetic oligonucleotide
  Antisense strand to SEQ ID NO: 1609435
acuucuaacuucaaguagc

SEQ ID NO: 1609437 - RNA, 19 nt, Artificial Sequence
  Description of Artificial Sequence: Synthetic oligonucleotide
  Sense strand starting at position 1449 of SEQ ID NO: 1560576
cccuucuaccugcgacaua

SEQ ID NO: 1609438 - RNA, 19 nt, Artificial Sequence
  Description of Artificial Sequence: Synthetic oligonucleotide
  Antisense strand to SEQ ID NO: 1609437
uaugucgcagguagaaggg

SEQ ID NO: 1609439 - RNA, 19 nt, Artificial Sequence
  Description of Artificial Sequence: Synthetic oligonucleotide
  Sense strand starting at position 1504 of SEQ ID NO: 1560576
cagugaccuucucugguaa

SEQ ID NO: 1609440 - RNA, 19 nt, Artificial Sequence
  Description of Artificial Sequence: Synthetic oligonucleotide
  Antisense strand to SEQ ID NO: 1609439
uuaccagagaaggucacug

SEQ ID NO: 1609441 - RNA, 19 nt, Artificial Sequence
  Description of Artificial Sequence: Synthetic oligonucleotide
  Sense strand starting at position 1894 of SEQ ID NO: 1560576
gcgcauucuuaccuccuga

SEQ ID NO: 1609442 - RNA, 19 nt, Artificial Sequence
  Description of Artificial Sequence: Synthetic oligonucleotide
  Antisense strand to SEQ ID NO: 1609441
ucaggagguaagaaugcgc

SEQ ID NO: 1609443 - RNA, 19 nt, Artificial Sequence
  Description of Artificial Sequence: Synthetic oligonucleotide
  Sense strand starting at position 2280 of SEQ ID NO: 1560576
uccagagucugccuuccau

SEQ ID NO: 1609444 - RNA, 19 nt, Artificial Sequence
  Description of Artificial Sequence: Synthetic oligonucleotide
  Antisense strand to SEQ ID NO: 1609443
auggaaggcagacucugga

SEQ ID NO: 1609445 - RNA, 19 nt, Artificial Sequence
  Description of Artificial Sequence: Synthetic oligonucleotide
  Sense strand starting at position 2315 of SEQ ID NO: 1560576
uguccacacgcuugguauu

SEQ ID NO: 1609446 - RNA, 19 nt, Artificial Sequence
  Description of Artificial Sequence: Synthetic oligonucleotide
  Antisense strand to SEQ ID NO: 1609445
aauaccaagcguguggaca

SEQ ID NO: 1609447 - RNA, 19 nt, Artificial Sequence
  Description of Artificial Sequence: Synthetic oligonucleotide
  Sense strand starting at position 2316 of SEQ ID NO: 1560576
guccacacgcuugguauua

SEQ ID NO: 1609448 - RNA, 19 nt, Artificial Sequence
  Description of Artificial Sequence: Synthetic oligonucleotide
  Antisense strand to SEQ ID NO: 1609447
uaauaccaagcguguggac

SEQ ID NO: 1609449 - RNA, 19 nt, Artificial Sequence
  Description of Artificial Sequence: Synthetic oligonucleotide
  Sense strand starting at position 2383 of SEQ ID NO: 1560576
gguuucucucuagaucuga

SEQ ID NO: 1609450 - RNA, 19 nt, Artificial Sequence
  Description of Artificial Sequence: Synthetic oligonucleotide
  Antisense strand to SEQ ID NO: 1609449
ucagaucuagagagaaacc

SEQ ID NO: 1609451 - RNA, 19 nt, Artificial Sequence
  Description of Artificial Sequence: Synthetic oligonucleotide
  Sense strand starting at position 2557 of SEQ ID NO: 1560576
ccgccagcugucuagaacu

SEQ ID NO: 1609452 - RNA, 19 nt, Artificial Sequence
  Description of Artificial Sequence: Synthetic oligonucleotide
  Antisense strand to SEQ ID NO: 1609451
aguucuagacagcuggcgg

SEQ ID NO: 1609453 - RNA, 19 nt, Artificial Sequence
  Description of Artificial Sequence: Synthetic oligonucleotide
  Sense strand starting at position 2952 of SEQ ID NO: 1560576
cccagauggccguguucua

SEQ ID NO: 1609454 - RNA, 19 nt, Artificial Sequence
  Description of Artificial Sequence: Synthetic oligonucleotide
  Antisense strand to SEQ ID NO: 1609453
uagaacacggccaucuggg

SEQ ID NO: 1609455 - RNA, 19 nt, Artificial Sequence
  Description of Artificial Sequence: Synthetic oligonucleotide
  Sense strand starting at position 3248 of SEQ ID NO: 1560576
agagaugcgaccugagaaa

SEQ ID NO: 1609456 - RNA, 19 nt, Artificial Sequence
  Description of Artificial Sequence: Synthetic oligonucleotide
  Antisense strand to SEQ ID NO: 1609455
uuucucaggucgcaucucu

SEQ ID NO: 1609457 - RNA, 19 nt, Artificial Sequence
  Description of Artificial Sequence: Synthetic oligonucleotide
  Sense strand starting at position 3356 of SEQ ID NO: 1560576
gccggaaagcuuugaagac

SEQ ID NO: 1609458 - RNA, 19 nt, Artificial Sequence
  Description of Artificial Sequence: Synthetic oligonucleotide
  Antisense strand to SEQ ID NO: 1609457
gucuucaaagcuuuccggc

SEQ ID NO: 1609459 - RNA, 19 nt, Artificial Sequence
  Description of Artificial Sequence: Synthetic oligonucleotide
  Sense strand starting at position 3362 of SEQ ID NO: 1560576
aagcuuugaagacguggau

SEQ ID NO: 1609460 - RNA, 19 nt, Artificial Sequence
  Description of Artificial Sequence: Synthetic oligonucleotide
  Antisense strand to SEQ ID NO: 1609459
auccacgucuucaaagcuu

SEQ ID NO: 1609461 - RNA, 19 nt, Artificial Sequence
  Description of Artificial Sequence: Synthetic oligonucleotide
  Sense strand starting at position 3430 of SEQ ID NO: 1560576
aggugucuccaggaacuau

SEQ ID NO: 1609462 - RNA, 19 nt, Artificial Sequence
  Description of Artificial Sequence: Synthetic oligonucleotide
  Antisense strand to SEQ ID NO: 1609461
auaguuccuggagacaccu

SEQ ID NO: 1609463 - RNA, 19 nt, Artificial Sequence
  Description of Artificial Sequence: Synthetic oligonucleotide
  Sense strand starting at position 3518 of SEQ ID NO: 1560576
gggucagaauuuggaagaa

SEQ ID NO: 1609464 - RNA, 19 nt, Artificial Sequence
  Description of Artificial Sequence: Synthetic oligonucleotide
  Antisense strand to SEQ ID NO: 1609463
uucuuccaaauucugaccc

SEQ ID NO: 1609465 - RNA, 19 nt, Artificial Sequence
  Description of Artificial Sequence: Synthetic oligonucleotide
  Sense strand starting at position 3641 of SEQ ID NO: 1560576
cuuguacaguccuuauuga

SEQ ID NO: 1609466 - RNA, 19 nt, Artificial Sequence
  Description of Artificial Sequence: Synthetic oligonucleotide
  Antisense strand to SEQ ID NO: 1609465
ucaauaaggacuguacaag

SEQ ID NO: 1609467 - RNA, 19 nt, Artificial Sequence
  Description of Artificial Sequence: Synthetic oligonucleotide
  Sense strand starting at position 3642 of SEQ ID NO: 1560576
uuguacaguccuuauugau

SEQ ID NO: 1609468 - RNA, 19 nt, Artificial Sequence
  Description of Artificial Sequence: Synthetic oligonucleotide
  Antisense strand to SEQ ID NO: 1609467
aucaauaaggacuguacaa

SEQ ID NO: 1609469 - RNA, 19 nt, Artificial Sequence
  Description of Artificial Sequence: Synthetic oligonucleotide
  Sense strand starting at position 3736 of SEQ ID NO: 1560576
ucugacauauaugaaauga

SEQ ID NO: 1609470 - RNA, 19 nt, Artificial Sequence
  Description of Artificial Sequence: Synthetic oligonucleotide
  Antisense strand to SEQ ID NO: 1609469
ucauuucauauaugucaga

SEQ ID NO: 1609471 - RNA, 19 nt, Artificial Sequence
  Description of Artificial Sequence: Synthetic oligonucleotide
  Sense strand starting at position 3758 of SEQ ID NO: 1560576
ugugucaaagauuguaucu

SEQ ID NO: 1609472 - RNA, 19 nt, Artificial Sequence
  Description of Artificial Sequence: Synthetic oligonucleotide
  Antisense strand to SEQ ID NO: 1609471
agauacaaucuuugacaca

SEQ ID NO: 1609473 - RNA, 19 nt, Artificial Sequence
  Description of Artificial Sequence: Synthetic oligonucleotide
  Sense strand starting at position 3768 of SEQ ID NO: 1560576
auuguaucuugacucauua

SEQ ID NO: 1609474 - RNA, 19 nt, Artificial Sequence
  Description of Artificial Sequence: Synthetic oligonucleotide
  Antisense strand to SEQ ID NO: 1609473
uaaugagucaagauacaau

SEQ ID NO: 1609475 - RNA, 19 nt, Artificial Sequence
  Description of Artificial Sequence: Synthetic oligonucleotide
  Sense strand starting at position 3800 of SEQ ID NO: 1560576
ccaguaagauguuacaaag

SEQ ID NO: 1609476 - RNA, 19 nt, Artificial Sequence
  Description of Artificial Sequence: Synthetic oligonucleotide
  Antisense strand to SEQ ID NO: 1609475
cuuuguaacaucuuacugg

SEQ ID NO: 1609477 - RNA, 19 nt, Artificial Sequence
  Description of Artificial Sequence: Synthetic oligonucleotide
  Sense strand starting at position 3902 of SEQ ID NO: 1560576
agggaaauccauuguacuu

SEQ ID NO: 1609478 - RNA, 19 nt, Artificial Sequence
  Description of Artificial Sequence: Synthetic oligonucleotide
  Antisense strand to SEQ ID NO: 1609477
aaguacaauggauuucccu

SEQ ID NO: 1609479 - RNA, 19 nt, Artificial Sequence
  Description of Artificial Sequence: Synthetic oligonucleotide
  Sense strand starting at position 3938 of SEQ ID NO: 1560576
uguaaacauuuauggacaa

SEQ ID NO: 1609480 - RNA, 19 nt, Artificial Sequence
  Description of Artificial Sequence: Synthetic oligonucleotide
  Antisense strand to SEQ ID NO: 1609479
uuguccauaaauguuuaca

SEQ ID NO: 1609481 - RNA, 19 nt, Artificial Sequence
  Description of Artificial Sequence: Synthetic oligonucleotide
  Sense strand starting at position 4 of SEQ ID NO: 1560577
ugacauuguuucuuuccua

SEQ ID NO: 1609482 - RNA, 19 nt, Artificial Sequence
  Description of Artificial Sequence: Synthetic oligonucleotide
  Antisense strand to SEQ ID NO: 1609481
uaggaaagaaacaauguca

SEQ ID NO: 1609483 - RNA, 19 nt, Artificial Sequence
  Description of Artificial Sequence: Synthetic oligonucleotide
  Sense strand starting at position 42 of SEQ ID NO: 1560577
cgugaucuuucugcuauga

SEQ ID NO: 1609484 - RNA, 19 nt, Artificial Sequence
  Description of Artificial Sequence: Synthetic oligonucleotide
  Antisense strand to SEQ ID NO: 1609483
ucauagcagaaagaucacg

SEQ ID NO: 1609485 - RNA, 19 nt, Artificial Sequence
  Description of Artificial Sequence: Synthetic oligonucleotide
  Sense strand starting at position 833 of SEQ ID NO: 1560577
cagggaagaugcuauaauc

SEQ ID NO: 1609486 - RNA, 19 nt, Artificial Sequence
  Description of Artificial Sequence: Synthetic oligonucleotide
  Antisense strand to SEQ ID NO: 1609485
gauuauagcaucuucccug

SEQ ID NO: 1609487 - RNA, 19 nt, Artificial Sequence
  Description of Artificial Sequence: Synthetic oligonucleotide
  Sense strand starting at position 922 of SEQ ID NO: 1560577
ggaucuagugguggaguca

SEQ ID NO: 1609488 - RNA, 19 nt, Artificial Sequence
  Description of Artificial Sequence: Synthetic oligonucleotide
  Antisense strand to SEQ ID NO: 1609487
ugacuccaccacuagaucc

SEQ ID NO: 1609489 - RNA, 19 nt, Artificial Sequence
  Description of Artificial Sequence: Synthetic oligonucleotide
  Sense strand starting at position 1333 of SEQ ID NO: 1560577
aggugugcucaugagagaa

SEQ ID NO: 1609490 - RNA, 19 nt, Artificial Sequence
  Description of Artificial Sequence: Synthetic oligonucleotide
  Antisense strand to SEQ ID NO: 1609489
uucucucaugagcacaccu

SEQ ID NO: 1609491 - RNA, 19 nt, Artificial Sequence
  Description of Artificial Sequence: Synthetic oligonucleotide
  Sense strand starting at position 1369 of SEQ ID NO: 1560577
uggagaaaccgguggaagu

SEQ ID NO: 1609492 - RNA, 19 nt, Artificial Sequence
  Description of Artificial Sequence: Synthetic oligonucleotide
  Antisense strand to SEQ ID NO: 1609491
acuuccaccgguuucucca

SEQ ID NO: 1609493 - RNA, 19 nt, Artificial Sequence
  Description of Artificial Sequence: Synthetic oligonucleotide
  Sense strand starting at position 1370 of SEQ ID NO: 1560577
ggagaaaccgguggaaguu

SEQ ID NO: 1609494 - RNA, 19 nt, Artificial Sequence
  Description of Artificial Sequence: Synthetic oligonucleotide
  Antisense strand to SEQ ID NO: 1609493
aacuuccaccgguuucucc

SEQ ID NO: 1609495 - RNA, 19 nt, Artificial Sequence
  Description of Artificial Sequence: Synthetic oligonucleotide
  Sense strand starting at position 1380 of SEQ ID NO: 1560577
guggaaguuggaugugaca

SEQ ID NO: 1609496 - RNA, 19 nt, Artificial Sequence
  Description of Artificial Sequence: Synthetic oligonucleotide
  Antisense strand to SEQ ID NO: 1609495
ugucacauccaacuuccac

SEQ ID NO: 1609497 - RNA, 19 nt, Artificial Sequence
  Description of Artificial Sequence: Synthetic oligonucleotide
  Sense strand starting at position 1624 of SEQ ID NO: 1560577
gaacaacagcgaugaugau

SEQ ID NO: 1609498 - RNA, 19 nt, Artificial Sequence
  Description of Artificial Sequence: Synthetic oligonucleotide
  Antisense strand to SEQ ID NO: 1609497
aucaucaucgcuguuguuc

SEQ ID NO: 1609499 - RNA, 19 nt, Artificial Sequence
  Description of Artificial Sequence: Synthetic oligonucleotide
  Sense strand starting at position 1654 of SEQ ID NO: 1560577
gggcaugagacguggaaga

SEQ ID NO: 1609500 - RNA, 19 nt, Artificial Sequence
  Description of Artificial Sequence: Synthetic oligonucleotide
  Antisense strand to SEQ ID NO: 1609499
ucuuccacgucucaugccc

SEQ ID NO: 1609501 - RNA, 19 nt, Artificial Sequence
  Description of Artificial Sequence: Synthetic oligonucleotide
  Sense strand starting at position 1951 of SEQ ID NO: 1560577
gaagguuggugccagaacu

SEQ ID NO: 1609502 - RNA, 19 nt, Artificial Sequence
  Description of Artificial Sequence: Synthetic oligonucleotide
  Antisense strand to SEQ ID NO: 1609501
aguucuggcaccaaccuuc

SEQ ID NO: 1609503 - RNA, 19 nt, Artificial Sequence
  Description of Artificial Sequence: Synthetic oligonucleotide
  Sense strand starting at position 2006 of SEQ ID NO: 1560577
caaagugagagcuggagau

SEQ ID NO: 1609504 - RNA, 19 nt, Artificial Sequence
  Description of Artificial Sequence: Synthetic oligonucleotide
  Antisense strand to SEQ ID NO: 1609503
aucuccagcucucacuuug

SEQ ID NO: 1609505 - RNA, 19 nt, Artificial Sequence
  Description of Artificial Sequence: Synthetic oligonucleotide
  Sense strand starting at position 2122 of SEQ ID NO: 1560577
gaaggacagucuuaacaga

SEQ ID NO: 1609506 - RNA, 19 nt, Artificial Sequence
  Description of Artificial Sequence: Synthetic oligonucleotide
  Antisense strand to SEQ ID NO: 1609505
ucuguuaagacuguccuuc

SEQ ID NO: 1609507 - RNA, 19 nt, Artificial Sequence
  Description of Artificial Sequence: Synthetic oligonucleotide
  Sense strand starting at position 2204 of SEQ ID NO: 1560577
gaaggauucuggccagccu

SEQ ID NO: 1609508 - RNA, 19 nt, Artificial Sequence
  Description of Artificial Sequence: Synthetic oligonucleotide
  Antisense strand to SEQ ID NO: 1609507
aggcuggccagaauccuuc

SEQ ID NO: 1609509 - RNA, 19 nt, Artificial Sequence
  Description of Artificial Sequence: Synthetic oligonucleotide
  Sense strand starting at position 2554 of SEQ ID NO: 1560577
ccaggugccuuucugugau

SEQ ID NO: 1609510 - RNA, 19 nt, Artificial Sequence
  Description of Artificial Sequence: Synthetic oligonucleotide
  Antisense strand to SEQ ID NO: 1609509
aucacagaaaggcaccugg

SEQ ID NO: 1609511 - RNA, 19 nt, Artificial Sequence
  Description of Artificial Sequence: Synthetic oligonucleotide
  Sense strand starting at position 2560 of SEQ ID NO: 1560577
gccuuucugugauuccuga

SEQ ID NO: 1609512 - RNA, 19 nt, Artificial Sequence
  Description of Artificial Sequence: Synthetic oligonucleotide
  Antisense strand to SEQ ID NO: 1609511
ucaggaaucacagaaaggc

SEQ ID NO: 1609513 - RNA, 19 nt, Artificial Sequence
  Description of Artificial Sequence: Synthetic oligonucleotide
  Sense strand starting at position 2574 of SEQ ID NO: 1560577
ccugaacuguuucuguuua

SEQ ID NO: 1609514 - RNA, 19 nt, Artificial Sequence
  Description of Artificial Sequence: Synthetic oligonucleotide
  Antisense strand to SEQ ID NO: 1609513
uaaacagaaacaguucagg

SEQ ID NO: 1609515 - RNA, 19 nt, Artificial Sequence
  Description of Artificial Sequence: Synthetic oligonucleotide
  Sense strand starting at position 2576 of SEQ ID NO: 1560577
ugaacuguuucuguuuaac

SEQ ID NO: 1609516 - RNA, 19 nt, Artificial Sequence
  Description of Artificial Sequence: Synthetic oligonucleotide
  Antisense strand to SEQ ID NO: 1609515
guuaaacagaaacaguuca

SEQ ID NO: 1609517 - RNA, 19 nt, Artificial Sequence
  Description of Artificial Sequence: Synthetic oligonucleotide
  Sense strand starting at position 2579 of SEQ ID NO: 1560577
acuguuucuguuuaacuau

SEQ ID NO: 1609518 - RNA, 19 nt, Artificial Sequence
  Description of Artificial Sequence: Synthetic oligonucleotide
  Antisense strand to SEQ ID NO: 1609517
auaguuaaacagaaacagu

SEQ ID NO: 1609519 - RNA, 19 nt, Artificial Sequence
  Description of Artificial Sequence: Synthetic oligonucleotide
  Sense strand starting at position 3118 of SEQ ID NO: 1560577
cugcucuguggugacgaau

SEQ ID NO: 1609520 - RNA, 19 nt, Artificial Sequence
  Description of Artificial Sequence: Synthetic oligonucleotide
  Antisense strand to SEQ ID NO: 1609519
auucgucaccacagagcag

SEQ ID NO: 1609521 - RNA, 19 nt, Artificial Sequence
  Description of Artificial Sequence: Synthetic oligonucleotide
  Sense strand starting at position 3146 of SEQ ID NO: 1560577
acuggauguggcggugauu

SEQ ID NO: 1609522 - RNA, 19 nt, Artificial Sequence
  Description of Artificial Sequence: Synthetic oligonucleotide
  Antisense strand to SEQ ID NO: 1609521
aaucaccgccacauccagu

SEQ ID NO: 1609523 - RNA, 19 nt, Artificial Sequence
  Description of Artificial Sequence: Synthetic oligonucleotide
  Sense strand starting at position 3149 of SEQ ID NO: 1560577
ggauguggcggugauuaca

SEQ ID NO: 1609524 - RNA, 19 nt, Artificial Sequence
  Description of Artificial Sequence: Synthetic oligonucleotide
  Antisense strand to SEQ ID NO: 1609523
uguaaucaccgccacaucc

SEQ ID NO: 1609525 - RNA, 19 nt, Artificial Sequence
  Description of Artificial Sequence: Synthetic oligonucleotide
  Sense strand starting at position 3157 of SEQ ID NO: 1560577
cggugauuacacgauucua

SEQ ID NO: 1609526 - RNA, 19 nt, Artificial Sequence
  Description of Artificial Sequence: Synthetic oligonucleotide
  Antisense strand to SEQ ID NO: 1609525
uagaaucguguaaucaccg

SEQ ID NO: 1609527 - RNA, 19 nt, Artificial Sequence
  Description of Artificial Sequence: Synthetic oligonucleotide
  Sense strand starting at position 3223 of SEQ ID NO: 1560577
caaagaaaugcgugugaaa

SEQ ID NO: 1609528 - RNA, 19 nt, Artificial Sequence
  Description of Artificial Sequence: Synthetic oligonucleotide
  Antisense strand to SEQ ID NO: 1609527
uuucacacgcauuucuuug

SEQ ID NO: 1609529 - RNA, 19 nt, Artificial Sequence
  Description of Artificial Sequence: Synthetic oligonucleotide
  Sense strand starting at position 3250 of SEQ ID NO: 1560577
cgcagugugaucuguaguc

SEQ ID NO: 1609530 - RNA, 19 nt, Artificial Sequence
  Description of Artificial Sequence: Synthetic oligonucleotide
  Antisense strand to SEQ ID NO: 1609529
gacuacagaucacacugcg

SEQ ID NO: 1609531 - RNA, 19 nt, Artificial Sequence
  Description of Artificial Sequence: Synthetic oligonucleotide
  Sense strand starting at position 3252 of SEQ ID NO: 1560577
cagugugaucuguagucuc

SEQ ID NO: 1609532 - RNA, 19 nt, Artificial Sequence
  Description of Artificial Sequence: Synthetic oligonucleotide
  Antisense strand to SEQ ID NO: 1609531
gagacuacagaucacacug

SEQ ID NO: 1609533 - RNA, 19 nt, Artificial Sequence
  Description of Artificial Sequence: Synthetic oligonucleotide
  Sense strand starting at position 3255 of SEQ ID NO: 1560577
ugugaucuguagucucauu

SEQ ID NO: 1609534 - RNA, 19 nt, Artificial Sequence
  Description of Artificial Sequence: Synthetic oligonucleotide
  Antisense strand to SEQ ID NO: 1609533
aaugagacuacagaucaca

SEQ ID NO: 1609535 - RNA, 19 nt, Artificial Sequence
  Description of Artificial Sequence: Synthetic oligonucleotide
  Sense strand starting at position 3260 of SEQ ID NO: 1560577
ucuguagucucauuaauag

SEQ ID NO: 1609536 - RNA, 19 nt, Artificial Sequence
  Description of Artificial Sequence: Synthetic oligonucleotide
  Antisense strand to SEQ ID NO: 1609535
cuauuaaugagacuacaga

SEQ ID NO: 1609537 - RNA, 19 nt, Artificial Sequence
  Description of Artificial Sequence: Synthetic oligonucleotide
  Sense strand starting at position 3272 of SEQ ID NO: 1560577
uuaauaguuugguuucugu

SEQ ID NO: 1609538 - RNA, 19 nt, Artificial Sequence
  Description of Artificial Sequence: Synthetic oligonucleotide
  Antisense strand to SEQ ID NO: 1609537
acagaaaccaaacuauuaa

SEQ ID NO: 1609539 - RNA, 19 nt, Artificial Sequence
  Description of Artificial Sequence: Synthetic oligonucleotide
  Sense strand starting at position 3279 of SEQ ID NO: 1560577
uuugguuucuguguugauu

SEQ ID NO: 1609540 - RNA, 19 nt, Artificial Sequence
  Description of Artificial Sequence: Synthetic oligonucleotide
  Antisense strand to SEQ ID NO: 1609539
aaucaacacagaaaccaaa

SEQ ID NO: 1609541 - RNA, 19 nt, Artificial Sequence
  Description of Artificial Sequence: Synthetic oligonucleotide
  Sense strand starting at position 3288 of SEQ ID NO: 1560577
uguguugauuuccugguuu

SEQ ID NO: 1609542 - RNA, 19 nt, Artificial Sequence
  Description of Artificial Sequence: Synthetic oligonucleotide
  Antisense strand to SEQ ID NO: 1609541
aaaccaggaaaucaacaca

SEQ ID NO: 1609543 - RNA, 19 nt, Artificial Sequence
  Description of Artificial Sequence: Synthetic oligonucleotide
  Sense strand starting at position 3305 of SEQ ID NO: 1560577
uuccauucugaacgacagu

SEQ ID NO: 1609544 - RNA, 19 nt, Artificial Sequence
  Description of Artificial Sequence: Synthetic oligonucleotide
  Antisense strand to SEQ ID NO: 1609543
acugucguucagaauggaa

SEQ ID NO: 1609545 - RNA, 19 nt, Artificial Sequence
  Description of Artificial Sequence: Synthetic oligonucleotide
  Sense strand starting at position 3356 of SEQ ID NO: 1560577
gagggagauucccuaugcu

SEQ ID NO: 1609546 - RNA, 19 nt, Artificial Sequence
  Description of Artificial Sequence: Synthetic oligonucleotide
  Antisense strand to SEQ ID NO: 1609545
agcauagggaaucucccuc

SEQ ID NO: 1609547 - RNA, 19 nt, Artificial Sequence
  Description of Artificial Sequence: Synthetic oligonucleotide
  Sense strand starting at position 3391 of SEQ ID NO: 1560577
gugagucuguaauuaucuc

SEQ ID NO: 1609548 - RNA, 19 nt, Artificial Sequence
  Description of Artificial Sequence: Synthetic oligonucleotide
  Antisense strand to SEQ ID NO: 1609547
gagauaauuacagacucac

SEQ ID NO: 1609549 - RNA, 19 nt, Artificial Sequence
  Description of Artificial Sequence: Synthetic oligonucleotide
  Sense strand starting at position 3395 of SEQ ID NO: 1560577
gucuguaauuaucucaaag

SEQ ID NO: 1609550 - RNA, 19 nt, Artificial Sequence
  Description of Artificial Sequence: Synthetic oligonucleotide
  Antisense strand to SEQ ID NO: 1609549
cuuugagauaauuacagac

SEQ ID NO: 1609551 - RNA, 19 nt, Artificial Sequence
  Description of Artificial Sequence: Synthetic oligonucleotide
  Sense strand starting at position 3397 of SEQ ID NO: 1560577
cuguaauuaucucaaagga

SEQ ID NO: 1609552 - RNA, 19 nt, Artificial Sequence
  Description of Artificial Sequence: Synthetic oligonucleotide
  Antisense strand to SEQ ID NO: 1609551
uccuuugagauaauuacag

SEQ ID NO: 1609553 - RNA, 19 nt, Artificial Sequence
  Description of Artificial Sequence: Synthetic oligonucleotide
  Sense strand starting at position 3454 of SEQ ID NO: 1560577
aggucucccuguuccuaaa

SEQ ID NO: 1609554 - RNA, 19 nt, Artificial Sequence
  Description of Artificial Sequence: Synthetic oligonucleotide
  Antisense strand to SEQ ID NO: 1609553
uuuaggaacagggagaccu

SEQ ID NO: 1609555 - RNA, 19 nt, Artificial Sequence
  Description of Artificial Sequence: Synthetic oligonucleotide
  Sense strand starting at position 3489 of SEQ ID NO: 1560577
agcagaaggccuuggucaa

SEQ ID NO: 1609556 - RNA, 19 nt, Artificial Sequence
  Description of Artificial Sequence: Synthetic oligonucleotide
  Antisense strand to SEQ ID NO: 1609555
uugaccaaggccuucugcu

SEQ ID NO: 1609557 - RNA, 19 nt, Artificial Sequence
  Description of Artificial Sequence: Synthetic oligonucleotide
  Sense strand starting at position 3538 of SEQ ID NO: 1560577
gccacucuaucccugagau

SEQ ID NO: 1609558 - RNA, 19 nt, Artificial Sequence
  Description of Artificial Sequence: Synthetic oligonucleotide
  Antisense strand to SEQ ID NO: 1609557
aucucagggauagaguggc

SEQ ID NO: 1609559 - RNA, 19 nt, Artificial Sequence
  Description of Artificial Sequence: Synthetic oligonucleotide
  Sense strand starting at position 3907 of SEQ ID NO: 1560577
ggguucuuguguuuaugca

SEQ ID NO: 1609560 - RNA, 19 nt, Artificial Sequence
  Description of Artificial Sequence: Synthetic oligonucleotide
  Antisense strand to SEQ ID NO: 1609559
ugcauaaacacaagaaccc

SEQ ID NO: 1609561 - RNA, 19 nt, Artificial Sequence
  Description of Artificial Sequence: Synthetic oligonucleotide
  Sense strand starting at position 538 of SEQ ID NO: 1560578
uggagucacugauuggguu

SEQ ID NO: 1609562 - RNA, 19 nt, Artificial Sequence
  Description of Artificial Sequence: Synthetic oligonucleotide
  Antisense strand to SEQ ID NO: 1609561
aacccaaucagugacucca

SEQ ID NO: 1609563 - RNA, 19 nt, Artificial Sequence
  Description of Artificial Sequence: Synthetic oligonucleotide
  Sense strand starting at position 539 of SEQ ID NO: 1560578
ggagucacugauuggguuu

SEQ ID NO: 1609564 - RNA, 19 nt, Artificial Sequence
  Description of Artificial Sequence: Synthetic oligonucleotide
  Antisense strand to SEQ ID NO: 1609563
aaacccaaucagugacucc

SEQ ID NO: 1609565 - RNA, 19 nt, Artificial Sequence
  Description of Artificial Sequence: Synthetic oligonucleotide
  Sense strand starting at position 585 of SEQ ID NO: 1560578
uggagaggaugugaacaua

SEQ ID NO: 1609566 - RNA, 19 nt, Artificial Sequence
  Description of Artificial Sequence: Synthetic oligonucleotide
  Antisense strand to SEQ ID NO: 1609565
uauguucacauccucucca

SEQ ID NO: 1609567 - RNA, 19 nt, Artificial Sequence
  Description of Artificial Sequence: Synthetic oligonucleotide
  Sense strand starting at position 662 of SEQ ID NO: 1560578
acagaauggcauuaugcuu

SEQ ID NO: 1609568 - RNA, 19 nt, Artificial Sequence
  Description of Artificial Sequence: Synthetic oligonucleotide
  Antisense strand to SEQ ID NO: 1609567
aagcauaaugccauucugu

SEQ ID NO: 1609569 - RNA, 19 nt, Artificial Sequence
  Description of Artificial Sequence: Synthetic oligonucleotide
  Sense strand starting at position 667 of SEQ ID NO: 1560578
auggcauuaugcuuaagga

SEQ ID NO: 1609570 - RNA, 19 nt, Artificial Sequence
  Description of Artificial Sequence: Synthetic oligonucleotide
  Antisense strand to SEQ ID NO: 1609569
uccuuaagcauaaugccau

SEQ ID NO: 1609571 - RNA, 19 nt, Artificial Sequence
  Description of Artificial Sequence: Synthetic oligonucleotide
  Sense strand starting at position 668 of SEQ ID NO: 1560578
uggcauuaugcuuaaggac

SEQ ID NO: 1609572 - RNA, 19 nt, Artificial Sequence
  Description of Artificial Sequence: Synthetic oligonucleotide
  Antisense strand to SEQ ID NO: 1609571
guccuuaagcauaaugcca

SEQ ID NO: 1609573 - RNA, 19 nt, Artificial Sequence
  Description of Artificial Sequence: Synthetic oligonucleotide
  Sense strand starting at position 676 of SEQ ID NO: 1560578
ugcuuaaggacaugauuag

SEQ ID NO: 1609574 - RNA, 19 nt, Artificial Sequence
  Description of Artificial Sequence: Synthetic oligonucleotide
  Antisense strand to SEQ ID NO: 1609573
cuaaucauguccuuaagca

SEQ ID NO: 1609575 - RNA, 19 nt, Artificial Sequence
  Description of Artificial Sequence: Synthetic oligonucleotide
  Sense strand starting at position 682 of SEQ ID NO: 1560578
aggacaugauuagagacau

SEQ ID NO: 1609576 - RNA, 19 nt, Artificial Sequence
  Description of Artificial Sequence: Synthetic oligonucleotide
  Antisense strand to SEQ ID NO: 1609575
augucucuaaucauguccu

SEQ ID NO: 1609577 - RNA, 19 nt, Artificial Sequence
  Description of Artificial Sequence: Synthetic oligonucleotide
  Sense strand starting at position 1111 of SEQ ID NO: 1560578
gagggucauuuguggcaga

SEQ ID NO: 1609578 - RNA, 19 nt, Artificial Sequence
  Description of Artificial Sequence: Synthetic oligonucleotide
  Antisense strand to SEQ ID NO: 1609577
ucugccacaaaugacccuc

SEQ ID NO: 1609579 - RNA, 19 nt, Artificial Sequence
  Description of Artificial Sequence: Synthetic oligonucleotide
  Sense strand starting at position 1112 of SEQ ID NO: 1560578
agggucauuuguggcagaa

SEQ ID NO: 1609580 - RNA, 19 nt, Artificial Sequence
  Description of Artificial Sequence: Synthetic oligonucleotide
  Antisense strand to SEQ ID NO: 1609579
uucugccacaaaugacccu

SEQ ID NO: 1609581 - RNA, 19 nt, Artificial Sequence
  Description of Artificial Sequence: Synthetic oligonucleotide
  Sense strand starting at position 1116 of SEQ ID NO: 1560578
ucauuuguggcagaacguu

SEQ ID NO: 1609582 - RNA, 19 nt, Artificial Sequence
  Description of Artificial Sequence: Synthetic oligonucleotide
  Antisense strand to SEQ ID NO: 1609581
aacguucugccacaaauga

SEQ ID NO: 1609583 - RNA, 19 nt, Artificial Sequence
  Description of Artificial Sequence: Synthetic oligonucleotide
  Sense strand starting at position 1122 of SEQ ID NO: 1560578
guggcagaacguuaaugaa

SEQ ID NO: 1609584 - RNA, 19 nt, Artificial Sequence
  Description of Artificial Sequence: Synthetic oligonucleotide
  Antisense strand to SEQ ID NO: 1609583
uucauuaacguucugccac

SEQ ID NO: 1609585 - RNA, 19 nt, Artificial Sequence
  Description of Artificial Sequence: Synthetic oligonucleotide
  Sense strand starting at position 1168 of SEQ ID NO: 1560578
gaggcaucagguuacaauu

SEQ ID NO: 1609586 - RNA, 19 nt, Artificial Sequence
  Description of Artificial Sequence: Synthetic oligonucleotide
  Antisense strand to SEQ ID NO: 1609585
aauuguaaccugaugccuc

SEQ ID NO: 1609587 - RNA, 19 nt, Artificial Sequence
  Description of Artificial Sequence: Synthetic oligonucleotide
  Sense strand starting at position 1170 of SEQ ID NO: 1560578
ggcaucagguuacaauuaa

SEQ ID NO: 1609588 - RNA, 19 nt, Artificial Sequence
  Description of Artificial Sequence: Synthetic oligonucleotide
  Antisense strand to SEQ ID NO: 1609587
uuaauuguaaccugaugcc

SEQ ID NO: 1609589 - RNA, 19 nt, Artificial Sequence
  Description of Artificial Sequence: Synthetic oligonucleotide
  Sense strand starting at position 1182 of SEQ ID NO: 1560578
caauuaauuucuuggugug

SEQ ID NO: 1609590 - RNA, 19 nt, Artificial Sequence
  Description of Artificial Sequence: Synthetic oligonucleotide
  Antisense strand to SEQ ID NO: 1609589
cacaccaagaaauuaauug

SEQ ID NO: 1609591 - RNA, 19 nt, Artificial Sequence
  Description of Artificial Sequence: Synthetic oligonucleotide
  Sense strand starting at position 1183 of SEQ ID NO: 1560578
aauuaauuucuuggugugu

SEQ ID NO: 1609592 - RNA, 19 nt, Artificial Sequence
  Description of Artificial Sequence: Synthetic oligonucleotide
  Antisense strand to SEQ ID NO: 1609591
acacaccaagaaauuaauu

SEQ ID NO: 1609593 - RNA, 19 nt, Artificial Sequence
  Description of Artificial Sequence: Synthetic oligonucleotide
  Sense strand starting at position 1199 of SEQ ID NO: 1560578
uguggcagcugaguucaau

SEQ ID NO: 1609594 - RNA, 19 nt, Artificial Sequence
  Description of Artificial Sequence: Synthetic oligonucleotide
  Antisense strand to SEQ ID NO: 1609593
auugaacucagcugccaca

SEQ ID NO: 1609595 - RNA, 19 nt, Artificial Sequence
  Description of Artificial Sequence: Synthetic oligonucleotide
  Sense strand starting at position 1315 of SEQ ID NO: 1560578
acacauagacguuguaugu

SEQ ID NO: 1609596 - RNA, 19 nt, Artificial Sequence
  Description of Artificial Sequence: Synthetic oligonucleotide
  Antisense strand to SEQ ID NO: 1609595
acauacaacgucuaugugu

SEQ ID NO: 1609597 - RNA, 19 nt, Artificial Sequence
  Description of Artificial Sequence: Synthetic oligonucleotide
  Sense strand starting at position 1324 of SEQ ID NO: 1560578
cguuguauguaagcucuaa

SEQ ID NO: 1609598 - RNA, 19 nt, Artificial Sequence
  Description of Artificial Sequence: Synthetic oligonucleotide
  Antisense strand to SEQ ID NO: 1609597
uuagagcuuacauacaacg

SEQ ID NO: 1609599 - RNA, 19 nt, Artificial Sequence
  Description of Artificial Sequence: Synthetic oligonucleotide
  Sense strand starting at position 1328 of SEQ ID NO: 1560578
guauguaagcucuaagcac

SEQ ID NO: 1609600 - RNA, 19 nt, Artificial Sequence
  Description of Artificial Sequence: Synthetic oligonucleotide
  Antisense strand to SEQ ID NO: 1609599
gugcuuagagcuuacauac

SEQ ID NO: 1609601 - RNA, 19 nt, Artificial Sequence
  Description of Artificial Sequence: Synthetic oligonucleotide
  Sense strand starting at position 1427 of SEQ ID NO: 1560578
ccucaaagacccuguaaga

SEQ ID NO: 1609602 - RNA, 19 nt, Artificial Sequence
  Description of Artificial Sequence: Synthetic oligonucleotide
  Antisense strand to SEQ ID NO: 1609601
ucuuacagggucuuugagg

SEQ ID NO: 1609603 - RNA, 19 nt, Artificial Sequence
  Description of Artificial Sequence: Synthetic oligonucleotide
  Sense strand starting at position 1510 of SEQ ID NO: 1560578
ugucuaaugcuugcuaugu

SEQ ID NO: 1609604 - RNA, 19 nt, Artificial Sequence
  Description of Artificial Sequence: Synthetic oligonucleotide
  Antisense strand to SEQ ID NO: 1609603
acauagcaagcauuagaca

SEQ ID NO: 1609605 - RNA, 19 nt, Artificial Sequence
  Description of Artificial Sequence: Synthetic oligonucleotide
  Sense strand starting at position 1511 of SEQ ID NO: 1560578
gucuaaugcuugcuaugua

SEQ ID NO: 1609606 - RNA, 19 nt, Artificial Sequence
  Description of Artificial Sequence: Synthetic oligonucleotide
  Antisense strand to SEQ ID NO: 1609605
uacauagcaagcauuagac

SEQ ID NO: 1609607 - RNA, 19 nt, Artificial Sequence
  Description of Artificial Sequence: Synthetic oligonucleotide
  Sense strand starting at position 1527 of SEQ ID NO: 1560578
guauauuaccucuguuaug

SEQ ID NO: 1609608 - RNA, 19 nt, Artificial Sequence
  Description of Artificial Sequence: Synthetic oligonucleotide
  Antisense strand to SEQ ID NO: 1609607
cauaacagagguaauauac

SEQ ID NO: 1609609 - RNA, 19 nt, Artificial Sequence
  Description of Artificial Sequence: Synthetic oligonucleotide
  Sense strand starting at position 1549 of SEQ ID NO: 1560578
uugagaccucacuguuauu

SEQ ID NO: 1609610 - RNA, 19 nt, Artificial Sequence
  Description of Artificial Sequence: Synthetic oligonucleotide
  Antisense strand to SEQ ID NO: 1609609
aauaacagugaggucucaa

SEQ ID NO: 1609611 - RNA, 19 nt, Artificial Sequence
  Description of Artificial Sequence: Synthetic oligonucleotide
  Sense strand starting at position 1582 of SEQ ID NO: 1560578
cugucuuauagagaaggca

SEQ ID NO: 1609612 - RNA, 19 nt, Artificial Sequence
  Description of Artificial Sequence: Synthetic oligonucleotide
  Antisense strand to SEQ ID NO: 1609611
ugccuucucuauaagacag

SEQ ID NO: 1609613 - RNA, 19 nt, Artificial Sequence
  Description of Artificial Sequence: Synthetic oligonucleotide
  Sense strand starting at position 1668 of SEQ ID NO: 1560578
ucagcucagguuuguguaa

SEQ ID NO: 1609614 - RNA, 19 nt, Artificial Sequence
  Description of Artificial Sequence: Synthetic oligonucleotide
  Antisense strand to SEQ ID NO: 1609613
uuacacaaaccugagcuga

SEQ ID NO: 1609615 - RNA, 19 nt, Artificial Sequence
  Description of Artificial Sequence: Synthetic oligonucleotide
  Sense strand starting at position 1810 of SEQ ID NO: 1560578
gaaggaucuuuaguggucu

SEQ ID NO: 1609616 - RNA, 19 nt, Artificial Sequence
  Description of Artificial Sequence: Synthetic oligonucleotide
  Antisense strand to SEQ ID NO: 1609615
agaccacuaaagauccuuc

SEQ ID NO: 1609617 - RNA, 19 nt, Artificial Sequence
  Description of Artificial Sequence: Synthetic oligonucleotide
  Sense strand starting at position 1818 of SEQ ID NO: 1560578
uuuaguggucucuggguga

SEQ ID NO: 1609618 - RNA, 19 nt, Artificial Sequence
  Description of Artificial Sequence: Synthetic oligonucleotide
  Antisense strand to SEQ ID NO: 1609617
ucacccagagaccacuaaa

SEQ ID NO: 1609619 - RNA, 19 nt, Artificial Sequence
  Description of Artificial Sequence: Synthetic oligonucleotide
  Sense strand starting at position 1822 of SEQ ID NO: 1560578
guggucucugggugaggua

SEQ ID NO: 1609620 - RNA, 19 nt, Artificial Sequence
  Description of Artificial Sequence: Synthetic oligonucleotide
  Antisense strand to SEQ ID NO: 1609619
uaccucacccagagaccac

SEQ ID NO: 1609621 - RNA, 19 nt, Artificial Sequence
  Description of Artificial Sequence: Synthetic oligonucleotide
  Sense strand starting at position 2676 of SEQ ID NO: 1560578
cccaaagggucuuucuaca

SEQ ID NO: 1609622 - RNA, 19 nt, Artificial Sequence
  Description of Artificial Sequence: Synthetic oligonucleotide
  Antisense strand to SEQ ID NO: 1609621
uguagaaagacccuuuggg

SEQ ID NO: 1609623 - RNA, 19 nt, Artificial Sequence
  Description of Artificial Sequence: Synthetic oligonucleotide
  Sense strand starting at position 3406 of SEQ ID NO: 1560578
ggaagcuuugagggugaau

SEQ ID NO: 1609624 - RNA, 19 nt, Artificial Sequence
  Description of Artificial Sequence: Synthetic oligonucleotide
  Antisense strand to SEQ ID NO: 1609623
auucacccucaaagcuucc

SEQ ID NO: 1609625 - RNA, 19 nt, Artificial Sequence
  Description of Artificial Sequence: Synthetic oligonucleotide
  Sense strand starting at position 3409 of SEQ ID NO: 1560578
agcuuugagggugaauuga

SEQ ID NO: 1609626 - RNA, 19 nt, Artificial Sequence
  Description of Artificial Sequence: Synthetic oligonucleotide
  Antisense strand to SEQ ID NO: 1609625
ucaauucacccucaaagcu

SEQ ID NO: 1609627 - RNA, 19 nt, Artificial Sequence
  Description of Artificial Sequence: Synthetic oligonucleotide
  Sense strand starting at position 3455 of SEQ ID NO: 1560578
ucaucuuuguccucugaca

SEQ ID NO: 1609628 - RNA, 19 nt, Artificial Sequence
  Description of Artificial Sequence: Synthetic oligonucleotide
  Antisense strand to SEQ ID NO: 1609627
ugucagaggacaaagauga

SEQ ID NO: 1609629 - RNA, 19 nt, Artificial Sequence
  Description of Artificial Sequence: Synthetic oligonucleotide
  Sense strand starting at position 3457 of SEQ ID NO: 1560578
aucuuuguccucugacacu

SEQ ID NO: 1609630 - RNA, 19 nt, Artificial Sequence
  Description of Artificial Sequence: Synthetic oligonucleotide
  Antisense strand to SEQ ID NO: 1609629
agugucagaggacaaagau

SEQ ID NO: 1609631 - RNA, 19 nt, Artificial Sequence
  Description of Artificial Sequence: Synthetic oligonucleotide
  Sense strand starting at position 3580 of SEQ ID NO: 1560578
ugaggucuggccuguucuu

SEQ ID NO: 1609632 - RNA, 19 nt, Artificial Sequence
  Description of Artificial Sequence: Synthetic oligonucleotide
  Antisense strand to SEQ ID NO: 1609631
aagaacaggccagaccuca

SEQ ID NO: 1609633 - RNA, 19 nt, Artificial Sequence
  Description of Artificial Sequence: Synthetic oligonucleotide
  Sense strand starting at position 3696 of SEQ ID NO: 1560578
ggagguugugcugaacuga

SEQ ID NO: 1609634 - RNA, 19 nt, Artificial Sequence
  Description of Artificial Sequence: Synthetic oligonucleotide
  Antisense strand to SEQ ID NO: 1609633
ucaguucagcacaaccucc

SEQ ID NO: 1609635 - RNA, 19 nt, Artificial Sequence
  Description of Artificial Sequence: Synthetic oligonucleotide
  Sense strand starting at position 3714 of SEQ ID NO: 1560578
acuugaacccgugaucacu

SEQ ID NO: 1609636 - RNA, 19 nt, Artificial Sequence
  Description of Artificial Sequence: Synthetic oligonucleotide
  Antisense strand to SEQ ID NO: 1609635
agugaucacggguucaagu

SEQ ID NO: 1609637 - RNA, 19 nt, Artificial Sequence
  Description of Artificial Sequence: Synthetic oligonucleotide
  Sense strand starting at position 3741 of SEQ ID NO: 1560578
cguucuuggcucugauaca

SEQ ID NO: 1609638 - RNA, 19 nt, Artificial Sequence
  Description of Artificial Sequence: Synthetic oligonucleotide
  Antisense strand to SEQ ID NO: 1609637
uguaucagagccaagaacg

SEQ ID NO: 1609639 - RNA, 19 nt, Artificial Sequence
  Description of Artificial Sequence: Synthetic oligonucleotide
  Sense strand starting at position 3977 of SEQ ID NO: 1560578
cccucagucuugucucaaa

SEQ ID NO: 1609640 - RNA, 19 nt, Artificial Sequence
  Description of Artificial Sequence: Synthetic oligonucleotide
  Antisense strand to SEQ ID NO: 1609639
uuugagacaagacugaggg

SEQ ID NO: 1609641 - RNA, 19 nt, Artificial Sequence
  Description of Artificial Sequence: Synthetic oligonucleotide
  Sense strand starting at position 30 of SEQ ID NO: 1560579
cagagagugcugugcaaug

SEQ ID NO: 1609642 - RNA, 19 nt, Artificial Sequence
  Description of Artificial Sequence: Synthetic oligonucleotide
  Antisense strand to SEQ ID NO: 1609641
cauugcacagcacucucug

SEQ ID NO: 1609643 - RNA, 19 nt, Artificial Sequence
  Description of Artificial Sequence: Synthetic oligonucleotide
  Sense strand starting at position 126 of SEQ ID NO: 1560579
ggguguguucaguagugau

SEQ ID NO: 1609644 - RNA, 19 nt, Artificial Sequence
  Description of Artificial Sequence: Synthetic oligonucleotide
  Antisense strand to SEQ ID NO: 1609643
aucacuacugaacacaccc

SEQ ID NO: 1609645 - RNA, 19 nt, Artificial Sequence
  Description of Artificial Sequence: Synthetic oligonucleotide
  Sense strand starting at position 458 of SEQ ID NO: 1560579
gaagccucaccugagaagu

SEQ ID NO: 1609646 - RNA, 19 nt, Artificial Sequence
  Description of Artificial Sequence: Synthetic oligonucleotide
  Antisense strand to SEQ ID NO: 1609645
acuucucaggugaggcuuc

SEQ ID NO: 1609647 - RNA, 19 nt, Artificial Sequence
  Description of Artificial Sequence: Synthetic oligonucleotide
  Sense strand starting at position 855 of SEQ ID NO: 1560579
cuggcaauucuguagcuau

SEQ ID NO: 1609648 - RNA, 19 nt, Artificial Sequence
  Description of Artificial Sequence: Synthetic oligonucleotide
  Antisense strand to SEQ ID NO: 1609647
auagcuacagaauugccag

SEQ ID NO: 1609649 - RNA, 19 nt, Artificial Sequence
  Description of Artificial Sequence: Synthetic oligonucleotide
  Sense strand starting at position 998 of SEQ ID NO: 1560579
uugggucauuuggagugau

SEQ ID NO: 1609650 - RNA, 19 nt, Artificial Sequence
  Description of Artificial Sequence: Synthetic oligonucleotide
  Antisense strand to SEQ ID NO: 1609649
aucacuccaaaugacccaa

SEQ ID NO: 1609651 - RNA, 19 nt, Artificial Sequence
  Description of Artificial Sequence: Synthetic oligonucleotide
  Sense strand starting at position 1094 of SEQ ID NO: 1560579
aggauaagugcccagugga

SEQ ID NO: 1609652 - RNA, 19 nt, Artificial Sequence
  Description of Artificial Sequence: Synthetic oligonucleotide
  Antisense strand to SEQ ID NO: 1609651
uccacugggcacuuauccu

SEQ ID NO: 1609653 - RNA, 19 nt, Artificial Sequence
  Description of Artificial Sequence: Synthetic oligonucleotide
  Sense strand starting at position 1115 of SEQ ID NO: 1560579
gguuuaguugcugggagag

SEQ ID NO: 1609654 - RNA, 19 nt, Artificial Sequence
  Description of Artificial Sequence: Synthetic oligonucleotide
  Antisense strand to SEQ ID NO: 1609653
cucucccagcaacuaaacc

SEQ ID NO: 1609655 - RNA, 19 nt, Artificial Sequence
  Description of Artificial Sequence: Synthetic oligonucleotide
  Sense strand starting at position 1144 of SEQ ID NO: 1560579
gaugguuuaccauguccaa

SEQ ID NO: 1609656 - RNA, 19 nt, Artificial Sequence
  Description of Artificial Sequence: Synthetic oligonucleotide
  Antisense strand to SEQ ID NO: 1609655
uuggacaugguaaaccauc

SEQ ID NO: 1609657 - RNA, 19 nt, Artificial Sequence
  Description of Artificial Sequence: Synthetic oligonucleotide
  Sense strand starting at position 1172 of SEQ ID NO: 1560579
aacaguucugccugaguug

SEQ ID NO: 1609658 - RNA, 19 nt, Artificial Sequence
  Description of Artificial Sequence: Synthetic oligonucleotide
  Antisense strand to SEQ ID NO: 1609657
caacucaggcagaacuguu

SEQ ID NO: 1609659 - RNA, 19 nt, Artificial Sequence
  Description of Artificial Sequence: Synthetic oligonucleotide
  Sense strand starting at position 1173 of SEQ ID NO: 1560579
acaguucugccugaguugu

SEQ ID NO: 1609660 - RNA, 19 nt, Artificial Sequence
  Description of Artificial Sequence: Synthetic oligonucleotide
  Antisense strand to SEQ ID NO: 1609659
acaacucaggcagaacugu

SEQ ID NO: 1609661 - RNA, 19 nt, Artificial Sequence
  Description of Artificial Sequence: Synthetic oligonucleotide
  Sense strand starting at position 1181 of SEQ ID NO: 1560579
gccugaguuguuucuugcu

SEQ ID NO: 1609662 - RNA, 19 nt, Artificial Sequence
  Description of Artificial Sequence: Synthetic oligonucleotide
  Antisense strand to SEQ ID NO: 1609661
agcaagaaacaacucaggc

SEQ ID NO: 1609663 - RNA, 19 nt, Artificial Sequence
  Description of Artificial Sequence: Synthetic oligonucleotide
  Sense strand starting at position 1431 of SEQ ID NO: 1560579
gaaggaagugucuggugga

SEQ ID NO: 1609664 - RNA, 19 nt, Artificial Sequence
  Description of Artificial Sequence: Synthetic oligonucleotide
  Antisense strand to SEQ ID NO: 1609663
uccaccagacacuuccuuc

SEQ ID NO: 1609665 - RNA, 19 nt, Artificial Sequence
  Description of Artificial Sequence: Synthetic oligonucleotide
  Sense strand starting at position 1444 of SEQ ID NO: 1560579
gguggaaucuggguuuccu

SEQ ID NO: 1609666 - RNA, 19 nt, Artificial Sequence
  Description of Artificial Sequence: Synthetic oligonucleotide
  Antisense strand to SEQ ID NO: 1609665
aggaaacccagauuccacc

SEQ ID NO: 1609667 - RNA, 19 nt, Artificial Sequence
  Description of Artificial Sequence: Synthetic oligonucleotide
  Sense strand starting at position 1532 of SEQ ID NO: 1560579
aagucaguagacuguggua

SEQ ID NO: 1609668 - RNA, 19 nt, Artificial Sequence
  Description of Artificial Sequence: Synthetic oligonucleotide
  Antisense strand to SEQ ID NO: 1609667
uaccacagucuacugacuu

SEQ ID NO: 1609669 - RNA, 19 nt, Artificial Sequence
  Description of Artificial Sequence: Synthetic oligonucleotide
  Sense strand starting at position 1650 of SEQ ID NO: 1560579
cagagaugcccaggaacuu

SEQ ID NO: 1609670 - RNA, 19 nt, Artificial Sequence
  Description of Artificial Sequence: Synthetic oligonucleotide
  Antisense strand to SEQ ID NO: 1609669
aaguuccugggcaucucug

SEQ ID NO: 1609671 - RNA, 19 nt, Artificial Sequence
  Description of Artificial Sequence: Synthetic oligonucleotide
  Sense strand starting at position 1662 of SEQ ID NO: 1560579
ggaacuugcucuuuaguaa

SEQ ID NO: 1609672 - RNA, 19 nt, Artificial Sequence
  Description of Artificial Sequence: Synthetic oligonucleotide
  Antisense strand to SEQ ID NO: 1609671
uuacuaaagagcaaguucc

SEQ ID NO: 1609673 - RNA, 19 nt, Artificial Sequence
  Description of Artificial Sequence: Synthetic oligonucleotide
  Sense strand starting at position 1759 of SEQ ID NO: 1560579
gggcaugaggacuauugca

SEQ ID NO: 1609674 - RNA, 19 nt, Artificial Sequence
  Description of Artificial Sequence: Synthetic oligonucleotide
  Antisense strand to SEQ ID NO: 1609673
ugcaauaguccucaugccc

SEQ ID NO: 1609675 - RNA, 19 nt, Artificial Sequence
  Description of Artificial Sequence: Synthetic oligonucleotide
  Sense strand starting at position 1767 of SEQ ID NO: 1560579
ggacuauugcaauguggaa

SEQ ID NO: 1609676 - RNA, 19 nt, Artificial Sequence
  Description of Artificial Sequence: Synthetic oligonucleotide
  Antisense strand to SEQ ID NO: 1609675
uuccacauugcaauagucc

SEQ ID NO: 1609677 - RNA, 19 nt, Artificial Sequence
  Description of Artificial Sequence: Synthetic oligonucleotide
  Sense strand starting at position 1769 of SEQ ID NO: 1560579
acuauugcaauguggaaga

SEQ ID NO: 1609678 - RNA, 19 nt, Artificial Sequence
  Description of Artificial Sequence: Synthetic oligonucleotide
  Antisense strand to SEQ ID NO: 1609677
ucuuccacauugcaauagu

SEQ ID NO: 1609679 - RNA, 19 nt, Artificial Sequence
  Description of Artificial Sequence: Synthetic oligonucleotide
  Sense strand starting at position 1795 of SEQ ID NO: 1560579
gcacauugucugggcugaa

SEQ ID NO: 1609680 - RNA, 19 nt, Artificial Sequence
  Description of Artificial Sequence: Synthetic oligonucleotide
  Antisense strand to SEQ ID NO: 1609679
uucagcccagacaaugugc

SEQ ID NO: 1609681 - RNA, 19 nt, Artificial Sequence
  Description of Artificial Sequence: Synthetic oligonucleotide
  Sense strand starting at position 1858 of SEQ ID NO: 1560579
agggcuucagcauaagagu

SEQ ID NO: 1609682 - RNA, 19 nt, Artificial Sequence
  Description of Artificial Sequence: Synthetic oligonucleotide
  Antisense strand to SEQ ID NO: 1609681
acucuuaugcugaagcccu

SEQ ID NO: 1609683 - RNA, 19 nt, Artificial Sequence
  Description of Artificial Sequence: Synthetic oligonucleotide
  Sense strand starting at position 2234 of SEQ ID NO: 1560579
ggaucauggagaugugauc

SEQ ID NO: 1609684 - RNA, 19 nt, Artificial Sequence
  Description of Artificial Sequence: Synthetic oligonucleotide
  Antisense strand to SEQ ID NO: 1609683
gaucacaucuccaugaucc

SEQ ID NO: 1609685 - RNA, 19 nt, Artificial Sequence
  Description of Artificial Sequence: Synthetic oligonucleotide
  Sense strand starting at position 2302 of SEQ ID NO: 1560579
uugggaugaucacugauuc

SEQ ID NO: 1609686 - RNA, 19 nt, Artificial Sequence
  Description of Artificial Sequence: Synthetic oligonucleotide
  Antisense strand to SEQ ID NO: 1609685
gaaucagugaucaucccaa

SEQ ID NO: 1609687 - RNA, 19 nt, Artificial Sequence
  Description of Artificial Sequence: Synthetic oligonucleotide
  Sense strand starting at position 2303 of SEQ ID NO: 1560579
ugggaugaucacugauucu

SEQ ID NO: 1609688 - RNA, 19 nt, Artificial Sequence
  Description of Artificial Sequence: Synthetic oligonucleotide
  Antisense strand to SEQ ID NO: 1609687
agaaucagugaucauccca

SEQ ID NO: 1609689 - RNA, 19 nt, Artificial Sequence
  Description of Artificial Sequence: Synthetic oligonucleotide
  Sense strand starting at position 2429 of SEQ ID NO: 1560579
ugucucagccuccaggaua

SEQ ID NO: 1609690 - RNA, 19 nt, Artificial Sequence
  Description of Artificial Sequence: Synthetic oligonucleotide
  Antisense strand to SEQ ID NO: 1609689
uauccuggaggcugagaca

SEQ ID NO: 1609691 - RNA, 19 nt, Artificial Sequence
  Description of Artificial Sequence: Synthetic oligonucleotide
  Sense strand starting at position 2695 of SEQ ID NO: 1560579
ccugaaauaucagaaugau

SEQ ID NO: 1609692 - RNA, 19 nt, Artificial Sequence
  Description of Artificial Sequence: Synthetic oligonucleotide
  Antisense strand to SEQ ID NO: 1609691
aucauucugauauuucagg

SEQ ID NO: 1609693 - RNA, 19 nt, Artificial Sequence
  Description of Artificial Sequence: Synthetic oligonucleotide
  Sense strand starting at position 2701 of SEQ ID NO: 1560579
auaucagaaugaucggauu

SEQ ID NO: 1609694 - RNA, 19 nt, Artificial Sequence
  Description of Artificial Sequence: Synthetic oligonucleotide
  Antisense strand to SEQ ID NO: 1609693
aauccgaucauucugauau

SEQ ID NO: 1609695 - RNA, 19 nt, Artificial Sequence
  Description of Artificial Sequence: Synthetic oligonucleotide
  Sense strand starting at position 2707 of SEQ ID NO: 1560579
gaaugaucggauugugaga

SEQ ID NO: 1609696 - RNA, 19 nt, Artificial Sequence
  Description of Artificial Sequence: Synthetic oligonucleotide
  Antisense strand to SEQ ID NO: 1609695
ucucacaauccgaucauuc

SEQ ID NO: 1609697 - RNA, 19 nt, Artificial Sequence
  Description of Artificial Sequence: Synthetic oligonucleotide
  Sense strand starting at position 2720 of SEQ ID NO: 1560579
gugagacuuccuggucccu

SEQ ID NO: 1609698 - RNA, 19 nt, Artificial Sequence
  Description of Artificial Sequence: Synthetic oligonucleotide
  Antisense strand to SEQ ID NO: 1609697
agggaccaggaagucucac

SEQ ID NO: 1609699 - RNA, 19 nt, Artificial Sequence
  Description of Artificial Sequence: Synthetic oligonucleotide
  Sense strand starting at position 2722 of SEQ ID NO: 1560579
gagacuuccuggucccuau

SEQ ID NO: 1609700 - RNA, 19 nt, Artificial Sequence
  Description of Artificial Sequence: Synthetic oligonucleotide
  Antisense strand to SEQ ID NO: 1609699
auagggaccaggaagucuc

SEQ ID NO: 1609701 - RNA, 19 nt, Artificial Sequence
  Description of Artificial Sequence: Synthetic oligonucleotide
  Sense strand starting at position 3049 of SEQ ID NO: 1560579
gcccuccuaggucagaauu

SEQ ID NO: 1609702 - RNA, 19 nt, Artificial Sequence
  Description of Artificial Sequence: Synthetic oligonucleotide
  Antisense strand to SEQ ID NO: 1609701
aauucugaccuaggagggc

SEQ ID NO: 1609703 - RNA, 19 nt, Artificial Sequence
  Description of Artificial Sequence: Synthetic oligonucleotide
  Sense strand starting at position 3057 of SEQ ID NO: 1560579
aggucagaauuguccucau

SEQ ID NO: 1609704 - RNA, 19 nt, Artificial Sequence
  Description of Artificial Sequence: Synthetic oligonucleotide
  Antisense strand to SEQ ID NO: 1609703
augaggacaauucugaccu

SEQ ID NO: 1609705 - RNA, 19 nt, Artificial Sequence
  Description of Artificial Sequence: Synthetic oligonucleotide
  Sense strand starting at position 3101 of SEQ ID NO: 1560579
ugaaaugucuagcuaucag

SEQ ID NO: 1609706 - RNA, 19 nt, Artificial Sequence
  Description of Artificial Sequence: Synthetic oligonucleotide
  Antisense strand to SEQ ID NO: 1609705
cugauagcuagacauuuca

SEQ ID NO: 1609707 - RNA, 19 nt, Artificial Sequence
  Description of Artificial Sequence: Synthetic oligonucleotide
  Sense strand starting at position 3475 of SEQ ID NO: 1560579
aaagaauuaggguggcauu

SEQ ID NO: 1609708 - RNA, 19 nt, Artificial Sequence
  Description of Artificial Sequence: Synthetic oligonucleotide
  Antisense strand to SEQ ID NO: 1609707
aaugccacccuaauucuuu

SEQ ID NO: 1609709 - RNA, 19 nt, Artificial Sequence
  Description of Artificial Sequence: Synthetic oligonucleotide
  Sense strand starting at position 3556 of SEQ ID NO: 1560579
auuauaagaguccacuguu

SEQ ID NO: 1609710 - RNA, 19 nt, Artificial Sequence
  Description of Artificial Sequence: Synthetic oligonucleotide
  Antisense strand to SEQ ID NO: 1609709
aacaguggacucuuauaau

SEQ ID NO: 1609711 - RNA, 19 nt, Artificial Sequence
  Description of Artificial Sequence: Synthetic oligonucleotide
  Sense strand starting at position 3559 of SEQ ID NO: 1560579
auaagaguccacuguuaac

SEQ ID NO: 1609712 - RNA, 19 nt, Artificial Sequence
  Description of Artificial Sequence: Synthetic oligonucleotide
  Antisense strand to SEQ ID NO: 1609711
guuaacaguggacucuuau

SEQ ID NO: 1609713 - RNA, 19 nt, Artificial Sequence
  Description of Artificial Sequence: Synthetic oligonucleotide
  Sense strand starting at position 3565 of SEQ ID NO: 1560579
guccacuguuaacucuaua

SEQ ID NO: 1609714 - RNA, 19 nt, Artificial Sequence
  Description of Artificial Sequence: Synthetic oligonucleotide
  Antisense strand to SEQ ID NO: 1609713
uauagaguuaacaguggac

SEQ ID NO: 1609715 - RNA, 19 nt, Artificial Sequence
  Description of Artificial Sequence: Synthetic oligonucleotide
  Sense strand starting at position 3824 of SEQ ID NO: 1560579
accacucguucccuggaau

SEQ ID NO: 1609716 - RNA, 19 nt, Artificial Sequence
  Description of Artificial Sequence: Synthetic oligonucleotide
  Antisense strand to SEQ ID NO: 1609715
auuccagggaacgaguggu

SEQ ID NO: 1609717 - RNA, 19 nt, Artificial Sequence
  Description of Artificial Sequence: Synthetic oligonucleotide
  Sense strand starting at position 3860 of SEQ ID NO: 1560579
uuugccucagcuugaauga

SEQ ID NO: 1609718 - RNA, 19 nt, Artificial Sequence
  Description of Artificial Sequence: Synthetic oligonucleotide
  Antisense strand to SEQ ID NO: 1609717
ucauucaagcugaggcaaa

SEQ ID NO: 1609719 - RNA, 19 nt, Artificial Sequence
  Description of Artificial Sequence: Synthetic oligonucleotide
  Sense strand starting at position 3884 of SEQ ID NO: 1560579
accugaauccaguguccca

SEQ ID NO: 1609720 - RNA, 19 nt, Artificial Sequence
  Description of Artificial Sequence: Synthetic oligonucleotide
  Antisense strand to SEQ ID NO: 1609719
ugggacacuggauucaggu

SEQ ID NO: 1609721 - RNA, 19 nt, Artificial Sequence
  Description of Artificial Sequence: Synthetic oligonucleotide
  Sense strand starting at position 272 of SEQ ID NO: 1560580
gccaguuaccaagagacau

SEQ ID NO: 1609722 - RNA, 19 nt, Artificial Sequence
  Description of Artificial Sequence: Synthetic oligonucleotide
  Antisense strand to SEQ ID NO: 1609721
augucucuugguaacuggc

SEQ ID NO: 1609723 - RNA, 19 nt, Artificial Sequence
  Description of Artificial Sequence: Synthetic oligonucleotide
  Sense strand starting at position 793 of SEQ ID NO: 1560580
cugggaguccugggacaug

SEQ ID NO: 1609724 - RNA, 19 nt, Artificial Sequence
  Description of Artificial Sequence: Synthetic oligonucleotide
  Antisense strand to SEQ ID NO: 1609723
caugucccaggacucccag

SEQ ID NO: 1609725 - RNA, 19 nt, Artificial Sequence
  Description of Artificial Sequence: Synthetic oligonucleotide
  Sense strand starting at position 823 of SEQ ID NO: 1560580
cugggaaaggcugggaauu

SEQ ID NO: 1609726 - RNA, 19 nt, Artificial Sequence
  Description of Artificial Sequence: Synthetic oligonucleotide
  Antisense strand to SEQ ID NO: 1609725
aauucccagccuuucccag

SEQ ID NO: 1609727 - RNA, 19 nt, Artificial Sequence
  Description of Artificial Sequence: Synthetic oligonucleotide
  Sense strand starting at position 842 of SEQ ID NO: 1560580
cugucaaucuucccuaggu

SEQ ID NO: 1609728 - RNA, 19 nt, Artificial Sequence
  Description of Artificial Sequence: Synthetic oligonucleotide
  Antisense strand to SEQ ID NO: 1609727
accuagggaagauugacag

SEQ ID NO: 1609729 - RNA, 19 nt, Artificial Sequence
  Description of Artificial Sequence: Synthetic oligonucleotide
  Sense strand starting at position 843 of SEQ ID NO: 1560580
ugucaaucuucccuagguu

SEQ ID NO: 1609730 - RNA, 19 nt, Artificial Sequence
  Description of Artificial Sequence: Synthetic oligonucleotide
  Antisense strand to SEQ ID NO: 1609729
aaccuagggaagauugaca

SEQ ID NO: 1609731 - RNA, 19 nt, Artificial Sequence
  Description of Artificial Sequence: Synthetic oligonucleotide
  Sense strand starting at position 844 of SEQ ID NO: 1560580
gucaaucuucccuagguuu

SEQ ID NO: 1609732 - RNA, 19 nt, Artificial Sequence
  Description of Artificial Sequence: Synthetic oligonucleotide
  Antisense strand to SEQ ID NO: 1609731
aaaccuagggaagauugac

SEQ ID NO: 1609733 - RNA, 19 nt, Artificial Sequence
  Description of Artificial Sequence: Synthetic oligonucleotide
  Sense strand starting at position 1230 of SEQ ID NO: 1560580
gaaucagagagcuggcagu

SEQ ID NO: 1609734 - RNA, 19 nt, Artificial Sequence
  Description of Artificial Sequence: Synthetic oligonucleotide
  Antisense strand to SEQ ID NO: 1609733
acugccagcucucugauuc

SEQ ID NO: 1609735 - RNA, 19 nt, Artificial Sequence
  Description of Artificial Sequence: Synthetic oligonucleotide
  Sense strand starting at position 1406 of SEQ ID NO: 1560580
ggaggugucugguuggcau

SEQ ID NO: 1609736 - RNA, 19 nt, Artificial Sequence
  Description of Artificial Sequence: Synthetic oligonucleotide
  Antisense strand to SEQ ID NO: 1609735
augccaaccagacaccucc

SEQ ID NO: 1609737 - RNA, 19 nt, Artificial Sequence
  Description of Artificial Sequence: Synthetic oligonucleotide
  Sense strand starting at position 1428 of SEQ ID NO: 1560580
gguauccuagggcaagauu

SEQ ID NO: 1609738 - RNA, 19 nt, Artificial Sequence
  Description of Artificial Sequence: Synthetic oligonucleotide
  Antisense strand to SEQ ID NO: 1609737
aaucuugcccuaggauacc

SEQ ID NO: 1609739 - RNA, 19 nt, Artificial Sequence
  Description of Artificial Sequence: Synthetic oligonucleotide
  Sense strand starting at position 1457 of SEQ ID NO: 1560580
gcaucaaggucucugggau

SEQ ID NO: 1609740 - RNA, 19 nt, Artificial Sequence
  Description of Artificial Sequence: Synthetic oligonucleotide
  Antisense strand to SEQ ID NO: 1609739
aucccagagaccuugaugc

SEQ ID NO: 1609741 - RNA, 19 nt, Artificial Sequence
  Description of Artificial Sequence: Synthetic oligonucleotide
  Sense strand starting at position 1458 of SEQ ID NO: 1560580
caucaaggucucugggaua

SEQ ID NO: 1609742 - RNA, 19 nt, Artificial Sequence
  Description of Artificial Sequence: Synthetic oligonucleotide
  Antisense strand to SEQ ID NO: 1609741
uaucccagagaccuugaug

SEQ ID NO: 1609743 - RNA, 19 nt, Artificial Sequence
  Description of Artificial Sequence: Synthetic oligonucleotide
  Sense strand starting at position 1505 of SEQ ID NO: 1560580
aagucaguagacugugaua

SEQ ID NO: 1609744 - RNA, 19 nt, Artificial Sequence
  Description of Artificial Sequence: Synthetic oligonucleotide
  Antisense strand to SEQ ID NO: 1609743
uaucacagucuacugacuu

SEQ ID NO: 1609745 - RNA, 19 nt, Artificial Sequence
  Description of Artificial Sequence: Synthetic oligonucleotide
  Sense strand starting at position 1550 of SEQ ID NO: 1560580
agugauacgguccaaggaa

SEQ ID NO: 1609746 - RNA, 19 nt, Artificial Sequence
  Description of Artificial Sequence: Synthetic oligonucleotide
  Antisense strand to SEQ ID NO: 1609745
uuccuuggaccguaucacu

SEQ ID NO: 1609747 - RNA, 19 nt, Artificial Sequence
  Description of Artificial Sequence: Synthetic oligonucleotide
  Sense strand starting at position 1574 of SEQ ID NO: 1560580
ggcauugagagagguccuu

SEQ ID NO: 1609748 - RNA, 19 nt, Artificial Sequence
  Description of Artificial Sequence: Synthetic oligonucleotide
  Antisense strand to SEQ ID NO: 1609747
aaggaccucucucaaugcc

SEQ ID NO: 1609749 - RNA, 19 nt, Artificial Sequence
  Description of Artificial Sequence: Synthetic oligonucleotide
  Sense strand starting at position 1580 of SEQ ID NO: 1560580
gagagagguccuuggaggu

SEQ ID NO: 1609750 - RNA, 19 nt, Artificial Sequence
  Description of Artificial Sequence: Synthetic oligonucleotide
  Antisense strand to SEQ ID NO: 1609749
accuccaaggaccucucuc

SEQ ID NO: 1609751 - RNA, 19 nt, Artificial Sequence
  Description of Artificial Sequence: Synthetic oligonucleotide
  Sense strand starting at position 1622 of SEQ ID NO: 1560580
cggagaugcccaggaacuu

SEQ ID NO: 1609752 - RNA, 19 nt, Artificial Sequence
  Description of Artificial Sequence: Synthetic oligonucleotide
  Antisense strand to SEQ ID NO: 1609751
aaguuccugggcaucuccg

SEQ ID NO: 1609753 - RNA, 19 nt, Artificial Sequence
  Description of Artificial Sequence: Synthetic oligonucleotide
  Sense strand starting at position 2158 of SEQ ID NO: 1560580
gcacuugcuguucugcaau

SEQ ID NO: 1609754 - RNA, 19 nt, Artificial Sequence
  Description of Artificial Sequence: Synthetic oligonucleotide
  Antisense strand to SEQ ID NO: 1609753
auugcagaacagcaagugc

SEQ ID NO: 1609755 - RNA, 19 nt, Artificial Sequence
  Description of Artificial Sequence: Synthetic oligonucleotide
  Sense strand starting at position 2341 of SEQ ID NO: 1560580
cccagugugcccuaagaca

SEQ ID NO: 1609756 - RNA, 19 nt, Artificial Sequence
  Description of Artificial Sequence: Synthetic oligonucleotide
  Antisense strand to SEQ ID NO: 1609755
ugucuuagggcacacuggg

SEQ ID NO: 1609757 - RNA, 19 nt, Artificial Sequence
  Description of Artificial Sequence: Synthetic oligonucleotide
  Sense strand starting at position 2431 of SEQ ID NO: 1560580
ccucaugcuccugaaauag

SEQ ID NO: 1609758 - RNA, 19 nt, Artificial Sequence
  Description of Artificial Sequence: Synthetic oligonucleotide
  Antisense strand to SEQ ID NO: 1609757
cuauuucaggagcaugagg

SEQ ID NO: 1609759 - RNA, 19 nt, Artificial Sequence
  Description of Artificial Sequence: Synthetic oligonucleotide
  Sense strand starting at position 2442 of SEQ ID NO: 1560580
ugaaauagaugucuuggca

SEQ ID NO: 1609760 - RNA, 19 nt, Artificial Sequence
  Description of Artificial Sequence: Synthetic oligonucleotide
  Antisense strand to SEQ ID NO: 1609759
ugccaagacaucuauuuca

SEQ ID NO: 1609761 - RNA, 19 nt, Artificial Sequence
  Description of Artificial Sequence: Synthetic oligonucleotide
  Sense strand starting at position 2537 of SEQ ID NO: 1560580
gaucuugugguccacagau

SEQ ID NO: 1609762 - RNA, 19 nt, Artificial Sequence
  Description of Artificial Sequence: Synthetic oligonucleotide
  Antisense strand to SEQ ID NO: 1609761
aucuguggaccacaagauc

SEQ ID NO: 1609763 - RNA, 19 nt, Artificial Sequence
  Description of Artificial Sequence: Synthetic oligonucleotide
  Sense strand starting at position 2649 of SEQ ID NO: 1560580
ccuuguucuccagaccugu

SEQ ID NO: 1609764 - RNA, 19 nt, Artificial Sequence
  Description of Artificial Sequence: Synthetic oligonucleotide
  Antisense strand to SEQ ID NO: 1609763
acaggucuggagaacaagg

SEQ ID NO: 1609765 - RNA, 19 nt, Artificial Sequence
  Description of Artificial Sequence: Synthetic oligonucleotide
  Sense strand starting at position 2668 of SEQ ID NO: 1560580
gcacucuaucugugcaaca

SEQ ID NO: 1609766 - RNA, 19 nt, Artificial Sequence
  Description of Artificial Sequence: Synthetic oligonucleotide
  Antisense strand to SEQ ID NO: 1609765
uguugcacagauagagugc

SEQ ID NO: 1609767 - RNA, 19 nt, Artificial Sequence
  Description of Artificial Sequence: Synthetic oligonucleotide
  Sense strand starting at position 2670 of SEQ ID NO: 1560580
acucuaucugugcaacaga

SEQ ID NO: 1609768 - RNA, 19 nt, Artificial Sequence
  Description of Artificial Sequence: Synthetic oligonucleotide
  Antisense strand to SEQ ID NO: 1609767
ucuguugcacagauagagu

SEQ ID NO: 1609769 - RNA, 19 nt, Artificial Sequence
  Description of Artificial Sequence: Synthetic oligonucleotide
  Sense strand starting at position 2673 of SEQ ID NO: 1560580
cuaucugugcaacagagau

SEQ ID NO: 1609770 - RNA, 19 nt, Artificial Sequence
  Description of Artificial Sequence: Synthetic oligonucleotide
  Antisense strand to SEQ ID NO: 1609769
aucucuguugcacagauag

SEQ ID NO: 1609771 - RNA, 19 nt, Artificial Sequence
  Description of Artificial Sequence: Synthetic oligonucleotide
  Sense strand starting at position 2712 of SEQ ID NO: 1560580
aggucagaaucauccucau

SEQ ID NO: 1609772 - RNA, 19 nt, Artificial Sequence
  Description of Artificial Sequence: Synthetic oligonucleotide
  Antisense strand to SEQ ID NO: 1609771
augaggaugauucugaccu

SEQ ID NO: 1609773 - RNA, 19 nt, Artificial Sequence
  Description of Artificial Sequence: Synthetic oligonucleotide
  Sense strand starting at position 2780 of SEQ ID NO: 1560580
agguuuauguaccucaaga

SEQ ID NO: 1609774 - RNA, 19 nt, Artificial Sequence
  Description of Artificial Sequence: Synthetic oligonucleotide
  Antisense strand to SEQ ID NO: 1609773
ucuugagguacauaaaccu

SEQ ID NO: 1609775 - RNA, 19 nt, Artificial Sequence
  Description of Artificial Sequence: Synthetic oligonucleotide
  Sense strand starting at position 2782 of SEQ ID NO: 1560580
guuuauguaccucaagauu

SEQ ID NO: 1609776 - RNA, 19 nt, Artificial Sequence
  Description of Artificial Sequence: Synthetic oligonucleotide
  Antisense strand to SEQ ID NO: 1609775
aaucuugagguacauaaac

SEQ ID NO: 1609777 - RNA, 19 nt, Artificial Sequence
  Description of Artificial Sequence: Synthetic oligonucleotide
  Sense strand starting at position 2797 of SEQ ID NO: 1560580
gauuaaacgacaggucagu

SEQ ID NO: 1609778 - RNA, 19 nt, Artificial Sequence
  Description of Artificial Sequence: Synthetic oligonucleotide
  Antisense strand to SEQ ID NO: 1609777
acugaccugucguuuaauc

SEQ ID NO: 1609779 - RNA, 19 nt, Artificial Sequence
  Description of Artificial Sequence: Synthetic oligonucleotide
  Sense strand starting at position 3360 of SEQ ID NO: 1560580
cugugaucacgccauugaa

SEQ ID NO: 1609780 - RNA, 19 nt, Artificial Sequence
  Description of Artificial Sequence: Synthetic oligonucleotide
  Antisense strand to SEQ ID NO: 1609779
uucaauggcgugaucacag

SEQ ID NO: 1609781 - RNA, 19 nt, Artificial Sequence
  Description of Artificial Sequence: Synthetic oligonucleotide
  Sense strand starting at position 3390 of SEQ ID NO: 1560580
gaaauagaaugagacugaa

SEQ ID NO: 1609782 - RNA, 19 nt, Artificial Sequence
  Description of Artificial Sequence: Synthetic oligonucleotide
  Antisense strand to SEQ ID NO: 1609781
uucagucucauucuauuuc

SEQ ID NO: 1609783 - RNA, 19 nt, Artificial Sequence
  Description of Artificial Sequence: Synthetic oligonucleotide
  Sense strand starting at position 3511 of SEQ ID NO: 1560580
cacuguuaacuccguaaga

SEQ ID NO: 1609784 - RNA, 19 nt, Artificial Sequence
  Description of Artificial Sequence: Synthetic oligonucleotide
  Antisense strand to SEQ ID NO: 1609783
ucuuacggaguuaacagug

SEQ ID NO: 1609785 - RNA, 19 nt, Artificial Sequence
  Description of Artificial Sequence: Synthetic oligonucleotide
  Sense strand starting at position 3512 of SEQ ID NO: 1560580
acuguuaacuccguaagau

SEQ ID NO: 1609786 - RNA, 19 nt, Artificial Sequence
  Description of Artificial Sequence: Synthetic oligonucleotide
  Antisense strand to SEQ ID NO: 1609785
aucuuacggaguuaacagu

SEQ ID NO: 1609787 - RNA, 19 nt, Artificial Sequence
  Description of Artificial Sequence: Synthetic oligonucleotide
  Sense strand starting at position 3513 of SEQ ID NO: 1560580
cuguuaacuccguaagauu

SEQ ID NO: 1609788 - RNA, 19 nt, Artificial Sequence
  Description of Artificial Sequence: Synthetic oligonucleotide
  Antisense strand to SEQ ID NO: 1609787
aaucuuacggaguuaacag

SEQ ID NO: 1609789 - RNA, 19 nt, Artificial Sequence
  Description of Artificial Sequence: Synthetic oligonucleotide
  Sense strand starting at position 3577 of SEQ ID NO: 1560580
cagaguagcucacuugauc

SEQ ID NO: 1609790 - RNA, 19 nt, Artificial Sequence
  Description of Artificial Sequence: Synthetic oligonucleotide
  Antisense strand to SEQ ID NO: 1609789
gaucaagugagcuacucug

SEQ ID NO: 1609791 - RNA, 19 nt, Artificial Sequence
  Description of Artificial Sequence: Synthetic oligonucleotide
  Sense strand starting at position 3954 of SEQ ID NO: 1560580
ccuguuucuaguugaguga

SEQ ID NO: 1609792 - RNA, 19 nt, Artificial Sequence
  Description of Artificial Sequence: Synthetic oligonucleotide
  Antisense strand to SEQ ID NO: 1609791
ucacucaacuagaaacagg

SEQ ID NO: 1609793 - RNA, 19 nt, Artificial Sequence
  Description of Artificial Sequence: Synthetic oligonucleotide
  Sense strand starting at position 3955 of SEQ ID NO: 1560580
cuguuucuaguugagugau

SEQ ID NO: 1609794 - RNA, 19 nt, Artificial Sequence
  Description of Artificial Sequence: Synthetic oligonucleotide
  Antisense strand to SEQ ID NO: 1609793
aucacucaacuagaaacag

SEQ ID NO: 1609795 - RNA, 19 nt, Artificial Sequence
  Description of Artificial Sequence: Synthetic oligonucleotide
  Sense strand starting at position 3957 of SEQ ID NO: 1560580
guuucuaguugagugauca

SEQ ID NO: 1609796 - RNA, 19 nt, Artificial Sequence
  Description of Artificial Sequence: Synthetic oligonucleotide
  Antisense strand to SEQ ID NO: 1609795
ugaucacucaacuagaaac

SEQ ID NO: 1609797 - RNA, 19 nt, Artificial Sequence
  Description of Artificial Sequence: Synthetic oligonucleotide
  Sense strand starting at position 3958 of SEQ ID NO: 1560580
uuucuaguugagugaucag

SEQ ID NO: 1609798 - RNA, 19 nt, Artificial Sequence
  Description of Artificial Sequence: Synthetic oligonucleotide
  Antisense strand to SEQ ID NO: 1609797
cugaucacucaacuagaaa

SEQ ID NO: 1609799 - RNA, 19 nt, Artificial Sequence
  Description of Artificial Sequence: Synthetic oligonucleotide
  Sense strand starting at position 3961 of SEQ ID NO: 1560580
cuaguugagugaucaggua

SEQ ID NO: 1609800 - RNA, 19 nt, Artificial Sequence
  Description of Artificial Sequence: Synthetic oligonucleotide
  Antisense strand to SEQ ID NO: 1609799
uaccugaucacucaacuag

SEQ ID NO: 1609801 - RNA, 19 nt, Artificial Sequence
  Description of Artificial Sequence: Synthetic oligonucleotide
  Sense strand starting at position 263 of SEQ ID NO: 1560581
acaagaacuugccuuaguu

SEQ ID NO: 1609802 - RNA, 19 nt, Artificial Sequence
  Description of Artificial Sequence: Synthetic oligonucleotide
  Antisense strand to SEQ ID NO: 1609801
aacuaaggcaaguucuugu

SEQ ID NO: 1609803 - RNA, 19 nt, Artificial Sequence
  Description of Artificial Sequence: Synthetic oligonucleotide
  Sense strand starting at position 292 of SEQ ID NO: 1560581
ucagcacugggcugagauu

SEQ ID NO: 1609804 - RNA, 19 nt, Artificial Sequence
  Description of Artificial Sequence: Synthetic oligonucleotide
  Antisense strand to SEQ ID NO: 1609803
aaucucagcccagugcuga

SEQ ID NO: 1609805 - RNA, 19 nt, Artificial Sequence
  Description of Artificial Sequence: Synthetic oligonucleotide
  Sense strand starting at position 322 of SEQ ID NO: 1560581
cucucugaguccuuccgaa

SEQ ID NO: 1609806 - RNA, 19 nt, Artificial Sequence
  Description of Artificial Sequence: Synthetic oligonucleotide
  Antisense strand to SEQ ID NO: 1609805
uucggaaggacucagagag

SEQ ID NO: 1609807 - RNA, 19 nt, Artificial Sequence
  Description of Artificial Sequence: Synthetic oligonucleotide
  Sense strand starting at position 330 of SEQ ID NO: 1560581
guccuuccgaagcaagauu

SEQ ID NO: 1609808 - RNA, 19 nt, Artificial Sequence
  Description of Artificial Sequence: Synthetic oligonucleotide
  Antisense strand to SEQ ID NO: 1609807
aaucuugcuucggaaggac

SEQ ID NO: 1609809 - RNA, 19 nt, Artificial Sequence
  Description of Artificial Sequence: Synthetic oligonucleotide
  Sense strand starting at position 445 of SEQ ID NO: 1560581
agaugagccugauauuagg

SEQ ID NO: 1609810 - RNA, 19 nt, Artificial Sequence
  Description of Artificial Sequence: Synthetic oligonucleotide
  Antisense strand to SEQ ID NO: 1609809
ccuaauaucaggcucaucu

SEQ ID NO: 1609811 - RNA, 19 nt, Artificial Sequence
  Description of Artificial Sequence: Synthetic oligonucleotide
  Sense strand starting at position 628 of SEQ ID NO: 1560581
caguccucgccguuuauga

SEQ ID NO: 1609812 - RNA, 19 nt, Artificial Sequence
  Description of Artificial Sequence: Synthetic oligonucleotide
  Antisense strand to SEQ ID NO: 1609811
ucauaaacggcgaggacug

SEQ ID NO: 1609813 - RNA, 19 nt, Artificial Sequence
  Description of Artificial Sequence: Synthetic oligonucleotide
  Sense strand starting at position 629 of SEQ ID NO: 1560581
aguccucgccguuuaugau

SEQ ID NO: 1609814 - RNA, 19 nt, Artificial Sequence
  Description of Artificial Sequence: Synthetic oligonucleotide
  Antisense strand to SEQ ID NO: 1609813
aucauaaacggcgaggacu

SEQ ID NO: 1609815 - RNA, 19 nt, Artificial Sequence
  Description of Artificial Sequence: Synthetic oligonucleotide
  Sense strand starting at position 630 of SEQ ID NO: 1560581
guccucgccguuuaugauu

SEQ ID NO: 1609816 - RNA, 19 nt, Artificial Sequence
  Description of Artificial Sequence: Synthetic oligonucleotide
  Antisense strand to SEQ ID NO: 1609815
aaucauaaacggcgaggac

SEQ ID NO: 1609817 - RNA, 19 nt, Artificial Sequence
  Description of Artificial Sequence: Synthetic oligonucleotide
  Sense strand starting at position 641 of SEQ ID NO: 1560581
uuaugauuuggcugcagcu

SEQ ID NO: 1609818 - RNA, 19 nt, Artificial Sequence
  Description of Artificial Sequence: Synthetic oligonucleotide
  Antisense strand to SEQ ID NO: 1609817
agcugcagccaaaucauaa

SEQ ID NO: 1609819 - RNA, 19 nt, Artificial Sequence
  Description of Artificial Sequence: Synthetic oligonucleotide
  Sense strand starting at position 1171 of SEQ ID NO: 1560581
gcuucaagagcuggguuau

SEQ ID NO: 1609820 - RNA, 19 nt, Artificial Sequence
  Description of Artificial Sequence: Synthetic oligonucleotide
  Antisense strand to SEQ ID NO: 1609819
auaacccagcucuugaagc

SEQ ID NO: 1609821 - RNA, 19 nt, Artificial Sequence
  Description of Artificial Sequence: Synthetic oligonucleotide
  Sense strand starting at position 1172 of SEQ ID NO: 1560581
cuucaagagcuggguuaug

SEQ ID NO: 1609822 - RNA, 19 nt, Artificial Sequence
  Description of Artificial Sequence: Synthetic oligonucleotide
  Antisense strand to SEQ ID NO: 1609821
cauaacccagcucuugaag

SEQ ID NO: 1609823 - RNA, 19 nt, Artificial Sequence
  Description of Artificial Sequence: Synthetic oligonucleotide
  Sense strand starting at position 1250 of SEQ ID NO: 1560581
gugagcucuggaggugaga

SEQ ID NO: 1609824 - RNA, 19 nt, Artificial Sequence
  Description of Artificial Sequence: Synthetic oligonucleotide
  Antisense strand to SEQ ID NO: 1609823
ucucaccuccagagcucac

SEQ ID NO: 1609825 - RNA, 19 nt, Artificial Sequence
  Description of Artificial Sequence: Synthetic oligonucleotide
  Sense strand starting at position 1271 of SEQ ID NO: 1560581
ggugccaucgcggugcaaa

SEQ ID NO: 1609826 - RNA, 19 nt, Artificial Sequence
  Description of Artificial Sequence: Synthetic oligonucleotide
  Antisense strand to SEQ ID NO: 1609825
uuugcaccgcgauggcacc

SEQ ID NO: 1609827 - RNA, 19 nt, Artificial Sequence
  Description of Artificial Sequence: Synthetic oligonucleotide
  Sense strand starting at position 1313 of SEQ ID NO: 1560581
agaggagucuaggcucaua

SEQ ID NO: 1609828 - RNA, 19 nt, Artificial Sequence
  Description of Artificial Sequence: Synthetic oligonucleotide
  Antisense strand to SEQ ID NO: 1609827
uaugagccuagacuccucu

SEQ ID NO: 1609829 - RNA, 19 nt, Artificial Sequence
  Description of Artificial Sequence: Synthetic oligonucleotide
  Sense strand starting at position 1376 of SEQ ID NO: 1560581
ggaguuguugcugggagca

SEQ ID NO: 1609830 - RNA, 19 nt, Artificial Sequence
  Description of Artificial Sequence: Synthetic oligonucleotide
  Antisense strand to SEQ ID NO: 1609829
ugcucccagcaacaacucc

SEQ ID NO: 1609831 - RNA, 19 nt, Artificial Sequence
  Description of Artificial Sequence: Synthetic oligonucleotide
  Sense strand starting at position 1416 of SEQ ID NO: 1560581
gcagacugaugcucaaaga

SEQ ID NO: 1609832 - RNA, 19 nt, Artificial Sequence
  Description of Artificial Sequence: Synthetic oligonucleotide
  Antisense strand to SEQ ID NO: 1609831
ucuuugagcaucagucugc

SEQ ID NO: 1609833 - RNA, 19 nt, Artificial Sequence
  Description of Artificial Sequence: Synthetic oligonucleotide
  Sense strand starting at position 1523 of SEQ ID NO: 1560581
uuuauaguccugugaggug

SEQ ID NO: 1609834 - RNA, 19 nt, Artificial Sequence
  Description of Artificial Sequence: Synthetic oligonucleotide
  Antisense strand to SEQ ID NO: 1609833
caccucacaggacuauaaa

SEQ ID NO: 1609835 - RNA, 19 nt, Artificial Sequence
  Description of Artificial Sequence: Synthetic oligonucleotide
  Sense strand starting at position 1683 of SEQ ID NO: 1560581
uugucacuccaccagauau

SEQ ID NO: 1609836 - RNA, 19 nt, Artificial Sequence
  Description of Artificial Sequence: Synthetic oligonucleotide
  Antisense strand to SEQ ID NO: 1609835
auaucugguggagugacaa

SEQ ID NO: 1609837 - RNA, 19 nt, Artificial Sequence
  Description of Artificial Sequence: Synthetic oligonucleotide
  Sense strand starting at position 2103 of SEQ ID NO: 1560581
ggacguuauuagguaggca

SEQ ID NO: 1609838 - RNA, 19 nt, Artificial Sequence
  Description of Artificial Sequence: Synthetic oligonucleotide
  Antisense strand to SEQ ID NO: 1609837
ugccuaccuaauaacgucc

SEQ ID NO: 1609839 - RNA, 19 nt, Artificial Sequence
  Description of Artificial Sequence: Synthetic oligonucleotide
  Sense strand starting at position 2104 of SEQ ID NO: 1560581
gacguuauuagguaggcaa

SEQ ID NO: 1609840 - RNA, 19 nt, Artificial Sequence
  Description of Artificial Sequence: Synthetic oligonucleotide
  Antisense strand to SEQ ID NO: 1609839
uugccuaccuaauaacguc

SEQ ID NO: 1609841 - RNA, 19 nt, Artificial Sequence
  Description of Artificial Sequence: Synthetic oligonucleotide
  Sense strand starting at position 2106 of SEQ ID NO: 1560581
cguuauuagguaggcaaga

SEQ ID NO: 1609842 - RNA, 19 nt, Artificial Sequence
  Description of Artificial Sequence: Synthetic oligonucleotide
  Antisense strand to SEQ ID NO: 1609841
ucuugccuaccuaauaacg

SEQ ID NO: 1609843 - RNA, 19 nt, Artificial Sequence
  Description of Artificial Sequence: Synthetic oligonucleotide
  Sense strand starting at position 2289 of SEQ ID NO: 1560581
gagagauggugucuagcca

SEQ ID NO: 1609844 - RNA, 19 nt, Artificial Sequence
  Description of Artificial Sequence: Synthetic oligonucleotide
  Antisense strand to SEQ ID NO: 1609843
uggcuagacaccaucucuc

SEQ ID NO: 1609845 - RNA, 19 nt, Artificial Sequence
  Description of Artificial Sequence: Synthetic oligonucleotide
  Sense strand starting at position 2359 of SEQ ID NO: 1560581
cagagugcuugagagauau

SEQ ID NO: 1609846 - RNA, 19 nt, Artificial Sequence
  Description of Artificial Sequence: Synthetic oligonucleotide
  Antisense strand to SEQ ID NO: 1609845
auaucucucaagcacucug

SEQ ID NO: 1609847 - RNA, 19 nt, Artificial Sequence
  Description of Artificial Sequence: Synthetic oligonucleotide
  Sense strand starting at position 2363 of SEQ ID NO: 1560581
gugcuugagagauauccuc

SEQ ID NO: 1609848 - RNA, 19 nt, Artificial Sequence
  Description of Artificial Sequence: Synthetic oligonucleotide
  Antisense strand to SEQ ID NO: 1609847
gaggauaucucucaagcac

SEQ ID NO: 1609849 - RNA, 19 nt, Artificial Sequence
  Description of Artificial Sequence: Synthetic oligonucleotide
  Sense strand starting at position 2371 of SEQ ID NO: 1560581
gagauauccucagagacag

SEQ ID NO: 1609850 - RNA, 19 nt, Artificial Sequence
  Description of Artificial Sequence: Synthetic oligonucleotide
  Antisense strand to SEQ ID NO: 1609849
cugucucugaggauaucuc

SEQ ID NO: 1609851 - RNA, 19 nt, Artificial Sequence
  Description of Artificial Sequence: Synthetic oligonucleotide
  Sense strand starting at position 2381 of SEQ ID NO: 1560581
cagagacagucugagaguu

SEQ ID NO: 1609852 - RNA, 19 nt, Artificial Sequence
  Description of Artificial Sequence: Synthetic oligonucleotide
  Antisense strand to SEQ ID NO: 1609851
aacucucagacugucucug

SEQ ID NO: 1609853 - RNA, 19 nt, Artificial Sequence
  Description of Artificial Sequence: Synthetic oligonucleotide
  Sense strand starting at position 2383 of SEQ ID NO: 1560581
gagacagucugagaguuag

SEQ ID NO: 1609854 - RNA, 19 nt, Artificial Sequence
  Description of Artificial Sequence: Synthetic oligonucleotide
  Antisense strand to SEQ ID NO: 1609853
cuaacucucagacugucuc

SEQ ID NO: 1609855 - RNA, 19 nt, Artificial Sequence
  Description of Artificial Sequence: Synthetic oligonucleotide
  Sense strand starting at position 2447 of SEQ ID NO: 1560581
gacagugacuccuaacuag

SEQ ID NO: 1609856 - RNA, 19 nt, Artificial Sequence
  Description of Artificial Sequence: Synthetic oligonucleotide
  Antisense strand to SEQ ID NO: 1609855
cuaguuaggagucacuguc

SEQ ID NO: 1609857 - RNA, 19 nt, Artificial Sequence
  Description of Artificial Sequence: Synthetic oligonucleotide
  Sense strand starting at position 2450 of SEQ ID NO: 1560581
agugacuccuaacuagaga

SEQ ID NO: 1609858 - RNA, 19 nt, Artificial Sequence
  Description of Artificial Sequence: Synthetic oligonucleotide
  Antisense strand to SEQ ID NO: 1609857
ucucuaguuaggagucacu

SEQ ID NO: 1609859 - RNA, 19 nt, Artificial Sequence
  Description of Artificial Sequence: Synthetic oligonucleotide
  Sense strand starting at position 2469 of SEQ ID NO: 1560581
cagugagagaucugucuag

SEQ ID NO: 1609860 - RNA, 19 nt, Artificial Sequence
  Description of Artificial Sequence: Synthetic oligonucleotide
  Antisense strand to SEQ ID NO: 1609859
cuagacagaucucucacug

SEQ ID NO: 1609861 - RNA, 19 nt, Artificial Sequence
  Description of Artificial Sequence: Synthetic oligonucleotide
  Sense strand starting at position 2516 of SEQ ID NO: 1560581
cugagaauccagcgacaug

SEQ ID NO: 1609862 - RNA, 19 nt, Artificial Sequence
  Description of Artificial Sequence: Synthetic oligonucleotide
  Antisense strand to SEQ ID NO: 1609861
caugucgcuggauucucag

SEQ ID NO: 1609863 - RNA, 19 nt, Artificial Sequence
  Description of Artificial Sequence: Synthetic oligonucleotide
  Sense strand starting at position 2546 of SEQ ID NO: 1560581
agaguuggaucaugaacac

SEQ ID NO: 1609864 - RNA, 19 nt, Artificial Sequence
  Description of Artificial Sequence: Synthetic oligonucleotide
  Antisense strand to SEQ ID NO: 1609863
guguucaugauccaacucu

SEQ ID NO: 1609865 - RNA, 19 nt, Artificial Sequence
  Description of Artificial Sequence: Synthetic oligonucleotide
  Sense strand starting at position 3126 of SEQ ID NO: 1560581
uucugugcuucuccagcaa

SEQ ID NO: 1609866 - RNA, 19 nt, Artificial Sequence
  Description of Artificial Sequence: Synthetic oligonucleotide
  Antisense strand to SEQ ID NO: 1609865
uugcuggagaagcacagaa

SEQ ID NO: 1609867 - RNA, 19 nt, Artificial Sequence
  Description of Artificial Sequence: Synthetic oligonucleotide
  Sense strand starting at position 3130 of SEQ ID NO: 1560581
gugcuucuccagcaaauuu

SEQ ID NO: 1609868 - RNA, 19 nt, Artificial Sequence
  Description of Artificial Sequence: Synthetic oligonucleotide
  Antisense strand to SEQ ID NO: 1609867
aaauuugcuggagaagcac

SEQ ID NO: 1609869 - RNA, 19 nt, Artificial Sequence
  Description of Artificial Sequence: Synthetic oligonucleotide
  Sense strand starting at position 3165 of SEQ ID NO: 1560581
agccuacaucacgaacuau

SEQ ID NO: 1609870 - RNA, 19 nt, Artificial Sequence
  Description of Artificial Sequence: Synthetic oligonucleotide
  Antisense strand to SEQ ID NO: 1609869
auaguucgugauguaggcu

SEQ ID NO: 1609871 - RNA, 19 nt, Artificial Sequence
  Description of Artificial Sequence: Synthetic oligonucleotide
  Sense strand starting at position 3282 of SEQ ID NO: 1560581
agagguaauucagggaaag

SEQ ID NO: 1609872 - RNA, 19 nt, Artificial Sequence
  Description of Artificial Sequence: Synthetic oligonucleotide
  Antisense strand to SEQ ID NO: 1609871
cuuucccugaauuaccucu

SEQ ID NO: 1609873 - RNA, 19 nt, Artificial Sequence
  Description of Artificial Sequence: Synthetic oligonucleotide
  Sense strand starting at position 3431 of SEQ ID NO: 1560581
cagcaaaguccucgucacu

SEQ ID NO: 1609874 - RNA, 19 nt, Artificial Sequence
  Description of Artificial Sequence: Synthetic oligonucleotide
  Antisense strand to SEQ ID NO: 1609873
agugacgaggacuuugcug

SEQ ID NO: 1609875 - RNA, 19 nt, Artificial Sequence
  Description of Artificial Sequence: Synthetic oligonucleotide
  Sense strand starting at position 3705 of SEQ ID NO: 1560581
guuuacguaccaggauuaa

SEQ ID NO: 1609876 - RNA, 19 nt, Artificial Sequence
  Description of Artificial Sequence: Synthetic oligonucleotide
  Antisense strand to SEQ ID NO: 1609875
uuaauccugguacguaaac

SEQ ID NO: 1609877 - RNA, 19 nt, Artificial Sequence
  Description of Artificial Sequence: Synthetic oligonucleotide
  Sense strand starting at position 3926 of SEQ ID NO: 1560581
caaguuacugcccgaugga

SEQ ID NO: 1609878 - RNA, 19 nt, Artificial Sequence
  Description of Artificial Sequence: Synthetic oligonucleotide
  Antisense strand to SEQ ID NO: 1609877
uccaucgggcaguaacuug

SEQ ID NO: 1609879 - RNA, 19 nt, Artificial Sequence
  Description of Artificial Sequence: Synthetic oligonucleotide
  Sense strand starting at position 3927 of SEQ ID NO: 1560581
aaguuacugcccgauggau

SEQ ID NO: 1609880 - RNA, 19 nt, Artificial Sequence
  Description of Artificial Sequence: Synthetic oligonucleotide
  Antisense strand to SEQ ID NO: 1609879
auccaucgggcaguaacuu

SEQ ID NO: 1609881 - RNA, 19 nt, Artificial Sequence
  Description of Artificial Sequence: Synthetic oligonucleotide
  Sense strand starting at position 38 of SEQ ID NO: 1560582
aggccuagguuucugaauu

SEQ ID NO: 1609882 - RNA, 19 nt, Artificial Sequence
  Description of Artificial Sequence: Synthetic oligonucleotide
  Antisense strand to SEQ ID NO: 1609881
aauucagaaaccuaggccu

SEQ ID NO: 1609883 - RNA, 19 nt, Artificial Sequence
  Description of Artificial Sequence: Synthetic oligonucleotide
  Sense strand starting at position 46 of SEQ ID NO: 1560582
guuucugaauucucagaug

SEQ ID NO: 1609884 - RNA, 19 nt, Artificial Sequence
  Description of Artificial Sequence: Synthetic oligonucleotide
  Antisense strand to SEQ ID NO: 1609883
caucugagaauucagaaac

SEQ ID NO: 1609885 - RNA, 19 nt, Artificial Sequence
  Description of Artificial Sequence: Synthetic oligonucleotide
  Sense strand starting at position 49 of SEQ ID NO: 1560582
ucugaauucucagaugaaa

SEQ ID NO: 1609886 - RNA, 19 nt, Artificial Sequence
  Description of Artificial Sequence: Synthetic oligonucleotide
  Antisense strand to SEQ ID NO: 1609885
uuucaucugagaauucaga

SEQ ID NO: 1609887 - RNA, 19 nt, Artificial Sequence
  Description of Artificial Sequence: Synthetic oligonucleotide
  Sense strand starting at position 485 of SEQ ID NO: 1560582
gguucuuacccuugcugau

SEQ ID NO: 1609888 - RNA, 19 nt, Artificial Sequence
  Description of Artificial Sequence: Synthetic oligonucleotide
  Antisense strand to SEQ ID NO: 1609887
aucagcaaggguaagaacc

SEQ ID NO: 1609889 - RNA, 19 nt, Artificial Sequence
  Description of Artificial Sequence: Synthetic oligonucleotide
  Sense strand starting at position 717 of SEQ ID NO: 1560582
ccgugugugcacagauguu

SEQ ID NO: 1609890 - RNA, 19 nt, Artificial Sequence
  Description of Artificial Sequence: Synthetic oligonucleotide
  Antisense strand to SEQ ID NO: 1609889
aacaucugugcacacacgg

SEQ ID NO: 1609891 - RNA, 19 nt, Artificial Sequence
  Description of Artificial Sequence: Synthetic oligonucleotide
  Sense strand starting at position 790 of SEQ ID NO: 1560582
gcacccaucucccagagau

SEQ ID NO: 1609892 - RNA, 19 nt, Artificial Sequence
  Description of Artificial Sequence: Synthetic oligonucleotide
  Antisense strand to SEQ ID NO: 1609891
aucucugggagaugggugc

SEQ ID NO: 1609893 - RNA, 19 nt, Artificial Sequence
  Description of Artificial Sequence: Synthetic oligonucleotide
  Sense strand starting at position 1034 of SEQ ID NO: 1560582
acagcuuuccauggugaug

SEQ ID NO: 1609894 - RNA, 19 nt, Artificial Sequence
  Description of Artificial Sequence: Synthetic oligonucleotide
  Antisense strand to SEQ ID NO: 1609893
caucaccauggaaagcugu

SEQ ID NO: 1609895 - RNA, 19 nt, Artificial Sequence
  Description of Artificial Sequence: Synthetic oligonucleotide
  Sense strand starting at position 1097 of SEQ ID NO: 1560582
ugcagauaccugcagucau

SEQ ID NO: 1609896 - RNA, 19 nt, Artificial Sequence
  Description of Artificial Sequence: Synthetic oligonucleotide
  Antisense strand to SEQ ID NO: 1609895
augacugcagguaucugca

SEQ ID NO: 1609897 - RNA, 19 nt, Artificial Sequence
  Description of Artificial Sequence: Synthetic oligonucleotide
  Sense strand starting at position 1269 of SEQ ID NO: 1560582
gccgcacagucaccugaua

SEQ ID NO: 1609898 - RNA, 19 nt, Artificial Sequence
  Description of Artificial Sequence: Synthetic oligonucleotide
  Antisense strand to SEQ ID NO: 1609897
uaucaggugacugugcggc

SEQ ID NO: 1609899 - RNA, 19 nt, Artificial Sequence
  Description of Artificial Sequence: Synthetic oligonucleotide
  Sense strand starting at position 1271 of SEQ ID NO: 1560582
cgcacagucaccugauaug

SEQ ID NO: 1609900 - RNA, 19 nt, Artificial Sequence
  Description of Artificial Sequence: Synthetic oligonucleotide
  Antisense strand to SEQ ID NO: 1609899
cauaucaggugacugugcg

SEQ ID NO: 1609901 - RNA, 19 nt, Artificial Sequence
  Description of Artificial Sequence: Synthetic oligonucleotide
  Sense strand starting at position 1482 of SEQ ID NO: 1560582
cagaguucugguuaccugu

SEQ ID NO: 1609902 - RNA, 19 nt, Artificial Sequence
  Description of Artificial Sequence: Synthetic oligonucleotide
  Antisense strand to SEQ ID NO: 1609901
acagguaaccagaacucug

SEQ ID NO: 1609903 - RNA, 19 nt, Artificial Sequence
  Description of Artificial Sequence: Synthetic oligonucleotide
  Sense strand starting at position 1484 of SEQ ID NO: 1560582
gaguucugguuaccuguga

SEQ ID NO: 1609904 - RNA, 19 nt, Artificial Sequence
  Description of Artificial Sequence: Synthetic oligonucleotide
  Antisense strand to SEQ ID NO: 1609903
ucacagguaaccagaacuc

SEQ ID NO: 1609905 - RNA, 19 nt, Artificial Sequence
  Description of Artificial Sequence: Synthetic oligonucleotide
  Sense strand starting at position 1510 of SEQ ID NO: 1560582
aagcaaggcugugaucaga

SEQ ID NO: 1609906 - RNA, 19 nt, Artificial Sequence
  Description of Artificial Sequence: Synthetic oligonucleotide
  Antisense strand to SEQ ID NO: 1609905
ucugaucacagccuugcuu

SEQ ID NO: 1609907 - RNA, 19 nt, Artificial Sequence
  Description of Artificial Sequence: Synthetic oligonucleotide
  Sense strand starting at position 1786 of SEQ ID NO: 1560582
gaaagaugugggugcagga

SEQ ID NO: 1609908 - RNA, 19 nt, Artificial Sequence
  Description of Artificial Sequence: Synthetic oligonucleotide
  Antisense strand to SEQ ID NO: 1609907
uccugcacccacaucuuuc

SEQ ID NO: 1609909 - RNA, 19 nt, Artificial Sequence
  Description of Artificial Sequence: Synthetic oligonucleotide
  Sense strand starting at position 1885 of SEQ ID NO: 1560582
gggauuugcucccagcuca

SEQ ID NO: 1609910 - RNA, 19 nt, Artificial Sequence
  Description of Artificial Sequence: Synthetic oligonucleotide
  Antisense strand to SEQ ID NO: 1609909
ugagcugggagcaaauccc

SEQ ID NO: 1609911 - RNA, 19 nt, Artificial Sequence
  Description of Artificial Sequence: Synthetic oligonucleotide
  Sense strand starting at position 1997 of SEQ ID NO: 1560582
gggcacauucccgggcaau

SEQ ID NO: 1609912 - RNA, 19 nt, Artificial Sequence
  Description of Artificial Sequence: Synthetic oligonucleotide
  Antisense strand to SEQ ID NO: 1609911
auugcccgggaaugugccc

SEQ ID NO: 1609913 - RNA, 19 nt, Artificial Sequence
  Description of Artificial Sequence: Synthetic oligonucleotide
  Sense strand starting at position 2090 of SEQ ID NO: 1560582
uccggaaugucacucccua

SEQ ID NO: 1609914 - RNA, 19 nt, Artificial Sequence
  Description of Artificial Sequence: Synthetic oligonucleotide
  Antisense strand to SEQ ID NO: 1609913
uagggagugacauuccgga

SEQ ID NO: 1609915 - RNA, 19 nt, Artificial Sequence
  Description of Artificial Sequence: Synthetic oligonucleotide
  Sense strand starting at position 2183 of SEQ ID NO: 1560582
ggaucuggcuucucaccaa

SEQ ID NO: 1609916 - RNA, 19 nt, Artificial Sequence
  Description of Artificial Sequence: Synthetic oligonucleotide
  Antisense strand to SEQ ID NO: 1609915
uuggugagaagccagaucc

SEQ ID NO: 1609917 - RNA, 19 nt, Artificial Sequence
  Description of Artificial Sequence: Synthetic oligonucleotide
  Sense strand starting at position 2319 of SEQ ID NO: 1560582
cucagagucuucuuccauc

SEQ ID NO: 1609918 - RNA, 19 nt, Artificial Sequence
  Description of Artificial Sequence: Synthetic oligonucleotide
  Antisense strand to SEQ ID NO: 1609917
gauggaagaagacucugag

SEQ ID NO: 1609919 - RNA, 19 nt, Artificial Sequence
  Description of Artificial Sequence: Synthetic oligonucleotide
  Sense strand starting at position 2583 of SEQ ID NO: 1560582
cuaugccucugugauucuu

SEQ ID NO: 1609920 - RNA, 19 nt, Artificial Sequence
  Description of Artificial Sequence: Synthetic oligonucleotide
  Antisense strand to SEQ ID NO: 1609919
aagaaucacagaggcauag

SEQ ID NO: 1609921 - RNA, 19 nt, Artificial Sequence
  Description of Artificial Sequence: Synthetic oligonucleotide
  Sense strand starting at position 2607 of SEQ ID NO: 1560582
uuuaaagguucugaaugau

SEQ ID NO: 1609922 - RNA, 19 nt, Artificial Sequence
  Description of Artificial Sequence: Synthetic oligonucleotide
  Antisense strand to SEQ ID NO: 1609921
aucauucagaaccuuuaaa

SEQ ID NO: 1609923 - RNA, 19 nt, Artificial Sequence
  Description of Artificial Sequence: Synthetic oligonucleotide
  Sense strand starting at position 2639 of SEQ ID NO: 1560582
cuuagaguucuuggcccau

SEQ ID NO: 1609924 - RNA, 19 nt, Artificial Sequence
  Description of Artificial Sequence: Synthetic oligonucleotide
  Antisense strand to SEQ ID NO: 1609923
augggccaagaacucuaag

SEQ ID NO: 1609925 - RNA, 19 nt, Artificial Sequence
  Description of Artificial Sequence: Synthetic oligonucleotide
  Sense strand starting at position 2641 of SEQ ID NO: 1560582
uagaguucuuggcccauuu

SEQ ID NO: 1609926 - RNA, 19 nt, Artificial Sequence
  Description of Artificial Sequence: Synthetic oligonucleotide
  Antisense strand to SEQ ID NO: 1609925
aaaugggccaagaacucua

SEQ ID NO: 1609927 - RNA, 19 nt, Artificial Sequence
  Description of Artificial Sequence: Synthetic oligonucleotide
  Sense strand starting at position 2683 of SEQ ID NO: 1560582
ucuauuuguugacagcauu

SEQ ID NO: 1609928 - RNA, 19 nt, Artificial Sequence
  Description of Artificial Sequence: Synthetic oligonucleotide
  Antisense strand to SEQ ID NO: 1609927
aaugcugucaacaaauaga

SEQ ID NO: 1609929 - RNA, 19 nt, Artificial Sequence
  Description of Artificial Sequence: Synthetic oligonucleotide
  Sense strand starting at position 2710 of SEQ ID NO: 1560582
agauauaacuaagguacaa

SEQ ID NO: 1609930 - RNA, 19 nt, Artificial Sequence
  Description of Artificial Sequence: Synthetic oligonucleotide
  Antisense strand to SEQ ID NO: 1609929
uuguaccuuaguuauaucu

SEQ ID NO: 1609931 - RNA, 19 nt, Artificial Sequence
  Description of Artificial Sequence: Synthetic oligonucleotide
  Sense strand starting at position 3081 of SEQ ID NO: 1560582
gucugauggcuuuagguac

SEQ ID NO: 1609932 - RNA, 19 nt, Artificial Sequence
  Description of Artificial Sequence: Synthetic oligonucleotide
  Antisense strand to SEQ ID NO: 1609931
guaccuaaagccaucagac

SEQ ID NO: 1609933 - RNA, 19 nt, Artificial Sequence
  Description of Artificial Sequence: Synthetic oligonucleotide
  Sense strand starting at position 3092 of SEQ ID NO: 1560582
uuagguacuugucacauca

SEQ ID NO: 1609934 - RNA, 19 nt, Artificial Sequence
  Description of Artificial Sequence: Synthetic oligonucleotide
  Antisense strand to SEQ ID NO: 1609933
ugaugugacaaguaccuaa

SEQ ID NO: 1609935 - RNA, 19 nt, Artificial Sequence
  Description of Artificial Sequence: Synthetic oligonucleotide
  Sense strand starting at position 3102 of SEQ ID NO: 1560582
gucacaucagcauagucaa

SEQ ID NO: 1609936 - RNA, 19 nt, Artificial Sequence
  Description of Artificial Sequence: Synthetic oligonucleotide
  Antisense strand to SEQ ID NO: 1609935
uugacuaugcugaugugac

SEQ ID NO: 1609937 - RNA, 19 nt, Artificial Sequence
  Description of Artificial Sequence: Synthetic oligonucleotide
  Sense strand starting at position 3105 of SEQ ID NO: 1560582
acaucagcauagucaagaa

SEQ ID NO: 1609938 - RNA, 19 nt, Artificial Sequence
  Description of Artificial Sequence: Synthetic oligonucleotide
  Antisense strand to SEQ ID NO: 1609937
uucuugacuaugcugaugu

SEQ ID NO: 1609939 - RNA, 19 nt, Artificial Sequence
  Description of Artificial Sequence: Synthetic oligonucleotide
  Sense strand starting at position 3498 of SEQ ID NO: 1560582
cugggacucuguuaaucuc

SEQ ID NO: 1609940 - RNA, 19 nt, Artificial Sequence
  Description of Artificial Sequence: Synthetic oligonucleotide
  Antisense strand to SEQ ID NO: 1609939
gagauuaacagagucccag

SEQ ID NO: 1609941 - RNA, 19 nt, Artificial Sequence
  Description of Artificial Sequence: Synthetic oligonucleotide
  Sense strand starting at position 3540 of SEQ ID NO: 1560582
ccauuugugucuuucucua

SEQ ID NO: 1609942 - RNA, 19 nt, Artificial Sequence
  Description of Artificial Sequence: Synthetic oligonucleotide
  Antisense strand to SEQ ID NO: 1609941
uagagaaagacacaaaugg

SEQ ID NO: 1609943 - RNA, 19 nt, Artificial Sequence
  Description of Artificial Sequence: Synthetic oligonucleotide
  Sense strand starting at position 3544 of SEQ ID NO: 1560582
uugugucuuucucuaucuu

SEQ ID NO: 1609944 - RNA, 19 nt, Artificial Sequence
  Description of Artificial Sequence: Synthetic oligonucleotide
  Antisense strand to SEQ ID NO: 1609943
aagauagagaaagacacaa

SEQ ID NO: 1609945 - RNA, 19 nt, Artificial Sequence
  Description of Artificial Sequence: Synthetic oligonucleotide
  Sense strand starting at position 3606 of SEQ ID NO: 1560582
cuguguguucucucugugu

SEQ ID NO: 1609946 - RNA, 19 nt, Artificial Sequence
  Description of Artificial Sequence: Synthetic oligonucleotide
  Antisense strand to SEQ ID NO: 1609945
acacagagagaacacacag

SEQ ID NO: 1609947 - RNA, 19 nt, Artificial Sequence
  Description of Artificial Sequence: Synthetic oligonucleotide
  Sense strand starting at position 3608 of SEQ ID NO: 1560582
guguguucucucuguguuu

SEQ ID NO: 1609948 - RNA, 19 nt, Artificial Sequence
  Description of Artificial Sequence: Synthetic oligonucleotide
  Antisense strand to SEQ ID NO: 1609947
aaacacagagagaacacac

SEQ ID NO: 1609949 - RNA, 19 nt, Artificial Sequence
  Description of Artificial Sequence: Synthetic oligonucleotide
  Sense strand starting at position 3621 of SEQ ID NO: 1560582
guguuucuguaguuguguu

SEQ ID NO: 1609950 - RNA, 19 nt, Artificial Sequence
  Description of Artificial Sequence: Synthetic oligonucleotide
  Antisense strand to SEQ ID NO: 1609949
aacacaacuacagaaacac

SEQ ID NO: 1609951 - RNA, 19 nt, Artificial Sequence
  Description of Artificial Sequence: Synthetic oligonucleotide
  Sense strand starting at position 3623 of SEQ ID NO: 1560582
guuucuguaguuguguuau

SEQ ID NO: 1609952 - RNA, 19 nt, Artificial Sequence
  Description of Artificial Sequence: Synthetic oligonucleotide
  Antisense strand to SEQ ID NO: 1609951
auaacacaacuacagaaac

SEQ ID NO: 1609953 - RNA, 19 nt, Artificial Sequence
  Description of Artificial Sequence: Synthetic oligonucleotide
  Sense strand starting at position 3888 of SEQ ID NO: 1560582
ggcuacuuguuauugggaa

SEQ ID NO: 1609954 - RNA, 19 nt, Artificial Sequence
  Description of Artificial Sequence: Synthetic oligonucleotide
  Antisense strand to SEQ ID NO: 1609953
uucccaauaacaaguagcc

SEQ ID NO: 1609955 - RNA, 19 nt, Artificial Sequence
  Description of Artificial Sequence: Synthetic oligonucleotide
  Sense strand starting at position 3889 of SEQ ID NO: 1560582
gcuacuuguuauugggaaa

SEQ ID NO: 1609956 - RNA, 19 nt, Artificial Sequence
  Description of Artificial Sequence: Synthetic oligonucleotide
  Antisense strand to SEQ ID NO: 1609955
uuucccaauaacaaguagc

SEQ ID NO: 1609957 - RNA, 19 nt, Artificial Sequence
  Description of Artificial Sequence: Synthetic oligonucleotide
  Sense strand starting at position 3930 of SEQ ID NO: 1560582
gggcagacggcuugggaaa

SEQ ID NO: 1609958 - RNA, 19 nt, Artificial Sequence
  Description of Artificial Sequence: Synthetic oligonucleotide
  Antisense strand to SEQ ID NO: 1609957
uuucccaagccgucugccc

SEQ ID NO: 1609959 - RNA, 19 nt, Artificial Sequence
  Description of Artificial Sequence: Synthetic oligonucleotide
  Sense strand starting at position 3931 of SEQ ID NO: 1560582
ggcagacggcuugggaaau

SEQ ID NO: 1609960 - RNA, 19 nt, Artificial Sequence
  Description of Artificial Sequence: Synthetic oligonucleotide
  Antisense strand to SEQ ID NO: 1609959
auuucccaagccgucugcc

SEQ ID NO: 1609961 - RNA, 19 nt, Artificial Sequence
  Description of Artificial Sequence: Synthetic oligonucleotide
  Sense strand starting at position 48 of SEQ ID NO: 1560583
gcuuccuacugugcucaga

SEQ ID NO: 1609962 - RNA, 19 nt, Artificial Sequence
  Description of Artificial Sequence: Synthetic oligonucleotide
  Antisense strand to SEQ ID NO: 1609961
ucugagcacaguaggaagc

SEQ ID NO: 1609963 - RNA, 19 nt, Artificial Sequence
  Description of Artificial Sequence: Synthetic oligonucleotide
  Sense strand starting at position 50 of SEQ ID NO: 1560583
uuccuacugugcucagaau

SEQ ID NO: 1609964 - RNA, 19 nt, Artificial Sequence
  Description of Artificial Sequence: Synthetic oligonucleotide
  Antisense strand to SEQ ID NO: 1609963
auucugagcacaguaggaa

SEQ ID NO: 1609965 - RNA, 19 nt, Artificial Sequence
  Description of Artificial Sequence: Synthetic oligonucleotide
  Sense strand starting at position 51 of SEQ ID NO: 1560583
uccuacugugcucagaauu

SEQ ID NO: 1609966 - RNA, 19 nt, Artificial Sequence
  Description of Artificial Sequence: Synthetic oligonucleotide
  Antisense strand to SEQ ID NO: 1609965
aauucugagcacaguagga

SEQ ID NO: 1609967 - RNA, 19 nt, Artificial Sequence
  Description of Artificial Sequence: Synthetic oligonucleotide
  Sense strand starting at position 246 of SEQ ID NO: 1560583
gccgaaugcaccuggcuau

SEQ ID NO: 1609968 - RNA, 19 nt, Artificial Sequence
  Description of Artificial Sequence: Synthetic oligonucleotide
  Antisense strand to SEQ ID NO: 1609967
auagccaggugcauucggc

SEQ ID NO: 1609969 - RNA, 19 nt, Artificial Sequence
  Description of Artificial Sequence: Synthetic oligonucleotide
  Sense strand starting at position 439 of SEQ ID NO: 1560583
gcaaguggcccgaggugua

SEQ ID NO: 1609970 - RNA, 19 nt, Artificial Sequence
  Description of Artificial Sequence: Synthetic oligonucleotide
  Antisense strand to SEQ ID NO: 1609969
uacaccucgggccacuugc

SEQ ID NO: 1609971 - RNA, 19 nt, Artificial Sequence
  Description of Artificial Sequence: Synthetic oligonucleotide
  Sense strand starting at position 541 of SEQ ID NO: 1560583
gagagaagaucugagucag

SEQ ID NO: 1609972 - RNA, 19 nt, Artificial Sequence
  Description of Artificial Sequence: Synthetic oligonucleotide
  Antisense strand to SEQ ID NO: 1609971
cugacucagaucuucucuc

SEQ ID NO: 1609973 - RNA, 19 nt, Artificial Sequence
  Description of Artificial Sequence: Synthetic oligonucleotide
  Sense strand starting at position 547 of SEQ ID NO: 1560583
agaucugagucagagagga

SEQ ID NO: 1609974 - RNA, 19 nt, Artificial Sequence
  Description of Artificial Sequence: Synthetic oligonucleotide
  Antisense strand to SEQ ID NO: 1609973
uccucucugacucagaucu

SEQ ID NO: 1609975 - RNA, 19 nt, Artificial Sequence
  Description of Artificial Sequence: Synthetic oligonucleotide
  Sense strand starting at position 849 of SEQ ID NO: 1560583
ucugcagugaacuauggau

SEQ ID NO: 1609976 - RNA, 19 nt, Artificial Sequence
  Description of Artificial Sequence: Synthetic oligonucleotide
  Antisense strand to SEQ ID NO: 1609975
auccauaguucacugcaga

SEQ ID NO: 1609977 - RNA, 19 nt, Artificial Sequence
  Description of Artificial Sequence: Synthetic oligonucleotide
  Sense strand starting at position 1552 of SEQ ID NO: 1560583
aguaacccauggugagauu

SEQ ID NO: 1609978 - RNA, 19 nt, Artificial Sequence
  Description of Artificial Sequence: Synthetic oligonucleotide
  Antisense strand to SEQ ID NO: 1609977
aaucucaccauggguuacu

SEQ ID NO: 1609979 - RNA, 19 nt, Artificial Sequence
  Description of Artificial Sequence: Synthetic oligonucleotide
  Sense strand starting at position 1561 of SEQ ID NO: 1560583
uggugagauucugauuaga

SEQ ID NO: 1609980 - RNA, 19 nt, Artificial Sequence
  Description of Artificial Sequence: Synthetic oligonucleotide
  Antisense strand to SEQ ID NO: 1609979
ucuaaucagaaucucacca

SEQ ID NO: 1609981 - RNA, 19 nt, Artificial Sequence
  Description of Artificial Sequence: Synthetic oligonucleotide
  Sense strand starting at position 1563 of SEQ ID NO: 1560583
gugagauucugauuagauc

SEQ ID NO: 1609982 - RNA, 19 nt, Artificial Sequence
  Description of Artificial Sequence: Synthetic oligonucleotide
  Antisense strand to SEQ ID NO: 1609981
gaucuaaucagaaucucac

SEQ ID NO: 1609983 - RNA, 19 nt, Artificial Sequence
  Description of Artificial Sequence: Synthetic oligonucleotide
  Sense strand starting at position 1566 of SEQ ID NO: 1560583
agauucugauuagaucuuu

SEQ ID NO: 1609984 - RNA, 19 nt, Artificial Sequence
  Description of Artificial Sequence: Synthetic oligonucleotide
  Antisense strand to SEQ ID NO: 1609983
aaagaucuaaucagaaucu

SEQ ID NO: 1609985 - RNA, 19 nt, Artificial Sequence
  Description of Artificial Sequence: Synthetic oligonucleotide
  Sense strand starting at position 1646 of SEQ ID NO: 1560583
uagcguucuuccucuguau

SEQ ID NO: 1609986 - RNA, 19 nt, Artificial Sequence
  Description of Artificial Sequence: Synthetic oligonucleotide
  Antisense strand to SEQ ID NO: 1609985
auacagaggaagaacgcua

SEQ ID NO: 1609987 - RNA, 19 nt, Artificial Sequence
  Description of Artificial Sequence: Synthetic oligonucleotide
  Sense strand starting at position 1650 of SEQ ID NO: 1560583
guucuuccucuguauggga

SEQ ID NO: 1609988 - RNA, 19 nt, Artificial Sequence
  Description of Artificial Sequence: Synthetic oligonucleotide
  Antisense strand to SEQ ID NO: 1609987
ucccauacagaggaagaac

SEQ ID NO: 1609989 - RNA, 19 nt, Artificial Sequence
  Description of Artificial Sequence: Synthetic oligonucleotide
  Sense strand starting at position 1727 of SEQ ID NO: 1560583
uucugugaugucugugauc

SEQ ID NO: 1609990 - RNA, 19 nt, Artificial Sequence
  Description of Artificial Sequence: Synthetic oligonucleotide
  Antisense strand to SEQ ID NO: 1609989
gaucacagacaucacagaa

SEQ ID NO: 1609991 - RNA, 19 nt, Artificial Sequence
  Description of Artificial Sequence: Synthetic oligonucleotide
  Sense strand starting at position 1729 of SEQ ID NO: 1560583
cugugaugucugugaucuc

SEQ ID NO: 1609992 - RNA, 19 nt, Artificial Sequence
  Description of Artificial Sequence: Synthetic oligonucleotide
  Antisense strand to SEQ ID NO: 1609991
gagaucacagacaucacag

SEQ ID NO: 1609993 - RNA, 19 nt, Artificial Sequence
  Description of Artificial Sequence: Synthetic oligonucleotide
  Sense strand starting at position 1730 of SEQ ID NO: 1560583
ugugaugucugugaucuca

SEQ ID NO: 1609994 - RNA, 19 nt, Artificial Sequence
  Description of Artificial Sequence: Synthetic oligonucleotide
  Antisense strand to SEQ ID NO: 1609993
ugagaucacagacaucaca

SEQ ID NO: 1609995 - RNA, 19 nt, Artificial Sequence
  Description of Artificial Sequence: Synthetic oligonucleotide
  Sense strand starting at position 2471 of SEQ ID NO: 1560583
ggaaguucuagucggcuca

SEQ ID NO: 1609996 - RNA, 19 nt, Artificial Sequence
  Description of Artificial Sequence: Synthetic oligonucleotide
  Antisense strand to SEQ ID NO: 1609995
ugagccgacuagaacuucc

SEQ ID NO: 1609997 - RNA, 19 nt, Artificial Sequence
  Description of Artificial Sequence: Synthetic oligonucleotide
  Sense strand starting at position 3605 of SEQ ID NO: 1560583
cucugacucuccgugcuua

SEQ ID NO: 1609998 - RNA, 19 nt, Artificial Sequence
  Description of Artificial Sequence: Synthetic oligonucleotide
  Antisense strand to SEQ ID NO: 1609997
uaagcacggagagucagag

SEQ ID NO: 1609999 - RNA, 19 nt, Artificial Sequence
  Description of Artificial Sequence: Synthetic oligonucleotide
  Sense strand starting at position 3606 of SEQ ID NO: 1560583
ucugacucuccgugcuuau

SEQ ID NO: 1610000 - RNA, 19 nt, Artificial Sequence
  Description of Artificial Sequence: Synthetic oligonucleotide
  Antisense strand to SEQ ID NO: 1609999
auaagcacggagagucaga

SEQ ID NO: 1610001 - RNA, 19 nt, Artificial Sequence
  Description of Artificial Sequence: Synthetic oligonucleotide
  Sense strand starting at position 3631 of SEQ ID NO: 1560583
cugggucucuucuuagauu

SEQ ID NO: 1610002 - RNA, 19 nt, Artificial Sequence
  Description of Artificial Sequence: Synthetic oligonucleotide
  Antisense strand to SEQ ID NO: 1610001
aaucuaagaagagacccag

SEQ ID NO: 1610003 - RNA, 19 nt, Artificial Sequence
  Description of Artificial Sequence: Synthetic oligonucleotide
  Sense strand starting at position 3632 of SEQ ID NO: 1560583
ugggucucuucuuagauuu

SEQ ID NO: 1610004 - RNA, 19 nt, Artificial Sequence
  Description of Artificial Sequence: Synthetic oligonucleotide
  Antisense strand to SEQ ID NO: 1610003
aaaucuaagaagagaccca

SEQ ID NO: 1610005 - RNA, 19 nt, Artificial Sequence
  Description of Artificial Sequence: Synthetic oligonucleotide
  Sense strand starting at position 3757 of SEQ ID NO: 1560583
aggacuuauugaugagaug

SEQ ID NO: 1610006 - RNA, 19 nt, Artificial Sequence
  Description of Artificial Sequence: Synthetic oligonucleotide
  Antisense strand to SEQ ID NO: 1610005
caucucaucaauaaguccu

SEQ ID NO: 1610007 - RNA, 19 nt, Artificial Sequence
  Description of Artificial Sequence: Synthetic oligonucleotide
  Sense strand starting at position 3786 of SEQ ID NO: 1560583
gcgagaggcauggaguuaa

SEQ ID NO: 1610008 - RNA, 19 nt, Artificial Sequence
  Description of Artificial Sequence: Synthetic oligonucleotide
  Antisense strand to SEQ ID NO: 1610007
uuaacuccaugccucucgc

SEQ ID NO: 1610009 - RNA, 19 nt, Artificial Sequence
  Description of Artificial Sequence: Synthetic oligonucleotide
  Sense strand starting at position 3805 of SEQ ID NO: 1560583
gcagaaaucggagagcacu

SEQ ID NO: 1610010 - RNA, 19 nt, Artificial Sequence
  Description of Artificial Sequence: Synthetic oligonucleotide
  Antisense strand to SEQ ID NO: 1610009
agugcucuccgauuucugc

SEQ ID NO: 1610011 - RNA, 19 nt, Artificial Sequence
  Description of Artificial Sequence: Synthetic oligonucleotide
  Sense strand starting at position 3893 of SEQ ID NO: 1560583
ggaggugucuuugaacuug

SEQ ID NO: 1610012 - RNA, 19 nt, Artificial Sequence
  Description of Artificial Sequence: Synthetic oligonucleotide
  Antisense strand to SEQ ID NO: 1610011
caaguucaaagacaccucc

SEQ ID NO: 1610013 - RNA, 19 nt, Artificial Sequence
  Description of Artificial Sequence: Synthetic oligonucleotide
  Sense strand starting at position 670 of SEQ ID NO: 1560584
aguaacccauggugagauu

SEQ ID NO: 1610014 - RNA, 19 nt, Artificial Sequence
  Description of Artificial Sequence: Synthetic oligonucleotide
  Antisense strand to SEQ ID NO: 1610013
aaucucaccauggguuacu

SEQ ID NO: 1610015 - RNA, 19 nt, Artificial Sequence
  Description of Artificial Sequence: Synthetic oligonucleotide
  Sense strand starting at position 679 of SEQ ID NO: 1560584
uggugagauucugauuaga

SEQ ID NO: 1610016 - RNA, 19 nt, Artificial Sequence
  Description of Artificial Sequence: Synthetic oligonucleotide
  Antisense strand to SEQ ID NO: 1610015
ucuaaucagaaucucacca

SEQ ID NO: 1610017 - RNA, 19 nt, Artificial Sequence
  Description of Artificial Sequence: Synthetic oligonucleotide
  Sense strand starting at position 681 of SEQ ID NO: 1560584
gugagauucugauuagauc

SEQ ID NO: 1610018 - RNA, 19 nt, Artificial Sequence
  Description of Artificial Sequence: Synthetic oligonucleotide
  Antisense strand to SEQ ID NO: 1610017
gaucuaaucagaaucucac

SEQ ID NO: 1610019 - RNA, 19 nt, Artificial Sequence
  Description of Artificial Sequence: Synthetic oligonucleotide
  Sense strand starting at position 684 of SEQ ID NO: 1560584
agauucugauuagaucuuu

SEQ ID NO: 1610020 - RNA, 19 nt, Artificial Sequence
  Description of Artificial Sequence: Synthetic oligonucleotide
  Antisense strand to SEQ ID NO: 1610019
aaagaucuaaucagaaucu

SEQ ID NO: 1610021 - RNA, 19 nt, Artificial Sequence
  Description of Artificial Sequence: Synthetic oligonucleotide
  Sense strand starting at position 764 of SEQ ID NO: 1560584
uagcguucuuccucuguau

SEQ ID NO: 1610022 - RNA, 19 nt, Artificial Sequence
  Description of Artificial Sequence: Synthetic oligonucleotide
  Antisense strand to SEQ ID NO: 1610021
auacagaggaagaacgcua

SEQ ID NO: 1610023 - RNA, 19 nt, Artificial Sequence
  Description of Artificial Sequence: Synthetic oligonucleotide
  Sense strand starting at position 768 of SEQ ID NO: 1560584
guucuuccucuguauggga

SEQ ID NO: 1610024 - RNA, 19 nt, Artificial Sequence
  Description of Artificial Sequence: Synthetic oligonucleotide
  Antisense strand to SEQ ID NO: 1610023
ucccauacagaggaagaac

SEQ ID NO: 1610025 - RNA, 19 nt, Artificial Sequence
  Description of Artificial Sequence: Synthetic oligonucleotide
  Sense strand starting at position 845 of SEQ ID NO: 1560584
uucugugaugucugugauc

SEQ ID NO: 1610026 - RNA, 19 nt, Artificial Sequence
  Description of Artificial Sequence: Synthetic oligonucleotide
  Antisense strand to SEQ ID NO: 1610025
gaucacagacaucacagaa

SEQ ID NO: 1610027 - RNA, 19 nt, Artificial Sequence
  Description of Artificial Sequence: Synthetic oligonucleotide
  Sense strand starting at position 847 of SEQ ID NO: 1560584
cugugaugucugugaucuc

SEQ ID NO: 1610028 - RNA, 19 nt, Artificial Sequence
  Description of Artificial Sequence: Synthetic oligonucleotide
  Antisense strand to SEQ ID NO: 1610027
gagaucacagacaucacag

SEQ ID NO: 1610029 - RNA, 19 nt, Artificial Sequence
  Description of Artificial Sequence: Synthetic oligonucleotide
  Sense strand starting at position 848 of SEQ ID NO: 1560584
ugugaugucugugaucuca

SEQ ID NO: 1610030 - RNA, 19 nt, Artificial Sequence
  Description of Artificial Sequence: Synthetic oligonucleotide
  Antisense strand to SEQ ID NO: 1610029
ugagaucacagacaucaca

SEQ ID NO: 1610031 - RNA, 19 nt, Artificial Sequence
  Description of Artificial Sequence: Synthetic oligonucleotide
  Sense strand starting at position 1589 of SEQ ID NO: 1560584
ggaaguucuagucggcuca

SEQ ID NO: 1610032 - RNA, 19 nt, Artificial Sequence
  Description of Artificial Sequence: Synthetic oligonucleotide
  Antisense strand to SEQ ID NO: 1610031
ugagccgacuagaacuucc

SEQ ID NO: 1610033 - RNA, 19 nt, Artificial Sequence
  Description of Artificial Sequence: Synthetic oligonucleotide
  Sense strand starting at position 2723 of SEQ ID NO: 1560584
cucugacucuccgugcuua

SEQ ID NO: 1610034 - RNA, 19 nt, Artificial Sequence
  Description of Artificial Sequence: Synthetic oligonucleotide
  Antisense strand to SEQ ID NO: 1610033
uaagcacggagagucagag

SEQ ID NO: 1610035 - RNA, 19 nt, Artificial Sequence
  Description of Artificial Sequence: Synthetic oligonucleotide
  Sense strand starting at position 2724 of SEQ ID NO: 1560584
ucugacucuccgugcuuau

SEQ ID NO: 1610036 - RNA, 19 nt, Artificial Sequence
  Description of Artificial Sequence: Synthetic oligonucleotide
  Antisense strand to SEQ ID NO: 1610035
auaagcacggagagucaga

SEQ ID NO: 1610037 - RNA, 19 nt, Artificial Sequence
  Description of Artificial Sequence: Synthetic oligonucleotide
  Sense strand starting at position 2749 of SEQ ID NO: 1560584
cugggucucuucuuagauu

SEQ ID NO: 1610038 - RNA, 19 nt, Artificial Sequence
  Description of Artificial Sequence: Synthetic oligonucleotide
  Antisense strand to SEQ ID NO: 1610037
aaucuaagaagagacccag

SEQ ID NO: 1610039 - RNA, 19 nt, Artificial Sequence
  Description of Artificial Sequence: Synthetic oligonucleotide
  Sense strand starting at position 2750 of SEQ ID NO: 1560584
ugggucucuucuuagauuu

SEQ ID NO: 1610040 - RNA, 19 nt, Artificial Sequence
  Description of Artificial Sequence: Synthetic oligonucleotide
  Antisense strand to SEQ ID NO: 1610039
aaaucuaagaagagaccca

SEQ ID NO: 1610041 - RNA, 19 nt, Artificial Sequence
  Description of Artificial Sequence: Synthetic oligonucleotide
  Sense strand starting at position 2875 of SEQ ID NO: 1560584
aggacuuauugaugagaug

SEQ ID NO: 1610042 - RNA, 19 nt, Artificial Sequence
  Description of Artificial Sequence: Synthetic oligonucleotide
  Antisense strand to SEQ ID NO: 1610041
caucucaucaauaaguccu

SEQ ID NO: 1610043 - RNA, 19 nt, Artificial Sequence
  Description of Artificial Sequence: Synthetic oligonucleotide
  Sense strand starting at position 2904 of SEQ ID NO: 1560584
gcgagaggcauggaguuaa

SEQ ID NO: 1610044 - RNA, 19 nt, Artificial Sequence
  Description of Artificial Sequence: Synthetic oligonucleotide
  Antisense strand to SEQ ID NO: 1610043
uuaacuccaugccucucgc

SEQ ID NO: 1610045 - RNA, 19 nt, Artificial Sequence
  Description of Artificial Sequence: Synthetic oligonucleotide
  Sense strand starting at position 2923 of SEQ ID NO: 1560584
gcagaaaucggagagcacu

SEQ ID NO: 1610046 - RNA, 19 nt, Artificial Sequence
  Description of Artificial Sequence: Synthetic oligonucleotide
  Antisense strand to SEQ ID NO: 1610045
agugcucuccgauuucugc

SEQ ID NO: 1610047 - RNA, 19 nt, Artificial Sequence
  Description of Artificial Sequence: Synthetic oligonucleotide
  Sense strand starting at position 3011 of SEQ ID NO: 1560584
ggaggugucuuugaacuug

SEQ ID NO: 1610048 - RNA, 19 nt, Artificial Sequence
  Description of Artificial Sequence: Synthetic oligonucleotide
  Antisense strand to SEQ ID NO: 1610047
caaguucaaagacaccucc

SEQ ID NO: 1610049 - RNA, 19 nt, Artificial Sequence
  Description of Artificial Sequence: Synthetic oligonucleotide
  Sense strand starting at position 3186 of SEQ ID NO: 1560584
ggaagucacugcguaauaa

SEQ ID NO: 1610050 - RNA, 19 nt, Artificial Sequence
  Description of Artificial Sequence: Synthetic oligonucleotide
  Antisense strand to SEQ ID NO: 1610049
uuauuacgcagugacuucc

SEQ ID NO: 1610051 - RNA, 19 nt, Artificial Sequence
  Description of Artificial Sequence: Synthetic oligonucleotide
  Sense strand starting at position 3187 of SEQ ID NO: 1560584
gaagucacugcguaauaag

SEQ ID NO: 1610052 - RNA, 19 nt, Artificial Sequence
  Description of Artificial Sequence: Synthetic oligonucleotide
  Antisense strand to SEQ ID NO: 1610051
cuuauuacgcagugacuuc

SEQ ID NO: 1610053 - RNA, 19 nt, Artificial Sequence
  Description of Artificial Sequence: Synthetic oligonucleotide
  Sense strand starting at position 3196 of SEQ ID NO: 1560584
gcguaauaaggacaaugau

SEQ ID NO: 1610054 - RNA, 19 nt, Artificial Sequence
  Description of Artificial Sequence: Synthetic oligonucleotide
  Antisense strand to SEQ ID NO: 1610053
aucauuguccuuauuacgc

SEQ ID NO: 1610055 - RNA, 19 nt, Artificial Sequence
  Description of Artificial Sequence: Synthetic oligonucleotide
  Sense strand starting at position 3202 of SEQ ID NO: 1560584
uaaggacaaugauaggaau

SEQ ID NO: 1610056 - RNA, 19 nt, Artificial Sequence
  Description of Artificial Sequence: Synthetic oligonucleotide
  Antisense strand to SEQ ID NO: 1610055
auuccuaucauuguccuua

SEQ ID NO: 1610057 - RNA, 19 nt, Artificial Sequence
  Description of Artificial Sequence: Synthetic oligonucleotide
  Sense strand starting at position 3205 of SEQ ID NO: 1560584
ggacaaugauaggaaugaa

SEQ ID NO: 1610058 - RNA, 19 nt, Artificial Sequence
  Description of Artificial Sequence: Synthetic oligonucleotide
  Antisense strand to SEQ ID NO: 1610057
uucauuccuaucauugucc

SEQ ID NO: 1610059 - RNA, 19 nt, Artificial Sequence
  Description of Artificial Sequence: Synthetic oligonucleotide
  Sense strand starting at position 3447 of SEQ ID NO: 1560584
uucuuugucuugcauugaa

SEQ ID NO: 1610060 - RNA, 19 nt, Artificial Sequence
  Description of Artificial Sequence: Synthetic oligonucleotide
  Antisense strand to SEQ ID NO: 1610059
uucaaugcaagacaaagaa

SEQ ID NO: 1610061 - RNA, 19 nt, Artificial Sequence
  Description of Artificial Sequence: Synthetic oligonucleotide
  Sense strand starting at position 3450 of SEQ ID NO: 1560584
uuugucuugcauugaaucu

SEQ ID NO: 1610062 - RNA, 19 nt, Artificial Sequence
  Description of Artificial Sequence: Synthetic oligonucleotide
  Antisense strand to SEQ ID NO: 1610061
agauucaaugcaagacaaa

SEQ ID NO: 1610063 - RNA, 19 nt, Artificial Sequence
  Description of Artificial Sequence: Synthetic oligonucleotide
  Sense strand starting at position 3472 of SEQ ID NO: 1560584
ugucaucuugcauugugca

SEQ ID NO: 1610064 - RNA, 19 nt, Artificial Sequence
  Description of Artificial Sequence: Synthetic oligonucleotide
  Antisense strand to SEQ ID NO: 1610063
ugcacaaugcaagaugaca

SEQ ID NO: 1610065 - RNA, 19 nt, Artificial Sequence
  Description of Artificial Sequence: Synthetic oligonucleotide
  Sense strand starting at position 3494 of SEQ ID NO: 1560584
cccaucacuccagggauga

SEQ ID NO: 1610066 - RNA, 19 nt, Artificial Sequence
  Description of Artificial Sequence: Synthetic oligonucleotide
  Antisense strand to SEQ ID NO: 1610065
ucaucccuggagugauggg

SEQ ID NO: 1610067 - RNA, 19 nt, Artificial Sequence
  Description of Artificial Sequence: Synthetic oligonucleotide
  Sense strand starting at position 3508 of SEQ ID NO: 1560584
gaugaagacuacuucggua

SEQ ID NO: 1610068 - RNA, 19 nt, Artificial Sequence
  Description of Artificial Sequence: Synthetic oligonucleotide
  Antisense strand to SEQ ID NO: 1610067
uaccgaaguagucuucauc

SEQ ID NO: 1610069 - RNA, 19 nt, Artificial Sequence
  Description of Artificial Sequence: Synthetic oligonucleotide
  Sense strand starting at position 3510 of SEQ ID NO: 1560584
ugaagacuacuucgguauu

SEQ ID NO: 1610070 - RNA, 19 nt, Artificial Sequence
  Description of Artificial Sequence: Synthetic oligonucleotide
  Antisense strand to SEQ ID NO: 1610069
aauaccgaaguagucuuca

SEQ ID NO: 1610071 - RNA, 19 nt, Artificial Sequence
  Description of Artificial Sequence: Synthetic oligonucleotide
  Sense strand starting at position 3613 of SEQ ID NO: 1560584
cagcaagucugauguugca

SEQ ID NO: 1610072 - RNA, 19 nt, Artificial Sequence
  Description of Artificial Sequence: Synthetic oligonucleotide
  Antisense strand to SEQ ID NO: 1610071
ugcaacaucagacuugcug

SEQ ID NO: 1610073 - RNA, 19 nt, Artificial Sequence
  Description of Artificial Sequence: Synthetic oligonucleotide
  Sense strand starting at position 3616 of SEQ ID NO: 1560584
caagucugauguugcacaa

SEQ ID NO: 1610074 - RNA, 19 nt, Artificial Sequence
  Description of Artificial Sequence: Synthetic oligonucleotide
  Antisense strand to SEQ ID NO: 1610073
uugugcaacaucagacuug

SEQ ID NO: 1610075 - RNA, 19 nt, Artificial Sequence
  Description of Artificial Sequence: Synthetic oligonucleotide
  Sense strand starting at position 3898 of SEQ ID NO: 1560584
cagggaaguccuggccaau

SEQ ID NO: 1610076 - RNA, 19 nt, Artificial Sequence
  Description of Artificial Sequence: Synthetic oligonucleotide
  Antisense strand to SEQ ID NO: 1610075
auuggccaggacuucccug

SEQ ID NO: 1610077 - RNA, 19 nt, Artificial Sequence
  Description of Artificial Sequence: Synthetic oligonucleotide
  Sense strand starting at position 3914 of SEQ ID NO: 1560584
aaugaaaugugaugccaag

SEQ ID NO: 1610078 - RNA, 19 nt, Artificial Sequence
  Description of Artificial Sequence: Synthetic oligonucleotide
  Antisense strand to SEQ ID NO: 1610077
cuuggcaucacauuucauu

SEQ ID NO: 1610079 - RNA, 19 nt, Artificial Sequence
  Description of Artificial Sequence: Synthetic oligonucleotide
  Sense strand starting at position 160 of SEQ ID NO: 1560585
gauggaagcuguuugagga

SEQ ID NO: 1610080 - RNA, 19 nt, Artificial Sequence
  Description of Artificial Sequence: Synthetic oligonucleotide
  Antisense strand to SEQ ID NO: 1610079
uccucaaacagcuuccauc

SEQ ID NO: 1610081 - RNA, 19 nt, Artificial Sequence
  Description of Artificial Sequence: Synthetic oligonucleotide
  Sense strand starting at position 178 of SEQ ID NO: 1560585
agggaaggguucugacuca

SEQ ID NO: 1610082 - RNA, 19 nt, Artificial Sequence
  Description of Artificial Sequence: Synthetic oligonucleotide
  Antisense strand to SEQ ID NO: 1610081
ugagucagaacccuucccu

SEQ ID NO: 1610083 - RNA, 19 nt, Artificial Sequence
  Description of Artificial Sequence: Synthetic oligonucleotide
  Sense strand starting at position 1788 of SEQ ID NO: 1560585
ucgagaggaucugauguga

SEQ ID NO: 1610084 - RNA, 19 nt, Artificial Sequence
  Description of Artificial Sequence: Synthetic oligonucleotide
  Antisense strand to SEQ ID NO: 1610083
ucacaucagauccucucga

SEQ ID NO: 1610085 - RNA, 19 nt, Artificial Sequence
  Description of Artificial Sequence: Synthetic oligonucleotide
  Sense strand starting at position 1793 of SEQ ID NO: 1560585
aggaucugaugugauccaa

SEQ ID NO: 1610086 - RNA, 19 nt, Artificial Sequence
  Description of Artificial Sequence: Synthetic oligonucleotide
  Antisense strand to SEQ ID NO: 1610085
uuggaucacaucagauccu

SEQ ID NO: 1610087 - RNA, 19 nt, Artificial Sequence
  Description of Artificial Sequence: Synthetic oligonucleotide
  Sense strand starting at position 1960 of SEQ ID NO: 1560585
cgguucugguuaucuggaa

SEQ ID NO: 1610088 - RNA, 19 nt, Artificial Sequence
  Description of Artificial Sequence: Synthetic oligonucleotide
  Antisense strand to SEQ ID NO: 1610087
uuccagauaaccagaaccg

SEQ ID NO: 1610089 - RNA, 19 nt, Artificial Sequence
  Description of Artificial Sequence: Synthetic oligonucleotide
  Sense strand starting at position 2155 of SEQ ID NO: 1560585
agucgcugagcucagagaa

SEQ ID NO: 1610090 - RNA, 19 nt, Artificial Sequence
  Description of Artificial Sequence: Synthetic oligonucleotide
  Antisense strand to SEQ ID NO: 1610089
uucucugagcucagcgacu

SEQ ID NO: 1610091 - RNA, 19 nt, Artificial Sequence
  Description of Artificial Sequence: Synthetic oligonucleotide
  Sense strand starting at position 2626 of SEQ ID NO: 1560585
aucccagucgugccuguaa

SEQ ID NO: 1610092 - RNA, 19 nt, Artificial Sequence
  Description of Artificial Sequence: Synthetic oligonucleotide
  Antisense strand to SEQ ID NO: 1610091
uuacaggcacgacugggau

SEQ ID NO: 1610093 - RNA, 19 nt, Artificial Sequence
  Description of Artificial Sequence: Synthetic oligonucleotide
  Sense strand starting at position 2628 of SEQ ID NO: 1560585
cccagucgugccuguaauu

SEQ ID NO: 1610094 - RNA, 19 nt, Artificial Sequence
  Description of Artificial Sequence: Synthetic oligonucleotide
  Antisense strand to SEQ ID NO: 1610093
aauuacaggcacgacuggg

SEQ ID NO: 1610095 - RNA, 19 nt, Artificial Sequence
  Description of Artificial Sequence: Synthetic oligonucleotide
  Sense strand starting at position 2629 of SEQ ID NO: 1560585
ccagucgugccuguaauua

SEQ ID NO: 1610096 - RNA, 19 nt, Artificial Sequence
  Description of Artificial Sequence: Synthetic oligonucleotide
  Antisense strand to SEQ ID NO: 1610095
uaauuacaggcacgacugg

SEQ ID NO: 1610097 - RNA, 19 nt, Artificial Sequence
  Description of Artificial Sequence: Synthetic oligonucleotide
  Sense strand starting at position 2637 of SEQ ID NO: 1560585
gccuguaauuacgccugaa

SEQ ID NO: 1610098 - RNA, 19 nt, Artificial Sequence
  Description of Artificial Sequence: Synthetic oligonucleotide
  Antisense strand to SEQ ID NO: 1610097
uucaggcguaauuacaggc

SEQ ID NO: 1610099 - RNA, 19 nt, Artificial Sequence
  Description of Artificial Sequence: Synthetic oligonucleotide
  Sense strand starting at position 2641 of SEQ ID NO: 1560585
guaauuacgccugaaccca

SEQ ID NO: 1610100 - RNA, 19 nt, Artificial Sequence
  Description of Artificial Sequence: Synthetic oligonucleotide
  Antisense strand to SEQ ID NO: 1610099
uggguucaggcguaauuac

SEQ ID NO: 1610101 - RNA, 19 nt, Artificial Sequence
  Description of Artificial Sequence: Synthetic oligonucleotide
  Sense strand starting at position 2667 of SEQ ID NO: 1560585
cucuaacagagagguguaa

SEQ ID NO: 1610102 - RNA, 19 nt, Artificial Sequence
  Description of Artificial Sequence: Synthetic oligonucleotide
  Antisense strand to SEQ ID NO: 1610101
uuacaccucucuguuagag

SEQ ID NO: 1610103 - RNA, 19 nt, Artificial Sequence
  Description of Artificial Sequence: Synthetic oligonucleotide
  Sense strand starting at position 2669 of SEQ ID NO: 1560585
cuaacagagagguguaagu

SEQ ID NO: 1610104 - RNA, 19 nt, Artificial Sequence
  Description of Artificial Sequence: Synthetic oligonucleotide
  Antisense strand to SEQ ID NO: 1610103
acuuacaccucucuguuag

SEQ ID NO: 1610105 - RNA, 19 nt, Artificial Sequence
  Description of Artificial Sequence: Synthetic oligonucleotide
  Sense strand starting at position 2726 of SEQ ID NO: 1560585
uugccauguuuaggaucua

SEQ ID NO: 1610106 - RNA, 19 nt, Artificial Sequence
  Description of Artificial Sequence: Synthetic oligonucleotide
  Antisense strand to SEQ ID NO: 1610105
uagauccuaaacauggcaa

SEQ ID NO: 1610107 - RNA, 19 nt, Artificial Sequence
  Description of Artificial Sequence: Synthetic oligonucleotide
  Sense strand starting at position 2727 of SEQ ID NO: 1560585
ugccauguuuaggaucuau

SEQ ID NO: 1610108 - RNA, 19 nt, Artificial Sequence
  Description of Artificial Sequence: Synthetic oligonucleotide
  Antisense strand to SEQ ID NO: 1610107
auagauccuaaacauggca

SEQ ID NO: 1610109 - RNA, 19 nt, Artificial Sequence
  Description of Artificial Sequence: Synthetic oligonucleotide
  Sense strand starting at position 2736 of SEQ ID NO: 1560585
uaggaucuauguucuuaug

SEQ ID NO: 1610110 - RNA, 19 nt, Artificial Sequence
  Description of Artificial Sequence: Synthetic oligonucleotide
  Antisense strand to SEQ ID NO: 1610109
cauaagaacauagauccua

SEQ ID NO: 1610111 - RNA, 19 nt, Artificial Sequence
  Description of Artificial Sequence: Synthetic oligonucleotide
  Sense strand starting at position 2738 of SEQ ID NO: 1560585
ggaucuauguucuuauggu

SEQ ID NO: 1610112 - RNA, 19 nt, Artificial Sequence
  Description of Artificial Sequence: Synthetic oligonucleotide
  Antisense strand to SEQ ID NO: 1610111
accauaagaacauagaucc

SEQ ID NO: 1610113 - RNA, 19 nt, Artificial Sequence
  Description of Artificial Sequence: Synthetic oligonucleotide
  Sense strand starting at position 2739 of SEQ ID NO: 1560585
gaucuauguucuuaugguc

SEQ ID NO: 1610114 - RNA, 19 nt, Artificial Sequence
  Description of Artificial Sequence: Synthetic oligonucleotide
  Antisense strand to SEQ ID NO: 1610113
gaccauaagaacauagauc

SEQ ID NO: 1610115 - RNA, 19 nt, Artificial Sequence
  Description of Artificial Sequence: Synthetic oligonucleotide
  Sense strand starting at position 2742 of SEQ ID NO: 1560585
cuauguucuuauggucauu

SEQ ID NO: 1610116 - RNA, 19 nt, Artificial Sequence
  Description of Artificial Sequence: Synthetic oligonucleotide
  Antisense strand to SEQ ID NO: 1610115
aaugaccauaagaacauag

SEQ ID NO: 1610117 - RNA, 19 nt, Artificial Sequence
  Description of Artificial Sequence: Synthetic oligonucleotide
  Sense strand starting at position 2933 of SEQ ID NO: 1560585
agguuuguugcguagguga

SEQ ID NO: 1610118 - RNA, 19 nt, Artificial Sequence
  Description of Artificial Sequence: Synthetic oligonucleotide
  Antisense strand to SEQ ID NO: 1610117
ucaccuacgcaacaaaccu

SEQ ID NO: 1610119 - RNA, 19 nt, Artificial Sequence
  Description of Artificial Sequence: Synthetic oligonucleotide
  Sense strand starting at position 2935 of SEQ ID NO: 1560585
guuuguugcguaggugaac

SEQ ID NO: 1610120 - RNA, 19 nt, Artificial Sequence
  Description of Artificial Sequence: Synthetic oligonucleotide
  Antisense strand to SEQ ID NO: 1610119
guucaccuacgcaacaaac

SEQ ID NO: 1610121 - RNA, 19 nt, Artificial Sequence
  Description of Artificial Sequence: Synthetic oligonucleotide
  Sense strand starting at position 3125 of SEQ ID NO: 1560585
acguacguucauuguagaa

SEQ ID NO: 1610122 - RNA, 19 nt, Artificial Sequence
  Description of Artificial Sequence: Synthetic oligonucleotide
  Antisense strand to SEQ ID NO: 1610121
uucuacaaugaacguacgu

SEQ ID NO: 1610123 - RNA, 19 nt, Artificial Sequence
  Description of Artificial Sequence: Synthetic oligonucleotide
  Sense strand starting at position 3333 of SEQ ID NO: 1560585
ccagauauggcauguuccu

SEQ ID NO: 1610124 - RNA, 19 nt, Artificial Sequence
  Description of Artificial Sequence: Synthetic oligonucleotide
  Antisense strand to SEQ ID NO: 1610123
aggaacaugccauaucugg

SEQ ID NO: 1610125 - RNA, 19 nt, Artificial Sequence
  Description of Artificial Sequence: Synthetic oligonucleotide
  Sense strand starting at position 3363 of SEQ ID NO: 1560585
guagcuaaaugaugagacu

SEQ ID NO: 1610126 - RNA, 19 nt, Artificial Sequence
  Description of Artificial Sequence: Synthetic oligonucleotide
  Antisense strand to SEQ ID NO: 1610125
agucucaucauuuagcuac

SEQ ID NO: 1610127 - RNA, 19 nt, Artificial Sequence
  Description of Artificial Sequence: Synthetic oligonucleotide
  Sense strand starting at position 3812 of SEQ ID NO: 1560585
aguaaucauuguccuaugu

SEQ ID NO: 1610128 - RNA, 19 nt, Artificial Sequence
  Description of Artificial Sequence: Synthetic oligonucleotide
  Antisense strand to SEQ ID NO: 1610127
acauaggacaaugauuacu

SEQ ID NO: 1610129 - RNA, 19 nt, Artificial Sequence
  Description of Artificial Sequence: Synthetic oligonucleotide
  Sense strand starting at position 3816 of SEQ ID NO: 1560585
aucauuguccuauguauau

SEQ ID NO: 1610130 - RNA, 19 nt, Artificial Sequence
  Description of Artificial Sequence: Synthetic oligonucleotide
  Antisense strand to SEQ ID NO: 1610129
auauacauaggacaaugau

SEQ ID NO: 1610131 - RNA, 19 nt, Artificial Sequence
  Description of Artificial Sequence: Synthetic oligonucleotide
  Sense strand starting at position 3820 of SEQ ID NO: 1560585
uuguccuauguauauacau

SEQ ID NO: 1610132 - RNA, 19 nt, Artificial Sequence
  Description of Artificial Sequence: Synthetic oligonucleotide
  Antisense strand to SEQ ID NO: 1610131
auguauauacauaggacaa

SEQ ID NO: 1610133 - RNA, 19 nt, Artificial Sequence
  Description of Artificial Sequence: Synthetic oligonucleotide
  Sense strand starting at position 3827 of SEQ ID NO: 1560585
auguauauacaucgcauau

SEQ ID NO: 1610134 - RNA, 19 nt, Artificial Sequence
  Description of Artificial Sequence: Synthetic oligonucleotide
  Antisense strand to SEQ ID NO: 1610133
auaugcgauguauauacau

SEQ ID NO: 1610135 - RNA, 19 nt, Artificial Sequence
  Description of Artificial Sequence: Synthetic oligonucleotide
  Sense strand starting at position 3829 of SEQ ID NO: 1560585
guauauacaucgcauauga

SEQ ID NO: 1610136 - RNA, 19 nt, Artificial Sequence
  Description of Artificial Sequence: Synthetic oligonucleotide
  Antisense strand to SEQ ID NO: 1610135
ucauaugcgauguauauac

SEQ ID NO: 1610137 - RNA, 19 nt, Artificial Sequence
  Description of Artificial Sequence: Synthetic oligonucleotide
  Sense strand starting at position 3831 of SEQ ID NO: 1560585
auauacaucgcauaugauc

SEQ ID NO: 1610138 - RNA, 19 nt, Artificial Sequence
  Description of Artificial Sequence: Synthetic oligonucleotide
  Antisense strand to SEQ ID NO: 1610137
gaucauaugcgauguauau

SEQ ID NO: 1610139 - RNA, 19 nt, Artificial Sequence
  Description of Artificial Sequence: Synthetic oligonucleotide
  Sense strand starting at position 3839 of SEQ ID NO: 1560585
cgcauaugaucauauugua

SEQ ID NO: 1610140 - RNA, 19 nt, Artificial Sequence
  Description of Artificial Sequence: Synthetic oligonucleotide
  Antisense strand to SEQ ID NO: 1610139
uacaauaugaucauaugcg

SEQ ID NO: 1610141 - RNA, 19 nt, Artificial Sequence
  Description of Artificial Sequence: Synthetic oligonucleotide
  Sense strand starting at position 3940 of SEQ ID NO: 1560585
ccuuuauaaugguugugua

SEQ ID NO: 1610142 - RNA, 19 nt, Artificial Sequence
  Description of Artificial Sequence: Synthetic oligonucleotide
  Antisense strand to SEQ ID NO: 1610141
uacacaaccauuauaaagg

SEQ ID NO: 1610143 - RNA, 19 nt, Artificial Sequence
  Description of Artificial Sequence: Synthetic oligonucleotide
  Sense strand starting at position 3941 of SEQ ID NO: 1560585
cuuuauaaugguuguguaa

SEQ ID NO: 1610144 - RNA, 19 nt, Artificial Sequence
  Description of Artificial Sequence: Synthetic oligonucleotide
  Antisense strand to SEQ ID NO: 1610143
uuacacaaccauuauaaag

SEQ ID NO: 1610145 - RNA, 19 nt, Artificial Sequence
  Description of Artificial Sequence: Synthetic oligonucleotide
  Sense strand starting at position 3966 of SEQ ID NO: 1560585
auacuauacuuguaucaug

SEQ ID NO: 1610146 - RNA, 19 nt, Artificial Sequence
  Description of Artificial Sequence: Synthetic oligonucleotide
  Antisense strand to SEQ ID NO: 1610145
caugauacaaguauaguau

SEQ ID NO: 1610147 - RNA, 19 nt, Artificial Sequence
  Description of Artificial Sequence: Synthetic oligonucleotide
  Sense strand starting at position 3971 of SEQ ID NO: 1560585
auacuuguaucaugaugca

SEQ ID NO: 1610148 - RNA, 19 nt, Artificial Sequence
  Description of Artificial Sequence: Synthetic oligonucleotide
  Antisense strand to SEQ ID NO: 1610147
ugcaucaugauacaaguau

SEQ ID NO: 1610149 - RNA, 19 nt, Artificial Sequence
  Description of Artificial Sequence: Synthetic oligonucleotide
  Sense strand starting at position 3974 of SEQ ID NO: 1560585
cuuguaucaugaugcaugu

SEQ ID NO: 1610150 - RNA, 19 nt, Artificial Sequence
  Description of Artificial Sequence: Synthetic oligonucleotide
  Antisense strand to SEQ ID NO: 1610149
acaugcaucaugauacaag

SEQ ID NO: 1610151 - RNA, 19 nt, Artificial Sequence
  Description of Artificial Sequence: Synthetic oligonucleotide
  Sense strand starting at position 50 of SEQ ID NO: 1560586
gugggagccucuugcacau

SEQ ID NO: 1610152 - RNA, 19 nt, Artificial Sequence
  Description of Artificial Sequence: Synthetic oligonucleotide
  Antisense strand to SEQ ID NO: 1610151
augugcaagaggcucccac

SEQ ID NO: 1610153 - RNA, 19 nt, Artificial Sequence
  Description of Artificial Sequence: Synthetic oligonucleotide
  Sense strand starting at position 70 of SEQ ID NO: 1560586
gggcgccaucaauaaucuu

SEQ ID NO: 1610154 - RNA, 19 nt, Artificial Sequence
  Description of Artificial Sequence: Synthetic oligonucleotide
  Antisense strand to SEQ ID NO: 1610153
aagauuauugauggcgccc

SEQ ID NO: 1610155 - RNA, 19 nt, Artificial Sequence
  Description of Artificial Sequence: Synthetic oligonucleotide
  Sense strand starting at position 409 of SEQ ID NO: 1560586
gauggaagcuguuugagga

SEQ ID NO: 1610156 - RNA, 19 nt, Artificial Sequence
  Description of Artificial Sequence: Synthetic oligonucleotide
  Antisense strand to SEQ ID NO: 1610155
uccucaaacagcuuccauc

SEQ ID NO: 1610157 - RNA, 19 nt, Artificial Sequence
  Description of Artificial Sequence: Synthetic oligonucleotide
  Sense strand starting at position 427 of SEQ ID NO: 1560586
agggaaggguucugacuca

SEQ ID NO: 1610158 - RNA, 19 nt, Artificial Sequence
  Description of Artificial Sequence: Synthetic oligonucleotide
  Antisense strand to SEQ ID NO: 1610157
ugagucagaacccuucccu

SEQ ID NO: 1610159 - RNA, 19 nt, Artificial Sequence
  Description of Artificial Sequence: Synthetic oligonucleotide
  Sense strand starting at position 2037 of SEQ ID NO: 1560586
ucgagaggaucugauguga

SEQ ID NO: 1610160 - RNA, 19 nt, Artificial Sequence
  Description of Artificial Sequence: Synthetic oligonucleotide
  Antisense strand to SEQ ID NO: 1610159
ucacaucagauccucucga

SEQ ID NO: 1610161 - RNA, 19 nt, Artificial Sequence
  Description of Artificial Sequence: Synthetic oligonucleotide
  Sense strand starting at position 2042 of SEQ ID NO: 1560586
aggaucugaugugauccaa

SEQ ID NO: 1610162 - RNA, 19 nt, Artificial Sequence
  Description of Artificial Sequence: Synthetic oligonucleotide
  Antisense strand to SEQ ID NO: 1610161
uuggaucacaucagauccu

SEQ ID NO: 1610163 - RNA, 19 nt, Artificial Sequence
  Description of Artificial Sequence: Synthetic oligonucleotide
  Sense strand starting at position 2209 of SEQ ID NO: 1560586
cgguucugguuaucuggaa

SEQ ID NO: 1610164 - RNA, 19 nt, Artificial Sequence
  Description of Artificial Sequence: Synthetic oligonucleotide
  Antisense strand to SEQ ID NO: 1610163
uuccagauaaccagaaccg

SEQ ID NO: 1610165 - RNA, 19 nt, Artificial Sequence
  Description of Artificial Sequence: Synthetic oligonucleotide
  Sense strand starting at position 2404 of SEQ ID NO: 1560586
agucgcugagcucagagaa

SEQ ID NO: 1610166 - RNA, 19 nt, Artificial Sequence
  Description of Artificial Sequence: Synthetic oligonucleotide
  Antisense strand to SEQ ID NO: 1610165
uucucugagcucagcgacu

SEQ ID NO: 1610167 - RNA, 19 nt, Artificial Sequence
  Description of Artificial Sequence: Synthetic oligonucleotide
  Sense strand starting at position 2875 of SEQ ID NO: 1560586
aucccagucgugccuguaa

SEQ ID NO: 1610168 - RNA, 19 nt, Artificial Sequence
  Description of Artificial Sequence: Synthetic oligonucleotide
  Antisense strand to SEQ ID NO: 1610167
uuacaggcacgacugggau

SEQ ID NO: 1610169 - RNA, 19 nt, Artificial Sequence
  Description of Artificial Sequence: Synthetic oligonucleotide
  Sense strand starting at position 2877 of SEQ ID NO: 1560586
cccagucgugccuguaauu

SEQ ID NO: 1610170 - RNA, 19 nt, Artificial Sequence
  Description of Artificial Sequence: Synthetic oligonucleotide
  Antisense strand to SEQ ID NO: 1610169
aauuacaggcacgacuggg

SEQ ID NO: 1610171 - RNA, 19 nt, Artificial Sequence
  Description of Artificial Sequence: Synthetic oligonucleotide
  Sense strand starting at position 2878 of SEQ ID NO: 1560586
ccagucgugccuguaauua

SEQ ID NO: 1610172 - RNA, 19 nt, Artificial Sequence
  Description of Artificial Sequence: Synthetic oligonucleotide
  Antisense strand to SEQ ID NO: 1610171
uaauuacaggcacgacugg

SEQ ID NO: 1610173 - RNA, 19 nt, Artificial Sequence
  Description of Artificial Sequence: Synthetic oligonucleotide
  Sense strand starting at position 2886 of SEQ ID NO: 1560586
gccuguaauuacgccugaa

SEQ ID NO: 1610174 - RNA, 19 nt, Artificial Sequence
  Description of Artificial Sequence: Synthetic oligonucleotide
  Antisense strand to SEQ ID NO: 1610173
uucaggcguaauuacaggc

SEQ ID NO: 1610175 - RNA, 19 nt, Artificial Sequence
  Description of Artificial Sequence: Synthetic oligonucleotide
  Sense strand starting at position 2890 of SEQ ID NO: 1560586
guaauuacgccugaaccca

SEQ ID NO: 1610176 - RNA, 19 nt, Artificial Sequence
  Description of Artificial Sequence: Synthetic oligonucleotide
  Antisense strand to SEQ ID NO: 1610175
uggguucaggcguaauuac

SEQ ID NO: 1610177 - RNA, 19 nt, Artificial Sequence
  Description of Artificial Sequence: Synthetic oligonucleotide
  Sense strand starting at position 2916 of SEQ ID NO: 1560586
cucuaacagagagguguaa

SEQ ID NO: 1610178 - RNA, 19 nt, Artificial Sequence
  Description of Artificial Sequence: Synthetic oligonucleotide
  Antisense strand to SEQ ID NO: 1610177
uuacaccucucuguuagag

SEQ ID NO: 1610179 - RNA, 19 nt, Artificial Sequence
  Description of Artificial Sequence: Synthetic oligonucleotide
  Sense strand starting at position 2918 of SEQ ID NO: 1560586
cuaacagagagguguaagu

SEQ ID NO: 1610180 - RNA, 19 nt, Artificial Sequence
  Description of Artificial Sequence: Synthetic oligonucleotide
  Antisense strand to SEQ ID NO: 1610179
acuuacaccucucuguuag

SEQ ID NO: 1610181 - RNA, 19 nt, Artificial Sequence
  Description of Artificial Sequence: Synthetic oligonucleotide
  Sense strand starting at position 2975 of SEQ ID NO: 1560586
uugccauguuuaggaucua

SEQ ID NO: 1610182 - RNA, 19 nt, Artificial Sequence
  Description of Artificial Sequence: Synthetic oligonucleotide
  Antisense strand to SEQ ID NO: 1610181
uagauccuaaacauggcaa

SEQ ID NO: 1610183 - RNA, 19 nt, Artificial Sequence
  Description of Artificial Sequence: Synthetic oligonucleotide
  Sense strand starting at position 2976 of SEQ ID NO: 1560586
ugccauguuuaggaucuau

SEQ ID NO: 1610184 - RNA, 19 nt, Artificial Sequence
  Description of Artificial Sequence: Synthetic oligonucleotide
  Antisense strand to SEQ ID NO: 1610183
auagauccuaaacauggca

SEQ ID NO: 1610185 - RNA, 19 nt, Artificial Sequence
  Description of Artificial Sequence: Synthetic oligonucleotide
  Sense strand starting at position 2985 of SEQ ID NO: 1560586
uaggaucuauguucuuaug

SEQ ID NO: 1610186 - RNA, 19 nt, Artificial Sequence
  Description of Artificial Sequence: Synthetic oligonucleotide
  Antisense strand to SEQ ID NO: 1610185
cauaagaacauagauccua

SEQ ID NO: 1610187 - RNA, 19 nt, Artificial Sequence
  Description of Artificial Sequence: Synthetic oligonucleotide
  Sense strand starting at position 2987 of SEQ ID NO: 1560586
ggaucuauguucuuauggu

SEQ ID NO: 1610188 - RNA, 19 nt, Artificial Sequence
  Description of Artificial Sequence: Synthetic oligonucleotide
  Antisense strand to SEQ ID NO: 1610187
accauaagaacauagaucc

SEQ ID NO: 1610189 - RNA, 19 nt, Artificial Sequence
  Description of Artificial Sequence: Synthetic oligonucleotide
  Sense strand starting at position 2988 of SEQ ID NO: 1560586
gaucuauguucuuaugguc

SEQ ID NO: 1610190 - RNA, 19 nt, Artificial Sequence
  Description of Artificial Sequence: Synthetic oligonucleotide
  Antisense strand to SEQ ID NO: 1610189
gaccauaagaacauagauc

SEQ ID NO: 1610191 - RNA, 19 nt, Artificial Sequence
  Description of Artificial Sequence: Synthetic oligonucleotide
  Sense strand starting at position 2991 of SEQ ID NO: 1560586
cuauguucuuauggucauu

SEQ ID NO: 1610192 - RNA, 19 nt, Artificial Sequence
  Description of Artificial Sequence: Synthetic oligonucleotide
  Antisense strand to SEQ ID NO: 1610191
aaugaccauaagaacauag

SEQ ID NO: 1610193 - RNA, 19 nt, Artificial Sequence
  Description of Artificial Sequence: Synthetic oligonucleotide
  Sense strand starting at position 3182 of SEQ ID NO: 1560586
agguuuguugcguagguga

SEQ ID NO: 1610194 - RNA, 19 nt, Artificial Sequence
  Description of Artificial Sequence: Synthetic oligonucleotide
  Antisense strand to SEQ ID NO: 1610193
ucaccuacgcaacaaaccu

SEQ ID NO: 1610195 - RNA, 19 nt, Artificial Sequence
  Description of Artificial Sequence: Synthetic oligonucleotide
  Sense strand starting at position 3184 of SEQ ID NO: 1560586
guuuguugcguaggugaac

SEQ ID NO: 1610196 - RNA, 19 nt, Artificial Sequence
  Description of Artificial Sequence: Synthetic oligonucleotide
  Antisense strand to SEQ ID NO: 1610195
guucaccuacgcaacaaac

SEQ ID NO: 1610197 - RNA, 19 nt, Artificial Sequence
  Description of Artificial Sequence: Synthetic oligonucleotide
  Sense strand starting at position 3374 of SEQ ID NO: 1560586
acguacguucauuguagaa

SEQ ID NO: 1610198 - RNA, 19 nt, Artificial Sequence
  Description of Artificial Sequence: Synthetic oligonucleotide
  Antisense strand to SEQ ID NO: 1610197
uucuacaaugaacguacgu

SEQ ID NO: 1610199 - RNA, 19 nt, Artificial Sequence
  Description of Artificial Sequence: Synthetic oligonucleotide
  Sense strand starting at position 3582 of SEQ ID NO: 1560586
ccagauauggcauguuccu

SEQ ID NO: 1610200 - RNA, 19 nt, Artificial Sequence
  Description of Artificial Sequence: Synthetic oligonucleotide
  Antisense strand to SEQ ID NO: 1610199
aggaacaugccauaucugg

SEQ ID NO: 1610201 - RNA, 19 nt, Artificial Sequence
  Description of Artificial Sequence: Synthetic oligonucleotide
  Sense strand starting at position 3612 of SEQ ID NO: 1560586
guagcuaaaugaugagacu

SEQ ID NO: 1610202 - RNA, 19 nt, Artificial Sequence
  Description of Artificial Sequence: Synthetic oligonucleotide
  Antisense strand to SEQ ID NO: 1610201
agucucaucauuuagcuac

SEQ ID NO: 1610203 - RNA, 19 nt, Artificial Sequence
  Description of Artificial Sequence: Synthetic oligonucleotide
  Sense strand starting at position 113 of SEQ ID NO: 1560587
ccacucuuguuaguaguca

SEQ ID NO: 1610204 - RNA, 19 nt, Artificial Sequence
  Description of Artificial Sequence: Synthetic oligonucleotide
  Antisense strand to SEQ ID NO: 1610203
ugacuacuaacaagagugg

SEQ ID NO: 1610205 - RNA, 19 nt, Artificial Sequence
  Description of Artificial Sequence: Synthetic oligonucleotide
  Sense strand starting at position 117 of SEQ ID NO: 1560587
ucuuguuaguagucagauc

SEQ ID NO: 1610206 - RNA, 19 nt, Artificial Sequence
  Description of Artificial Sequence: Synthetic oligonucleotide
  Antisense strand to SEQ ID NO: 1610205
gaucugacuacuaacaaga

SEQ ID NO: 1610207 - RNA, 19 nt, Artificial Sequence
  Description of Artificial Sequence: Synthetic oligonucleotide
  Sense strand starting at position 118 of SEQ ID NO: 1560587
cuuguuaguagucagaucu

SEQ ID NO: 1610208 - RNA, 19 nt, Artificial Sequence
  Description of Artificial Sequence: Synthetic oligonucleotide
  Antisense strand to SEQ ID NO: 1610207
agaucugacuacuaacaag

SEQ ID NO: 1610209 - RNA, 19 nt, Artificial Sequence
  Description of Artificial Sequence: Synthetic oligonucleotide
  Sense strand starting at position 135 of SEQ ID NO: 1560587
cuucgaggcuucucauaug

SEQ ID NO: 1610210 - RNA, 19 nt, Artificial Sequence
  Description of Artificial Sequence: Synthetic oligonucleotide
  Antisense strand to SEQ ID NO: 1610209
cauaugagaagccucgaag

SEQ ID NO: 1610211 - RNA, 19 nt, Artificial Sequence
  Description of Artificial Sequence: Synthetic oligonucleotide
  Sense strand starting at position 150 of SEQ ID NO: 1560587
uaugacuccugcuugugaa

SEQ ID NO: 1610212 - RNA, 19 nt, Artificial Sequence
  Description of Artificial Sequence: Synthetic oligonucleotide
  Antisense strand to SEQ ID NO: 1610211
uucacaagcaggagucaua

SEQ ID NO: 1610213 - RNA, 19 nt, Artificial Sequence
  Description of Artificial Sequence: Synthetic oligonucleotide
  Sense strand starting at position 151 of SEQ ID NO: 1560587
augacuccugcuugugaau

SEQ ID NO: 1610214 - RNA, 19 nt, Artificial Sequence
  Description of Artificial Sequence: Synthetic oligonucleotide
  Antisense strand to SEQ ID NO: 1610213
auucacaagcaggagucau

SEQ ID NO: 1610215 - RNA, 19 nt, Artificial Sequence
  Description of Artificial Sequence: Synthetic oligonucleotide
  Sense strand starting at position 211 of SEQ ID NO: 1560587
gggaccaagcuuugccaau

SEQ ID NO: 1610216 - RNA, 19 nt, Artificial Sequence
  Description of Artificial Sequence: Synthetic oligonucleotide
  Antisense strand to SEQ ID NO: 1610215
auuggcaaagcuugguccc

SEQ ID NO: 1610217 - RNA, 19 nt, Artificial Sequence
  Description of Artificial Sequence: Synthetic oligonucleotide
  Sense strand starting at position 212 of SEQ ID NO: 1560587
ggaccaagcuuugccaaua

SEQ ID NO: 1610218 - RNA, 19 nt, Artificial Sequence
  Description of Artificial Sequence: Synthetic oligonucleotide
  Antisense strand to SEQ ID NO: 1610217
uauuggcaaagcuuggucc

SEQ ID NO: 1610219 - RNA, 19 nt, Artificial Sequence
  Description of Artificial Sequence: Synthetic oligonucleotide
  Sense strand starting at position 354 of SEQ ID NO: 1560587
aaugaucugccaggcugau

SEQ ID NO: 1610220 - RNA, 19 nt, Artificial Sequence
  Description of Artificial Sequence: Synthetic oligonucleotide
  Antisense strand to SEQ ID NO: 1610219
aucagccuggcagaucauu

SEQ ID NO: 1610221 - RNA, 19 nt, Artificial Sequence
  Description of Artificial Sequence: Synthetic oligonucleotide
  Sense strand starting at position 414 of SEQ ID NO: 1560587
gaagaagcaucagaucaug

SEQ ID NO: 1610222 - RNA, 19 nt, Artificial Sequence
  Description of Artificial Sequence: Synthetic oligonucleotide
  Antisense strand to SEQ ID NO: 1610221
caugaucugaugcuucuuc

SEQ ID NO: 1610223 - RNA, 19 nt, Artificial Sequence
  Description of Artificial Sequence: Synthetic oligonucleotide
  Sense strand starting at position 417 of SEQ ID NO: 1560587
gaagcaucagaucaugguu

SEQ ID NO: 1610224 - RNA, 19 nt, Artificial Sequence
  Description of Artificial Sequence: Synthetic oligonucleotide
  Antisense strand to SEQ ID NO: 1610223
aaccaugaucugaugcuuc

SEQ ID NO: 1610225 - RNA, 19 nt, Artificial Sequence
  Description of Artificial Sequence: Synthetic oligonucleotide
  Sense strand starting at position 506 of SEQ ID NO: 1560587
gggccaucuuuauucugua

SEQ ID NO: 1610226 - RNA, 19 nt, Artificial Sequence
  Description of Artificial Sequence: Synthetic oligonucleotide
  Antisense strand to SEQ ID NO: 1610225
uacagaauaaagauggccc

SEQ ID NO: 1610227 - RNA, 19 nt, Artificial Sequence
  Description of Artificial Sequence: Synthetic oligonucleotide
  Sense strand starting at position 548 of SEQ ID NO: 1560587
guguauuuccuguaauggu

SEQ ID NO: 1610228 - RNA, 19 nt, Artificial Sequence
  Description of Artificial Sequence: Synthetic oligonucleotide
  Antisense strand to SEQ ID NO: 1610227
accauuacaggaaauacac

SEQ ID NO: 1610229 - RNA, 19 nt, Artificial Sequence
  Description of Artificial Sequence: Synthetic oligonucleotide
  Sense strand starting at position 646 of SEQ ID NO: 1560587
ucuccuuccugagucgaaa

SEQ ID NO: 1610230 - RNA, 19 nt, Artificial Sequence
  Description of Artificial Sequence: Synthetic oligonucleotide
  Antisense strand to SEQ ID NO: 1610229
uuucgacucaggaaggaga

SEQ ID NO: 1610231 - RNA, 19 nt, Artificial Sequence
  Description of Artificial Sequence: Synthetic oligonucleotide
  Sense strand starting at position 969 of SEQ ID NO: 1560587
gcaaguucuccgcauacaa

SEQ ID NO: 1610232 - RNA, 19 nt, Artificial Sequence
  Description of Artificial Sequence: Synthetic oligonucleotide
  Antisense strand to SEQ ID NO: 1610231
uuguaugcggagaacuugc

SEQ ID NO: 1610233 - RNA, 19 nt, Artificial Sequence
  Description of Artificial Sequence: Synthetic oligonucleotide
  Sense strand starting at position 1042 of SEQ ID NO: 1560587
guccaugugucaucauaca

SEQ ID NO: 1610234 - RNA, 19 nt, Artificial Sequence
  Description of Artificial Sequence: Synthetic oligonucleotide
  Antisense strand to SEQ ID NO: 1610233
uguaugaugacacauggac

SEQ ID NO: 1610235 - RNA, 19 nt, Artificial Sequence
  Description of Artificial Sequence: Synthetic oligonucleotide
  Sense strand starting at position 1047 of SEQ ID NO: 1560587
ugugucaucauacaagagu

SEQ ID NO: 1610236 - RNA, 19 nt, Artificial Sequence
  Description of Artificial Sequence: Synthetic oligonucleotide
  Antisense strand to SEQ ID NO: 1610235
acucuuguaugaugacaca

SEQ ID NO: 1610237 - RNA, 19 nt, Artificial Sequence
  Description of Artificial Sequence: Synthetic oligonucleotide
  Sense strand starting at position 1115 of SEQ ID NO: 1560587
cgaguacucccaggugaau

SEQ ID NO: 1610238 - RNA, 19 nt, Artificial Sequence
  Description of Artificial Sequence: Synthetic oligonucleotide
  Antisense strand to SEQ ID NO: 1610237
auucaccugggaguacucg

SEQ ID NO: 1610239 - RNA, 19 nt, Artificial Sequence
  Description of Artificial Sequence: Synthetic oligonucleotide
  Sense strand starting at position 1231 of SEQ ID NO: 1560587
cucuguccacccugaggaa

SEQ ID NO: 1610240 - RNA, 19 nt, Artificial Sequence
  Description of Artificial Sequence: Synthetic oligonucleotide
  Antisense strand to SEQ ID NO: 1610239
uuccucaggguggacagag

SEQ ID NO: 1610241 - RNA, 19 nt, Artificial Sequence
  Description of Artificial Sequence: Synthetic oligonucleotide
  Sense strand starting at position 1463 of SEQ ID NO: 1560587
cauggugaggucugggaaa

SEQ ID NO: 1610242 - RNA, 19 nt, Artificial Sequence
  Description of Artificial Sequence: Synthetic oligonucleotide
  Antisense strand to SEQ ID NO: 1610241
uuucccagaccucaccaug

SEQ ID NO: 1610243 - RNA, 19 nt, Artificial Sequence
  Description of Artificial Sequence: Synthetic oligonucleotide
  Sense strand starting at position 1609 of SEQ ID NO: 1560587
gggacuggauuccuacauu

SEQ ID NO: 1610244 - RNA, 19 nt, Artificial Sequence
  Description of Artificial Sequence: Synthetic oligonucleotide
  Antisense strand to SEQ ID NO: 1610243
aauguaggaauccaguccc

SEQ ID NO: 1610245 - RNA, 19 nt, Artificial Sequence
  Description of Artificial Sequence: Synthetic oligonucleotide
  Sense strand starting at position 1645 of SEQ ID NO: 1560587
ccucgaugucugggucuga

SEQ ID NO: 1610246 - RNA, 19 nt, Artificial Sequence
  Description of Artificial Sequence: Synthetic oligonucleotide
  Antisense strand to SEQ ID NO: 1610245
ucagacccagacaucgagg

SEQ ID NO: 1610247 - RNA, 19 nt, Artificial Sequence
  Description of Artificial Sequence: Synthetic oligonucleotide
  Sense strand starting at position 1763 of SEQ ID NO: 1560587
gguccuggaaucuggagaa

SEQ ID NO: 1610248 - RNA, 19 nt, Artificial Sequence
  Description of Artificial Sequence: Synthetic oligonucleotide
  Antisense strand to SEQ ID NO: 1610247
uucuccagauuccaggacc

SEQ ID NO: 1610249 - RNA, 19 nt, Artificial Sequence
  Description of Artificial Sequence: Synthetic oligonucleotide
  Sense strand starting at position 1794 of SEQ ID NO: 1560587
gccugaugucuguaucuga

SEQ ID NO: 1610250 - RNA, 19 nt, Artificial Sequence
  Description of Artificial Sequence: Synthetic oligonucleotide
  Antisense strand to SEQ ID NO: 1610249
ucagauacagacaucaggc

SEQ ID NO: 1610251 - RNA, 19 nt, Artificial Sequence
  Description of Artificial Sequence: Synthetic oligonucleotide
  Sense strand starting at position 1797 of SEQ ID NO: 1560587
ugaugucuguaucugagua

SEQ ID NO: 1610252 - RNA, 19 nt, Artificial Sequence
  Description of Artificial Sequence: Synthetic oligonucleotide
  Antisense strand to SEQ ID NO: 1610251
uacucagauacagacauca

SEQ ID NO: 1610253 - RNA, 19 nt, Artificial Sequence
  Description of Artificial Sequence: Synthetic oligonucleotide
  Sense strand starting at position 2043 of SEQ ID NO: 1560587
cgugaaaucuugagggagg

SEQ ID NO: 1610254 - RNA, 19 nt, Artificial Sequence
  Description of Artificial Sequence: Synthetic oligonucleotide
  Antisense strand to SEQ ID NO: 1610253
ccucccucaagauuucacg

SEQ ID NO: 1610255 - RNA, 19 nt, Artificial Sequence
  Description of Artificial Sequence: Synthetic oligonucleotide
  Sense strand starting at position 2373 of SEQ ID NO: 1560587
ccuggauuccuggguguga

SEQ ID NO: 1610256 - RNA, 19 nt, Artificial Sequence
  Description of Artificial Sequence: Synthetic oligonucleotide
  Antisense strand to SEQ ID NO: 1610255
ucacacccaggaauccagg

SEQ ID NO: 1610257 - RNA, 19 nt, Artificial Sequence
  Description of Artificial Sequence: Synthetic oligonucleotide
  Sense strand starting at position 2410 of SEQ ID NO: 1560587
gcugaauucuaaguacuuu

SEQ ID NO: 1610258 - RNA, 19 nt, Artificial Sequence
  Description of Artificial Sequence: Synthetic oligonucleotide
  Antisense strand to SEQ ID NO: 1610257
aaaguacuuagaauucagc

SEQ ID NO: 1610259 - RNA, 19 nt, Artificial Sequence
  Description of Artificial Sequence: Synthetic oligonucleotide
  Sense strand starting at position 2644 of SEQ ID NO: 1560587
agcagaacccaggagucuu

SEQ ID NO: 1610260 - RNA, 19 nt, Artificial Sequence
  Description of Artificial Sequence: Synthetic oligonucleotide
  Antisense strand to SEQ ID NO: 1610259
aagacuccuggguucugcu

SEQ ID NO: 1610261 - RNA, 19 nt, Artificial Sequence
  Description of Artificial Sequence: Synthetic oligonucleotide
  Sense strand starting at position 2652 of SEQ ID NO: 1560587
ccaggagucuugcugcaau

SEQ ID NO: 1610262 - RNA, 19 nt, Artificial Sequence
  Description of Artificial Sequence: Synthetic oligonucleotide
  Antisense strand to SEQ ID NO: 1610261
auugcagcaagacuccugg

SEQ ID NO: 1610263 - RNA, 19 nt, Artificial Sequence
  Description of Artificial Sequence: Synthetic oligonucleotide
  Sense strand starting at position 2812 of SEQ ID NO: 1560587
gagguuucccgcguuuacu

SEQ ID NO: 1610264 - RNA, 19 nt, Artificial Sequence
  Description of Artificial Sequence: Synthetic oligonucleotide
  Antisense strand to SEQ ID NO: 1610263
aguaaacgcgggaaaccuc

SEQ ID NO: 1610265 - RNA, 19 nt, Artificial Sequence
  Description of Artificial Sequence: Synthetic oligonucleotide
  Sense strand starting at position 2844 of SEQ ID NO: 1560587
uugcauuggcucuaaaggu

SEQ ID NO: 1610266 - RNA, 19 nt, Artificial Sequence
  Description of Artificial Sequence: Synthetic oligonucleotide
  Antisense strand to SEQ ID NO: 1610265
accuuuagagccaaugcaa

SEQ ID NO: 1610267 - RNA, 19 nt, Artificial Sequence
  Description of Artificial Sequence: Synthetic oligonucleotide
  Sense strand starting at position 2888 of SEQ ID NO: 1560587
ccaggucuccgccaggauu

SEQ ID NO: 1610268 - RNA, 19 nt, Artificial Sequence
  Description of Artificial Sequence: Synthetic oligonucleotide
  Antisense strand to SEQ ID NO: 1610267
aauccuggcggagaccugg

SEQ ID NO: 1610269 - RNA, 19 nt, Artificial Sequence
  Description of Artificial Sequence: Synthetic oligonucleotide
  Sense strand starting at position 3005 of SEQ ID NO: 1560587
gggcgagaucucuggugaa

SEQ ID NO: 1610270 - RNA, 19 nt, Artificial Sequence
  Description of Artificial Sequence: Synthetic oligonucleotide
  Antisense strand to SEQ ID NO: 1610269
uucaccagagaucucgccc

SEQ ID NO: 1610271 - RNA, 19 nt, Artificial Sequence
  Description of Artificial Sequence: Synthetic oligonucleotide
  Sense strand starting at position 3405 of SEQ ID NO: 1560587
gggcucaguucuccaugau

SEQ ID NO: 1610272 - RNA, 19 nt, Artificial Sequence
  Description of Artificial Sequence: Synthetic oligonucleotide
  Antisense strand to SEQ ID NO: 1610271
aucauggagaacugagccc

SEQ ID NO: 1610273 - RNA, 19 nt, Artificial Sequence
  Description of Artificial Sequence: Synthetic oligonucleotide
  Sense strand starting at position 3406 of SEQ ID NO: 1560587
ggcucaguucuccaugauu

SEQ ID NO: 1610274 - RNA, 19 nt, Artificial Sequence
  Description of Artificial Sequence: Synthetic oligonucleotide
  Antisense strand to SEQ ID NO: 1610273
aaucauggagaacugagcc

SEQ ID NO: 1610275 - RNA, 19 nt, Artificial Sequence
  Description of Artificial Sequence: Synthetic oligonucleotide
  Sense strand starting at position 3426 of SEQ ID NO: 1560587
cuuggauccagucaaggua

SEQ ID NO: 1610276 - RNA, 19 nt, Artificial Sequence
  Description of Artificial Sequence: Synthetic oligonucleotide
  Antisense strand to SEQ ID NO: 1610275
uaccuugacuggauccaag

SEQ ID NO: 1610277 - RNA, 19 nt, Artificial Sequence
  Description of Artificial Sequence: Synthetic oligonucleotide
  Sense strand starting at position 3666 of SEQ ID NO: 1560587
auccgagaguccuccaucu

SEQ ID NO: 1610278 - RNA, 19 nt, Artificial Sequence
  Description of Artificial Sequence: Synthetic oligonucleotide
  Antisense strand to SEQ ID NO: 1610277
agauggaggacucucggau

SEQ ID NO: 1610279 - RNA, 19 nt, Artificial Sequence
  Description of Artificial Sequence: Synthetic oligonucleotide
  Sense strand starting at position 3697 of SEQ ID NO: 1560587
uccucagacccaggaguaa

SEQ ID NO: 1610280 - RNA, 19 nt, Artificial Sequence
  Description of Artificial Sequence: Synthetic oligonucleotide
  Antisense strand to SEQ ID NO: 1610279
uuacuccugggucugagga

SEQ ID NO: 1610281 - RNA, 19 nt, Artificial Sequence
  Description of Artificial Sequence: Synthetic oligonucleotide
  Sense strand starting at position 3797 of SEQ ID NO: 1560587
ccuguagauccagaagucu

SEQ ID NO: 1610282 - RNA, 19 nt, Artificial Sequence
  Description of Artificial Sequence: Synthetic oligonucleotide
  Antisense strand to SEQ ID NO: 1610281
agacuucuggaucuacagg

SEQ ID NO: 1610283 - RNA, 19 nt, Artificial Sequence
  Description of Artificial Sequence: Synthetic oligonucleotide
  Sense strand starting at position 3 of SEQ ID NO: 1560588
gauguauaggcuuaaguua

SEQ ID NO: 1610284 - RNA, 19 nt, Artificial Sequence
  Description of Artificial Sequence: Synthetic oligonucleotide
  Antisense strand to SEQ ID NO: 1610283
uaacuuaagccuauacauc

SEQ ID NO: 1610285 - RNA, 19 nt, Artificial Sequence
  Description of Artificial Sequence: Synthetic oligonucleotide
  Sense strand starting at position 12 of SEQ ID NO: 1560588
gcuuaaguuaaaggagguu

SEQ ID NO: 1610286 - RNA, 19 nt, Artificial Sequence
  Description of Artificial Sequence: Synthetic oligonucleotide
  Antisense strand to SEQ ID NO: 1610285
aaccuccuuuaacuuaagc

SEQ ID NO: 1610287 - RNA, 19 nt, Artificial Sequence
  Description of Artificial Sequence: Synthetic oligonucleotide
  Sense strand starting at position 27 of SEQ ID NO: 1560588
gguuccaucauggagcaau

SEQ ID NO: 1610288 - RNA, 19 nt, Artificial Sequence
  Description of Artificial Sequence: Synthetic oligonucleotide
  Antisense strand to SEQ ID NO: 1610287
auugcuccaugauggaacc

SEQ ID NO: 1610289 - RNA, 19 nt, Artificial Sequence
  Description of Artificial Sequence: Synthetic oligonucleotide
  Sense strand starting at position 89 of SEQ ID NO: 1560588
ugcuuuacucauggaggga

SEQ ID NO: 1610290 - RNA, 19 nt, Artificial Sequence
  Description of Artificial Sequence: Synthetic oligonucleotide
  Antisense strand to SEQ ID NO: 1610289
ucccuccaugaguaaagca

SEQ ID NO: 1610291 - RNA, 19 nt, Artificial Sequence
  Description of Artificial Sequence: Synthetic oligonucleotide
  Sense strand starting at position 179 of SEQ ID NO: 1560588
ccaggauacuauuagaaug

SEQ ID NO: 1610292 - RNA, 19 nt, Artificial Sequence
  Description of Artificial Sequence: Synthetic oligonucleotide
  Antisense strand to SEQ ID NO: 1610291
cauucuaauaguauccugg

SEQ ID NO: 1610293 - RNA, 19 nt, Artificial Sequence
  Description of Artificial Sequence: Synthetic oligonucleotide
  Sense strand starting at position 382 of SEQ ID NO: 1560588
uuuaauguucuaggacaaa

SEQ ID NO: 1610294 - RNA, 19 nt, Artificial Sequence
  Description of Artificial Sequence: Synthetic oligonucleotide
  Antisense strand to SEQ ID NO: 1610293
uuuguccuagaacauuaaa

SEQ ID NO: 1610295 - RNA, 19 nt, Artificial Sequence
  Description of Artificial Sequence: Synthetic oligonucleotide
  Sense strand starting at position 772 of SEQ ID NO: 1560588
auuuaagagucugggauuc

SEQ ID NO: 1610296 - RNA, 19 nt, Artificial Sequence
  Description of Artificial Sequence: Synthetic oligonucleotide
  Antisense strand to SEQ ID NO: 1610295
gaaucccagacucuuaaau

SEQ ID NO: 1610297 - RNA, 19 nt, Artificial Sequence
  Description of Artificial Sequence: Synthetic oligonucleotide
  Sense strand starting at position 852 of SEQ ID NO: 1560588
auucuaguacugugaguuu

SEQ ID NO: 1610298 - RNA, 19 nt, Artificial Sequence
  Description of Artificial Sequence: Synthetic oligonucleotide
  Antisense strand to SEQ ID NO: 1610297
aaacucacaguacuagaau

SEQ ID NO: 1610299 - RNA, 19 nt, Artificial Sequence
  Description of Artificial Sequence: Synthetic oligonucleotide
  Sense strand starting at position 913 of SEQ ID NO: 1560588
ggaucacacuagccauuau

SEQ ID NO: 1610300 - RNA, 19 nt, Artificial Sequence
  Description of Artificial Sequence: Synthetic oligonucleotide
  Antisense strand to SEQ ID NO: 1610299
auaauggcuagugugaucc

SEQ ID NO: 1610301 - RNA, 19 nt, Artificial Sequence
  Description of Artificial Sequence: Synthetic oligonucleotide
  Sense strand starting at position 922 of SEQ ID NO: 1560588
uagccauuauggcuauuga

SEQ ID NO: 1610302 - RNA, 19 nt, Artificial Sequence
  Description of Artificial Sequence: Synthetic oligonucleotide
  Antisense strand to SEQ ID NO: 1610301
ucaauagccauaauggcua

SEQ ID NO: 1610303 - RNA, 19 nt, Artificial Sequence
  Description of Artificial Sequence: Synthetic oligonucleotide
  Sense strand starting at position 923 of SEQ ID NO: 1560588
agccauuauggcuauugaa

SEQ ID NO: 1610304 - RNA, 19 nt, Artificial Sequence
  Description of Artificial Sequence: Synthetic oligonucleotide
  Antisense strand to SEQ ID NO: 1610303
uucaauagccauaauggcu

SEQ ID NO: 1610305 - RNA, 19 nt, Artificial Sequence
  Description of Artificial Sequence: Synthetic oligonucleotide
  Sense strand starting at position 1170 of SEQ ID NO: 1560588
uguggcuggcaucauaauu

SEQ ID NO: 1610306 - RNA, 19 nt, Artificial Sequence
  Description of Artificial Sequence: Synthetic oligonucleotide
  Antisense strand to SEQ ID NO: 1610305
aauuaugaugccagccaca

SEQ ID NO: 1610307 - RNA, 19 nt, Artificial Sequence
  Description of Artificial Sequence: Synthetic oligonucleotide
  Sense strand starting at position 1181 of SEQ ID NO: 1560588
ucauaauuccucugggcag

SEQ ID NO: 1610308 - RNA, 19 nt, Artificial Sequence
  Description of Artificial Sequence: Synthetic oligonucleotide
  Antisense strand to SEQ ID NO: 1610307
cugcccagaggaauuauga

SEQ ID NO: 1610309 - RNA, 19 nt, Artificial Sequence
  Description of Artificial Sequence: Synthetic oligonucleotide
  Sense strand starting at position 1220 of SEQ ID NO: 1560588
auucuaauagucugcgaau

SEQ ID NO: 1610310 - RNA, 19 nt, Artificial Sequence
  Description of Artificial Sequence: Synthetic oligonucleotide
  Antisense strand to SEQ ID NO: 1610309
auucgcagacuauuagaau

SEQ ID NO: 1610311 - RNA, 19 nt, Artificial Sequence
  Description of Artificial Sequence: Synthetic oligonucleotide
  Sense strand starting at position 1233 of SEQ ID NO: 1560588
gcgaaucuaugauucuaaa

SEQ ID NO: 1610312 - RNA, 19 nt, Artificial Sequence
  Description of Artificial Sequence: Synthetic oligonucleotide
  Antisense strand to SEQ ID NO: 1610311
uuuagaaucauagauucgc

SEQ ID NO: 1610313 - RNA, 19 nt, Artificial Sequence
  Description of Artificial Sequence: Synthetic oligonucleotide
  Sense strand starting at position 1328 of SEQ ID NO: 1560588
cucggauucgaagagccua

SEQ ID NO: 1610314 - RNA, 19 nt, Artificial Sequence
  Description of Artificial Sequence: Synthetic oligonucleotide
  Antisense strand to SEQ ID NO: 1610313
uaggcucuucgaauccgag

SEQ ID NO: 1610315 - RNA, 19 nt, Artificial Sequence
  Description of Artificial Sequence: Synthetic oligonucleotide
  Sense strand starting at position 1333 of SEQ ID NO: 1560588
auucgaagagccuaaguuu

SEQ ID NO: 1610316 - RNA, 19 nt, Artificial Sequence
  Description of Artificial Sequence: Synthetic oligonucleotide
  Antisense strand to SEQ ID NO: 1610315
aaacuuaggcucuucgaau

SEQ ID NO: 1610317 - RNA, 19 nt, Artificial Sequence
  Description of Artificial Sequence: Synthetic oligonucleotide
  Sense strand starting at position 1372 of SEQ ID NO: 1560588
ugagauauugcuggucucu

SEQ ID NO: 1610318 - RNA, 19 nt, Artificial Sequence
  Description of Artificial Sequence: Synthetic oligonucleotide
  Antisense strand to SEQ ID NO: 1610317
agagaccagcaauaucuca

SEQ ID NO: 1610319 - RNA, 19 nt, Artificial Sequence
  Description of Artificial Sequence: Synthetic oligonucleotide
  Sense strand starting at position 1374 of SEQ ID NO: 1560588
agauauugcuggucucuag

SEQ ID NO: 1610320 - RNA, 19 nt, Artificial Sequence
  Description of Artificial Sequence: Synthetic oligonucleotide
  Antisense strand to SEQ ID NO: 1610319
cuagagaccagcaauaucu

SEQ ID NO: 1610321 - RNA, 19 nt, Artificial Sequence
  Description of Artificial Sequence: Synthetic oligonucleotide
  Sense strand starting at position 1377 of SEQ ID NO: 1560588
uauugcuggucucuagaau

SEQ ID NO: 1610322 - RNA, 19 nt, Artificial Sequence
  Description of Artificial Sequence: Synthetic oligonucleotide
  Antisense strand to SEQ ID NO: 1610321
auucuagagaccagcaaua

SEQ ID NO: 1610323 - RNA, 19 nt, Artificial Sequence
  Description of Artificial Sequence: Synthetic oligonucleotide
  Sense strand starting at position 1378 of SEQ ID NO: 1560588
auugcuggucucuagaauu

SEQ ID NO: 1610324 - RNA, 19 nt, Artificial Sequence
  Description of Artificial Sequence: Synthetic oligonucleotide
  Antisense strand to SEQ ID NO: 1610323
aauucuagagaccagcaau

SEQ ID NO: 1610325 - RNA, 19 nt, Artificial Sequence
  Description of Artificial Sequence: Synthetic oligonucleotide
  Sense strand starting at position 1429 of SEQ ID NO: 1560588
aagaguugaacuuguggua

SEQ ID NO: 1610326 - RNA, 19 nt, Artificial Sequence
  Description of Artificial Sequence: Synthetic oligonucleotide
  Antisense strand to SEQ ID NO: 1610325
uaccacaaguucaacucuu

SEQ ID NO: 1610327 - RNA, 19 nt, Artificial Sequence
  Description of Artificial Sequence: Synthetic oligonucleotide
  Sense strand starting at position 1465 of SEQ ID NO: 1560588
gcacuucuggccuaaagca

SEQ ID NO: 1610328 - RNA, 19 nt, Artificial Sequence
  Description of Artificial Sequence: Synthetic oligonucleotide
  Antisense strand to SEQ ID NO: 1610327
ugcuuuaggccagaagugc

SEQ ID NO: 1610329 - RNA, 19 nt, Artificial Sequence
  Description of Artificial Sequence: Synthetic oligonucleotide
  Sense strand starting at position 1950 of SEQ ID NO: 1560588
gcguccagugcuucuuuau

SEQ ID NO: 1610330 - RNA, 19 nt, Artificial Sequence
  Description of Artificial Sequence: Synthetic oligonucleotide
  Antisense strand to SEQ ID NO: 1610329
auaaagaagcacuggacgc

SEQ ID NO: 1610331 - RNA, 19 nt, Artificial Sequence
  Description of Artificial Sequence: Synthetic oligonucleotide
  Sense strand starting at position 2135 of SEQ ID NO: 1560588
gggccagagcuugacugaa

SEQ ID NO: 1610332 - RNA, 19 nt, Artificial Sequence
  Description of Artificial Sequence: Synthetic oligonucleotide
  Antisense strand to SEQ ID NO: 1610331
uucagucaagcucuggccc

SEQ ID NO: 1610333 - RNA, 19 nt, Artificial Sequence
  Description of Artificial Sequence: Synthetic oligonucleotide
  Sense strand starting at position 2137 of SEQ ID NO: 1560588
gccagagcuugacugaaug

SEQ ID NO: 1610334 - RNA, 19 nt, Artificial Sequence
  Description of Artificial Sequence: Synthetic oligonucleotide
  Antisense strand to SEQ ID NO: 1610333
cauucagucaagcucuggc

SEQ ID NO: 1610335 - RNA, 19 nt, Artificial Sequence
  Description of Artificial Sequence: Synthetic oligonucleotide
  Sense strand starting at position 2202 of SEQ ID NO: 1560588
gggucuucagagugggaga

SEQ ID NO: 1610336 - RNA, 19 nt, Artificial Sequence
  Description of Artificial Sequence: Synthetic oligonucleotide
  Antisense strand to SEQ ID NO: 1610335
ucucccacucugaagaccc

SEQ ID NO: 1610337 - RNA, 19 nt, Artificial Sequence
  Description of Artificial Sequence: Synthetic oligonucleotide
  Sense strand starting at position 2524 of SEQ ID NO: 1560588
gggaaagauugagggaaau

SEQ ID NO: 1610338 - RNA, 19 nt, Artificial Sequence
  Description of Artificial Sequence: Synthetic oligonucleotide
  Antisense strand to SEQ ID NO: 1610337
auuucccucaaucuuuccc

SEQ ID NO: 1610339 - RNA, 19 nt, Artificial Sequence
  Description of Artificial Sequence: Synthetic oligonucleotide
  Sense strand starting at position 2644 of SEQ ID NO: 1560588
ggcccucuccuagaauguu

SEQ ID NO: 1610340 - RNA, 19 nt, Artificial Sequence
  Description of Artificial Sequence: Synthetic oligonucleotide
  Antisense strand to SEQ ID NO: 1610339
aacauucuaggagagggcc

SEQ ID NO: 1610341 - RNA, 19 nt, Artificial Sequence
  Description of Artificial Sequence: Synthetic oligonucleotide
  Sense strand starting at position 2662 of SEQ ID NO: 1560588
ugagaaaucugguuccauc

SEQ ID NO: 1610342 - RNA, 19 nt, Artificial Sequence
  Description of Artificial Sequence: Synthetic oligonucleotide
  Antisense strand to SEQ ID NO: 1610341
gauggaaccagauuucuca

SEQ ID NO: 1610343 - RNA, 19 nt, Artificial Sequence
  Description of Artificial Sequence: Synthetic oligonucleotide
  Sense strand starting at position 3036 of SEQ ID NO: 1560588
gagugaaugucuuucucca

SEQ ID NO: 1610344 - RNA, 19 nt, Artificial Sequence
  Description of Artificial Sequence: Synthetic oligonucleotide
  Antisense strand to SEQ ID NO: 1610343
uggagaaagacauucacuc

SEQ ID NO: 1610345 - RNA, 19 nt, Artificial Sequence
  Description of Artificial Sequence: Synthetic oligonucleotide
  Sense strand starting at position 3038 of SEQ ID NO: 1560588
gugaaugucuuucuccaua

SEQ ID NO: 1610346 - RNA, 19 nt, Artificial Sequence
  Description of Artificial Sequence: Synthetic oligonucleotide
  Antisense strand to SEQ ID NO: 1610345
uauggagaaagacauucac

SEQ ID NO: 1610347 - RNA, 19 nt, Artificial Sequence
  Description of Artificial Sequence: Synthetic oligonucleotide
  Sense strand starting at position 3286 of SEQ ID NO: 1560588
ugaaccauguguguccaaa

SEQ ID NO: 1610348 - RNA, 19 nt, Artificial Sequence
  Description of Artificial Sequence: Synthetic oligonucleotide
  Antisense strand to SEQ ID NO: 1610347
uuuggacacacaugguuca

SEQ ID NO: 1610349 - RNA, 19 nt, Artificial Sequence
  Description of Artificial Sequence: Synthetic oligonucleotide
  Sense strand starting at position 3306 of SEQ ID NO: 1560588
cucaaugauuaggugugau

SEQ ID NO: 1610350 - RNA, 19 nt, Artificial Sequence
  Description of Artificial Sequence: Synthetic oligonucleotide
  Antisense strand to SEQ ID NO: 1610349
aucacaccuaaucauugag

SEQ ID NO: 1610351 - RNA, 19 nt, Artificial Sequence
  Description of Artificial Sequence: Synthetic oligonucleotide
  Sense strand starting at position 3309 of SEQ ID NO: 1560588
aaugauuaggugugauuag

SEQ ID NO: 1610352 - RNA, 19 nt, Artificial Sequence
  Description of Artificial Sequence: Synthetic oligonucleotide
  Antisense strand to SEQ ID NO: 1610351
cuaaucacaccuaaucauu

SEQ ID NO: 1610353 - RNA, 19 nt, Artificial Sequence
  Description of Artificial Sequence: Synthetic oligonucleotide
  Sense strand starting at position 3320 of SEQ ID NO: 1560588
gugauuagugaugaggugu

SEQ ID NO: 1610354 - RNA, 19 nt, Artificial Sequence
  Description of Artificial Sequence: Synthetic oligonucleotide
  Antisense strand to SEQ ID NO: 1610353
acaccucaucacuaaucac

SEQ ID NO: 1610355 - RNA, 19 nt, Artificial Sequence
  Description of Artificial Sequence: Synthetic oligonucleotide
  Sense strand starting at position 3326 of SEQ ID NO: 1560588
agugaugaggugugugacu

SEQ ID NO: 1610356 - RNA, 19 nt, Artificial Sequence
  Description of Artificial Sequence: Synthetic oligonucleotide
  Antisense strand to SEQ ID NO: 1610355
agucacacaccucaucacu

SEQ ID NO: 1610357 - RNA, 19 nt, Artificial Sequence
  Description of Artificial Sequence: Synthetic oligonucleotide
  Sense strand starting at position 3328 of SEQ ID NO: 1560588
ugaugaggugugugacuuu

SEQ ID NO: 1610358 - RNA, 19 nt, Artificial Sequence
  Description of Artificial Sequence: Synthetic oligonucleotide
  Antisense strand to SEQ ID NO: 1610357
aaagucacacaccucauca

SEQ ID NO: 1610359 - RNA, 19 nt, Artificial Sequence
  Description of Artificial Sequence: Synthetic oligonucleotide
  Sense strand starting at position 3422 of SEQ ID NO: 1560588
ggaguauugcucugacacc

SEQ ID NO: 1610360 - RNA, 19 nt, Artificial Sequence
  Description of Artificial Sequence: Synthetic oligonucleotide
  Antisense strand to SEQ ID NO: 1610359
ggugucagagcaauacucc

SEQ ID NO: 1610361 - RNA, 19 nt, Artificial Sequence
  Description of Artificial Sequence: Synthetic oligonucleotide
  Sense strand starting at position 3887 of SEQ ID NO: 1560588
cagggaaguccuugagauc

SEQ ID NO: 1610362 - RNA, 19 nt, Artificial Sequence
  Description of Artificial Sequence: Synthetic oligonucleotide
  Antisense strand to SEQ ID NO: 1610361
gaucucaaggacuucccug

SEQ ID NO: 1610363 - RNA, 19 nt, Artificial Sequence
  Description of Artificial Sequence: Synthetic oligonucleotide
  Sense strand starting at position 310 of SEQ ID NO: 1560589
gggacuaagucuugcuugu

SEQ ID NO: 1610364 - RNA, 19 nt, Artificial Sequence
  Description of Artificial Sequence: Synthetic oligonucleotide
  Antisense strand to SEQ ID NO: 1610363
acaagcaagacuuaguccc

SEQ ID NO: 1610365 - RNA, 19 nt, Artificial Sequence
  Description of Artificial Sequence: Synthetic oligonucleotide
  Sense strand starting at position 312 of SEQ ID NO: 1560589
gacuaagucuugcuugugu

SEQ ID NO: 1610366 - RNA, 19 nt, Artificial Sequence
  Description of Artificial Sequence: Synthetic oligonucleotide
  Antisense strand to SEQ ID NO: 1610365
acacaagcaagacuuaguc

SEQ ID NO: 1610367 - RNA, 19 nt, Artificial Sequence
  Description of Artificial Sequence: Synthetic oligonucleotide
  Sense strand starting at position 314 of SEQ ID NO: 1560589
cuaagucuugcuugugugu

SEQ ID NO: 1610368 - RNA, 19 nt, Artificial Sequence
  Description of Artificial Sequence: Synthetic oligonucleotide
  Antisense strand to SEQ ID NO: 1610367
acacacaagcaagacuuag

SEQ ID NO: 1610369 - RNA, 19 nt, Artificial Sequence
  Description of Artificial Sequence: Synthetic oligonucleotide
  Sense strand starting at position 316 of SEQ ID NO: 1560589
aagucuugcuuguguguuu

SEQ ID NO: 1610370 - RNA, 19 nt, Artificial Sequence
  Description of Artificial Sequence: Synthetic oligonucleotide
  Antisense strand to SEQ ID NO: 1610369
aaacacacaagcaagacuu

SEQ ID NO: 1610371 - RNA, 19 nt, Artificial Sequence
  Description of Artificial Sequence: Synthetic oligonucleotide
  Sense strand starting at position 371 of SEQ ID NO: 1560589
gaacacauucggcaacuga

SEQ ID NO: 1610372 - RNA, 19 nt, Artificial Sequence
  Description of Artificial Sequence: Synthetic oligonucleotide
  Antisense strand to SEQ ID NO: 1610371
ucaguugccgaauguguuc

SEQ ID NO: 1610373 - RNA, 19 nt, Artificial Sequence
  Description of Artificial Sequence: Synthetic oligonucleotide
  Sense strand starting at position 395 of SEQ ID NO: 1560589
gcuaguugaacagggaaga

SEQ ID NO: 1610374 - RNA, 19 nt, Artificial Sequence
  Description of Artificial Sequence: Synthetic oligonucleotide
  Antisense strand to SEQ ID NO: 1610373
ucuucccuguucaacuagc

SEQ ID NO: 1610375 - RNA, 19 nt, Artificial Sequence
  Description of Artificial Sequence: Synthetic oligonucleotide
  Sense strand starting at position 430 of SEQ ID NO: 1560589
aggauaaauuccugugacg

SEQ ID NO: 1610376 - RNA, 19 nt, Artificial Sequence
  Description of Artificial Sequence: Synthetic oligonucleotide
  Antisense strand to SEQ ID NO: 1610375
cgucacaggaauuuauccu

SEQ ID NO: 1610377 - RNA, 19 nt, Artificial Sequence
  Description of Artificial Sequence: Synthetic oligonucleotide
  Sense strand starting at position 432 of SEQ ID NO: 1560589
gauaaauuccugugacgcu

SEQ ID NO: 1610378 - RNA, 19 nt, Artificial Sequence
  Description of Artificial Sequence: Synthetic oligonucleotide
  Antisense strand to SEQ ID NO: 1610377
agcgucacaggaauuuauc

SEQ ID NO: 1610379 - RNA, 19 nt, Artificial Sequence
  Description of Artificial Sequence: Synthetic oligonucleotide
  Sense strand starting at position 433 of SEQ ID NO: 1560589
auaaauuccugugacgcua

SEQ ID NO: 1610380 - RNA, 19 nt, Artificial Sequence
  Description of Artificial Sequence: Synthetic oligonucleotide
  Antisense strand to SEQ ID NO: 1610379
uagcgucacaggaauuuau

SEQ ID NO: 1610381 - RNA, 19 nt, Artificial Sequence
  Description of Artificial Sequence: Synthetic oligonucleotide
  Sense strand starting at position 435 of SEQ ID NO: 1560589
aaauuccugugacgcuaaa

SEQ ID NO: 1610382 - RNA, 19 nt, Artificial Sequence
  Description of Artificial Sequence: Synthetic oligonucleotide
  Antisense strand to SEQ ID NO: 1610381
uuuagcgucacaggaauuu

SEQ ID NO: 1610383 - RNA, 19 nt, Artificial Sequence
  Description of Artificial Sequence: Synthetic oligonucleotide
  Sense strand starting at position 603 of SEQ ID NO: 1560589
ccucguuccaucugaggua

SEQ ID NO: 1610384 - RNA, 19 nt, Artificial Sequence
  Description of Artificial Sequence: Synthetic oligonucleotide
  Antisense strand to SEQ ID NO: 1610383
uaccucagauggaacgagg

SEQ ID NO: 1610385 - RNA, 19 nt, Artificial Sequence
  Description of Artificial Sequence: Synthetic oligonucleotide
  Sense strand starting at position 604 of SEQ ID NO: 1560589
cucguuccaucugagguau

SEQ ID NO: 1610386 - RNA, 19 nt, Artificial Sequence
  Description of Artificial Sequence: Synthetic oligonucleotide
  Antisense strand to SEQ ID NO: 1610385
auaccucagauggaacgag

SEQ ID NO: 1610387 - RNA, 19 nt, Artificial Sequence
  Description of Artificial Sequence: Synthetic oligonucleotide
  Sense strand starting at position 710 of SEQ ID NO: 1560589
agggucucucccuagggau

SEQ ID NO: 1610388 - RNA, 19 nt, Artificial Sequence
  Description of Artificial Sequence: Synthetic oligonucleotide
  Antisense strand to SEQ ID NO: 1610387
aucccuagggagagacccu

SEQ ID NO: 1610389 - RNA, 19 nt, Artificial Sequence
  Description of Artificial Sequence: Synthetic oligonucleotide
  Sense strand starting at position 794 of SEQ ID NO: 1560589
gguucacuggcccaagaga

SEQ ID NO: 1610390 - RNA, 19 nt, Artificial Sequence
  Description of Artificial Sequence: Synthetic oligonucleotide
  Antisense strand to SEQ ID NO: 1610389
ucucuugggccagugaacc

SEQ ID NO: 1610391 - RNA, 19 nt, Artificial Sequence
  Description of Artificial Sequence: Synthetic oligonucleotide
  Sense strand starting at position 929 of SEQ ID NO: 1560589
cugcauuaaguugggaaca

SEQ ID NO: 1610392 - RNA, 19 nt, Artificial Sequence
  Description of Artificial Sequence: Synthetic oligonucleotide
  Antisense strand to SEQ ID NO: 1610391
uguucccaacuuaaugcag

SEQ ID NO: 1610393 - RNA, 19 nt, Artificial Sequence
  Description of Artificial Sequence: Synthetic oligonucleotide
  Sense strand starting at position 1006 of SEQ ID NO: 1560589
gcgagcucucagguuguua

SEQ ID NO: 1610394 - RNA, 19 nt, Artificial Sequence
  Description of Artificial Sequence: Synthetic oligonucleotide
  Antisense strand to SEQ ID NO: 1610393
uaacaaccugagagcucgc

SEQ ID NO: 1610395 - RNA, 19 nt, Artificial Sequence
  Description of Artificial Sequence: Synthetic oligonucleotide
  Sense strand starting at position 1008 of SEQ ID NO: 1560589
gagcucucagguuguuauu

SEQ ID NO: 1610396 - RNA, 19 nt, Artificial Sequence
  Description of Artificial Sequence: Synthetic oligonucleotide
  Antisense strand to SEQ ID NO: 1610395
aauaacaaccugagagcuc

SEQ ID NO: 1610397 - RNA, 19 nt, Artificial Sequence
  Description of Artificial Sequence: Synthetic oligonucleotide
  Sense strand starting at position 1010 of SEQ ID NO: 1560589
gcucucagguuguuauuaa

SEQ ID NO: 1610398 - RNA, 19 nt, Artificial Sequence
  Description of Artificial Sequence: Synthetic oligonucleotide
  Antisense strand to SEQ ID NO: 1610397
uuaauaacaaccugagagc

SEQ ID NO: 1610399 - RNA, 19 nt, Artificial Sequence
  Description of Artificial Sequence: Synthetic oligonucleotide
  Sense strand starting at position 1011 of SEQ ID NO: 1560589
cucucagguuguuauuaac

SEQ ID NO: 1610400 - RNA, 19 nt, Artificial Sequence
  Description of Artificial Sequence: Synthetic oligonucleotide
  Antisense strand to SEQ ID NO: 1610399
guuaauaacaaccugagag

SEQ ID NO: 1610401 - RNA, 19 nt, Artificial Sequence
  Description of Artificial Sequence: Synthetic oligonucleotide
  Sense strand starting at position 1017 of SEQ ID NO: 1560589
gguuguuauuaaccgucca

SEQ ID NO: 1610402 - RNA, 19 nt, Artificial Sequence
  Description of Artificial Sequence: Synthetic oligonucleotide
  Antisense strand to SEQ ID NO: 1610401
uggacgguuaauaacaacc

SEQ ID NO: 1610403 - RNA, 19 nt, Artificial Sequence
  Description of Artificial Sequence: Synthetic oligonucleotide
  Sense strand starting at position 1054 of SEQ ID NO: 1560589
cuuccugccuguucugaaa

SEQ ID NO: 1610404 - RNA, 19 nt, Artificial Sequence
  Description of Artificial Sequence: Synthetic oligonucleotide
  Antisense strand to SEQ ID NO: 1610403
uuucagaacaggcaggaag

SEQ ID NO: 1610405 - RNA, 19 nt, Artificial Sequence
  Description of Artificial Sequence: Synthetic oligonucleotide
  Sense strand starting at position 1081 of SEQ ID NO: 1560589
gagaaauccugagcugagc

SEQ ID NO: 1610406 - RNA, 19 nt, Artificial Sequence
  Description of Artificial Sequence: Synthetic oligonucleotide
  Antisense strand to SEQ ID NO: 1610405
gcucagcucaggauuucuc

SEQ ID NO: 1610407 - RNA, 19 nt, Artificial Sequence
  Description of Artificial Sequence: Synthetic oligonucleotide
  Sense strand starting at position 1998 of SEQ ID NO: 1560589
ccaucuuggcaccgugaga

SEQ ID NO: 1610408 - RNA, 19 nt, Artificial Sequence
  Description of Artificial Sequence: Synthetic oligonucleotide
  Antisense strand to SEQ ID NO: 1610407
ucucacggugccaagaugg

SEQ ID NO: 1610409 - RNA, 19 nt, Artificial Sequence
  Description of Artificial Sequence: Synthetic oligonucleotide
  Sense strand starting at position 2401 of SEQ ID NO: 1560589
cucccauuguucuuggcua

SEQ ID NO: 1610410 - RNA, 19 nt, Artificial Sequence
  Description of Artificial Sequence: Synthetic oligonucleotide
  Antisense strand to SEQ ID NO: 1610409
uagccaagaacaaugggag

SEQ ID NO: 1610411 - RNA, 19 nt, Artificial Sequence
  Description of Artificial Sequence: Synthetic oligonucleotide
  Sense strand starting at position 2631 of SEQ ID NO: 1560589
guccgugugcucccggaga

SEQ ID NO: 1610412 - RNA, 19 nt, Artificial Sequence
  Description of Artificial Sequence: Synthetic oligonucleotide
  Antisense strand to SEQ ID NO: 1610411
ucuccgggagcacacggac

SEQ ID NO: 1610413 - RNA, 19 nt, Artificial Sequence
  Description of Artificial Sequence: Synthetic oligonucleotide
  Sense strand starting at position 2958 of SEQ ID NO: 1560589
agacuaaacucggcuuucu

SEQ ID NO: 1610414 - RNA, 19 nt, Artificial Sequence
  Description of Artificial Sequence: Synthetic oligonucleotide
  Antisense strand to SEQ ID NO: 1610413
agaaagccgaguuuagucu

SEQ ID NO: 1610415 - RNA, 19 nt, Artificial Sequence
  Description of Artificial Sequence: Synthetic oligonucleotide
  Sense strand starting at position 2967 of SEQ ID NO: 1560589
ucggcuuucuaguccugaa

SEQ ID NO: 1610416 - RNA, 19 nt, Artificial Sequence
  Description of Artificial Sequence: Synthetic oligonucleotide
  Antisense strand to SEQ ID NO: 1610415
uucaggacuagaaagccga

SEQ ID NO: 1610417 - RNA, 19 nt, Artificial Sequence
  Description of Artificial Sequence: Synthetic oligonucleotide
  Sense strand starting at position 3587 of SEQ ID NO: 1560589
ggcgaaagcuggccaaguu

SEQ ID NO: 1610418 - RNA, 19 nt, Artificial Sequence
  Description of Artificial Sequence: Synthetic oligonucleotide
  Antisense strand to SEQ ID NO: 1610417
aacuuggccagcuuucgcc

SEQ ID NO: 1610419 - RNA, 19 nt, Artificial Sequence
  Description of Artificial Sequence: Synthetic oligonucleotide
  Sense strand starting at position 3588 of SEQ ID NO: 1560589
gcgaaagcuggccaaguua

SEQ ID NO: 1610420 - RNA, 19 nt, Artificial Sequence
  Description of Artificial Sequence: Synthetic oligonucleotide
  Antisense strand to SEQ ID NO: 1610419
uaacuuggccagcuuucgc

SEQ ID NO: 1610421 - RNA, 19 nt, Artificial Sequence
  Description of Artificial Sequence: Synthetic oligonucleotide
  Sense strand starting at position 268 of SEQ ID NO: 1560590
uguagaaucugauugucua

SEQ ID NO: 1610422 - RNA, 19 nt, Artificial Sequence
  Description of Artificial Sequence: Synthetic oligonucleotide
  Antisense strand to SEQ ID NO: 1610421
uagacaaucagauucuaca

SEQ ID NO: 1610423 - RNA, 19 nt, Artificial Sequence
  Description of Artificial Sequence: Synthetic oligonucleotide
  Sense strand starting at position 269 of SEQ ID NO: 1560590
guagaaucugauugucuau

SEQ ID NO: 1610424 - RNA, 19 nt, Artificial Sequence
  Description of Artificial Sequence: Synthetic oligonucleotide
  Antisense strand to SEQ ID NO: 1610423
auagacaaucagauucuac

SEQ ID NO: 1610425 - RNA, 19 nt, Artificial Sequence
  Description of Artificial Sequence: Synthetic oligonucleotide
  Sense strand starting at position 272 of SEQ ID NO: 1560590
gaaucugauugucuaugga

SEQ ID NO: 1610426 - RNA, 19 nt, Artificial Sequence
  Description of Artificial Sequence: Synthetic oligonucleotide
  Antisense strand to SEQ ID NO: 1610425
uccauagacaaucagauuc

SEQ ID NO: 1610427 - RNA, 19 nt, Artificial Sequence
  Description of Artificial Sequence: Synthetic oligonucleotide
  Sense strand starting at position 275 of SEQ ID NO: 1560590
ucugauugucuauggacaa

SEQ ID NO: 1610428 - RNA, 19 nt, Artificial Sequence
  Description of Artificial Sequence: Synthetic oligonucleotide
  Antisense strand to SEQ ID NO: 1610427
uuguccauagacaaucaga

SEQ ID NO: 1610429 - RNA, 19 nt, Artificial Sequence
  Description of Artificial Sequence: Synthetic oligonucleotide
  Sense strand starting at position 297 of SEQ ID NO: 1560590
cguggucuccaguuagcua

SEQ ID NO: 1610430 - RNA, 19 nt, Artificial Sequence
  Description of Artificial Sequence: Synthetic oligonucleotide
  Antisense strand to SEQ ID NO: 1610429
uagcuaacuggagaccacg

SEQ ID NO: 1610431 - RNA, 19 nt, Artificial Sequence
  Description of Artificial Sequence: Synthetic oligonucleotide
  Sense strand starting at position 349 of SEQ ID NO: 1560590
gcacaugugcucccuguua

SEQ ID NO: 1610432 - RNA, 19 nt, Artificial Sequence
  Description of Artificial Sequence: Synthetic oligonucleotide
  Antisense strand to SEQ ID NO: 1610431
uaacagggagcacaugugc

SEQ ID NO: 1610433 - RNA, 19 nt, Artificial Sequence
  Description of Artificial Sequence: Synthetic oligonucleotide
  Sense strand starting at position 370 of SEQ ID NO: 1560590
uuacauuugugcuuuccau

SEQ ID NO: 1610434 - RNA, 19 nt, Artificial Sequence
  Description of Artificial Sequence: Synthetic oligonucleotide
  Antisense strand to SEQ ID NO: 1610433
auggaaagcacaaauguaa

SEQ ID NO: 1610435 - RNA, 19 nt, Artificial Sequence
  Description of Artificial Sequence: Synthetic oligonucleotide
  Sense strand starting at position 563 of SEQ ID NO: 1560590
uccugaguaggcugggauu

SEQ ID NO: 1610436 - RNA, 19 nt, Artificial Sequence
  Description of Artificial Sequence: Synthetic oligonucleotide
  Antisense strand to SEQ ID NO: 1610435
aaucccagccuacucagga

SEQ ID NO: 1610437 - RNA, 19 nt, Artificial Sequence
  Description of Artificial Sequence: Synthetic oligonucleotide
  Sense strand starting at position 1031 of SEQ ID NO: 1560590
gggcaauagagucaagguu

SEQ ID NO: 1610438 - RNA, 19 nt, Artificial Sequence
  Description of Artificial Sequence: Synthetic oligonucleotide
  Antisense strand to SEQ ID NO: 1610437
aaccuugacucuauugccc

SEQ ID NO: 1610439 - RNA, 19 nt, Artificial Sequence
  Description of Artificial Sequence: Synthetic oligonucleotide
  Sense strand starting at position 1065 of SEQ ID NO: 1560590
cucguagucgcaguaaaug

SEQ ID NO: 1610440 - RNA, 19 nt, Artificial Sequence
  Description of Artificial Sequence: Synthetic oligonucleotide
  Antisense strand to SEQ ID NO: 1610439
cauuuacugcgacuacgag

SEQ ID NO: 1610441 - RNA, 19 nt, Artificial Sequence
  Description of Artificial Sequence: Synthetic oligonucleotide
  Sense strand starting at position 1073 of SEQ ID NO: 1560590
cgcaguaaauguucaggaa

SEQ ID NO: 1610442 - RNA, 19 nt, Artificial Sequence
  Description of Artificial Sequence: Synthetic oligonucleotide
  Antisense strand to SEQ ID NO: 1610441
uuccugaacauuuacugcg

SEQ ID NO: 1610443 - RNA, 19 nt, Artificial Sequence
  Description of Artificial Sequence: Synthetic oligonucleotide
  Sense strand starting at position 1074 of SEQ ID NO: 1560590
gcaguaaauguucaggaag

SEQ ID NO: 1610444 - RNA, 19 nt, Artificial Sequence
  Description of Artificial Sequence: Synthetic oligonucleotide
  Antisense strand to SEQ ID NO: 1610443
cuuccugaacauuuacugc

SEQ ID NO: 1610445 - RNA, 19 nt, Artificial Sequence
  Description of Artificial Sequence: Synthetic oligonucleotide
  Sense strand starting at position 1277 of SEQ ID NO: 1560590
gggugacuuguugaaagug

SEQ ID NO: 1610446 - RNA, 19 nt, Artificial Sequence
  Description of Artificial Sequence: Synthetic oligonucleotide
  Antisense strand to SEQ ID NO: 1610445
cacuuucaacaagucaccc

SEQ ID NO: 1610447 - RNA, 19 nt, Artificial Sequence
  Description of Artificial Sequence: Synthetic oligonucleotide
  Sense strand starting at position 1289 of SEQ ID NO: 1560590
gaaagugucgauggagaca

SEQ ID NO: 1610448 - RNA, 19 nt, Artificial Sequence
  Description of Artificial Sequence: Synthetic oligonucleotide
  Antisense strand to SEQ ID NO: 1610447
ugucuccaucgacacuuuc

SEQ ID NO: 1610449 - RNA, 19 nt, Artificial Sequence
  Description of Artificial Sequence: Synthetic oligonucleotide
  Sense strand starting at position 1353 of SEQ ID NO: 1560590
gcagacucaugcuuccaau

SEQ ID NO: 1610450 - RNA, 19 nt, Artificial Sequence
  Description of Artificial Sequence: Synthetic oligonucleotide
  Antisense strand to SEQ ID NO: 1610449
auuggaagcaugagucugc

SEQ ID NO: 1610451 - RNA, 19 nt, Artificial Sequence
  Description of Artificial Sequence: Synthetic oligonucleotide
  Sense strand starting at position 1444 of SEQ ID NO: 1560590
gaucucuguucccugggua

SEQ ID NO: 1610452 - RNA, 19 nt, Artificial Sequence
  Description of Artificial Sequence: Synthetic oligonucleotide
  Antisense strand to SEQ ID NO: 1610451
uacccagggaacagagauc

SEQ ID NO: 1610453 - RNA, 19 nt, Artificial Sequence
  Description of Artificial Sequence: Synthetic oligonucleotide
  Sense strand starting at position 1466 of SEQ ID NO: 1560590
gggauccugaccuguaagu

SEQ ID NO: 1610454 - RNA, 19 nt, Artificial Sequence
  Description of Artificial Sequence: Synthetic oligonucleotide
  Antisense strand to SEQ ID NO: 1610453
acuuacaggucaggauccc

SEQ ID NO: 1610455 - RNA, 19 nt, Artificial Sequence
  Description of Artificial Sequence: Synthetic oligonucleotide
  Sense strand starting at position 1468 of SEQ ID NO: 1560590
gauccugaccuguaagucu

SEQ ID NO: 1610456 - RNA, 19 nt, Artificial Sequence
  Description of Artificial Sequence: Synthetic oligonucleotide
  Antisense strand to SEQ ID NO: 1610455
agacuuacaggucaggauc

SEQ ID NO: 1610457 - RNA, 19 nt, Artificial Sequence
  Description of Artificial Sequence: Synthetic oligonucleotide
  Sense strand starting at position 1670 of SEQ ID NO: 1560590
ccgggaauguaguugaacu

SEQ ID NO: 1610458 - RNA, 19 nt, Artificial Sequence
  Description of Artificial Sequence: Synthetic oligonucleotide
  Antisense strand to SEQ ID NO: 1610457
aguucaacuacauucccgg

SEQ ID NO: 1610459 - RNA, 19 nt, Artificial Sequence
  Description of Artificial Sequence: Synthetic oligonucleotide
  Sense strand starting at position 2253 of SEQ ID NO: 1560590
gaacuacuguaagugcauu

SEQ ID NO: 1610460 - RNA, 19 nt, Artificial Sequence
  Description of Artificial Sequence: Synthetic oligonucleotide
  Antisense strand to SEQ ID NO: 1610459
aaugcacuuacaguaguuc

SEQ ID NO: 1610461 - RNA, 19 nt, Artificial Sequence
  Description of Artificial Sequence: Synthetic oligonucleotide
  Sense strand starting at position 2307 of SEQ ID NO: 1560590
ggagguagguacuuaaauc

SEQ ID NO: 1610462 - RNA, 19 nt, Artificial Sequence
  Description of Artificial Sequence: Synthetic oligonucleotide
  Antisense strand to SEQ ID NO: 1610461
gauuuaaguaccuaccucc

SEQ ID NO: 1610463 - RNA, 19 nt, Artificial Sequence
  Description of Artificial Sequence: Synthetic oligonucleotide
  Sense strand starting at position 2862 of SEQ ID NO: 1560590
uggcucugauaaucugauu

SEQ ID NO: 1610464 - RNA, 19 nt, Artificial Sequence
  Description of Artificial Sequence: Synthetic oligonucleotide
  Antisense strand to SEQ ID NO: 1610463
aaucagauuaucagagcca

SEQ ID NO: 1610465 - RNA, 19 nt, Artificial Sequence
  Description of Artificial Sequence: Synthetic oligonucleotide
  Sense strand starting at position 3021 of SEQ ID NO: 1560590
agagguuuauuaucccagu

SEQ ID NO: 1610466 - RNA, 19 nt, Artificial Sequence
  Description of Artificial Sequence: Synthetic oligonucleotide
  Antisense strand to SEQ ID NO: 1610465
acugggauaauaaaccucu

SEQ ID NO: 1610467 - RNA, 19 nt, Artificial Sequence
  Description of Artificial Sequence: Synthetic oligonucleotide
  Sense strand starting at position 3022 of SEQ ID NO: 1560590
gagguuuauuaucccaguu

SEQ ID NO: 1610468 - RNA, 19 nt, Artificial Sequence
  Description of Artificial Sequence: Synthetic oligonucleotide
  Antisense strand to SEQ ID NO: 1610467
aacugggauaauaaaccuc

SEQ ID NO: 1610469 - RNA, 19 nt, Artificial Sequence
  Description of Artificial Sequence: Synthetic oligonucleotide
  Sense strand starting at position 3069 of SEQ ID NO: 1560590
gaguaaguccacugacuga

SEQ ID NO: 1610470 - RNA, 19 nt, Artificial Sequence
  Description of Artificial Sequence: Synthetic oligonucleotide
  Antisense strand to SEQ ID NO: 1610469
ucagucaguggacuuacuc

SEQ ID NO: 1610471 - RNA, 19 nt, Artificial Sequence
  Description of Artificial Sequence: Synthetic oligonucleotide
  Sense strand starting at position 3111 of SEQ ID NO: 1560590
ggauguaaaccagguguuu

SEQ ID NO: 1610472 - RNA, 19 nt, Artificial Sequence
  Description of Artificial Sequence: Synthetic oligonucleotide
  Antisense strand to SEQ ID NO: 1610471
aaacaccugguuuacaucc

SEQ ID NO: 1610473 - RNA, 19 nt, Artificial Sequence
  Description of Artificial Sequence: Synthetic oligonucleotide
  Sense strand starting at position 3164 of SEQ ID NO: 1560590
cugcuuugucccuagaagg

SEQ ID NO: 1610474 - RNA, 19 nt, Artificial Sequence
  Description of Artificial Sequence: Synthetic oligonucleotide
  Antisense strand to SEQ ID NO: 1610473
ccuucuagggacaaagcag

SEQ ID NO: 1610475 - RNA, 19 nt, Artificial Sequence
  Description of Artificial Sequence: Synthetic oligonucleotide
  Sense strand starting at position 3205 of SEQ ID NO: 1560590
ugcacaucuguguaucauu

SEQ ID NO: 1610476 - RNA, 19 nt, Artificial Sequence
  Description of Artificial Sequence: Synthetic oligonucleotide
  Antisense strand to SEQ ID NO: 1610475
aaugauacacagaugugca

SEQ ID NO: 1610477 - RNA, 19 nt, Artificial Sequence
  Description of Artificial Sequence: Synthetic oligonucleotide
  Sense strand starting at position 3214 of SEQ ID NO: 1560590
guguaucauuuccagaaga

SEQ ID NO: 1610478 - RNA, 19 nt, Artificial Sequence
  Description of Artificial Sequence: Synthetic oligonucleotide
  Antisense strand to SEQ ID NO: 1610477
ucuucuggaaaugauacac

SEQ ID NO: 1610479 - RNA, 19 nt, Artificial Sequence
  Description of Artificial Sequence: Synthetic oligonucleotide
  Sense strand starting at position 3300 of SEQ ID NO: 1560590
gcugaucucccuugaucac

SEQ ID NO: 1610480 - RNA, 19 nt, Artificial Sequence
  Description of Artificial Sequence: Synthetic oligonucleotide
  Antisense strand to SEQ ID NO: 1610479
gugaucaagggagaucagc

SEQ ID NO: 1610481 - RNA, 19 nt, Artificial Sequence
  Description of Artificial Sequence: Synthetic oligonucleotide
  Sense strand starting at position 3396 of SEQ ID NO: 1560590
cuaugugcugagcauguaa

SEQ ID NO: 1610482 - RNA, 19 nt, Artificial Sequence
  Description of Artificial Sequence: Synthetic oligonucleotide
  Antisense strand to SEQ ID NO: 1610481
uuacaugcucagcacauag

SEQ ID NO: 1610483 - RNA, 19 nt, Artificial Sequence
  Description of Artificial Sequence: Synthetic oligonucleotide
  Sense strand starting at position 3422 of SEQ ID NO: 1560590
cucuuacaugauggaaagu

SEQ ID NO: 1610484 - RNA, 19 nt, Artificial Sequence
  Description of Artificial Sequence: Synthetic oligonucleotide
  Antisense strand to SEQ ID NO: 1610483
acuuuccaucauguaagag

SEQ ID NO: 1610485 - RNA, 19 nt, Artificial Sequence
  Description of Artificial Sequence: Synthetic oligonucleotide
  Sense strand starting at position 3471 of SEQ ID NO: 1560590
caaggaauuugugaugauu

SEQ ID NO: 1610486 - RNA, 19 nt, Artificial Sequence
  Description of Artificial Sequence: Synthetic oligonucleotide
  Antisense strand to SEQ ID NO: 1610485
aaucaucacaaauuccuug

SEQ ID NO: 1610487 - RNA, 19 nt, Artificial Sequence
  Description of Artificial Sequence: Synthetic oligonucleotide
  Sense strand starting at position 3479 of SEQ ID NO: 1560590
uugugaugauuccagauuu

SEQ ID NO: 1610488 - RNA, 19 nt, Artificial Sequence
  Description of Artificial Sequence: Synthetic oligonucleotide
  Antisense strand to SEQ ID NO: 1610487
aaaucuggaaucaucacaa

SEQ ID NO: 1610489 - RNA, 19 nt, Artificial Sequence
  Description of Artificial Sequence: Synthetic oligonucleotide
  Sense strand starting at position 3542 of SEQ ID NO: 1560590
ccgucagugcugcuguauu

SEQ ID NO: 1610490 - RNA, 19 nt, Artificial Sequence
  Description of Artificial Sequence: Synthetic oligonucleotide
  Antisense strand to SEQ ID NO: 1610489
aauacagcagcacugacgg

SEQ ID NO: 1610491 - RNA, 19 nt, Artificial Sequence
  Description of Artificial Sequence: Synthetic oligonucleotide
  Sense strand starting at position 3590 of SEQ ID NO: 1560590
gugaauauucgcugaggga

SEQ ID NO: 1610492 - RNA, 19 nt, Artificial Sequence
  Description of Artificial Sequence: Synthetic oligonucleotide
  Antisense strand to SEQ ID NO: 1610491
ucccucagcgaauauucac

SEQ ID NO: 1610493 - RNA, 19 nt, Artificial Sequence
  Description of Artificial Sequence: Synthetic oligonucleotide
  Sense strand starting at position 3591 of SEQ ID NO: 1560590
ugaauauucgcugagggag

SEQ ID NO: 1610494 - RNA, 19 nt, Artificial Sequence
  Description of Artificial Sequence: Synthetic oligonucleotide
  Antisense strand to SEQ ID NO: 1610493
cucccucagcgaauauuca

SEQ ID NO: 1610495 - RNA, 19 nt, Artificial Sequence
  Description of Artificial Sequence: Synthetic oligonucleotide
  Sense strand starting at position 3654 of SEQ ID NO: 1560590
gcgucuucccgcccuagua

SEQ ID NO: 1610496 - RNA, 19 nt, Artificial Sequence
  Description of Artificial Sequence: Synthetic oligonucleotide
  Antisense strand to SEQ ID NO: 1610495
uacuagggcgggaagacgc

SEQ ID NO: 1610497 - RNA, 19 nt, Artificial Sequence
  Description of Artificial Sequence: Synthetic oligonucleotide
  Sense strand starting at position 3655 of SEQ ID NO: 1560590
cgucuucccgcccuaguaa

SEQ ID NO: 1610498 - RNA, 19 nt, Artificial Sequence
  Description of Artificial Sequence: Synthetic oligonucleotide
  Antisense strand to SEQ ID NO: 1610497
uuacuagggcgggaagacg

SEQ ID NO: 1610499 - RNA, 19 nt, Artificial Sequence
  Description of Artificial Sequence: Synthetic oligonucleotide
  Sense strand starting at position 3684 of SEQ ID NO: 1560590
acauguugagcggaugaau

SEQ ID NO: 1610500 - RNA, 19 nt, Artificial Sequence
  Description of Artificial Sequence: Synthetic oligonucleotide
  Antisense strand to SEQ ID NO: 1610499
auucauccgcucaacaugu

SEQ ID NO: 1610501 - RNA, 19 nt, Artificial Sequence
  Description of Artificial Sequence: Synthetic oligonucleotide
  Sense strand starting at position 459 of SEQ ID NO: 1560591
ucuugcuauguuggccaaa

SEQ ID NO: 1610502 - RNA, 19 nt, Artificial Sequence
  Description of Artificial Sequence: Synthetic oligonucleotide
  Antisense strand to SEQ ID NO: 1610501
uuuggccaacauagcaaga

SEQ ID NO: 1610503 - RNA, 19 nt, Artificial Sequence
  Description of Artificial Sequence: Synthetic oligonucleotide
  Sense strand starting at position 461 of SEQ ID NO: 1560591
uugcuauguuggccaaacu

SEQ ID NO: 1610504 - RNA, 19 nt, Artificial Sequence
  Description of Artificial Sequence: Synthetic oligonucleotide
  Antisense strand to SEQ ID NO: 1610503
aguuuggccaacauagcaa

SEQ ID NO: 1610505 - RNA, 19 nt, Artificial Sequence
  Description of Artificial Sequence: Synthetic oligonucleotide
  Sense strand starting at position 535 of SEQ ID NO: 1560591
ggauuagaugcuugaacca

SEQ ID NO: 1610506 - RNA, 19 nt, Artificial Sequence
  Description of Artificial Sequence: Synthetic oligonucleotide
  Antisense strand to SEQ ID NO: 1610505
ugguucaagcaucuaaucc

SEQ ID NO: 1610507 - RNA, 19 nt, Artificial Sequence
  Description of Artificial Sequence: Synthetic oligonucleotide
  Sense strand starting at position 658 of SEQ ID NO: 1560591
cugcuaaggacuugugacu

SEQ ID NO: 1610508 - RNA, 19 nt, Artificial Sequence
  Description of Artificial Sequence: Synthetic oligonucleotide
  Antisense strand to SEQ ID NO: 1610507
agucacaaguccuuagcag

SEQ ID NO: 1610509 - RNA, 19 nt, Artificial Sequence
  Description of Artificial Sequence: Synthetic oligonucleotide
  Sense strand starting at position 663 of SEQ ID NO: 1560591
aaggacuugugacuuguga

SEQ ID NO: 1610510 - RNA, 19 nt, Artificial Sequence
  Description of Artificial Sequence: Synthetic oligonucleotide
  Antisense strand to SEQ ID NO: 1610509
ucacaagucacaaguccuu

SEQ ID NO: 1610511 - RNA, 19 nt, Artificial Sequence
  Description of Artificial Sequence: Synthetic oligonucleotide
  Sense strand starting at position 665 of SEQ ID NO: 1560591
ggacuugugacuugugaag

SEQ ID NO: 1610512 - RNA, 19 nt, Artificial Sequence
  Description of Artificial Sequence: Synthetic oligonucleotide
  Antisense strand to SEQ ID NO: 1610511
cuucacaagucacaagucc

SEQ ID NO: 1610513 - RNA, 19 nt, Artificial Sequence
  Description of Artificial Sequence: Synthetic oligonucleotide
  Sense strand starting at position 704 of SEQ ID NO: 1560591
acagaugaacuguguaaac

SEQ ID NO: 1610514 - RNA, 19 nt, Artificial Sequence
  Description of Artificial Sequence: Synthetic oligonucleotide
  Antisense strand to SEQ ID NO: 1610513
guuuacacaguucaucugu

SEQ ID NO: 1610515 - RNA, 19 nt, Artificial Sequence
  Description of Artificial Sequence: Synthetic oligonucleotide
  Sense strand starting at position 713 of SEQ ID NO: 1560591
cuguguaaacuggguaaau

SEQ ID NO: 1610516 - RNA, 19 nt, Artificial Sequence
  Description of Artificial Sequence: Synthetic oligonucleotide
  Antisense strand to SEQ ID NO: 1610515
auuuacccaguuuacacag

SEQ ID NO: 1610517 - RNA, 19 nt, Artificial Sequence
  Description of Artificial Sequence: Synthetic oligonucleotide
  Sense strand starting at position 714 of SEQ ID NO: 1560591
uguguaaacuggguaaauc

SEQ ID NO: 1610518 - RNA, 19 nt, Artificial Sequence
  Description of Artificial Sequence: Synthetic oligonucleotide
  Antisense strand to SEQ ID NO: 1610517
gauuuacccaguuuacaca

SEQ ID NO: 1610519 - RNA, 19 nt, Artificial Sequence
  Description of Artificial Sequence: Synthetic oligonucleotide
  Sense strand starting at position 722 of SEQ ID NO: 1560591
cuggguaaaucccaaucua

SEQ ID NO: 1610520 - RNA, 19 nt, Artificial Sequence
  Description of Artificial Sequence: Synthetic oligonucleotide
  Antisense strand to SEQ ID NO: 1610519
uagauugggauuuacccag

SEQ ID NO: 1610521 - RNA, 19 nt, Artificial Sequence
  Description of Artificial Sequence: Synthetic oligonucleotide
  Sense strand starting at position 760 of SEQ ID NO: 1560591
gggagaugcuaccguuaga

SEQ ID NO: 1610522 - RNA, 19 nt, Artificial Sequence
  Description of Artificial Sequence: Synthetic oligonucleotide
  Antisense strand to SEQ ID NO: 1610521
ucuaacgguagcaucuccc

SEQ ID NO: 1610523 - RNA, 19 nt, Artificial Sequence
  Description of Artificial Sequence: Synthetic oligonucleotide
  Sense strand starting at position 763 of SEQ ID NO: 1560591
agaugcuaccguuagauau

SEQ ID NO: 1610524 - RNA, 19 nt, Artificial Sequence
  Description of Artificial Sequence: Synthetic oligonucleotide
  Antisense strand to SEQ ID NO: 1610523
auaucuaacgguagcaucu

SEQ ID NO: 1610525 - RNA, 19 nt, Artificial Sequence
  Description of Artificial Sequence: Synthetic oligonucleotide
  Sense strand starting at position 853 of SEQ ID NO: 1560591
cggauucugcuccagagga

SEQ ID NO: 1610526 - RNA, 19 nt, Artificial Sequence
  Description of Artificial Sequence: Synthetic oligonucleotide
  Antisense strand to SEQ ID NO: 1610525
uccucuggagcagaauccg

SEQ ID NO: 1610527 - RNA, 19 nt, Artificial Sequence
  Description of Artificial Sequence: Synthetic oligonucleotide
  Sense strand starting at position 919 of SEQ ID NO: 1560591
gguggcaucuuucugauaa

SEQ ID NO: 1610528 - RNA, 19 nt, Artificial Sequence
  Description of Artificial Sequence: Synthetic oligonucleotide
  Antisense strand to SEQ ID NO: 1610527
uuaucagaaagaugccacc

SEQ ID NO: 1610529 - RNA, 19 nt, Artificial Sequence
  Description of Artificial Sequence: Synthetic oligonucleotide
  Sense strand starting at position 920 of SEQ ID NO: 1560591
guggcaucuuucugauaaa

SEQ ID NO: 1610530 - RNA, 19 nt, Artificial Sequence
  Description of Artificial Sequence: Synthetic oligonucleotide
  Antisense strand to SEQ ID NO: 1610529
uuuaucagaaagaugccac

SEQ ID NO: 1610531 - RNA, 19 nt, Artificial Sequence
  Description of Artificial Sequence: Synthetic oligonucleotide
  Sense strand starting at position 923 of SEQ ID NO: 1560591
gcaucuuucugauaaaugc

SEQ ID NO: 1610532 - RNA, 19 nt, Artificial Sequence
  Description of Artificial Sequence: Synthetic oligonucleotide
  Antisense strand to SEQ ID NO: 1610531
gcauuuaucagaaagaugc

SEQ ID NO: 1610533 - RNA, 19 nt, Artificial Sequence
  Description of Artificial Sequence: Synthetic oligonucleotide
  Sense strand starting at position 998 of SEQ ID NO: 1560591
ggaucaaauuccuagggca

SEQ ID NO: 1610534 - RNA, 19 nt, Artificial Sequence
  Description of Artificial Sequence: Synthetic oligonucleotide
  Antisense strand to SEQ ID NO: 1610533
ugcccuaggaauuugaucc

SEQ ID NO: 1610535 - RNA, 19 nt, Artificial Sequence
  Description of Artificial Sequence: Synthetic oligonucleotide
  Sense strand starting at position 1076 of SEQ ID NO: 1560591
ugagcucagcguagggauu

SEQ ID NO: 1610536 - RNA, 19 nt, Artificial Sequence
  Description of Artificial Sequence: Synthetic oligonucleotide
  Antisense strand to SEQ ID NO: 1610535
aaucccuacgcugagcuca

SEQ ID NO: 1610537 - RNA, 19 nt, Artificial Sequence
  Description of Artificial Sequence: Synthetic oligonucleotide
  Sense strand starting at position 1077 of SEQ ID NO: 1560591
gagcucagcguagggauua

SEQ ID NO: 1610538 - RNA, 19 nt, Artificial Sequence
  Description of Artificial Sequence: Synthetic oligonucleotide
  Antisense strand to SEQ ID NO: 1610537
uaaucccuacgcugagcuc

SEQ ID NO: 1610539 - RNA, 19 nt, Artificial Sequence
  Description of Artificial Sequence: Synthetic oligonucleotide
  Sense strand starting at position 1125 of SEQ ID NO: 1560591
ggucaaacagguggucaaa

SEQ ID NO: 1610540 - RNA, 19 nt, Artificial Sequence
  Description of Artificial Sequence: Synthetic oligonucleotide
  Antisense strand to SEQ ID NO: 1610539
uuugaccaccuguuugacc

SEQ ID NO: 1610541 - RNA, 19 nt, Artificial Sequence
  Description of Artificial Sequence: Synthetic oligonucleotide
  Sense strand starting at position 1398 of SEQ ID NO: 1560591
uggcuagacucuugaggau

SEQ ID NO: 1610542 - RNA, 19 nt, Artificial Sequence
  Description of Artificial Sequence: Synthetic oligonucleotide
  Antisense strand to SEQ ID NO: 1610541
auccucaagagucuagcca

SEQ ID NO: 1610543 - RNA, 19 nt, Artificial Sequence
  Description of Artificial Sequence: Synthetic oligonucleotide
  Sense strand starting at position 1401 of SEQ ID NO: 1560591
cuagacucuugaggaugaa

SEQ ID NO: 1610544 - RNA, 19 nt, Artificial Sequence
  Description of Artificial Sequence: Synthetic oligonucleotide
  Antisense strand to SEQ ID NO: 1610543
uucauccucaagagucuag

SEQ ID NO: 1610545 - RNA, 19 nt, Artificial Sequence
  Description of Artificial Sequence: Synthetic oligonucleotide
  Sense strand starting at position 2376 of SEQ ID NO: 1560591
caacauccgggauguguaa

SEQ ID NO: 1610546 - RNA, 19 nt, Artificial Sequence
  Description of Artificial Sequence: Synthetic oligonucleotide
  Antisense strand to SEQ ID NO: 1610545
uuacacaucccggauguug

SEQ ID NO: 1610547 - RNA, 19 nt, Artificial Sequence
  Description of Artificial Sequence: Synthetic oligonucleotide
  Sense strand starting at position 2449 of SEQ ID NO: 1560591
gucuuaauuuaauggguaa

SEQ ID NO: 1610548 - RNA, 19 nt, Artificial Sequence
  Description of Artificial Sequence: Synthetic oligonucleotide
  Antisense strand to SEQ ID NO: 1610547
uuacccauuaaauuaagac

SEQ ID NO: 1610549 - RNA, 19 nt, Artificial Sequence
  Description of Artificial Sequence: Synthetic oligonucleotide
  Sense strand starting at position 3314 of SEQ ID NO: 1560591
ggagguguccuggacauug

SEQ ID NO: 1610550 - RNA, 19 nt, Artificial Sequence
  Description of Artificial Sequence: Synthetic oligonucleotide
  Antisense strand to SEQ ID NO: 1610549
caauguccaggacaccucc

SEQ ID NO: 1610551 - RNA, 19 nt, Artificial Sequence
  Description of Artificial Sequence: Synthetic oligonucleotide
  Sense strand starting at position 3477 of SEQ ID NO: 1560591
agaggcaucucccagaaac

SEQ ID NO: 1610552 - RNA, 19 nt, Artificial Sequence
  Description of Artificial Sequence: Synthetic oligonucleotide
  Antisense strand to SEQ ID NO: 1610551
guuucugggagaugccucu

SEQ ID NO: 1610553 - RNA, 19 nt, Artificial Sequence
  Description of Artificial Sequence: Synthetic oligonucleotide
  Sense strand starting at position 3549 of SEQ ID NO: 1560591
caggaaaguucuucuggga

SEQ ID NO: 1610554 - RNA, 19 nt, Artificial Sequence
  Description of Artificial Sequence: Synthetic oligonucleotide
  Antisense strand to SEQ ID NO: 1610553
ucccagaagaacuuuccug

SEQ ID NO: 1610555 - RNA, 19 nt, Artificial Sequence
  Description of Artificial Sequence: Synthetic oligonucleotide
  Sense strand starting at position 3552 of SEQ ID NO: 1560591
gaaaguucuucugggaaua

SEQ ID NO: 1610556 - RNA, 19 nt, Artificial Sequence
  Description of Artificial Sequence: Synthetic oligonucleotide
  Antisense strand to SEQ ID NO: 1610555
uauucccagaagaacuuuc

SEQ ID NO: 1610557 - RNA, 19 nt, Artificial Sequence
  Description of Artificial Sequence: Synthetic oligonucleotide
  Sense strand starting at position 3553 of SEQ ID NO: 1560591
aaaguucuucugggaauag

SEQ ID NO: 1610558 - RNA, 19 nt, Artificial Sequence
  Description of Artificial Sequence: Synthetic oligonucleotide
  Antisense strand to SEQ ID NO: 1610557
cuauucccagaagaacuuu

SEQ ID NO: 1610559 - RNA, 19 nt, Artificial Sequence
  Description of Artificial Sequence: Synthetic oligonucleotide
  Sense strand starting at position 3587 of SEQ ID NO: 1560591
gcuggucacucccuuaaga

SEQ ID NO: 1610560 - RNA, 19 nt, Artificial Sequence
  Description of Artificial Sequence: Synthetic oligonucleotide
  Antisense strand to SEQ ID NO: 1610559
ucuuaagggagugaccagc

SEQ ID NO: 1610561 - RNA, 19 nt, Artificial Sequence
  Description of Artificial Sequence: Synthetic oligonucleotide
  Sense strand starting at position 3589 of SEQ ID NO: 1560591
uggucacucccuuaagaau

SEQ ID NO: 1610562 - RNA, 19 nt, Artificial Sequence
  Description of Artificial Sequence: Synthetic oligonucleotide
  Antisense strand to SEQ ID NO: 1610561
auucuuaagggagugacca

SEQ ID NO: 1610563 - RNA, 19 nt, Artificial Sequence
  Description of Artificial Sequence: Synthetic oligonucleotide
  Sense strand starting at position 3841 of SEQ ID NO: 1560591
cuacauaauggugauguca

SEQ ID NO: 1610564 - RNA, 19 nt, Artificial Sequence
  Description of Artificial Sequence: Synthetic oligonucleotide
  Antisense strand to SEQ ID NO: 1610563
ugacaucaccauuauguag

SEQ ID NO: 1610565 - RNA, 19 nt, Artificial Sequence
  Description of Artificial Sequence: Synthetic oligonucleotide
  Sense strand starting at position 3920 of SEQ ID NO: 1560591
aaacgagacuucccuguaa

SEQ ID NO: 1610566 - RNA, 19 nt, Artificial Sequence
  Description of Artificial Sequence: Synthetic oligonucleotide
  Antisense strand to SEQ ID NO: 1610565
uuacagggaagucucguuu

SEQ ID NO: 1610567 - RNA, 19 nt, Artificial Sequence
  Description of Artificial Sequence: Synthetic oligonucleotide
  Sense strand starting at position 3938 of SEQ ID NO: 1560591
aaaugucucccagggaaua

SEQ ID NO: 1610568 - RNA, 19 nt, Artificial Sequence
  Description of Artificial Sequence: Synthetic oligonucleotide
  Antisense strand to SEQ ID NO: 1610567
uauucccugggagacauuu

SEQ ID NO: 1610569 - RNA, 19 nt, Artificial Sequence
  Description of Artificial Sequence: Synthetic oligonucleotide
  Sense strand starting at position 3939 of SEQ ID NO: 1560591
aaugucucccagggaauau

SEQ ID NO: 1610570 - RNA, 19 nt, Artificial Sequence
  Description of Artificial Sequence: Synthetic oligonucleotide
  Antisense strand to SEQ ID NO: 1610569
auauucccugggagacauu

SEQ ID NO: 1610571 - RNA, 19 nt, Artificial Sequence
  Description of Artificial Sequence: Synthetic oligonucleotide
  Sense strand starting at position 3951 of SEQ ID NO: 1560591
ggaauauagggaugucuug

SEQ ID NO: 1610572 - RNA, 19 nt, Artificial Sequence
  Description of Artificial Sequence: Synthetic oligonucleotide
  Antisense strand to SEQ ID NO: 1610571
caagacaucccuauauucc

SEQ ID NO: 1610573 - RNA, 19 nt, Artificial Sequence
  Description of Artificial Sequence: Synthetic oligonucleotide
  Sense strand starting at position 3958 of SEQ ID NO: 1560591
agggaugucuugcaaucug

SEQ ID NO: 1610574 - RNA, 19 nt, Artificial Sequence
  Description of Artificial Sequence: Synthetic oligonucleotide
  Antisense strand to SEQ ID NO: 1610573
cagauugcaagacaucccu

SEQ ID NO: 1610575 - RNA, 19 nt, Artificial Sequence
  Description of Artificial Sequence: Synthetic oligonucleotide
  Sense strand starting at position 3966 of SEQ ID NO: 1560591
cuugcaaucugacauuguu

SEQ ID NO: 1610576 - RNA, 19 nt, Artificial Sequence
  Description of Artificial Sequence: Synthetic oligonucleotide
  Antisense strand to SEQ ID NO: 1610575
aacaaugucagauugcaag

SEQ ID NO: 1610577 - RNA, 19 nt, Artificial Sequence
  Description of Artificial Sequence: Synthetic oligonucleotide
  Sense strand starting at position 3974 of SEQ ID NO: 1560591
cugacauuguuccuccauu

SEQ ID NO: 1610578 - RNA, 19 nt, Artificial Sequence
  Description of Artificial Sequence: Synthetic oligonucleotide
  Antisense strand to SEQ ID NO: 1610577
aauggaggaacaaugucag

SEQ ID NO: 1610579 - RNA, 19 nt, Artificial Sequence
  Description of Artificial Sequence: Synthetic oligonucleotide
  Sense strand starting at position 3975 of SEQ ID NO: 1560591
ugacauuguuccuccauug

SEQ ID NO: 1610580 - RNA, 19 nt, Artificial Sequence
  Description of Artificial Sequence: Synthetic oligonucleotide
  Antisense strand to SEQ ID NO: 1610579
caauggaggaacaauguca

SEQ ID NO: 1610581 - RNA, 19 nt, Artificial Sequence
  Description of Artificial Sequence: Synthetic oligonucleotide
  Sense strand starting at position 84 of SEQ ID NO: 1560592
cugugaugaggguauucgu

SEQ ID NO: 1610582 - RNA, 19 nt, Artificial Sequence
  Description of Artificial Sequence: Synthetic oligonucleotide
  Antisense strand to SEQ ID NO: 1610581
acgaauacccucaucacag

SEQ ID NO: 1610583 - RNA, 19 nt, Artificial Sequence
  Description of Artificial Sequence: Synthetic oligonucleotide
  Sense strand starting at position 115 of SEQ ID NO: 1560592
agagaagcguacucacaga

SEQ ID NO: 1610584 - RNA, 19 nt, Artificial Sequence
  Description of Artificial Sequence: Synthetic oligonucleotide
  Antisense strand to SEQ ID NO: 1610583
ucugugaguacgcuucucu

SEQ ID NO: 1610585 - RNA, 19 nt, Artificial Sequence
  Description of Artificial Sequence: Synthetic oligonucleotide
  Sense strand starting at position 132 of SEQ ID NO: 1560592
gaucgcaauuugucgaugu

SEQ ID NO: 1610586 - RNA, 19 nt, Artificial Sequence
  Description of Artificial Sequence: Synthetic oligonucleotide
  Antisense strand to SEQ ID NO: 1610585
acaucgacaaauugcgauc

SEQ ID NO: 1610587 - RNA, 19 nt, Artificial Sequence
  Description of Artificial Sequence: Synthetic oligonucleotide
  Sense strand starting at position 134 of SEQ ID NO: 1560592
ucgcaauuugucgauguuc

SEQ ID NO: 1610588 - RNA, 19 nt, Artificial Sequence
  Description of Artificial Sequence: Synthetic oligonucleotide
  Antisense strand to SEQ ID NO: 1610587
gaacaucgacaaauugcga

SEQ ID NO: 1610589 - RNA, 19 nt, Artificial Sequence
  Description of Artificial Sequence: Synthetic oligonucleotide
  Sense strand starting at position 136 of SEQ ID NO: 1560592
gcaauuugucgauguucag

SEQ ID NO: 1610590 - RNA, 19 nt, Artificial Sequence
  Description of Artificial Sequence: Synthetic oligonucleotide
  Antisense strand to SEQ ID NO: 1610589
cugaacaucgacaaauugc

SEQ ID NO: 1610591 - RNA, 19 nt, Artificial Sequence
  Description of Artificial Sequence: Synthetic oligonucleotide
  Sense strand starting at position 193 of SEQ ID NO: 1560592
uuaggaaaguugcuaagaa

SEQ ID NO: 1610592 - RNA, 19 nt, Artificial Sequence
  Description of Artificial Sequence: Synthetic oligonucleotide
  Antisense strand to SEQ ID NO: 1610591
uucuuagcaacuuuccuaa

SEQ ID NO: 1610593 - RNA, 19 nt, Artificial Sequence
  Description of Artificial Sequence: Synthetic oligonucleotide
  Sense strand starting at position 272 of SEQ ID NO: 1560592
ucgggucgugacgcauaau

SEQ ID NO: 1610594 - RNA, 19 nt, Artificial Sequence
  Description of Artificial Sequence: Synthetic oligonucleotide
  Antisense strand to SEQ ID NO: 1610593
auuaugcgucacgacccga

SEQ ID NO: 1610595 - RNA, 19 nt, Artificial Sequence
  Description of Artificial Sequence: Synthetic oligonucleotide
  Sense strand starting at position 298 of SEQ ID NO: 1560592
ggugcuuucuuccuggaaa

SEQ ID NO: 1610596 - RNA, 19 nt, Artificial Sequence
  Description of Artificial Sequence: Synthetic oligonucleotide
  Antisense strand to SEQ ID NO: 1610595
uuuccaggaagaaagcacc

SEQ ID NO: 1610597 - RNA, 19 nt, Artificial Sequence
  Description of Artificial Sequence: Synthetic oligonucleotide
  Sense strand starting at position 556 of SEQ ID NO: 1560592
gagcauuccucuccggaaa

SEQ ID NO: 1610598 - RNA, 19 nt, Artificial Sequence
  Description of Artificial Sequence: Synthetic oligonucleotide
  Antisense strand to SEQ ID NO: 1610597
uuuccggagaggaaugcuc

SEQ ID NO: 1610599 - RNA, 19 nt, Artificial Sequence
  Description of Artificial Sequence: Synthetic oligonucleotide
  Sense strand starting at position 648 of SEQ ID NO: 1560592
cguauagcuggaugggaaa

SEQ ID NO: 1610600 - RNA, 19 nt, Artificial Sequence
  Description of Artificial Sequence: Synthetic oligonucleotide
  Antisense strand to SEQ ID NO: 1610599
uuucccauccagcuauacg

SEQ ID NO: 1610601 - RNA, 19 nt, Artificial Sequence
  Description of Artificial Sequence: Synthetic oligonucleotide
  Sense strand starting at position 865 of SEQ ID NO: 1560592
gauccagaugcuuagaucu

SEQ ID NO: 1610602 - RNA, 19 nt, Artificial Sequence
  Description of Artificial Sequence: Synthetic oligonucleotide
  Antisense strand to SEQ ID NO: 1610601
agaucuaagcaucuggauc

SEQ ID NO: 1610603 - RNA, 19 nt, Artificial Sequence
  Description of Artificial Sequence: Synthetic oligonucleotide
  Sense strand starting at position 909 of SEQ ID NO: 1560592
ugguuugaauuagacauuu

SEQ ID NO: 1610604 - RNA, 19 nt, Artificial Sequence
  Description of Artificial Sequence: Synthetic oligonucleotide
  Antisense strand to SEQ ID NO: 1610603
aaaugucuaauucaaacca

SEQ ID NO: 1610605 - RNA, 19 nt, Artificial Sequence
  Description of Artificial Sequence: Synthetic oligonucleotide
  Sense strand starting at position 1173 of SEQ ID NO: 1560592
aggauuccucucuggcuga

SEQ ID NO: 1610606 - RNA, 19 nt, Artificial Sequence
  Description of Artificial Sequence: Synthetic oligonucleotide
  Antisense strand to SEQ ID NO: 1610605
ucagccagagaggaauccu

SEQ ID NO: 1610607 - RNA, 19 nt, Artificial Sequence
  Description of Artificial Sequence: Synthetic oligonucleotide
  Sense strand starting at position 1200 of SEQ ID NO: 1560592
ugguaaagauucucacugu

SEQ ID NO: 1610608 - RNA, 19 nt, Artificial Sequence
  Description of Artificial Sequence: Synthetic oligonucleotide
  Antisense strand to SEQ ID NO: 1610607
acagugagaaucuuuacca

SEQ ID NO: 1610609 - RNA, 19 nt, Artificial Sequence
  Description of Artificial Sequence: Synthetic oligonucleotide
  Sense strand starting at position 1329 of SEQ ID NO: 1560592
cccacuccucuuugaguua

SEQ ID NO: 1610610 - RNA, 19 nt, Artificial Sequence
  Description of Artificial Sequence: Synthetic oligonucleotide
  Antisense strand to SEQ ID NO: 1610609
uaacucaaagaggaguggg

SEQ ID NO: 1610611 - RNA, 19 nt, Artificial Sequence
  Description of Artificial Sequence: Synthetic oligonucleotide
  Sense strand starting at position 1332 of SEQ ID NO: 1560592
acuccucuuugaguuaagu

SEQ ID NO: 1610612 - RNA, 19 nt, Artificial Sequence
  Description of Artificial Sequence: Synthetic oligonucleotide
  Antisense strand to SEQ ID NO: 1610611
acuuaacucaaagaggagu

SEQ ID NO: 1610613 - RNA, 19 nt, Artificial Sequence
  Description of Artificial Sequence: Synthetic oligonucleotide
  Sense strand starting at position 1632 of SEQ ID NO: 1560592
aggagcaucucugucccaa

SEQ ID NO: 1610614 - RNA, 19 nt, Artificial Sequence
  Description of Artificial Sequence: Synthetic oligonucleotide
  Antisense strand to SEQ ID NO: 1610613
uugggacagagaugcuccu

SEQ ID NO: 1610615 - RNA, 19 nt, Artificial Sequence
  Description of Artificial Sequence: Synthetic oligonucleotide
  Sense strand starting at position 1781 of SEQ ID NO: 1560592
guggguaacacguauaaga

SEQ ID NO: 1610616 - RNA, 19 nt, Artificial Sequence
  Description of Artificial Sequence: Synthetic oligonucleotide
  Antisense strand to SEQ ID NO: 1610615
ucuuauacguguuacccac

SEQ ID NO: 1610617 - RNA, 19 nt, Artificial Sequence
  Description of Artificial Sequence: Synthetic oligonucleotide
  Sense strand starting at position 1959 of SEQ ID NO: 1560592
uuauauugccaaggaggca

SEQ ID NO: 1610618 - RNA, 19 nt, Artificial Sequence
  Description of Artificial Sequence: Synthetic oligonucleotide
  Antisense strand to SEQ ID NO: 1610617
ugccuccuuggcaauauaa

SEQ ID NO: 1610619 - RNA, 19 nt, Artificial Sequence
  Description of Artificial Sequence: Synthetic oligonucleotide
  Sense strand starting at position 2074 of SEQ ID NO: 1560592
ucauuugccucggauuucu

SEQ ID NO: 1610620 - RNA, 19 nt, Artificial Sequence
  Description of Artificial Sequence: Synthetic oligonucleotide
  Antisense strand to SEQ ID NO: 1610619
agaaauccgaggcaaauga

SEQ ID NO: 1610621 - RNA, 19 nt, Artificial Sequence
  Description of Artificial Sequence: Synthetic oligonucleotide
  Sense strand starting at position 2199 of SEQ ID NO: 1560592
ggcagugguacccaagcaa

SEQ ID NO: 1610622 - RNA, 19 nt, Artificial Sequence
  Description of Artificial Sequence: Synthetic oligonucleotide
  Antisense strand to SEQ ID NO: 1610621
uugcuuggguaccacugcc

SEQ ID NO: 1610623 - RNA, 19 nt, Artificial Sequence
  Description of Artificial Sequence: Synthetic oligonucleotide
  Sense strand starting at position 2244 of SEQ ID NO: 1560592
cguuauaucccucauuccu

SEQ ID NO: 1610624 - RNA, 19 nt, Artificial Sequence
  Description of Artificial Sequence: Synthetic oligonucleotide
  Antisense strand to SEQ ID NO: 1610623
aggaaugagggauauaacg

SEQ ID NO: 1610625 - RNA, 19 nt, Artificial Sequence
  Description of Artificial Sequence: Synthetic oligonucleotide
  Sense strand starting at position 2885 of SEQ ID NO: 1560592
ggaugaagcuucccagauu

SEQ ID NO: 1610626 - RNA, 19 nt, Artificial Sequence
  Description of Artificial Sequence: Synthetic oligonucleotide
  Antisense strand to SEQ ID NO: 1610625
aaucugggaagcuucaucc

SEQ ID NO: 1610627 - RNA, 19 nt, Artificial Sequence
  Description of Artificial Sequence: Synthetic oligonucleotide
  Sense strand starting at position 3000 of SEQ ID NO: 1560592
ucauguucucgccuuguuu

SEQ ID NO: 1610628 - RNA, 19 nt, Artificial Sequence
  Description of Artificial Sequence: Synthetic oligonucleotide
  Antisense strand to SEQ ID NO: 1610627
aaacaaggcgagaacauga

SEQ ID NO: 1610629 - RNA, 19 nt, Artificial Sequence
  Description of Artificial Sequence: Synthetic oligonucleotide
  Sense strand starting at position 3030 of SEQ ID NO: 1560592
uaucaaguuccuugagguc

SEQ ID NO: 1610630 - RNA, 19 nt, Artificial Sequence
  Description of Artificial Sequence: Synthetic oligonucleotide
  Antisense strand to SEQ ID NO: 1610629
gaccucaaggaacuugaua

SEQ ID NO: 1610631 - RNA, 19 nt, Artificial Sequence
  Description of Artificial Sequence: Synthetic oligonucleotide
  Sense strand starting at position 3111 of SEQ ID NO: 1560592
agagucagcauuggucaga

SEQ ID NO: 1610632 - RNA, 19 nt, Artificial Sequence
  Description of Artificial Sequence: Synthetic oligonucleotide
  Antisense strand to SEQ ID NO: 1610631
ucugaccaaugcugacucu

SEQ ID NO: 1610633 - RNA, 19 nt, Artificial Sequence
  Description of Artificial Sequence: Synthetic oligonucleotide
  Sense strand starting at position 3112 of SEQ ID NO: 1560592
gagucagcauuggucagau

SEQ ID NO: 1610634 - RNA, 19 nt, Artificial Sequence
  Description of Artificial Sequence: Synthetic oligonucleotide
  Antisense strand to SEQ ID NO: 1610633
aucugaccaaugcugacuc

SEQ ID NO: 1610635 - RNA, 19 nt, Artificial Sequence
  Description of Artificial Sequence: Synthetic oligonucleotide
  Sense strand starting at position 3114 of SEQ ID NO: 1560592
gucagcauuggucagauau

SEQ ID NO: 1610636 - RNA, 19 nt, Artificial Sequence
  Description of Artificial Sequence: Synthetic oligonucleotide
  Antisense strand to SEQ ID NO: 1610635
auaucugaccaaugcugac

SEQ ID NO: 1610637 - RNA, 19 nt, Artificial Sequence
  Description of Artificial Sequence: Synthetic oligonucleotide
  Sense strand starting at position 3125 of SEQ ID NO: 1560592
ucagauaugauacguuaga

SEQ ID NO: 1610638 - RNA, 19 nt, Artificial Sequence
  Description of Artificial Sequence: Synthetic oligonucleotide
  Antisense strand to SEQ ID NO: 1610637
ucuaacguaucauaucuga

SEQ ID NO: 1610639 - RNA, 19 nt, Artificial Sequence
  Description of Artificial Sequence: Synthetic oligonucleotide
  Sense strand starting at position 3126 of SEQ ID NO: 1560592
cagauaugauacguuagac

SEQ ID NO: 1610640 - RNA, 19 nt, Artificial Sequence
  Description of Artificial Sequence: Synthetic oligonucleotide
  Antisense strand to SEQ ID NO: 1610639
gucuaacguaucauaucug

SEQ ID NO: 1610641 - RNA, 19 nt, Artificial Sequence
  Description of Artificial Sequence: Synthetic oligonucleotide
  Sense strand starting at position 3242 of SEQ ID NO: 1560592
cagagaaaugacugucuug

SEQ ID NO: 1610642 - RNA, 19 nt, Artificial Sequence
  Description of Artificial Sequence: Synthetic oligonucleotide
  Antisense strand to SEQ ID NO: 1610641
caagacagucauuucucug

SEQ ID NO: 1610643 - RNA, 19 nt, Artificial Sequence
  Description of Artificial Sequence: Synthetic oligonucleotide
  Sense strand starting at position 3248 of SEQ ID NO: 1560592
aaugacugucuugagcuaa

SEQ ID NO: 1610644 - RNA, 19 nt, Artificial Sequence
  Description of Artificial Sequence: Synthetic oligonucleotide
  Antisense strand to SEQ ID NO: 1610643
uuagcucaagacagucauu

SEQ ID NO: 1610645 - RNA, 19 nt, Artificial Sequence
  Description of Artificial Sequence: Synthetic oligonucleotide
  Sense strand starting at position 3252 of SEQ ID NO: 1560592
acugucuugagcuaagaug

SEQ ID NO: 1610646 - RNA, 19 nt, Artificial Sequence
  Description of Artificial Sequence: Synthetic oligonucleotide
  Antisense strand to SEQ ID NO: 1610645
caucuuagcucaagacagu

SEQ ID NO: 1610647 - RNA, 19 nt, Artificial Sequence
  Description of Artificial Sequence: Synthetic oligonucleotide
  Sense strand starting at position 3402 of SEQ ID NO: 1560592
ggaucaccucacugugaca

SEQ ID NO: 1610648 - RNA, 19 nt, Artificial Sequence
  Description of Artificial Sequence: Synthetic oligonucleotide
  Antisense strand to SEQ ID NO: 1610647
ugucacagugaggugaucc

SEQ ID NO: 1610649 - RNA, 19 nt, Artificial Sequence
  Description of Artificial Sequence: Synthetic oligonucleotide
  Sense strand starting at position 3781 of SEQ ID NO: 1560592
cacaguaguggaugucaca

SEQ ID NO: 1610650 - RNA, 19 nt, Artificial Sequence
  Description of Artificial Sequence: Synthetic oligonucleotide
  Antisense strand to SEQ ID NO: 1610649
ugugacauccacuacugug

SEQ ID NO: 1610651 - RNA, 19 nt, Artificial Sequence
  Description of Artificial Sequence: Synthetic oligonucleotide
  Sense strand starting at position 3822 of SEQ ID NO: 1560592
cgaguuagagaaugacuga

SEQ ID NO: 1610652 - RNA, 19 nt, Artificial Sequence
  Description of Artificial Sequence: Synthetic oligonucleotide
  Antisense strand to SEQ ID NO: 1610651
ucagucauucucuaacucg

SEQ ID NO: 1610653 - RNA, 19 nt, Artificial Sequence
  Description of Artificial Sequence: Synthetic oligonucleotide
  Sense strand starting at position 3876 of SEQ ID NO: 1560592
gacacaaguucuguguaau

SEQ ID NO: 1610654 - RNA, 19 nt, Artificial Sequence
  Description of Artificial Sequence: Synthetic oligonucleotide
  Antisense strand to SEQ ID NO: 1610653
auuacacagaacuuguguc

SEQ ID NO: 1610655 - RNA, 19 nt, Artificial Sequence
  Description of Artificial Sequence: Synthetic oligonucleotide
  Sense strand starting at position 3877 of SEQ ID NO: 1560592
acacaaguucuguguaaug

SEQ ID NO: 1610656 - RNA, 19 nt, Artificial Sequence
  Description of Artificial Sequence: Synthetic oligonucleotide
  Antisense strand to SEQ ID NO: 1610655
cauuacacagaacuugugu

SEQ ID NO: 1610657 - RNA, 19 nt, Artificial Sequence
  Description of Artificial Sequence: Synthetic oligonucleotide
  Sense strand starting at position 3879 of SEQ ID NO: 1560592
acaaguucuguguaaugaa

SEQ ID NO: 1610658 - RNA, 19 nt, Artificial Sequence
  Description of Artificial Sequence: Synthetic oligonucleotide
  Antisense strand to SEQ ID NO: 1610657
uucauuacacagaacuugu

SEQ ID NO: 1610659 - RNA, 19 nt, Artificial Sequence
  Description of Artificial Sequence: Synthetic oligonucleotide
  Sense strand starting at position 3889 of SEQ ID NO: 1560592
uguaaugaauccuugcuaa

SEQ ID NO: 1610660 - RNA, 19 nt, Artificial Sequence
  Description of Artificial Sequence: Synthetic oligonucleotide
  Antisense strand to SEQ ID NO: 1610659
uuagcaaggauucauuaca

SEQ ID NO: 1610661 - RNA, 19 nt, Artificial Sequence
  Description of Artificial Sequence: Synthetic oligonucleotide
  Sense strand starting at position 93 of SEQ ID NO: 1560593
gucucacaaaggugugaau

SEQ ID NO: 1610662 - RNA, 19 nt, Artificial Sequence
  Description of Artificial Sequence: Synthetic oligonucleotide
  Antisense strand to SEQ ID NO: 1610661
auucacaccuuugugagac

SEQ ID NO: 1610663 - RNA, 19 nt, Artificial Sequence
  Description of Artificial Sequence: Synthetic oligonucleotide
  Sense strand starting at position 95 of SEQ ID NO: 1560593
cucacaaaggugugaaucu

SEQ ID NO: 1610664 - RNA, 19 nt, Artificial Sequence
  Description of Artificial Sequence: Synthetic oligonucleotide
  Antisense strand to SEQ ID NO: 1610663
agauucacaccuuugugag

SEQ ID NO: 1610665 - RNA, 19 nt, Artificial Sequence
  Description of Artificial Sequence: Synthetic oligonucleotide
  Sense strand starting at position 161 of SEQ ID NO: 1560593
gcagcugauuucugccuga

SEQ ID NO: 1610666 - RNA, 19 nt, Artificial Sequence
  Description of Artificial Sequence: Synthetic oligonucleotide
  Antisense strand to SEQ ID NO: 1610665
ucaggcagaaaucagcugc

SEQ ID NO: 1610667 - RNA, 19 nt, Artificial Sequence
  Description of Artificial Sequence: Synthetic oligonucleotide
  Sense strand starting at position 164 of SEQ ID NO: 1560593
gcugauuucugccugacuu

SEQ ID NO: 1610668 - RNA, 19 nt, Artificial Sequence
  Description of Artificial Sequence: Synthetic oligonucleotide
  Antisense strand to SEQ ID NO: 1610667
aagucaggcagaaaucagc

SEQ ID NO: 1610669 - RNA, 19 nt, Artificial Sequence
  Description of Artificial Sequence: Synthetic oligonucleotide
  Sense strand starting at position 165 of SEQ ID NO: 1560593
cugauuucugccugacuuc

SEQ ID NO: 1610670 - RNA, 19 nt, Artificial Sequence
  Description of Artificial Sequence: Synthetic oligonucleotide
  Antisense strand to SEQ ID NO: 1610669
gaagucaggcagaaaucag

SEQ ID NO: 1610671 - RNA, 19 nt, Artificial Sequence
  Description of Artificial Sequence: Synthetic oligonucleotide
  Sense strand starting at position 181 of SEQ ID NO: 1560593
uucugauguuucuccagga

SEQ ID NO: 1610672 - RNA, 19 nt, Artificial Sequence
  Description of Artificial Sequence: Synthetic oligonucleotide
  Antisense strand to SEQ ID NO: 1610671
uccuggagaaacaucagaa

SEQ ID NO: 1610673 - RNA, 19 nt, Artificial Sequence
  Description of Artificial Sequence: Synthetic oligonucleotide
  Sense strand starting at position 240 of SEQ ID NO: 1560593
auugacaaaugucagcaau

SEQ ID NO: 1610674 - RNA, 19 nt, Artificial Sequence
  Description of Artificial Sequence: Synthetic oligonucleotide
  Antisense strand to SEQ ID NO: 1610673
auugcugacauuugucaau

SEQ ID NO: 1610675 - RNA, 19 nt, Artificial Sequence
  Description of Artificial Sequence: Synthetic oligonucleotide
  Sense strand starting at position 242 of SEQ ID NO: 1560593
ugacaaaugucagcaauca

SEQ ID NO: 1610676 - RNA, 19 nt, Artificial Sequence
  Description of Artificial Sequence: Synthetic oligonucleotide
  Antisense strand to SEQ ID NO: 1610675
ugauugcugacauuuguca

SEQ ID NO: 1610677 - RNA, 19 nt, Artificial Sequence
  Description of Artificial Sequence: Synthetic oligonucleotide
  Sense strand starting at position 294 of SEQ ID NO: 1560593
gcaucuauuugugaucugu

SEQ ID NO: 1610678 - RNA, 19 nt, Artificial Sequence
  Description of Artificial Sequence: Synthetic oligonucleotide
  Antisense strand to SEQ ID NO: 1610677
acagaucacaaauagaugc

SEQ ID NO: 1610679 - RNA, 19 nt, Artificial Sequence
  Description of Artificial Sequence: Synthetic oligonucleotide
  Sense strand starting at position 328 of SEQ ID NO: 1560593
ugcagcaccuucuagaaau

SEQ ID NO: 1610680 - RNA, 19 nt, Artificial Sequence
  Description of Artificial Sequence: Synthetic oligonucleotide
  Antisense strand to SEQ ID NO: 1610679
auuucuagaaggugcugca

SEQ ID NO: 1610681 - RNA, 19 nt, Artificial Sequence
  Description of Artificial Sequence: Synthetic oligonucleotide
  Sense strand starting at position 397 of SEQ ID NO: 1560593
auugaacuccuaugacaug

SEQ ID NO: 1610682 - RNA, 19 nt, Artificial Sequence
  Description of Artificial Sequence: Synthetic oligonucleotide
  Antisense strand to SEQ ID NO: 1610681
caugucauaggaguucaau

SEQ ID NO: 1610683 - RNA, 19 nt, Artificial Sequence
  Description of Artificial Sequence: Synthetic oligonucleotide
  Sense strand starting at position 444 of SEQ ID NO: 1560593
cccaaagaagcaugaucuu

SEQ ID NO: 1610684 - RNA, 19 nt, Artificial Sequence
  Description of Artificial Sequence: Synthetic oligonucleotide
  Antisense strand to SEQ ID NO: 1610683
aagaucaugcuucuuuggg

SEQ ID NO: 1610685 - RNA, 19 nt, Artificial Sequence
  Description of Artificial Sequence: Synthetic oligonucleotide
  Sense strand starting at position 447 of SEQ ID NO: 1560593
aaagaagcaugaucuugua

SEQ ID NO: 1610686 - RNA, 19 nt, Artificial Sequence
  Description of Artificial Sequence: Synthetic oligonucleotide
  Antisense strand to SEQ ID NO: 1610685
uacaagaucaugcuucuuu

SEQ ID NO: 1610687 - RNA, 19 nt, Artificial Sequence
  Description of Artificial Sequence: Synthetic oligonucleotide
  Sense strand starting at position 450 of SEQ ID NO: 1560593
gaagcaugaucuuguauaa

SEQ ID NO: 1610688 - RNA, 19 nt, Artificial Sequence
  Description of Artificial Sequence: Synthetic oligonucleotide
  Antisense strand to SEQ ID NO: 1610687
uuauacaagaucaugcuuc

SEQ ID NO: 1610689 - RNA, 19 nt, Artificial Sequence
  Description of Artificial Sequence: Synthetic oligonucleotide
  Sense strand starting at position 1072 of SEQ ID NO: 1560593
gcuguuugaccaugggaga

SEQ ID NO: 1610690 - RNA, 19 nt, Artificial Sequence
  Description of Artificial Sequence: Synthetic oligonucleotide
  Antisense strand to SEQ ID NO: 1610689
ucucccauggucaaacagc

SEQ ID NO: 1610691 - RNA, 19 nt, Artificial Sequence
  Description of Artificial Sequence: Synthetic oligonucleotide
  Sense strand starting at position 1210 of SEQ ID NO: 1560593
acaggcuguuucuccaaga

SEQ ID NO: 1610692 - RNA, 19 nt, Artificial Sequence
  Description of Artificial Sequence: Synthetic oligonucleotide
  Antisense strand to SEQ ID NO: 1610691
ucuuggagaaacagccugu

SEQ ID NO: 1610693 - RNA, 19 nt, Artificial Sequence
  Description of Artificial Sequence: Synthetic oligonucleotide
  Sense strand starting at position 1215 of SEQ ID NO: 1560593
cuguuucuccaagaggagu

SEQ ID NO: 1610694 - RNA, 19 nt, Artificial Sequence
  Description of Artificial Sequence: Synthetic oligonucleotide
  Antisense strand to SEQ ID NO: 1610693
acuccucuuggagaaacag

SEQ ID NO: 1610695 - RNA, 19 nt, Artificial Sequence
  Description of Artificial Sequence: Synthetic oligonucleotide
  Sense strand starting at position 1235 of SEQ ID NO: 1560593
ugaagaagucccgggaauc

SEQ ID NO: 1610696 - RNA, 19 nt, Artificial Sequence
  Description of Artificial Sequence: Synthetic oligonucleotide
  Antisense strand to SEQ ID NO: 1610695
gauucccgggacuucuuca

SEQ ID NO: 1610697 - RNA, 19 nt, Artificial Sequence
  Description of Artificial Sequence: Synthetic oligonucleotide
  Sense strand starting at position 1236 of SEQ ID NO: 1560593
gaagaagucccgggaauca

SEQ ID NO: 1610698 - RNA, 19 nt, Artificial Sequence
  Description of Artificial Sequence: Synthetic oligonucleotide
  Antisense strand to SEQ ID NO: 1610697
ugauucccgggacuucuuc

SEQ ID NO: 1610699 - RNA, 19 nt, Artificial Sequence
  Description of Artificial Sequence: Synthetic oligonucleotide
  Sense strand starting at position 1284 of SEQ ID NO: 1560593
agaauauauuacgggcaaa

SEQ ID NO: 1610700 - RNA, 19 nt, Artificial Sequence
  Description of Artificial Sequence: Synthetic oligonucleotide
  Antisense strand to SEQ ID NO: 1610699
uuugcccguaauauauucu

SEQ ID NO: 1610701 - RNA, 19 nt, Artificial Sequence
  Description of Artificial Sequence: Synthetic oligonucleotide
  Sense strand starting at position 1351 of SEQ ID NO: 1560593
cacaaucaucuccgaguga

SEQ ID NO: 1610702 - RNA, 19 nt, Artificial Sequence
  Description of Artificial Sequence: Synthetic oligonucleotide
  Antisense strand to SEQ ID NO: 1610701
ucacucggagaugauugug

SEQ ID NO: 1610703 - RNA, 19 nt, Artificial Sequence
  Description of Artificial Sequence: Synthetic oligonucleotide
  Sense strand starting at position 1352 of SEQ ID NO: 1560593
acaaucaucuccgagugaa

SEQ ID NO: 1610704 - RNA, 19 nt, Artificial Sequence
  Description of Artificial Sequence: Synthetic oligonucleotide
  Antisense strand to SEQ ID NO: 1610703
uucacucggagaugauugu

SEQ ID NO: 1610705 - RNA, 19 nt, Artificial Sequence
  Description of Artificial Sequence: Synthetic oligonucleotide
  Sense strand starting at position 1355 of SEQ ID NO: 1560593
aucaucuccgagugaaacu

SEQ ID NO: 1610706 - RNA, 19 nt, Artificial Sequence
  Description of Artificial Sequence: Synthetic oligonucleotide
  Antisense strand to SEQ ID NO: 1610705
aguuucacucggagaugau

SEQ ID NO: 1610707 - RNA, 19 nt, Artificial Sequence
  Description of Artificial Sequence: Synthetic oligonucleotide
  Sense strand starting at position 1433 of SEQ ID NO: 1560593
cgguucuauauccagguua

SEQ ID NO: 1610708 - RNA, 19 nt, Artificial Sequence
  Description of Artificial Sequence: Synthetic oligonucleotide
  Antisense strand to SEQ ID NO: 1610707
uaaccuggauauagaaccg

SEQ ID NO: 1610709 - RNA, 19 nt, Artificial Sequence
  Description of Artificial Sequence: Synthetic oligonucleotide
  Sense strand starting at position 1665 of SEQ ID NO: 1560593
ugcguauccauugagcaga

SEQ ID NO: 1610710 - RNA, 19 nt, Artificial Sequence
  Description of Artificial Sequence: Synthetic oligonucleotide
  Antisense strand to SEQ ID NO: 1610709
ucugcucaauggauacgca

SEQ ID NO: 1610711 - RNA, 19 nt, Artificial Sequence
  Description of Artificial Sequence: Synthetic oligonucleotide
  Sense strand starting at position 2015 of SEQ ID NO: 1560593
gugggugcaucacaaugaa

SEQ ID NO: 1610712 - RNA, 19 nt, Artificial Sequence
  Description of Artificial Sequence: Synthetic oligonucleotide
  Antisense strand to SEQ ID NO: 1610711
uucauugugaugcacccac

SEQ ID NO: 1610713 - RNA, 19 nt, Artificial Sequence
  Description of Artificial Sequence: Synthetic oligonucleotide
  Sense strand starting at position 2018 of SEQ ID NO: 1560593
ggugcaucacaaugaauag

SEQ ID NO: 1610714 - RNA, 19 nt, Artificial Sequence
  Description of Artificial Sequence: Synthetic oligonucleotide
  Antisense strand to SEQ ID NO: 1610713
cuauucauugugaugcacc

SEQ ID NO: 1610715 - RNA, 19 nt, Artificial Sequence
  Description of Artificial Sequence: Synthetic oligonucleotide
  Sense strand starting at position 2238 of SEQ ID NO: 1560593
gaauuagacucaucugugu

SEQ ID NO: 1610716 - RNA, 19 nt, Artificial Sequence
  Description of Artificial Sequence: Synthetic oligonucleotide
  Antisense strand to SEQ ID NO: 1610715
acacagaugagucuaauuc

SEQ ID NO: 1610717 - RNA, 19 nt, Artificial Sequence
  Description of Artificial Sequence: Synthetic oligonucleotide
  Sense strand starting at position 2698 of SEQ ID NO: 1560593
cucacauccugucauugua

SEQ ID NO: 1610718 - RNA, 19 nt, Artificial Sequence
  Description of Artificial Sequence: Synthetic oligonucleotide
  Antisense strand to SEQ ID NO: 1610717
uacaaugacaggaugugag

SEQ ID NO: 1610719 - RNA, 19 nt, Artificial Sequence
  Description of Artificial Sequence: Synthetic oligonucleotide
  Sense strand starting at position 2701 of SEQ ID NO: 1560593
acauccugucauuguaauc

SEQ ID NO: 1610720 - RNA, 19 nt, Artificial Sequence
  Description of Artificial Sequence: Synthetic oligonucleotide
  Antisense strand to SEQ ID NO: 1610719
gauuacaaugacaggaugu

SEQ ID NO: 1610721 - RNA, 19 nt, Artificial Sequence
  Description of Artificial Sequence: Synthetic oligonucleotide
  Sense strand starting at position 3022 of SEQ ID NO: 1560593
ucauguuaguuuguguaua

SEQ ID NO: 1610722 - RNA, 19 nt, Artificial Sequence
  Description of Artificial Sequence: Synthetic oligonucleotide
  Antisense strand to SEQ ID NO: 1610721
uauacacaaacuaacauga

SEQ ID NO: 1610723 - RNA, 19 nt, Artificial Sequence
  Description of Artificial Sequence: Synthetic oligonucleotide
  Sense strand starting at position 3026 of SEQ ID NO: 1560593
guuaguuuguguauacgag

SEQ ID NO: 1610724 - RNA, 19 nt, Artificial Sequence
  Description of Artificial Sequence: Synthetic oligonucleotide
  Antisense strand to SEQ ID NO: 1610723
cucguauacacaaacuaac

SEQ ID NO: 1610725 - RNA, 19 nt, Artificial Sequence
  Description of Artificial Sequence: Synthetic oligonucleotide
  Sense strand starting at position 3027 of SEQ ID NO: 1560593
uuaguuuguguauacgagu

SEQ ID NO: 1610726 - RNA, 19 nt, Artificial Sequence
  Description of Artificial Sequence: Synthetic oligonucleotide
  Antisense strand to SEQ ID NO: 1610725
acucguauacacaaacuaa

SEQ ID NO: 1610727 - RNA, 19 nt, Artificial Sequence
  Description of Artificial Sequence: Synthetic oligonucleotide
  Sense strand starting at position 3033 of SEQ ID NO: 1560593
uguguauacgaguaccaag

SEQ ID NO: 1610728 - RNA, 19 nt, Artificial Sequence
  Description of Artificial Sequence: Synthetic oligonucleotide
  Antisense strand to SEQ ID NO: 1610727
cuugguacucguauacaca

SEQ ID NO: 1610729 - RNA, 19 nt, Artificial Sequence
  Description of Artificial Sequence: Synthetic oligonucleotide
  Sense strand starting at position 3148 of SEQ ID NO: 1560593
guaggaguaucguuugagg

SEQ ID NO: 1610730 - RNA, 19 nt, Artificial Sequence
  Description of Artificial Sequence: Synthetic oligonucleotide
  Antisense strand to SEQ ID NO: 1610729
ccucaaacgauacuccuac

SEQ ID NO: 1610731 - RNA, 19 nt, Artificial Sequence
  Description of Artificial Sequence: Synthetic oligonucleotide
  Sense strand starting at position 3176 of SEQ ID NO: 1560593
agaaguugcagugaacgaa

SEQ ID NO: 1610732 - RNA, 19 nt, Artificial Sequence
  Description of Artificial Sequence: Synthetic oligonucleotide
  Antisense strand to SEQ ID NO: 1610731
uucguucacugcaacuucu

SEQ ID NO: 1610733 - RNA, 19 nt, Artificial Sequence
  Description of Artificial Sequence: Synthetic oligonucleotide
  Sense strand starting at position 3573 of SEQ ID NO: 1560593
gcuauaaacugauguggau

SEQ ID NO: 1610734 - RNA, 19 nt, Artificial Sequence
  Description of Artificial Sequence: Synthetic oligonucleotide
  Antisense strand to SEQ ID NO: 1610733
auccacaucaguuuauagc

SEQ ID NO: 1610735 - RNA, 19 nt, Artificial Sequence
  Description of Artificial Sequence: Synthetic oligonucleotide
  Sense strand starting at position 3576 of SEQ ID NO: 1560593
auaaacugauguggauuaa

SEQ ID NO: 1610736 - RNA, 19 nt, Artificial Sequence
  Description of Artificial Sequence: Synthetic oligonucleotide
  Antisense strand to SEQ ID NO: 1610735
uuaauccacaucaguuuau

SEQ ID NO: 1610737 - RNA, 19 nt, Artificial Sequence
  Description of Artificial Sequence: Synthetic oligonucleotide
  Sense strand starting at position 3976 of SEQ ID NO: 1560593
uuuaauaugucgccaccau

SEQ ID NO: 1610738 - RNA, 19 nt, Artificial Sequence
  Description of Artificial Sequence: Synthetic oligonucleotide
  Antisense strand to SEQ ID NO: 1610737
augguggcgacauauuaaa

SEQ ID NO: 1610739 - RNA, 19 nt, Artificial Sequence
  Description of Artificial Sequence: Synthetic oligonucleotide
  Sense strand starting at position 3977 of SEQ ID NO: 1560593
uuaauaugucgccaccauu

SEQ ID NO: 1610740 - RNA, 19 nt, Artificial Sequence
  Description of Artificial Sequence: Synthetic oligonucleotide
  Antisense strand to SEQ ID NO: 1610739
aaugguggcgacauauuaa

SEQ ID NO: 1610741 - RNA, 19 nt, Artificial Sequence
  Description of Artificial Sequence: Synthetic oligonucleotide
  Sense strand starting at position 216 of SEQ ID NO: 1560594
gaggaugaguguucagagu

SEQ ID NO: 1610742 - RNA, 19 nt, Artificial Sequence
  Description of Artificial Sequence: Synthetic oligonucleotide
  Antisense strand to SEQ ID NO: 1610741
acucugaacacucauccuc

SEQ ID NO: 1610743 - RNA, 19 nt, Artificial Sequence
  Description of Artificial Sequence: Synthetic oligonucleotide
  Sense strand starting at position 331 of SEQ ID NO: 1560594
ggguuugaauucucauugu

SEQ ID NO: 1610744 - RNA, 19 nt, Artificial Sequence
  Description of Artificial Sequence: Synthetic oligonucleotide
  Antisense strand to SEQ ID NO: 1610743
acaaugagaauucaaaccc

SEQ ID NO: 1610745 - RNA, 19 nt, Artificial Sequence
  Description of Artificial Sequence: Synthetic oligonucleotide
  Sense strand starting at position 334 of SEQ ID NO: 1560594
uuugaauucucauugugga

SEQ ID NO: 1610746 - RNA, 19 nt, Artificial Sequence
  Description of Artificial Sequence: Synthetic oligonucleotide
  Antisense strand to SEQ ID NO: 1610745
uccacaaugagaauucaaa

SEQ ID NO: 1610747 - RNA, 19 nt, Artificial Sequence
  Description of Artificial Sequence: Synthetic oligonucleotide
  Sense strand starting at position 335 of SEQ ID NO: 1560594
uugaauucucauuguggaa

SEQ ID NO: 1610748 - RNA, 19 nt, Artificial Sequence
  Description of Artificial Sequence: Synthetic oligonucleotide
  Antisense strand to SEQ ID NO: 1610747
uuccacaaugagaauucaa

SEQ ID NO: 1610749 - RNA, 19 nt, Artificial Sequence
  Description of Artificial Sequence: Synthetic oligonucleotide
  Sense strand starting at position 473 of SEQ ID NO: 1560594
guguauaugcaauggaaua

SEQ ID NO: 1610750 - RNA, 19 nt, Artificial Sequence
  Description of Artificial Sequence: Synthetic oligonucleotide
  Antisense strand to SEQ ID NO: 1610749
uauuccauugcauauacac

SEQ ID NO: 1610751 - RNA, 19 nt, Artificial Sequence
  Description of Artificial Sequence: Synthetic oligonucleotide
  Sense strand starting at position 511 of SEQ ID NO: 1560594
gaaggacauucugucauuc

SEQ ID NO: 1610752 - RNA, 19 nt, Artificial Sequence
  Description of Artificial Sequence: Synthetic oligonucleotide
  Antisense strand to SEQ ID NO: 1610751
gaaugacagaauguccuuc

SEQ ID NO: 1610753 - RNA, 19 nt, Artificial Sequence
  Description of Artificial Sequence: Synthetic oligonucleotide
  Sense strand starting at position 554 of SEQ ID NO: 1560594
acguuaggcuaagugaaau

SEQ ID NO: 1610754 - RNA, 19 nt, Artificial Sequence
  Description of Artificial Sequence: Synthetic oligonucleotide
  Antisense strand to SEQ ID NO: 1610753
auuucacuuagccuaacgu

SEQ ID NO: 1610755 - RNA, 19 nt, Artificial Sequence
  Description of Artificial Sequence: Synthetic oligonucleotide
  Sense strand starting at position 591 of SEQ ID NO: 1560594
caauuacugcgcguucuca

SEQ ID NO: 1610756 - RNA, 19 nt, Artificial Sequence
  Description of Artificial Sequence: Synthetic oligonucleotide
  Antisense strand to SEQ ID NO: 1610755
ugagaacgcgcaguaauug

SEQ ID NO: 1610757 - RNA, 19 nt, Artificial Sequence
  Description of Artificial Sequence: Synthetic oligonucleotide
  Sense strand starting at position 599 of SEQ ID NO: 1560594
gcgcguucucacuuaucug

SEQ ID NO: 1610758 - RNA, 19 nt, Artificial Sequence
  Description of Artificial Sequence: Synthetic oligonucleotide
  Antisense strand to SEQ ID NO: 1610757
cagauaagugagaacgcgc

SEQ ID NO: 1610759 - RNA, 19 nt, Artificial Sequence
  Description of Artificial Sequence: Synthetic oligonucleotide
  Sense strand starting at position 632 of SEQ ID NO: 1560594
aguugaucacccggaagca

SEQ ID NO: 1610760 - RNA, 19 nt, Artificial Sequence
  Description of Artificial Sequence: Synthetic oligonucleotide
  Antisense strand to SEQ ID NO: 1610759
ugcuuccgggugaucaacu

SEQ ID NO: 1610761 - RNA, 19 nt, Artificial Sequence
  Description of Artificial Sequence: Synthetic oligonucleotide
  Sense strand starting at position 751 of SEQ ID NO: 1560594
agaucuauggcacagcaga

SEQ ID NO: 1610762 - RNA, 19 nt, Artificial Sequence
  Description of Artificial Sequence: Synthetic oligonucleotide
  Antisense strand to SEQ ID NO: 1610761
ucugcugugccauagaucu

SEQ ID NO: 1610763 - RNA, 19 nt, Artificial Sequence
  Description of Artificial Sequence: Synthetic oligonucleotide
  Sense strand starting at position 838 of SEQ ID NO: 1560594
ucacaauaaguaugugaug

SEQ ID NO: 1610764 - RNA, 19 nt, Artificial Sequence
  Description of Artificial Sequence: Synthetic oligonucleotide
  Antisense strand to SEQ ID NO: 1610763
caucacauacuuauuguga

SEQ ID NO: 1610765 - RNA, 19 nt, Artificial Sequence
  Description of Artificial Sequence: Synthetic oligonucleotide
  Sense strand starting at position 860 of SEQ ID NO: 1560594
cugauauguuaaucagcuu

SEQ ID NO: 1610766 - RNA, 19 nt, Artificial Sequence
  Description of Artificial Sequence: Synthetic oligonucleotide
  Antisense strand to SEQ ID NO: 1610765
aagcugauuaacauaucag

SEQ ID NO: 1610767 - RNA, 19 nt, Artificial Sequence
  Description of Artificial Sequence: Synthetic oligonucleotide
  Sense strand starting at position 898 of SEQ ID NO: 1560594
guguacauacgucauaaua

SEQ ID NO: 1610768 - RNA, 19 nt, Artificial Sequence
  Description of Artificial Sequence: Synthetic oligonucleotide
  Antisense strand to SEQ ID NO: 1610767
uauuaugacguauguacac

SEQ ID NO: 1610769 - RNA, 19 nt, Artificial Sequence
  Description of Artificial Sequence: Synthetic oligonucleotide
  Sense strand starting at position 1017 of SEQ ID NO: 1560594
cugggugaggguugguuau

SEQ ID NO: 1610770 - RNA, 19 nt, Artificial Sequence
  Description of Artificial Sequence: Synthetic oligonucleotide
  Antisense strand to SEQ ID NO: 1610769
auaaccaacccucacccag

SEQ ID NO: 1610771 - RNA, 19 nt, Artificial Sequence
  Description of Artificial Sequence: Synthetic oligonucleotide
  Sense strand starting at position 1046 of SEQ ID NO: 1560594
uuuggaagaguuugcaauc

SEQ ID NO: 1610772 - RNA, 19 nt, Artificial Sequence
  Description of Artificial Sequence: Synthetic oligonucleotide
  Antisense strand to SEQ ID NO: 1610771
gauugcaaacucuuccaaa

SEQ ID NO: 1610773 - RNA, 19 nt, Artificial Sequence
  Description of Artificial Sequence: Synthetic oligonucleotide
  Sense strand starting at position 1047 of SEQ ID NO: 1560594
uuggaagaguuugcaaucu

SEQ ID NO: 1610774 - RNA, 19 nt, Artificial Sequence
  Description of Artificial Sequence: Synthetic oligonucleotide
  Antisense strand to SEQ ID NO: 1610773
agauugcaaacucuuccaa

SEQ ID NO: 1610775 - RNA, 19 nt, Artificial Sequence
  Description of Artificial Sequence: Synthetic oligonucleotide
  Sense strand starting at position 1053 of SEQ ID NO: 1560594
gaguuugcaaucuagggua

SEQ ID NO: 1610776 - RNA, 19 nt, Artificial Sequence
  Description of Artificial Sequence: Synthetic oligonucleotide
  Antisense strand to SEQ ID NO: 1610775
uacccuagauugcaaacuc

SEQ ID NO: 1610777 - RNA, 19 nt, Artificial Sequence
  Description of Artificial Sequence: Synthetic oligonucleotide
  Sense strand starting at position 1055 of SEQ ID NO: 1560594
guuugcaaucuaggguaua

SEQ ID NO: 1610778 - RNA, 19 nt, Artificial Sequence
  Description of Artificial Sequence: Synthetic oligonucleotide
  Antisense strand to SEQ ID NO: 1610777
uauacccuagauugcaaac

SEQ ID NO: 1610779 - RNA, 19 nt, Artificial Sequence
  Description of Artificial Sequence: Synthetic oligonucleotide
  Sense strand starting at position 1344 of SEQ ID NO: 1560594
acaucacugucuccaugua

SEQ ID NO: 1610780 - RNA, 19 nt, Artificial Sequence
  Description of Artificial Sequence: Synthetic oligonucleotide
  Antisense strand to SEQ ID NO: 1610779
uacauggagacagugaugu

SEQ ID NO: 1610781 - RNA, 19 nt, Artificial Sequence
  Description of Artificial Sequence: Synthetic oligonucleotide
  Sense strand starting at position 1586 of SEQ ID NO: 1560594
caggcuugagcagggaauu

SEQ ID NO: 1610782 - RNA, 19 nt, Artificial Sequence
  Description of Artificial Sequence: Synthetic oligonucleotide
  Antisense strand to SEQ ID NO: 1610781
aauucccugcucaagccug

SEQ ID NO: 1610783 - RNA, 19 nt, Artificial Sequence
  Description of Artificial Sequence: Synthetic oligonucleotide
  Sense strand starting at position 1739 of SEQ ID NO: 1560594
gacagaacucugcagcaga

SEQ ID NO: 1610784 - RNA, 19 nt, Artificial Sequence
  Description of Artificial Sequence: Synthetic oligonucleotide
  Antisense strand to SEQ ID NO: 1610783
ucugcugcagaguucuguc

SEQ ID NO: 1610785 - RNA, 19 nt, Artificial Sequence
  Description of Artificial Sequence: Synthetic oligonucleotide
  Sense strand starting at position 1933 of SEQ ID NO: 1560594
ggcagaugaccguaaacua

SEQ ID NO: 1610786 - RNA, 19 nt, Artificial Sequence
  Description of Artificial Sequence: Synthetic oligonucleotide
  Antisense strand to SEQ ID NO: 1610785
uaguuuacggucaucugcc

SEQ ID NO: 1610787 - RNA, 19 nt, Artificial Sequence
  Description of Artificial Sequence: Synthetic oligonucleotide
  Sense strand starting at position 1949 of SEQ ID NO: 1560594
cuaguuaccagauguguca

SEQ ID NO: 1610788 - RNA, 19 nt, Artificial Sequence
  Description of Artificial Sequence: Synthetic oligonucleotide
  Antisense strand to SEQ ID NO: 1610787
ugacacaucugguaacuag

SEQ ID NO: 1610789 - RNA, 19 nt, Artificial Sequence
  Description of Artificial Sequence: Synthetic oligonucleotide
  Sense strand starting at position 1973 of SEQ ID NO: 1560594
uuucuaaaucuaugggaca

SEQ ID NO: 1610790 - RNA, 19 nt, Artificial Sequence
  Description of Artificial Sequence: Synthetic oligonucleotide
  Antisense strand to SEQ ID NO: 1610789
ugucccauagauuuagaaa

SEQ ID NO: 1610791 - RNA, 19 nt, Artificial Sequence
  Description of Artificial Sequence: Synthetic oligonucleotide
  Sense strand starting at position 2032 of SEQ ID NO: 1560594
gucccaacuccacaaguua

SEQ ID NO: 1610792 - RNA, 19 nt, Artificial Sequence
  Description of Artificial Sequence: Synthetic oligonucleotide
  Antisense strand to SEQ ID NO: 1610791
uaacuuguggaguugggac

SEQ ID NO: 1610793 - RNA, 19 nt, Artificial Sequence
  Description of Artificial Sequence: Synthetic oligonucleotide
  Sense strand starting at position 2089 of SEQ ID NO: 1560594
agcugacauuuccuuguau

SEQ ID NO: 1610794 - RNA, 19 nt, Artificial Sequence
  Description of Artificial Sequence: Synthetic oligonucleotide
  Antisense strand to SEQ ID NO: 1610793
auacaaggaaaugucagcu

SEQ ID NO: 1610795 - RNA, 19 nt, Artificial Sequence
  Description of Artificial Sequence: Synthetic oligonucleotide
  Sense strand starting at position 2090 of SEQ ID NO: 1560594
gcugacauuuccuuguauu

SEQ ID NO: 1610796 - RNA, 19 nt, Artificial Sequence
  Description of Artificial Sequence: Synthetic oligonucleotide
  Antisense strand to SEQ ID NO: 1610795
aauacaaggaaaugucagc

SEQ ID NO: 1610797 - RNA, 19 nt, Artificial Sequence
  Description of Artificial Sequence: Synthetic oligonucleotide
  Sense strand starting at position 2144 of SEQ ID NO: 1560594
uuaauauugugaucuaugc

SEQ ID NO: 1610798 - RNA, 19 nt, Artificial Sequence
  Description of Artificial Sequence: Synthetic oligonucleotide
  Antisense strand to SEQ ID NO: 1610797
gcauagaucacaauauuaa

SEQ ID NO: 1610799 - RNA, 19 nt, Artificial Sequence
  Description of Artificial Sequence: Synthetic oligonucleotide
  Sense strand starting at position 3039 of SEQ ID NO: 1560594
agagaucugcugcaccaca

SEQ ID NO: 1610800 - RNA, 19 nt, Artificial Sequence
  Description of Artificial Sequence: Synthetic oligonucleotide
  Antisense strand to SEQ ID NO: 1610799
uguggugcagcagaucucu

SEQ ID NO: 1610801 - RNA, 19 nt, Artificial Sequence
  Description of Artificial Sequence: Synthetic oligonucleotide
  Sense strand starting at position 3061 of SEQ ID NO: 1560594
gacccaucgucagcaauaa

SEQ ID NO: 1610802 - RNA, 19 nt, Artificial Sequence
  Description of Artificial Sequence: Synthetic oligonucleotide
  Antisense strand to SEQ ID NO: 1610801
uuauugcugacgauggguc

SEQ ID NO: 1610803 - RNA, 19 nt, Artificial Sequence
  Description of Artificial Sequence: Synthetic oligonucleotide
  Sense strand starting at position 3091 of SEQ ID NO: 1560594
cuugaaauuuguuaacgga

SEQ ID NO: 1610804 - RNA, 19 nt, Artificial Sequence
  Description of Artificial Sequence: Synthetic oligonucleotide
  Antisense strand to SEQ ID NO: 1610803
uccguuaacaaauuucaag

SEQ ID NO: 1610805 - RNA, 19 nt, Artificial Sequence
  Description of Artificial Sequence: Synthetic oligonucleotide
  Sense strand starting at position 3094 of SEQ ID NO: 1560594
gaaauuuguuaacggaaua

SEQ ID NO: 1610806 - RNA, 19 nt, Artificial Sequence
  Description of Artificial Sequence: Synthetic oligonucleotide
  Antisense strand to SEQ ID NO: 1610805
uauuccguuaacaaauuuc

SEQ ID NO: 1610807 - RNA, 19 nt, Artificial Sequence
  Description of Artificial Sequence: Synthetic oligonucleotide
  Sense strand starting at position 3106 of SEQ ID NO: 1560594
cggaauagaccucauguua

SEQ ID NO: 1610808 - RNA, 19 nt, Artificial Sequence
  Description of Artificial Sequence: Synthetic oligonucleotide
  Antisense strand to SEQ ID NO: 1610807
uaacaugaggucuauuccg

SEQ ID NO: 1610809 - RNA, 19 nt, Artificial Sequence
  Description of Artificial Sequence: Synthetic oligonucleotide
  Sense strand starting at position 3212 of SEQ ID NO: 1560594
uagugaugugaacagcgaa

SEQ ID NO: 1610810 - RNA, 19 nt, Artificial Sequence
  Description of Artificial Sequence: Synthetic oligonucleotide
  Antisense strand to SEQ ID NO: 1610809
uucgcuguucacaucacua

SEQ ID NO: 1610811 - RNA, 19 nt, Artificial Sequence
  Description of Artificial Sequence: Synthetic oligonucleotide
  Sense strand starting at position 3243 of SEQ ID NO: 1560594
aaggucucagcuggaaaua

SEQ ID NO: 1610812 - RNA, 19 nt, Artificial Sequence
  Description of Artificial Sequence: Synthetic oligonucleotide
  Antisense strand to SEQ ID NO: 1610811
uauuuccagcugagaccuu

SEQ ID NO: 1610813 - RNA, 19 nt, Artificial Sequence
  Description of Artificial Sequence: Synthetic oligonucleotide
  Sense strand starting at position 3329 of SEQ ID NO: 1560594
cuguccaugcccuagagau

SEQ ID NO: 1610814 - RNA, 19 nt, Artificial Sequence
  Description of Artificial Sequence: Synthetic oligonucleotide
  Antisense strand to SEQ ID NO: 1610813
aucucuagggcauggacag

SEQ ID NO: 1610815 - RNA, 19 nt, Artificial Sequence
  Description of Artificial Sequence: Synthetic oligonucleotide
  Sense strand starting at position 3736 of SEQ ID NO: 1560594
ggcucagaugugggagcaa

SEQ ID NO: 1610816 - RNA, 19 nt, Artificial Sequence
  Description of Artificial Sequence: Synthetic oligonucleotide
  Antisense strand to SEQ ID NO: 1610815
uugcucccacaucugagcc

SEQ ID NO: 1610817 - RNA, 19 nt, Artificial Sequence
  Description of Artificial Sequence: Synthetic oligonucleotide
  Sense strand starting at position 3822 of SEQ ID NO: 1560594
ggacuagccacaugguaga

SEQ ID NO: 1610818 - RNA, 19 nt, Artificial Sequence
  Description of Artificial Sequence: Synthetic oligonucleotide
  Antisense strand to SEQ ID NO: 1610817
ucuaccauguggcuagucc

SEQ ID NO: 1610819 - RNA, 19 nt, Artificial Sequence
  Description of Artificial Sequence: Synthetic oligonucleotide
  Sense strand starting at position 3887 of SEQ ID NO: 1560594
caacgacuugcuggagaaa

SEQ ID NO: 1610820 - RNA, 19 nt, Artificial Sequence
  Description of Artificial Sequence: Synthetic oligonucleotide
  Antisense strand to SEQ ID NO: 1610819
uuucuccagcaagucguug

SEQ ID NO: 1610821 - RNA, 19 nt, Artificial Sequence
  Description of Artificial Sequence: Synthetic oligonucleotide
  Sense strand starting at position 58 of SEQ ID NO: 1560595
ucagaagauuccucaugcu

SEQ ID NO: 1610822 - RNA, 19 nt, Artificial Sequence
  Description of Artificial Sequence: Synthetic oligonucleotide
  Antisense strand to SEQ ID NO: 1610821
agcaugaggaaucuucuga

SEQ ID NO: 1610823 - RNA, 19 nt, Artificial Sequence
  Description of Artificial Sequence: Synthetic oligonucleotide
  Sense strand starting at position 453 of SEQ ID NO: 1560595
acuucuuaccugggaauaa

SEQ ID NO: 1610824 - RNA, 19 nt, Artificial Sequence
  Description of Artificial Sequence: Synthetic oligonucleotide
  Antisense strand to SEQ ID NO: 1610823
uuauucccagguaagaagu

SEQ ID NO: 1610825 - RNA, 19 nt, Artificial Sequence
  Description of Artificial Sequence: Synthetic oligonucleotide
  Sense strand starting at position 708 of SEQ ID NO: 1560595
cucuguuaacugcagagaa

SEQ ID NO: 1610826 - RNA, 19 nt, Artificial Sequence
  Description of Artificial Sequence: Synthetic oligonucleotide
  Antisense strand to SEQ ID NO: 1610825
uucucugcaguuaacagag

SEQ ID NO: 1610827 - RNA, 19 nt, Artificial Sequence
  Description of Artificial Sequence: Synthetic oligonucleotide
  Sense strand starting at position 741 of SEQ ID NO: 1560595
cugguuggacccugauuaa

SEQ ID NO: 1610828 - RNA, 19 nt, Artificial Sequence
  Description of Artificial Sequence: Synthetic oligonucleotide
  Antisense strand to SEQ ID NO: 1610827
uuaaucaggguccaaccag

SEQ ID NO: 1610829 - RNA, 19 nt, Artificial Sequence
  Description of Artificial Sequence: Synthetic oligonucleotide
  Sense strand starting at position 744 of SEQ ID NO: 1560595
guuggacccugauuaauau

SEQ ID NO: 1610830 - RNA, 19 nt, Artificial Sequence
  Description of Artificial Sequence: Synthetic oligonucleotide
  Antisense strand to SEQ ID NO: 1610829
auauuaaucaggguccaac

SEQ ID NO: 1610831 - RNA, 19 nt, Artificial Sequence
  Description of Artificial Sequence: Synthetic oligonucleotide
  Sense strand starting at position 931 of SEQ ID NO: 1560595
agagcugucguuguuccau

SEQ ID NO: 1610832 - RNA, 19 nt, Artificial Sequence
  Description of Artificial Sequence: Synthetic oligonucleotide
  Antisense strand to SEQ ID NO: 1610831
auggaacaacgacagcucu

SEQ ID NO: 1610833 - RNA, 19 nt, Artificial Sequence
  Description of Artificial Sequence: Synthetic oligonucleotide
  Sense strand starting at position 934 of SEQ ID NO: 1560595
gcugucguuguuccauauu

SEQ ID NO: 1610834 - RNA, 19 nt, Artificial Sequence
  Description of Artificial Sequence: Synthetic oligonucleotide
  Antisense strand to SEQ ID NO: 1610833
aauauggaacaacgacagc

SEQ ID NO: 1610835 - RNA, 19 nt, Artificial Sequence
  Description of Artificial Sequence: Synthetic oligonucleotide
  Sense strand starting at position 984 of SEQ ID NO: 1560595
agaccuuuccucugagacu

SEQ ID NO: 1610836 - RNA, 19 nt, Artificial Sequence
  Description of Artificial Sequence: Synthetic oligonucleotide
  Antisense strand to SEQ ID NO: 1610835
agucucagaggaaaggucu

SEQ ID NO: 1610837 - RNA, 19 nt, Artificial Sequence
  Description of Artificial Sequence: Synthetic oligonucleotide
  Sense strand starting at position 1183 of SEQ ID NO: 1560595
uuaaaugucaaguggaaag

SEQ ID NO: 1610838 - RNA, 19 nt, Artificial Sequence
  Description of Artificial Sequence: Synthetic oligonucleotide
  Antisense strand to SEQ ID NO: 1610837
cuuuccacuugacauuuaa

SEQ ID NO: 1610839 - RNA, 19 nt, Artificial Sequence
  Description of Artificial Sequence: Synthetic oligonucleotide
  Sense strand starting at position 1334 of SEQ ID NO: 1560595
ugagauguggucgccguaa

SEQ ID NO: 1610840 - RNA, 19 nt, Artificial Sequence
  Description of Artificial Sequence: Synthetic oligonucleotide
  Antisense strand to SEQ ID NO: 1610839
uuacggcgaccacaucuca

SEQ ID NO: 1610841 - RNA, 19 nt, Artificial Sequence
  Description of Artificial Sequence: Synthetic oligonucleotide
  Sense strand starting at position 1339 of SEQ ID NO: 1560595
uguggucgccguaaugauc

SEQ ID NO: 1610842 - RNA, 19 nt, Artificial Sequence
  Description of Artificial Sequence: Synthetic oligonucleotide
  Antisense strand to SEQ ID NO: 1610841
gaucauuacggcgaccaca

SEQ ID NO: 1610843 - RNA, 19 nt, Artificial Sequence
  Description of Artificial Sequence: Synthetic oligonucleotide
  Sense strand starting at position 1518 of SEQ ID NO: 1560595
uacagaaucugagucuaga

SEQ ID NO: 1610844 - RNA, 19 nt, Artificial Sequence
  Description of Artificial Sequence: Synthetic oligonucleotide
  Antisense strand to SEQ ID NO: 1610843
ucuagacucagauucugua

SEQ ID NO: 1610845 - RNA, 19 nt, Artificial Sequence
  Description of Artificial Sequence: Synthetic oligonucleotide
  Sense strand starting at position 1797 of SEQ ID NO: 1560595
uggcuuuguccugaauauu

SEQ ID NO: 1610846 - RNA, 19 nt, Artificial Sequence
  Description of Artificial Sequence: Synthetic oligonucleotide
  Antisense strand to SEQ ID NO: 1610845
aauauucaggacaaagcca

SEQ ID NO: 1610847 - RNA, 19 nt, Artificial Sequence
  Description of Artificial Sequence: Synthetic oligonucleotide
  Sense strand starting at position 1848 of SEQ ID NO: 1560595
ggaugaacuuggcuuucca

SEQ ID NO: 1610848 - RNA, 19 nt, Artificial Sequence
  Description of Artificial Sequence: Synthetic oligonucleotide
  Antisense strand to SEQ ID NO: 1610847
uggaaagccaaguucaucc

SEQ ID NO: 1610849 - RNA, 19 nt, Artificial Sequence
  Description of Artificial Sequence: Synthetic oligonucleotide
  Sense strand starting at position 1967 of SEQ ID NO: 1560595
gggugucauagaugugaaa

SEQ ID NO: 1610850 - RNA, 19 nt, Artificial Sequence
  Description of Artificial Sequence: Synthetic oligonucleotide
  Antisense strand to SEQ ID NO: 1610849
uuucacaucuaugacaccc

SEQ ID NO: 1610851 - RNA, 19 nt, Artificial Sequence
  Description of Artificial Sequence: Synthetic oligonucleotide
  Sense strand starting at position 2125 of SEQ ID NO: 1560595
cuguauacgucuccgauuu

SEQ ID NO: 1610852 - RNA, 19 nt, Artificial Sequence
  Description of Artificial Sequence: Synthetic oligonucleotide
  Antisense strand to SEQ ID NO: 1610851
aaaucggagacguauacag

SEQ ID NO: 1610853 - RNA, 19 nt, Artificial Sequence
  Description of Artificial Sequence: Synthetic oligonucleotide
  Sense strand starting at position 2244 of SEQ ID NO: 1560595
ccuaauuagugccugacaa

SEQ ID NO: 1610854 - RNA, 19 nt, Artificial Sequence
  Description of Artificial Sequence: Synthetic oligonucleotide
  Antisense strand to SEQ ID NO: 1610853
uugucaggcacuaauuagg

SEQ ID NO: 1610855 - RNA, 19 nt, Artificial Sequence
  Description of Artificial Sequence: Synthetic oligonucleotide
  Sense strand starting at position 2245 of SEQ ID NO: 1560595
cuaauuagugccugacaag

SEQ ID NO: 1610856 - RNA, 19 nt, Artificial Sequence
  Description of Artificial Sequence: Synthetic oligonucleotide
  Antisense strand to SEQ ID NO: 1610855
cuugucaggcacuaauuag

SEQ ID NO: 1610857 - RNA, 19 nt, Artificial Sequence
  Description of Artificial Sequence: Synthetic oligonucleotide
  Sense strand starting at position 2246 of SEQ ID NO: 1560595
uaauuagugccugacaaga

SEQ ID NO: 1610858 - RNA, 19 nt, Artificial Sequence
  Description of Artificial Sequence: Synthetic oligonucleotide
  Antisense strand to SEQ ID NO: 1610857
ucuugucaggcacuaauua

SEQ ID NO: 1610859 - RNA, 19 nt, Artificial Sequence
  Description of Artificial Sequence: Synthetic oligonucleotide
  Sense strand starting at position 2425 of SEQ ID NO: 1560595
cagagagcugauugucaag

SEQ ID NO: 1610860 - RNA, 19 nt, Artificial Sequence
  Description of Artificial Sequence: Synthetic oligonucleotide
  Antisense strand to SEQ ID NO: 1610859
cuugacaaucagcucucug

SEQ ID NO: 1610861 - RNA, 19 nt, Artificial Sequence
  Description of Artificial Sequence: Synthetic oligonucleotide
  Sense strand starting at position 2431 of SEQ ID NO: 1560595
gcugauugucaagacuuua

SEQ ID NO: 1610862 - RNA, 19 nt, Artificial Sequence
  Description of Artificial Sequence: Synthetic oligonucleotide
  Antisense strand to SEQ ID NO: 1610861
uaaagucuugacaaucagc

SEQ ID NO: 1610863 - RNA, 19 nt, Artificial Sequence
  Description of Artificial Sequence: Synthetic oligonucleotide
  Sense strand starting at position 2558 of SEQ ID NO: 1560595
auugauaaagcaugucuau

SEQ ID NO: 1610864 - RNA, 19 nt, Artificial Sequence
  Description of Artificial Sequence: Synthetic oligonucleotide
  Antisense strand to SEQ ID NO: 1610863
auagacaugcuuuaucaau

SEQ ID NO: 1610865 - RNA, 19 nt, Artificial Sequence
  Description of Artificial Sequence: Synthetic oligonucleotide
  Sense strand starting at position 2567 of SEQ ID NO: 1560595
gcaugucuauuucuguagu

SEQ ID NO: 1610866 - RNA, 19 nt, Artificial Sequence
  Description of Artificial Sequence: Synthetic oligonucleotide
  Antisense strand to SEQ ID NO: 1610865
acuacagaaauagacaugc

SEQ ID NO: 1610867 - RNA, 19 nt, Artificial Sequence
  Description of Artificial Sequence: Synthetic oligonucleotide
  Sense strand starting at position 2570 of SEQ ID NO: 1560595
ugucuauuucuguagugua

SEQ ID NO: 1610868 - RNA, 19 nt, Artificial Sequence
  Description of Artificial Sequence: Synthetic oligonucleotide
  Antisense strand to SEQ ID NO: 1610867
uacacuacagaaauagaca

SEQ ID NO: 1610869 - RNA, 19 nt, Artificial Sequence
  Description of Artificial Sequence: Synthetic oligonucleotide
  Sense strand starting at position 2698 of SEQ ID NO: 1560595
accuauuugguguguaugu

SEQ ID NO: 1610870 - RNA, 19 nt, Artificial Sequence
  Description of Artificial Sequence: Synthetic oligonucleotide
  Antisense strand to SEQ ID NO: 1610869
acauacacaccaaauaggu

SEQ ID NO: 1610871 - RNA, 19 nt, Artificial Sequence
  Description of Artificial Sequence: Synthetic oligonucleotide
  Sense strand starting at position 2699 of SEQ ID NO: 1560595
ccuauuugguguguaugua

SEQ ID NO: 1610872 - RNA, 19 nt, Artificial Sequence
  Description of Artificial Sequence: Synthetic oligonucleotide
  Antisense strand to SEQ ID NO: 1610871
uacauacacaccaaauagg

SEQ ID NO: 1610873 - RNA, 19 nt, Artificial Sequence
  Description of Artificial Sequence: Synthetic oligonucleotide
  Sense strand starting at position 2700 of SEQ ID NO: 1560595
cuauuugguguguauguau

SEQ ID NO: 1610874 - RNA, 19 nt, Artificial Sequence
  Description of Artificial Sequence: Synthetic oligonucleotide
  Antisense strand to SEQ ID NO: 1610873
auacauacacaccaaauag

SEQ ID NO: 1610875 - RNA, 19 nt, Artificial Sequence
  Description of Artificial Sequence: Synthetic oligonucleotide
  Sense strand starting at position 2875 of SEQ ID NO: 1560595
ugggauuauaaggguguga

SEQ ID NO: 1610876 - RNA, 19 nt, Artificial Sequence
  Description of Artificial Sequence: Synthetic oligonucleotide
  Antisense strand to SEQ ID NO: 1610875
ucacacccuuauaauccca

SEQ ID NO: 1610877 - RNA, 19 nt, Artificial Sequence
  Description of Artificial Sequence: Synthetic oligonucleotide
  Sense strand starting at position 3362 of SEQ ID NO: 1560595
gcuuauuucguguagugau

SEQ ID NO: 1610878 - RNA, 19 nt, Artificial Sequence
  Description of Artificial Sequence: Synthetic oligonucleotide
  Antisense strand to SEQ ID NO: 1610877
aucacuacacgaaauaagc

SEQ ID NO: 1610879 - RNA, 19 nt, Artificial Sequence
  Description of Artificial Sequence: Synthetic oligonucleotide
  Sense strand starting at position 3370 of SEQ ID NO: 1560595
cguguagugauauacauug

SEQ ID NO: 1610880 - RNA, 19 nt, Artificial Sequence
  Description of Artificial Sequence: Synthetic oligonucleotide
  Antisense strand to SEQ ID NO: 1610879
caauguauaucacuacacg

SEQ ID NO: 1610881 - RNA, 19 nt, Artificial Sequence
  Description of Artificial Sequence: Synthetic oligonucleotide
  Sense strand starting at position 3375 of SEQ ID NO: 1560595
agugauauacauugaacuc

SEQ ID NO: 1610882 - RNA, 19 nt, Artificial Sequence
  Description of Artificial Sequence: Synthetic oligonucleotide
  Antisense strand to SEQ ID NO: 1610881
gaguucaauguauaucacu

SEQ ID NO: 1610883 - RNA, 19 nt, Artificial Sequence
  Description of Artificial Sequence: Synthetic oligonucleotide
  Sense strand starting at position 3428 of SEQ ID NO: 1560595
ucuucuuagcaugggauaa

SEQ ID NO: 1610884 - RNA, 19 nt, Artificial Sequence
  Description of Artificial Sequence: Synthetic oligonucleotide
  Antisense strand to SEQ ID NO: 1610883
uuaucccaugcuaagaaga

SEQ ID NO: 1610885 - RNA, 19 nt, Artificial Sequence
  Description of Artificial Sequence: Synthetic oligonucleotide
  Sense strand starting at position 3449 of SEQ ID NO: 1560595
uuccauugucuggacacau

SEQ ID NO: 1610886 - RNA, 19 nt, Artificial Sequence
  Description of Artificial Sequence: Synthetic oligonucleotide
  Antisense strand to SEQ ID NO: 1610885
auguguccagacaauggaa

SEQ ID NO: 1610887 - RNA, 19 nt, Artificial Sequence
  Description of Artificial Sequence: Synthetic oligonucleotide
  Sense strand starting at position 3567 of SEQ ID NO: 1560595
agcucccuucgguaaauau

SEQ ID NO: 1610888 - RNA, 19 nt, Artificial Sequence
  Description of Artificial Sequence: Synthetic oligonucleotide
  Antisense strand to SEQ ID NO: 1610887
auauuuaccgaagggagcu

SEQ ID NO: 1610889 - RNA, 19 nt, Artificial Sequence
  Description of Artificial Sequence: Synthetic oligonucleotide
  Sense strand starting at position 3592 of SEQ ID NO: 1560595
augcaauugcuggauuaca

SEQ ID NO: 1610890 - RNA, 19 nt, Artificial Sequence
  Description of Artificial Sequence: Synthetic oligonucleotide
  Antisense strand to SEQ ID NO: 1610889
uguaauccagcaauugcau

SEQ ID NO: 1610891 - RNA, 19 nt, Artificial Sequence
  Description of Artificial Sequence: Synthetic oligonucleotide
  Sense strand starting at position 3600 of SEQ ID NO: 1560595
gcuggauuacauggcaaag

SEQ ID NO: 1610892 - RNA, 19 nt, Artificial Sequence
  Description of Artificial Sequence: Synthetic oligonucleotide
  Antisense strand to SEQ ID NO: 1610891
cuuugccauguaauccagc

SEQ ID NO: 1610893 - RNA, 19 nt, Artificial Sequence
  Description of Artificial Sequence: Synthetic oligonucleotide
  Sense strand starting at position 3663 of SEQ ID NO: 1560595
ggcuguaccauuuggcaau

SEQ ID NO: 1610894 - RNA, 19 nt, Artificial Sequence
  Description of Artificial Sequence: Synthetic oligonucleotide
  Antisense strand to SEQ ID NO: 1610893
auugccaaaugguacagcc

SEQ ID NO: 1610895 - RNA, 19 nt, Artificial Sequence
  Description of Artificial Sequence: Synthetic oligonucleotide
  Sense strand starting at position 3778 of SEQ ID NO: 1560595
aggugugucgugguaacuu

SEQ ID NO: 1610896 - RNA, 19 nt, Artificial Sequence
  Description of Artificial Sequence: Synthetic oligonucleotide
  Antisense strand to SEQ ID NO: 1610895
aaguuaccacgacacaccu

SEQ ID NO: 1610897 - RNA, 19 nt, Artificial Sequence
  Description of Artificial Sequence: Synthetic oligonucleotide
  Sense strand starting at position 3790 of SEQ ID NO: 1560595
guaacuugguuccuaagau

SEQ ID NO: 1610898 - RNA, 19 nt, Artificial Sequence
  Description of Artificial Sequence: Synthetic oligonucleotide
  Antisense strand to SEQ ID NO: 1610897
aucuuaggaaccaaguuac

SEQ ID NO: 1610899 - RNA, 19 nt, Artificial Sequence
  Description of Artificial Sequence: Synthetic oligonucleotide
  Sense strand starting at position 3848 of SEQ ID NO: 1560595
gaaugagcuucuccuguga

SEQ ID NO: 1610900 - RNA, 19 nt, Artificial Sequence
  Description of Artificial Sequence: Synthetic oligonucleotide
  Antisense strand to SEQ ID NO: 1610899
ucacaggagaagcucauuc

SEQ ID NO: 1610901 - RNA, 19 nt, Artificial Sequence
  Description of Artificial Sequence: Synthetic oligonucleotide
  Sense strand starting at position 194 of SEQ ID NO: 1560596
ggucaucucacagaguuag

SEQ ID NO: 1610902 - RNA, 19 nt, Artificial Sequence
  Description of Artificial Sequence: Synthetic oligonucleotide
  Antisense strand to SEQ ID NO: 1610901
cuaacucugugagaugacc

SEQ ID NO: 1610903 - RNA, 19 nt, Artificial Sequence
  Description of Artificial Sequence: Synthetic oligonucleotide
  Sense strand starting at position 200 of SEQ ID NO: 1560596
cucacagaguuagagauua

SEQ ID NO: 1610904 - RNA, 19 nt, Artificial Sequence
  Description of Artificial Sequence: Synthetic oligonucleotide
  Antisense strand to SEQ ID NO: 1610903
uaaucucuaacucugugag

SEQ ID NO: 1610905 - RNA, 19 nt, Artificial Sequence
  Description of Artificial Sequence: Synthetic oligonucleotide
  Sense strand starting at position 219 of SEQ ID NO: 1560596
gaaugaugcuauuaaaguc

SEQ ID NO: 1610906 - RNA, 19 nt, Artificial Sequence
  Description of Artificial Sequence: Synthetic oligonucleotide
  Antisense strand to SEQ ID NO: 1610905
gacuuuaauagcaucauuc

SEQ ID NO: 1610907 - RNA, 19 nt, Artificial Sequence
  Description of Artificial Sequence: Synthetic oligonucleotide
  Sense strand starting at position 225 of SEQ ID NO: 1560596
ugcuauuaaagucgggaaa

SEQ ID NO: 1610908 - RNA, 19 nt, Artificial Sequence
  Description of Artificial Sequence: Synthetic oligonucleotide
  Antisense strand to SEQ ID NO: 1610907
uuucccgacuuuaauagca

SEQ ID NO: 1610909 - RNA, 19 nt, Artificial Sequence
  Description of Artificial Sequence: Synthetic oligonucleotide
  Sense strand starting at position 226 of SEQ ID NO: 1560596
gcuauuaaagucgggaaau

SEQ ID NO: 1610910 - RNA, 19 nt, Artificial Sequence
  Description of Artificial Sequence: Synthetic oligonucleotide
  Antisense strand to SEQ ID NO: 1610909
auuucccgacuuuaauagc

SEQ ID NO: 1610911 - RNA, 19 nt, Artificial Sequence
  Description of Artificial Sequence: Synthetic oligonucleotide
  Sense strand starting at position 276 of SEQ ID NO: 1560596
uacaaaguuucgguuaaac

SEQ ID NO: 1610912 - RNA, 19 nt, Artificial Sequence
  Description of Artificial Sequence: Synthetic oligonucleotide
  Antisense strand to SEQ ID NO: 1610911
guuuaaccgaaacuuugua

SEQ ID NO: 1610913 - RNA, 19 nt, Artificial Sequence
  Description of Artificial Sequence: Synthetic oligonucleotide
  Sense strand starting at position 278 of SEQ ID NO: 1560596
caaaguuucgguuaaacag

SEQ ID NO: 1610914 - RNA, 19 nt, Artificial Sequence
  Description of Artificial Sequence: Synthetic oligonucleotide
  Antisense strand to SEQ ID NO: 1610913
cuguuuaaccgaaacuuug

SEQ ID NO: 1610915 - RNA, 19 nt, Artificial Sequence
  Description of Artificial Sequence: Synthetic oligonucleotide
  Sense strand starting at position 327 of SEQ ID NO: 1560596
gcaggcugacuauaguuaa

SEQ ID NO: 1610916 - RNA, 19 nt, Artificial Sequence
  Description of Artificial Sequence: Synthetic oligonucleotide
  Antisense strand to SEQ ID NO: 1610915
uuaacuauagucagccugc

SEQ ID NO: 1610917 - RNA, 19 nt, Artificial Sequence
  Description of Artificial Sequence: Synthetic oligonucleotide
  Sense strand starting at position 330 of SEQ ID NO: 1560596
ggcugacuauaguuaauaa

SEQ ID NO: 1610918 - RNA, 19 nt, Artificial Sequence
  Description of Artificial Sequence: Synthetic oligonucleotide
  Antisense strand to SEQ ID NO: 1610917
uuauuaacuauagucagcc

SEQ ID NO: 1610919 - RNA, 19 nt, Artificial Sequence
  Description of Artificial Sequence: Synthetic oligonucleotide
  Sense strand starting at position 400 of SEQ ID NO: 1560596
ucacaauaaguaugugaug

SEQ ID NO: 1610920 - RNA, 19 nt, Artificial Sequence
  Description of Artificial Sequence: Synthetic oligonucleotide
  Antisense strand to SEQ ID NO: 1610919
caucacauacuuauuguga

SEQ ID NO: 1610921 - RNA, 19 nt, Artificial Sequence
  Description of Artificial Sequence: Synthetic oligonucleotide
  Sense strand starting at position 407 of SEQ ID NO: 1560596
aaguaugugaugugauuga

SEQ ID NO: 1610922 - RNA, 19 nt, Artificial Sequence
  Description of Artificial Sequence: Synthetic oligonucleotide
  Antisense strand to SEQ ID NO: 1610921
ucaaucacaucacauacuu

SEQ ID NO: 1610923 - RNA, 19 nt, Artificial Sequence
  Description of Artificial Sequence: Synthetic oligonucleotide
  Sense strand starting at position 411 of SEQ ID NO: 1560596
augugaugugauugauaug

SEQ ID NO: 1610924 - RNA, 19 nt, Artificial Sequence
  Description of Artificial Sequence: Synthetic oligonucleotide
  Antisense strand to SEQ ID NO: 1610923
cauaucaaucacaucacau

SEQ ID NO: 1610925 - RNA, 19 nt, Artificial Sequence
  Description of Artificial Sequence: Synthetic oligonucleotide
  Sense strand starting at position 422 of SEQ ID NO: 1560596
uugauauguuauuuagccu

SEQ ID NO: 1610926 - RNA, 19 nt, Artificial Sequence
  Description of Artificial Sequence: Synthetic oligonucleotide
  Antisense strand to SEQ ID NO: 1610925
aggcuaaauaacauaucaa

SEQ ID NO: 1610927 - RNA, 19 nt, Artificial Sequence
  Description of Artificial Sequence: Synthetic oligonucleotide
  Sense strand starting at position 458 of SEQ ID NO: 1560596
auguuuacauacguuguaa

SEQ ID NO: 1610928 - RNA, 19 nt, Artificial Sequence
  Description of Artificial Sequence: Synthetic oligonucleotide
  Antisense strand to SEQ ID NO: 1610927
uuacaacguauguaaacau

SEQ ID NO: 1610929 - RNA, 19 nt, Artificial Sequence
  Description of Artificial Sequence: Synthetic oligonucleotide
  Sense strand starting at position 460 of SEQ ID NO: 1560596
guuuacauacguuguaaca

SEQ ID NO: 1610930 - RNA, 19 nt, Artificial Sequence
  Description of Artificial Sequence: Synthetic oligonucleotide
  Antisense strand to SEQ ID NO: 1610929
uguuacaacguauguaaac

SEQ ID NO: 1610931 - RNA, 19 nt, Artificial Sequence
  Description of Artificial Sequence: Synthetic oligonucleotide
  Sense strand starting at position 905 of SEQ ID NO: 1560596
gggugaggguuaugcauuu

SEQ ID NO: 1610932 - RNA, 19 nt, Artificial Sequence
  Description of Artificial Sequence: Synthetic oligonucleotide
  Antisense strand to SEQ ID NO: 1610931
aaaugcauaacccucaccc

SEQ ID NO: 1610933 - RNA, 19 nt, Artificial Sequence
  Description of Artificial Sequence: Synthetic oligonucleotide
  Sense strand starting at position 928 of SEQ ID NO: 1560596
uuuggaauaguuugcaauc

SEQ ID NO: 1610934 - RNA, 19 nt, Artificial Sequence
  Description of Artificial Sequence: Synthetic oligonucleotide
  Antisense strand to SEQ ID NO: 1610933
gauugcaaacuauuccaaa

SEQ ID NO: 1610935 - RNA, 19 nt, Artificial Sequence
  Description of Artificial Sequence: Synthetic oligonucleotide
  Sense strand starting at position 929 of SEQ ID NO: 1560596
uuggaauaguuugcaaucu

SEQ ID NO: 1610936 - RNA, 19 nt, Artificial Sequence
  Description of Artificial Sequence: Synthetic oligonucleotide
  Antisense strand to SEQ ID NO: 1610935
agauugcaaacuauuccaa

SEQ ID NO: 1610937 - RNA, 19 nt, Artificial Sequence
  Description of Artificial Sequence: Synthetic oligonucleotide
  Sense strand starting at position 937 of SEQ ID NO: 1560596
guuugcaaucuaggguaua

SEQ ID NO: 1610938 - RNA, 19 nt, Artificial Sequence
  Description of Artificial Sequence: Synthetic oligonucleotide
  Antisense strand to SEQ ID NO: 1610937
uauacccuagauugcaaac

SEQ ID NO: 1610939 - RNA, 19 nt, Artificial Sequence
  Description of Artificial Sequence: Synthetic oligonucleotide
  Sense strand starting at position 1329 of SEQ ID NO: 1560596
ugguguuguuggagacgga

SEQ ID NO: 1610940 - RNA, 19 nt, Artificial Sequence
  Description of Artificial Sequence: Synthetic oligonucleotide
  Antisense strand to SEQ ID NO: 1610939
uccgucuccaacaacacca

SEQ ID NO: 1610941 - RNA, 19 nt, Artificial Sequence
  Description of Artificial Sequence: Synthetic oligonucleotide
  Sense strand starting at position 1671 of SEQ ID NO: 1560596
aggacaagguugucucuga

SEQ ID NO: 1610942 - RNA, 19 nt, Artificial Sequence
  Description of Artificial Sequence: Synthetic oligonucleotide
  Antisense strand to SEQ ID NO: 1610941
ucagagacaaccuuguccu

SEQ ID NO: 1610943 - RNA, 19 nt, Artificial Sequence
  Description of Artificial Sequence: Synthetic oligonucleotide
  Sense strand starting at position 1672 of SEQ ID NO: 1560596
ggacaagguugucucugau

SEQ ID NO: 1610944 - RNA, 19 nt, Artificial Sequence
  Description of Artificial Sequence: Synthetic oligonucleotide
  Antisense strand to SEQ ID NO: 1610943
aucagagacaaccuugucc

SEQ ID NO: 1610945 - RNA, 19 nt, Artificial Sequence
  Description of Artificial Sequence: Synthetic oligonucleotide
  Sense strand starting at position 1675 of SEQ ID NO: 1560596
caagguugucucugaucag

SEQ ID NO: 1610946 - RNA, 19 nt, Artificial Sequence
  Description of Artificial Sequence: Synthetic oligonucleotide
  Antisense strand to SEQ ID NO: 1610945
cugaucagagacaaccuug

SEQ ID NO: 1610947 - RNA, 19 nt, Artificial Sequence
  Description of Artificial Sequence: Synthetic oligonucleotide
  Sense strand starting at position 1678 of SEQ ID NO: 1560596
gguugucucugaucagacu

SEQ ID NO: 1610948 - RNA, 19 nt, Artificial Sequence
  Description of Artificial Sequence: Synthetic oligonucleotide
  Antisense strand to SEQ ID NO: 1610947
agucugaucagagacaacc

SEQ ID NO: 1610949 - RNA, 19 nt, Artificial Sequence
  Description of Artificial Sequence: Synthetic oligonucleotide
  Sense strand starting at position 1679 of SEQ ID NO: 1560596
guugucucugaucagacuu

SEQ ID NO: 1610950 - RNA, 19 nt, Artificial Sequence
  Description of Artificial Sequence: Synthetic oligonucleotide
  Antisense strand to SEQ ID NO: 1610949
aagucugaucagagacaac

SEQ ID NO: 1610951 - RNA, 19 nt, Artificial Sequence
  Description of Artificial Sequence: Synthetic oligonucleotide
  Sense strand starting at position 1752 of SEQ ID NO: 1560596
ccagaaucuucuggacuag

SEQ ID NO: 1610952 - RNA, 19 nt, Artificial Sequence
  Description of Artificial Sequence: Synthetic oligonucleotide
  Antisense strand to SEQ ID NO: 1610951
cuaguccagaagauucugg

SEQ ID NO: 1610953 - RNA, 19 nt, Artificial Sequence
  Description of Artificial Sequence: Synthetic oligonucleotide
  Sense strand starting at position 2135 of SEQ ID NO: 1560596
cagaauaaaggucgugcaa

SEQ ID NO: 1610954 - RNA, 19 nt, Artificial Sequence
  Description of Artificial Sequence: Synthetic oligonucleotide
  Antisense strand to SEQ ID NO: 1610953
uugcacgaccuuuauucug

SEQ ID NO: 1610955 - RNA, 19 nt, Artificial Sequence
  Description of Artificial Sequence: Synthetic oligonucleotide
  Sense strand starting at position 2200 of SEQ ID NO: 1560596
gcucuugggcaagauguua

SEQ ID NO: 1610956 - RNA, 19 nt, Artificial Sequence
  Description of Artificial Sequence: Synthetic oligonucleotide
  Antisense strand to SEQ ID NO: 1610955
uaacaucuugcccaagagc

SEQ ID NO: 1610957 - RNA, 19 nt, Artificial Sequence
  Description of Artificial Sequence: Synthetic oligonucleotide
  Sense strand starting at position 2231 of SEQ ID NO: 1560596
ucgacauguccucguauuu

SEQ ID NO: 1610958 - RNA, 19 nt, Artificial Sequence
  Description of Artificial Sequence: Synthetic oligonucleotide
  Antisense strand to SEQ ID NO: 1610957
aaauacgaggacaugucga

SEQ ID NO: 1610959 - RNA, 19 nt, Artificial Sequence
  Description of Artificial Sequence: Synthetic oligonucleotide
  Sense strand starting at position 2461 of SEQ ID NO: 1560596
uaccguaugguccaacaau

SEQ ID NO: 1610960 - RNA, 19 nt, Artificial Sequence
  Description of Artificial Sequence: Synthetic oligonucleotide
  Antisense strand to SEQ ID NO: 1610959
auuguuggaccauacggua

SEQ ID NO: 1610961 - RNA, 19 nt, Artificial Sequence
  Description of Artificial Sequence: Synthetic oligonucleotide
  Sense strand starting at position 2478 of SEQ ID NO: 1560596
augccacuucugggucuau

SEQ ID NO: 1610962 - RNA, 19 nt, Artificial Sequence
  Description of Artificial Sequence: Synthetic oligonucleotide
  Antisense strand to SEQ ID NO: 1610961
auagacccagaaguggcau

SEQ ID NO: 1610963 - RNA, 19 nt, Artificial Sequence
  Description of Artificial Sequence: Synthetic oligonucleotide
  Sense strand starting at position 2479 of SEQ ID NO: 1560596
ugccacuucugggucuaua

SEQ ID NO: 1610964 - RNA, 19 nt, Artificial Sequence
  Description of Artificial Sequence: Synthetic oligonucleotide
  Antisense strand to SEQ ID NO: 1610963
uauagacccagaaguggca

SEQ ID NO: 1610965 - RNA, 19 nt, Artificial Sequence
  Description of Artificial Sequence: Synthetic oligonucleotide
  Sense strand starting at position 2592 of SEQ ID NO: 1560596
aauguccauugauagaaga

SEQ ID NO: 1610966 - RNA, 19 nt, Artificial Sequence
  Description of Artificial Sequence: Synthetic oligonucleotide
  Antisense strand to SEQ ID NO: 1610965
ucuucuaucaauggacauu

SEQ ID NO: 1610967 - RNA, 19 nt, Artificial Sequence
  Description of Artificial Sequence: Synthetic oligonucleotide
  Sense strand starting at position 2753 of SEQ ID NO: 1560596
ugaugucacuuacaggaga

SEQ ID NO: 1610968 - RNA, 19 nt, Artificial Sequence
  Description of Artificial Sequence: Synthetic oligonucleotide
  Antisense strand to SEQ ID NO: 1610967
ucuccuguaagugacauca

SEQ ID NO: 1610969 - RNA, 19 nt, Artificial Sequence
  Description of Artificial Sequence: Synthetic oligonucleotide
  Sense strand starting at position 2845 of SEQ ID NO: 1560596
gggaguuauuaacaaacag

SEQ ID NO: 1610970 - RNA, 19 nt, Artificial Sequence
  Description of Artificial Sequence: Synthetic oligonucleotide
  Antisense strand to SEQ ID NO: 1610969
cuguuuguuaauaacuccc

SEQ ID NO: 1610971 - RNA, 19 nt, Artificial Sequence
  Description of Artificial Sequence: Synthetic oligonucleotide
  Sense strand starting at position 2890 of SEQ ID NO: 1560596
gacccaucgucagcaauaa

SEQ ID NO: 1610972 - RNA, 19 nt, Artificial Sequence
  Description of Artificial Sequence: Synthetic oligonucleotide
  Antisense strand to SEQ ID NO: 1610971
uuauugcugacgauggguc

SEQ ID NO: 1610973 - RNA, 19 nt, Artificial Sequence
  Description of Artificial Sequence: Synthetic oligonucleotide
  Sense strand starting at position 2923 of SEQ ID NO: 1560596
gaaauuuguuaagaggaca

SEQ ID NO: 1610974 - RNA, 19 nt, Artificial Sequence
  Description of Artificial Sequence: Synthetic oligonucleotide
  Antisense strand to SEQ ID NO: 1610973
uguccucuuaacaaauuuc

SEQ ID NO: 1610975 - RNA, 19 nt, Artificial Sequence
  Description of Artificial Sequence: Synthetic oligonucleotide
  Sense strand starting at position 2955 of SEQ ID NO: 1560596
guguucuaacaaugauaca

SEQ ID NO: 1610976 - RNA, 19 nt, Artificial Sequence
  Description of Artificial Sequence: Synthetic oligonucleotide
  Antisense strand to SEQ ID NO: 1610975
uguaucauuguuagaacac

SEQ ID NO: 1610977 - RNA, 19 nt, Artificial Sequence
  Description of Artificial Sequence: Synthetic oligonucleotide
  Sense strand starting at position 3699 of SEQ ID NO: 1560596
aggagacagugcuuagaac

SEQ ID NO: 1610978 - RNA, 19 nt, Artificial Sequence
  Description of Artificial Sequence: Synthetic oligonucleotide
  Antisense strand to SEQ ID NO: 1610977
guucuaagcacugucuccu

SEQ ID NO: 1610979 - RNA, 19 nt, Artificial Sequence
  Description of Artificial Sequence: Synthetic oligonucleotide
  Sense strand starting at position 3969 of SEQ ID NO: 1560596
uugagugguugugcuccaa

SEQ ID NO: 1610980 - RNA, 19 nt, Artificial Sequence
  Description of Artificial Sequence: Synthetic oligonucleotide
  Antisense strand to SEQ ID NO: 1610979
uuggagcacaaccacucaa

SEQ ID NO: 1610981 - RNA, 19 nt, Artificial Sequence
  Description of Artificial Sequence: Synthetic oligonucleotide
  Sense strand starting at position 45 of SEQ ID NO: 1560597
aggaaacugguguguuagu

SEQ ID NO: 1610982 - RNA, 19 nt, Artificial Sequence
  Description of Artificial Sequence: Synthetic oligonucleotide
  Antisense strand to SEQ ID NO: 1610981
acuaacacaccaguuuccu

SEQ ID NO: 1610983 - RNA, 19 nt, Artificial Sequence
  Description of Artificial Sequence: Synthetic oligonucleotide
  Sense strand starting at position 46 of SEQ ID NO: 1560597
ggaaacugguguguuaguu

SEQ ID NO: 1610984 - RNA, 19 nt, Artificial Sequence
  Description of Artificial Sequence: Synthetic oligonucleotide
  Antisense strand to SEQ ID NO: 1610983
aacuaacacaccaguuucc

SEQ ID NO: 1610985 - RNA, 19 nt, Artificial Sequence
  Description of Artificial Sequence: Synthetic oligonucleotide
  Sense strand starting at position 59 of SEQ ID NO: 1560597
uuaguuacagcgugaauuu

SEQ ID NO: 1610986 - RNA, 19 nt, Artificial Sequence
  Description of Artificial Sequence: Synthetic oligonucleotide
  Antisense strand to SEQ ID NO: 1610985
aaauucacgcuguaacuaa

SEQ ID NO: 1610987 - RNA, 19 nt, Artificial Sequence
  Description of Artificial Sequence: Synthetic oligonucleotide
  Sense strand starting at position 69 of SEQ ID NO: 1560597
cgugaauuucaaggcaguu

SEQ ID NO: 1610988 - RNA, 19 nt, Artificial Sequence
  Description of Artificial Sequence: Synthetic oligonucleotide
  Antisense strand to SEQ ID NO: 1610987
aacugccuugaaauucacg

SEQ ID NO: 1610989 - RNA, 19 nt, Artificial Sequence
  Description of Artificial Sequence: Synthetic oligonucleotide
  Sense strand starting at position 191 of SEQ ID NO: 1560597
gcugguucucaggagggaa

SEQ ID NO: 1610990 - RNA, 19 nt, Artificial Sequence
  Description of Artificial Sequence: Synthetic oligonucleotide
  Antisense strand to SEQ ID NO: 1610989
uucccuccugagaaccagc

SEQ ID NO: 1610991 - RNA, 19 nt, Artificial Sequence
  Description of Artificial Sequence: Synthetic oligonucleotide
  Sense strand starting at position 238 of SEQ ID NO: 1560597
ggcugucucucugcaacua

SEQ ID NO: 1610992 - RNA, 19 nt, Artificial Sequence
  Description of Artificial Sequence: Synthetic oligonucleotide
  Antisense strand to SEQ ID NO: 1610991
uaguugcagagagacagcc

SEQ ID NO: 1610993 - RNA, 19 nt, Artificial Sequence
  Description of Artificial Sequence: Synthetic oligonucleotide
  Sense strand starting at position 239 of SEQ ID NO: 1560597
gcugucucucugcaacuaa

SEQ ID NO: 1610994 - RNA, 19 nt, Artificial Sequence
  Description of Artificial Sequence: Synthetic oligonucleotide
  Antisense strand to SEQ ID NO: 1610993
uuaguugcagagagacagc

SEQ ID NO: 1610995 - RNA, 19 nt, Artificial Sequence
  Description of Artificial Sequence: Synthetic oligonucleotide
  Sense strand starting at position 484 of SEQ ID NO: 1560597
gagauucugaggcaacguu

SEQ ID NO: 1610996 - RNA, 19 nt, Artificial Sequence
  Description of Artificial Sequence: Synthetic oligonucleotide
  Antisense strand to SEQ ID NO: 1610995
aacguugccucagaaucuc

SEQ ID NO: 1610997 - RNA, 19 nt, Artificial Sequence
  Description of Artificial Sequence: Synthetic oligonucleotide
  Sense strand starting at position 1185 of SEQ ID NO: 1560597
ccagcuccgaguuagaaga

SEQ ID NO: 1610998 - RNA, 19 nt, Artificial Sequence
  Description of Artificial Sequence: Synthetic oligonucleotide
  Antisense strand to SEQ ID NO: 1610997
ucuucuaacucggagcugg

SEQ ID NO: 1610999 - RNA, 19 nt, Artificial Sequence
  Description of Artificial Sequence: Synthetic oligonucleotide
  Sense strand starting at position 1387 of SEQ ID NO: 1560597
agaggagacucgcuuaaac

SEQ ID NO: 1611000 - RNA, 19 nt, Artificial Sequence
  Description of Artificial Sequence: Synthetic oligonucleotide
  Antisense strand to SEQ ID NO: 1610999
guuuaagcgagucuccucu

SEQ ID NO: 1611001 - RNA, 19 nt, Artificial Sequence
  Description of Artificial Sequence: Synthetic oligonucleotide
  Sense strand starting at position 1659 of SEQ ID NO: 1560597
agugauuauuuguacccaa

SEQ ID NO: 1611002 - RNA, 19 nt, Artificial Sequence
  Description of Artificial Sequence: Synthetic oligonucleotide
  Antisense strand to SEQ ID NO: 1611001
uuggguacaaauaaucacu

SEQ ID NO: 1611003 - RNA, 19 nt, Artificial Sequence
  Description of Artificial Sequence: Synthetic oligonucleotide
  Sense strand starting at position 2017 of SEQ ID NO: 1560597
gccgaugugacaucggcuu

SEQ ID NO: 1611004 - RNA, 19 nt, Artificial Sequence
  Description of Artificial Sequence: Synthetic oligonucleotide
  Antisense strand to SEQ ID NO: 1611003
aagccgaugucacaucggc

SEQ ID NO: 1611005 - RNA, 19 nt, Artificial Sequence
  Description of Artificial Sequence: Synthetic oligonucleotide
  Sense strand starting at position 2059 of SEQ ID NO: 1560597
ccacuccaguccuucgaaa

SEQ ID NO: 1611006 - RNA, 19 nt, Artificial Sequence
  Description of Artificial Sequence: Synthetic oligonucleotide
  Antisense strand to SEQ ID NO: 1611005
uuucgaaggacuggagugg

SEQ ID NO: 1611007 - RNA, 19 nt, Artificial Sequence
  Description of Artificial Sequence: Synthetic oligonucleotide
  Sense strand starting at position 2061 of SEQ ID NO: 1560597
acuccaguccuucgaaagu

SEQ ID NO: 1611008 - RNA, 19 nt, Artificial Sequence
  Description of Artificial Sequence: Synthetic oligonucleotide
  Antisense strand to SEQ ID NO: 1611007
acuuucgaaggacuggagu

SEQ ID NO: 1611009 - RNA, 19 nt, Artificial Sequence
  Description of Artificial Sequence: Synthetic oligonucleotide
  Sense strand starting at position 2092 of SEQ ID NO: 1560597
ggcgacuugauuuguugua

SEQ ID NO: 1611010 - RNA, 19 nt, Artificial Sequence
  Description of Artificial Sequence: Synthetic oligonucleotide
  Antisense strand to SEQ ID NO: 1611009
uacaacaaaucaagucgcc

SEQ ID NO: 1611011 - RNA, 19 nt, Artificial Sequence
  Description of Artificial Sequence: Synthetic oligonucleotide
  Sense strand starting at position 2093 of SEQ ID NO: 1560597
gcgacuugauuuguuguau

SEQ ID NO: 1611012 - RNA, 19 nt, Artificial Sequence
  Description of Artificial Sequence: Synthetic oligonucleotide
  Antisense strand to SEQ ID NO: 1611011
auacaacaaaucaagucgc

SEQ ID NO: 1611013 - RNA, 19 nt, Artificial Sequence
  Description of Artificial Sequence: Synthetic oligonucleotide
  Sense strand starting at position 2094 of SEQ ID NO: 1560597
cgacuugauuuguuguauu

SEQ ID NO: 1611014 - RNA, 19 nt, Artificial Sequence
  Description of Artificial Sequence: Synthetic oligonucleotide
  Antisense strand to SEQ ID NO: 1611013
aauacaacaaaucaagucg

SEQ ID NO: 1611015 - RNA, 19 nt, Artificial Sequence
  Description of Artificial Sequence: Synthetic oligonucleotide
  Sense strand starting at position 2112 of SEQ ID NO: 1560597
uugggucuccggugaagag

SEQ ID NO: 1611016 - RNA, 19 nt, Artificial Sequence
  Description of Artificial Sequence: Synthetic oligonucleotide
  Antisense strand to SEQ ID NO: 1611015
cucuucaccggagacccaa

SEQ ID NO: 1611017 - RNA, 19 nt, Artificial Sequence
  Description of Artificial Sequence: Synthetic oligonucleotide
  Sense strand starting at position 2150 of SEQ ID NO: 1560597
ggaaacgcaucuucugaaa

SEQ ID NO: 1611018 - RNA, 19 nt, Artificial Sequence
  Description of Artificial Sequence: Synthetic oligonucleotide
  Antisense strand to SEQ ID NO: 1611017
uuucagaagaugcguuucc

SEQ ID NO: 1611019 - RNA, 19 nt, Artificial Sequence
  Description of Artificial Sequence: Synthetic oligonucleotide
  Sense strand starting at position 2185 of SEQ ID NO: 1560597
cucgauguuuaacuguuaa

SEQ ID NO: 1611020 - RNA, 19 nt, Artificial Sequence
  Description of Artificial Sequence: Synthetic oligonucleotide
  Antisense strand to SEQ ID NO: 1611019
uuaacaguuaaacaucgag

SEQ ID NO: 1611021 - RNA, 19 nt, Artificial Sequence
  Description of Artificial Sequence: Synthetic oligonucleotide
  Sense strand starting at position 2209 of SEQ ID NO: 1560597
ugcuguuguuguccacaga

SEQ ID NO: 1611022 - RNA, 19 nt, Artificial Sequence
  Description of Artificial Sequence: Synthetic oligonucleotide
  Antisense strand to SEQ ID NO: 1611021
ucuguggacaacaacagca

SEQ ID NO: 1611023 - RNA, 19 nt, Artificial Sequence
  Description of Artificial Sequence: Synthetic oligonucleotide
  Sense strand starting at position 2210 of SEQ ID NO: 1560597
gcuguuguuguccacagaa

SEQ ID NO: 1611024 - RNA, 19 nt, Artificial Sequence
  Description of Artificial Sequence: Synthetic oligonucleotide
  Antisense strand to SEQ ID NO: 1611023
uucuguggacaacaacagc

SEQ ID NO: 1611025 - RNA, 19 nt, Artificial Sequence
  Description of Artificial Sequence: Synthetic oligonucleotide
  Sense strand starting at position 2428 of SEQ ID NO: 1560597
acugaucaaucaggaauuu

SEQ ID NO: 1611026 - RNA, 19 nt, Artificial Sequence
  Description of Artificial Sequence: Synthetic oligonucleotide
  Antisense strand to SEQ ID NO: 1611025
aaauuccugauugaucagu

SEQ ID NO: 1611027 - RNA, 19 nt, Artificial Sequence
  Description of Artificial Sequence: Synthetic oligonucleotide
  Sense strand starting at position 2502 of SEQ ID NO: 1560597
ccgccuuuggcugaguaua

SEQ ID NO: 1611028 - RNA, 19 nt, Artificial Sequence
  Description of Artificial Sequence: Synthetic oligonucleotide
  Antisense strand to SEQ ID NO: 1611027
uauacucagccaaaggcgg

SEQ ID NO: 1611029 - RNA, 19 nt, Artificial Sequence
  Description of Artificial Sequence: Synthetic oligonucleotide
  Sense strand starting at position 2504 of SEQ ID NO: 1560597
gccuuuggcugaguauaaa

SEQ ID NO: 1611030 - RNA, 19 nt, Artificial Sequence
  Description of Artificial Sequence: Synthetic oligonucleotide
  Antisense strand to SEQ ID NO: 1611029
uuuauacucagccaaaggc

SEQ ID NO: 1611031 - RNA, 19 nt, Artificial Sequence
  Description of Artificial Sequence: Synthetic oligonucleotide
  Sense strand starting at position 2507 of SEQ ID NO: 1560597
uuuggcugaguauaaacau

SEQ ID NO: 1611032 - RNA, 19 nt, Artificial Sequence
  Description of Artificial Sequence: Synthetic oligonucleotide
  Antisense strand to SEQ ID NO: 1611031
auguuuauacucagccaaa

SEQ ID NO: 1611033 - RNA, 19 nt, Artificial Sequence
  Description of Artificial Sequence: Synthetic oligonucleotide
  Sense strand starting at position 2552 of SEQ ID NO: 1560597
ggagucuggacguaaauau

SEQ ID NO: 1611034 - RNA, 19 nt, Artificial Sequence
  Description of Artificial Sequence: Synthetic oligonucleotide
  Antisense strand to SEQ ID NO: 1611033
auauuuacguccagacucc

SEQ ID NO: 1611035 - RNA, 19 nt, Artificial Sequence
  Description of Artificial Sequence: Synthetic oligonucleotide
  Sense strand starting at position 2559 of SEQ ID NO: 1560597
ggacguaaauauugauuuc

SEQ ID NO: 1611036 - RNA, 19 nt, Artificial Sequence
  Description of Artificial Sequence: Synthetic oligonucleotide
  Antisense strand to SEQ ID NO: 1611035
gaaaucaauauuuacgucc

SEQ ID NO: 1611037 - RNA, 19 nt, Artificial Sequence
  Description of Artificial Sequence: Synthetic oligonucleotide
  Sense strand starting at position 2612 of SEQ ID NO: 1560597
gcgguuuccucucccucaa

SEQ ID NO: 1611038 - RNA, 19 nt, Artificial Sequence
  Description of Artificial Sequence: Synthetic oligonucleotide
  Antisense strand to SEQ ID NO: 1611037
uugagggagaggaaaccgc

SEQ ID NO: 1611039 - RNA, 19 nt, Artificial Sequence
  Description of Artificial Sequence: Synthetic oligonucleotide
  Sense strand starting at position 2770 of SEQ ID NO: 1560597
augugagaaacuugccuga

SEQ ID NO: 1611040 - RNA, 19 nt, Artificial Sequence
  Description of Artificial Sequence: Synthetic oligonucleotide
  Antisense strand to SEQ ID NO: 1611039
ucaggcaaguuucucacau

SEQ ID NO: 1611041 - RNA, 19 nt, Artificial Sequence
  Description of Artificial Sequence: Synthetic oligonucleotide
  Sense strand starting at position 2772 of SEQ ID NO: 1560597
gugagaaacuugccugaac

SEQ ID NO: 1611042 - RNA, 19 nt, Artificial Sequence
  Description of Artificial Sequence: Synthetic oligonucleotide
  Antisense strand to SEQ ID NO: 1611041
guucaggcaaguuucucac

SEQ ID NO: 1611043 - RNA, 19 nt, Artificial Sequence
  Description of Artificial Sequence: Synthetic oligonucleotide
  Sense strand starting at position 2879 of SEQ ID NO: 1560597
cuaaccucucagcaggauu

SEQ ID NO: 1611044 - RNA, 19 nt, Artificial Sequence
  Description of Artificial Sequence: Synthetic oligonucleotide
  Antisense strand to SEQ ID NO: 1611043
aauccugcugagagguuag

SEQ ID NO: 1611045 - RNA, 19 nt, Artificial Sequence
  Description of Artificial Sequence: Synthetic oligonucleotide
  Sense strand starting at position 3265 of SEQ ID NO: 1560597
gcaucaugaugccucucaa

SEQ ID NO: 1611046 - RNA, 19 nt, Artificial Sequence
  Description of Artificial Sequence: Synthetic oligonucleotide
  Antisense strand to SEQ ID NO: 1611045
uugagaggcaucaugaugc

SEQ ID NO: 1611047 - RNA, 19 nt, Artificial Sequence
  Description of Artificial Sequence: Synthetic oligonucleotide
  Sense strand starting at position 3278 of SEQ ID NO: 1560597
ucucaaauugcuggcuuua

SEQ ID NO: 1611048 - RNA, 19 nt, Artificial Sequence
  Description of Artificial Sequence: Synthetic oligonucleotide
  Antisense strand to SEQ ID NO: 1611047
uaaagccagcaauuugaga

SEQ ID NO: 1611049 - RNA, 19 nt, Artificial Sequence
  Description of Artificial Sequence: Synthetic oligonucleotide
  Sense strand starting at position 3280 of SEQ ID NO: 1560597
ucaaauugcuggcuuuaca

SEQ ID NO: 1611050 - RNA, 19 nt, Artificial Sequence
  Description of Artificial Sequence: Synthetic oligonucleotide
  Antisense strand to SEQ ID NO: 1611049
uguaaagccagcaauuuga

SEQ ID NO: 1611051 - RNA, 19 nt, Artificial Sequence
  Description of Artificial Sequence: Synthetic oligonucleotide
  Sense strand starting at position 3378 of SEQ ID NO: 1560597
cggccuuggacagauaaau

SEQ ID NO: 1611052 - RNA, 19 nt, Artificial Sequence
  Description of Artificial Sequence: Synthetic oligonucleotide
  Antisense strand to SEQ ID NO: 1611051
auuuaucuguccaaggccg

SEQ ID NO: 1611053 - RNA, 19 nt, Artificial Sequence
  Description of Artificial Sequence: Synthetic oligonucleotide
  Sense strand starting at position 3807 of SEQ ID NO: 1560597
uagagaaguuuacaaggau

SEQ ID NO: 1611054 - RNA, 19 nt, Artificial Sequence
  Description of Artificial Sequence: Synthetic oligonucleotide
  Antisense strand to SEQ ID NO: 1611053
auccuuguaaacuucucua

SEQ ID NO: 1611055 - RNA, 19 nt, Artificial Sequence
  Description of Artificial Sequence: Synthetic oligonucleotide
  Sense strand starting at position 3841 of SEQ ID NO: 1560597
gcugcugcaacguuuauaa

SEQ ID NO: 1611056 - RNA, 19 nt, Artificial Sequence
  Description of Artificial Sequence: Synthetic oligonucleotide
  Antisense strand to SEQ ID NO: 1611055
uuauaaacguugcagcagc

SEQ ID NO: 1611057 - RNA, 19 nt, Artificial Sequence
  Description of Artificial Sequence: Synthetic oligonucleotide
  Sense strand starting at position 3843 of SEQ ID NO: 1560597
ugcugcaacguuuauaaau

SEQ ID NO: 1611058 - RNA, 19 nt, Artificial Sequence
  Description of Artificial Sequence: Synthetic oligonucleotide
  Antisense strand to SEQ ID NO: 1611057
auuuauaaacguugcagca

SEQ ID NO: 1611059 - RNA, 19 nt, Artificial Sequence
  Description of Artificial Sequence: Synthetic oligonucleotide
  Sense strand starting at position 3886 of SEQ ID NO: 1560597
uaugccauuugcgacauua

SEQ ID NO: 1611060 - RNA, 19 nt, Artificial Sequence
  Description of Artificial Sequence: Synthetic oligonucleotide
  Antisense strand to SEQ ID NO: 1611059
uaaugucgcaaauggcaua

SEQ ID NO: 1611061 - RNA, 19 nt, Artificial Sequence
  Description of Artificial Sequence: Synthetic oligonucleotide
  Sense strand starting at position 251 of SEQ ID NO: 1560598
gccacagccggcugauuua

SEQ ID NO: 1611062 - RNA, 19 nt, Artificial Sequence
  Description of Artificial Sequence: Synthetic oligonucleotide
  Antisense strand to SEQ ID NO: 1611061
uaaaucagccggcuguggc

SEQ ID NO: 1611063 - RNA, 19 nt, Artificial Sequence
  Description of Artificial Sequence: Synthetic oligonucleotide
  Sense strand starting at position 254 of SEQ ID NO: 1560598
acagccggcugauuuaaau

SEQ ID NO: 1611064 - RNA, 19 nt, Artificial Sequence
  Description of Artificial Sequence: Synthetic oligonucleotide
  Antisense strand to SEQ ID NO: 1611063
auuuaaaucagccggcugu

SEQ ID NO: 1611065 - RNA, 19 nt, Artificial Sequence
  Description of Artificial Sequence: Synthetic oligonucleotide
  Sense strand starting at position 281 of SEQ ID NO: 1560598
gcccaucagguuugagacu

SEQ ID NO: 1611066 - RNA, 19 nt, Artificial Sequence
  Description of Artificial Sequence: Synthetic oligonucleotide
  Antisense strand to SEQ ID NO: 1611065
agucucaaaccugaugggc

SEQ ID NO: 1611067 - RNA, 19 nt, Artificial Sequence
  Description of Artificial Sequence: Synthetic oligonucleotide
  Sense strand starting at position 290 of SEQ ID NO: 1560598
guuugagacuccuccaguu

SEQ ID NO: 1611068 - RNA, 19 nt, Artificial Sequence
  Description of Artificial Sequence: Synthetic oligonucleotide
  Antisense strand to SEQ ID NO: 1611067
aacuggaggagucucaaac

SEQ ID NO: 1611069 - RNA, 19 nt, Artificial Sequence
  Description of Artificial Sequence: Synthetic oligonucleotide
  Sense strand starting at position 297 of SEQ ID NO: 1560598
acuccuccaguuuggagaa

SEQ ID NO: 1611070 - RNA, 19 nt, Artificial Sequence
  Description of Artificial Sequence: Synthetic oligonucleotide
  Antisense strand to SEQ ID NO: 1611069
uucuccaaacuggaggagu

SEQ ID NO: 1611071 - RNA, 19 nt, Artificial Sequence
  Description of Artificial Sequence: Synthetic oligonucleotide
  Sense strand starting at position 423 of SEQ ID NO: 1560598
uccuaaauucuguguguuc

SEQ ID NO: 1611072 - RNA, 19 nt, Artificial Sequence
  Description of Artificial Sequence: Synthetic oligonucleotide
  Antisense strand to SEQ ID NO: 1611071
gaacacacagaauuuagga

SEQ ID NO: 1611073 - RNA, 19 nt, Artificial Sequence
  Description of Artificial Sequence: Synthetic oligonucleotide
  Sense strand starting at position 446 of SEQ ID NO: 1560598
uuguuugaccuuggucaca

SEQ ID NO: 1611074 - RNA, 19 nt, Artificial Sequence
  Description of Artificial Sequence: Synthetic oligonucleotide
  Antisense strand to SEQ ID NO: 1611073
ugugaccaaggucaaacaa

SEQ ID NO: 1611075 - RNA, 19 nt, Artificial Sequence
  Description of Artificial Sequence: Synthetic oligonucleotide
  Sense strand starting at position 688 of SEQ ID NO: 1560598
uggcuuucuuccguaggaa

SEQ ID NO: 1611076 - RNA, 19 nt, Artificial Sequence
  Description of Artificial Sequence: Synthetic oligonucleotide
  Antisense strand to SEQ ID NO: 1611075
uuccuacggaagaaagcca

SEQ ID NO: 1611077 - RNA, 19 nt, Artificial Sequence
  Description of Artificial Sequence: Synthetic oligonucleotide
  Sense strand starting at position 689 of SEQ ID NO: 1560598
ggcuuucuuccguaggaau

SEQ ID NO: 1611078 - RNA, 19 nt, Artificial Sequence
  Description of Artificial Sequence: Synthetic oligonucleotide
  Antisense strand to SEQ ID NO: 1611077
auuccuacggaagaaagcc

SEQ ID NO: 1611079 - RNA, 19 nt, Artificial Sequence
  Description of Artificial Sequence: Synthetic oligonucleotide
  Sense strand starting at position 728 of SEQ ID NO: 1560598
aaguuauaggcaggacauu

SEQ ID NO: 1611080 - RNA, 19 nt, Artificial Sequence
  Description of Artificial Sequence: Synthetic oligonucleotide
  Antisense strand to SEQ ID NO: 1611079
aauguccugccuauaacuu

SEQ ID NO: 1611081 - RNA, 19 nt, Artificial Sequence
  Description of Artificial Sequence: Synthetic oligonucleotide
  Sense strand starting at position 934 of SEQ ID NO: 1560598
acgggucaucaaggaugua

SEQ ID NO: 1611082 - RNA, 19 nt, Artificial Sequence
  Description of Artificial Sequence: Synthetic oligonucleotide
  Antisense strand to SEQ ID NO: 1611081
uacauccuugaugacccgu

SEQ ID NO: 1611083 - RNA, 19 nt, Artificial Sequence
  Description of Artificial Sequence: Synthetic oligonucleotide
  Sense strand starting at position 935 of SEQ ID NO: 1560598
cgggucaucaaggauguau

SEQ ID NO: 1611084 - RNA, 19 nt, Artificial Sequence
  Description of Artificial Sequence: Synthetic oligonucleotide
  Antisense strand to SEQ ID NO: 1611083
auacauccuugaugacccg

SEQ ID NO: 1611085 - RNA, 19 nt, Artificial Sequence
  Description of Artificial Sequence: Synthetic oligonucleotide
  Sense strand starting at position 983 of SEQ ID NO: 1560598
gguuccuaaccucaaguga

SEQ ID NO: 1611086 - RNA, 19 nt, Artificial Sequence
  Description of Artificial Sequence: Synthetic oligonucleotide
  Antisense strand to SEQ ID NO: 1611085
ucacuugagguuaggaacc

SEQ ID NO: 1611087 - RNA, 19 nt, Artificial Sequence
  Description of Artificial Sequence: Synthetic oligonucleotide
  Sense strand starting at position 1015 of SEQ ID NO: 1560598
gccauaaagguaugcauua

SEQ ID NO: 1611088 - RNA, 19 nt, Artificial Sequence
  Description of Artificial Sequence: Synthetic oligonucleotide
  Antisense strand to SEQ ID NO: 1611087
uaaugcauaccuuuauggc

SEQ ID NO: 1611089 - RNA, 19 nt, Artificial Sequence
  Description of Artificial Sequence: Synthetic oligonucleotide
  Sense strand starting at position 1053 of SEQ ID NO: 1560598
uagccauggcuccaaguga

SEQ ID NO: 1611090 - RNA, 19 nt, Artificial Sequence
  Description of Artificial Sequence: Synthetic oligonucleotide
  Antisense strand to SEQ ID NO: 1611089
ucacuuggagccauggcua

SEQ ID NO: 1611091 - RNA, 19 nt, Artificial Sequence
  Description of Artificial Sequence: Synthetic oligonucleotide
  Sense strand starting at position 1204 of SEQ ID NO: 1560598
aaugaaaguuggguguaca

SEQ ID NO: 1611092 - RNA, 19 nt, Artificial Sequence
  Description of Artificial Sequence: Synthetic oligonucleotide
  Antisense strand to SEQ ID NO: 1611091
uguacacccaacuuucauu

SEQ ID NO: 1611093 - RNA, 19 nt, Artificial Sequence
  Description of Artificial Sequence: Synthetic oligonucleotide
  Sense strand starting at position 1365 of SEQ ID NO: 1560598
ucucacuucgugcaacaga

SEQ ID NO: 1611094 - RNA, 19 nt, Artificial Sequence
  Description of Artificial Sequence: Synthetic oligonucleotide
  Antisense strand to SEQ ID NO: 1611093
ucuguugcacgaagugaga

SEQ ID NO: 1611095 - RNA, 19 nt, Artificial Sequence
  Description of Artificial Sequence: Synthetic oligonucleotide
  Sense strand starting at position 1368 of SEQ ID NO: 1560598
cacuucgugcaacagagau

SEQ ID NO: 1611096 - RNA, 19 nt, Artificial Sequence
  Description of Artificial Sequence: Synthetic oligonucleotide
  Antisense strand to SEQ ID NO: 1611095
aucucuguugcacgaagug

SEQ ID NO: 1611097 - RNA, 19 nt, Artificial Sequence
  Description of Artificial Sequence: Synthetic oligonucleotide
  Sense strand starting at position 1443 of SEQ ID NO: 1560598
acggcauguaguuagcaua

SEQ ID NO: 1611098 - RNA, 19 nt, Artificial Sequence
  Description of Artificial Sequence: Synthetic oligonucleotide
  Antisense strand to SEQ ID NO: 1611097
uaugcuaacuacaugccgu

SEQ ID NO: 1611099 - RNA, 19 nt, Artificial Sequence
  Description of Artificial Sequence: Synthetic oligonucleotide
  Sense strand starting at position 1450 of SEQ ID NO: 1560598
guaguuagcauacaguaga

SEQ ID NO: 1611100 - RNA, 19 nt, Artificial Sequence
  Description of Artificial Sequence: Synthetic oligonucleotide
  Antisense strand to SEQ ID NO: 1611099
ucuacuguaugcuaacuac

SEQ ID NO: 1611101 - RNA, 19 nt, Artificial Sequence
  Description of Artificial Sequence: Synthetic oligonucleotide
  Sense strand starting at position 1579 of SEQ ID NO: 1560598
cuguuccagccaugugaaa

SEQ ID NO: 1611102 - RNA, 19 nt, Artificial Sequence
  Description of Artificial Sequence: Synthetic oligonucleotide
  Antisense strand to SEQ ID NO: 1611101
uuucacauggcuggaacag

SEQ ID NO: 1611103 - RNA, 19 nt, Artificial Sequence
  Description of Artificial Sequence: Synthetic oligonucleotide
  Sense strand starting at position 1638 of SEQ ID NO: 1560598
ggaagguuucguggaagug

SEQ ID NO: 1611104 - RNA, 19 nt, Artificial Sequence
  Description of Artificial Sequence: Synthetic oligonucleotide
  Antisense strand to SEQ ID NO: 1611103
cacuuccacgaaaccuucc

SEQ ID NO: 1611105 - RNA, 19 nt, Artificial Sequence
  Description of Artificial Sequence: Synthetic oligonucleotide
  Sense strand starting at position 1928 of SEQ ID NO: 1560598
agcucuucuugggcaagau

SEQ ID NO: 1611106 - RNA, 19 nt, Artificial Sequence
  Description of Artificial Sequence: Synthetic oligonucleotide
  Antisense strand to SEQ ID NO: 1611105
aucuugcccaagaagagcu

SEQ ID NO: 1611107 - RNA, 19 nt, Artificial Sequence
  Description of Artificial Sequence: Synthetic oligonucleotide
  Sense strand starting at position 1929 of SEQ ID NO: 1560598
gcucuucuugggcaagaua

SEQ ID NO: 1611108 - RNA, 19 nt, Artificial Sequence
  Description of Artificial Sequence: Synthetic oligonucleotide
  Antisense strand to SEQ ID NO: 1611107
uaucuugcccaagaagagc

SEQ ID NO: 1611109 - RNA, 19 nt, Artificial Sequence
  Description of Artificial Sequence: Synthetic oligonucleotide
  Sense strand starting at position 2082 of SEQ ID NO: 1560598
gccuguagcgacaggugau

SEQ ID NO: 1611110 - RNA, 19 nt, Artificial Sequence
  Description of Artificial Sequence: Synthetic oligonucleotide
  Antisense strand to SEQ ID NO: 1611109
aucaccugucgcuacaggc

SEQ ID NO: 1611111 - RNA, 19 nt, Artificial Sequence
  Description of Artificial Sequence: Synthetic oligonucleotide
  Sense strand starting at position 2083 of SEQ ID NO: 1560598
ccuguagcgacaggugauu

SEQ ID NO: 1611112 - RNA, 19 nt, Artificial Sequence
  Description of Artificial Sequence: Synthetic oligonucleotide
  Antisense strand to SEQ ID NO: 1611111
aaucaccugucgcuacagg

SEQ ID NO: 1611113 - RNA, 19 nt, Artificial Sequence
  Description of Artificial Sequence: Synthetic oligonucleotide
  Sense strand starting at position 2105 of SEQ ID NO: 1560598
ugagacgcccuuuaucaca

SEQ ID NO: 1611114 - RNA, 19 nt, Artificial Sequence
  Description of Artificial Sequence: Synthetic oligonucleotide
  Antisense strand to SEQ ID NO: 1611113
ugugauaaagggcgucuca

SEQ ID NO: 1611115 - RNA, 19 nt, Artificial Sequence
  Description of Artificial Sequence: Synthetic oligonucleotide
  Sense strand starting at position 2228 of SEQ ID NO: 1560598
cgucgauuggccgacauga

SEQ ID NO: 1611116 - RNA, 19 nt, Artificial Sequence
  Description of Artificial Sequence: Synthetic oligonucleotide
  Antisense strand to SEQ ID NO: 1611115
ucaugucggccaaucgacg

SEQ ID NO: 1611117 - RNA, 19 nt, Artificial Sequence
  Description of Artificial Sequence: Synthetic oligonucleotide
  Sense strand starting at position 2248 of SEQ ID NO: 1560598
cgacaagucuccuugcgga

SEQ ID NO: 1611118 - RNA, 19 nt, Artificial Sequence
  Description of Artificial Sequence: Synthetic oligonucleotide
  Antisense strand to SEQ ID NO: 1611117
uccgcaaggagacuugucg

SEQ ID NO: 1611119 - RNA, 19 nt, Artificial Sequence
  Description of Artificial Sequence: Synthetic oligonucleotide
  Sense strand starting at position 2282 of SEQ ID NO: 1560598
gacaaacaugcccguacau

SEQ ID NO: 1611120 - RNA, 19 nt, Artificial Sequence
  Description of Artificial Sequence: Synthetic oligonucleotide
  Antisense strand to SEQ ID NO: 1611119
auguacgggcauguuuguc

SEQ ID NO: 1611121 - RNA, 19 nt, Artificial Sequence
  Description of Artificial Sequence: Synthetic oligonucleotide
  Sense strand starting at position 2485 of SEQ ID NO: 1560598
guucuccuaguuuacagau

SEQ ID NO: 1611122 - RNA, 19 nt, Artificial Sequence
  Description of Artificial Sequence: Synthetic oligonucleotide
  Antisense strand to SEQ ID NO: 1611121
aucuguaaacuaggagaac

SEQ ID NO: 1611123 - RNA, 19 nt, Artificial Sequence
  Description of Artificial Sequence: Synthetic oligonucleotide
  Sense strand starting at position 2501 of SEQ ID NO: 1560598
gauguugugaccuaggcuu

SEQ ID NO: 1611124 - RNA, 19 nt, Artificial Sequence
  Description of Artificial Sequence: Synthetic oligonucleotide
  Antisense strand to SEQ ID NO: 1611123
aagccuaggucacaacauc

SEQ ID NO: 1611125 - RNA, 19 nt, Artificial Sequence
  Description of Artificial Sequence: Synthetic oligonucleotide
  Sense strand starting at position 2735 of SEQ ID NO: 1560598
gacguuugagcucagagau

SEQ ID NO: 1611126 - RNA, 19 nt, Artificial Sequence
  Description of Artificial Sequence: Synthetic oligonucleotide
  Antisense strand to SEQ ID NO: 1611125
aucucugagcucaaacguc

SEQ ID NO: 1611127 - RNA, 19 nt, Artificial Sequence
  Description of Artificial Sequence: Synthetic oligonucleotide
  Sense strand starting at position 2753 of SEQ ID NO: 1560598
ugaggcguccguaggaguu

SEQ ID NO: 1611128 - RNA, 19 nt, Artificial Sequence
  Description of Artificial Sequence: Synthetic oligonucleotide
  Antisense strand to SEQ ID NO: 1611127
aacuccuacggacgccuca

SEQ ID NO: 1611129 - RNA, 19 nt, Artificial Sequence
  Description of Artificial Sequence: Synthetic oligonucleotide
  Sense strand starting at position 2831 of SEQ ID NO: 1560598
cugacacgcucuuccauua

SEQ ID NO: 1611130 - RNA, 19 nt, Artificial Sequence
  Description of Artificial Sequence: Synthetic oligonucleotide
  Antisense strand to SEQ ID NO: 1611129
uaauggaagagcgugucag

SEQ ID NO: 1611131 - RNA, 19 nt, Artificial Sequence
  Description of Artificial Sequence: Synthetic oligonucleotide
  Sense strand starting at position 3124 of SEQ ID NO: 1560598
ggccgucucaccuggagau

SEQ ID NO: 1611132 - RNA, 19 nt, Artificial Sequence
  Description of Artificial Sequence: Synthetic oligonucleotide
  Antisense strand to SEQ ID NO: 1611131
aucuccaggugagacggcc

SEQ ID NO: 1611133 - RNA, 19 nt, Artificial Sequence
  Description of Artificial Sequence: Synthetic oligonucleotide
  Sense strand starting at position 3185 of SEQ ID NO: 1560598
gaggaaauucugggugguc

SEQ ID NO: 1611134 - RNA, 19 nt, Artificial Sequence
  Description of Artificial Sequence: Synthetic oligonucleotide
  Antisense strand to SEQ ID NO: 1611133
gaccacccagaauuuccuc

SEQ ID NO: 1611135 - RNA, 19 nt, Artificial Sequence
  Description of Artificial Sequence: Synthetic oligonucleotide
  Sense strand starting at position 3186 of SEQ ID NO: 1560598
aggaaauucuggguggucu

SEQ ID NO: 1611136 - RNA, 19 nt, Artificial Sequence
  Description of Artificial Sequence: Synthetic oligonucleotide
  Antisense strand to SEQ ID NO: 1611135
agaccacccagaauuuccu

SEQ ID NO: 1611137 - RNA, 19 nt, Artificial Sequence
  Description of Artificial Sequence: Synthetic oligonucleotide
  Sense strand starting at position 3188 of SEQ ID NO: 1560598
gaaauucuggguggucuca

SEQ ID NO: 1611138 - RNA, 19 nt, Artificial Sequence
  Description of Artificial Sequence: Synthetic oligonucleotide
  Antisense strand to SEQ ID NO: 1611137
ugagaccacccagaauuuc

SEQ ID NO: 1611139 - RNA, 19 nt, Artificial Sequence
  Description of Artificial Sequence: Synthetic oligonucleotide
  Sense strand starting at position 3557 of SEQ ID NO: 1560598
aagagucugugccuccauu

SEQ ID NO: 1611140 - RNA, 19 nt, Artificial Sequence
  Description of Artificial Sequence: Synthetic oligonucleotide
  Antisense strand to SEQ ID NO: 1611139
aauggaggcacagacucuu

SEQ ID NO: 1611141 - RNA, 19 nt, Artificial Sequence
  Description of Artificial Sequence: Synthetic oligonucleotide
  Sense strand starting at position 16 of SEQ ID NO: 1560599
aagaguucuggguguggac

SEQ ID NO: 1611142 - RNA, 19 nt, Artificial Sequence
  Description of Artificial Sequence: Synthetic oligonucleotide
  Antisense strand to SEQ ID NO: 1611141
guccacacccagaacucuu

SEQ ID NO: 1611143 - RNA, 19 nt, Artificial Sequence
  Description of Artificial Sequence: Synthetic oligonucleotide
  Sense strand starting at position 18 of SEQ ID NO: 1560599
gaguucuggguguggacua

SEQ ID NO: 1611144 - RNA, 19 nt, Artificial Sequence
  Description of Artificial Sequence: Synthetic oligonucleotide
  Antisense strand to SEQ ID NO: 1611143
uaguccacacccagaacuc

SEQ ID NO: 1611145 - RNA, 19 nt, Artificial Sequence
  Description of Artificial Sequence: Synthetic oligonucleotide
  Sense strand starting at position 549 of SEQ ID NO: 1560599
gggaguacggguugugaaa

SEQ ID NO: 1611146 - RNA, 19 nt, Artificial Sequence
  Description of Artificial Sequence: Synthetic oligonucleotide
  Antisense strand to SEQ ID NO: 1611145
uuucacaacccguacuccc

SEQ ID NO: 1611147 - RNA, 19 nt, Artificial Sequence
  Description of Artificial Sequence: Synthetic oligonucleotide
  Sense strand starting at position 582 of SEQ ID NO: 1560599
gaggauggaugcuauaaug

SEQ ID NO: 1611148 - RNA, 19 nt, Artificial Sequence
  Description of Artificial Sequence: Synthetic oligonucleotide
  Antisense strand to SEQ ID NO: 1611147
cauuauagcauccauccuc

SEQ ID NO: 1611149 - RNA, 19 nt, Artificial Sequence
  Description of Artificial Sequence: Synthetic oligonucleotide
  Sense strand starting at position 599 of SEQ ID NO: 1560599
ugagaagagucugagggaa

SEQ ID NO: 1611150 - RNA, 19 nt, Artificial Sequence
  Description of Artificial Sequence: Synthetic oligonucleotide
  Antisense strand to SEQ ID NO: 1611149
uucccucagacucuucuca

SEQ ID NO: 1611151 - RNA, 19 nt, Artificial Sequence
  Description of Artificial Sequence: Synthetic oligonucleotide
  Sense strand starting at position 635 of SEQ ID NO: 1560599
guggaaagguuuccgagaa

SEQ ID NO: 1611152 - RNA, 19 nt, Artificial Sequence
  Description of Artificial Sequence: Synthetic oligonucleotide
  Antisense strand to SEQ ID NO: 1611151
uucucggaaaccuuuccac

SEQ ID NO: 1611153 - RNA, 19 nt, Artificial Sequence
  Description of Artificial Sequence: Synthetic oligonucleotide
  Sense strand starting at position 639 of SEQ ID NO: 1560599
aaagguuuccgagaacucu

SEQ ID NO: 1611154 - RNA, 19 nt, Artificial Sequence
  Description of Artificial Sequence: Synthetic oligonucleotide
  Antisense strand to SEQ ID NO: 1611153
agaguucucggaaaccuuu

SEQ ID NO: 1611155 - RNA, 19 nt, Artificial Sequence
  Description of Artificial Sequence: Synthetic oligonucleotide
  Sense strand starting at position 645 of SEQ ID NO: 1560599
uuccgagaacucugugaaa

SEQ ID NO: 1611156 - RNA, 19 nt, Artificial Sequence
  Description of Artificial Sequence: Synthetic oligonucleotide
  Antisense strand to SEQ ID NO: 1611155
uuucacagaguucucggaa

SEQ ID NO: 1611157 - RNA, 19 nt, Artificial Sequence
  Description of Artificial Sequence: Synthetic oligonucleotide
  Sense strand starting at position 694 of SEQ ID NO: 1560599
cuggaagaauauuggagaa

SEQ ID NO: 1611158 - RNA, 19 nt, Artificial Sequence
  Description of Artificial Sequence: Synthetic oligonucleotide
  Antisense strand to SEQ ID NO: 1611157
uucuccaauauucuuccag

SEQ ID NO: 1611159 - RNA, 19 nt, Artificial Sequence
  Description of Artificial Sequence: Synthetic oligonucleotide
  Sense strand starting at position 696 of SEQ ID NO: 1560599
ggaagaauauuggagaaga

SEQ ID NO: 1611160 - RNA, 19 nt, Artificial Sequence
  Description of Artificial Sequence: Synthetic oligonucleotide
  Antisense strand to SEQ ID NO: 1611159
ucuucuccaauauucuucc

SEQ ID NO: 1611161 - RNA, 19 nt, Artificial Sequence
  Description of Artificial Sequence: Synthetic oligonucleotide
  Sense strand starting at position 749 of SEQ ID NO: 1560599
gaaguuaacccuggaagca

SEQ ID NO: 1611162 - RNA, 19 nt, Artificial Sequence
  Description of Artificial Sequence: Synthetic oligonucleotide
  Antisense strand to SEQ ID NO: 1611161
ugcuuccaggguuaacuuc

SEQ ID NO: 1611163 - RNA, 19 nt, Artificial Sequence
  Description of Artificial Sequence: Synthetic oligonucleotide
  Sense strand starting at position 771 of SEQ ID NO: 1560599
ggucguugagcguuccuga

SEQ ID NO: 1611164 - RNA, 19 nt, Artificial Sequence
  Description of Artificial Sequence: Synthetic oligonucleotide
  Antisense strand to SEQ ID NO: 1611163
ucaggaacgcucaacgacc

SEQ ID NO: 1611165 - RNA, 19 nt, Artificial Sequence
  Description of Artificial Sequence: Synthetic oligonucleotide
  Sense strand starting at position 776 of SEQ ID NO: 1560599
uugagcguuccugagaaug

SEQ ID NO: 1611166 - RNA, 19 nt, Artificial Sequence
  Description of Artificial Sequence: Synthetic oligonucleotide
  Antisense strand to SEQ ID NO: 1611165
cauucucaggaacgcucaa

SEQ ID NO: 1611167 - RNA, 19 nt, Artificial Sequence
  Description of Artificial Sequence: Synthetic oligonucleotide
  Sense strand starting at position 787 of SEQ ID NO: 1560599
ugagaaugccaacgugaac

SEQ ID NO: 1611168 - RNA, 19 nt, Artificial Sequence
  Description of Artificial Sequence: Synthetic oligonucleotide
  Antisense strand to SEQ ID NO: 1611167
guucacguuggcauucuca

SEQ ID NO: 1611169 - RNA, 19 nt, Artificial Sequence
  Description of Artificial Sequence: Synthetic oligonucleotide
  Sense strand starting at position 811 of SEQ ID NO: 1560599
cgugaagaaauggguucuu

SEQ ID NO: 1611170 - RNA, 19 nt, Artificial Sequence
  Description of Artificial Sequence: Synthetic oligonucleotide
  Antisense strand to SEQ ID NO: 1611169
aagaacccauuucuucacg

SEQ ID NO: 1611171 - RNA, 19 nt, Artificial Sequence
  Description of Artificial Sequence: Synthetic oligonucleotide
  Sense strand starting at position 823 of SEQ ID NO: 1560599
gguucuuagcacugacaga

SEQ ID NO: 1611172 - RNA, 19 nt, Artificial Sequence
  Description of Artificial Sequence: Synthetic oligonucleotide
  Antisense strand to SEQ ID NO: 1611171
ucugucagugcuaagaacc

SEQ ID NO: 1611173 - RNA, 19 nt, Artificial Sequence
  Description of Artificial Sequence: Synthetic oligonucleotide
  Sense strand starting at position 886 of SEQ ID NO: 1560599
gggaguccucagugggacu

SEQ ID NO: 1611174 - RNA, 19 nt, Artificial Sequence
  Description of Artificial Sequence: Synthetic oligonucleotide
  Antisense strand to SEQ ID NO: 1611173
agucccacugaggacuccc

SEQ ID NO: 1611175 - RNA, 19 nt, Artificial Sequence
  Description of Artificial Sequence: Synthetic oligonucleotide
  Sense strand starting at position 979 of SEQ ID NO: 1560599
ggugucuggacauaaagcu

SEQ ID NO: 1611176 - RNA, 19 nt, Artificial Sequence
  Description of Artificial Sequence: Synthetic oligonucleotide
  Antisense strand to SEQ ID NO: 1611175
agcuuuauguccagacacc

SEQ ID NO: 1611177 - RNA, 19 nt, Artificial Sequence
  Description of Artificial Sequence: Synthetic oligonucleotide
  Sense strand starting at position 987 of SEQ ID NO: 1560599
gacauaaagcuuugggaau

SEQ ID NO: 1611178 - RNA, 19 nt, Artificial Sequence
  Description of Artificial Sequence: Synthetic oligonucleotide
  Antisense strand to SEQ ID NO: 1611177
auucccaaagcuuuauguc

SEQ ID NO: 1611179 - RNA, 19 nt, Artificial Sequence
  Description of Artificial Sequence: Synthetic oligonucleotide
  Sense strand starting at position 993 of SEQ ID NO: 1560599
aagcuuugggaaugccaaa

SEQ ID NO: 1611180 - RNA, 19 nt, Artificial Sequence
  Description of Artificial Sequence: Synthetic oligonucleotide
  Antisense strand to SEQ ID NO: 1611179
uuuggcauucccaaagcuu

SEQ ID NO: 1611181 - RNA, 19 nt, Artificial Sequence
  Description of Artificial Sequence: Synthetic oligonucleotide
  Sense strand starting at position 1051 of SEQ ID NO: 1560599
cagagagaauuggaagaaa

SEQ ID NO: 1611182 - RNA, 19 nt, Artificial Sequence
  Description of Artificial Sequence: Synthetic oligonucleotide
  Antisense strand to SEQ ID NO: 1611181
uuucuuccaauucucucug

SEQ ID NO: 1611183 - RNA, 19 nt, Artificial Sequence
  Description of Artificial Sequence: Synthetic oligonucleotide
  Sense strand starting at position 1117 of SEQ ID NO: 1560599
gggaguaacugauaaguag

SEQ ID NO: 1611184 - RNA, 19 nt, Artificial Sequence
  Description of Artificial Sequence: Synthetic oligonucleotide
  Antisense strand to SEQ ID NO: 1611183
cuacuuaucaguuacuccc

SEQ ID NO: 1611185 - RNA, 19 nt, Artificial Sequence
  Description of Artificial Sequence: Synthetic oligonucleotide
  Sense strand starting at position 1124 of SEQ ID NO: 1560599
acugauaaguaggauaauu

SEQ ID NO: 1611186 - RNA, 19 nt, Artificial Sequence
  Description of Artificial Sequence: Synthetic oligonucleotide
  Antisense strand to SEQ ID NO: 1611185
aauuauccuacuuaucagu

SEQ ID NO: 1611187 - RNA, 19 nt, Artificial Sequence
  Description of Artificial Sequence: Synthetic oligonucleotide
  Sense strand starting at position 1138 of SEQ ID NO: 1560599
uaauuaaucccgcaggaga

SEQ ID NO: 1611188 - RNA, 19 nt, Artificial Sequence
  Description of Artificial Sequence: Synthetic oligonucleotide
  Antisense strand to SEQ ID NO: 1611187
ucuccugcgggauuaauua

SEQ ID NO: 1611189 - RNA, 19 nt, Artificial Sequence
  Description of Artificial Sequence: Synthetic oligonucleotide
  Sense strand starting at position 1158 of SEQ ID NO: 1560599
ccggaauucccacgaguug

SEQ ID NO: 1611190 - RNA, 19 nt, Artificial Sequence
  Description of Artificial Sequence: Synthetic oligonucleotide
  Antisense strand to SEQ ID NO: 1611189
caacucgugggaauuccgg

SEQ ID NO: 1611191 - RNA, 19 nt, Artificial Sequence
  Description of Artificial Sequence: Synthetic oligonucleotide
  Sense strand starting at position 1159 of SEQ ID NO: 1560599
cggaauucccacgaguuga

SEQ ID NO: 1611192 - RNA, 19 nt, Artificial Sequence
  Description of Artificial Sequence: Synthetic oligonucleotide
  Antisense strand to SEQ ID NO: 1611191
ucaacucgugggaauuccg

SEQ ID NO: 1611193 - RNA, 19 nt, Artificial Sequence
  Description of Artificial Sequence: Synthetic oligonucleotide
  Sense strand starting at position 2073 of SEQ ID NO: 1560599
gcacuuacgcaugaacauu

SEQ ID NO: 1611194 - RNA, 19 nt, Artificial Sequence
  Description of Artificial Sequence: Synthetic oligonucleotide
  Antisense strand to SEQ ID NO: 1611193
aauguucaugcguaagugc

SEQ ID NO: 1611195 - RNA, 19 nt, Artificial Sequence
  Description of Artificial Sequence: Synthetic oligonucleotide
  Sense strand starting at position 2215 of SEQ ID NO: 1560599
uguuguucucggagacgga

SEQ ID NO: 1611196 - RNA, 19 nt, Artificial Sequence
  Description of Artificial Sequence: Synthetic oligonucleotide
  Antisense strand to SEQ ID NO: 1611195
uccgucuccgagaacaaca

SEQ ID NO: 1611197 - RNA, 19 nt, Artificial Sequence
  Description of Artificial Sequence: Synthetic oligonucleotide
  Sense strand starting at position 2573 of SEQ ID NO: 1560599
acaggaguuccgggauugu

SEQ ID NO: 1611198 - RNA, 19 nt, Artificial Sequence
  Description of Artificial Sequence: Synthetic oligonucleotide
  Antisense strand to SEQ ID NO: 1611197
acaaucccggaacuccugu

SEQ ID NO: 1611199 - RNA, 19 nt, Artificial Sequence
  Description of Artificial Sequence: Synthetic oligonucleotide
  Sense strand starting at position 2619 of SEQ ID NO: 1560599
gggagagaaugauaaagaa

SEQ ID NO: 1611200 - RNA, 19 nt, Artificial Sequence
  Description of Artificial Sequence: Synthetic oligonucleotide
  Antisense strand to SEQ ID NO: 1611199
uucuuuaucauucucuccc

SEQ ID NO: 1611201 - RNA, 19 nt, Artificial Sequence
  Description of Artificial Sequence: Synthetic oligonucleotide
  Sense strand starting at position 2876 of SEQ ID NO: 1560599
uggaccaaauccguacaua

SEQ ID NO: 1611202 - RNA, 19 nt, Artificial Sequence
  Description of Artificial Sequence: Synthetic oligonucleotide
  Antisense strand to SEQ ID NO: 1611201
uauguacggauuuggucca

SEQ ID NO: 1611203 - RNA, 19 nt, Artificial Sequence
  Description of Artificial Sequence: Synthetic oligonucleotide
  Sense strand starting at position 2941 of SEQ ID NO: 1560599
cguccaggacucugauaca

SEQ ID NO: 1611204 - RNA, 19 nt, Artificial Sequence
  Description of Artificial Sequence: Synthetic oligonucleotide
  Antisense strand to SEQ ID NO: 1611203
uguaucagaguccuggacg

SEQ ID NO: 1611205 - RNA, 19 nt, Artificial Sequence
  Description of Artificial Sequence: Synthetic oligonucleotide
  Sense strand starting at position 2944 of SEQ ID NO: 1560599
ccaggacucugauacaacu

SEQ ID NO: 1611206 - RNA, 19 nt, Artificial Sequence
  Description of Artificial Sequence: Synthetic oligonucleotide
  Antisense strand to SEQ ID NO: 1611205
aguuguaucagaguccugg

SEQ ID NO: 1611207 - RNA, 19 nt, Artificial Sequence
  Description of Artificial Sequence: Synthetic oligonucleotide
  Sense strand starting at position 3048 of SEQ ID NO: 1560599
augaacgucuagcuugaaa

SEQ ID NO: 1611208 - RNA, 19 nt, Artificial Sequence
  Description of Artificial Sequence: Synthetic oligonucleotide
  Antisense strand to SEQ ID NO: 1611207
uuucaagcuagacguucau

SEQ ID NO: 1611209 - RNA, 19 nt, Artificial Sequence
  Description of Artificial Sequence: Synthetic oligonucleotide
  Sense strand starting at position 3099 of SEQ ID NO: 1560599
uuguuagugcuagcauagu

SEQ ID NO: 1611210 - RNA, 19 nt, Artificial Sequence
  Description of Artificial Sequence: Synthetic oligonucleotide
  Antisense strand to SEQ ID NO: 1611209
acuaugcuagcacuaacaa

SEQ ID NO: 1611211 - RNA, 19 nt, Artificial Sequence
  Description of Artificial Sequence: Synthetic oligonucleotide
  Sense strand starting at position 3634 of SEQ ID NO: 1560599
uguagauacugacaugaug

SEQ ID NO: 1611212 - RNA, 19 nt, Artificial Sequence
  Description of Artificial Sequence: Synthetic oligonucleotide
  Antisense strand to SEQ ID NO: 1611211
caucaugucaguaucuaca

SEQ ID NO: 1611213 - RNA, 19 nt, Artificial Sequence
  Description of Artificial Sequence: Synthetic oligonucleotide
  Sense strand starting at position 3858 of SEQ ID NO: 1560599
agguguuuauaacuguacu

SEQ ID NO: 1611214 - RNA, 19 nt, Artificial Sequence
  Description of Artificial Sequence: Synthetic oligonucleotide
  Antisense strand to SEQ ID NO: 1611213
aguacaguuauaaacaccu

SEQ ID NO: 1611215 - RNA, 19 nt, Artificial Sequence
  Description of Artificial Sequence: Synthetic oligonucleotide
  Sense strand starting at position 3859 of SEQ ID NO: 1560599
gguguuuauaacuguacuu

SEQ ID NO: 1611216 - RNA, 19 nt, Artificial Sequence
  Description of Artificial Sequence: Synthetic oligonucleotide
  Antisense strand to SEQ ID NO: 1611215
aaguacaguuauaaacacc

SEQ ID NO: 1611217 - RNA, 19 nt, Artificial Sequence
  Description of Artificial Sequence: Synthetic oligonucleotide
  Sense strand starting at position 3887 of SEQ ID NO: 1560599
augucuuauucuuuagcau

SEQ ID NO: 1611218 - RNA, 19 nt, Artificial Sequence
  Description of Artificial Sequence: Synthetic oligonucleotide
  Antisense strand to SEQ ID NO: 1611217
augcuaaagaauaagacau

SEQ ID NO: 1611219 - RNA, 19 nt, Artificial Sequence
  Description of Artificial Sequence: Synthetic oligonucleotide
  Sense strand starting at position 3888 of SEQ ID NO: 1560599
ugucuuauucuuuagcauu

SEQ ID NO: 1611220 - RNA, 19 nt, Artificial Sequence
  Description of Artificial Sequence: Synthetic oligonucleotide
  Antisense strand to SEQ ID NO: 1611219
aaugcuaaagaauaagaca

SEQ ID NO: 1611221 - RNA, 19 nt, Artificial Sequence
  Description of Artificial Sequence: Synthetic oligonucleotide
  Sense strand starting at position 338 of SEQ ID NO: 1560600
ggcuguuugcauccauugu

SEQ ID NO: 1611222 - RNA, 19 nt, Artificial Sequence
  Description of Artificial Sequence: Synthetic oligonucleotide
  Antisense strand to SEQ ID NO: 1611221
acaauggaugcaaacagcc

SEQ ID NO: 1611223 - RNA, 19 nt, Artificial Sequence
  Description of Artificial Sequence: Synthetic oligonucleotide
  Sense strand starting at position 351 of SEQ ID NO: 1560600
cauugucuccuccagaggu

SEQ ID NO: 1611224 - RNA, 19 nt, Artificial Sequence
  Description of Artificial Sequence: Synthetic oligonucleotide
  Antisense strand to SEQ ID NO: 1611223
accucuggaggagacaaug

SEQ ID NO: 1611225 - RNA, 19 nt, Artificial Sequence
  Description of Artificial Sequence: Synthetic oligonucleotide
  Sense strand starting at position 619 of SEQ ID NO: 1560600
caugcuuuccaguguggga

SEQ ID NO: 1611226 - RNA, 19 nt, Artificial Sequence
  Description of Artificial Sequence: Synthetic oligonucleotide
  Antisense strand to SEQ ID NO: 1611225
ucccacacuggaaagcaug

SEQ ID NO: 1611227 - RNA, 19 nt, Artificial Sequence
  Description of Artificial Sequence: Synthetic oligonucleotide
  Sense strand starting at position 672 of SEQ ID NO: 1560600
ggaccagcuuucuaaagcu

SEQ ID NO: 1611228 - RNA, 19 nt, Artificial Sequence
  Description of Artificial Sequence: Synthetic oligonucleotide
  Antisense strand to SEQ ID NO: 1611227
agcuuuagaaagcuggucc

SEQ ID NO: 1611229 - RNA, 19 nt, Artificial Sequence
  Description of Artificial Sequence: Synthetic oligonucleotide
  Sense strand starting at position 852 of SEQ ID NO: 1560600
ccagguauuccugggccuu

SEQ ID NO: 1611230 - RNA, 19 nt, Artificial Sequence
  Description of Artificial Sequence: Synthetic oligonucleotide
  Antisense strand to SEQ ID NO: 1611229
aaggcccaggaauaccugg

SEQ ID NO: 1611231 - RNA, 19 nt, Artificial Sequence
  Description of Artificial Sequence: Synthetic oligonucleotide
  Sense strand starting at position 869 of SEQ ID NO: 1560600
uuggucacuucugcuugua

SEQ ID NO: 1611232 - RNA, 19 nt, Artificial Sequence
  Description of Artificial Sequence: Synthetic oligonucleotide
  Antisense strand to SEQ ID NO: 1611231
uacaagcagaagugaccaa

SEQ ID NO: 1611233 - RNA, 19 nt, Artificial Sequence
  Description of Artificial Sequence: Synthetic oligonucleotide
  Sense strand starting at position 1128 of SEQ ID NO: 1560600
gggccaguguucccaaauc

SEQ ID NO: 1611234 - RNA, 19 nt, Artificial Sequence
  Description of Artificial Sequence: Synthetic oligonucleotide
  Antisense strand to SEQ ID NO: 1611233
gauuugggaacacuggccc

SEQ ID NO: 1611235 - RNA, 19 nt, Artificial Sequence
  Description of Artificial Sequence: Synthetic oligonucleotide
  Sense strand starting at position 1533 of SEQ ID NO: 1560600
ccagaaagcggucgacgua

SEQ ID NO: 1611236 - RNA, 19 nt, Artificial Sequence
  Description of Artificial Sequence: Synthetic oligonucleotide
  Antisense strand to SEQ ID NO: 1611235
uacgucgaccgcuuucugg

SEQ ID NO: 1611237 - RNA, 19 nt, Artificial Sequence
  Description of Artificial Sequence: Synthetic oligonucleotide
  Sense strand starting at position 2130 of SEQ ID NO: 1560600
ugaugugugcugccucuuu

SEQ ID NO: 1611238 - RNA, 19 nt, Artificial Sequence
  Description of Artificial Sequence: Synthetic oligonucleotide
  Antisense strand to SEQ ID NO: 1611237
aaagaggcagcacacauca

SEQ ID NO: 1611239 - RNA, 19 nt, Artificial Sequence
  Description of Artificial Sequence: Synthetic oligonucleotide
  Sense strand starting at position 2140 of SEQ ID NO: 1560600
ugccucuuucugggugauu

SEQ ID NO: 1611240 - RNA, 19 nt, Artificial Sequence
  Description of Artificial Sequence: Synthetic oligonucleotide
  Antisense strand to SEQ ID NO: 1611239
aaucacccagaaagaggca

SEQ ID NO: 1611241 - RNA, 19 nt, Artificial Sequence
  Description of Artificial Sequence: Synthetic oligonucleotide
  Sense strand starting at position 2141 of SEQ ID NO: 1560600
gccucuuucugggugauuu

SEQ ID NO: 1611242 - RNA, 19 nt, Artificial Sequence
  Description of Artificial Sequence: Synthetic oligonucleotide
  Antisense strand to SEQ ID NO: 1611241
aaaucacccagaaagaggc

SEQ ID NO: 1611243 - RNA, 19 nt, Artificial Sequence
  Description of Artificial Sequence: Synthetic oligonucleotide
  Sense strand starting at position 2149 of SEQ ID NO: 1560600
cugggugauuuacauguaa

SEQ ID NO: 1611244 - RNA, 19 nt, Artificial Sequence
  Description of Artificial Sequence: Synthetic oligonucleotide
  Antisense strand to SEQ ID NO: 1611243
uuacauguaaaucacccag

SEQ ID NO: 1611245 - RNA, 19 nt, Artificial Sequence
  Description of Artificial Sequence: Synthetic oligonucleotide
  Sense strand starting at position 2199 of SEQ ID NO: 1560600
ccucgaccuuuaggugauu

SEQ ID NO: 1611246 - RNA, 19 nt, Artificial Sequence
  Description of Artificial Sequence: Synthetic oligonucleotide
  Antisense strand to SEQ ID NO: 1611245
aaucaccuaaaggucgagg

SEQ ID NO: 1611247 - RNA, 19 nt, Artificial Sequence
  Description of Artificial Sequence: Synthetic oligonucleotide
  Sense strand starting at position 2243 of SEQ ID NO: 1560600
cggugauuuacauguggug

SEQ ID NO: 1611248 - RNA, 19 nt, Artificial Sequence
  Description of Artificial Sequence: Synthetic oligonucleotide
  Antisense strand to SEQ ID NO: 1611247
caccacauguaaaucaccg

SEQ ID NO: 1611249 - RNA, 19 nt, Artificial Sequence
  Description of Artificial Sequence: Synthetic oligonucleotide
  Sense strand starting at position 2345 of SEQ ID NO: 1560600
ccaagugauuuacauaugu

SEQ ID NO: 1611250 - RNA, 19 nt, Artificial Sequence
  Description of Artificial Sequence: Synthetic oligonucleotide
  Antisense strand to SEQ ID NO: 1611249
acauauguaaaucacuugg

SEQ ID NO: 1611251 - RNA, 19 nt, Artificial Sequence
  Description of Artificial Sequence: Synthetic oligonucleotide
  Sense strand starting at position 2377 of SEQ ID NO: 1560600
caggguaauuuacauguaa

SEQ ID NO: 1611252 - RNA, 19 nt, Artificial Sequence
  Description of Artificial Sequence: Synthetic oligonucleotide
  Antisense strand to SEQ ID NO: 1611251
uuacauguaaauuacccug

SEQ ID NO: 1611253 - RNA, 19 nt, Artificial Sequence
  Description of Artificial Sequence: Synthetic oligonucleotide
  Sense strand starting at position 2414 of SEQ ID NO: 1560600
gugauuuacgagugccucu

SEQ ID NO: 1611254 - RNA, 19 nt, Artificial Sequence
  Description of Artificial Sequence: Synthetic oligonucleotide
  Antisense strand to SEQ ID NO: 1611253
agaggcacucguaaaucac

SEQ ID NO: 1611255 - RNA, 19 nt, Artificial Sequence
  Description of Artificial Sequence: Synthetic oligonucleotide
  Sense strand starting at position 2440 of SEQ ID NO: 1560600
ucaagugauuuacaugugu

SEQ ID NO: 1611256 - RNA, 19 nt, Artificial Sequence
  Description of Artificial Sequence: Synthetic oligonucleotide
  Antisense strand to SEQ ID NO: 1611255
acacauguaaaucacuuga

SEQ ID NO: 1611257 - RNA, 19 nt, Artificial Sequence
  Description of Artificial Sequence: Synthetic oligonucleotide
  Sense strand starting at position 2495 of SEQ ID NO: 1560600
gcccuuucccagugauacu

SEQ ID NO: 1611258 - RNA, 19 nt, Artificial Sequence
  Description of Artificial Sequence: Synthetic oligonucleotide
  Antisense strand to SEQ ID NO: 1611257
aguaucacugggaaagggc

SEQ ID NO: 1611259 - RNA, 19 nt, Artificial Sequence
  Description of Artificial Sequence: Synthetic oligonucleotide
  Sense strand starting at position 2521 of SEQ ID NO: 1560600
ugccucuuuccgggugauu

SEQ ID NO: 1611260 - RNA, 19 nt, Artificial Sequence
  Description of Artificial Sequence: Synthetic oligonucleotide
  Antisense strand to SEQ ID NO: 1611259
aaucacccggaaagaggca

SEQ ID NO: 1611261 - RNA, 19 nt, Artificial Sequence
  Description of Artificial Sequence: Synthetic oligonucleotide
  Sense strand starting at position 2523 of SEQ ID NO: 1560600
ccucuuuccgggugauuua

SEQ ID NO: 1611262 - RNA, 19 nt, Artificial Sequence
  Description of Artificial Sequence: Synthetic oligonucleotide
  Antisense strand to SEQ ID NO: 1611261
uaaaucacccggaaagagg

SEQ ID NO: 1611263 - RNA, 19 nt, Artificial Sequence
  Description of Artificial Sequence: Synthetic oligonucleotide
  Sense strand starting at position 2534 of SEQ ID NO: 1560600
gugauuuacgugugugccu

SEQ ID NO: 1611264 - RNA, 19 nt, Artificial Sequence
  Description of Artificial Sequence: Synthetic oligonucleotide
  Antisense strand to SEQ ID NO: 1611263
aggcacacacguaaaucac

SEQ ID NO: 1611265 - RNA, 19 nt, Artificial Sequence
  Description of Artificial Sequence: Synthetic oligonucleotide
  Sense strand starting at position 2557 of SEQ ID NO: 1560600
ccaagugauuuacaugugu

SEQ ID NO: 1611266 - RNA, 19 nt, Artificial Sequence
  Description of Artificial Sequence: Synthetic oligonucleotide
  Antisense strand to SEQ ID NO: 1611265
acacauguaaaucacuugg

SEQ ID NO: 1611267 - RNA, 19 nt, Artificial Sequence
  Description of Artificial Sequence: Synthetic oligonucleotide
  Sense strand starting at position 2624 of SEQ ID NO: 1560600
gggugauuuaccugugucc

SEQ ID NO: 1611268 - RNA, 19 nt, Artificial Sequence
  Description of Artificial Sequence: Synthetic oligonucleotide
  Antisense strand to SEQ ID NO: 1611267
ggacacagguaaaucaccc

SEQ ID NO: 1611269 - RNA, 19 nt, Artificial Sequence
  Description of Artificial Sequence: Synthetic oligonucleotide
  Sense strand starting at position 2626 of SEQ ID NO: 1560600
gugauuuaccuguguccca

SEQ ID NO: 1611270 - RNA, 19 nt, Artificial Sequence
  Description of Artificial Sequence: Synthetic oligonucleotide
  Antisense strand to SEQ ID NO: 1611269
ugggacacagguaaaucac

SEQ ID NO: 1611271 - RNA, 19 nt, Artificial Sequence
  Description of Artificial Sequence: Synthetic oligonucleotide
  Sense strand starting at position 2627 of SEQ ID NO: 1560600
ugauuuaccugugucccau

SEQ ID NO: 1611272 - RNA, 19 nt, Artificial Sequence
  Description of Artificial Sequence: Synthetic oligonucleotide
  Antisense strand to SEQ ID NO: 1611271
augggacacagguaaauca

SEQ ID NO: 1611273 - RNA, 19 nt, Artificial Sequence
  Description of Artificial Sequence: Synthetic oligonucleotide
  Sense strand starting at position 2645 of SEQ ID NO: 1560600
ucccuuucccggugauuua

SEQ ID NO: 1611274 - RNA, 19 nt, Artificial Sequence
  Description of Artificial Sequence: Synthetic oligonucleotide
  Antisense strand to SEQ ID NO: 1611273
uaaaucaccgggaaaggga

SEQ ID NO: 1611275 - RNA, 19 nt, Artificial Sequence
  Description of Artificial Sequence: Synthetic oligonucleotide
  Sense strand starting at position 3102 of SEQ ID NO: 1560600
gcgcacaguauuugacgaa

SEQ ID NO: 1611276 - RNA, 19 nt, Artificial Sequence
  Description of Artificial Sequence: Synthetic oligonucleotide
  Antisense strand to SEQ ID NO: 1611275
uucgucaaauacugugcgc

SEQ ID NO: 1611277 - RNA, 19 nt, Artificial Sequence
  Description of Artificial Sequence: Synthetic oligonucleotide
  Sense strand starting at position 3103 of SEQ ID NO: 1560600
cgcacaguauuugacgaau

SEQ ID NO: 1611278 - RNA, 19 nt, Artificial Sequence
  Description of Artificial Sequence: Synthetic oligonucleotide
  Antisense strand to SEQ ID NO: 1611277
auucgucaaauacugugcg

SEQ ID NO: 1611279 - RNA, 19 nt, Artificial Sequence
  Description of Artificial Sequence: Synthetic oligonucleotide
  Sense strand starting at position 3261 of SEQ ID NO: 1560600
gcgccaggacccuaucauu

SEQ ID NO: 1611280 - RNA, 19 nt, Artificial Sequence
  Description of Artificial Sequence: Synthetic oligonucleotide
  Antisense strand to SEQ ID NO: 1611279
aaugauaggguccuggcgc

SEQ ID NO: 1611281 - RNA, 19 nt, Artificial Sequence
  Description of Artificial Sequence: Synthetic oligonucleotide
  Sense strand starting at position 3331 of SEQ ID NO: 1560600
gccguuuauguauacagaa

SEQ ID NO: 1611282 - RNA, 19 nt, Artificial Sequence
  Description of Artificial Sequence: Synthetic oligonucleotide
  Antisense strand to SEQ ID NO: 1611281
uucuguauacauaaacggc

SEQ ID NO: 1611283 - RNA, 19 nt, Artificial Sequence
  Description of Artificial Sequence: Synthetic oligonucleotide
  Sense strand starting at position 3333 of SEQ ID NO: 1560600
cguuuauguauacagaagu

SEQ ID NO: 1611284 - RNA, 19 nt, Artificial Sequence
  Description of Artificial Sequence: Synthetic oligonucleotide
  Antisense strand to SEQ ID NO: 1611283
acuucuguauacauaaacg

SEQ ID NO: 1611285 - RNA, 19 nt, Artificial Sequence
  Description of Artificial Sequence: Synthetic oligonucleotide
  Sense strand starting at position 275 of SEQ ID NO: 1560601
guaucuucucuugaguaug

SEQ ID NO: 1611286 - RNA, 19 nt, Artificial Sequence
  Description of Artificial Sequence: Synthetic oligonucleotide
  Antisense strand to SEQ ID NO: 1611285
cauacucaagagaagauac

SEQ ID NO: 1611287 - RNA, 19 nt, Artificial Sequence
  Description of Artificial Sequence: Synthetic oligonucleotide
  Sense strand starting at position 277 of SEQ ID NO: 1560601
aucuucucuugaguaugga

SEQ ID NO: 1611288 - RNA, 19 nt, Artificial Sequence
  Description of Artificial Sequence: Synthetic oligonucleotide
  Antisense strand to SEQ ID NO: 1611287
uccauacucaagagaagau

SEQ ID NO: 1611289 - RNA, 19 nt, Artificial Sequence
  Description of Artificial Sequence: Synthetic oligonucleotide
  Sense strand starting at position 278 of SEQ ID NO: 1560601
ucuucucuugaguauggau

SEQ ID NO: 1611290 - RNA, 19 nt, Artificial Sequence
  Description of Artificial Sequence: Synthetic oligonucleotide
  Antisense strand to SEQ ID NO: 1611289
auccauacucaagagaaga

SEQ ID NO: 1611291 - RNA, 19 nt, Artificial Sequence
  Description of Artificial Sequence: Synthetic oligonucleotide
  Sense strand starting at position 481 of SEQ ID NO: 1560601
ucuccaugaugggucuuau

SEQ ID NO: 1611292 - RNA, 19 nt, Artificial Sequence
  Description of Artificial Sequence: Synthetic oligonucleotide
  Antisense strand to SEQ ID NO: 1611291
auaagacccaucauggaga

SEQ ID NO: 1611293 - RNA, 19 nt, Artificial Sequence
  Description of Artificial Sequence: Synthetic oligonucleotide
  Sense strand starting at position 505 of SEQ ID NO: 1560601
gggugaguguaauucacua

SEQ ID NO: 1611294 - RNA, 19 nt, Artificial Sequence
  Description of Artificial Sequence: Synthetic oligonucleotide
  Antisense strand to SEQ ID NO: 1611293
uagugaauuacacucaccc

SEQ ID NO: 1611295 - RNA, 19 nt, Artificial Sequence
  Description of Artificial Sequence: Synthetic oligonucleotide
  Sense strand starting at position 527 of SEQ ID NO: 1560601
agaucuagucucuauccau

SEQ ID NO: 1611296 - RNA, 19 nt, Artificial Sequence
  Description of Artificial Sequence: Synthetic oligonucleotide
  Antisense strand to SEQ ID NO: 1611295
auggauagagacuagaucu

SEQ ID NO: 1611297 - RNA, 19 nt, Artificial Sequence
  Description of Artificial Sequence: Synthetic oligonucleotide
  Sense strand starting at position 533 of SEQ ID NO: 1560601
agucucuauccaugagaua

SEQ ID NO: 1611298 - RNA, 19 nt, Artificial Sequence
  Description of Artificial Sequence: Synthetic oligonucleotide
  Antisense strand to SEQ ID NO: 1611297
uaucucauggauagagacu

SEQ ID NO: 1611299 - RNA, 19 nt, Artificial Sequence
  Description of Artificial Sequence: Synthetic oligonucleotide
  Sense strand starting at position 534 of SEQ ID NO: 1560601
gucucuauccaugagauau

SEQ ID NO: 1611300 - RNA, 19 nt, Artificial Sequence
  Description of Artificial Sequence: Synthetic oligonucleotide
  Antisense strand to SEQ ID NO: 1611299
auaucucauggauagagac

SEQ ID NO: 1611301 - RNA, 19 nt, Artificial Sequence
  Description of Artificial Sequence: Synthetic oligonucleotide
  Sense strand starting at position 580 of SEQ ID NO: 1560601
agcuuucugaagcagagau

SEQ ID NO: 1611302 - RNA, 19 nt, Artificial Sequence
  Description of Artificial Sequence: Synthetic oligonucleotide
  Antisense strand to SEQ ID NO: 1611301
aucucugcuucagaaagcu

SEQ ID NO: 1611303 - RNA, 19 nt, Artificial Sequence
  Description of Artificial Sequence: Synthetic oligonucleotide
  Sense strand starting at position 684 of SEQ ID NO: 1560601
aaagucuuggacuagcgaa

SEQ ID NO: 1611304 - RNA, 19 nt, Artificial Sequence
  Description of Artificial Sequence: Synthetic oligonucleotide
  Antisense strand to SEQ ID NO: 1611303
uucgcuaguccaagacuuu

SEQ ID NO: 1611305 - RNA, 19 nt, Artificial Sequence
  Description of Artificial Sequence: Synthetic oligonucleotide
  Sense strand starting at position 703 of SEQ ID NO: 1560601
agaacucugucucugggaa

SEQ ID NO: 1611306 - RNA, 19 nt, Artificial Sequence
  Description of Artificial Sequence: Synthetic oligonucleotide
  Antisense strand to SEQ ID NO: 1611305
uucccagagacagaguucu

SEQ ID NO: 1611307 - RNA, 19 nt, Artificial Sequence
  Description of Artificial Sequence: Synthetic oligonucleotide
  Sense strand starting at position 704 of SEQ ID NO: 1560601
gaacucugucucugggaac

SEQ ID NO: 1611308 - RNA, 19 nt, Artificial Sequence
  Description of Artificial Sequence: Synthetic oligonucleotide
  Antisense strand to SEQ ID NO: 1611307
guucccagagacagaguuc

SEQ ID NO: 1611309 - RNA, 19 nt, Artificial Sequence
  Description of Artificial Sequence: Synthetic oligonucleotide
  Sense strand starting at position 1035 of SEQ ID NO: 1560601
uagaaucagucccuggagu

SEQ ID NO: 1611310 - RNA, 19 nt, Artificial Sequence
  Description of Artificial Sequence: Synthetic oligonucleotide
  Antisense strand to SEQ ID NO: 1611309
acuccagggacugauucua

SEQ ID NO: 1611311 - RNA, 19 nt, Artificial Sequence
  Description of Artificial Sequence: Synthetic oligonucleotide
  Sense strand starting at position 1036 of SEQ ID NO: 1560601
agaaucagucccuggaguu

SEQ ID NO: 1611312 - RNA, 19 nt, Artificial Sequence
  Description of Artificial Sequence: Synthetic oligonucleotide
  Antisense strand to SEQ ID NO: 1611311
aacuccagggacugauucu

SEQ ID NO: 1611313 - RNA, 19 nt, Artificial Sequence
  Description of Artificial Sequence: Synthetic oligonucleotide
  Sense strand starting at position 1037 of SEQ ID NO: 1560601
gaaucagucccuggaguug

SEQ ID NO: 1611314 - RNA, 19 nt, Artificial Sequence
  Description of Artificial Sequence: Synthetic oligonucleotide
  Antisense strand to SEQ ID NO: 1611313
caacuccagggacugauuc

SEQ ID NO: 1611315 - RNA, 19 nt, Artificial Sequence
  Description of Artificial Sequence: Synthetic oligonucleotide
  Sense strand starting at position 1049 of SEQ ID NO: 1560601
ggaguugcccuaugacacu

SEQ ID NO: 1611316 - RNA, 19 nt, Artificial Sequence
  Description of Artificial Sequence: Synthetic oligonucleotide
  Antisense strand to SEQ ID NO: 1611315
agugucauagggcaacucc

SEQ ID NO: 1611317 - RNA, 19 nt, Artificial Sequence
  Description of Artificial Sequence: Synthetic oligonucleotide
  Sense strand starting at position 1200 of SEQ ID NO: 1560601
ugcuaagauuuguuccagu

SEQ ID NO: 1611318 - RNA, 19 nt, Artificial Sequence
  Description of Artificial Sequence: Synthetic oligonucleotide
  Antisense strand to SEQ ID NO: 1611317
acuggaacaaaucuuagca

SEQ ID NO: 1611319 - RNA, 19 nt, Artificial Sequence
  Description of Artificial Sequence: Synthetic oligonucleotide
  Sense strand starting at position 1322 of SEQ ID NO: 1560601
cgcaguucugauuaugaua

SEQ ID NO: 1611320 - RNA, 19 nt, Artificial Sequence
  Description of Artificial Sequence: Synthetic oligonucleotide
  Antisense strand to SEQ ID NO: 1611319
uaucauaaucagaacugcg

SEQ ID NO: 1611321 - RNA, 19 nt, Artificial Sequence
  Description of Artificial Sequence: Synthetic oligonucleotide
  Sense strand starting at position 1406 of SEQ ID NO: 1560601
guaagaugucucugaggaa

SEQ ID NO: 1611322 - RNA, 19 nt, Artificial Sequence
  Description of Artificial Sequence: Synthetic oligonucleotide
  Antisense strand to SEQ ID NO: 1611321
uuccucagagacaucuuac

SEQ ID NO: 1611323 - RNA, 19 nt, Artificial Sequence
  Description of Artificial Sequence: Synthetic oligonucleotide
  Sense strand starting at position 1410 of SEQ ID NO: 1560601
gaugucucugaggaaguau

SEQ ID NO: 1611324 - RNA, 19 nt, Artificial Sequence
  Description of Artificial Sequence: Synthetic oligonucleotide
  Antisense strand to SEQ ID NO: 1611323
auacuuccucagagacauc

SEQ ID NO: 1611325 - RNA, 19 nt, Artificial Sequence
  Description of Artificial Sequence: Synthetic oligonucleotide
  Sense strand starting at position 1512 of SEQ ID NO: 1560601
augucugaggugcagauaa

SEQ ID NO: 1611326 - RNA, 19 nt, Artificial Sequence
  Description of Artificial Sequence: Synthetic oligonucleotide
  Antisense strand to SEQ ID NO: 1611325
uuaucugcaccucagacau

SEQ ID NO: 1611327 - RNA, 19 nt, Artificial Sequence
  Description of Artificial Sequence: Synthetic oligonucleotide
  Sense strand starting at position 1514 of SEQ ID NO: 1560601
gucugaggugcagauaaga

SEQ ID NO: 1611328 - RNA, 19 nt, Artificial Sequence
  Description of Artificial Sequence: Synthetic oligonucleotide
  Antisense strand to SEQ ID NO: 1611327
ucuuaucugcaccucagac

SEQ ID NO: 1611329 - RNA, 19 nt, Artificial Sequence
  Description of Artificial Sequence: Synthetic oligonucleotide
  Sense strand starting at position 1527 of SEQ ID NO: 1560601
auaagaggccacuguaguu

SEQ ID NO: 1611330 - RNA, 19 nt, Artificial Sequence
  Description of Artificial Sequence: Synthetic oligonucleotide
  Antisense strand to SEQ ID NO: 1611329
aacuacaguggccucuuau

SEQ ID NO: 1611331 - RNA, 19 nt, Artificial Sequence
  Description of Artificial Sequence: Synthetic oligonucleotide
  Sense strand starting at position 1550 of SEQ ID NO: 1560601
uguguugugggagaggaau

SEQ ID NO: 1611332 - RNA, 19 nt, Artificial Sequence
  Description of Artificial Sequence: Synthetic oligonucleotide
  Antisense strand to SEQ ID NO: 1611331
auuccucucccacaacaca

SEQ ID NO: 1611333 - RNA, 19 nt, Artificial Sequence
  Description of Artificial Sequence: Synthetic oligonucleotide
  Sense strand starting at position 1552 of SEQ ID NO: 1560601
uguugugggagaggaauau

SEQ ID NO: 1611334 - RNA, 19 nt, Artificial Sequence
  Description of Artificial Sequence: Synthetic oligonucleotide
  Antisense strand to SEQ ID NO: 1611333
auauuccucucccacaaca

SEQ ID NO: 1611335 - RNA, 19 nt, Artificial Sequence
  Description of Artificial Sequence: Synthetic oligonucleotide
  Sense strand starting at position 1878 of SEQ ID NO: 1560601
accacaagcuacuugagaa

SEQ ID NO: 1611336 - RNA, 19 nt, Artificial Sequence
  Description of Artificial Sequence: Synthetic oligonucleotide
  Antisense strand to SEQ ID NO: 1611335
uucucaaguagcuuguggu

SEQ ID NO: 1611337 - RNA, 19 nt, Artificial Sequence
  Description of Artificial Sequence: Synthetic oligonucleotide
  Sense strand starting at position 1910 of SEQ ID NO: 1560601
aucgccucaccuugagaaa

SEQ ID NO: 1611338 - RNA, 19 nt, Artificial Sequence
  Description of Artificial Sequence: Synthetic oligonucleotide
  Antisense strand to SEQ ID NO: 1611337
uuucucaaggugaggcgau

SEQ ID NO: 1611339 - RNA, 19 nt, Artificial Sequence
  Description of Artificial Sequence: Synthetic oligonucleotide
  Sense strand starting at position 2018 of SEQ ID NO: 1560601
guugcauuuguuuggagca

SEQ ID NO: 1611340 - RNA, 19 nt, Artificial Sequence
  Description of Artificial Sequence: Synthetic oligonucleotide
  Antisense strand to SEQ ID NO: 1611339
ugcuccaaacaaaugcaac

SEQ ID NO: 1611341 - RNA, 19 nt, Artificial Sequence
  Description of Artificial Sequence: Synthetic oligonucleotide
  Sense strand starting at position 2187 of SEQ ID NO: 1560601
ugggaauguuggucuccau

SEQ ID NO: 1611342 - RNA, 19 nt, Artificial Sequence
  Description of Artificial Sequence: Synthetic oligonucleotide
  Antisense strand to SEQ ID NO: 1611341
auggagaccaacauuccca

SEQ ID NO: 1611343 - RNA, 19 nt, Artificial Sequence
  Description of Artificial Sequence: Synthetic oligonucleotide
  Sense strand starting at position 2190 of SEQ ID NO: 1560601
gaauguuggucuccaugag

SEQ ID NO: 1611344 - RNA, 19 nt, Artificial Sequence
  Description of Artificial Sequence: Synthetic oligonucleotide
  Antisense strand to SEQ ID NO: 1611343
cucauggagaccaacauuc

SEQ ID NO: 1611345 - RNA, 19 nt, Artificial Sequence
  Description of Artificial Sequence: Synthetic oligonucleotide
  Sense strand starting at position 2263 of SEQ ID NO: 1560601
augguaguugcucauuaua

SEQ ID NO: 1611346 - RNA, 19 nt, Artificial Sequence
  Description of Artificial Sequence: Synthetic oligonucleotide
  Antisense strand to SEQ ID NO: 1611345
uauaaugagcaacuaccau

SEQ ID NO: 1611347 - RNA, 19 nt, Artificial Sequence
  Description of Artificial Sequence: Synthetic oligonucleotide
  Sense strand starting at position 2266 of SEQ ID NO: 1560601
guaguugcucauuauaaga

SEQ ID NO: 1611348 - RNA, 19 nt, Artificial Sequence
  Description of Artificial Sequence: Synthetic oligonucleotide
  Antisense strand to SEQ ID NO: 1611347
ucuuauaaugagcaacuac

SEQ ID NO: 1611349 - RNA, 19 nt, Artificial Sequence
  Description of Artificial Sequence: Synthetic oligonucleotide
  Sense strand starting at position 2389 of SEQ ID NO: 1560601
uuggcaugcacugaaguau

SEQ ID NO: 1611350 - RNA, 19 nt, Artificial Sequence
  Description of Artificial Sequence: Synthetic oligonucleotide
  Antisense strand to SEQ ID NO: 1611349
auacuucagugcaugccaa

SEQ ID NO: 1611351 - RNA, 19 nt, Artificial Sequence
  Description of Artificial Sequence: Synthetic oligonucleotide
  Sense strand starting at position 2683 of SEQ ID NO: 1560601
gucaucgcagaucaguaau

SEQ ID NO: 1611352 - RNA, 19 nt, Artificial Sequence
  Description of Artificial Sequence: Synthetic oligonucleotide
  Antisense strand to SEQ ID NO: 1611351
auuacugaucugcgaugac

SEQ ID NO: 1611353 - RNA, 19 nt, Artificial Sequence
  Description of Artificial Sequence: Synthetic oligonucleotide
  Sense strand starting at position 2989 of SEQ ID NO: 1560601
cugauuggaugauggauuu

SEQ ID NO: 1611354 - RNA, 19 nt, Artificial Sequence
  Description of Artificial Sequence: Synthetic oligonucleotide
  Antisense strand to SEQ ID NO: 1611353
aaauccaucauccaaucag

SEQ ID NO: 1611355 - RNA, 19 nt, Artificial Sequence
  Description of Artificial Sequence: Synthetic oligonucleotide
  Sense strand starting at position 3111 of SEQ ID NO: 1560601
ucuuguggagcugaaugua

SEQ ID NO: 1611356 - RNA, 19 nt, Artificial Sequence
  Description of Artificial Sequence: Synthetic oligonucleotide
  Antisense strand to SEQ ID NO: 1611355
uacauucagcuccacaaga

SEQ ID NO: 1611357 - RNA, 19 nt, Artificial Sequence
  Description of Artificial Sequence: Synthetic oligonucleotide
  Sense strand starting at position 3388 of SEQ ID NO: 1560601
acccuuuguccuggagaag

SEQ ID NO: 1611358 - RNA, 19 nt, Artificial Sequence
  Description of Artificial Sequence: Synthetic oligonucleotide
  Antisense strand to SEQ ID NO: 1611357
cuucuccaggacaaagggu

SEQ ID NO: 1611359 - RNA, 19 nt, Artificial Sequence
  Description of Artificial Sequence: Synthetic oligonucleotide
  Sense strand starting at position 3427 of SEQ ID NO: 1560601
ggguuucuaguuuaggaga

SEQ ID NO: 1611360 - RNA, 19 nt, Artificial Sequence
  Description of Artificial Sequence: Synthetic oligonucleotide
  Antisense strand to SEQ ID NO: 1611359
ucuccuaaacuagaaaccc

SEQ ID NO: 1611361 - RNA, 19 nt, Artificial Sequence
  Description of Artificial Sequence: Synthetic oligonucleotide
  Sense strand starting at position 3515 of SEQ ID NO: 1560601
ugugcucaccuguauuaag

SEQ ID NO: 1611362 - RNA, 19 nt, Artificial Sequence
  Description of Artificial Sequence: Synthetic oligonucleotide
  Antisense strand to SEQ ID NO: 1611361
cuuaauacaggugagcaca

SEQ ID NO: 1611363 - RNA, 19 nt, Artificial Sequence
  Description of Artificial Sequence: Synthetic oligonucleotide
  Sense strand starting at position 3546 of SEQ ID NO: 1560601
acagauagcucccucaaag

SEQ ID NO: 1611364 - RNA, 19 nt, Artificial Sequence
  Description of Artificial Sequence: Synthetic oligonucleotide
  Antisense strand to SEQ ID NO: 1611363
cuuugagggagcuaucugu

SEQ ID NO: 1611365 - RNA, 19 nt, Artificial Sequence
  Description of Artificial Sequence: Synthetic oligonucleotide
  Sense strand starting at position 34 of SEQ ID NO: 1560602
uguggacucuccucuuuaa

SEQ ID NO: 1611366 - RNA, 19 nt, Artificial Sequence
  Description of Artificial Sequence: Synthetic oligonucleotide
  Antisense strand to SEQ ID NO: 1611365
uuaaagaggagaguccaca

SEQ ID NO: 1611367 - RNA, 19 nt, Artificial Sequence
  Description of Artificial Sequence: Synthetic oligonucleotide
  Sense strand starting at position 172 of SEQ ID NO: 1560602
agucuuagauuugcuacuu

SEQ ID NO: 1611368 - RNA, 19 nt, Artificial Sequence
  Description of Artificial Sequence: Synthetic oligonucleotide
  Antisense strand to SEQ ID NO: 1611367
aaguagcaaaucuaagacu

SEQ ID NO: 1611369 - RNA, 19 nt, Artificial Sequence
  Description of Artificial Sequence: Synthetic oligonucleotide
  Sense strand starting at position 173 of SEQ ID NO: 1560602
gucuuagauuugcuacuug

SEQ ID NO: 1611370 - RNA, 19 nt, Artificial Sequence
  Description of Artificial Sequence: Synthetic oligonucleotide
  Antisense strand to SEQ ID NO: 1611369
caaguagcaaaucuaagac

SEQ ID NO: 1611371 - RNA, 19 nt, Artificial Sequence
  Description of Artificial Sequence: Synthetic oligonucleotide
  Sense strand starting at position 219 of SEQ ID NO: 1560602
cgaggauuaucaggaauuu

SEQ ID NO: 1611372 - RNA, 19 nt, Artificial Sequence
  Description of Artificial Sequence: Synthetic oligonucleotide
  Antisense strand to SEQ ID NO: 1611371
aaauuccugauaauccucg

SEQ ID NO: 1611373 - RNA, 19 nt, Artificial Sequence
  Description of Artificial Sequence: Synthetic oligonucleotide
  Sense strand starting at position 248 of SEQ ID NO: 1560602
ggauguucuccguaauagg

SEQ ID NO: 1611374 - RNA, 19 nt, Artificial Sequence
  Description of Artificial Sequence: Synthetic oligonucleotide
  Antisense strand to SEQ ID NO: 1611373
ccuauuacggagaacaucc

SEQ ID NO: 1611375 - RNA, 19 nt, Artificial Sequence
  Description of Artificial Sequence: Synthetic oligonucleotide
  Sense strand starting at position 255 of SEQ ID NO: 1560602
cuccguaauagggaguuaa

SEQ ID NO: 1611376 - RNA, 19 nt, Artificial Sequence
  Description of Artificial Sequence: Synthetic oligonucleotide
  Antisense strand to SEQ ID NO: 1611375
uuaacucccuauuacggag

SEQ ID NO: 1611377 - RNA, 19 nt, Artificial Sequence
  Description of Artificial Sequence: Synthetic oligonucleotide
  Sense strand starting at position 314 of SEQ ID NO: 1560602
gccucuuagggugaccuaa

SEQ ID NO: 1611378 - RNA, 19 nt, Artificial Sequence
  Description of Artificial Sequence: Synthetic oligonucleotide
  Antisense strand to SEQ ID NO: 1611377
uuaggucacccuaagaggc

SEQ ID NO: 1611379 - RNA, 19 nt, Artificial Sequence
  Description of Artificial Sequence: Synthetic oligonucleotide
  Sense strand starting at position 337 of SEQ ID NO: 1560602
acaggagaguccucuugaa

SEQ ID NO: 1611380 - RNA, 19 nt, Artificial Sequence
  Description of Artificial Sequence: Synthetic oligonucleotide
  Antisense strand to SEQ ID NO: 1611379
uucaagaggacucuccugu

SEQ ID NO: 1611381 - RNA, 19 nt, Artificial Sequence
  Description of Artificial Sequence: Synthetic oligonucleotide
  Sense strand starting at position 625 of SEQ ID NO: 1560602
augauugauuucuaugaug

SEQ ID NO: 1611382 - RNA, 19 nt, Artificial Sequence
  Description of Artificial Sequence: Synthetic oligonucleotide
  Antisense strand to SEQ ID NO: 1611381
caucauagaaaucaaucau

SEQ ID NO: 1611383 - RNA, 19 nt, Artificial Sequence
  Description of Artificial Sequence: Synthetic oligonucleotide
  Sense strand starting at position 628 of SEQ ID NO: 1560602
auugauuucuaugaugacu

SEQ ID NO: 1611384 - RNA, 19 nt, Artificial Sequence
  Description of Artificial Sequence: Synthetic oligonucleotide
  Antisense strand to SEQ ID NO: 1611383
agucaucauagaaaucaau

SEQ ID NO: 1611385 - RNA, 19 nt, Artificial Sequence
  Description of Artificial Sequence: Synthetic oligonucleotide
  Sense strand starting at position 785 of SEQ ID NO: 1560602
ucuugaauagcugggaaga

SEQ ID NO: 1611386 - RNA, 19 nt, Artificial Sequence
  Description of Artificial Sequence: Synthetic oligonucleotide
  Antisense strand to SEQ ID NO: 1611385
ucuucccagcuauucaaga

SEQ ID NO: 1611387 - RNA, 19 nt, Artificial Sequence
  Description of Artificial Sequence: Synthetic oligonucleotide
  Sense strand starting at position 927 of SEQ ID NO: 1560602
gugggauuauagccauaag

SEQ ID NO: 1611388 - RNA, 19 nt, Artificial Sequence
  Description of Artificial Sequence: Synthetic oligonucleotide
  Antisense strand to SEQ ID NO: 1611387
cuuauggcuauaaucccac

SEQ ID NO: 1611389 - RNA, 19 nt, Artificial Sequence
  Description of Artificial Sequence: Synthetic oligonucleotide
  Sense strand starting at position 957 of SEQ ID NO: 1560602
agcugcuugguugauuaau

SEQ ID NO: 1611390 - RNA, 19 nt, Artificial Sequence
  Description of Artificial Sequence: Synthetic oligonucleotide
  Antisense strand to SEQ ID NO: 1611389
auuaaucaaccaagcagcu

SEQ ID NO: 1611391 - RNA, 19 nt, Artificial Sequence
  Description of Artificial Sequence: Synthetic oligonucleotide
  Sense strand starting at position 959 of SEQ ID NO: 1560602
cugcuugguugauuaauau

SEQ ID NO: 1611392 - RNA, 19 nt, Artificial Sequence
  Description of Artificial Sequence: Synthetic oligonucleotide
  Antisense strand to SEQ ID NO: 1611391
auauuaaucaaccaagcag

SEQ ID NO: 1611393 - RNA, 19 nt, Artificial Sequence
  Description of Artificial Sequence: Synthetic oligonucleotide
  Sense strand starting at position 980 of SEQ ID NO: 1560602
acuguaagcuccuucugaa

SEQ ID NO: 1611394 - RNA, 19 nt, Artificial Sequence
  Description of Artificial Sequence: Synthetic oligonucleotide
  Antisense strand to SEQ ID NO: 1611393
uucagaaggagcuuacagu

SEQ ID NO: 1611395 - RNA, 19 nt, Artificial Sequence
  Description of Artificial Sequence: Synthetic oligonucleotide
  Sense strand starting at position 1332 of SEQ ID NO: 1560602
ugaaauaaguccuugguaa

SEQ ID NO: 1611396 - RNA, 19 nt, Artificial Sequence
  Description of Artificial Sequence: Synthetic oligonucleotide
  Antisense strand to SEQ ID NO: 1611395
uuaccaaggacuuauuuca

SEQ ID NO: 1611397 - RNA, 19 nt, Artificial Sequence
  Description of Artificial Sequence: Synthetic oligonucleotide
  Sense strand starting at position 1333 of SEQ ID NO: 1560602
gaaauaaguccuugguaac

SEQ ID NO: 1611398 - RNA, 19 nt, Artificial Sequence
  Description of Artificial Sequence: Synthetic oligonucleotide
  Antisense strand to SEQ ID NO: 1611397
guuaccaaggacuuauuuc

SEQ ID NO: 1611399 - RNA, 19 nt, Artificial Sequence
  Description of Artificial Sequence: Synthetic oligonucleotide
  Sense strand starting at position 1375 of SEQ ID NO: 1560602
aguuaagccacaugggauu

SEQ ID NO: 1611400 - RNA, 19 nt, Artificial Sequence
  Description of Artificial Sequence: Synthetic oligonucleotide
  Antisense strand to SEQ ID NO: 1611399
aaucccauguggcuuaacu

SEQ ID NO: 1611401 - RNA, 19 nt, Artificial Sequence
  Description of Artificial Sequence: Synthetic oligonucleotide
  Sense strand starting at position 1435 of SEQ ID NO: 1560602
ugaagaaagccacaugcau

SEQ ID NO: 1611402 - RNA, 19 nt, Artificial Sequence
  Description of Artificial Sequence: Synthetic oligonucleotide
  Antisense strand to SEQ ID NO: 1611401
augcauguggcuuucuuca

SEQ ID NO: 1611403 - RNA, 19 nt, Artificial Sequence
  Description of Artificial Sequence: Synthetic oligonucleotide
  Sense strand starting at position 1692 of SEQ ID NO: 1560602
acauuaucuccgcagaguu

SEQ ID NO: 1611404 - RNA, 19 nt, Artificial Sequence
  Description of Artificial Sequence: Synthetic oligonucleotide
  Antisense strand to SEQ ID NO: 1611403
aacucugcggagauaaugu

SEQ ID NO: 1611405 - RNA, 19 nt, Artificial Sequence
  Description of Artificial Sequence: Synthetic oligonucleotide
  Sense strand starting at position 1694 of SEQ ID NO: 1560602
auuaucuccgcagaguuua

SEQ ID NO: 1611406 - RNA, 19 nt, Artificial Sequence
  Description of Artificial Sequence: Synthetic oligonucleotide
  Antisense strand to SEQ ID NO: 1611405
uaaacucugcggagauaau

SEQ ID NO: 1611407 - RNA, 19 nt, Artificial Sequence
  Description of Artificial Sequence: Synthetic oligonucleotide
  Sense strand starting at position 1704 of SEQ ID NO: 1560602
cagaguuuaugcucaucag

SEQ ID NO: 1611408 - RNA, 19 nt, Artificial Sequence
  Description of Artificial Sequence: Synthetic oligonucleotide
  Antisense strand to SEQ ID NO: 1611407
cugaugagcauaaacucug

SEQ ID NO: 1611409 - RNA, 19 nt, Artificial Sequence
  Description of Artificial Sequence: Synthetic oligonucleotide
  Sense strand starting at position 1705 of SEQ ID NO: 1560602
agaguuuaugcucaucaga

SEQ ID NO: 1611410 - RNA, 19 nt, Artificial Sequence
  Description of Artificial Sequence: Synthetic oligonucleotide
  Antisense strand to SEQ ID NO: 1611409
ucugaugagcauaaacucu

SEQ ID NO: 1611411 - RNA, 19 nt, Artificial Sequence
  Description of Artificial Sequence: Synthetic oligonucleotide
  Sense strand starting at position 1707 of SEQ ID NO: 1560602
aguuuaugcucaucagaca

SEQ ID NO: 1611412 - RNA, 19 nt, Artificial Sequence
  Description of Artificial Sequence: Synthetic oligonucleotide
  Antisense strand to SEQ ID NO: 1611411
ugucugaugagcauaaacu

SEQ ID NO: 1611413 - RNA, 19 nt, Artificial Sequence
  Description of Artificial Sequence: Synthetic oligonucleotide
  Sense strand starting at position 1986 of SEQ ID NO: 1560602
cagaauugaguccagucuu

SEQ ID NO: 1611414 - RNA, 19 nt, Artificial Sequence
  Description of Artificial Sequence: Synthetic oligonucleotide
  Antisense strand to SEQ ID NO: 1611413
aagacuggacucaauucug

SEQ ID NO: 1611415 - RNA, 19 nt, Artificial Sequence
  Description of Artificial Sequence: Synthetic oligonucleotide
  Sense strand starting at position 2079 of SEQ ID NO: 1560602
agcuccucccagcaagauu

SEQ ID NO: 1611416 - RNA, 19 nt, Artificial Sequence
  Description of Artificial Sequence: Synthetic oligonucleotide
  Antisense strand to SEQ ID NO: 1611415
aaucuugcugggaggagcu

SEQ ID NO: 1611417 - RNA, 19 nt, Artificial Sequence
  Description of Artificial Sequence: Synthetic oligonucleotide
  Sense strand starting at position 2090 of SEQ ID NO: 1560602
gcaagauuuccuugcagcu

SEQ ID NO: 1611418 - RNA, 19 nt, Artificial Sequence
  Description of Artificial Sequence: Synthetic oligonucleotide
  Antisense strand to SEQ ID NO: 1611417
agcugcaaggaaaucuugc

SEQ ID NO: 1611419 - RNA, 19 nt, Artificial Sequence
  Description of Artificial Sequence: Synthetic oligonucleotide
  Sense strand starting at position 2110 of SEQ ID NO: 1560602
uagacagguuuaguuguua

SEQ ID NO: 1611420 - RNA, 19 nt, Artificial Sequence
  Description of Artificial Sequence: Synthetic oligonucleotide
  Antisense strand to SEQ ID NO: 1611419
uaacaacuaaaccugucua

SEQ ID NO: 1611421 - RNA, 19 nt, Artificial Sequence
  Description of Artificial Sequence: Synthetic oligonucleotide
  Sense strand starting at position 2114 of SEQ ID NO: 1560602
cagguuuaguuguuaggaa

SEQ ID NO: 1611422 - RNA, 19 nt, Artificial Sequence
  Description of Artificial Sequence: Synthetic oligonucleotide
  Antisense strand to SEQ ID NO: 1611421
uuccuaacaacuaaaccug

SEQ ID NO: 1611423 - RNA, 19 nt, Artificial Sequence
  Description of Artificial Sequence: Synthetic oligonucleotide
  Sense strand starting at position 2168 of SEQ ID NO: 1560602
guaucuguaaugcagcaga

SEQ ID NO: 1611424 - RNA, 19 nt, Artificial Sequence
  Description of Artificial Sequence: Synthetic oligonucleotide
  Antisense strand to SEQ ID NO: 1611423
ucugcugcauuacagauac

SEQ ID NO: 1611425 - RNA, 19 nt, Artificial Sequence
  Description of Artificial Sequence: Synthetic oligonucleotide
  Sense strand starting at position 2171 of SEQ ID NO: 1560602
ucuguaaugcagcagaagu

SEQ ID NO: 1611426 - RNA, 19 nt, Artificial Sequence
  Description of Artificial Sequence: Synthetic oligonucleotide
  Antisense strand to SEQ ID NO: 1611425
acuucugcugcauuacaga

SEQ ID NO: 1611427 - RNA, 19 nt, Artificial Sequence
  Description of Artificial Sequence: Synthetic oligonucleotide
  Sense strand starting at position 2395 of SEQ ID NO: 1560602
acauuagcccuagaaggua

SEQ ID NO: 1611428 - RNA, 19 nt, Artificial Sequence
  Description of Artificial Sequence: Synthetic oligonucleotide
  Antisense strand to SEQ ID NO: 1611427
uaccuucuagggcuaaugu

SEQ ID NO: 1611429 - RNA, 19 nt, Artificial Sequence
  Description of Artificial Sequence: Synthetic oligonucleotide
  Sense strand starting at position 2732 of SEQ ID NO: 1560602
agucgugucaugggauuug

SEQ ID NO: 1611430 - RNA, 19 nt, Artificial Sequence
  Description of Artificial Sequence: Synthetic oligonucleotide
  Antisense strand to SEQ ID NO: 1611429
caaaucccaugacacgacu

SEQ ID NO: 1611431 - RNA, 19 nt, Artificial Sequence
  Description of Artificial Sequence: Synthetic oligonucleotide
  Sense strand starting at position 2774 of SEQ ID NO: 1560602
gguuacuaaguguaguacu

SEQ ID NO: 1611432 - RNA, 19 nt, Artificial Sequence
  Description of Artificial Sequence: Synthetic oligonucleotide
  Antisense strand to SEQ ID NO: 1611431
aguacuacacuuaguaacc

SEQ ID NO: 1611433 - RNA, 19 nt, Artificial Sequence
  Description of Artificial Sequence: Synthetic oligonucleotide
  Sense strand starting at position 2880 of SEQ ID NO: 1560602
ugagccuccucauuuaguu

SEQ ID NO: 1611434 - RNA, 19 nt, Artificial Sequence
  Description of Artificial Sequence: Synthetic oligonucleotide
  Antisense strand to SEQ ID NO: 1611433
aacuaaaugaggaggcuca

SEQ ID NO: 1611435 - RNA, 19 nt, Artificial Sequence
  Description of Artificial Sequence: Synthetic oligonucleotide
  Sense strand starting at position 3063 of SEQ ID NO: 1560602
accgaucugucauugauug

SEQ ID NO: 1611436 - RNA, 19 nt, Artificial Sequence
  Description of Artificial Sequence: Synthetic oligonucleotide
  Antisense strand to SEQ ID NO: 1611435
caaucaaugacagaucggu

SEQ ID NO: 1611437 - RNA, 19 nt, Artificial Sequence
  Description of Artificial Sequence: Synthetic oligonucleotide
  Sense strand starting at position 3099 of SEQ ID NO: 1560602
gugucuucgcuauugugca

SEQ ID NO: 1611438 - RNA, 19 nt, Artificial Sequence
  Description of Artificial Sequence: Synthetic oligonucleotide
  Antisense strand to SEQ ID NO: 1611437
ugcacaauagcgaagacac

SEQ ID NO: 1611439 - RNA, 19 nt, Artificial Sequence
  Description of Artificial Sequence: Synthetic oligonucleotide
  Sense strand starting at position 3866 of SEQ ID NO: 1560602
ucuuauaaaugcucggaua

SEQ ID NO: 1611440 - RNA, 19 nt, Artificial Sequence
  Description of Artificial Sequence: Synthetic oligonucleotide
  Antisense strand to SEQ ID NO: 1611439
uauccgagcauuuauaaga

SEQ ID NO: 1611441 - RNA, 19 nt, Artificial Sequence
  Description of Artificial Sequence: Synthetic oligonucleotide
  Sense strand starting at position 3867 of SEQ ID NO: 1560602
cuuauaaaugcucggauau

SEQ ID NO: 1611442 - RNA, 19 nt, Artificial Sequence
  Description of Artificial Sequence: Synthetic oligonucleotide
  Antisense strand to SEQ ID NO: 1611441
auauccgagcauuuauaag

SEQ ID NO: 1611443 - RNA, 19 nt, Artificial Sequence
  Description of Artificial Sequence: Synthetic oligonucleotide
  Sense strand starting at position 3868 of SEQ ID NO: 1560602
uuauaaaugcucggauauu

SEQ ID NO: 1611444 - RNA, 19 nt, Artificial Sequence
  Description of Artificial Sequence: Synthetic oligonucleotide
  Antisense strand to SEQ ID NO: 1611443
aauauccgagcauuuauaa

SEQ ID NO: 1611445 - RNA, 19 nt, Artificial Sequence
  Description of Artificial Sequence: Synthetic oligonucleotide
  Sense strand starting at position 40 of SEQ ID NO: 1560603
cucaguaauagaggaguua

SEQ ID NO: 1611446 - RNA, 19 nt, Artificial Sequence
  Description of Artificial Sequence: Synthetic oligonucleotide
  Antisense strand to SEQ ID NO: 1611445
uaacuccucuauuacugag

SEQ ID NO: 1611447 - RNA, 19 nt, Artificial Sequence
  Description of Artificial Sequence: Synthetic oligonucleotide
  Sense strand starting at position 713 of SEQ ID NO: 1560603
gugggauuauagucaugaa

SEQ ID NO: 1611448 - RNA, 19 nt, Artificial Sequence
  Description of Artificial Sequence: Synthetic oligonucleotide
  Antisense strand to SEQ ID NO: 1611447
uucaugacuauaaucccac

SEQ ID NO: 1611449 - RNA, 19 nt, Artificial Sequence
  Description of Artificial Sequence: Synthetic oligonucleotide
  Sense strand starting at position 753 of SEQ ID NO: 1560603
uugaguaauguccacagua

SEQ ID NO: 1611450 - RNA, 19 nt, Artificial Sequence
  Description of Artificial Sequence: Synthetic oligonucleotide
  Antisense strand to SEQ ID NO: 1611449
uacuguggacauuacucaa

SEQ ID NO: 1611451 - RNA, 19 nt, Artificial Sequence
  Description of Artificial Sequence: Synthetic oligonucleotide
  Sense strand starting at position 755 of SEQ ID NO: 1560603
gaguaauguccacaguaag

SEQ ID NO: 1611452 - RNA, 19 nt, Artificial Sequence
  Description of Artificial Sequence: Synthetic oligonucleotide
  Antisense strand to SEQ ID NO: 1611451
cuuacuguggacauuacuc

SEQ ID NO: 1611453 - RNA, 19 nt, Artificial Sequence
  Description of Artificial Sequence: Synthetic oligonucleotide
  Sense strand starting at position 765 of SEQ ID NO: 1560603
cacaguaagcacugucuga

SEQ ID NO: 1611454 - RNA, 19 nt, Artificial Sequence
  Description of Artificial Sequence: Synthetic oligonucleotide
  Antisense strand to SEQ ID NO: 1611453
ucagacagugcuuacugug

SEQ ID NO: 1611455 - RNA, 19 nt, Artificial Sequence
  Description of Artificial Sequence: Synthetic oligonucleotide
  Sense strand starting at position 798 of SEQ ID NO: 1560603
uucuuucaugaguggagga

SEQ ID NO: 1611456 - RNA, 19 nt, Artificial Sequence
  Description of Artificial Sequence: Synthetic oligonucleotide
  Antisense strand to SEQ ID NO: 1611455
uccuccacucaugaaagaa

SEQ ID NO: 1611457 - RNA, 19 nt, Artificial Sequence
  Description of Artificial Sequence: Synthetic oligonucleotide
  Sense strand starting at position 1057 of SEQ ID NO: 1560603
uccucacucuuacugggaa

SEQ ID NO: 1611458 - RNA, 19 nt, Artificial Sequence
  Description of Artificial Sequence: Synthetic oligonucleotide
  Antisense strand to SEQ ID NO: 1611457
uucccaguaagagugagga

SEQ ID NO: 1611459 - RNA, 19 nt, Artificial Sequence
  Description of Artificial Sequence: Synthetic oligonucleotide
  Sense strand starting at position 1090 of SEQ ID NO: 1560603
ugauauauuucgcucucau

SEQ ID NO: 1611460 - RNA, 19 nt, Artificial Sequence
  Description of Artificial Sequence: Synthetic oligonucleotide
  Antisense strand to SEQ ID NO: 1611459
augagagcgaaauauauca

SEQ ID NO: 1611461 - RNA, 19 nt, Artificial Sequence
  Description of Artificial Sequence: Synthetic oligonucleotide
  Sense strand starting at position 1105 of SEQ ID NO: 1560603
ucauaagugaucugaaacg

SEQ ID NO: 1611462 - RNA, 19 nt, Artificial Sequence
  Description of Artificial Sequence: Synthetic oligonucleotide
  Antisense strand to SEQ ID NO: 1611461
cguuucagaucacuuauga

SEQ ID NO: 1611463 - RNA, 19 nt, Artificial Sequence
  Description of Artificial Sequence: Synthetic oligonucleotide
  Sense strand starting at position 1117 of SEQ ID NO: 1560603
ugaaacgaguccuugguaa

SEQ ID NO: 1611464 - RNA, 19 nt, Artificial Sequence
  Description of Artificial Sequence: Synthetic oligonucleotide
  Antisense strand to SEQ ID NO: 1611463
uuaccaaggacucguuuca

SEQ ID NO: 1611465 - RNA, 19 nt, Artificial Sequence
  Description of Artificial Sequence: Synthetic oligonucleotide
  Sense strand starting at position 1119 of SEQ ID NO: 1560603
aaacgaguccuugguaacu

SEQ ID NO: 1611466 - RNA, 19 nt, Artificial Sequence
  Description of Artificial Sequence: Synthetic oligonucleotide
  Antisense strand to SEQ ID NO: 1611465
aguuaccaaggacucguuu

SEQ ID NO: 1611467 - RNA, 19 nt, Artificial Sequence
  Description of Artificial Sequence: Synthetic oligonucleotide
  Sense strand starting at position 1508 of SEQ ID NO: 1560603
acuuaaucucagcagaguu

SEQ ID NO: 1611468 - RNA, 19 nt, Artificial Sequence
  Description of Artificial Sequence: Synthetic oligonucleotide
  Antisense strand to SEQ ID NO: 1611467
aacucugcugagauuaagu

SEQ ID NO: 1611469 - RNA, 19 nt, Artificial Sequence
  Description of Artificial Sequence: Synthetic oligonucleotide
  Sense strand starting at position 1640 of SEQ ID NO: 1560603
cccacaacucucgguaaug

SEQ ID NO: 1611470 - RNA, 19 nt, Artificial Sequence
  Description of Artificial Sequence: Synthetic oligonucleotide
  Antisense strand to SEQ ID NO: 1611469
cauuaccgagaguuguggg

SEQ ID NO: 1611471 - RNA, 19 nt, Artificial Sequence
  Description of Artificial Sequence: Synthetic oligonucleotide
  Sense strand starting at position 1642 of SEQ ID NO: 1560603
cacaacucucgguaaugca

SEQ ID NO: 1611472 - RNA, 19 nt, Artificial Sequence
  Description of Artificial Sequence: Synthetic oligonucleotide
  Antisense strand to SEQ ID NO: 1611471
ugcauuaccgagaguugug

SEQ ID NO: 1611473 - RNA, 19 nt, Artificial Sequence
  Description of Artificial Sequence: Synthetic oligonucleotide
  Sense strand starting at position 1716 of SEQ ID NO: 1560603
ugguuuaugugacuugaga

SEQ ID NO: 1611474 - RNA, 19 nt, Artificial Sequence
  Description of Artificial Sequence: Synthetic oligonucleotide
  Antisense strand to SEQ ID NO: 1611473
ucucaagucacauaaacca

SEQ ID NO: 1611475 - RNA, 19 nt, Artificial Sequence
  Description of Artificial Sequence: Synthetic oligonucleotide
  Sense strand starting at position 1718 of SEQ ID NO: 1560603
guuuaugugacuugagauu

SEQ ID NO: 1611476 - RNA, 19 nt, Artificial Sequence
  Description of Artificial Sequence: Synthetic oligonucleotide
  Antisense strand to SEQ ID NO: 1611475
aaucucaagucacauaaac

SEQ ID NO: 1611477 - RNA, 19 nt, Artificial Sequence
  Description of Artificial Sequence: Synthetic oligonucleotide
  Sense strand starting at position 1736 of SEQ ID NO: 1560603
uauugaaggcugugacuuu

SEQ ID NO: 1611478 - RNA, 19 nt, Artificial Sequence
  Description of Artificial Sequence: Synthetic oligonucleotide
  Antisense strand to SEQ ID NO: 1611477
aaagucacagccuucaaua

SEQ ID NO: 1611479 - RNA, 19 nt, Artificial Sequence
  Description of Artificial Sequence: Synthetic oligonucleotide
  Sense strand starting at position 1755 of SEQ ID NO: 1560603
ucaacucacggguagugau

SEQ ID NO: 1611480 - RNA, 19 nt, Artificial Sequence
  Description of Artificial Sequence: Synthetic oligonucleotide
  Antisense strand to SEQ ID NO: 1611479
aucacuacccgugaguuga

SEQ ID NO: 1611481 - RNA, 19 nt, Artificial Sequence
  Description of Artificial Sequence: Synthetic oligonucleotide
  Sense strand starting at position 2132 of SEQ ID NO: 1560603
ugcagaaucuagccagaag

SEQ ID NO: 1611482 - RNA, 19 nt, Artificial Sequence
  Description of Artificial Sequence: Synthetic oligonucleotide
  Antisense strand to SEQ ID NO: 1611481
cuucuggcuagauucugca

SEQ ID NO: 1611483 - RNA, 19 nt, Artificial Sequence
  Description of Artificial Sequence: Synthetic oligonucleotide
  Sense strand starting at position 2212 of SEQ ID NO: 1560603
acguuagaccuagaaggua

SEQ ID NO: 1611484 - RNA, 19 nt, Artificial Sequence
  Description of Artificial Sequence: Synthetic oligonucleotide
  Antisense strand to SEQ ID NO: 1611483
uaccuucuaggucuaacgu

SEQ ID NO: 1611485 - RNA, 19 nt, Artificial Sequence
  Description of Artificial Sequence: Synthetic oligonucleotide
  Sense strand starting at position 2236 of SEQ ID NO: 1560603
ucucuuugccuuuaaaggu

SEQ ID NO: 1611486 - RNA, 19 nt, Artificial Sequence
  Description of Artificial Sequence: Synthetic oligonucleotide
  Antisense strand to SEQ ID NO: 1611485
accuuuaaaggcaaagaga

SEQ ID NO: 1611487 - RNA, 19 nt, Artificial Sequence
  Description of Artificial Sequence: Synthetic oligonucleotide
  Sense strand starting at position 2321 of SEQ ID NO: 1560603
uagagauaguucuugcaug

SEQ ID NO: 1611488 - RNA, 19 nt, Artificial Sequence
  Description of Artificial Sequence: Synthetic oligonucleotide
  Antisense strand to SEQ ID NO: 1611487
caugcaagaacuaucucua

SEQ ID NO: 1611489 - RNA, 19 nt, Artificial Sequence
  Description of Artificial Sequence: Synthetic oligonucleotide
  Sense strand starting at position 2326 of SEQ ID NO: 1560603
auaguucuugcaugaaccu

SEQ ID NO: 1611490 - RNA, 19 nt, Artificial Sequence
  Description of Artificial Sequence: Synthetic oligonucleotide
  Antisense strand to SEQ ID NO: 1611489
agguucaugcaagaacuau

SEQ ID NO: 1611491 - RNA, 19 nt, Artificial Sequence
  Description of Artificial Sequence: Synthetic oligonucleotide
  Sense strand starting at position 2433 of SEQ ID NO: 1560603
ugucuuggaguccauguaa

SEQ ID NO: 1611492 - RNA, 19 nt, Artificial Sequence
  Description of Artificial Sequence: Synthetic oligonucleotide
  Antisense strand to SEQ ID NO: 1611491
uuacauggacuccaagaca

SEQ ID NO: 1611493 - RNA, 19 nt, Artificial Sequence
  Description of Artificial Sequence: Synthetic oligonucleotide
  Sense strand starting at position 2566 of SEQ ID NO: 1560603
aagucaugucaugagguuu

SEQ ID NO: 1611494 - RNA, 19 nt, Artificial Sequence
  Description of Artificial Sequence: Synthetic oligonucleotide
  Antisense strand to SEQ ID NO: 1611493
aaaccucaugacaugacuu

SEQ ID NO: 1611495 - RNA, 19 nt, Artificial Sequence
  Description of Artificial Sequence: Synthetic oligonucleotide
  Sense strand starting at position 2579 of SEQ ID NO: 1560603
agguuugugguacauauga

SEQ ID NO: 1611496 - RNA, 19 nt, Artificial Sequence
  Description of Artificial Sequence: Synthetic oligonucleotide
  Antisense strand to SEQ ID NO: 1611495
ucauauguaccacaaaccu

SEQ ID NO: 1611497 - RNA, 19 nt, Artificial Sequence
  Description of Artificial Sequence: Synthetic oligonucleotide
  Sense strand starting at position 2581 of SEQ ID NO: 1560603
guuugugguacauaugauu

SEQ ID NO: 1611498 - RNA, 19 nt, Artificial Sequence
  Description of Artificial Sequence: Synthetic oligonucleotide
  Antisense strand to SEQ ID NO: 1611497
aaucauauguaccacaaac

SEQ ID NO: 1611499 - RNA, 19 nt, Artificial Sequence
  Description of Artificial Sequence: Synthetic oligonucleotide
  Sense strand starting at position 2702 of SEQ ID NO: 1560603
ccuauugguguccaugagu

SEQ ID NO: 1611500 - RNA, 19 nt, Artificial Sequence
  Description of Artificial Sequence: Synthetic oligonucleotide
  Antisense strand to SEQ ID NO: 1611499
acucauggacaccaauagg

SEQ ID NO: 1611501 - RNA, 19 nt, Artificial Sequence
  Description of Artificial Sequence: Synthetic oligonucleotide
  Sense strand starting at position 2881 of SEQ ID NO: 1560603
uguaucacauuaucuguau

SEQ ID NO: 1611502 - RNA, 19 nt, Artificial Sequence
  Description of Artificial Sequence: Synthetic oligonucleotide
  Antisense strand to SEQ ID NO: 1611501
auacagauaaugugauaca

SEQ ID NO: 1611503 - RNA, 19 nt, Artificial Sequence
  Description of Artificial Sequence: Synthetic oligonucleotide
  Sense strand starting at position 2901 of SEQ ID NO: 1560603
caaucuguccuugauggca

SEQ ID NO: 1611504 - RNA, 19 nt, Artificial Sequence
  Description of Artificial Sequence: Synthetic oligonucleotide
  Antisense strand to SEQ ID NO: 1611503
ugccaucaaggacagauug

SEQ ID NO: 1611505 - RNA, 19 nt, Artificial Sequence
  Description of Artificial Sequence: Synthetic oligonucleotide
  Sense strand starting at position 2976 of SEQ ID NO: 1560603
ugcauaugucuuuaaggca

SEQ ID NO: 1611506 - RNA, 19 nt, Artificial Sequence
  Description of Artificial Sequence: Synthetic oligonucleotide
  Antisense strand to SEQ ID NO: 1611505
ugccuuaaagacauaugca

SEQ ID NO: 1611507 - RNA, 19 nt, Artificial Sequence
  Description of Artificial Sequence: Synthetic oligonucleotide
  Sense strand starting at position 2983 of SEQ ID NO: 1560603
gucuuuaaggcagaauaau

SEQ ID NO: 1611508 - RNA, 19 nt, Artificial Sequence
  Description of Artificial Sequence: Synthetic oligonucleotide
  Antisense strand to SEQ ID NO: 1611507
auuauucugccuuaaagac

SEQ ID NO: 1611509 - RNA, 19 nt, Artificial Sequence
  Description of Artificial Sequence: Synthetic oligonucleotide
  Sense strand starting at position 3004 of SEQ ID NO: 1560603
cuauucuucuguguauaca

SEQ ID NO: 1611510 - RNA, 19 nt, Artificial Sequence
  Description of Artificial Sequence: Synthetic oligonucleotide
  Antisense strand to SEQ ID NO: 1611509
uguauacacagaagaauag

SEQ ID NO: 1611511 - RNA, 19 nt, Artificial Sequence
  Description of Artificial Sequence: Synthetic oligonucleotide
  Sense strand starting at position 3064 of SEQ ID NO: 1560603
aaugguaguucuguuauaa

SEQ ID NO: 1611512 - RNA, 19 nt, Artificial Sequence
  Description of Artificial Sequence: Synthetic oligonucleotide
  Antisense strand to SEQ ID NO: 1611511
uuauaacagaacuaccauu

SEQ ID NO: 1611513 - RNA, 19 nt, Artificial Sequence
  Description of Artificial Sequence: Synthetic oligonucleotide
  Sense strand starting at position 3076 of SEQ ID NO: 1560603
guuauaagcucuuugagga

SEQ ID NO: 1611514 - RNA, 19 nt, Artificial Sequence
  Description of Artificial Sequence: Synthetic oligonucleotide
  Antisense strand to SEQ ID NO: 1611513
uccucaaagagcuuauaac

SEQ ID NO: 1611515 - RNA, 19 nt, Artificial Sequence
  Description of Artificial Sequence: Synthetic oligonucleotide
  Sense strand starting at position 3112 of SEQ ID NO: 1560603
cacaaugggugagcuaauu

SEQ ID NO: 1611516 - RNA, 19 nt, Artificial Sequence
  Description of Artificial Sequence: Synthetic oligonucleotide
  Antisense strand to SEQ ID NO: 1611515
aauuagcucacccauugug

SEQ ID NO: 1611517 - RNA, 19 nt, Artificial Sequence
  Description of Artificial Sequence: Synthetic oligonucleotide
  Sense strand starting at position 3861 of SEQ ID NO: 1560603
ugcccuugauccucaggau

SEQ ID NO: 1611518 - RNA, 19 nt, Artificial Sequence
  Description of Artificial Sequence: Synthetic oligonucleotide
  Antisense strand to SEQ ID NO: 1611517
auccugaggaucaagggca

SEQ ID NO: 1611519 - RNA, 19 nt, Artificial Sequence
  Description of Artificial Sequence: Synthetic oligonucleotide
  Sense strand starting at position 3895 of SEQ ID NO: 1560603
uagagaacguccuugcaug

SEQ ID NO: 1611520 - RNA, 19 nt, Artificial Sequence
  Description of Artificial Sequence: Synthetic oligonucleotide
  Antisense strand to SEQ ID NO: 1611519
caugcaaggacguucucua

SEQ ID NO: 1611521 - RNA, 19 nt, Artificial Sequence
  Description of Artificial Sequence: Synthetic oligonucleotide
  Sense strand starting at position 3896 of SEQ ID NO: 1560603
agagaacguccuugcauga

SEQ ID NO: 1611522 - RNA, 19 nt, Artificial Sequence
  Description of Artificial Sequence: Synthetic oligonucleotide
  Antisense strand to SEQ ID NO: 1611521
ucaugcaaggacguucucu

SEQ ID NO: 1611523 - RNA, 19 nt, Artificial Sequence
  Description of Artificial Sequence: Synthetic oligonucleotide
  Sense strand starting at position 3977 of SEQ ID NO: 1560603
acaccuggacucuagcaau

SEQ ID NO: 1611524 - RNA, 19 nt, Artificial Sequence
  Description of Artificial Sequence: Synthetic oligonucleotide
  Antisense strand to SEQ ID NO: 1611523
auugcuagaguccaggugu

SEQ ID NO: 1611525 - RNA, 19 nt, Artificial Sequence
  Description of Artificial Sequence: Synthetic oligonucleotide
  Sense strand starting at position 174 of SEQ ID NO: 1560604
gguggacccauagguaaga

SEQ ID NO: 1611526 - RNA, 19 nt, Artificial Sequence
  Description of Artificial Sequence: Synthetic oligonucleotide
  Antisense strand to SEQ ID NO: 1611525
ucuuaccuauggguccacc

SEQ ID NO: 1611527 - RNA, 19 nt, Artificial Sequence
  Description of Artificial Sequence: Synthetic oligonucleotide
  Sense strand starting at position 256 of SEQ ID NO: 1560604
aaucuuagaucgguuacuu

SEQ ID NO: 1611528 - RNA, 19 nt, Artificial Sequence
  Description of Artificial Sequence: Synthetic oligonucleotide
  Antisense strand to SEQ ID NO: 1611527
aaguaaccgaucuaagauu

SEQ ID NO: 1611529 - RNA, 19 nt, Artificial Sequence
  Description of Artificial Sequence: Synthetic oligonucleotide
  Sense strand starting at position 300 of SEQ ID NO: 1560604
ggaggauuaucaugaauuc

SEQ ID NO: 1611530 - RNA, 19 nt, Artificial Sequence
  Description of Artificial Sequence: Synthetic oligonucleotide
  Antisense strand to SEQ ID NO: 1611529
gaauucaugauaauccucc

SEQ ID NO: 1611531 - RNA, 19 nt, Artificial Sequence
  Description of Artificial Sequence: Synthetic oligonucleotide
  Sense strand starting at position 314 of SEQ ID NO: 1560604
aauuccuacuguguaggaa

SEQ ID NO: 1611532 - RNA, 19 nt, Artificial Sequence
  Description of Artificial Sequence: Synthetic oligonucleotide
  Antisense strand to SEQ ID NO: 1611531
uuccuacacaguaggaauu

SEQ ID NO: 1611533 - RNA, 19 nt, Artificial Sequence
  Description of Artificial Sequence: Synthetic oligonucleotide
  Sense strand starting at position 326 of SEQ ID NO: 1560604
guaggaaguucuccauaau

SEQ ID NO: 1611534 - RNA, 19 nt, Artificial Sequence
  Description of Artificial Sequence: Synthetic oligonucleotide
  Antisense strand to SEQ ID NO: 1611533
auuauggagaacuuccuac

SEQ ID NO: 1611535 - RNA, 19 nt, Artificial Sequence
  Description of Artificial Sequence: Synthetic oligonucleotide
  Sense strand starting at position 337 of SEQ ID NO: 1560604
uccauaauagagcaguuaa

SEQ ID NO: 1611536 - RNA, 19 nt, Artificial Sequence
  Description of Artificial Sequence: Synthetic oligonucleotide
  Antisense strand to SEQ ID NO: 1611535
uuaacugcucuauuaugga

SEQ ID NO: 1611537 - RNA, 19 nt, Artificial Sequence
  Description of Artificial Sequence: Synthetic oligonucleotide
  Sense strand starting at position 579 of SEQ ID NO: 1560604
augauugauuucuacaaug

SEQ ID NO: 1611538 - RNA, 19 nt, Artificial Sequence
  Description of Artificial Sequence: Synthetic oligonucleotide
  Antisense strand to SEQ ID NO: 1611537
cauuguagaaaucaaucau

SEQ ID NO: 1611539 - RNA, 19 nt, Artificial Sequence
  Description of Artificial Sequence: Synthetic oligonucleotide
  Sense strand starting at position 682 of SEQ ID NO: 1560604
agcucauugaaacguugaa

SEQ ID NO: 1611540 - RNA, 19 nt, Artificial Sequence
  Description of Artificial Sequence: Synthetic oligonucleotide
  Antisense strand to SEQ ID NO: 1611539
uucaacguuucaaugagcu

SEQ ID NO: 1611541 - RNA, 19 nt, Artificial Sequence
  Description of Artificial Sequence: Synthetic oligonucleotide
  Sense strand starting at position 771 of SEQ ID NO: 1560604
cuggcagucugauauuuaa

SEQ ID NO: 1611542 - RNA, 19 nt, Artificial Sequence
  Description of Artificial Sequence: Synthetic oligonucleotide
  Antisense strand to SEQ ID NO: 1611541
uuaaauaucagacugccag

SEQ ID NO: 1611543 - RNA, 19 nt, Artificial Sequence
  Description of Artificial Sequence: Synthetic oligonucleotide
  Sense strand starting at position 860 of SEQ ID NO: 1560604
ucaucuuugucucucagau

SEQ ID NO: 1611544 - RNA, 19 nt, Artificial Sequence
  Description of Artificial Sequence: Synthetic oligonucleotide
  Antisense strand to SEQ ID NO: 1611543
aucugagagacaaagauga

SEQ ID NO: 1611545 - RNA, 19 nt, Artificial Sequence
  Description of Artificial Sequence: Synthetic oligonucleotide
  Sense strand starting at position 862 of SEQ ID NO: 1560604
aucuuugucucucagauug

SEQ ID NO: 1611546 - RNA, 19 nt, Artificial Sequence
  Description of Artificial Sequence: Synthetic oligonucleotide
  Antisense strand to SEQ ID NO: 1611545
caaucugagagacaaagau

SEQ ID NO: 1611547 - RNA, 19 nt, Artificial Sequence
  Description of Artificial Sequence: Synthetic oligonucleotide
  Sense strand starting at position 872 of SEQ ID NO: 1560604
cucagauuggugggauuau

SEQ ID NO: 1611548 - RNA, 19 nt, Artificial Sequence
  Description of Artificial Sequence: Synthetic oligonucleotide
  Antisense strand to SEQ ID NO: 1611547
auaaucccaccaaucugag

SEQ ID NO: 1611549 - RNA, 19 nt, Artificial Sequence
  Description of Artificial Sequence: Synthetic oligonucleotide
  Sense strand starting at position 873 of SEQ ID NO: 1560604
ucagauuggugggauuaua

SEQ ID NO: 1611550 - RNA, 19 nt, Artificial Sequence
  Description of Artificial Sequence: Synthetic oligonucleotide
  Antisense strand to SEQ ID NO: 1611549
uauaaucccaccaaucuga

SEQ ID NO: 1611551 - RNA, 19 nt, Artificial Sequence
  Description of Artificial Sequence: Synthetic oligonucleotide
  Sense strand starting at position 909 of SEQ ID NO: 1560604
ccagcugcuuuguugauua

SEQ ID NO: 1611552 - RNA, 19 nt, Artificial Sequence
  Description of Artificial Sequence: Synthetic oligonucleotide
  Antisense strand to SEQ ID NO: 1611551
uaaucaacaaagcagcugg

SEQ ID NO: 1611553 - RNA, 19 nt, Artificial Sequence
  Description of Artificial Sequence: Synthetic oligonucleotide
  Sense strand starting at position 911 of SEQ ID NO: 1560604
agcugcuuuguugauuaau

SEQ ID NO: 1611554 - RNA, 19 nt, Artificial Sequence
  Description of Artificial Sequence: Synthetic oligonucleotide
  Antisense strand to SEQ ID NO: 1611553
auuaaucaacaaagcagcu

SEQ ID NO: 1611555 - RNA, 19 nt, Artificial Sequence
  Description of Artificial Sequence: Synthetic oligonucleotide
  Sense strand starting at position 913 of SEQ ID NO: 1560604
cugcuuuguugauuaauau

SEQ ID NO: 1611556 - RNA, 19 nt, Artificial Sequence
  Description of Artificial Sequence: Synthetic oligonucleotide
  Antisense strand to SEQ ID NO: 1611555
auauuaaucaacaaagcag

SEQ ID NO: 1611557 - RNA, 19 nt, Artificial Sequence
  Description of Artificial Sequence: Synthetic oligonucleotide
  Sense strand starting at position 914 of SEQ ID NO: 1560604
ugcuuuguugauuaauauc

SEQ ID NO: 1611558 - RNA, 19 nt, Artificial Sequence
  Description of Artificial Sequence: Synthetic oligonucleotide
  Antisense strand to SEQ ID NO: 1611557
gauauuaaucaacaaagca

SEQ ID NO: 1611559 - RNA, 19 nt, Artificial Sequence
  Description of Artificial Sequence: Synthetic oligonucleotide
  Sense strand starting at position 933 of SEQ ID NO: 1560604
cacuguaagcucugucuga

SEQ ID NO: 1611560 - RNA, 19 nt, Artificial Sequence
  Description of Artificial Sequence: Synthetic oligonucleotide
  Antisense strand to SEQ ID NO: 1611559
ucagacagagcuuacagug

SEQ ID NO: 1611561 - RNA, 19 nt, Artificial Sequence
  Description of Artificial Sequence: Synthetic oligonucleotide
  Sense strand starting at position 934 of SEQ ID NO: 1560604
acuguaagcucugucugaa

SEQ ID NO: 1611562 - RNA, 19 nt, Artificial Sequence
  Description of Artificial Sequence: Synthetic oligonucleotide
  Antisense strand to SEQ ID NO: 1611561
uucagacagagcuuacagu

SEQ ID NO: 1611563 - RNA, 19 nt, Artificial Sequence
  Description of Artificial Sequence: Synthetic oligonucleotide
  Sense strand starting at position 990 of SEQ ID NO: 1560604
aguuuagacucaguugaga

SEQ ID NO: 1611564 - RNA, 19 nt, Artificial Sequence
  Description of Artificial Sequence: Synthetic oligonucleotide
  Antisense strand to SEQ ID NO: 1611563
ucucaacugagucuaaacu

SEQ ID NO: 1611565 - RNA, 19 nt, Artificial Sequence
  Description of Artificial Sequence: Synthetic oligonucleotide
  Sense strand starting at position 1009 of SEQ ID NO: 1560604
cauagcuuacaguggauau

SEQ ID NO: 1611566 - RNA, 19 nt, Artificial Sequence
  Description of Artificial Sequence: Synthetic oligonucleotide
  Antisense strand to SEQ ID NO: 1611565
auauccacuguaagcuaug

SEQ ID NO: 1611567 - RNA, 19 nt, Artificial Sequence
  Description of Artificial Sequence: Synthetic oligonucleotide
  Sense strand starting at position 1272 of SEQ ID NO: 1560604
ugaaacaaguccuugguaa

SEQ ID NO: 1611568 - RNA, 19 nt, Artificial Sequence
  Description of Artificial Sequence: Synthetic oligonucleotide
  Antisense strand to SEQ ID NO: 1611567
uuaccaaggacuuguuuca

SEQ ID NO: 1611569 - RNA, 19 nt, Artificial Sequence
  Description of Artificial Sequence: Synthetic oligonucleotide
  Sense strand starting at position 1273 of SEQ ID NO: 1560604
gaaacaaguccuugguaac

SEQ ID NO: 1611570 - RNA, 19 nt, Artificial Sequence
  Description of Artificial Sequence: Synthetic oligonucleotide
  Antisense strand to SEQ ID NO: 1611569
guuaccaaggacuuguuuc

SEQ ID NO: 1611571 - RNA, 19 nt, Artificial Sequence
  Description of Artificial Sequence: Synthetic oligonucleotide
  Sense strand starting at position 1276 of SEQ ID NO: 1560604
acaaguccuugguaacuca

SEQ ID NO: 1611572 - RNA, 19 nt, Artificial Sequence
  Description of Artificial Sequence: Synthetic oligonucleotide
  Antisense strand to SEQ ID NO: 1611571
ugaguuaccaaggacuugu

SEQ ID NO: 1611573 - RNA, 19 nt, Artificial Sequence
  Description of Artificial Sequence: Synthetic oligonucleotide
  Sense strand starting at position 1661 of SEQ ID NO: 1560604
gucacaucaucucaucaga

SEQ ID NO: 1611574 - RNA, 19 nt, Artificial Sequence
  Description of Artificial Sequence: Synthetic oligonucleotide
  Antisense strand to SEQ ID NO: 1611573
ucugaugagaugaugugac

SEQ ID NO: 1611575 - RNA, 19 nt, Artificial Sequence
  Description of Artificial Sequence: Synthetic oligonucleotide
  Sense strand starting at position 2032 of SEQ ID NO: 1560604
ggcaucauuccagauucca

SEQ ID NO: 1611576 - RNA, 19 nt, Artificial Sequence
  Description of Artificial Sequence: Synthetic oligonucleotide
  Antisense strand to SEQ ID NO: 1611575
uggaaucuggaaugaugcc

SEQ ID NO: 1611577 - RNA, 19 nt, Artificial Sequence
  Description of Artificial Sequence: Synthetic oligonucleotide
  Sense strand starting at position 2067 of SEQ ID NO: 1560604
cuuuccuugcagcaugaga

SEQ ID NO: 1611578 - RNA, 19 nt, Artificial Sequence
  Description of Artificial Sequence: Synthetic oligonucleotide
  Antisense strand to SEQ ID NO: 1611577
ucucaugcugcaaggaaag

SEQ ID NO: 1611579 - RNA, 19 nt, Artificial Sequence
  Description of Artificial Sequence: Synthetic oligonucleotide
  Sense strand starting at position 2069 of SEQ ID NO: 1560604
uuccuugcagcaugagaaa

SEQ ID NO: 1611580 - RNA, 19 nt, Artificial Sequence
  Description of Artificial Sequence: Synthetic oligonucleotide
  Antisense strand to SEQ ID NO: 1611579
uuucucaugcugcaaggaa

SEQ ID NO: 1611581 - RNA, 19 nt, Artificial Sequence
  Description of Artificial Sequence: Synthetic oligonucleotide
  Sense strand starting at position 2101 of SEQ ID NO: 1560604
cgaagaaacucagucacaa

SEQ ID NO: 1611582 - RNA, 19 nt, Artificial Sequence
  Description of Artificial Sequence: Synthetic oligonucleotide
  Antisense strand to SEQ ID NO: 1611581
uugugacugaguuucuucg

SEQ ID NO: 1611583 - RNA, 19 nt, Artificial Sequence
  Description of Artificial Sequence: Synthetic oligonucleotide
  Sense strand starting at position 2404 of SEQ ID NO: 1560604
gccuuuaaauguucuggga

SEQ ID NO: 1611584 - RNA, 19 nt, Artificial Sequence
  Description of Artificial Sequence: Synthetic oligonucleotide
  Antisense strand to SEQ ID NO: 1611583
ucccagaacauuuaaaggc

SEQ ID NO: 1611585 - RNA, 19 nt, Artificial Sequence
  Description of Artificial Sequence: Synthetic oligonucleotide
  Sense strand starting at position 2406 of SEQ ID NO: 1560604
cuuuaaauguucugggaga

SEQ ID NO: 1611586 - RNA, 19 nt, Artificial Sequence
  Description of Artificial Sequence: Synthetic oligonucleotide
  Antisense strand to SEQ ID NO: 1611585
ucucccagaacauuuaaag

SEQ ID NO: 1611587 - RNA, 19 nt, Artificial Sequence
  Description of Artificial Sequence: Synthetic oligonucleotide
  Sense strand starting at position 2407 of SEQ ID NO: 1560604
uuuaaauguucugggagag

SEQ ID NO: 1611588 - RNA, 19 nt, Artificial Sequence
  Description of Artificial Sequence: Synthetic oligonucleotide
  Antisense strand to SEQ ID NO: 1611587
cucucccagaacauuuaaa

SEQ ID NO: 1611589 - RNA, 19 nt, Artificial Sequence
  Description of Artificial Sequence: Synthetic oligonucleotide
  Sense strand starting at position 2432 of SEQ ID NO: 1560604
ccuugauccugaggaggau

SEQ ID NO: 1611590 - RNA, 19 nt, Artificial Sequence
  Description of Artificial Sequence: Synthetic oligonucleotide
  Antisense strand to SEQ ID NO: 1611589
auccuccucaggaucaagg

SEQ ID NO: 1611591 - RNA, 19 nt, Artificial Sequence
  Description of Artificial Sequence: Synthetic oligonucleotide
  Sense strand starting at position 2568 of SEQ ID NO: 1560604
cucuguugguguccaugua

SEQ ID NO: 1611592 - RNA, 19 nt, Artificial Sequence
  Description of Artificial Sequence: Synthetic oligonucleotide
  Antisense strand to SEQ ID NO: 1611591
uacauggacaccaacagag

SEQ ID NO: 1611593 - RNA, 19 nt, Artificial Sequence
  Description of Artificial Sequence: Synthetic oligonucleotide
  Sense strand starting at position 2569 of SEQ ID NO: 1560604
ucuguugguguccauguaa

SEQ ID NO: 1611594 - RNA, 19 nt, Artificial Sequence
  Description of Artificial Sequence: Synthetic oligonucleotide
  Antisense strand to SEQ ID NO: 1611593
uuacauggacaccaacaga

SEQ ID NO: 1611595 - RNA, 19 nt, Artificial Sequence
  Description of Artificial Sequence: Synthetic oligonucleotide
  Sense strand starting at position 2601 of SEQ ID NO: 1560604
ggagacuguuucuucugca

SEQ ID NO: 1611596 - RNA, 19 nt, Artificial Sequence
  Description of Artificial Sequence: Synthetic oligonucleotide
  Antisense strand to SEQ ID NO: 1611595
ugcagaagaaacagucucc

SEQ ID NO: 1611597 - RNA, 19 nt, Artificial Sequence
  Description of Artificial Sequence: Synthetic oligonucleotide
  Sense strand starting at position 2605 of SEQ ID NO: 1560604
acuguuucuucugcagauu

SEQ ID NO: 1611598 - RNA, 19 nt, Artificial Sequence
  Description of Artificial Sequence: Synthetic oligonucleotide
  Antisense strand to SEQ ID NO: 1611597
aaucugcagaagaaacagu

SEQ ID NO: 1611599 - RNA, 19 nt, Artificial Sequence
  Description of Artificial Sequence: Synthetic oligonucleotide
  Sense strand starting at position 2614 of SEQ ID NO: 1560604
ucugcagauucugggagaa

SEQ ID NO: 1611600 - RNA, 19 nt, Artificial Sequence
  Description of Artificial Sequence: Synthetic oligonucleotide
  Antisense strand to SEQ ID NO: 1611599
uucucccagaaucugcaga

SEQ ID NO: 1611601 - RNA, 19 nt, Artificial Sequence
  Description of Artificial Sequence: Synthetic oligonucleotide
  Sense strand starting at position 2897 of SEQ ID NO: 1560604
uucugugcuagugauaguu

SEQ ID NO: 1611602 - RNA, 19 nt, Artificial Sequence
  Description of Artificial Sequence: Synthetic oligonucleotide
  Antisense strand to SEQ ID NO: 1611601
aacuaucacuagcacagaa

SEQ ID NO: 1611603 - RNA, 19 nt, Artificial Sequence
  Description of Artificial Sequence: Synthetic oligonucleotide
  Sense strand starting at position 3028 of SEQ ID NO: 1560604
ucagucuaucauugaagga

SEQ ID NO: 1611604 - RNA, 19 nt, Artificial Sequence
  Description of Artificial Sequence: Synthetic oligonucleotide
  Antisense strand to SEQ ID NO: 1611603
uccuucaaugauagacuga

SEQ ID NO: 1611605 - RNA, 19 nt, Artificial Sequence
  Description of Artificial Sequence: Synthetic oligonucleotide
  Sense strand starting at position 200 of SEQ ID NO: 1560605
auaggcacucagugaagaa

SEQ ID NO: 1611606 - RNA, 19 nt, Artificial Sequence
  Description of Artificial Sequence: Synthetic oligonucleotide
  Antisense strand to SEQ ID NO: 1611605
uucuucacugagugccuau

SEQ ID NO: 1611607 - RNA, 19 nt, Artificial Sequence
  Description of Artificial Sequence: Synthetic oligonucleotide
  Sense strand starting at position 437 of SEQ ID NO: 1560605
agucccaucugcuuggaaa

SEQ ID NO: 1611608 - RNA, 19 nt, Artificial Sequence
  Description of Artificial Sequence: Synthetic oligonucleotide
  Antisense strand to SEQ ID NO: 1611607
uuuccaagcagaugggacu

SEQ ID NO: 1611609 - RNA, 19 nt, Artificial Sequence
  Description of Artificial Sequence: Synthetic oligonucleotide
  Sense strand starting at position 438 of SEQ ID NO: 1560605
gucccaucugcuuggaaag

SEQ ID NO: 1611610 - RNA, 19 nt, Artificial Sequence
  Description of Artificial Sequence: Synthetic oligonucleotide
  Antisense strand to SEQ ID NO: 1611609
cuuuccaagcagaugggac

SEQ ID NO: 1611611 - RNA, 19 nt, Artificial Sequence
  Description of Artificial Sequence: Synthetic oligonucleotide
  Sense strand starting at position 439 of SEQ ID NO: 1560605
ucccaucugcuuggaaaga

SEQ ID NO: 1611612 - RNA, 19 nt, Artificial Sequence
  Description of Artificial Sequence: Synthetic oligonucleotide
  Antisense strand to SEQ ID NO: 1611611
ucuuuccaagcagauggga

SEQ ID NO: 1611613 - RNA, 19 nt, Artificial Sequence
  Description of Artificial Sequence: Synthetic oligonucleotide
  Sense strand starting at position 440 of SEQ ID NO: 1560605
cccaucugcuuggaaagau

SEQ ID NO: 1611614 - RNA, 19 nt, Artificial Sequence
  Description of Artificial Sequence: Synthetic oligonucleotide
  Antisense strand to SEQ ID NO: 1611613
aucuuuccaagcagauggg

SEQ ID NO: 1611615 - RNA, 19 nt, Artificial Sequence
  Description of Artificial Sequence: Synthetic oligonucleotide
  Sense strand starting at position 494 of SEQ ID NO: 1560605
gccgaagugagcuauaaua

SEQ ID NO: 1611616 - RNA, 19 nt, Artificial Sequence
  Description of Artificial Sequence: Synthetic oligonucleotide
  Antisense strand to SEQ ID NO: 1611615
uauuauagcucacuucggc

SEQ ID NO: 1611617 - RNA, 19 nt, Artificial Sequence
  Description of Artificial Sequence: Synthetic oligonucleotide
  Sense strand starting at position 496 of SEQ ID NO: 1560605
cgaagugagcuauaauauu

SEQ ID NO: 1611618 - RNA, 19 nt, Artificial Sequence
  Description of Artificial Sequence: Synthetic oligonucleotide
  Antisense strand to SEQ ID NO: 1611617
aauauuauagcucacuucg

SEQ ID NO: 1611619 - RNA, 19 nt, Artificial Sequence
  Description of Artificial Sequence: Synthetic oligonucleotide
  Sense strand starting at position 574 of SEQ ID NO: 1560605
guccuaugaggccaaucau

SEQ ID NO: 1611620 - RNA, 19 nt, Artificial Sequence
  Description of Artificial Sequence: Synthetic oligonucleotide
  Antisense strand to SEQ ID NO: 1611619
augauuggccucauaggac

SEQ ID NO: 1611621 - RNA, 19 nt, Artificial Sequence
  Description of Artificial Sequence: Synthetic oligonucleotide
  Sense strand starting at position 583 of SEQ ID NO: 1560605
ggccaaucauuaucaacgu

SEQ ID NO: 1611622 - RNA, 19 nt, Artificial Sequence
  Description of Artificial Sequence: Synthetic oligonucleotide
  Antisense strand to SEQ ID NO: 1611621
acguugauaaugauuggcc

SEQ ID NO: 1611623 - RNA, 19 nt, Artificial Sequence
  Description of Artificial Sequence: Synthetic oligonucleotide
  Sense strand starting at position 1053 of SEQ ID NO: 1560605
cugagccugugaucugaau

SEQ ID NO: 1611624 - RNA, 19 nt, Artificial Sequence
  Description of Artificial Sequence: Synthetic oligonucleotide
  Antisense strand to SEQ ID NO: 1611623
auucagaucacaggcucag

SEQ ID NO: 1611625 - RNA, 19 nt, Artificial Sequence
  Description of Artificial Sequence: Synthetic oligonucleotide
  Sense strand starting at position 1066 of SEQ ID NO: 1560605
cugaauuccugccauugca

SEQ ID NO: 1611626 - RNA, 19 nt, Artificial Sequence
  Description of Artificial Sequence: Synthetic oligonucleotide
  Antisense strand to SEQ ID NO: 1611625
ugcaauggcaggaauucag

SEQ ID NO: 1611627 - RNA, 19 nt, Artificial Sequence
  Description of Artificial Sequence: Synthetic oligonucleotide
  Sense strand starting at position 1347 of SEQ ID NO: 1560605
uggccacuccuuggaugua

SEQ ID NO: 1611628 - RNA, 19 nt, Artificial Sequence
  Description of Artificial Sequence: Synthetic oligonucleotide
  Antisense strand to SEQ ID NO: 1611627
uacauccaaggaguggcca

SEQ ID NO: 1611629 - RNA, 19 nt, Artificial Sequence
  Description of Artificial Sequence: Synthetic oligonucleotide
  Sense strand starting at position 1348 of SEQ ID NO: 1560605
ggccacuccuuggauguaa

SEQ ID NO: 1611630 - RNA, 19 nt, Artificial Sequence
  Description of Artificial Sequence: Synthetic oligonucleotide
  Antisense strand to SEQ ID NO: 1611629
uuacauccaaggaguggcc

SEQ ID NO: 1611631 - RNA, 19 nt, Artificial Sequence
  Description of Artificial Sequence: Synthetic oligonucleotide
  Sense strand starting at position 1559 of SEQ ID NO: 1560605
acaguuagacguggacaca

SEQ ID NO: 1611632 - RNA, 19 nt, Artificial Sequence
  Description of Artificial Sequence: Synthetic oligonucleotide
  Antisense strand to SEQ ID NO: 1611631
uguguccacgucuaacugu

SEQ ID NO: 1611633 - RNA, 19 nt, Artificial Sequence
  Description of Artificial Sequence: Synthetic oligonucleotide
  Sense strand starting at position 1616 of SEQ ID NO: 1560605
gggucagcuuuggguaaau

SEQ ID NO: 1611634 - RNA, 19 nt, Artificial Sequence
  Description of Artificial Sequence: Synthetic oligonucleotide
  Antisense strand to SEQ ID NO: 1611633
auuuacccaaagcugaccc

SEQ ID NO: 1611635 - RNA, 19 nt, Artificial Sequence
  Description of Artificial Sequence: Synthetic oligonucleotide
  Sense strand starting at position 1618 of SEQ ID NO: 1560605
gucagcuuuggguaaauca

SEQ ID NO: 1611636 - RNA, 19 nt, Artificial Sequence
  Description of Artificial Sequence: Synthetic oligonucleotide
  Antisense strand to SEQ ID NO: 1611635
ugauuuacccaaagcugac

SEQ ID NO: 1611637 - RNA, 19 nt, Artificial Sequence
  Description of Artificial Sequence: Synthetic oligonucleotide
  Sense strand starting at position 1625 of SEQ ID NO: 1560605
uuggguaaaucagaccaca

SEQ ID NO: 1611638 - RNA, 19 nt, Artificial Sequence
  Description of Artificial Sequence: Synthetic oligonucleotide
  Antisense strand to SEQ ID NO: 1611637
uguggucugauuuacccaa

SEQ ID NO: 1611639 - RNA, 19 nt, Artificial Sequence
  Description of Artificial Sequence: Synthetic oligonucleotide
  Sense strand starting at position 1732 of SEQ ID NO: 1560605
ggcaucucaccggguugua

SEQ ID NO: 1611640 - RNA, 19 nt, Artificial Sequence
  Description of Artificial Sequence: Synthetic oligonucleotide
  Antisense strand to SEQ ID NO: 1611639
uacaacccggugagaugcc

SEQ ID NO: 1611641 - RNA, 19 nt, Artificial Sequence
  Description of Artificial Sequence: Synthetic oligonucleotide
  Sense strand starting at position 1857 of SEQ ID NO: 1560605
ggcggugguggcucuuaua

SEQ ID NO: 1611642 - RNA, 19 nt, Artificial Sequence
  Description of Artificial Sequence: Synthetic oligonucleotide
  Antisense strand to SEQ ID NO: 1611641
uauaagagccaccaccgcc

SEQ ID NO: 1611643 - RNA, 19 nt, Artificial Sequence
  Description of Artificial Sequence: Synthetic oligonucleotide
  Sense strand starting at position 1866 of SEQ ID NO: 1560605
ggcucuuauacccagggua

SEQ ID NO: 1611644 - RNA, 19 nt, Artificial Sequence
  Description of Artificial Sequence: Synthetic oligonucleotide
  Antisense strand to SEQ ID NO: 1611643
uacccuggguauaagagcc

SEQ ID NO: 1611645 - RNA, 19 nt, Artificial Sequence
  Description of Artificial Sequence: Synthetic oligonucleotide
  Sense strand starting at position 1868 of SEQ ID NO: 1560605
cucuuauacccaggguaag

SEQ ID NO: 1611646 - RNA, 19 nt, Artificial Sequence
  Description of Artificial Sequence: Synthetic oligonucleotide
  Antisense strand to SEQ ID NO: 1611645
cuuacccuggguauaagag

SEQ ID NO: 1611647 - RNA, 19 nt, Artificial Sequence
  Description of Artificial Sequence: Synthetic oligonucleotide
  Sense strand starting at position 2074 of SEQ ID NO: 1560605
cugccagggccuuaucaga

SEQ ID NO: 1611648 - RNA, 19 nt, Artificial Sequence
  Description of Artificial Sequence: Synthetic oligonucleotide
  Antisense strand to SEQ ID NO: 1611647
ucugauaaggcccuggcag

SEQ ID NO: 1611649 - RNA, 19 nt, Artificial Sequence
  Description of Artificial Sequence: Synthetic oligonucleotide
  Sense strand starting at position 2109 of SEQ ID NO: 1560605
ccagacuucuguuggcaga

SEQ ID NO: 1611650 - RNA, 19 nt, Artificial Sequence
  Description of Artificial Sequence: Synthetic oligonucleotide
  Antisense strand to SEQ ID NO: 1611649
ucugccaacagaagucugg

SEQ ID NO: 1611651 - RNA, 19 nt, Artificial Sequence
  Description of Artificial Sequence: Synthetic oligonucleotide
  Sense strand starting at position 2291 of SEQ ID NO: 1560605
guuguauuguagggagagu

SEQ ID NO: 1611652 - RNA, 19 nt, Artificial Sequence
  Description of Artificial Sequence: Synthetic oligonucleotide
  Antisense strand to SEQ ID NO: 1611651
acucucccuacaauacaac

SEQ ID NO: 1611653 - RNA, 19 nt, Artificial Sequence
  Description of Artificial Sequence: Synthetic oligonucleotide
  Sense strand starting at position 2300 of SEQ ID NO: 1560605
uagggagagugguuuagau

SEQ ID NO: 1611654 - RNA, 19 nt, Artificial Sequence
  Description of Artificial Sequence: Synthetic oligonucleotide
  Antisense strand to SEQ ID NO: 1611653
aucuaaaccacucucccua

SEQ ID NO: 1611655 - RNA, 19 nt, Artificial Sequence
  Description of Artificial Sequence: Synthetic oligonucleotide
  Sense strand starting at position 2304 of SEQ ID NO: 1560605
gagagugguuuagauuacu

SEQ ID NO: 1611656 - RNA, 19 nt, Artificial Sequence
  Description of Artificial Sequence: Synthetic oligonucleotide
  Antisense strand to SEQ ID NO: 1611655
aguaaucuaaaccacucuc

SEQ ID NO: 1611657 - RNA, 19 nt, Artificial Sequence
  Description of Artificial Sequence: Synthetic oligonucleotide
  Sense strand starting at position 2307 of SEQ ID NO: 1560605
agugguuuagauuacuagu

SEQ ID NO: 1611658 - RNA, 19 nt, Artificial Sequence
  Description of Artificial Sequence: Synthetic oligonucleotide
  Antisense strand to SEQ ID NO: 1611657
acuaguaaucuaaaccacu

SEQ ID NO: 1611659 - RNA, 19 nt, Artificial Sequence
  Description of Artificial Sequence: Synthetic oligonucleotide
  Sense strand starting at position 2309 of SEQ ID NO: 1560605
ugguuuagauuacuagugu

SEQ ID NO: 1611660 - RNA, 19 nt, Artificial Sequence
  Description of Artificial Sequence: Synthetic oligonucleotide
  Antisense strand to SEQ ID NO: 1611659
acacuaguaaucuaaacca

SEQ ID NO: 1611661 - RNA, 19 nt, Artificial Sequence
  Description of Artificial Sequence: Synthetic oligonucleotide
  Sense strand starting at position 2369 of SEQ ID NO: 1560605
uucucagcuguaugaucau

SEQ ID NO: 1611662 - RNA, 19 nt, Artificial Sequence
  Description of Artificial Sequence: Synthetic oligonucleotide
  Antisense strand to SEQ ID NO: 1611661
augaucauacagcugagaa

SEQ ID NO: 1611663 - RNA, 19 nt, Artificial Sequence
  Description of Artificial Sequence: Synthetic oligonucleotide
  Sense strand starting at position 2811 of SEQ ID NO: 1560605
uccaguaaugccuguaugu

SEQ ID NO: 1611664 - RNA, 19 nt, Artificial Sequence
  Description of Artificial Sequence: Synthetic oligonucleotide
  Antisense strand to SEQ ID NO: 1611663
acauacaggcauuacugga

SEQ ID NO: 1611665 - RNA, 19 nt, Artificial Sequence
  Description of Artificial Sequence: Synthetic oligonucleotide
  Sense strand starting at position 2813 of SEQ ID NO: 1560605
caguaaugccuguauguua

SEQ ID NO: 1611666 - RNA, 19 nt, Artificial Sequence
  Description of Artificial Sequence: Synthetic oligonucleotide
  Antisense strand to SEQ ID NO: 1611665
uaacauacaggcauuacug

SEQ ID NO: 1611667 - RNA, 19 nt, Artificial Sequence
  Description of Artificial Sequence: Synthetic oligonucleotide
  Sense strand starting at position 2818 of SEQ ID NO: 1560605
augccuguauguuauuaau

SEQ ID NO: 1611668 - RNA, 19 nt, Artificial Sequence
  Description of Artificial Sequence: Synthetic oligonucleotide
  Antisense strand to SEQ ID NO: 1611667
auuaauaacauacaggcau

SEQ ID NO: 1611669 - RNA, 19 nt, Artificial Sequence
  Description of Artificial Sequence: Synthetic oligonucleotide
  Sense strand starting at position 2820 of SEQ ID NO: 1560605
gccuguauguuauuaaucu

SEQ ID NO: 1611670 - RNA, 19 nt, Artificial Sequence
  Description of Artificial Sequence: Synthetic oligonucleotide
  Antisense strand to SEQ ID NO: 1611669
agauuaauaacauacaggc

SEQ ID NO: 1611671 - RNA, 19 nt, Artificial Sequence
  Description of Artificial Sequence: Synthetic oligonucleotide
  Sense strand starting at position 2821 of SEQ ID NO: 1560605
ccuguauguuauuaaucug

SEQ ID NO: 1611672 - RNA, 19 nt, Artificial Sequence
  Description of Artificial Sequence: Synthetic oligonucleotide
  Antisense strand to SEQ ID NO: 1611671
cagauuaauaacauacagg

SEQ ID NO: 1611673 - RNA, 19 nt, Artificial Sequence
  Description of Artificial Sequence: Synthetic oligonucleotide
  Sense strand starting at position 2824 of SEQ ID NO: 1560605
guauguuauuaaucugcca

SEQ ID NO: 1611674 - RNA, 19 nt, Artificial Sequence
  Description of Artificial Sequence: Synthetic oligonucleotide
  Antisense strand to SEQ ID NO: 1611673
uggcagauuaauaacauac

SEQ ID NO: 1611675 - RNA, 19 nt, Artificial Sequence
  Description of Artificial Sequence: Synthetic oligonucleotide
  Sense strand starting at position 3183 of SEQ ID NO: 1560605
gacuaagaguccgucucua

SEQ ID NO: 1611676 - RNA, 19 nt, Artificial Sequence
  Description of Artificial Sequence: Synthetic oligonucleotide
  Antisense strand to SEQ ID NO: 1611675
uagagacggacucuuaguc

SEQ ID NO: 1611677 - RNA, 19 nt, Artificial Sequence
  Description of Artificial Sequence: Synthetic oligonucleotide
  Sense strand starting at position 3259 of SEQ ID NO: 1560605
aguccuugaucauuaagau

SEQ ID NO: 1611678 - RNA, 19 nt, Artificial Sequence
  Description of Artificial Sequence: Synthetic oligonucleotide
  Antisense strand to SEQ ID NO: 1611677
aucuuaaugaucaaggacu

SEQ ID NO: 1611679 - RNA, 19 nt, Artificial Sequence
  Description of Artificial Sequence: Synthetic oligonucleotide
  Sense strand starting at position 3358 of SEQ ID NO: 1560605
uccggaagauugggaugau

SEQ ID NO: 1611680 - RNA, 19 nt, Artificial Sequence
  Description of Artificial Sequence: Synthetic oligonucleotide
  Antisense strand to SEQ ID NO: 1611679
aucaucccaaucuuccgga

SEQ ID NO: 1611681 - RNA, 19 nt, Artificial Sequence
  Description of Artificial Sequence: Synthetic oligonucleotide
  Sense strand starting at position 3359 of SEQ ID NO: 1560605
ccggaagauugggaugaua

SEQ ID NO: 1611682 - RNA, 19 nt, Artificial Sequence
  Description of Artificial Sequence: Synthetic oligonucleotide
  Antisense strand to SEQ ID NO: 1611681
uaucaucccaaucuuccgg

SEQ ID NO: 1611683 - RNA, 19 nt, Artificial Sequence
  Description of Artificial Sequence: Synthetic oligonucleotide
  Sense strand starting at position 3922 of SEQ ID NO: 1560605
ugacuaggcugguugcaaa

SEQ ID NO: 1611684 - RNA, 19 nt, Artificial Sequence
  Description of Artificial Sequence: Synthetic oligonucleotide
  Antisense strand to SEQ ID NO: 1611683
uuugcaaccagccuaguca

SEQ ID NO: 1611685 - RNA, 19 nt, Artificial Sequence
  Description of Artificial Sequence: Synthetic oligonucleotide
  Sense strand starting at position 130 of SEQ ID NO: 1560606
gugggaguuguuuaggcga

SEQ ID NO: 1611686 - RNA, 19 nt, Artificial Sequence
  Description of Artificial Sequence: Synthetic oligonucleotide
  Antisense strand to SEQ ID NO: 1611685
ucgccuaaacaacucccac

SEQ ID NO: 1611687 - RNA, 19 nt, Artificial Sequence
  Description of Artificial Sequence: Synthetic oligonucleotide
  Sense strand starting at position 133 of SEQ ID NO: 1560606
ggaguuguuuaggcgagag

SEQ ID NO: 1611688 - RNA, 19 nt, Artificial Sequence
  Description of Artificial Sequence: Synthetic oligonucleotide
  Antisense strand to SEQ ID NO: 1611687
cucucgccuaaacaacucc

SEQ ID NO: 1611689 - RNA, 19 nt, Artificial Sequence
  Description of Artificial Sequence: Synthetic oligonucleotide
  Sense strand starting at position 135 of SEQ ID NO: 1560606
aguuguuuaggcgagagag

SEQ ID NO: 1611690 - RNA, 19 nt, Artificial Sequence
  Description of Artificial Sequence: Synthetic oligonucleotide
  Antisense strand to SEQ ID NO: 1611689
cucucucgccuaaacaacu

SEQ ID NO: 1611691 - RNA, 19 nt, Artificial Sequence
  Description of Artificial Sequence: Synthetic oligonucleotide
  Sense strand starting at position 311 of SEQ ID NO: 1560606
ccuugaagccgucgucuga

SEQ ID NO: 1611692 - RNA, 19 nt, Artificial Sequence
  Description of Artificial Sequence: Synthetic oligonucleotide
  Antisense strand to SEQ ID NO: 1611691
ucagacgacggcuucaagg

SEQ ID NO: 1611693 - RNA, 19 nt, Artificial Sequence
  Description of Artificial Sequence: Synthetic oligonucleotide
  Sense strand starting at position 578 of SEQ ID NO: 1560606
gaggaauaccgaugucuac

SEQ ID NO: 1611694 - RNA, 19 nt, Artificial Sequence
  Description of Artificial Sequence: Synthetic oligonucleotide
  Antisense strand to SEQ ID NO: 1611693
guagacaucgguauuccuc

SEQ ID NO: 1611695 - RNA, 19 nt, Artificial Sequence
  Description of Artificial Sequence: Synthetic oligonucleotide
  Sense strand starting at position 581 of SEQ ID NO: 1560606
gaauaccgaugucuacaau

SEQ ID NO: 1611696 - RNA, 19 nt, Artificial Sequence
  Description of Artificial Sequence: Synthetic oligonucleotide
  Antisense strand to SEQ ID NO: 1611695
auuguagacaucgguauuc

SEQ ID NO: 1611697 - RNA, 19 nt, Artificial Sequence
  Description of Artificial Sequence: Synthetic oligonucleotide
  Sense strand starting at position 785 of SEQ ID NO: 1560606
gaccaaagugaaggucuua

SEQ ID NO: 1611698 - RNA, 19 nt, Artificial Sequence
  Description of Artificial Sequence: Synthetic oligonucleotide
  Antisense strand to SEQ ID NO: 1611697
uaagaccuucacuuugguc

SEQ ID NO: 1611699 - RNA, 19 nt, Artificial Sequence
  Description of Artificial Sequence: Synthetic oligonucleotide
  Sense strand starting at position 790 of SEQ ID NO: 1560606
aagugaaggucuuauggac

SEQ ID NO: 1611700 - RNA, 19 nt, Artificial Sequence
  Description of Artificial Sequence: Synthetic oligonucleotide
  Antisense strand to SEQ ID NO: 1611699
guccauaagaccuucacuu

SEQ ID NO: 1611701 - RNA, 19 nt, Artificial Sequence
  Description of Artificial Sequence: Synthetic oligonucleotide
  Sense strand starting at position 1019 of SEQ ID NO: 1560606
ccaggaggucugggugaua

SEQ ID NO: 1611702 - RNA, 19 nt, Artificial Sequence
  Description of Artificial Sequence: Synthetic oligonucleotide
  Antisense strand to SEQ ID NO: 1611701
uaucacccagaccuccugg

SEQ ID NO: 1611703 - RNA, 19 nt, Artificial Sequence
  Description of Artificial Sequence: Synthetic oligonucleotide
  Sense strand starting at position 1046 of SEQ ID NO: 1560606
gcuccugaugcucagggaa

SEQ ID NO: 1611704 - RNA, 19 nt, Artificial Sequence
  Description of Artificial Sequence: Synthetic oligonucleotide
  Antisense strand to SEQ ID NO: 1611703
uucccugagcaucaggagc

SEQ ID NO: 1611705 - RNA, 19 nt, Artificial Sequence
  Description of Artificial Sequence: Synthetic oligonucleotide
  Sense strand starting at position 1137 of SEQ ID NO: 1560606
gcccgaaguuccuuagcca

SEQ ID NO: 1611706 - RNA, 19 nt, Artificial Sequence
  Description of Artificial Sequence: Synthetic oligonucleotide
  Antisense strand to SEQ ID NO: 1611705
uggcuaaggaacuucgggc

SEQ ID NO: 1611707 - RNA, 19 nt, Artificial Sequence
  Description of Artificial Sequence: Synthetic oligonucleotide
  Sense strand starting at position 1141 of SEQ ID NO: 1560606
gaaguuccuuagccaggaa

SEQ ID NO: 1611708 - RNA, 19 nt, Artificial Sequence
  Description of Artificial Sequence: Synthetic oligonucleotide
  Antisense strand to SEQ ID NO: 1611707
uuccuggcuaaggaacuuc

SEQ ID NO: 1611709 - RNA, 19 nt, Artificial Sequence
  Description of Artificial Sequence: Synthetic oligonucleotide
  Sense strand starting at position 1221 of SEQ ID NO: 1560606
uccagaguucccugggacu

SEQ ID NO: 1611710 - RNA, 19 nt, Artificial Sequence
  Description of Artificial Sequence: Synthetic oligonucleotide
  Antisense strand to SEQ ID NO: 1611709
agucccagggaacucugga

SEQ ID NO: 1611711 - RNA, 19 nt, Artificial Sequence
  Description of Artificial Sequence: Synthetic oligonucleotide
  Sense strand starting at position 1223 of SEQ ID NO: 1560606
cagaguucccugggacuca

SEQ ID NO: 1611712 - RNA, 19 nt, Artificial Sequence
  Description of Artificial Sequence: Synthetic oligonucleotide
  Antisense strand to SEQ ID NO: 1611711
ugagucccagggaacucug

SEQ ID NO: 1611713 - RNA, 19 nt, Artificial Sequence
  Description of Artificial Sequence: Synthetic oligonucleotide
  Sense strand starting at position 1347 of SEQ ID NO: 1560606
acgaauacaucagauuuga

SEQ ID NO: 1611714 - RNA, 19 nt, Artificial Sequence
  Description of Artificial Sequence: Synthetic oligonucleotide
  Antisense strand to SEQ ID NO: 1611713
ucaaaucugauguauucgu

SEQ ID NO: 1611715 - RNA, 19 nt, Artificial Sequence
  Description of Artificial Sequence: Synthetic oligonucleotide
  Sense strand starting at position 1677 of SEQ ID NO: 1560606
ggcugagacuggcagaaau

SEQ ID NO: 1611716 - RNA, 19 nt, Artificial Sequence
  Description of Artificial Sequence: Synthetic oligonucleotide
  Antisense strand to SEQ ID NO: 1611715
auuucugccagucucagcc

SEQ ID NO: 1611717 - RNA, 19 nt, Artificial Sequence
  Description of Artificial Sequence: Synthetic oligonucleotide
  Sense strand starting at position 2218 of SEQ ID NO: 1560606
gggaauguuuaauaguaau

SEQ ID NO: 1611718 - RNA, 19 nt, Artificial Sequence
  Description of Artificial Sequence: Synthetic oligonucleotide
  Antisense strand to SEQ ID NO: 1611717
auuacuauuaaacauuccc

SEQ ID NO: 1611719 - RNA, 19 nt, Artificial Sequence
  Description of Artificial Sequence: Synthetic oligonucleotide
  Sense strand starting at position 2232 of SEQ ID NO: 1560606
guaauaaacucacagcaga

SEQ ID NO: 1611720 - RNA, 19 nt, Artificial Sequence
  Description of Artificial Sequence: Synthetic oligonucleotide
  Antisense strand to SEQ ID NO: 1611719
ucugcugugaguuuauuac

SEQ ID NO: 1611721 - RNA, 19 nt, Artificial Sequence
  Description of Artificial Sequence: Synthetic oligonucleotide
  Sense strand starting at position 2440 of SEQ ID NO: 1560606
uggacugauccgugcugaa

SEQ ID NO: 1611722 - RNA, 19 nt, Artificial Sequence
  Description of Artificial Sequence: Synthetic oligonucleotide
  Antisense strand to SEQ ID NO: 1611721
uucagcacggaucagucca

SEQ ID NO: 1611723 - RNA, 19 nt, Artificial Sequence
  Description of Artificial Sequence: Synthetic oligonucleotide
  Sense strand starting at position 2450 of SEQ ID NO: 1560606
cgugcugaaaucuaagcuu

SEQ ID NO: 1611724 - RNA, 19 nt, Artificial Sequence
  Description of Artificial Sequence: Synthetic oligonucleotide
  Antisense strand to SEQ ID NO: 1611723
aagcuuagauuucagcacg

SEQ ID NO: 1611725 - RNA, 19 nt, Artificial Sequence
  Description of Artificial Sequence: Synthetic oligonucleotide
  Sense strand starting at position 2639 of SEQ ID NO: 1560606
cuaggacuaugccugucau

SEQ ID NO: 1611726 - RNA, 19 nt, Artificial Sequence
  Description of Artificial Sequence: Synthetic oligonucleotide
  Antisense strand to SEQ ID NO: 1611725
augacaggcauaguccuag

SEQ ID NO: 1611727 - RNA, 19 nt, Artificial Sequence
  Description of Artificial Sequence: Synthetic oligonucleotide
  Sense strand starting at position 2640 of SEQ ID NO: 1560606
uaggacuaugccugucauu

SEQ ID NO: 1611728 - RNA, 19 nt, Artificial Sequence
  Description of Artificial Sequence: Synthetic oligonucleotide
  Antisense strand to SEQ ID NO: 1611727
aaugacaggcauaguccua

SEQ ID NO: 1611729 - RNA, 19 nt, Artificial Sequence
  Description of Artificial Sequence: Synthetic oligonucleotide
  Sense strand starting at position 2687 of SEQ ID NO: 1560606
gcaggaaaucacugauugg

SEQ ID NO: 1611730 - RNA, 19 nt, Artificial Sequence
  Description of Artificial Sequence: Synthetic oligonucleotide
  Antisense strand to SEQ ID NO: 1611729
ccaaucagugauuuccugc

SEQ ID NO: 1611731 - RNA, 19 nt, Artificial Sequence
  Description of Artificial Sequence: Synthetic oligonucleotide
  Sense strand starting at position 2997 of SEQ ID NO: 1560606
ccaaguuuguaggucagga

SEQ ID NO: 1611732 - RNA, 19 nt, Artificial Sequence
  Description of Artificial Sequence: Synthetic oligonucleotide
  Antisense strand to SEQ ID NO: 1611731
uccugaccuacaaacuugg

SEQ ID NO: 1611733 - RNA, 19 nt, Artificial Sequence
  Description of Artificial Sequence: Synthetic oligonucleotide
  Sense strand starting at position 3121 of SEQ ID NO: 1560606
ggccuaagacucugcaaga

SEQ ID NO: 1611734 - RNA, 19 nt, Artificial Sequence
  Description of Artificial Sequence: Synthetic oligonucleotide
  Antisense strand to SEQ ID NO: 1611733
ucuugcagagucuuaggcc

SEQ ID NO: 1611735 - RNA, 19 nt, Artificial Sequence
  Description of Artificial Sequence: Synthetic oligonucleotide
  Sense strand starting at position 3122 of SEQ ID NO: 1560606
gccuaagacucugcaagag

SEQ ID NO: 1611736 - RNA, 19 nt, Artificial Sequence
  Description of Artificial Sequence: Synthetic oligonucleotide
  Antisense strand to SEQ ID NO: 1611735
cucuugcagagucuuaggc

SEQ ID NO: 1611737 - RNA, 19 nt, Artificial Sequence
  Description of Artificial Sequence: Synthetic oligonucleotide
  Sense strand starting at position 3174 of SEQ ID NO: 1560606
gcggguagggcugaaagau

SEQ ID NO: 1611738 - RNA, 19 nt, Artificial Sequence
  Description of Artificial Sequence: Synthetic oligonucleotide
  Antisense strand to SEQ ID NO: 1611737
aucuuucagcccuacccgc

SEQ ID NO: 1611739 - RNA, 19 nt, Artificial Sequence
  Description of Artificial Sequence: Synthetic oligonucleotide
  Sense strand starting at position 3183 of SEQ ID NO: 1560606
gcugaaagaugcuucugaa

SEQ ID NO: 1611740 - RNA, 19 nt, Artificial Sequence
  Description of Artificial Sequence: Synthetic oligonucleotide
  Antisense strand to SEQ ID NO: 1611739
uucagaagcaucuuucagc

SEQ ID NO: 1611741 - RNA, 19 nt, Artificial Sequence
  Description of Artificial Sequence: Synthetic oligonucleotide
  Sense strand starting at position 3186 of SEQ ID NO: 1560606
gaaagaugcuucugaaagg

SEQ ID NO: 1611742 - RNA, 19 nt, Artificial Sequence
  Description of Artificial Sequence: Synthetic oligonucleotide
  Antisense strand to SEQ ID NO: 1611741
ccuuucagaagcaucuuuc

SEQ ID NO: 1611743 - RNA, 19 nt, Artificial Sequence
  Description of Artificial Sequence: Synthetic oligonucleotide
  Sense strand starting at position 3340 of SEQ ID NO: 1560606
uggaaaguuuggguggaga

SEQ ID NO: 1611744 - RNA, 19 nt, Artificial Sequence
  Description of Artificial Sequence: Synthetic oligonucleotide
  Antisense strand to SEQ ID NO: 1611743
ucuccacccaaacuuucca

SEQ ID NO: 1611745 - RNA, 19 nt, Artificial Sequence
  Description of Artificial Sequence: Synthetic oligonucleotide
  Sense strand starting at position 3342 of SEQ ID NO: 1560606
gaaaguuuggguggagaca

SEQ ID NO: 1611746 - RNA, 19 nt, Artificial Sequence
  Description of Artificial Sequence: Synthetic oligonucleotide
  Antisense strand to SEQ ID NO: 1611745
ugucuccacccaaacuuuc

SEQ ID NO: 1611747 - RNA, 19 nt, Artificial Sequence
  Description of Artificial Sequence: Synthetic oligonucleotide
  Sense strand starting at position 3448 of SEQ ID NO: 1560606
ggaccaguucuugggaaca

SEQ ID NO: 1611748 - RNA, 19 nt, Artificial Sequence
  Description of Artificial Sequence: Synthetic oligonucleotide
  Antisense strand to SEQ ID NO: 1611747
uguucccaagaacuggucc

SEQ ID NO: 1611749 - RNA, 19 nt, Artificial Sequence
  Description of Artificial Sequence: Synthetic oligonucleotide
  Sense strand starting at position 3450 of SEQ ID NO: 1560606
accaguucuugggaacaug

SEQ ID NO: 1611750 - RNA, 19 nt, Artificial Sequence
  Description of Artificial Sequence: Synthetic oligonucleotide
  Antisense strand to SEQ ID NO: 1611749
cauguucccaagaacuggu

SEQ ID NO: 1611751 - RNA, 19 nt, Artificial Sequence
  Description of Artificial Sequence: Synthetic oligonucleotide
  Sense strand starting at position 3649 of SEQ ID NO: 1560606
caggguguccggugaucau

SEQ ID NO: 1611752 - RNA, 19 nt, Artificial Sequence
  Description of Artificial Sequence: Synthetic oligonucleotide
  Antisense strand to SEQ ID NO: 1611751
augaucaccggacacccug

SEQ ID NO: 1611753 - RNA, 19 nt, Artificial Sequence
  Description of Artificial Sequence: Synthetic oligonucleotide
  Sense strand starting at position 3681 of SEQ ID NO: 1560606
cucaguuaguucccgagaa

SEQ ID NO: 1611754 - RNA, 19 nt, Artificial Sequence
  Description of Artificial Sequence: Synthetic oligonucleotide
  Antisense strand to SEQ ID NO: 1611753
uucucgggaacuaacugag

SEQ ID NO: 1611755 - RNA, 19 nt, Artificial Sequence
  Description of Artificial Sequence: Synthetic oligonucleotide
  Sense strand starting at position 3683 of SEQ ID NO: 1560606
caguuaguucccgagaaug

SEQ ID NO: 1611756 - RNA, 19 nt, Artificial Sequence
  Description of Artificial Sequence: Synthetic oligonucleotide
  Antisense strand to SEQ ID NO: 1611755
cauucucgggaacuaacug

SEQ ID NO: 1611757 - RNA, 19 nt, Artificial Sequence
  Description of Artificial Sequence: Synthetic oligonucleotide
  Sense strand starting at position 3685 of SEQ ID NO: 1560606
guuaguucccgagaauguu

SEQ ID NO: 1611758 - RNA, 19 nt, Artificial Sequence
  Description of Artificial Sequence: Synthetic oligonucleotide
  Antisense strand to SEQ ID NO: 1611757
aacauucucgggaacuaac

SEQ ID NO: 1611759 - RNA, 19 nt, Artificial Sequence
  Description of Artificial Sequence: Synthetic oligonucleotide
  Sense strand starting at position 3713 of SEQ ID NO: 1560606
gguggacuccauuguucua

SEQ ID NO: 1611760 - RNA, 19 nt, Artificial Sequence
  Description of Artificial Sequence: Synthetic oligonucleotide
  Antisense strand to SEQ ID NO: 1611759
uagaacaauggaguccacc

SEQ ID NO: 1611761 - RNA, 19 nt, Artificial Sequence
  Description of Artificial Sequence: Synthetic oligonucleotide
  Sense strand starting at position 3716 of SEQ ID NO: 1560606
ggacuccauuguucuaaca

SEQ ID NO: 1611762 - RNA, 19 nt, Artificial Sequence
  Description of Artificial Sequence: Synthetic oligonucleotide
  Antisense strand to SEQ ID NO: 1611761
uguuagaacaauggagucc

SEQ ID NO: 1611763 - RNA, 19 nt, Artificial Sequence
  Description of Artificial Sequence: Synthetic oligonucleotide
  Sense strand starting at position 3834 of SEQ ID NO: 1560606
cgcacaucugccuguaauu

SEQ ID NO: 1611764 - RNA, 19 nt, Artificial Sequence
  Description of Artificial Sequence: Synthetic oligonucleotide
  Antisense strand to SEQ ID NO: 1611763
aauuacaggcagaugugcg

SEQ ID NO: 1611765 - RNA, 19 nt, Artificial Sequence
  Description of Artificial Sequence: Synthetic oligonucleotide
  Sense strand starting at position 139 of SEQ ID NO: 1560607
gugggaguuguuuaggcga

SEQ ID NO: 1611766 - RNA, 19 nt, Artificial Sequence
  Description of Artificial Sequence: Synthetic oligonucleotide
  Antisense strand to SEQ ID NO: 1611765
ucgccuaaacaacucccac

SEQ ID NO: 1611767 - RNA, 19 nt, Artificial Sequence
  Description of Artificial Sequence: Synthetic oligonucleotide
  Sense strand starting at position 142 of SEQ ID NO: 1560607
ggaguuguuuaggcgagag

SEQ ID NO: 1611768 - RNA, 19 nt, Artificial Sequence
  Description of Artificial Sequence: Synthetic oligonucleotide
  Antisense strand to SEQ ID NO: 1611767
cucucgccuaaacaacucc

SEQ ID NO: 1611769 - RNA, 19 nt, Artificial Sequence
  Description of Artificial Sequence: Synthetic oligonucleotide
  Sense strand starting at position 144 of SEQ ID NO: 1560607
aguuguuuaggcgagagag

SEQ ID NO: 1611770 - RNA, 19 nt, Artificial Sequence
  Description of Artificial Sequence: Synthetic oligonucleotide
  Antisense strand to SEQ ID NO: 1611769
cucucucgccuaaacaacu

SEQ ID NO: 1611771 - RNA, 19 nt, Artificial Sequence
  Description of Artificial Sequence: Synthetic oligonucleotide
  Sense strand starting at position 587 of SEQ ID NO: 1560607
gaggaauaccgaugucuac

SEQ ID NO: 1611772 - RNA, 19 nt, Artificial Sequence
  Description of Artificial Sequence: Synthetic oligonucleotide
  Antisense strand to SEQ ID NO: 1611771
guagacaucgguauuccuc

SEQ ID NO: 1611773 - RNA, 19 nt, Artificial Sequence
  Description of Artificial Sequence: Synthetic oligonucleotide
  Sense strand starting at position 590 of SEQ ID NO: 1560607
gaauaccgaugucuacaau

SEQ ID NO: 1611774 - RNA, 19 nt, Artificial Sequence
  Description of Artificial Sequence: Synthetic oligonucleotide
  Antisense strand to SEQ ID NO: 1611773
auuguagacaucgguauuc

SEQ ID NO: 1611775 - RNA, 19 nt, Artificial Sequence
  Description of Artificial Sequence: Synthetic oligonucleotide
  Sense strand starting at position 794 of SEQ ID NO: 1560607
gaccaaagugaaggucuua

SEQ ID NO: 1611776 - RNA, 19 nt, Artificial Sequence
  Description of Artificial Sequence: Synthetic oligonucleotide
  Antisense strand to SEQ ID NO: 1611775
uaagaccuucacuuugguc

SEQ ID NO: 1611777 - RNA, 19 nt, Artificial Sequence
  Description of Artificial Sequence: Synthetic oligonucleotide
  Sense strand starting at position 885 of SEQ ID NO: 1560607
ggagaggugggcgacuaau

SEQ ID NO: 1611778 - RNA, 19 nt, Artificial Sequence
  Description of Artificial Sequence: Synthetic oligonucleotide
  Antisense strand to SEQ ID NO: 1611777
auuagucgcccaccucucc

SEQ ID NO: 1611779 - RNA, 19 nt, Artificial Sequence
  Description of Artificial Sequence: Synthetic oligonucleotide
  Sense strand starting at position 1028 of SEQ ID NO: 1560607
ccaggaggucugggugaua

SEQ ID NO: 1611780 - RNA, 19 nt, Artificial Sequence
  Description of Artificial Sequence: Synthetic oligonucleotide
  Antisense strand to SEQ ID NO: 1611779
uaucacccagaccuccugg

SEQ ID NO: 1611781 - RNA, 19 nt, Artificial Sequence
  Description of Artificial Sequence: Synthetic oligonucleotide
  Sense strand starting at position 1055 of SEQ ID NO: 1560607
gcuccugaugcucagggaa

SEQ ID NO: 1611782 - RNA, 19 nt, Artificial Sequence
  Description of Artificial Sequence: Synthetic oligonucleotide
  Antisense strand to SEQ ID NO: 1611781
uucccugagcaucaggagc

SEQ ID NO: 1611783 - RNA, 19 nt, Artificial Sequence
  Description of Artificial Sequence: Synthetic oligonucleotide
  Sense strand starting at position 1146 of SEQ ID NO: 1560607
gcccgaaguuccuuagcca

SEQ ID NO: 1611784 - RNA, 19 nt, Artificial Sequence
  Description of Artificial Sequence: Synthetic oligonucleotide
  Antisense strand to SEQ ID NO: 1611783
uggcuaaggaacuucgggc

SEQ ID NO: 1611785 - RNA, 19 nt, Artificial Sequence
  Description of Artificial Sequence: Synthetic oligonucleotide
  Sense strand starting at position 1150 of SEQ ID NO: 1560607
gaaguuccuuagccaggaa

SEQ ID NO: 1611786 - RNA, 19 nt, Artificial Sequence
  Description of Artificial Sequence: Synthetic oligonucleotide
  Antisense strand to SEQ ID NO: 1611785
uuccuggcuaaggaacuuc

SEQ ID NO: 1611787 - RNA, 19 nt, Artificial Sequence
  Description of Artificial Sequence: Synthetic oligonucleotide
  Sense strand starting at position 1230 of SEQ ID NO: 1560607
uccagaguucccugggacu

SEQ ID NO: 1611788 - RNA, 19 nt, Artificial Sequence
  Description of Artificial Sequence: Synthetic oligonucleotide
  Antisense strand to SEQ ID NO: 1611787
agucccagggaacucugga

SEQ ID NO: 1611789 - RNA, 19 nt, Artificial Sequence
  Description of Artificial Sequence: Synthetic oligonucleotide
  Sense strand starting at position 1232 of SEQ ID NO: 1560607
cagaguucccugggacuca

SEQ ID NO: 1611790 - RNA, 19 nt, Artificial Sequence
  Description of Artificial Sequence: Synthetic oligonucleotide
  Antisense strand to SEQ ID NO: 1611789
ugagucccagggaacucug

SEQ ID NO: 1611791 - RNA, 19 nt, Artificial Sequence
  Description of Artificial Sequence: Synthetic oligonucleotide
  Sense strand starting at position 1356 of SEQ ID NO: 1560607
acgaauacaucagauuuga

SEQ ID NO: 1611792 - RNA, 19 nt, Artificial Sequence
  Description of Artificial Sequence: Synthetic oligonucleotide
  Antisense strand to SEQ ID NO: 1611791
ucaaaucugauguauucgu

SEQ ID NO: 1611793 - RNA, 19 nt, Artificial Sequence
  Description of Artificial Sequence: Synthetic oligonucleotide
  Sense strand starting at position 1686 of SEQ ID NO: 1560607
ggcugagacuggcagaaau

SEQ ID NO: 1611794 - RNA, 19 nt, Artificial Sequence
  Description of Artificial Sequence: Synthetic oligonucleotide
  Antisense strand to SEQ ID NO: 1611793
auuucugccagucucagcc

SEQ ID NO: 1611795 - RNA, 19 nt, Artificial Sequence
  Description of Artificial Sequence: Synthetic oligonucleotide
  Sense strand starting at position 2330 of SEQ ID NO: 1560607
gcgggaacucuagacccuu

SEQ ID NO: 1611796 - RNA, 19 nt, Artificial Sequence
  Description of Artificial Sequence: Synthetic oligonucleotide
  Antisense strand to SEQ ID NO: 1611795
aagggucuagaguucccgc

SEQ ID NO: 1611797 - RNA, 19 nt, Artificial Sequence
  Description of Artificial Sequence: Synthetic oligonucleotide
  Sense strand starting at position 2377 of SEQ ID NO: 1560607
cuggaaaugucugcgcuga

SEQ ID NO: 1611798 - RNA, 19 nt, Artificial Sequence
  Description of Artificial Sequence: Synthetic oligonucleotide
  Antisense strand to SEQ ID NO: 1611797
ucagcgcagacauuuccag

SEQ ID NO: 1611799 - RNA, 19 nt, Artificial Sequence
  Description of Artificial Sequence: Synthetic oligonucleotide
  Sense strand starting at position 2378 of SEQ ID NO: 1560607
uggaaaugucugcgcugaa

SEQ ID NO: 1611800 - RNA, 19 nt, Artificial Sequence
  Description of Artificial Sequence: Synthetic oligonucleotide
  Antisense strand to SEQ ID NO: 1611799
uucagcgcagacauuucca

SEQ ID NO: 1611801 - RNA, 19 nt, Artificial Sequence
  Description of Artificial Sequence: Synthetic oligonucleotide
  Sense strand starting at position 2379 of SEQ ID NO: 1560607
ggaaaugucugcgcugaaa

SEQ ID NO: 1611802 - RNA, 19 nt, Artificial Sequence
  Description of Artificial Sequence: Synthetic oligonucleotide
  Antisense strand to SEQ ID NO: 1611801
uuucagcgcagacauuucc

SEQ ID NO: 1611803 - RNA, 19 nt, Artificial Sequence
  Description of Artificial Sequence: Synthetic oligonucleotide
  Sense strand starting at position 2381 of SEQ ID NO: 1560607
aaaugucugcgcugaaauc

SEQ ID NO: 1611804 - RNA, 19 nt, Artificial Sequence
  Description of Artificial Sequence: Synthetic oligonucleotide
  Antisense strand to SEQ ID NO: 1611803
gauuucagcgcagacauuu

SEQ ID NO: 1611805 - RNA, 19 nt, Artificial Sequence
  Description of Artificial Sequence: Synthetic oligonucleotide
  Sense strand starting at position 2390 of SEQ ID NO: 1560607
cgcugaaaucccugcuucu

SEQ ID NO: 1611806 - RNA, 19 nt, Artificial Sequence
  Description of Artificial Sequence: Synthetic oligonucleotide
  Antisense strand to SEQ ID NO: 1611805
agaagcagggauuucagcg

SEQ ID NO: 1611807 - RNA, 19 nt, Artificial Sequence
  Description of Artificial Sequence: Synthetic oligonucleotide
  Sense strand starting at position 2393 of SEQ ID NO: 1560607
ugaaaucccugcuucuaag

SEQ ID NO: 1611808 - RNA, 19 nt, Artificial Sequence
  Description of Artificial Sequence: Synthetic oligonucleotide
  Antisense strand to SEQ ID NO: 1611807
cuuagaagcagggauuuca

SEQ ID NO: 1611809 - RNA, 19 nt, Artificial Sequence
  Description of Artificial Sequence: Synthetic oligonucleotide
  Sense strand starting at position 2404 of SEQ ID NO: 1560607
cuucuaagucuccagugga

SEQ ID NO: 1611810 - RNA, 19 nt, Artificial Sequence
  Description of Artificial Sequence: Synthetic oligonucleotide
  Antisense strand to SEQ ID NO: 1611809
uccacuggagacuuagaag

SEQ ID NO: 1611811 - RNA, 19 nt, Artificial Sequence
  Description of Artificial Sequence: Synthetic oligonucleotide
  Sense strand starting at position 2516 of SEQ ID NO: 1560607
uggagugugccggguucau

SEQ ID NO: 1611812 - RNA, 19 nt, Artificial Sequence
  Description of Artificial Sequence: Synthetic oligonucleotide
  Antisense strand to SEQ ID NO: 1611811
augaacccggcacacucca

SEQ ID NO: 1611813 - RNA, 19 nt, Artificial Sequence
  Description of Artificial Sequence: Synthetic oligonucleotide
  Sense strand starting at position 2576 of SEQ ID NO: 1560607
uaggacuacgcuugucauu

SEQ ID NO: 1611814 - RNA, 19 nt, Artificial Sequence
  Description of Artificial Sequence: Synthetic oligonucleotide
  Antisense strand to SEQ ID NO: 1611813
aaugacaagcguaguccua

SEQ ID NO: 1611815 - RNA, 19 nt, Artificial Sequence
  Description of Artificial Sequence: Synthetic oligonucleotide
  Sense strand starting at position 2578 of SEQ ID NO: 1560607
ggacuacgcuugucauuuc

SEQ ID NO: 1611816 - RNA, 19 nt, Artificial Sequence
  Description of Artificial Sequence: Synthetic oligonucleotide
  Antisense strand to SEQ ID NO: 1611815
gaaaugacaagcguagucc

SEQ ID NO: 1611817 - RNA, 19 nt, Artificial Sequence
  Description of Artificial Sequence: Synthetic oligonucleotide
  Sense strand starting at position 2614 of SEQ ID NO: 1560607
ccaggauaugcaggaaauc

SEQ ID NO: 1611818 - RNA, 19 nt, Artificial Sequence
  Description of Artificial Sequence: Synthetic oligonucleotide
  Antisense strand to SEQ ID NO: 1611817
gauuuccugcauauccugg

SEQ ID NO: 1611819 - RNA, 19 nt, Artificial Sequence
  Description of Artificial Sequence: Synthetic oligonucleotide
  Sense strand starting at position 2623 of SEQ ID NO: 1560607
gcaggaaaucacugauugg

SEQ ID NO: 1611820 - RNA, 19 nt, Artificial Sequence
  Description of Artificial Sequence: Synthetic oligonucleotide
  Antisense strand to SEQ ID NO: 1611819
ccaaucagugauuuccugc

SEQ ID NO: 1611821 - RNA, 19 nt, Artificial Sequence
  Description of Artificial Sequence: Synthetic oligonucleotide
  Sense strand starting at position 2824 of SEQ ID NO: 1560607
ucuguuugucucugucuau

SEQ ID NO: 1611822 - RNA, 19 nt, Artificial Sequence
  Description of Artificial Sequence: Synthetic oligonucleotide
  Antisense strand to SEQ ID NO: 1611821
auagacagagacaaacaga

SEQ ID NO: 1611823 - RNA, 19 nt, Artificial Sequence
  Description of Artificial Sequence: Synthetic oligonucleotide
  Sense strand starting at position 2825 of SEQ ID NO: 1560607
cuguuugucucugucuaua

SEQ ID NO: 1611824 - RNA, 19 nt, Artificial Sequence
  Description of Artificial Sequence: Synthetic oligonucleotide
  Antisense strand to SEQ ID NO: 1611823
uauagacagagacaaacag

SEQ ID NO: 1611825 - RNA, 19 nt, Artificial Sequence
  Description of Artificial Sequence: Synthetic oligonucleotide
  Sense strand starting at position 2827 of SEQ ID NO: 1560607
guuugucucugucuauaac

SEQ ID NO: 1611826 - RNA, 19 nt, Artificial Sequence
  Description of Artificial Sequence: Synthetic oligonucleotide
  Antisense strand to SEQ ID NO: 1611825
guuauagacagagacaaac

SEQ ID NO: 1611827 - RNA, 19 nt, Artificial Sequence
  Description of Artificial Sequence: Synthetic oligonucleotide
  Sense strand starting at position 2828 of SEQ ID NO: 1560607
uuugucucugucuauaacu

SEQ ID NO: 1611828 - RNA, 19 nt, Artificial Sequence
  Description of Artificial Sequence: Synthetic oligonucleotide
  Antisense strand to SEQ ID NO: 1611827
aguuauagacagagacaaa

SEQ ID NO: 1611829 - RNA, 19 nt, Artificial Sequence
  Description of Artificial Sequence: Synthetic oligonucleotide
  Sense strand starting at position 2853 of SEQ ID NO: 1560607
cgcguauuccugucccacu

SEQ ID NO: 1611830 - RNA, 19 nt, Artificial Sequence
  Description of Artificial Sequence: Synthetic oligonucleotide
  Antisense strand to SEQ ID NO: 1611829
agugggacaggaauacgcg

SEQ ID NO: 1611831 - RNA, 19 nt, Artificial Sequence
  Description of Artificial Sequence: Synthetic oligonucleotide
  Sense strand starting at position 2854 of SEQ ID NO: 1560607
gcguauuccugucccacuu

SEQ ID NO: 1611832 - RNA, 19 nt, Artificial Sequence
  Description of Artificial Sequence: Synthetic oligonucleotide
  Antisense strand to SEQ ID NO: 1611831
aagugggacaggaauacgc

SEQ ID NO: 1611833 - RNA, 19 nt, Artificial Sequence
  Description of Artificial Sequence: Synthetic oligonucleotide
  Sense strand starting at position 2903 of SEQ ID NO: 1560607
ccaggacuguuaccaucuu

SEQ ID NO: 1611834 - RNA, 19 nt, Artificial Sequence
  Description of Artificial Sequence: Synthetic oligonucleotide
  Antisense strand to SEQ ID NO: 1611833
aagaugguaacaguccugg

SEQ ID NO: 1611835 - RNA, 19 nt, Artificial Sequence
  Description of Artificial Sequence: Synthetic oligonucleotide
  Sense strand starting at position 3128 of SEQ ID NO: 1560607
acugaaaucuguuucugaa

SEQ ID NO: 1611836 - RNA, 19 nt, Artificial Sequence
  Description of Artificial Sequence: Synthetic oligonucleotide
  Antisense strand to SEQ ID NO: 1611835
uucagaaacagauuucagu

SEQ ID NO: 1611837 - RNA, 19 nt, Artificial Sequence
  Description of Artificial Sequence: Synthetic oligonucleotide
  Sense strand starting at position 3130 of SEQ ID NO: 1560607
ugaaaucuguuucugaaag

SEQ ID NO: 1611838 - RNA, 19 nt, Artificial Sequence
  Description of Artificial Sequence: Synthetic oligonucleotide
  Antisense strand to SEQ ID NO: 1611837
cuuucagaaacagauuuca

SEQ ID NO: 1611839 - RNA, 19 nt, Artificial Sequence
  Description of Artificial Sequence: Synthetic oligonucleotide
  Sense strand starting at position 3131 of SEQ ID NO: 1560607
gaaaucuguuucugaaagg

SEQ ID NO: 1611840 - RNA, 19 nt, Artificial Sequence
  Description of Artificial Sequence: Synthetic oligonucleotide
  Antisense strand to SEQ ID NO: 1611839
ccuuucagaaacagauuuc

SEQ ID NO: 1611841 - RNA, 19 nt, Artificial Sequence
  Description of Artificial Sequence: Synthetic oligonucleotide
  Sense strand starting at position 3906 of SEQ ID NO: 1560607
uggaaaguuuggguggaga

SEQ ID NO: 1611842 - RNA, 19 nt, Artificial Sequence
  Description of Artificial Sequence: Synthetic oligonucleotide
  Antisense strand to SEQ ID NO: 1611841
ucuccacccaaacuuucca

SEQ ID NO: 1611843 - RNA, 19 nt, Artificial Sequence
  Description of Artificial Sequence: Synthetic oligonucleotide
  Sense strand starting at position 3908 of SEQ ID NO: 1560607
gaaaguuuggguggagaca

SEQ ID NO: 1611844 - RNA, 19 nt, Artificial Sequence
  Description of Artificial Sequence: Synthetic oligonucleotide
  Antisense strand to SEQ ID NO: 1611843
ugucuccacccaaacuuuc

SEQ ID NO: 1611845 - RNA, 19 nt, Artificial Sequence
  Description of Artificial Sequence: Synthetic oligonucleotide
  Sense strand starting at position 50 of SEQ ID NO: 1560608
cagaguuguuuccugguca

SEQ ID NO: 1611846 - RNA, 19 nt, Artificial Sequence
  Description of Artificial Sequence: Synthetic oligonucleotide
  Antisense strand to SEQ ID NO: 1611845
ugaccaggaaacaacucug

SEQ ID NO: 1611847 - RNA, 19 nt, Artificial Sequence
  Description of Artificial Sequence: Synthetic oligonucleotide
  Sense strand starting at position 54 of SEQ ID NO: 1560608
guuguuuccuggucauuug

SEQ ID NO: 1611848 - RNA, 19 nt, Artificial Sequence
  Description of Artificial Sequence: Synthetic oligonucleotide
  Antisense strand to SEQ ID NO: 1611847
caaaugaccaggaaacaac

SEQ ID NO: 1611849 - RNA, 19 nt, Artificial Sequence
  Description of Artificial Sequence: Synthetic oligonucleotide
  Sense strand starting at position 64 of SEQ ID NO: 1560608
ggucauuugaaacguuucu

SEQ ID NO: 1611850 - RNA, 19 nt, Artificial Sequence
  Description of Artificial Sequence: Synthetic oligonucleotide
  Antisense strand to SEQ ID NO: 1611849
agaaacguuucaaaugacc

SEQ ID NO: 1611851 - RNA, 19 nt, Artificial Sequence
  Description of Artificial Sequence: Synthetic oligonucleotide
  Sense strand starting at position 73 of SEQ ID NO: 1560608
aaacguuucuugucucuga

SEQ ID NO: 1611852 - RNA, 19 nt, Artificial Sequence
  Description of Artificial Sequence: Synthetic oligonucleotide
  Antisense strand to SEQ ID NO: 1611851
ucagagacaagaaacguuu

SEQ ID NO: 1611853 - RNA, 19 nt, Artificial Sequence
  Description of Artificial Sequence: Synthetic oligonucleotide
  Sense strand starting at position 135 of SEQ ID NO: 1560608
agaaucaggcucugguuau

SEQ ID NO: 1611854 - RNA, 19 nt, Artificial Sequence
  Description of Artificial Sequence: Synthetic oligonucleotide
  Antisense strand to SEQ ID NO: 1611853
auaaccagagccugauucu

SEQ ID NO: 1611855 - RNA, 19 nt, Artificial Sequence
  Description of Artificial Sequence: Synthetic oligonucleotide
  Sense strand starting at position 443 of SEQ ID NO: 1560608
gcaaaugcaucguccucaa

SEQ ID NO: 1611856 - RNA, 19 nt, Artificial Sequence
  Description of Artificial Sequence: Synthetic oligonucleotide
  Antisense strand to SEQ ID NO: 1611855
uugaggacgaugcauuugc

SEQ ID NO: 1611857 - RNA, 19 nt, Artificial Sequence
  Description of Artificial Sequence: Synthetic oligonucleotide
  Sense strand starting at position 596 of SEQ ID NO: 1560608
gaguaugugcauggacaca

SEQ ID NO: 1611858 - RNA, 19 nt, Artificial Sequence
  Description of Artificial Sequence: Synthetic oligonucleotide
  Antisense strand to SEQ ID NO: 1611857
uguguccaugcacauacuc

SEQ ID NO: 1611859 - RNA, 19 nt, Artificial Sequence
  Description of Artificial Sequence: Synthetic oligonucleotide
  Sense strand starting at position 670 of SEQ ID NO: 1560608
cugacaucugugugagcau

SEQ ID NO: 1611860 - RNA, 19 nt, Artificial Sequence
  Description of Artificial Sequence: Synthetic oligonucleotide
  Antisense strand to SEQ ID NO: 1611859
augcucacacagaugucag

SEQ ID NO: 1611861 - RNA, 19 nt, Artificial Sequence
  Description of Artificial Sequence: Synthetic oligonucleotide
  Sense strand starting at position 673 of SEQ ID NO: 1560608
acaucugugugagcauaca

SEQ ID NO: 1611862 - RNA, 19 nt, Artificial Sequence
  Description of Artificial Sequence: Synthetic oligonucleotide
  Antisense strand to SEQ ID NO: 1611861
uguaugcucacacagaugu

SEQ ID NO: 1611863 - RNA, 19 nt, Artificial Sequence
  Description of Artificial Sequence: Synthetic oligonucleotide
  Sense strand starting at position 1292 of SEQ ID NO: 1560608
gggcgcugucuuuagagca

SEQ ID NO: 1611864 - RNA, 19 nt, Artificial Sequence
  Description of Artificial Sequence: Synthetic oligonucleotide
  Antisense strand to SEQ ID NO: 1611863
ugcucuaaagacagcgccc

SEQ ID NO: 1611865 - RNA, 19 nt, Artificial Sequence
  Description of Artificial Sequence: Synthetic oligonucleotide
  Sense strand starting at position 1580 of SEQ ID NO: 1560608
ugucuuuggugucuaauuu

SEQ ID NO: 1611866 - RNA, 19 nt, Artificial Sequence
  Description of Artificial Sequence: Synthetic oligonucleotide
  Antisense strand to SEQ ID NO: 1611865
aaauuagacaccaaagaca

SEQ ID NO: 1611867 - RNA, 19 nt, Artificial Sequence
  Description of Artificial Sequence: Synthetic oligonucleotide
  Sense strand starting at position 1637 of SEQ ID NO: 1560608
uuugacucuguguguuagu

SEQ ID NO: 1611868 - RNA, 19 nt, Artificial Sequence
  Description of Artificial Sequence: Synthetic oligonucleotide
  Antisense strand to SEQ ID NO: 1611867
acuaacacacagagucaaa

SEQ ID NO: 1611869 - RNA, 19 nt, Artificial Sequence
  Description of Artificial Sequence: Synthetic oligonucleotide
  Sense strand starting at position 1726 of SEQ ID NO: 1560608
ggcuuuagguagcugucua

SEQ ID NO: 1611870 - RNA, 19 nt, Artificial Sequence
  Description of Artificial Sequence: Synthetic oligonucleotide
  Antisense strand to SEQ ID NO: 1611869
uagacagcuaccuaaagcc

SEQ ID NO: 1611871 - RNA, 19 nt, Artificial Sequence
  Description of Artificial Sequence: Synthetic oligonucleotide
  Sense strand starting at position 2527 of SEQ ID NO: 1560608
gccaaagcccucugaaguu

SEQ ID NO: 1611872 - RNA, 19 nt, Artificial Sequence
  Description of Artificial Sequence: Synthetic oligonucleotide
  Antisense strand to SEQ ID NO: 1611871
aacuucagagggcuuuggc

SEQ ID NO: 1611873 - RNA, 19 nt, Artificial Sequence
  Description of Artificial Sequence: Synthetic oligonucleotide
  Sense strand starting at position 2562 of SEQ ID NO: 1560608
ccacuuuacagcuggagga

SEQ ID NO: 1611874 - RNA, 19 nt, Artificial Sequence
  Description of Artificial Sequence: Synthetic oligonucleotide
  Antisense strand to SEQ ID NO: 1611873
uccuccagcuguaaagugg

SEQ ID NO: 1611875 - RNA, 19 nt, Artificial Sequence
  Description of Artificial Sequence: Synthetic oligonucleotide
  Sense strand starting at position 2563 of SEQ ID NO: 1560608
cacuuuacagcuggaggaa

SEQ ID NO: 1611876 - RNA, 19 nt, Artificial Sequence
  Description of Artificial Sequence: Synthetic oligonucleotide
  Antisense strand to SEQ ID NO: 1611875
uuccuccagcuguaaagug

SEQ ID NO: 1611877 - RNA, 19 nt, Artificial Sequence
  Description of Artificial Sequence: Synthetic oligonucleotide
  Sense strand starting at position 2674 of SEQ ID NO: 1560608
ugcauucuuucuuuggaga

SEQ ID NO: 1611878 - RNA, 19 nt, Artificial Sequence
  Description of Artificial Sequence: Synthetic oligonucleotide
  Antisense strand to SEQ ID NO: 1611877
ucuccaaagaaagaaugca

SEQ ID NO: 1611879 - RNA, 19 nt, Artificial Sequence
  Description of Artificial Sequence: Synthetic oligonucleotide
  Sense strand starting at position 2675 of SEQ ID NO: 1560608
gcauucuuucuuuggagau

SEQ ID NO: 1611880 - RNA, 19 nt, Artificial Sequence
  Description of Artificial Sequence: Synthetic oligonucleotide
  Antisense strand to SEQ ID NO: 1611879
aucuccaaagaaagaaugc

SEQ ID NO: 1611881 - RNA, 19 nt, Artificial Sequence
  Description of Artificial Sequence: Synthetic oligonucleotide
  Sense strand starting at position 2709 of SEQ ID NO: 1560608
gauggauaauugguuguuu

SEQ ID NO: 1611882 - RNA, 19 nt, Artificial Sequence
  Description of Artificial Sequence: Synthetic oligonucleotide
  Antisense strand to SEQ ID NO: 1611881
aaacaaccaauuauccauc

SEQ ID NO: 1611883 - RNA, 19 nt, Artificial Sequence
  Description of Artificial Sequence: Synthetic oligonucleotide
  Sense strand starting at position 2753 of SEQ ID NO: 1560608
uggauagauucuguccacu

SEQ ID NO: 1611884 - RNA, 19 nt, Artificial Sequence
  Description of Artificial Sequence: Synthetic oligonucleotide
  Antisense strand to SEQ ID NO: 1611883
aguggacagaaucuaucca

SEQ ID NO: 1611885 - RNA, 19 nt, Artificial Sequence
  Description of Artificial Sequence: Synthetic oligonucleotide
  Sense strand starting at position 2792 of SEQ ID NO: 1560608
ugacacuuguuagcuaaga

SEQ ID NO: 1611886 - RNA, 19 nt, Artificial Sequence
  Description of Artificial Sequence: Synthetic oligonucleotide
  Antisense strand to SEQ ID NO: 1611885
ucuuagcuaacaaguguca

SEQ ID NO: 1611887 - RNA, 19 nt, Artificial Sequence
  Description of Artificial Sequence: Synthetic oligonucleotide
  Sense strand starting at position 2793 of SEQ ID NO: 1560608
gacacuuguuagcuaagau

SEQ ID NO: 1611888 - RNA, 19 nt, Artificial Sequence
  Description of Artificial Sequence: Synthetic oligonucleotide
  Antisense strand to SEQ ID NO: 1611887
aucuuagcuaacaaguguc

SEQ ID NO: 1611889 - RNA, 19 nt, Artificial Sequence
  Description of Artificial Sequence: Synthetic oligonucleotide
  Sense strand starting at position 2817 of SEQ ID NO: 1560608
aguaguaauguuuauacuc

SEQ ID NO: 1611890 - RNA, 19 nt, Artificial Sequence
  Description of Artificial Sequence: Synthetic oligonucleotide
  Antisense strand to SEQ ID NO: 1611889
gaguauaaacauuacuacu

SEQ ID NO: 1611891 - RNA, 19 nt, Artificial Sequence
  Description of Artificial Sequence: Synthetic oligonucleotide
  Sense strand starting at position 2910 of SEQ ID NO: 1560608
cagggaaguuaugugauua

SEQ ID NO: 1611892 - RNA, 19 nt, Artificial Sequence
  Description of Artificial Sequence: Synthetic oligonucleotide
  Antisense strand to SEQ ID NO: 1611891
uaaucacauaacuucccug

SEQ ID NO: 1611893 - RNA, 19 nt, Artificial Sequence
  Description of Artificial Sequence: Synthetic oligonucleotide
  Sense strand starting at position 2911 of SEQ ID NO: 1560608
agggaaguuaugugauuag

SEQ ID NO: 1611894 - RNA, 19 nt, Artificial Sequence
  Description of Artificial Sequence: Synthetic oligonucleotide
  Antisense strand to SEQ ID NO: 1611893
cuaaucacauaacuucccu

SEQ ID NO: 1611895 - RNA, 19 nt, Artificial Sequence
  Description of Artificial Sequence: Synthetic oligonucleotide
  Sense strand starting at position 2914 of SEQ ID NO: 1560608
gaaguuaugugauuaguuu

SEQ ID NO: 1611896 - RNA, 19 nt, Artificial Sequence
  Description of Artificial Sequence: Synthetic oligonucleotide
  Antisense strand to SEQ ID NO: 1611895
aaacuaaucacauaacuuc

SEQ ID NO: 1611897 - RNA, 19 nt, Artificial Sequence
  Description of Artificial Sequence: Synthetic oligonucleotide
  Sense strand starting at position 2915 of SEQ ID NO: 1560608
aaguuaugugauuaguuuc

SEQ ID NO: 1611898 - RNA, 19 nt, Artificial Sequence
  Description of Artificial Sequence: Synthetic oligonucleotide
  Antisense strand to SEQ ID NO: 1611897
gaaacuaaucacauaacuu

SEQ ID NO: 1611899 - RNA, 19 nt, Artificial Sequence
  Description of Artificial Sequence: Synthetic oligonucleotide
  Sense strand starting at position 2926 of SEQ ID NO: 1560608
uuaguuuccuggcucuagu

SEQ ID NO: 1611900 - RNA, 19 nt, Artificial Sequence
  Description of Artificial Sequence: Synthetic oligonucleotide
  Antisense strand to SEQ ID NO: 1611899
acuagagccaggaaacuaa

SEQ ID NO: 1611901 - RNA, 19 nt, Artificial Sequence
  Description of Artificial Sequence: Synthetic oligonucleotide
  Sense strand starting at position 2935 of SEQ ID NO: 1560608
uggcucuagucagcucuaa

SEQ ID NO: 1611902 - RNA, 19 nt, Artificial Sequence
  Description of Artificial Sequence: Synthetic oligonucleotide
  Antisense strand to SEQ ID NO: 1611901
uuagagcugacuagagcca

SEQ ID NO: 1611903 - RNA, 19 nt, Artificial Sequence
  Description of Artificial Sequence: Synthetic oligonucleotide
  Sense strand starting at position 2994 of SEQ ID NO: 1560608
agacucauccugugauuga

SEQ ID NO: 1611904 - RNA, 19 nt, Artificial Sequence
  Description of Artificial Sequence: Synthetic oligonucleotide
  Antisense strand to SEQ ID NO: 1611903
ucaaucacaggaugagucu

SEQ ID NO: 1611905 - RNA, 19 nt, Artificial Sequence
  Description of Artificial Sequence: Synthetic oligonucleotide
  Sense strand starting at position 2998 of SEQ ID NO: 1560608
ucauccugugauugaggaa

SEQ ID NO: 1611906 - RNA, 19 nt, Artificial Sequence
  Description of Artificial Sequence: Synthetic oligonucleotide
  Antisense strand to SEQ ID NO: 1611905
uuccucaaucacaggauga

SEQ ID NO: 1611907 - RNA, 19 nt, Artificial Sequence
  Description of Artificial Sequence: Synthetic oligonucleotide
  Sense strand starting at position 3332 of SEQ ID NO: 1560608
gcccgucagcucucaguuu

SEQ ID NO: 1611908 - RNA, 19 nt, Artificial Sequence
  Description of Artificial Sequence: Synthetic oligonucleotide
  Antisense strand to SEQ ID NO: 1611907
aaacugagagcugacgggc

SEQ ID NO: 1611909 - RNA, 19 nt, Artificial Sequence
  Description of Artificial Sequence: Synthetic oligonucleotide
  Sense strand starting at position 3360 of SEQ ID NO: 1560608
acuauuggguaugauaaac

SEQ ID NO: 1611910 - RNA, 19 nt, Artificial Sequence
  Description of Artificial Sequence: Synthetic oligonucleotide
  Antisense strand to SEQ ID NO: 1611909
guuuaucauacccaauagu

SEQ ID NO: 1611911 - RNA, 19 nt, Artificial Sequence
  Description of Artificial Sequence: Synthetic oligonucleotide
  Sense strand starting at position 3806 of SEQ ID NO: 1560608
ugaaguuaaucauaagaca

SEQ ID NO: 1611912 - RNA, 19 nt, Artificial Sequence
  Description of Artificial Sequence: Synthetic oligonucleotide
  Antisense strand to SEQ ID NO: 1611911
ugucuuaugauuaacuuca

SEQ ID NO: 1611913 - RNA, 19 nt, Artificial Sequence
  Description of Artificial Sequence: Synthetic oligonucleotide
  Sense strand starting at position 3809 of SEQ ID NO: 1560608
aguuaaucauaagacaaug

SEQ ID NO: 1611914 - RNA, 19 nt, Artificial Sequence
  Description of Artificial Sequence: Synthetic oligonucleotide
  Antisense strand to SEQ ID NO: 1611913
cauugucuuaugauuaacu

SEQ ID NO: 1611915 - RNA, 19 nt, Artificial Sequence
  Description of Artificial Sequence: Synthetic oligonucleotide
  Sense strand starting at position 3846 of SEQ ID NO: 1560608
gagcccuguccaggauuau

SEQ ID NO: 1611916 - RNA, 19 nt, Artificial Sequence
  Description of Artificial Sequence: Synthetic oligonucleotide
  Antisense strand to SEQ ID NO: 1611915
auaauccuggacagggcuc

SEQ ID NO: 1611917 - RNA, 19 nt, Artificial Sequence
  Description of Artificial Sequence: Synthetic oligonucleotide
  Sense strand starting at position 3847 of SEQ ID NO: 1560608
agcccuguccaggauuaua

SEQ ID NO: 1611918 - RNA, 19 nt, Artificial Sequence
  Description of Artificial Sequence: Synthetic oligonucleotide
  Antisense strand to SEQ ID NO: 1611917
uauaauccuggacagggcu

SEQ ID NO: 1611919 - RNA, 19 nt, Artificial Sequence
  Description of Artificial Sequence: Synthetic oligonucleotide
  Sense strand starting at position 3858 of SEQ ID NO: 1560608
ggauuauacacgugaucuu

SEQ ID NO: 1611920 - RNA, 19 nt, Artificial Sequence
  Description of Artificial Sequence: Synthetic oligonucleotide
  Antisense strand to SEQ ID NO: 1611919
aagaucacguguauaaucc

SEQ ID NO: 1611921 - RNA, 19 nt, Artificial Sequence
  Description of Artificial Sequence: Synthetic oligonucleotide
  Sense strand starting at position 3859 of SEQ ID NO: 1560608
gauuauacacgugaucuua

SEQ ID NO: 1611922 - RNA, 19 nt, Artificial Sequence
  Description of Artificial Sequence: Synthetic oligonucleotide
  Antisense strand to SEQ ID NO: 1611921
uaagaucacguguauaauc

SEQ ID NO: 1611923 - RNA, 19 nt, Artificial Sequence
  Description of Artificial Sequence: Synthetic oligonucleotide
  Sense strand starting at position 3861 of SEQ ID NO: 1560608
uuauacacgugaucuuagu

SEQ ID NO: 1611924 - RNA, 19 nt, Artificial Sequence
  Description of Artificial Sequence: Synthetic oligonucleotide
  Antisense strand to SEQ ID NO: 1611923
acuaagaucacguguauaa

SEQ ID NO: 1611925 - RNA, 19 nt, Artificial Sequence
  Description of Artificial Sequence: Synthetic oligonucleotide
  Sense strand starting at position 187 of SEQ ID NO: 1560609
cagguuggcuucuguauca

SEQ ID NO: 1611926 - RNA, 19 nt, Artificial Sequence
  Description of Artificial Sequence: Synthetic oligonucleotide
  Antisense strand to SEQ ID NO: 1611925
ugauacagaagccaaccug

SEQ ID NO: 1611927 - RNA, 19 nt, Artificial Sequence
  Description of Artificial Sequence: Synthetic oligonucleotide
  Sense strand starting at position 215 of SEQ ID NO: 1560609
gccuauaguagguaucagu

SEQ ID NO: 1611928 - RNA, 19 nt, Artificial Sequence
  Description of Artificial Sequence: Synthetic oligonucleotide
  Antisense strand to SEQ ID NO: 1611927
acugauaccuacuauaggc

SEQ ID NO: 1611929 - RNA, 19 nt, Artificial Sequence
  Description of Artificial Sequence: Synthetic oligonucleotide
  Sense strand starting at position 218 of SEQ ID NO: 1560609
uauaguagguaucaguaaa

SEQ ID NO: 1611930 - RNA, 19 nt, Artificial Sequence
  Description of Artificial Sequence: Synthetic oligonucleotide
  Antisense strand to SEQ ID NO: 1611929
uuuacugauaccuacuaua

SEQ ID NO: 1611931 - RNA, 19 nt, Artificial Sequence
  Description of Artificial Sequence: Synthetic oligonucleotide
  Sense strand starting at position 257 of SEQ ID NO: 1560609
ugcuguuagguccaccuua

SEQ ID NO: 1611932 - RNA, 19 nt, Artificial Sequence
  Description of Artificial Sequence: Synthetic oligonucleotide
  Antisense strand to SEQ ID NO: 1611931
uaagguggaccuaacagca

SEQ ID NO: 1611933 - RNA, 19 nt, Artificial Sequence
  Description of Artificial Sequence: Synthetic oligonucleotide
  Sense strand starting at position 262 of SEQ ID NO: 1560609
uuagguccaccuuacagau

SEQ ID NO: 1611934 - RNA, 19 nt, Artificial Sequence
  Description of Artificial Sequence: Synthetic oligonucleotide
  Antisense strand to SEQ ID NO: 1611933
aucuguaagguggaccuaa

SEQ ID NO: 1611935 - RNA, 19 nt, Artificial Sequence
  Description of Artificial Sequence: Synthetic oligonucleotide
  Sense strand starting at position 280 of SEQ ID NO: 1560609
uaaagaaacugaggaauga

SEQ ID NO: 1611936 - RNA, 19 nt, Artificial Sequence
  Description of Artificial Sequence: Synthetic oligonucleotide
  Antisense strand to SEQ ID NO: 1611935
ucauuccucaguuucuuua

SEQ ID NO: 1611937 - RNA, 19 nt, Artificial Sequence
  Description of Artificial Sequence: Synthetic oligonucleotide
  Sense strand starting at position 651 of SEQ ID NO: 1560609
gagggagcucggcguagaa

SEQ ID NO: 1611938 - RNA, 19 nt, Artificial Sequence
  Description of Artificial Sequence: Synthetic oligonucleotide
  Antisense strand to SEQ ID NO: 1611937
uucuacgccgagcucccuc

SEQ ID NO: 1611939 - RNA, 19 nt, Artificial Sequence
  Description of Artificial Sequence: Synthetic oligonucleotide
  Sense strand starting at position 1966 of SEQ ID NO: 1560609
uguagucuuaccuggagca

SEQ ID NO: 1611940 - RNA, 19 nt, Artificial Sequence
  Description of Artificial Sequence: Synthetic oligonucleotide
  Antisense strand to SEQ ID NO: 1611939
ugcuccagguaagacuaca

SEQ ID NO: 1611941 - RNA, 19 nt, Artificial Sequence
  Description of Artificial Sequence: Synthetic oligonucleotide
  Sense strand starting at position 1967 of SEQ ID NO: 1560609
guagucuuaccuggagcau

SEQ ID NO: 1611942 - RNA, 19 nt, Artificial Sequence
  Description of Artificial Sequence: Synthetic oligonucleotide
  Antisense strand to SEQ ID NO: 1611941
augcuccagguaagacuac

SEQ ID NO: 1611943 - RNA, 19 nt, Artificial Sequence
  Description of Artificial Sequence: Synthetic oligonucleotide
  Sense strand starting at position 2009 of SEQ ID NO: 1560609
ccucguguaucuggcuaua

SEQ ID NO: 1611944 - RNA, 19 nt, Artificial Sequence
  Description of Artificial Sequence: Synthetic oligonucleotide
  Antisense strand to SEQ ID NO: 1611943
uauagccagauacacgagg

SEQ ID NO: 1611945 - RNA, 19 nt, Artificial Sequence
  Description of Artificial Sequence: Synthetic oligonucleotide
  Sense strand starting at position 2011 of SEQ ID NO: 1560609
ucguguaucuggcuauaua

SEQ ID NO: 1611946 - RNA, 19 nt, Artificial Sequence
  Description of Artificial Sequence: Synthetic oligonucleotide
  Antisense strand to SEQ ID NO: 1611945
uauauagccagauacacga

SEQ ID NO: 1611947 - RNA, 19 nt, Artificial Sequence
  Description of Artificial Sequence: Synthetic oligonucleotide
  Sense strand starting at position 2012 of SEQ ID NO: 1560609
cguguaucuggcuauauac

SEQ ID NO: 1611948 - RNA, 19 nt, Artificial Sequence
  Description of Artificial Sequence: Synthetic oligonucleotide
  Antisense strand to SEQ ID NO: 1611947
guauauagccagauacacg

SEQ ID NO: 1611949 - RNA, 19 nt, Artificial Sequence
  Description of Artificial Sequence: Synthetic oligonucleotide
  Sense strand starting at position 2234 of SEQ ID NO: 1560609
ugucgagugcuagggacua

SEQ ID NO: 1611950 - RNA, 19 nt, Artificial Sequence
  Description of Artificial Sequence: Synthetic oligonucleotide
  Antisense strand to SEQ ID NO: 1611949
uagucccuagcacucgaca

SEQ ID NO: 1611951 - RNA, 19 nt, Artificial Sequence
  Description of Artificial Sequence: Synthetic oligonucleotide
  Sense strand starting at position 2329 of SEQ ID NO: 1560609
gaggccaugacccgagaaa

SEQ ID NO: 1611952 - RNA, 19 nt, Artificial Sequence
  Description of Artificial Sequence: Synthetic oligonucleotide
  Antisense strand to SEQ ID NO: 1611951
uuucucgggucauggccuc

SEQ ID NO: 1611953 - RNA, 19 nt, Artificial Sequence
  Description of Artificial Sequence: Synthetic oligonucleotide
  Sense strand starting at position 2596 of SEQ ID NO: 1560609
gggugugguucaggugauu

SEQ ID NO: 1611954 - RNA, 19 nt, Artificial Sequence
  Description of Artificial Sequence: Synthetic oligonucleotide
  Antisense strand to SEQ ID NO: 1611953
aaucaccugaaccacaccc

SEQ ID NO: 1611955 - RNA, 19 nt, Artificial Sequence
  Description of Artificial Sequence: Synthetic oligonucleotide
  Sense strand starting at position 2752 of SEQ ID NO: 1560609
ugccaauagacguaaugag

SEQ ID NO: 1611956 - RNA, 19 nt, Artificial Sequence
  Description of Artificial Sequence: Synthetic oligonucleotide
  Antisense strand to SEQ ID NO: 1611955
cucauuacgucuauuggca

SEQ ID NO: 1611957 - RNA, 19 nt, Artificial Sequence
  Description of Artificial Sequence: Synthetic oligonucleotide
  Sense strand starting at position 2759 of SEQ ID NO: 1560609
agacguaaugagugcgacu

SEQ ID NO: 1611958 - RNA, 19 nt, Artificial Sequence
  Description of Artificial Sequence: Synthetic oligonucleotide
  Antisense strand to SEQ ID NO: 1611957
agucgcacucauuacgucu

SEQ ID NO: 1611959 - RNA, 19 nt, Artificial Sequence
  Description of Artificial Sequence: Synthetic oligonucleotide
  Sense strand starting at position 2761 of SEQ ID NO: 1560609
acguaaugagugcgacuca

SEQ ID NO: 1611960 - RNA, 19 nt, Artificial Sequence
  Description of Artificial Sequence: Synthetic oligonucleotide
  Antisense strand to SEQ ID NO: 1611959
ugagucgcacucauuacgu

SEQ ID NO: 1611961 - RNA, 19 nt, Artificial Sequence
  Description of Artificial Sequence: Synthetic oligonucleotide
  Sense strand starting at position 2908 of SEQ ID NO: 1560609
gcuggaguucucgguacug

SEQ ID NO: 1611962 - RNA, 19 nt, Artificial Sequence
  Description of Artificial Sequence: Synthetic oligonucleotide
  Antisense strand to SEQ ID NO: 1611961
caguaccgagaacuccagc

SEQ ID NO: 1611963 - RNA, 19 nt, Artificial Sequence
  Description of Artificial Sequence: Synthetic oligonucleotide
  Sense strand starting at position 2910 of SEQ ID NO: 1560609
uggaguucucgguacugua

SEQ ID NO: 1611964 - RNA, 19 nt, Artificial Sequence
  Description of Artificial Sequence: Synthetic oligonucleotide
  Antisense strand to SEQ ID NO: 1611963
uacaguaccgagaacucca

SEQ ID NO: 1611965 - RNA, 19 nt, Artificial Sequence
  Description of Artificial Sequence: Synthetic oligonucleotide
  Sense strand starting at position 3419 of SEQ ID NO: 1560609
uacuuaacguccuggaaac

SEQ ID NO: 1611966 - RNA, 19 nt, Artificial Sequence
  Description of Artificial Sequence: Synthetic oligonucleotide
  Antisense strand to SEQ ID NO: 1611965
guuuccaggacguuaagua

SEQ ID NO: 1611967 - RNA, 19 nt, Artificial Sequence
  Description of Artificial Sequence: Synthetic oligonucleotide
  Sense strand starting at position 3420 of SEQ ID NO: 1560609
acuuaacguccuggaaacu

SEQ ID NO: 1611968 - RNA, 19 nt, Artificial Sequence
  Description of Artificial Sequence: Synthetic oligonucleotide
  Antisense strand to SEQ ID NO: 1611967
aguuuccaggacguuaagu

SEQ ID NO: 1611969 - RNA, 19 nt, Artificial Sequence
  Description of Artificial Sequence: Synthetic oligonucleotide
  Sense strand starting at position 3444 of SEQ ID NO: 1560609
uucgcauccuagggaagua

SEQ ID NO: 1611970 - RNA, 19 nt, Artificial Sequence
  Description of Artificial Sequence: Synthetic oligonucleotide
  Antisense strand to SEQ ID NO: 1611969
uacuucccuaggaugcgaa

SEQ ID NO: 1611971 - RNA, 19 nt, Artificial Sequence
  Description of Artificial Sequence: Synthetic oligonucleotide
  Sense strand starting at position 3445 of SEQ ID NO: 1560609
ucgcauccuagggaaguaa

SEQ ID NO: 1611972 - RNA, 19 nt, Artificial Sequence
  Description of Artificial Sequence: Synthetic oligonucleotide
  Antisense strand to SEQ ID NO: 1611971
uuacuucccuaggaugcga

SEQ ID NO: 1611973 - RNA, 19 nt, Artificial Sequence
  Description of Artificial Sequence: Synthetic oligonucleotide
  Sense strand starting at position 3577 of SEQ ID NO: 1560609
cgcgguuccugagagguga

SEQ ID NO: 1611974 - RNA, 19 nt, Artificial Sequence
  Description of Artificial Sequence: Synthetic oligonucleotide
  Antisense strand to SEQ ID NO: 1611973
ucaccucucaggaaccgcg

SEQ ID NO: 1611975 - RNA, 19 nt, Artificial Sequence
  Description of Artificial Sequence: Synthetic oligonucleotide
  Sense strand starting at position 3581 of SEQ ID NO: 1560609
guuccugagaggugacacu

SEQ ID NO: 1611976 - RNA, 19 nt, Artificial Sequence
  Description of Artificial Sequence: Synthetic oligonucleotide
  Antisense strand to SEQ ID NO: 1611975
agugucaccucucaggaac

SEQ ID NO: 1611977 - RNA, 19 nt, Artificial Sequence
  Description of Artificial Sequence: Synthetic oligonucleotide
  Sense strand starting at position 3601 of SEQ ID NO: 1560609
aggacuccugggugcuuaa

SEQ ID NO: 1611978 - RNA, 19 nt, Artificial Sequence
  Description of Artificial Sequence: Synthetic oligonucleotide
  Antisense strand to SEQ ID NO: 1611977
uuaagcacccaggaguccu

SEQ ID NO: 1611979 - RNA, 19 nt, Artificial Sequence
  Description of Artificial Sequence: Synthetic oligonucleotide
  Sense strand starting at position 3652 of SEQ ID NO: 1560609
gguucuugcugcuacagaa

SEQ ID NO: 1611980 - RNA, 19 nt, Artificial Sequence
  Description of Artificial Sequence: Synthetic oligonucleotide
  Antisense strand to SEQ ID NO: 1611979
uucuguagcagcaagaacc

SEQ ID NO: 1611981 - RNA, 19 nt, Artificial Sequence
  Description of Artificial Sequence: Synthetic oligonucleotide
  Sense strand starting at position 3848 of SEQ ID NO: 1560609
ccggucggauacugugaaa

SEQ ID NO: 1611982 - RNA, 19 nt, Artificial Sequence
  Description of Artificial Sequence: Synthetic oligonucleotide
  Antisense strand to SEQ ID NO: 1611981
uuucacaguauccgaccgg

SEQ ID NO: 1611983 - RNA, 19 nt, Artificial Sequence
  Description of Artificial Sequence: Synthetic oligonucleotide
  Sense strand starting at position 3885 of SEQ ID NO: 1560609
ggguucuucguccaggcaa

SEQ ID NO: 1611984 - RNA, 19 nt, Artificial Sequence
  Description of Artificial Sequence: Synthetic oligonucleotide
  Antisense strand to SEQ ID NO: 1611983
uugccuggacgaagaaccc

SEQ ID NO: 1611985 - RNA, 19 nt, Artificial Sequence
  Description of Artificial Sequence: Synthetic oligonucleotide
  Sense strand starting at position 3887 of SEQ ID NO: 1560609
guucuucguccaggcaauu

SEQ ID NO: 1611986 - RNA, 19 nt, Artificial Sequence
  Description of Artificial Sequence: Synthetic oligonucleotide
  Antisense strand to SEQ ID NO: 1611985
aauugccuggacgaagaac

SEQ ID NO: 1611987 - RNA, 19 nt, Artificial Sequence
  Description of Artificial Sequence: Synthetic oligonucleotide
  Sense strand starting at position 3900 of SEQ ID NO: 1560609
gcaauuagagccugagcaa

SEQ ID NO: 1611988 - RNA, 19 nt, Artificial Sequence
  Description of Artificial Sequence: Synthetic oligonucleotide
  Antisense strand to SEQ ID NO: 1611987
uugcucaggcucuaauugc

SEQ ID NO: 1611989 - RNA, 19 nt, Artificial Sequence
  Description of Artificial Sequence: Synthetic oligonucleotide
  Sense strand starting at position 47 of SEQ ID NO: 1560610
gggaacugguucccucauu

SEQ ID NO: 1611990 - RNA, 19 nt, Artificial Sequence
  Description of Artificial Sequence: Synthetic oligonucleotide
  Antisense strand to SEQ ID NO: 1611989
aaugagggaaccaguuccc

SEQ ID NO: 1611991 - RNA, 19 nt, Artificial Sequence
  Description of Artificial Sequence: Synthetic oligonucleotide
  Sense strand starting at position 48 of SEQ ID NO: 1560610
ggaacugguucccucauua

SEQ ID NO: 1611992 - RNA, 19 nt, Artificial Sequence
  Description of Artificial Sequence: Synthetic oligonucleotide
  Antisense strand to SEQ ID NO: 1611991
uaaugagggaaccaguucc

SEQ ID NO: 1611993 - RNA, 19 nt, Artificial Sequence
  Description of Artificial Sequence: Synthetic oligonucleotide
  Sense strand starting at position 69 of SEQ ID NO: 1560610
ggaauaccauaugguagaa

SEQ ID NO: 1611994 - RNA, 19 nt, Artificial Sequence
  Description of Artificial Sequence: Synthetic oligonucleotide
  Antisense strand to SEQ ID NO: 1611993
uucuaccauaugguauucc

SEQ ID NO: 1611995 - RNA, 19 nt, Artificial Sequence
  Description of Artificial Sequence: Synthetic oligonucleotide
  Sense strand starting at position 82 of SEQ ID NO: 1560610
guagaauauuguucagggu

SEQ ID NO: 1611996 - RNA, 19 nt, Artificial Sequence
  Description of Artificial Sequence: Synthetic oligonucleotide
  Antisense strand to SEQ ID NO: 1611995
acccugaacaauauucuac

SEQ ID NO: 1611997 - RNA, 19 nt, Artificial Sequence
  Description of Artificial Sequence: Synthetic oligonucleotide
  Sense strand starting at position 176 of SEQ ID NO: 1560610
ugguaauaacugcacaacu

SEQ ID NO: 1611998 - RNA, 19 nt, Artificial Sequence
  Description of Artificial Sequence: Synthetic oligonucleotide
  Antisense strand to SEQ ID NO: 1611997
aguugugcaguuauuacca

SEQ ID NO: 1611999 - RNA, 19 nt, Artificial Sequence
  Description of Artificial Sequence: Synthetic oligonucleotide
  Sense strand starting at position 279 of SEQ ID NO: 1560610
accgcugacuuguacauuu

SEQ ID NO: 1612000 - RNA, 19 nt, Artificial Sequence
  Description of Artificial Sequence: Synthetic oligonucleotide
  Antisense strand to SEQ ID NO: 1611999
aaauguacaagucagcggu

SEQ ID NO: 1612001 - RNA, 19 nt, Artificial Sequence
  Description of Artificial Sequence: Synthetic oligonucleotide
  Sense strand starting at position 324 of SEQ ID NO: 1560610
augggcaaacuguauaauu

SEQ ID NO: 1612002 - RNA, 19 nt, Artificial Sequence
  Description of Artificial Sequence: Synthetic oligonucleotide
  Antisense strand to SEQ ID NO: 1612001
aauuauacaguuugcccau

SEQ ID NO: 1612003 - RNA, 19 nt, Artificial Sequence
  Description of Artificial Sequence: Synthetic oligonucleotide
  Sense strand starting at position 326 of SEQ ID NO: 1560610
gggcaaacuguauaauugu

SEQ ID NO: 1612004 - RNA, 19 nt, Artificial Sequence
  Description of Artificial Sequence: Synthetic oligonucleotide
  Antisense strand to SEQ ID NO: 1612003
acaauuauacaguuugccc

SEQ ID NO: 1612005 - RNA, 19 nt, Artificial Sequence
  Description of Artificial Sequence: Synthetic oligonucleotide
  Sense strand starting at position 378 of SEQ ID NO: 1560610
aagagauaaugacaggaaa

SEQ ID NO: 1612006 - RNA, 19 nt, Artificial Sequence
  Description of Artificial Sequence: Synthetic oligonucleotide
  Antisense strand to SEQ ID NO: 1612005
uuuccugucauuaucucuu

SEQ ID NO: 1612007 - RNA, 19 nt, Artificial Sequence
  Description of Artificial Sequence: Synthetic oligonucleotide
  Sense strand starting at position 479 of SEQ ID NO: 1560610
gggcauugugcagaguaga

SEQ ID NO: 1612008 - RNA, 19 nt, Artificial Sequence
  Description of Artificial Sequence: Synthetic oligonucleotide
  Antisense strand to SEQ ID NO: 1612007
ucuacucugcacaaugccc

SEQ ID NO: 1612009 - RNA, 19 nt, Artificial Sequence
  Description of Artificial Sequence: Synthetic oligonucleotide
  Sense strand starting at position 536 of SEQ ID NO: 1560610
auaacaaucuccgaaugac

SEQ ID NO: 1612010 - RNA, 19 nt, Artificial Sequence
  Description of Artificial Sequence: Synthetic oligonucleotide
  Antisense strand to SEQ ID NO: 1612009
gucauucggagauuguuau

SEQ ID NO: 1612011 - RNA, 19 nt, Artificial Sequence
  Description of Artificial Sequence: Synthetic oligonucleotide
  Sense strand starting at position 601 of SEQ ID NO: 1560610
aggaguucuuauguggaga

SEQ ID NO: 1612012 - RNA, 19 nt, Artificial Sequence
  Description of Artificial Sequence: Synthetic oligonucleotide
  Antisense strand to SEQ ID NO: 1612011
ucuccacauaagaacuccu

SEQ ID NO: 1612013 - RNA, 19 nt, Artificial Sequence
  Description of Artificial Sequence: Synthetic oligonucleotide
  Sense strand starting at position 602 of SEQ ID NO: 1560610
ggaguucuuauguggagag

SEQ ID NO: 1612014 - RNA, 19 nt, Artificial Sequence
  Description of Artificial Sequence: Synthetic oligonucleotide
  Antisense strand to SEQ ID NO: 1612013
cucuccacauaagaacucc

SEQ ID NO: 1612015 - RNA, 19 nt, Artificial Sequence
  Description of Artificial Sequence: Synthetic oligonucleotide
  Sense strand starting at position 614 of SEQ ID NO: 1560610
uggagagggaacuguucua

SEQ ID NO: 1612016 - RNA, 19 nt, Artificial Sequence
  Description of Artificial Sequence: Synthetic oligonucleotide
  Antisense strand to SEQ ID NO: 1612015
uagaacaguucccucucca

SEQ ID NO: 1612017 - RNA, 19 nt, Artificial Sequence
  Description of Artificial Sequence: Synthetic oligonucleotide
  Sense strand starting at position 619 of SEQ ID NO: 1560610
agggaacuguucuauauca

SEQ ID NO: 1612018 - RNA, 19 nt, Artificial Sequence
  Description of Artificial Sequence: Synthetic oligonucleotide
  Antisense strand to SEQ ID NO: 1612017
ugauauagaacaguucccu

SEQ ID NO: 1612019 - RNA, 19 nt, Artificial Sequence
  Description of Artificial Sequence: Synthetic oligonucleotide
  Sense strand starting at position 735 of SEQ ID NO: 1560610
ugaacaaggucuguaaucu

SEQ ID NO: 1612020 - RNA, 19 nt, Artificial Sequence
  Description of Artificial Sequence: Synthetic oligonucleotide
  Antisense strand to SEQ ID NO: 1612019
agauuacagaccuuguuca

SEQ ID NO: 1612021 - RNA, 19 nt, Artificial Sequence
  Description of Artificial Sequence: Synthetic oligonucleotide
  Sense strand starting at position 739 of SEQ ID NO: 1560610
caaggucuguaaucuaguu

SEQ ID NO: 1612022 - RNA, 19 nt, Artificial Sequence
  Description of Artificial Sequence: Synthetic oligonucleotide
  Antisense strand to SEQ ID NO: 1612021
aacuagauuacagaccuug

SEQ ID NO: 1612023 - RNA, 19 nt, Artificial Sequence
  Description of Artificial Sequence: Synthetic oligonucleotide
  Sense strand starting at position 765 of SEQ ID NO: 1560610
cuguauugaugucaauuuc

SEQ ID NO: 1612024 - RNA, 19 nt, Artificial Sequence
  Description of Artificial Sequence: Synthetic oligonucleotide
  Antisense strand to SEQ ID NO: 1612023
gaaauugacaucaauacag

SEQ ID NO: 1612025 - RNA, 19 nt, Artificial Sequence
  Description of Artificial Sequence: Synthetic oligonucleotide
  Sense strand starting at position 786 of SEQ ID NO: 1560610
gguuucgauauugggacua

SEQ ID NO: 1612026 - RNA, 19 nt, Artificial Sequence
  Description of Artificial Sequence: Synthetic oligonucleotide
  Antisense strand to SEQ ID NO: 1612025
uagucccaauaucgaaacc

SEQ ID NO: 1612027 - RNA, 19 nt, Artificial Sequence
  Description of Artificial Sequence: Synthetic oligonucleotide
  Sense strand starting at position 788 of SEQ ID NO: 1560610
uuucgauauugggacuaca

SEQ ID NO: 1612028 - RNA, 19 nt, Artificial Sequence
  Description of Artificial Sequence: Synthetic oligonucleotide
  Antisense strand to SEQ ID NO: 1612027
uguagucccaauaucgaaa

SEQ ID NO: 1612029 - RNA, 19 nt, Artificial Sequence
  Description of Artificial Sequence: Synthetic oligonucleotide
  Sense strand starting at position 1059 of SEQ ID NO: 1560610
ugcugcugcccgcgauuua

SEQ ID NO: 1612030 - RNA, 19 nt, Artificial Sequence
  Description of Artificial Sequence: Synthetic oligonucleotide
  Antisense strand to SEQ ID NO: 1612029
uaaaucgcgggcagcagca

SEQ ID NO: 1612031 - RNA, 19 nt, Artificial Sequence
  Description of Artificial Sequence: Synthetic oligonucleotide
  Sense strand starting at position 2318 of SEQ ID NO: 1560610
gggccaugucuagaacgaa

SEQ ID NO: 1612032 - RNA, 19 nt, Artificial Sequence
  Description of Artificial Sequence: Synthetic oligonucleotide
  Antisense strand to SEQ ID NO: 1612031
uucguucuagacauggccc

SEQ ID NO: 1612033 - RNA, 19 nt, Artificial Sequence
  Description of Artificial Sequence: Synthetic oligonucleotide
  Sense strand starting at position 2321 of SEQ ID NO: 1560610
ccaugucuagaacgaagau

SEQ ID NO: 1612034 - RNA, 19 nt, Artificial Sequence
  Description of Artificial Sequence: Synthetic oligonucleotide
  Antisense strand to SEQ ID NO: 1612033
aucuucguucuagacaugg

SEQ ID NO: 1612035 - RNA, 19 nt, Artificial Sequence
  Description of Artificial Sequence: Synthetic oligonucleotide
  Sense strand starting at position 2426 of SEQ ID NO: 1560610
gugaauacuggugacacuu

SEQ ID NO: 1612036 - RNA, 19 nt, Artificial Sequence
  Description of Artificial Sequence: Synthetic oligonucleotide
  Antisense strand to SEQ ID NO: 1612035
aagugucaccaguauucac

SEQ ID NO: 1612037 - RNA, 19 nt, Artificial Sequence
  Description of Artificial Sequence: Synthetic oligonucleotide
  Sense strand starting at position 2435 of SEQ ID NO: 1560610
ggugacacuuccgaggaga

SEQ ID NO: 1612038 - RNA, 19 nt, Artificial Sequence
  Description of Artificial Sequence: Synthetic oligonucleotide
  Antisense strand to SEQ ID NO: 1612037
ucuccucggaagugucacc

SEQ ID NO: 1612039 - RNA, 19 nt, Artificial Sequence
  Description of Artificial Sequence: Synthetic oligonucleotide
  Sense strand starting at position 2508 of SEQ ID NO: 1560610
gggaguacaucuggagaug

SEQ ID NO: 1612040 - RNA, 19 nt, Artificial Sequence
  Description of Artificial Sequence: Synthetic oligonucleotide
  Antisense strand to SEQ ID NO: 1612039
caucuccagauguacuccc

SEQ ID NO: 1612041 - RNA, 19 nt, Artificial Sequence
  Description of Artificial Sequence: Synthetic oligonucleotide
  Sense strand starting at position 2519 of SEQ ID NO: 1560610
uggagaugagagugucuca

SEQ ID NO: 1612042 - RNA, 19 nt, Artificial Sequence
  Description of Artificial Sequence: Synthetic oligonucleotide
  Antisense strand to SEQ ID NO: 1612041
ugagacacucucaucucca

SEQ ID NO: 1612043 - RNA, 19 nt, Artificial Sequence
  Description of Artificial Sequence: Synthetic oligonucleotide
  Sense strand starting at position 2567 of SEQ ID NO: 1560610
gagccauagggucauaauc

SEQ ID NO: 1612044 - RNA, 19 nt, Artificial Sequence
  Description of Artificial Sequence: Synthetic oligonucleotide
  Antisense strand to SEQ ID NO: 1612043
gauuaugacccuauggcuc

SEQ ID NO: 1612045 - RNA, 19 nt, Artificial Sequence
  Description of Artificial Sequence: Synthetic oligonucleotide
  Sense strand starting at position 2758 of SEQ ID NO: 1560610
uccagaugaauacgagagu

SEQ ID NO: 1612046 - RNA, 19 nt, Artificial Sequence
  Description of Artificial Sequence: Synthetic oligonucleotide
  Antisense strand to SEQ ID NO: 1612045
acucucguauucaucugga

SEQ ID NO: 1612047 - RNA, 19 nt, Artificial Sequence
  Description of Artificial Sequence: Synthetic oligonucleotide
  Sense strand starting at position 2759 of SEQ ID NO: 1560610
ccagaugaauacgagaguu

SEQ ID NO: 1612048 - RNA, 19 nt, Artificial Sequence
  Description of Artificial Sequence: Synthetic oligonucleotide
  Antisense strand to SEQ ID NO: 1612047
aacucucguauucaucugg

SEQ ID NO: 1612049 - RNA, 19 nt, Artificial Sequence
  Description of Artificial Sequence: Synthetic oligonucleotide
  Sense strand starting at position 2782 of SEQ ID NO: 1560610
guuacucuugggugagaga

SEQ ID NO: 1612050 - RNA, 19 nt, Artificial Sequence
  Description of Artificial Sequence: Synthetic oligonucleotide
  Antisense strand to SEQ ID NO: 1612049
ucucucacccaagaguaac

SEQ ID NO: 1612051 - RNA, 19 nt, Artificial Sequence
  Description of Artificial Sequence: Synthetic oligonucleotide
  Sense strand starting at position 2827 of SEQ ID NO: 1560610
gcuggaauuugagaacaca

SEQ ID NO: 1612052 - RNA, 19 nt, Artificial Sequence
  Description of Artificial Sequence: Synthetic oligonucleotide
  Antisense strand to SEQ ID NO: 1612051
uguguucucaaauuccagc

SEQ ID NO: 1612053 - RNA, 19 nt, Artificial Sequence
  Description of Artificial Sequence: Synthetic oligonucleotide
  Sense strand starting at position 2864 of SEQ ID NO: 1560610
agggacaucugagcuuaag

SEQ ID NO: 1612054 - RNA, 19 nt, Artificial Sequence
  Description of Artificial Sequence: Synthetic oligonucleotide
  Antisense strand to SEQ ID NO: 1612053
cuuaagcucagaugucccu

SEQ ID NO: 1612055 - RNA, 19 nt, Artificial Sequence
  Description of Artificial Sequence: Synthetic oligonucleotide
  Sense strand starting at position 2874 of SEQ ID NO: 1560610
gagcuuaagggucguauuu

SEQ ID NO: 1612056 - RNA, 19 nt, Artificial Sequence
  Description of Artificial Sequence: Synthetic oligonucleotide
  Antisense strand to SEQ ID NO: 1612055
aaauacgacccuuaagcuc

SEQ ID NO: 1612057 - RNA, 19 nt, Artificial Sequence
  Description of Artificial Sequence: Synthetic oligonucleotide
  Sense strand starting at position 2939 of SEQ ID NO: 1560610
aggagacgaguuggaauua

SEQ ID NO: 1612058 - RNA, 19 nt, Artificial Sequence
  Description of Artificial Sequence: Synthetic oligonucleotide
  Antisense strand to SEQ ID NO: 1612057
uaauuccaacucgucuccu

SEQ ID NO: 1612059 - RNA, 19 nt, Artificial Sequence
  Description of Artificial Sequence: Synthetic oligonucleotide
  Sense strand starting at position 3018 of SEQ ID NO: 1560610
uaggauggagguugauauu

SEQ ID NO: 1612060 - RNA, 19 nt, Artificial Sequence
  Description of Artificial Sequence: Synthetic oligonucleotide
  Antisense strand to SEQ ID NO: 1612059
aauaucaaccuccauccua

SEQ ID NO: 1612061 - RNA, 19 nt, Artificial Sequence
  Description of Artificial Sequence: Synthetic oligonucleotide
  Sense strand starting at position 3021 of SEQ ID NO: 1560610
gauggagguugauauuuau

SEQ ID NO: 1612062 - RNA, 19 nt, Artificial Sequence
  Description of Artificial Sequence: Synthetic oligonucleotide
  Antisense strand to SEQ ID NO: 1612061
auaaauaucaaccuccauc

SEQ ID NO: 1612063 - RNA, 19 nt, Artificial Sequence
  Description of Artificial Sequence: Synthetic oligonucleotide
  Sense strand starting at position 3146 of SEQ ID NO: 1560610
ugggaaugggucugauauc

SEQ ID NO: 1612064 - RNA, 19 nt, Artificial Sequence
  Description of Artificial Sequence: Synthetic oligonucleotide
  Antisense strand to SEQ ID NO: 1612063
gauaucagacccauuccca

SEQ ID NO: 1612065 - RNA, 19 nt, Artificial Sequence
  Description of Artificial Sequence: Synthetic oligonucleotide
  Sense strand starting at position 3632 of SEQ ID NO: 1560610
agggacauguacugagaga

SEQ ID NO: 1612066 - RNA, 19 nt, Artificial Sequence
  Description of Artificial Sequence: Synthetic oligonucleotide
  Antisense strand to SEQ ID NO: 1612065
ucucucaguacaugucccu

SEQ ID NO: 1612067 - RNA, 19 nt, Artificial Sequence
  Description of Artificial Sequence: Synthetic oligonucleotide
  Sense strand starting at position 3671 of SEQ ID NO: 1560610
aaagauacucacggagcaa

SEQ ID NO: 1612068 - RNA, 19 nt, Artificial Sequence
  Description of Artificial Sequence: Synthetic oligonucleotide
  Antisense strand to SEQ ID NO: 1612067
uugcuccgugaguaucuuu

SEQ ID NO: 1612069 - RNA, 19 nt, Artificial Sequence
  Description of Artificial Sequence: Synthetic oligonucleotide
  Sense strand starting at position 1628 of SEQ ID NO: 1560611
uccucuucucacugagaga

SEQ ID NO: 1612070 - RNA, 19 nt, Artificial Sequence
  Description of Artificial Sequence: Synthetic oligonucleotide
  Antisense strand to SEQ ID NO: 1612069
ucucucagugagaagagga

SEQ ID NO: 1612071 - RNA, 19 nt, Artificial Sequence
  Description of Artificial Sequence: Synthetic oligonucleotide
  Sense strand starting at position 2170 of SEQ ID NO: 1560611
augacuuauguuugagcuu

SEQ ID NO: 1612072 - RNA, 19 nt, Artificial Sequence
  Description of Artificial Sequence: Synthetic oligonucleotide
  Antisense strand to SEQ ID NO: 1612071
aagcucaaacauaagucau

SEQ ID NO: 1612073 - RNA, 19 nt, Artificial Sequence
  Description of Artificial Sequence: Synthetic oligonucleotide
  Sense strand starting at position 2173 of SEQ ID NO: 1560611
acuuauguuugagcuuuga

SEQ ID NO: 1612074 - RNA, 19 nt, Artificial Sequence
  Description of Artificial Sequence: Synthetic oligonucleotide
  Antisense strand to SEQ ID NO: 1612073
ucaaagcucaaacauaagu

SEQ ID NO: 1612075 - RNA, 19 nt, Artificial Sequence
  Description of Artificial Sequence: Synthetic oligonucleotide
  Sense strand starting at position 2223 of SEQ ID NO: 1560611
uuugaugacugguuaucau

SEQ ID NO: 1612076 - RNA, 19 nt, Artificial Sequence
  Description of Artificial Sequence: Synthetic oligonucleotide
  Antisense strand to SEQ ID NO: 1612075
augauaaccagucaucaaa

SEQ ID NO: 1612077 - RNA, 19 nt, Artificial Sequence
  Description of Artificial Sequence: Synthetic oligonucleotide
  Sense strand starting at position 2233 of SEQ ID NO: 1560611
gguuaucauccgcugccua

SEQ ID NO: 1612078 - RNA, 19 nt, Artificial Sequence
  Description of Artificial Sequence: Synthetic oligonucleotide
  Antisense strand to SEQ ID NO: 1612077
uaggcagcggaugauaacc

SEQ ID NO: 1612079 - RNA, 19 nt, Artificial Sequence
  Description of Artificial Sequence: Synthetic oligonucleotide
  Sense strand starting at position 2251 of SEQ ID NO: 1560611
acaugaccuugguuuguaa

SEQ ID NO: 1612080 - RNA, 19 nt, Artificial Sequence
  Description of Artificial Sequence: Synthetic oligonucleotide
  Antisense strand to SEQ ID NO: 1612079
uuacaaaccaaggucaugu

SEQ ID NO: 1612081 - RNA, 19 nt, Artificial Sequence
  Description of Artificial Sequence: Synthetic oligonucleotide
  Sense strand starting at position 2290 of SEQ ID NO: 1560611
guuuccuccuuugcagauu

SEQ ID NO: 1612082 - RNA, 19 nt, Artificial Sequence
  Description of Artificial Sequence: Synthetic oligonucleotide
  Antisense strand to SEQ ID NO: 1612081
aaucugcaaaggaggaaac

SEQ ID NO: 1612083 - RNA, 19 nt, Artificial Sequence
  Description of Artificial Sequence: Synthetic oligonucleotide
  Sense strand starting at position 2301 of SEQ ID NO: 1560611
ugcagauuguugucaugaa

SEQ ID NO: 1612084 - RNA, 19 nt, Artificial Sequence
  Description of Artificial Sequence: Synthetic oligonucleotide
  Antisense strand to SEQ ID NO: 1612083
uucaugacaacaaucugca

SEQ ID NO: 1612085 - RNA, 19 nt, Artificial Sequence
  Description of Artificial Sequence: Synthetic oligonucleotide
  Sense strand starting at position 2345 of SEQ ID NO: 1560611
gucaguggugccugggaca

SEQ ID NO: 1612086 - RNA, 19 nt, Artificial Sequence
  Description of Artificial Sequence: Synthetic oligonucleotide
  Antisense strand to SEQ ID NO: 1612085
ugucccaggcaccacugac

SEQ ID NO: 1612087 - RNA, 19 nt, Artificial Sequence
  Description of Artificial Sequence: Synthetic oligonucleotide
  Sense strand starting at position 2371 of SEQ ID NO: 1560611
gggcucauuugugcuugau

SEQ ID NO: 1612088 - RNA, 19 nt, Artificial Sequence
  Description of Artificial Sequence: Synthetic oligonucleotide
  Antisense strand to SEQ ID NO: 1612087
aucaagcacaaaugagccc

SEQ ID NO: 1612089 - RNA, 19 nt, Artificial Sequence
  Description of Artificial Sequence: Synthetic oligonucleotide
  Sense strand starting at position 2381 of SEQ ID NO: 1560611
gugcuugauuuccagacca

SEQ ID NO: 1612090 - RNA, 19 nt, Artificial Sequence
  Description of Artificial Sequence: Synthetic oligonucleotide
  Antisense strand to SEQ ID NO: 1612089
uggucuggaaaucaagcac

SEQ ID NO: 1612091 - RNA, 19 nt, Artificial Sequence
  Description of Artificial Sequence: Synthetic oligonucleotide
  Sense strand starting at position 2407 of SEQ ID NO: 1560611
accugaacuguuugggaug

SEQ ID NO: 1612092 - RNA, 19 nt, Artificial Sequence
  Description of Artificial Sequence: Synthetic oligonucleotide
  Antisense strand to SEQ ID NO: 1612091
caucccaaacaguucaggu

SEQ ID NO: 1612093 - RNA, 19 nt, Artificial Sequence
  Description of Artificial Sequence: Synthetic oligonucleotide
  Sense strand starting at position 2412 of SEQ ID NO: 1560611
aacuguuugggaugugaaa

SEQ ID NO: 1612094 - RNA, 19 nt, Artificial Sequence
  Description of Artificial Sequence: Synthetic oligonucleotide
  Antisense strand to SEQ ID NO: 1612093
uuucacaucccaaacaguu

SEQ ID NO: 1612095 - RNA, 19 nt, Artificial Sequence
  Description of Artificial Sequence: Synthetic oligonucleotide
  Sense strand starting at position 2428 of SEQ ID NO: 1560611
aaaggaucucgauguugga

SEQ ID NO: 1612096 - RNA, 19 nt, Artificial Sequence
  Description of Artificial Sequence: Synthetic oligonucleotide
  Antisense strand to SEQ ID NO: 1612095
uccaacaucgagauccuuu

SEQ ID NO: 1612097 - RNA, 19 nt, Artificial Sequence
  Description of Artificial Sequence: Synthetic oligonucleotide
  Sense strand starting at position 2451 of SEQ ID NO: 1560611
ccagucuguguagaugauu

SEQ ID NO: 1612098 - RNA, 19 nt, Artificial Sequence
  Description of Artificial Sequence: Synthetic oligonucleotide
  Antisense strand to SEQ ID NO: 1612097
aaucaucuacacagacugg

SEQ ID NO: 1612099 - RNA, 19 nt, Artificial Sequence
  Description of Artificial Sequence: Synthetic oligonucleotide
  Sense strand starting at position 2454 of SEQ ID NO: 1560611
gucuguguagaugauugau

SEQ ID NO: 1612100 - RNA, 19 nt, Artificial Sequence
  Description of Artificial Sequence: Synthetic oligonucleotide
  Antisense strand to SEQ ID NO: 1612099
aucaaucaucuacacagac

SEQ ID NO: 1612101 - RNA, 19 nt, Artificial Sequence
  Description of Artificial Sequence: Synthetic oligonucleotide
  Sense strand starting at position 2456 of SEQ ID NO: 1560611
cuguguagaugauugaugu

SEQ ID NO: 1612102 - RNA, 19 nt, Artificial Sequence
  Description of Artificial Sequence: Synthetic oligonucleotide
  Antisense strand to SEQ ID NO: 1612101
acaucaaucaucuacacag

SEQ ID NO: 1612103 - RNA, 19 nt, Artificial Sequence
  Description of Artificial Sequence: Synthetic oligonucleotide
  Sense strand starting at position 2462 of SEQ ID NO: 1560611
agaugauugauguguccac

SEQ ID NO: 1612104 - RNA, 19 nt, Artificial Sequence
  Description of Artificial Sequence: Synthetic oligonucleotide
  Antisense strand to SEQ ID NO: 1612103
guggacacaucaaucaucu

SEQ ID NO: 1612105 - RNA, 19 nt, Artificial Sequence
  Description of Artificial Sequence: Synthetic oligonucleotide
  Sense strand starting at position 2463 of SEQ ID NO: 1560611
gaugauugauguguccacu

SEQ ID NO: 1612106 - RNA, 19 nt, Artificial Sequence
  Description of Artificial Sequence: Synthetic oligonucleotide
  Antisense strand to SEQ ID NO: 1612105
aguggacacaucaaucauc

SEQ ID NO: 1612107 - RNA, 19 nt, Artificial Sequence
  Description of Artificial Sequence: Synthetic oligonucleotide
  Sense strand starting at position 2519 of SEQ ID NO: 1560611
ugaggcauuucugaaauac

SEQ ID NO: 1612108 - RNA, 19 nt, Artificial Sequence
  Description of Artificial Sequence: Synthetic oligonucleotide
  Antisense strand to SEQ ID NO: 1612107
guauuucagaaaugccuca

SEQ ID NO: 1612109 - RNA, 19 nt, Artificial Sequence
  Description of Artificial Sequence: Synthetic oligonucleotide
  Sense strand starting at position 2642 of SEQ ID NO: 1560611
gguaauuagaauggaguuu

SEQ ID NO: 1612110 - RNA, 19 nt, Artificial Sequence
  Description of Artificial Sequence: Synthetic oligonucleotide
  Antisense strand to SEQ ID NO: 1612109
aaacuccauucuaauuacc

SEQ ID NO: 1612111 - RNA, 19 nt, Artificial Sequence
  Description of Artificial Sequence: Synthetic oligonucleotide
  Sense strand starting at position 2819 of SEQ ID NO: 1560611
caaaccguccagugauaga

SEQ ID NO: 1612112 - RNA, 19 nt, Artificial Sequence
  Description of Artificial Sequence: Synthetic oligonucleotide
  Antisense strand to SEQ ID NO: 1612111
ucuaucacuggacgguuug

SEQ ID NO: 1612113 - RNA, 19 nt, Artificial Sequence
  Description of Artificial Sequence: Synthetic oligonucleotide
  Sense strand starting at position 2923 of SEQ ID NO: 1560611
gcagcauguccuggaggua

SEQ ID NO: 1612114 - RNA, 19 nt, Artificial Sequence
  Description of Artificial Sequence: Synthetic oligonucleotide
  Antisense strand to SEQ ID NO: 1612113
uaccuccaggacaugcugc

SEQ ID NO: 1612115 - RNA, 19 nt, Artificial Sequence
  Description of Artificial Sequence: Synthetic oligonucleotide
  Sense strand starting at position 2947 of SEQ ID NO: 1560611
ggugacacuggguguucua

SEQ ID NO: 1612116 - RNA, 19 nt, Artificial Sequence
  Description of Artificial Sequence: Synthetic oligonucleotide
  Antisense strand to SEQ ID NO: 1612115
uagaacacccagugucacc

SEQ ID NO: 1612117 - RNA, 19 nt, Artificial Sequence
  Description of Artificial Sequence: Synthetic oligonucleotide
  Sense strand starting at position 2956 of SEQ ID NO: 1560611
ggguguucuauccaaugcu

SEQ ID NO: 1612118 - RNA, 19 nt, Artificial Sequence
  Description of Artificial Sequence: Synthetic oligonucleotide
  Antisense strand to SEQ ID NO: 1612117
agcauuggauagaacaccc

SEQ ID NO: 1612119 - RNA, 19 nt, Artificial Sequence
  Description of Artificial Sequence: Synthetic oligonucleotide
  Sense strand starting at position 3028 of SEQ ID NO: 1560611
acaguuguucuuuggugua

SEQ ID NO: 1612120 - RNA, 19 nt, Artificial Sequence
  Description of Artificial Sequence: Synthetic oligonucleotide
  Antisense strand to SEQ ID NO: 1612119
uacaccaaagaacaacugu

SEQ ID NO: 1612121 - RNA, 19 nt, Artificial Sequence
  Description of Artificial Sequence: Synthetic oligonucleotide
  Sense strand starting at position 3030 of SEQ ID NO: 1560611
aguuguucuuugguguaca

SEQ ID NO: 1612122 - RNA, 19 nt, Artificial Sequence
  Description of Artificial Sequence: Synthetic oligonucleotide
  Antisense strand to SEQ ID NO: 1612121
uguacaccaaagaacaacu

SEQ ID NO: 1612123 - RNA, 19 nt, Artificial Sequence
  Description of Artificial Sequence: Synthetic oligonucleotide
  Sense strand starting at position 3161 of SEQ ID NO: 1560611
ggauuugcaucccacaaau

SEQ ID NO: 1612124 - RNA, 19 nt, Artificial Sequence
  Description of Artificial Sequence: Synthetic oligonucleotide
  Antisense strand to SEQ ID NO: 1612123
auuugugggaugcaaaucc

SEQ ID NO: 1612125 - RNA, 19 nt, Artificial Sequence
  Description of Artificial Sequence: Synthetic oligonucleotide
  Sense strand starting at position 3196 of SEQ ID NO: 1560611
ccguuugguugaagagagu

SEQ ID NO: 1612126 - RNA, 19 nt, Artificial Sequence
  Description of Artificial Sequence: Synthetic oligonucleotide
  Antisense strand to SEQ ID NO: 1612125
acucucuucaaccaaacgg

SEQ ID NO: 1612127 - RNA, 19 nt, Artificial Sequence
  Description of Artificial Sequence: Synthetic oligonucleotide
  Sense strand starting at position 3202 of SEQ ID NO: 1560611
gguugaagagagugugcau

SEQ ID NO: 1612128 - RNA, 19 nt, Artificial Sequence
  Description of Artificial Sequence: Synthetic oligonucleotide
  Antisense strand to SEQ ID NO: 1612127
augcacacucucuucaacc

SEQ ID NO: 1612129 - RNA, 19 nt, Artificial Sequence
  Description of Artificial Sequence: Synthetic oligonucleotide
  Sense strand starting at position 3244 of SEQ ID NO: 1560611
gcugcauugcuccaggguu

SEQ ID NO: 1612130 - RNA, 19 nt, Artificial Sequence
  Description of Artificial Sequence: Synthetic oligonucleotide
  Antisense strand to SEQ ID NO: 1612129
aacccuggagcaaugcagc

SEQ ID NO: 1612131 - RNA, 19 nt, Artificial Sequence
  Description of Artificial Sequence: Synthetic oligonucleotide
  Sense strand starting at position 3274 of SEQ ID NO: 1560611
gcuuguauuugacaaugag

SEQ ID NO: 1612132 - RNA, 19 nt, Artificial Sequence
  Description of Artificial Sequence: Synthetic oligonucleotide
  Antisense strand to SEQ ID NO: 1612131
cucauugucaaauacaagc

SEQ ID NO: 1612133 - RNA, 19 nt, Artificial Sequence
  Description of Artificial Sequence: Synthetic oligonucleotide
  Sense strand starting at position 3431 of SEQ ID NO: 1560611
guuagaguauuggcugugu

SEQ ID NO: 1612134 - RNA, 19 nt, Artificial Sequence
  Description of Artificial Sequence: Synthetic oligonucleotide
  Antisense strand to SEQ ID NO: 1612133
acacagccaauacucuaac

SEQ ID NO: 1612135 - RNA, 19 nt, Artificial Sequence
  Description of Artificial Sequence: Synthetic oligonucleotide
  Sense strand starting at position 3433 of SEQ ID NO: 1560611
uagaguauuggcuguguua

SEQ ID NO: 1612136 - RNA, 19 nt, Artificial Sequence
  Description of Artificial Sequence: Synthetic oligonucleotide
  Antisense strand to SEQ ID NO: 1612135
uaacacagccaauacucua

SEQ ID NO: 1612137 - RNA, 19 nt, Artificial Sequence
  Description of Artificial Sequence: Synthetic oligonucleotide
  Sense strand starting at position 3435 of SEQ ID NO: 1560611
gaguauuggcuguguuagg

SEQ ID NO: 1612138 - RNA, 19 nt, Artificial Sequence
  Description of Artificial Sequence: Synthetic oligonucleotide
  Antisense strand to SEQ ID NO: 1612137
ccuaacacagccaauacuc

SEQ ID NO: 1612139 - RNA, 19 nt, Artificial Sequence
  Description of Artificial Sequence: Synthetic oligonucleotide
  Sense strand starting at position 3501 of SEQ ID NO: 1560611
aaggcaagacucgaauguu

SEQ ID NO: 1612140 - RNA, 19 nt, Artificial Sequence
  Description of Artificial Sequence: Synthetic oligonucleotide
  Antisense strand to SEQ ID NO: 1612139
aacauucgagucuugccuu

SEQ ID NO: 1612141 - RNA, 19 nt, Artificial Sequence
  Description of Artificial Sequence: Synthetic oligonucleotide
  Sense strand starting at position 3510 of SEQ ID NO: 1560611
cucgaauguucccugccuu

SEQ ID NO: 1612142 - RNA, 19 nt, Artificial Sequence
  Description of Artificial Sequence: Synthetic oligonucleotide
  Antisense strand to SEQ ID NO: 1612141
aaggcagggaacauucgag

SEQ ID NO: 1612143 - RNA, 19 nt, Artificial Sequence
  Description of Artificial Sequence: Synthetic oligonucleotide
  Sense strand starting at position 3787 of SEQ ID NO: 1560611
gucagugucucccugaguu

SEQ ID NO: 1612144 - RNA, 19 nt, Artificial Sequence
  Description of Artificial Sequence: Synthetic oligonucleotide
  Antisense strand to SEQ ID NO: 1612143
aacucagggagacacugac

SEQ ID NO: 1612145 - RNA, 19 nt, Artificial Sequence
  Description of Artificial Sequence: Synthetic oligonucleotide
  Sense strand starting at position 3789 of SEQ ID NO: 1560611
cagugucucccugaguucu

SEQ ID NO: 1612146 - RNA, 19 nt, Artificial Sequence
  Description of Artificial Sequence: Synthetic oligonucleotide
  Antisense strand to SEQ ID NO: 1612145
agaacucagggagacacug

SEQ ID NO: 1612147 - RNA, 19 nt, Artificial Sequence
  Description of Artificial Sequence: Synthetic oligonucleotide
  Sense strand starting at position 3959 of SEQ ID NO: 1560611
gacugugucuggguagaca

SEQ ID NO: 1612148 - RNA, 19 nt, Artificial Sequence
  Description of Artificial Sequence: Synthetic oligonucleotide
  Antisense strand to SEQ ID NO: 1612147
ugucuacccagacacaguc

SEQ ID NO: 1612149 - RNA, 19 nt, Artificial Sequence
  Description of Artificial Sequence: Synthetic oligonucleotide
  Sense strand starting at position 227 of SEQ ID NO: 1560612
gccugugucccugacugaa

SEQ ID NO: 1612150 - RNA, 19 nt, Artificial Sequence
  Description of Artificial Sequence: Synthetic oligonucleotide
  Antisense strand to SEQ ID NO: 1612149
uucagucagggacacaggc

SEQ ID NO: 1612151 - RNA, 19 nt, Artificial Sequence
  Description of Artificial Sequence: Synthetic oligonucleotide
  Sense strand starting at position 2249 of SEQ ID NO: 1560612
uccucuucucacugagaga

SEQ ID NO: 1612152 - RNA, 19 nt, Artificial Sequence
  Description of Artificial Sequence: Synthetic oligonucleotide
  Antisense strand to SEQ ID NO: 1612151
ucucucagugagaagagga

SEQ ID NO: 1612153 - RNA, 19 nt, Artificial Sequence
  Description of Artificial Sequence: Synthetic oligonucleotide
  Sense strand starting at position 2791 of SEQ ID NO: 1560612
augacuuauguuugagcuu

SEQ ID NO: 1612154 - RNA, 19 nt, Artificial Sequence
  Description of Artificial Sequence: Synthetic oligonucleotide
  Antisense strand to SEQ ID NO: 1612153
aagcucaaacauaagucau

SEQ ID NO: 1612155 - RNA, 19 nt, Artificial Sequence
  Description of Artificial Sequence: Synthetic oligonucleotide
  Sense strand starting at position 2792 of SEQ ID NO: 1560612
ugacuuauguuugagcuuu

SEQ ID NO: 1612156 - RNA, 19 nt, Artificial Sequence
  Description of Artificial Sequence: Synthetic oligonucleotide
  Antisense strand to SEQ ID NO: 1612155
aaagcucaaacauaaguca

SEQ ID NO: 1612157 - RNA, 19 nt, Artificial Sequence
  Description of Artificial Sequence: Synthetic oligonucleotide
  Sense strand starting at position 2794 of SEQ ID NO: 1560612
acuuauguuugagcuuuga

SEQ ID NO: 1612158 - RNA, 19 nt, Artificial Sequence
  Description of Artificial Sequence: Synthetic oligonucleotide
  Antisense strand to SEQ ID NO: 1612157
ucaaagcucaaacauaagu

SEQ ID NO: 1612159 - RNA, 19 nt, Artificial Sequence
  Description of Artificial Sequence: Synthetic oligonucleotide
  Sense strand starting at position 2844 of SEQ ID NO: 1560612
uuugaugacugguuaucau

SEQ ID NO: 1612160 - RNA, 19 nt, Artificial Sequence
  Description of Artificial Sequence: Synthetic oligonucleotide
  Antisense strand to SEQ ID NO: 1612159
augauaaccagucaucaaa

SEQ ID NO: 1612161 - RNA, 19 nt, Artificial Sequence
  Description of Artificial Sequence: Synthetic oligonucleotide
  Sense strand starting at position 2854 of SEQ ID NO: 1560612
gguuaucauccgcugccua

SEQ ID NO: 1612162 - RNA, 19 nt, Artificial Sequence
  Description of Artificial Sequence: Synthetic oligonucleotide
  Antisense strand to SEQ ID NO: 1612161
uaggcagcggaugauaacc

SEQ ID NO: 1612163 - RNA, 19 nt, Artificial Sequence
  Description of Artificial Sequence: Synthetic oligonucleotide
  Sense strand starting at position 2872 of SEQ ID NO: 1560612
acaugaccuugguuuguaa

SEQ ID NO: 1612164 - RNA, 19 nt, Artificial Sequence
  Description of Artificial Sequence: Synthetic oligonucleotide
  Antisense strand to SEQ ID NO: 1612163
uuacaaaccaaggucaugu

SEQ ID NO: 1612165 - RNA, 19 nt, Artificial Sequence
  Description of Artificial Sequence: Synthetic oligonucleotide
  Sense strand starting at position 2884 of SEQ ID NO: 1560612
uuuguaaugucccaucacu

SEQ ID NO: 1612166 - RNA, 19 nt, Artificial Sequence
  Description of Artificial Sequence: Synthetic oligonucleotide
  Antisense strand to SEQ ID NO: 1612165
agugaugggacauuacaaa

SEQ ID NO: 1612167 - RNA, 19 nt, Artificial Sequence
  Description of Artificial Sequence: Synthetic oligonucleotide
  Sense strand starting at position 2911 of SEQ ID NO: 1560612
guuuccuccuuugcagauu

SEQ ID NO: 1612168 - RNA, 19 nt, Artificial Sequence
  Description of Artificial Sequence: Synthetic oligonucleotide
  Antisense strand to SEQ ID NO: 1612167
aaucugcaaaggaggaaac

SEQ ID NO: 1612169 - RNA, 19 nt, Artificial Sequence
  Description of Artificial Sequence: Synthetic oligonucleotide
  Sense strand starting at position 2922 of SEQ ID NO: 1560612
ugcagauuguugucaugaa

SEQ ID NO: 1612170 - RNA, 19 nt, Artificial Sequence
  Description of Artificial Sequence: Synthetic oligonucleotide
  Antisense strand to SEQ ID NO: 1612169
uucaugacaacaaucugca

SEQ ID NO: 1612171 - RNA, 19 nt, Artificial Sequence
  Description of Artificial Sequence: Synthetic oligonucleotide
  Sense strand starting at position 2923 of SEQ ID NO: 1560612
gcagauuguugucaugaau

SEQ ID NO: 1612172 - RNA, 19 nt, Artificial Sequence
  Description of Artificial Sequence: Synthetic oligonucleotide
  Antisense strand to SEQ ID NO: 1612171
auucaugacaacaaucugc

SEQ ID NO: 1612173 - RNA, 19 nt, Artificial Sequence
  Description of Artificial Sequence: Synthetic oligonucleotide
  Sense strand starting at position 2966 of SEQ ID NO: 1560612
gucaguggugccugggaca

SEQ ID NO: 1612174 - RNA, 19 nt, Artificial Sequence
  Description of Artificial Sequence: Synthetic oligonucleotide
  Antisense strand to SEQ ID NO: 1612173
ugucccaggcaccacugac

SEQ ID NO: 1612175 - RNA, 19 nt, Artificial Sequence
  Description of Artificial Sequence: Synthetic oligonucleotide
  Sense strand starting at position 2992 of SEQ ID NO: 1560612
gggcucauuugugcuugau

SEQ ID NO: 1612176 - RNA, 19 nt, Artificial Sequence
  Description of Artificial Sequence: Synthetic oligonucleotide
  Antisense strand to SEQ ID NO: 1612175
aucaagcacaaaugagccc

SEQ ID NO: 1612177 - RNA, 19 nt, Artificial Sequence
  Description of Artificial Sequence: Synthetic oligonucleotide
  Sense strand starting at position 3002 of SEQ ID NO: 1560612
gugcuugauuuccagacca

SEQ ID NO: 1612178 - RNA, 19 nt, Artificial Sequence
  Description of Artificial Sequence: Synthetic oligonucleotide
  Antisense strand to SEQ ID NO: 1612177
uggucuggaaaucaagcac

SEQ ID NO: 1612179 - RNA, 19 nt, Artificial Sequence
  Description of Artificial Sequence: Synthetic oligonucleotide
  Sense strand starting at position 3028 of SEQ ID NO: 1560612
accugaacuguuugggaug

SEQ ID NO: 1612180 - RNA, 19 nt, Artificial Sequence
  Description of Artificial Sequence: Synthetic oligonucleotide
  Antisense strand to SEQ ID NO: 1612179
caucccaaacaguucaggu

SEQ ID NO: 1612181 - RNA, 19 nt, Artificial Sequence
  Description of Artificial Sequence: Synthetic oligonucleotide
  Sense strand starting at position 3031 of SEQ ID NO: 1560612
ugaacuguuugggauguga

SEQ ID NO: 1612182 - RNA, 19 nt, Artificial Sequence
  Description of Artificial Sequence: Synthetic oligonucleotide
  Antisense strand to SEQ ID NO: 1612181
ucacaucccaaacaguuca

SEQ ID NO: 1612183 - RNA, 19 nt, Artificial Sequence
  Description of Artificial Sequence: Synthetic oligonucleotide
  Sense strand starting at position 3033 of SEQ ID NO: 1560612
aacuguuugggaugugaaa

SEQ ID NO: 1612184 - RNA, 19 nt, Artificial Sequence
  Description of Artificial Sequence: Synthetic oligonucleotide
  Antisense strand to SEQ ID NO: 1612183
uuucacaucccaaacaguu

SEQ ID NO: 1612185 - RNA, 19 nt, Artificial Sequence
  Description of Artificial Sequence: Synthetic oligonucleotide
  Sense strand starting at position 3046 of SEQ ID NO: 1560612
gugaaaggaucucgauguu

SEQ ID NO: 1612186 - RNA, 19 nt, Artificial Sequence
  Description of Artificial Sequence: Synthetic oligonucleotide
  Antisense strand to SEQ ID NO: 1612185
aacaucgagauccuuucac

SEQ ID NO: 1612187 - RNA, 19 nt, Artificial Sequence
  Description of Artificial Sequence: Synthetic oligonucleotide
  Sense strand starting at position 3049 of SEQ ID NO: 1560612
aaaggaucucgauguugga

SEQ ID NO: 1612188 - RNA, 19 nt, Artificial Sequence
  Description of Artificial Sequence: Synthetic oligonucleotide
  Antisense strand to SEQ ID NO: 1612187
uccaacaucgagauccuuu

SEQ ID NO: 1612189 - RNA, 19 nt, Artificial Sequence
  Description of Artificial Sequence: Synthetic oligonucleotide
  Sense strand starting at position 3072 of SEQ ID NO: 1560612
ccagucuguguagaugauu

SEQ ID NO: 1612190 - RNA, 19 nt, Artificial Sequence
  Description of Artificial Sequence: Synthetic oligonucleotide
  Antisense strand to SEQ ID NO: 1612189
aaucaucuacacagacugg

SEQ ID NO: 1612191 - RNA, 19 nt, Artificial Sequence
  Description of Artificial Sequence: Synthetic oligonucleotide
  Sense strand starting at position 3075 of SEQ ID NO: 1560612
gucuguguagaugauugau

SEQ ID NO: 1612192 - RNA, 19 nt, Artificial Sequence
  Description of Artificial Sequence: Synthetic oligonucleotide
  Antisense strand to SEQ ID NO: 1612191
aucaaucaucuacacagac

SEQ ID NO: 1612193 - RNA, 19 nt, Artificial Sequence
  Description of Artificial Sequence: Synthetic oligonucleotide
  Sense strand starting at position 3077 of SEQ ID NO: 1560612
cuguguagaugauugaugu

SEQ ID NO: 1612194 - RNA, 19 nt, Artificial Sequence
  Description of Artificial Sequence: Synthetic oligonucleotide
  Antisense strand to SEQ ID NO: 1612193
acaucaaucaucuacacag

SEQ ID NO: 1612195 - RNA, 19 nt, Artificial Sequence
  Description of Artificial Sequence: Synthetic oligonucleotide
  Sense strand starting at position 3083 of SEQ ID NO: 1560612
agaugauugauguguccac

SEQ ID NO: 1612196 - RNA, 19 nt, Artificial Sequence
  Description of Artificial Sequence: Synthetic oligonucleotide
  Antisense strand to SEQ ID NO: 1612195
guggacacaucaaucaucu

SEQ ID NO: 1612197 - RNA, 19 nt, Artificial Sequence
  Description of Artificial Sequence: Synthetic oligonucleotide
  Sense strand starting at position 3084 of SEQ ID NO: 1560612
gaugauugauguguccacu

SEQ ID NO: 1612198 - RNA, 19 nt, Artificial Sequence
  Description of Artificial Sequence: Synthetic oligonucleotide
  Antisense strand to SEQ ID NO: 1612197
aguggacacaucaaucauc

SEQ ID NO: 1612199 - RNA, 19 nt, Artificial Sequence
  Description of Artificial Sequence: Synthetic oligonucleotide
  Sense strand starting at position 3140 of SEQ ID NO: 1560612
ugaggcauuucugaaauac

SEQ ID NO: 1612200 - RNA, 19 nt, Artificial Sequence
  Description of Artificial Sequence: Synthetic oligonucleotide
  Antisense strand to SEQ ID NO: 1612199
guauuucagaaaugccuca

SEQ ID NO: 1612201 - RNA, 19 nt, Artificial Sequence
  Description of Artificial Sequence: Synthetic oligonucleotide
  Sense strand starting at position 3192 of SEQ ID NO: 1560612
ugaggaaguucccaagugu

SEQ ID NO: 1612202 - RNA, 19 nt, Artificial Sequence
  Description of Artificial Sequence: Synthetic oligonucleotide
  Antisense strand to SEQ ID NO: 1612201
acacuugggaacuuccuca

SEQ ID NO: 1612203 - RNA, 19 nt, Artificial Sequence
  Description of Artificial Sequence: Synthetic oligonucleotide
  Sense strand starting at position 3263 of SEQ ID NO: 1560612
gguaauuagaauggaguuu

SEQ ID NO: 1612204 - RNA, 19 nt, Artificial Sequence
  Description of Artificial Sequence: Synthetic oligonucleotide
  Antisense strand to SEQ ID NO: 1612203
aaacuccauucuaauuacc

SEQ ID NO: 1612205 - RNA, 19 nt, Artificial Sequence
  Description of Artificial Sequence: Synthetic oligonucleotide
  Sense strand starting at position 3440 of SEQ ID NO: 1560612
caaaccguccagugauaga

SEQ ID NO: 1612206 - RNA, 19 nt, Artificial Sequence
  Description of Artificial Sequence: Synthetic oligonucleotide
  Antisense strand to SEQ ID NO: 1612205
ucuaucacuggacgguuug

SEQ ID NO: 1612207 - RNA, 19 nt, Artificial Sequence
  Description of Artificial Sequence: Synthetic oligonucleotide
  Sense strand starting at position 3544 of SEQ ID NO: 1560612
gcagcauguccuggaggua

SEQ ID NO: 1612208 - RNA, 19 nt, Artificial Sequence
  Description of Artificial Sequence: Synthetic oligonucleotide
  Antisense strand to SEQ ID NO: 1612207
uaccuccaggacaugcugc

SEQ ID NO: 1612209 - RNA, 19 nt, Artificial Sequence
  Description of Artificial Sequence: Synthetic oligonucleotide
  Sense strand starting at position 3568 of SEQ ID NO: 1560612
ggugacacuggguguucua

SEQ ID NO: 1612210 - RNA, 19 nt, Artificial Sequence
  Description of Artificial Sequence: Synthetic oligonucleotide
  Antisense strand to SEQ ID NO: 1612209
uagaacacccagugucacc

SEQ ID NO: 1612211 - RNA, 19 nt, Artificial Sequence
  Description of Artificial Sequence: Synthetic oligonucleotide
  Sense strand starting at position 3577 of SEQ ID NO: 1560612
ggguguucuauccaaugcu

SEQ ID NO: 1612212 - RNA, 19 nt, Artificial Sequence
  Description of Artificial Sequence: Synthetic oligonucleotide
  Antisense strand to SEQ ID NO: 1612211
agcauuggauagaacaccc

SEQ ID NO: 1612213 - RNA, 19 nt, Artificial Sequence
  Description of Artificial Sequence: Synthetic oligonucleotide
  Sense strand starting at position 3649 of SEQ ID NO: 1560612
acaguuguucuuuggugua

SEQ ID NO: 1612214 - RNA, 19 nt, Artificial Sequence
  Description of Artificial Sequence: Synthetic oligonucleotide
  Antisense strand to SEQ ID NO: 1612213
uacaccaaagaacaacugu

SEQ ID NO: 1612215 - RNA, 19 nt, Artificial Sequence
  Description of Artificial Sequence: Synthetic oligonucleotide
  Sense strand starting at position 3651 of SEQ ID NO: 1560612
aguuguucuuugguguaca

SEQ ID NO: 1612216 - RNA, 19 nt, Artificial Sequence
  Description of Artificial Sequence: Synthetic oligonucleotide
  Antisense strand to SEQ ID NO: 1612215
uguacaccaaagaacaacu

SEQ ID NO: 1612217 - RNA, 19 nt, Artificial Sequence
  Description of Artificial Sequence: Synthetic oligonucleotide
  Sense strand starting at position 3756 of SEQ ID NO: 1560612
gggaaagucugccauucgu

SEQ ID NO: 1612218 - RNA, 19 nt, Artificial Sequence
  Description of Artificial Sequence: Synthetic oligonucleotide
  Antisense strand to SEQ ID NO: 1612217
acgaauggcagacuuuccc

SEQ ID NO: 1612219 - RNA, 19 nt, Artificial Sequence
  Description of Artificial Sequence: Synthetic oligonucleotide
  Sense strand starting at position 3782 of SEQ ID NO: 1560612
ggauuugcaucccacaaau

SEQ ID NO: 1612220 - RNA, 19 nt, Artificial Sequence
  Description of Artificial Sequence: Synthetic oligonucleotide
  Antisense strand to SEQ ID NO: 1612219
auuugugggaugcaaaucc

SEQ ID NO: 1612221 - RNA, 19 nt, Artificial Sequence
  Description of Artificial Sequence: Synthetic oligonucleotide
  Sense strand starting at position 3817 of SEQ ID NO: 1560612
ccguuugguugaagagagu

SEQ ID NO: 1612222 - RNA, 19 nt, Artificial Sequence
  Description of Artificial Sequence: Synthetic oligonucleotide
  Antisense strand to SEQ ID NO: 1612221
acucucuucaaccaaacgg

SEQ ID NO: 1612223 - RNA, 19 nt, Artificial Sequence
  Description of Artificial Sequence: Synthetic oligonucleotide
  Sense strand starting at position 3823 of SEQ ID NO: 1560612
gguugaagagagugugcau

SEQ ID NO: 1612224 - RNA, 19 nt, Artificial Sequence
  Description of Artificial Sequence: Synthetic oligonucleotide
  Antisense strand to SEQ ID NO: 1612223
augcacacucucuucaacc

SEQ ID NO: 1612225 - RNA, 19 nt, Artificial Sequence
  Description of Artificial Sequence: Synthetic oligonucleotide
  Sense strand starting at position 3865 of SEQ ID NO: 1560612
gcugcauugcuccaggguu

SEQ ID NO: 1612226 - RNA, 19 nt, Artificial Sequence
  Description of Artificial Sequence: Synthetic oligonucleotide
  Antisense strand to SEQ ID NO: 1612225
aacccuggagcaaugcagc

SEQ ID NO: 1612227 - RNA, 19 nt, Artificial Sequence
  Description of Artificial Sequence: Synthetic oligonucleotide
  Sense strand starting at position 3895 of SEQ ID NO: 1560612
gcuuguauuugacaaugag

SEQ ID NO: 1612228 - RNA, 19 nt, Artificial Sequence
  Description of Artificial Sequence: Synthetic oligonucleotide
  Antisense strand to SEQ ID NO: 1612227
cucauugucaaauacaagc

SEQ ID NO: 1612229 - RNA, 19 nt, Artificial Sequence
  Description of Artificial Sequence: Synthetic oligonucleotide
  Sense strand starting at position 15 of SEQ ID NO: 1560613
auagaacuguccuagagag

SEQ ID NO: 1612230 - RNA, 19 nt, Artificial Sequence
  Description of Artificial Sequence: Synthetic oligonucleotide
  Antisense strand to SEQ ID NO: 1612229
cucucuaggacaguucuau

SEQ ID NO: 1612231 - RNA, 19 nt, Artificial Sequence
  Description of Artificial Sequence: Synthetic oligonucleotide
  Sense strand starting at position 645 of SEQ ID NO: 1560613
cgcugaucuuccugugucu

SEQ ID NO: 1612232 - RNA, 19 nt, Artificial Sequence
  Description of Artificial Sequence: Synthetic oligonucleotide
  Antisense strand to SEQ ID NO: 1612231
agacacaggaagaucagcg

SEQ ID NO: 1612233 - RNA, 19 nt, Artificial Sequence
  Description of Artificial Sequence: Synthetic oligonucleotide
  Sense strand starting at position 774 of SEQ ID NO: 1560613
ccaagcaauucugugaauu

SEQ ID NO: 1612234 - RNA, 19 nt, Artificial Sequence
  Description of Artificial Sequence: Synthetic oligonucleotide
  Antisense strand to SEQ ID NO: 1612233
aauucacagaauugcuugg

SEQ ID NO: 1612235 - RNA, 19 nt, Artificial Sequence
  Description of Artificial Sequence: Synthetic oligonucleotide
  Sense strand starting at position 1091 of SEQ ID NO: 1560613
gcuguaggcuccuaggaga

SEQ ID NO: 1612236 - RNA, 19 nt, Artificial Sequence
  Description of Artificial Sequence: Synthetic oligonucleotide
  Antisense strand to SEQ ID NO: 1612235
ucuccuaggagccuacagc

SEQ ID NO: 1612237 - RNA, 19 nt, Artificial Sequence
  Description of Artificial Sequence: Synthetic oligonucleotide
  Sense strand starting at position 1549 of SEQ ID NO: 1560613
gucggauucuaagucauuu

SEQ ID NO: 1612238 - RNA, 19 nt, Artificial Sequence
  Description of Artificial Sequence: Synthetic oligonucleotide
  Antisense strand to SEQ ID NO: 1612237
aaaugacuuagaauccgac

SEQ ID NO: 1612239 - RNA, 19 nt, Artificial Sequence
  Description of Artificial Sequence: Synthetic oligonucleotide
  Sense strand starting at position 2207 of SEQ ID NO: 1560613
cacugucugucugguuuau

SEQ ID NO: 1612240 - RNA, 19 nt, Artificial Sequence
  Description of Artificial Sequence: Synthetic oligonucleotide
  Antisense strand to SEQ ID NO: 1612239
auaaaccagacagacagug

SEQ ID NO: 1612241 - RNA, 19 nt, Artificial Sequence
  Description of Artificial Sequence: Synthetic oligonucleotide
  Sense strand starting at position 2219 of SEQ ID NO: 1560613
gguuuauccucaucuccuu

SEQ ID NO: 1612242 - RNA, 19 nt, Artificial Sequence
  Description of Artificial Sequence: Synthetic oligonucleotide
  Antisense strand to SEQ ID NO: 1612241
aaggagaugaggauaaacc

SEQ ID NO: 1612243 - RNA, 19 nt, Artificial Sequence
  Description of Artificial Sequence: Synthetic oligonucleotide
  Sense strand starting at position 2234 of SEQ ID NO: 1560613
ccuugagaccugggaugua

SEQ ID NO: 1612244 - RNA, 19 nt, Artificial Sequence
  Description of Artificial Sequence: Synthetic oligonucleotide
  Antisense strand to SEQ ID NO: 1612243
uacaucccaggucucaagg

SEQ ID NO: 1612245 - RNA, 19 nt, Artificial Sequence
  Description of Artificial Sequence: Synthetic oligonucleotide
  Sense strand starting at position 2869 of SEQ ID NO: 1560613
uuuguucugucuugagagu

SEQ ID NO: 1612246 - RNA, 19 nt, Artificial Sequence
  Description of Artificial Sequence: Synthetic oligonucleotide
  Antisense strand to SEQ ID NO: 1612245
acucucaagacagaacaaa

SEQ ID NO: 1612247 - RNA, 19 nt, Artificial Sequence
  Description of Artificial Sequence: Synthetic oligonucleotide
  Sense strand starting at position 2889 of SEQ ID NO: 1560613
uguguuuccuuccuaccaa

SEQ ID NO: 1612248 - RNA, 19 nt, Artificial Sequence
  Description of Artificial Sequence: Synthetic oligonucleotide
  Antisense strand to SEQ ID NO: 1612247
uugguaggaaggaaacaca

SEQ ID NO: 1612249 - RNA, 19 nt, Artificial Sequence
  Description of Artificial Sequence: Synthetic oligonucleotide
  Sense strand starting at position 2890 of SEQ ID NO: 1560613
guguuuccuuccuaccaaa

SEQ ID NO: 1612250 - RNA, 19 nt, Artificial Sequence
  Description of Artificial Sequence: Synthetic oligonucleotide
  Antisense strand to SEQ ID NO: 1612249
uuugguaggaaggaaacac

SEQ ID NO: 1612251 - RNA, 19 nt, Artificial Sequence
  Description of Artificial Sequence: Synthetic oligonucleotide
  Sense strand starting at position 3058 of SEQ ID NO: 1560613
agaagaauuuguuaggucu

SEQ ID NO: 1612252 - RNA, 19 nt, Artificial Sequence
  Description of Artificial Sequence: Synthetic oligonucleotide
  Antisense strand to SEQ ID NO: 1612251
agaccuaacaaauucuucu

SEQ ID NO: 1612253 - RNA, 19 nt, Artificial Sequence
  Description of Artificial Sequence: Synthetic oligonucleotide
  Sense strand starting at position 3060 of SEQ ID NO: 1560613
aagaauuuguuaggucugu

SEQ ID NO: 1612254 - RNA, 19 nt, Artificial Sequence
  Description of Artificial Sequence: Synthetic oligonucleotide
  Antisense strand to SEQ ID NO: 1612253
acagaccuaacaaauucuu

SEQ ID NO: 1612255 - RNA, 19 nt, Artificial Sequence
  Description of Artificial Sequence: Synthetic oligonucleotide
  Sense strand starting at position 3064 of SEQ ID NO: 1560613
auuuguuaggucuguaauc

SEQ ID NO: 1612256 - RNA, 19 nt, Artificial Sequence
  Description of Artificial Sequence: Synthetic oligonucleotide
  Antisense strand to SEQ ID NO: 1612255
gauuacagaccuaacaaau

SEQ ID NO: 1612257 - RNA, 19 nt, Artificial Sequence
  Description of Artificial Sequence: Synthetic oligonucleotide
  Sense strand starting at position 3065 of SEQ ID NO: 1560613
uuuguuaggucuguaaucu

SEQ ID NO: 1612258 - RNA, 19 nt, Artificial Sequence
  Description of Artificial Sequence: Synthetic oligonucleotide
  Antisense strand to SEQ ID NO: 1612257
agauuacagaccuaacaaa

SEQ ID NO: 1612259 - RNA, 19 nt, Artificial Sequence
  Description of Artificial Sequence: Synthetic oligonucleotide
  Sense strand starting at position 3066 of SEQ ID NO: 1560613
uuguuaggucuguaaucug

SEQ ID NO: 1612260 - RNA, 19 nt, Artificial Sequence
  Description of Artificial Sequence: Synthetic oligonucleotide
  Antisense strand to SEQ ID NO: 1612259
cagauuacagaccuaacaa

SEQ ID NO: 1612261 - RNA, 19 nt, Artificial Sequence
  Description of Artificial Sequence: Synthetic oligonucleotide
  Sense strand starting at position 3069 of SEQ ID NO: 1560613
uuaggucuguaaucugauu

SEQ ID NO: 1612262 - RNA, 19 nt, Artificial Sequence
  Description of Artificial Sequence: Synthetic oligonucleotide
  Antisense strand to SEQ ID NO: 1612261
aaucagauuacagaccuaa

SEQ ID NO: 1612263 - RNA, 19 nt, Artificial Sequence
  Description of Artificial Sequence: Synthetic oligonucleotide
  Sense strand starting at position 3098 of SEQ ID NO: 1560613
ugagcugauuuguauuuaa

SEQ ID NO: 1612264 - RNA, 19 nt, Artificial Sequence
  Description of Artificial Sequence: Synthetic oligonucleotide
  Antisense strand to SEQ ID NO: 1612263
uuaaauacaaaucagcuca

SEQ ID NO: 1612265 - RNA, 19 nt, Artificial Sequence
  Description of Artificial Sequence: Synthetic oligonucleotide
  Sense strand starting at position 3122 of SEQ ID NO: 1560613
gauuaucauccaggguuua

SEQ ID NO: 1612266 - RNA, 19 nt, Artificial Sequence
  Description of Artificial Sequence: Synthetic oligonucleotide
  Antisense strand to SEQ ID NO: 1612265
uaaacccuggaugauaauc

SEQ ID NO: 1612267 - RNA, 19 nt, Artificial Sequence
  Description of Artificial Sequence: Synthetic oligonucleotide
  Sense strand starting at position 3123 of SEQ ID NO: 1560613
auuaucauccaggguuuau

SEQ ID NO: 1612268 - RNA, 19 nt, Artificial Sequence
  Description of Artificial Sequence: Synthetic oligonucleotide
  Antisense strand to SEQ ID NO: 1612267
auaaacccuggaugauaau

SEQ ID NO: 1612269 - RNA, 19 nt, Artificial Sequence
  Description of Artificial Sequence: Synthetic oligonucleotide
  Sense strand starting at position 3134 of SEQ ID NO: 1560613
ggguuuaugugacuuugga

SEQ ID NO: 1612270 - RNA, 19 nt, Artificial Sequence
  Description of Artificial Sequence: Synthetic oligonucleotide
  Antisense strand to SEQ ID NO: 1612269
uccaaagucacauaaaccc

SEQ ID NO: 1612271 - RNA, 19 nt, Artificial Sequence
  Description of Artificial Sequence: Synthetic oligonucleotide
  Sense strand starting at position 3138 of SEQ ID NO: 1560613
uuaugugacuuuggacaug

SEQ ID NO: 1612272 - RNA, 19 nt, Artificial Sequence
  Description of Artificial Sequence: Synthetic oligonucleotide
  Antisense strand to SEQ ID NO: 1612271
cauguccaaagucacauaa

SEQ ID NO: 1612273 - RNA, 19 nt, Artificial Sequence
  Description of Artificial Sequence: Synthetic oligonucleotide
  Sense strand starting at position 3143 of SEQ ID NO: 1560613
ugacuuuggacaugaaugu

SEQ ID NO: 1612274 - RNA, 19 nt, Artificial Sequence
  Description of Artificial Sequence: Synthetic oligonucleotide
  Antisense strand to SEQ ID NO: 1612273
acauucauguccaaaguca

SEQ ID NO: 1612275 - RNA, 19 nt, Artificial Sequence
  Description of Artificial Sequence: Synthetic oligonucleotide
  Sense strand starting at position 3234 of SEQ ID NO: 1560613
gaggcucagccauggugaa

SEQ ID NO: 1612276 - RNA, 19 nt, Artificial Sequence
  Description of Artificial Sequence: Synthetic oligonucleotide
  Antisense strand to SEQ ID NO: 1612275
uucaccauggcugagccuc

SEQ ID NO: 1612277 - RNA, 19 nt, Artificial Sequence
  Description of Artificial Sequence: Synthetic oligonucleotide
  Sense strand starting at position 3235 of SEQ ID NO: 1560613
aggcucagccauggugaau

SEQ ID NO: 1612278 - RNA, 19 nt, Artificial Sequence
  Description of Artificial Sequence: Synthetic oligonucleotide
  Antisense strand to SEQ ID NO: 1612277
auucaccauggcugagccu

SEQ ID NO: 1612279 - RNA, 19 nt, Artificial Sequence
  Description of Artificial Sequence: Synthetic oligonucleotide
  Sense strand starting at position 3368 of SEQ ID NO: 1560613
ccaugaaauucuccuugug

SEQ ID NO: 1612280 - RNA, 19 nt, Artificial Sequence
  Description of Artificial Sequence: Synthetic oligonucleotide
  Antisense strand to SEQ ID NO: 1612279
cacaaggagaauuucaugg

SEQ ID NO: 1612281 - RNA, 19 nt, Artificial Sequence
  Description of Artificial Sequence: Synthetic oligonucleotide
  Sense strand starting at position 3370 of SEQ ID NO: 1560613
augaaauucuccuugugau

SEQ ID NO: 1612282 - RNA, 19 nt, Artificial Sequence
  Description of Artificial Sequence: Synthetic oligonucleotide
  Antisense strand to SEQ ID NO: 1612281
aucacaaggagaauuucau

SEQ ID NO: 1612283 - RNA, 19 nt, Artificial Sequence
  Description of Artificial Sequence: Synthetic oligonucleotide
  Sense strand starting at position 3371 of SEQ ID NO: 1560613
ugaaauucuccuugugaua

SEQ ID NO: 1612284 - RNA, 19 nt, Artificial Sequence
  Description of Artificial Sequence: Synthetic oligonucleotide
  Antisense strand to SEQ ID NO: 1612283
uaucacaaggagaauuuca

SEQ ID NO: 1612285 - RNA, 19 nt, Artificial Sequence
  Description of Artificial Sequence: Synthetic oligonucleotide
  Sense strand starting at position 3383 of SEQ ID NO: 1560613
ugugauacaucugaaauau

SEQ ID NO: 1612286 - RNA, 19 nt, Artificial Sequence
  Description of Artificial Sequence: Synthetic oligonucleotide
  Antisense strand to SEQ ID NO: 1612285
auauuucagauguaucaca

SEQ ID NO: 1612287 - RNA, 19 nt, Artificial Sequence
  Description of Artificial Sequence: Synthetic oligonucleotide
  Sense strand starting at position 3812 of SEQ ID NO: 1560613
gcacaaucuugagcugaca

SEQ ID NO: 1612288 - RNA, 19 nt, Artificial Sequence
  Description of Artificial Sequence: Synthetic oligonucleotide
  Antisense strand to SEQ ID NO: 1612287
ugucagcucaagauugugc

SEQ ID NO: 1612289 - RNA, 19 nt, Artificial Sequence
  Description of Artificial Sequence: Synthetic oligonucleotide
  Sense strand starting at position 3980 of SEQ ID NO: 1560613
cacagacaguuguugaaau

SEQ ID NO: 1612290 - RNA, 19 nt, Artificial Sequence
  Description of Artificial Sequence: Synthetic oligonucleotide
  Antisense strand to SEQ ID NO: 1612289
auuucaacaacugucugug

SEQ ID NO: 1612291 - RNA, 19 nt, Artificial Sequence
  Description of Artificial Sequence: Synthetic oligonucleotide
  Sense strand starting at position 257 of SEQ ID NO: 1560614
gcuguaggcuccuaggaga

SEQ ID NO: 1612292 - RNA, 19 nt, Artificial Sequence
  Description of Artificial Sequence: Synthetic oligonucleotide
  Antisense strand to SEQ ID NO: 1612291
ucuccuaggagccuacagc

SEQ ID NO: 1612293 - RNA, 19 nt, Artificial Sequence
  Description of Artificial Sequence: Synthetic oligonucleotide
  Sense strand starting at position 715 of SEQ ID NO: 1560614
gucggauucuaagucauuu

SEQ ID NO: 1612294 - RNA, 19 nt, Artificial Sequence
  Description of Artificial Sequence: Synthetic oligonucleotide
  Antisense strand to SEQ ID NO: 1612293
aaaugacuuagaauccgac

SEQ ID NO: 1612295 - RNA, 19 nt, Artificial Sequence
  Description of Artificial Sequence: Synthetic oligonucleotide
  Sense strand starting at position 1373 of SEQ ID NO: 1560614
cacugucugucugguuuau

SEQ ID NO: 1612296 - RNA, 19 nt, Artificial Sequence
  Description of Artificial Sequence: Synthetic oligonucleotide
  Antisense strand to SEQ ID NO: 1612295
auaaaccagacagacagug

SEQ ID NO: 1612297 - RNA, 19 nt, Artificial Sequence
  Description of Artificial Sequence: Synthetic oligonucleotide
  Sense strand starting at position 1385 of SEQ ID NO: 1560614
gguuuauccucaucuccuu

SEQ ID NO: 1612298 - RNA, 19 nt, Artificial Sequence
  Description of Artificial Sequence: Synthetic oligonucleotide
  Antisense strand to SEQ ID NO: 1612297
aaggagaugaggauaaacc

SEQ ID NO: 1612299 - RNA, 19 nt, Artificial Sequence
  Description of Artificial Sequence: Synthetic oligonucleotide
  Sense strand starting at position 1400 of SEQ ID NO: 1560614
ccuugagaccugggaugua

SEQ ID NO: 1612300 - RNA, 19 nt, Artificial Sequence
  Description of Artificial Sequence: Synthetic oligonucleotide
  Antisense strand to SEQ ID NO: 1612299
uacaucccaggucucaagg

SEQ ID NO: 1612301 - RNA, 19 nt, Artificial Sequence
  Description of Artificial Sequence: Synthetic oligonucleotide
  Sense strand starting at position 2035 of SEQ ID NO: 1560614
uuuguucugucuugagagu

SEQ ID NO: 1612302 - RNA, 19 nt, Artificial Sequence
  Description of Artificial Sequence: Synthetic oligonucleotide
  Antisense strand to SEQ ID NO: 1612301
acucucaagacagaacaaa

SEQ ID NO: 1612303 - RNA, 19 nt, Artificial Sequence
  Description of Artificial Sequence: Synthetic oligonucleotide
  Sense strand starting at position 2055 of SEQ ID NO: 1560614
uguguuuccuuccuaccaa

SEQ ID NO: 1612304 - RNA, 19 nt, Artificial Sequence
  Description of Artificial Sequence: Synthetic oligonucleotide
  Antisense strand to SEQ ID NO: 1612303
uugguaggaaggaaacaca

SEQ ID NO: 1612305 - RNA, 19 nt, Artificial Sequence
  Description of Artificial Sequence: Synthetic oligonucleotide
  Sense strand starting at position 2056 of SEQ ID NO: 1560614
guguuuccuuccuaccaaa

SEQ ID NO: 1612306 - RNA, 19 nt, Artificial Sequence
  Description of Artificial Sequence: Synthetic oligonucleotide
  Antisense strand to SEQ ID NO: 1612305
uuugguaggaaggaaacac

SEQ ID NO: 1612307 - RNA, 19 nt, Artificial Sequence
  Description of Artificial Sequence: Synthetic oligonucleotide
  Sense strand starting at position 2224 of SEQ ID NO: 1560614
agaagaauuuguuaggucu

SEQ ID NO: 1612308 - RNA, 19 nt, Artificial Sequence
  Description of Artificial Sequence: Synthetic oligonucleotide
  Antisense strand to SEQ ID NO: 1612307
agaccuaacaaauucuucu

SEQ ID NO: 1612309 - RNA, 19 nt, Artificial Sequence
  Description of Artificial Sequence: Synthetic oligonucleotide
  Sense strand starting at position 2226 of SEQ ID NO: 1560614
aagaauuuguuaggucugu

SEQ ID NO: 1612310 - RNA, 19 nt, Artificial Sequence
  Description of Artificial Sequence: Synthetic oligonucleotide
  Antisense strand to SEQ ID NO: 1612309
acagaccuaacaaauucuu

SEQ ID NO: 1612311 - RNA, 19 nt, Artificial Sequence
  Description of Artificial Sequence: Synthetic oligonucleotide
  Sense strand starting at position 2230 of SEQ ID NO: 1560614
auuuguuaggucuguaauc

SEQ ID NO: 1612312 - RNA, 19 nt, Artificial Sequence
  Description of Artificial Sequence: Synthetic oligonucleotide
  Antisense strand to SEQ ID NO: 1612311
gauuacagaccuaacaaau

SEQ ID NO: 1612313 - RNA, 19 nt, Artificial Sequence
  Description of Artificial Sequence: Synthetic oligonucleotide
  Sense strand starting at position 2231 of SEQ ID NO: 1560614
uuuguuaggucuguaaucu

SEQ ID NO: 1612314 - RNA, 19 nt, Artificial Sequence
  Description of Artificial Sequence: Synthetic oligonucleotide
  Antisense strand to SEQ ID NO: 1612313
agauuacagaccuaacaaa

SEQ ID NO: 1612315 - RNA, 19 nt, Artificial Sequence
  Description of Artificial Sequence: Synthetic oligonucleotide
  Sense strand starting at position 2232 of SEQ ID NO: 1560614
uuguuaggucuguaaucug

SEQ ID NO: 1612316 - RNA, 19 nt, Artificial Sequence
  Description of Artificial Sequence: Synthetic oligonucleotide
  Antisense strand to SEQ ID NO: 1612315
cagauuacagaccuaacaa

SEQ ID NO: 1612317 - RNA, 19 nt, Artificial Sequence
  Description of Artificial Sequence: Synthetic oligonucleotide
  Sense strand starting at position 2235 of SEQ ID NO: 1560614
uuaggucuguaaucugauu

SEQ ID NO: 1612318 - RNA, 19 nt, Artificial Sequence
  Description of Artificial Sequence: Synthetic oligonucleotide
  Antisense strand to SEQ ID NO: 1612317
aaucagauuacagaccuaa

SEQ ID NO: 1612319 - RNA, 19 nt, Artificial Sequence
  Description of Artificial Sequence: Synthetic oligonucleotide
  Sense strand starting at position 2264 of SEQ ID NO: 1560614
ugagcugauuuguauuuaa

SEQ ID NO: 1612320 - RNA, 19 nt, Artificial Sequence
  Description of Artificial Sequence: Synthetic oligonucleotide
  Antisense strand to SEQ ID NO: 1612319
uuaaauacaaaucagcuca

SEQ ID NO: 1612321 - RNA, 19 nt, Artificial Sequence
  Description of Artificial Sequence: Synthetic oligonucleotide
  Sense strand starting at position 2288 of SEQ ID NO: 1560614
gauuaucauccaggguuua

SEQ ID NO: 1612322 - RNA, 19 nt, Artificial Sequence
  Description of Artificial Sequence: Synthetic oligonucleotide
  Antisense strand to SEQ ID NO: 1612321
uaaacccuggaugauaauc

SEQ ID NO: 1612323 - RNA, 19 nt, Artificial Sequence
  Description of Artificial Sequence: Synthetic oligonucleotide
  Sense strand starting at position 2289 of SEQ ID NO: 1560614
auuaucauccaggguuuau

SEQ ID NO: 1612324 - RNA, 19 nt, Artificial Sequence
  Description of Artificial Sequence: Synthetic oligonucleotide
  Antisense strand to SEQ ID NO: 1612323
auaaacccuggaugauaau

SEQ ID NO: 1612325 - RNA, 19 nt, Artificial Sequence
  Description of Artificial Sequence: Synthetic oligonucleotide
  Sense strand starting at position 2300 of SEQ ID NO: 1560614
ggguuuaugugacuuugga

SEQ ID NO: 1612326 - RNA, 19 nt, Artificial Sequence
  Description of Artificial Sequence: Synthetic oligonucleotide
  Antisense strand to SEQ ID NO: 1612325
uccaaagucacauaaaccc

SEQ ID NO: 1612327 - RNA, 19 nt, Artificial Sequence
  Description of Artificial Sequence: Synthetic oligonucleotide
  Sense strand starting at position 2304 of SEQ ID NO: 1560614
uuaugugacuuuggacaug

SEQ ID NO: 1612328 - RNA, 19 nt, Artificial Sequence
  Description of Artificial Sequence: Synthetic oligonucleotide
  Antisense strand to SEQ ID NO: 1612327
cauguccaaagucacauaa

SEQ ID NO: 1612329 - RNA, 19 nt, Artificial Sequence
  Description of Artificial Sequence: Synthetic oligonucleotide
  Sense strand starting at position 2309 of SEQ ID NO: 1560614
ugacuuuggacaugaaugu

SEQ ID NO: 1612330 - RNA, 19 nt, Artificial Sequence
  Description of Artificial Sequence: Synthetic oligonucleotide
  Antisense strand to SEQ ID NO: 1612329
acauucauguccaaaguca

SEQ ID NO: 1612331 - RNA, 19 nt, Artificial Sequence
  Description of Artificial Sequence: Synthetic oligonucleotide
  Sense strand starting at position 2400 of SEQ ID NO: 1560614
gaggcucagccauggugaa

SEQ ID NO: 1612332 - RNA, 19 nt, Artificial Sequence
  Description of Artificial Sequence: Synthetic oligonucleotide
  Antisense strand to SEQ ID NO: 1612331
uucaccauggcugagccuc

SEQ ID NO: 1612333 - RNA, 19 nt, Artificial Sequence
  Description of Artificial Sequence: Synthetic oligonucleotide
  Sense strand starting at position 2401 of SEQ ID NO: 1560614
aggcucagccauggugaau

SEQ ID NO: 1612334 - RNA, 19 nt, Artificial Sequence
  Description of Artificial Sequence: Synthetic oligonucleotide
  Antisense strand to SEQ ID NO: 1612333
auucaccauggcugagccu

SEQ ID NO: 1612335 - RNA, 19 nt, Artificial Sequence
  Description of Artificial Sequence: Synthetic oligonucleotide
  Sense strand starting at position 2534 of SEQ ID NO: 1560614
ccaugaaauucuccuugug

SEQ ID NO: 1612336 - RNA, 19 nt, Artificial Sequence
  Description of Artificial Sequence: Synthetic oligonucleotide
  Antisense strand to SEQ ID NO: 1612335
cacaaggagaauuucaugg

SEQ ID NO: 1612337 - RNA, 19 nt, Artificial Sequence
  Description of Artificial Sequence: Synthetic oligonucleotide
  Sense strand starting at position 2536 of SEQ ID NO: 1560614
augaaauucuccuugugau

SEQ ID NO: 1612338 - RNA, 19 nt, Artificial Sequence
  Description of Artificial Sequence: Synthetic oligonucleotide
  Antisense strand to SEQ ID NO: 1612337
aucacaaggagaauuucau

SEQ ID NO: 1612339 - RNA, 19 nt, Artificial Sequence
  Description of Artificial Sequence: Synthetic oligonucleotide
  Sense strand starting at position 2537 of SEQ ID NO: 1560614
ugaaauucuccuugugaua

SEQ ID NO: 1612340 - RNA, 19 nt, Artificial Sequence
  Description of Artificial Sequence: Synthetic oligonucleotide
  Antisense strand to SEQ ID NO: 1612339
uaucacaaggagaauuuca

SEQ ID NO: 1612341 - RNA, 19 nt, Artificial Sequence
  Description of Artificial Sequence: Synthetic oligonucleotide
  Sense strand starting at position 2549 of SEQ ID NO: 1560614
ugugauacaucugaaauau

SEQ ID NO: 1612342 - RNA, 19 nt, Artificial Sequence
  Description of Artificial Sequence: Synthetic oligonucleotide
  Antisense strand to SEQ ID NO: 1612341
auauuucagauguaucaca

SEQ ID NO: 1612343 - RNA, 19 nt, Artificial Sequence
  Description of Artificial Sequence: Synthetic oligonucleotide
  Sense strand starting at position 2978 of SEQ ID NO: 1560614
gcacaaucuugagcugaca

SEQ ID NO: 1612344 - RNA, 19 nt, Artificial Sequence
  Description of Artificial Sequence: Synthetic oligonucleotide
  Antisense strand to SEQ ID NO: 1612343
ugucagcucaagauugugc

SEQ ID NO: 1612345 - RNA, 19 nt, Artificial Sequence
  Description of Artificial Sequence: Synthetic oligonucleotide
  Sense strand starting at position 3146 of SEQ ID NO: 1560614
cacagacaguuguugaaau

SEQ ID NO: 1612346 - RNA, 19 nt, Artificial Sequence
  Description of Artificial Sequence: Synthetic oligonucleotide
  Antisense strand to SEQ ID NO: 1612345
auuucaacaacugucugug

SEQ ID NO: 1612347 - RNA, 19 nt, Artificial Sequence
  Description of Artificial Sequence: Synthetic oligonucleotide
  Sense strand starting at position 3154 of SEQ ID NO: 1560614
guuguugaaaugcauuaga

SEQ ID NO: 1612348 - RNA, 19 nt, Artificial Sequence
  Description of Artificial Sequence: Synthetic oligonucleotide
  Antisense strand to SEQ ID NO: 1612347
ucuaaugcauuucaacaac

SEQ ID NO: 1612349 - RNA, 19 nt, Artificial Sequence
  Description of Artificial Sequence: Synthetic oligonucleotide
  Sense strand starting at position 3165 of SEQ ID NO: 1560614
gcauuagacagacauugug

SEQ ID NO: 1612350 - RNA, 19 nt, Artificial Sequence
  Description of Artificial Sequence: Synthetic oligonucleotide
  Antisense strand to SEQ ID NO: 1612349
cacaaugucugucuaaugc

SEQ ID NO: 1612351 - RNA, 19 nt, Artificial Sequence
  Description of Artificial Sequence: Synthetic oligonucleotide
  Sense strand starting at position 3174 of SEQ ID NO: 1560614
agacauugugaaggugaau

SEQ ID NO: 1612352 - RNA, 19 nt, Artificial Sequence
  Description of Artificial Sequence: Synthetic oligonucleotide
  Antisense strand to SEQ ID NO: 1612351
auucaccuucacaaugucu

SEQ ID NO: 1612353 - RNA, 19 nt, Artificial Sequence
  Description of Artificial Sequence: Synthetic oligonucleotide
  Sense strand starting at position 3256 of SEQ ID NO: 1560614
ugcuaucauugcuaccgaa

SEQ ID NO: 1612354 - RNA, 19 nt, Artificial Sequence
  Description of Artificial Sequence: Synthetic oligonucleotide
  Antisense strand to SEQ ID NO: 1612353
uucgguagcaaugauagca

SEQ ID NO: 1612355 - RNA, 19 nt, Artificial Sequence
  Description of Artificial Sequence: Synthetic oligonucleotide
  Sense strand starting at position 3632 of SEQ ID NO: 1560614
aacgucguuagaugaaaca

SEQ ID NO: 1612356 - RNA, 19 nt, Artificial Sequence
  Description of Artificial Sequence: Synthetic oligonucleotide
  Antisense strand to SEQ ID NO: 1612355
uguuucaucuaacgacguu

SEQ ID NO: 1612357 - RNA, 19 nt, Artificial Sequence
  Description of Artificial Sequence: Synthetic oligonucleotide
  Sense strand starting at position 3859 of SEQ ID NO: 1560614
gccagugucagaggagaaa

SEQ ID NO: 1612358 - RNA, 19 nt, Artificial Sequence
  Description of Artificial Sequence: Synthetic oligonucleotide
  Antisense strand to SEQ ID NO: 1612357
uuucuccucugacacuggc

SEQ ID NO: 1612359 - RNA, 19 nt, Artificial Sequence
  Description of Artificial Sequence: Synthetic oligonucleotide
  Sense strand starting at position 3954 of SEQ ID NO: 1560614
guaggacugugaaggugua

SEQ ID NO: 1612360 - RNA, 19 nt, Artificial Sequence
  Description of Artificial Sequence: Synthetic oligonucleotide
  Antisense strand to SEQ ID NO: 1612359
uacaccuucacaguccuac

SEQ ID NO: 1612361 - RNA, 19 nt, Artificial Sequence
  Description of Artificial Sequence: Synthetic oligonucleotide
  Sense strand starting at position 435 of SEQ ID NO: 1560615
uacagaguguaucugaugu

SEQ ID NO: 1612362 - RNA, 19 nt, Artificial Sequence
  Description of Artificial Sequence: Synthetic oligonucleotide
  Antisense strand to SEQ ID NO: 1612361
acaucagauacacucugua

SEQ ID NO: 1612363 - RNA, 19 nt, Artificial Sequence
  Description of Artificial Sequence: Synthetic oligonucleotide
  Sense strand starting at position 448 of SEQ ID NO: 1560615
ugauguagccgacaucaga

SEQ ID NO: 1612364 - RNA, 19 nt, Artificial Sequence
  Description of Artificial Sequence: Synthetic oligonucleotide
  Antisense strand to SEQ ID NO: 1612363
ucugaugucggcuacauca

SEQ ID NO: 1612365 - RNA, 19 nt, Artificial Sequence
  Description of Artificial Sequence: Synthetic oligonucleotide
  Sense strand starting at position 924 of SEQ ID NO: 1560615
gguuguguuggugugaguu

SEQ ID NO: 1612366 - RNA, 19 nt, Artificial Sequence
  Description of Artificial Sequence: Synthetic oligonucleotide
  Antisense strand to SEQ ID NO: 1612365
aacucacaccaacacaacc

SEQ ID NO: 1612367 - RNA, 19 nt, Artificial Sequence
  Description of Artificial Sequence: Synthetic oligonucleotide
  Sense strand starting at position 1311 of SEQ ID NO: 1560615
ugauaucgcccugcauguu

SEQ ID NO: 1612368 - RNA, 19 nt, Artificial Sequence
  Description of Artificial Sequence: Synthetic oligonucleotide
  Antisense strand to SEQ ID NO: 1612367
aacaugcagggcgauauca

SEQ ID NO: 1612369 - RNA, 19 nt, Artificial Sequence
  Description of Artificial Sequence: Synthetic oligonucleotide
  Sense strand starting at position 1348 of SEQ ID NO: 1560615
uggagaguuugaccuuguu

SEQ ID NO: 1612370 - RNA, 19 nt, Artificial Sequence
  Description of Artificial Sequence: Synthetic oligonucleotide
  Antisense strand to SEQ ID NO: 1612369
aacaaggucaaacucucca

SEQ ID NO: 1612371 - RNA, 19 nt, Artificial Sequence
  Description of Artificial Sequence: Synthetic oligonucleotide
  Sense strand starting at position 1411 of SEQ ID NO: 1560615
ccucuuuauccagacggua

SEQ ID NO: 1612372 - RNA, 19 nt, Artificial Sequence
  Description of Artificial Sequence: Synthetic oligonucleotide
  Antisense strand to SEQ ID NO: 1612371
uaccgucuggauaaagagg

SEQ ID NO: 1612373 - RNA, 19 nt, Artificial Sequence
  Description of Artificial Sequence: Synthetic oligonucleotide
  Sense strand starting at position 1507 of SEQ ID NO: 1560615
acaggauggguuugaguag

SEQ ID NO: 1612374 - RNA, 19 nt, Artificial Sequence
  Description of Artificial Sequence: Synthetic oligonucleotide
  Antisense strand to SEQ ID NO: 1612373
cuacucaaacccauccugu

SEQ ID NO: 1612375 - RNA, 19 nt, Artificial Sequence
  Description of Artificial Sequence: Synthetic oligonucleotide
  Sense strand starting at position 1510 of SEQ ID NO: 1560615
ggauggguuugaguagguu

SEQ ID NO: 1612376 - RNA, 19 nt, Artificial Sequence
  Description of Artificial Sequence: Synthetic oligonucleotide
  Antisense strand to SEQ ID NO: 1612375
aaccuacucaaacccaucc

SEQ ID NO: 1612377 - RNA, 19 nt, Artificial Sequence
  Description of Artificial Sequence: Synthetic oligonucleotide
  Sense strand starting at position 1743 of SEQ ID NO: 1560615
ggcucagcccuggaagaga

SEQ ID NO: 1612378 - RNA, 19 nt, Artificial Sequence
  Description of Artificial Sequence: Synthetic oligonucleotide
  Antisense strand to SEQ ID NO: 1612377
ucucuuccagggcugagcc

SEQ ID NO: 1612379 - RNA, 19 nt, Artificial Sequence
  Description of Artificial Sequence: Synthetic oligonucleotide
  Sense strand starting at position 1829 of SEQ ID NO: 1560615
gcccuaauugacuaaggca

SEQ ID NO: 1612380 - RNA, 19 nt, Artificial Sequence
  Description of Artificial Sequence: Synthetic oligonucleotide
  Antisense strand to SEQ ID NO: 1612379
ugccuuagucaauuagggc

SEQ ID NO: 1612381 - RNA, 19 nt, Artificial Sequence
  Description of Artificial Sequence: Synthetic oligonucleotide
  Sense strand starting at position 2150 of SEQ ID NO: 1560615
aggcucucugccgauauuu

SEQ ID NO: 1612382 - RNA, 19 nt, Artificial Sequence
  Description of Artificial Sequence: Synthetic oligonucleotide
  Antisense strand to SEQ ID NO: 1612381
aaauaucggcagagagccu

SEQ ID NO: 1612383 - RNA, 19 nt, Artificial Sequence
  Description of Artificial Sequence: Synthetic oligonucleotide
  Sense strand starting at position 2195 of SEQ ID NO: 1560615
ggucguuaagaaggacauu

SEQ ID NO: 1612384 - RNA, 19 nt, Artificial Sequence
  Description of Artificial Sequence: Synthetic oligonucleotide
  Antisense strand to SEQ ID NO: 1612383
aauguccuucuuaacgacc

SEQ ID NO: 1612385 - RNA, 19 nt, Artificial Sequence
  Description of Artificial Sequence: Synthetic oligonucleotide
  Sense strand starting at position 2583 of SEQ ID NO: 1560615
uagggcuccaggugaaagu

SEQ ID NO: 1612386 - RNA, 19 nt, Artificial Sequence
  Description of Artificial Sequence: Synthetic oligonucleotide
  Antisense strand to SEQ ID NO: 1612385
acuuucaccuggagcccua

SEQ ID NO: 1612387 - RNA, 19 nt, Artificial Sequence
  Description of Artificial Sequence: Synthetic oligonucleotide
  Sense strand starting at position 2752 of SEQ ID NO: 1560615
ccaggcucucuagagauau

SEQ ID NO: 1612388 - RNA, 19 nt, Artificial Sequence
  Description of Artificial Sequence: Synthetic oligonucleotide
  Antisense strand to SEQ ID NO: 1612387
auaucucuagagagccugg

SEQ ID NO: 1612389 - RNA, 19 nt, Artificial Sequence
  Description of Artificial Sequence: Synthetic oligonucleotide
  Sense strand starting at position 3067 of SEQ ID NO: 1560615
ggcagaugcuaaguuugga

SEQ ID NO: 1612390 - RNA, 19 nt, Artificial Sequence
  Description of Artificial Sequence: Synthetic oligonucleotide
  Antisense strand to SEQ ID NO: 1612389
uccaaacuuagcaucugcc

SEQ ID NO: 1612391 - RNA, 19 nt, Artificial Sequence
  Description of Artificial Sequence: Synthetic oligonucleotide
  Sense strand starting at position 3070 of SEQ ID NO: 1560615
agaugcuaaguuuggaaga

SEQ ID NO: 1612392 - RNA, 19 nt, Artificial Sequence
  Description of Artificial Sequence: Synthetic oligonucleotide
  Antisense strand to SEQ ID NO: 1612391
ucuuccaaacuuagcaucu

SEQ ID NO: 1612393 - RNA, 19 nt, Artificial Sequence
  Description of Artificial Sequence: Synthetic oligonucleotide
  Sense strand starting at position 3085 of SEQ ID NO: 1560615
aagaguugaugcuccugga

SEQ ID NO: 1612394 - RNA, 19 nt, Artificial Sequence
  Description of Artificial Sequence: Synthetic oligonucleotide
  Antisense strand to SEQ ID NO: 1612393
uccaggagcaucaacucuu

SEQ ID NO: 1612395 - RNA, 19 nt, Artificial Sequence
  Description of Artificial Sequence: Synthetic oligonucleotide
  Sense strand starting at position 3137 of SEQ ID NO: 1560615
ccugauuucugagucgucu

SEQ ID NO: 1612396 - RNA, 19 nt, Artificial Sequence
  Description of Artificial Sequence: Synthetic oligonucleotide
  Antisense strand to SEQ ID NO: 1612395
agacgacucagaaaucagg

SEQ ID NO: 1612397 - RNA, 19 nt, Artificial Sequence
  Description of Artificial Sequence: Synthetic oligonucleotide
  Sense strand starting at position 3139 of SEQ ID NO: 1560615
ugauuucugagucgucucu

SEQ ID NO: 1612398 - RNA, 19 nt, Artificial Sequence
  Description of Artificial Sequence: Synthetic oligonucleotide
  Antisense strand to SEQ ID NO: 1612397
agagacgacucagaaauca

SEQ ID NO: 1612399 - RNA, 19 nt, Artificial Sequence
  Description of Artificial Sequence: Synthetic oligonucleotide
  Sense strand starting at position 3145 of SEQ ID NO: 1560615
cugagucgucucugggaga

SEQ ID NO: 1612400 - RNA, 19 nt, Artificial Sequence
  Description of Artificial Sequence: Synthetic oligonucleotide
  Antisense strand to SEQ ID NO: 1612399
ucucccagagacgacucag

SEQ ID NO: 1612401 - RNA, 19 nt, Artificial Sequence
  Description of Artificial Sequence: Synthetic oligonucleotide
  Sense strand starting at position 3150 of SEQ ID NO: 1560615
ucgucucugggagaaaugu

SEQ ID NO: 1612402 - RNA, 19 nt, Artificial Sequence
  Description of Artificial Sequence: Synthetic oligonucleotide
  Antisense strand to SEQ ID NO: 1612401
acauuucucccagagacga

SEQ ID NO: 1612403 - RNA, 19 nt, Artificial Sequence
  Description of Artificial Sequence: Synthetic oligonucleotide
  Sense strand starting at position 3159 of SEQ ID NO: 1560615
ggagaaauguucuuuguaa

SEQ ID NO: 1612404 - RNA, 19 nt, Artificial Sequence
  Description of Artificial Sequence: Synthetic oligonucleotide
  Antisense strand to SEQ ID NO: 1612403
uuacaaagaacauuucucc

SEQ ID NO: 1612405 - RNA, 19 nt, Artificial Sequence
  Description of Artificial Sequence: Synthetic oligonucleotide
  Sense strand starting at position 3161 of SEQ ID NO: 1560615
agaaauguucuuuguaaga

SEQ ID NO: 1612406 - RNA, 19 nt, Artificial Sequence
  Description of Artificial Sequence: Synthetic oligonucleotide
  Antisense strand to SEQ ID NO: 1612405
ucuuacaaagaacauuucu

SEQ ID NO: 1612407 - RNA, 19 nt, Artificial Sequence
  Description of Artificial Sequence: Synthetic oligonucleotide
  Sense strand starting at position 3201 of SEQ ID NO: 1560615
gacagcaugcaguguauuu

SEQ ID NO: 1612408 - RNA, 19 nt, Artificial Sequence
  Description of Artificial Sequence: Synthetic oligonucleotide
  Antisense strand to SEQ ID NO: 1612407
aaauacacugcaugcuguc

SEQ ID NO: 1612409 - RNA, 19 nt, Artificial Sequence
  Description of Artificial Sequence: Synthetic oligonucleotide
  Sense strand starting at position 3210 of SEQ ID NO: 1560615
caguguauuugagaagaga

SEQ ID NO: 1612410 - RNA, 19 nt, Artificial Sequence
  Description of Artificial Sequence: Synthetic oligonucleotide
  Antisense strand to SEQ ID NO: 1612409
ucucuucucaaauacacug

SEQ ID NO: 1612411 - RNA, 19 nt, Artificial Sequence
  Description of Artificial Sequence: Synthetic oligonucleotide
  Sense strand starting at position 3235 of SEQ ID NO: 1560615
acuagaaauuauguaggca

SEQ ID NO: 1612412 - RNA, 19 nt, Artificial Sequence
  Description of Artificial Sequence: Synthetic oligonucleotide
  Antisense strand to SEQ ID NO: 1612411
ugccuacauaauuucuagu

SEQ ID NO: 1612413 - RNA, 19 nt, Artificial Sequence
  Description of Artificial Sequence: Synthetic oligonucleotide
  Sense strand starting at position 3239 of SEQ ID NO: 1560615
gaaauuauguaggcagaug

SEQ ID NO: 1612414 - RNA, 19 nt, Artificial Sequence
  Description of Artificial Sequence: Synthetic oligonucleotide
  Antisense strand to SEQ ID NO: 1612413
caucugccuacauaauuuc

SEQ ID NO: 1612415 - RNA, 19 nt, Artificial Sequence
  Description of Artificial Sequence: Synthetic oligonucleotide
  Sense strand starting at position 3488 of SEQ ID NO: 1560615
aaaugucugcucuauggau

SEQ ID NO: 1612416 - RNA, 19 nt, Artificial Sequence
  Description of Artificial Sequence: Synthetic oligonucleotide
  Antisense strand to SEQ ID NO: 1612415
auccauagagcagacauuu

SEQ ID NO: 1612417 - RNA, 19 nt, Artificial Sequence
  Description of Artificial Sequence: Synthetic oligonucleotide
  Sense strand starting at position 3501 of SEQ ID NO: 1560615
auggauucuucuuugaauu

SEQ ID NO: 1612418 - RNA, 19 nt, Artificial Sequence
  Description of Artificial Sequence: Synthetic oligonucleotide
  Antisense strand to SEQ ID NO: 1612417
aauucaaagaagaauccau

SEQ ID NO: 1612419 - RNA, 19 nt, Artificial Sequence
  Description of Artificial Sequence: Synthetic oligonucleotide
  Sense strand starting at position 3502 of SEQ ID NO: 1560615
uggauucuucuuugaauuc

SEQ ID NO: 1612420 - RNA, 19 nt, Artificial Sequence
  Description of Artificial Sequence: Synthetic oligonucleotide
  Antisense strand to SEQ ID NO: 1612419
gaauucaaagaagaaucca

SEQ ID NO: 1612421 - RNA, 19 nt, Artificial Sequence
  Description of Artificial Sequence: Synthetic oligonucleotide
  Sense strand starting at position 3546 of SEQ ID NO: 1560615
cguuaauaguaagcuaaau

SEQ ID NO: 1612422 - RNA, 19 nt, Artificial Sequence
  Description of Artificial Sequence: Synthetic oligonucleotide
  Antisense strand to SEQ ID NO: 1612421
auuuagcuuacuauuaacg

SEQ ID NO: 1612423 - RNA, 19 nt, Artificial Sequence
  Description of Artificial Sequence: Synthetic oligonucleotide
  Sense strand starting at position 3653 of SEQ ID NO: 1560615
caagaaugcuggucauaag

SEQ ID NO: 1612424 - RNA, 19 nt, Artificial Sequence
  Description of Artificial Sequence: Synthetic oligonucleotide
  Antisense strand to SEQ ID NO: 1612423
cuuaugaccagcauucuug

SEQ ID NO: 1612425 - RNA, 19 nt, Artificial Sequence
  Description of Artificial Sequence: Synthetic oligonucleotide
  Sense strand starting at position 3661 of SEQ ID NO: 1560615
cuggucauaagcugugaaa

SEQ ID NO: 1612426 - RNA, 19 nt, Artificial Sequence
  Description of Artificial Sequence: Synthetic oligonucleotide
  Antisense strand to SEQ ID NO: 1612425
uuucacagcuuaugaccag

SEQ ID NO: 1612427 - RNA, 19 nt, Artificial Sequence
  Description of Artificial Sequence: Synthetic oligonucleotide
  Sense strand starting at position 3680 of SEQ ID NO: 1560615
aucuaugucuugucuuaau

SEQ ID NO: 1612428 - RNA, 19 nt, Artificial Sequence
  Description of Artificial Sequence: Synthetic oligonucleotide
  Antisense strand to SEQ ID NO: 1612427
auuaagacaagacauagau

SEQ ID NO: 1612429 - RNA, 19 nt, Artificial Sequence
  Description of Artificial Sequence: Synthetic oligonucleotide
  Sense strand starting at position 3749 of SEQ ID NO: 1560615
ggcaaaccugcuuaagacu

SEQ ID NO: 1612430 - RNA, 19 nt, Artificial Sequence
  Description of Artificial Sequence: Synthetic oligonucleotide
  Antisense strand to SEQ ID NO: 1612429
agucuuaagcagguuugcc

SEQ ID NO: 1612431 - RNA, 19 nt, Artificial Sequence
  Description of Artificial Sequence: Synthetic oligonucleotide
  Sense strand starting at position 3796 of SEQ ID NO: 1560615
gccauauaggcauaauggu

SEQ ID NO: 1612432 - RNA, 19 nt, Artificial Sequence
  Description of Artificial Sequence: Synthetic oligonucleotide
  Antisense strand to SEQ ID NO: 1612431
accauuaugccuauauggc

SEQ ID NO: 1612433 - RNA, 19 nt, Artificial Sequence
  Description of Artificial Sequence: Synthetic oligonucleotide
  Sense strand starting at position 3805 of SEQ ID NO: 1560615
gcauaauggucagucacag

SEQ ID NO: 1612434 - RNA, 19 nt, Artificial Sequence
  Description of Artificial Sequence: Synthetic oligonucleotide
  Antisense strand to SEQ ID NO: 1612433
cugugacugaccauuaugc

SEQ ID NO: 1612435 - RNA, 19 nt, Artificial Sequence
  Description of Artificial Sequence: Synthetic oligonucleotide
  Sense strand starting at position 3873 of SEQ ID NO: 1560615
acucaucaacagugagcua

SEQ ID NO: 1612436 - RNA, 19 nt, Artificial Sequence
  Description of Artificial Sequence: Synthetic oligonucleotide
  Antisense strand to SEQ ID NO: 1612435
uagcucacuguugaugagu

SEQ ID NO: 1612437 - RNA, 19 nt, Artificial Sequence
  Description of Artificial Sequence: Synthetic oligonucleotide
  Sense strand starting at position 3900 of SEQ ID NO: 1560615
gcggaaauggccuagucaa

SEQ ID NO: 1612438 - RNA, 19 nt, Artificial Sequence
  Description of Artificial Sequence: Synthetic oligonucleotide
  Antisense strand to SEQ ID NO: 1612437
uugacuaggccauuuccgc

SEQ ID NO: 1612439 - RNA, 19 nt, Artificial Sequence
  Description of Artificial Sequence: Synthetic oligonucleotide
  Sense strand starting at position 3953 of SEQ ID NO: 1560615
accagcuuaucucuuagga

SEQ ID NO: 1612440 - RNA, 19 nt, Artificial Sequence
  Description of Artificial Sequence: Synthetic oligonucleotide
  Antisense strand to SEQ ID NO: 1612439
uccuaagagauaagcuggu

SEQ ID NO: 1612441 - RNA, 19 nt, Artificial Sequence
  Description of Artificial Sequence: Synthetic oligonucleotide
  Sense strand starting at position 135 of SEQ ID NO: 1560616
cccugaauuugugucccua

SEQ ID NO: 1612442 - RNA, 19 nt, Artificial Sequence
  Description of Artificial Sequence: Synthetic oligonucleotide
  Antisense strand to SEQ ID NO: 1612441
uagggacacaaauucaggg

SEQ ID NO: 1612443 - RNA, 19 nt, Artificial Sequence
  Description of Artificial Sequence: Synthetic oligonucleotide
  Sense strand starting at position 151 of SEQ ID NO: 1560616
cuaggauuucuguguucuc

SEQ ID NO: 1612444 - RNA, 19 nt, Artificial Sequence
  Description of Artificial Sequence: Synthetic oligonucleotide
  Antisense strand to SEQ ID NO: 1612443
gagaacacagaaauccuag

SEQ ID NO: 1612445 - RNA, 19 nt, Artificial Sequence
  Description of Artificial Sequence: Synthetic oligonucleotide
  Sense strand starting at position 154 of SEQ ID NO: 1560616
ggauuucuguguucuccuu

SEQ ID NO: 1612446 - RNA, 19 nt, Artificial Sequence
  Description of Artificial Sequence: Synthetic oligonucleotide
  Antisense strand to SEQ ID NO: 1612445
aaggagaacacagaaaucc

SEQ ID NO: 1612447 - RNA, 19 nt, Artificial Sequence
  Description of Artificial Sequence: Synthetic oligonucleotide
  Sense strand starting at position 227 of SEQ ID NO: 1560616
cugucuggcuucccugaau

SEQ ID NO: 1612448 - RNA, 19 nt, Artificial Sequence
  Description of Artificial Sequence: Synthetic oligonucleotide
  Antisense strand to SEQ ID NO: 1612447
auucagggaagccagacag

SEQ ID NO: 1612449 - RNA, 19 nt, Artificial Sequence
  Description of Artificial Sequence: Synthetic oligonucleotide
  Sense strand starting at position 230 of SEQ ID NO: 1560616
ucuggcuucccugaauugu

SEQ ID NO: 1612450 - RNA, 19 nt, Artificial Sequence
  Description of Artificial Sequence: Synthetic oligonucleotide
  Antisense strand to SEQ ID NO: 1612449
acaauucagggaagccaga

SEQ ID NO: 1612451 - RNA, 19 nt, Artificial Sequence
  Description of Artificial Sequence: Synthetic oligonucleotide
  Sense strand starting at position 239 of SEQ ID NO: 1560616
ccugaauuguacuagagaa

SEQ ID NO: 1612452 - RNA, 19 nt, Artificial Sequence
  Description of Artificial Sequence: Synthetic oligonucleotide
  Antisense strand to SEQ ID NO: 1612451
uucucuaguacaauucagg

SEQ ID NO: 1612453 - RNA, 19 nt, Artificial Sequence
  Description of Artificial Sequence: Synthetic oligonucleotide
  Sense strand starting at position 262 of SEQ ID NO: 1560616
guggcuuccucaccugaga

SEQ ID NO: 1612454 - RNA, 19 nt, Artificial Sequence
  Description of Artificial Sequence: Synthetic oligonucleotide
  Antisense strand to SEQ ID NO: 1612453
ucucaggugaggaagccac

SEQ ID NO: 1612455 - RNA, 19 nt, Artificial Sequence
  Description of Artificial Sequence: Synthetic oligonucleotide
  Sense strand starting at position 320 of SEQ ID NO: 1560616
gcaggauaugccugcgaga

SEQ ID NO: 1612456 - RNA, 19 nt, Artificial Sequence
  Description of Artificial Sequence: Synthetic oligonucleotide
  Antisense strand to SEQ ID NO: 1612455
ucucgcaggcauauccugc

SEQ ID NO: 1612457 - RNA, 19 nt, Artificial Sequence
  Description of Artificial Sequence: Synthetic oligonucleotide
  Sense strand starting at position 442 of SEQ ID NO: 1560616
gagagcuuguggucuccuu

SEQ ID NO: 1612458 - RNA, 19 nt, Artificial Sequence
  Description of Artificial Sequence: Synthetic oligonucleotide
  Antisense strand to SEQ ID NO: 1612457
aaggagaccacaagcucuc

SEQ ID NO: 1612459 - RNA, 19 nt, Artificial Sequence
  Description of Artificial Sequence: Synthetic oligonucleotide
  Sense strand starting at position 467 of SEQ ID NO: 1560616
ucagaaugaaccugucgaa

SEQ ID NO: 1612460 - RNA, 19 nt, Artificial Sequence
  Description of Artificial Sequence: Synthetic oligonucleotide
  Antisense strand to SEQ ID NO: 1612459
uucgacagguucauucuga

SEQ ID NO: 1612461 - RNA, 19 nt, Artificial Sequence
  Description of Artificial Sequence: Synthetic oligonucleotide
  Sense strand starting at position 483 of SEQ ID NO: 1560616
gaaucucagccgugagcca

SEQ ID NO: 1612462 - RNA, 19 nt, Artificial Sequence
  Description of Artificial Sequence: Synthetic oligonucleotide
  Antisense strand to SEQ ID NO: 1612461
uggcucacggcugagauuc

SEQ ID NO: 1612463 - RNA, 19 nt, Artificial Sequence
  Description of Artificial Sequence: Synthetic oligonucleotide
  Sense strand starting at position 808 of SEQ ID NO: 1560616
ugcucugucauggauggga

SEQ ID NO: 1612464 - RNA, 19 nt, Artificial Sequence
  Description of Artificial Sequence: Synthetic oligonucleotide
  Antisense strand to SEQ ID NO: 1612463
ucccauccaugacagagca

SEQ ID NO: 1612465 - RNA, 19 nt, Artificial Sequence
  Description of Artificial Sequence: Synthetic oligonucleotide
  Sense strand starting at position 883 of SEQ ID NO: 1560616
gggcuucccucuuuaacca

SEQ ID NO: 1612466 - RNA, 19 nt, Artificial Sequence
  Description of Artificial Sequence: Synthetic oligonucleotide
  Antisense strand to SEQ ID NO: 1612465
ugguuaaagagggaagccc

SEQ ID NO: 1612467 - RNA, 19 nt, Artificial Sequence
  Description of Artificial Sequence: Synthetic oligonucleotide
  Sense strand starting at position 890 of SEQ ID NO: 1560616
ccucuuuaaccagacggua

SEQ ID NO: 1612468 - RNA, 19 nt, Artificial Sequence
  Description of Artificial Sequence: Synthetic oligonucleotide
  Antisense strand to SEQ ID NO: 1612467
uaccgucugguuaaagagg

SEQ ID NO: 1612469 - RNA, 19 nt, Artificial Sequence
  Description of Artificial Sequence: Synthetic oligonucleotide
  Sense strand starting at position 1312 of SEQ ID NO: 1560616
ggaguuuccugauagacaa

SEQ ID NO: 1612470 - RNA, 19 nt, Artificial Sequence
  Description of Artificial Sequence: Synthetic oligonucleotide
  Antisense strand to SEQ ID NO: 1612469
uugucuaucaggaaacucc

SEQ ID NO: 1612471 - RNA, 19 nt, Artificial Sequence
  Description of Artificial Sequence: Synthetic oligonucleotide
  Sense strand starting at position 1619 of SEQ ID NO: 1560616
aagugaaguaguugagacu

SEQ ID NO: 1612472 - RNA, 19 nt, Artificial Sequence
  Description of Artificial Sequence: Synthetic oligonucleotide
  Antisense strand to SEQ ID NO: 1612471
agucucaacuacuucacuu

SEQ ID NO: 1612473 - RNA, 19 nt, Artificial Sequence
  Description of Artificial Sequence: Synthetic oligonucleotide
  Sense strand starting at position 1620 of SEQ ID NO: 1560616
agugaaguaguugagacua

SEQ ID NO: 1612474 - RNA, 19 nt, Artificial Sequence
  Description of Artificial Sequence: Synthetic oligonucleotide
  Antisense strand to SEQ ID NO: 1612473
uagucucaacuacuucacu

SEQ ID NO: 1612475 - RNA, 19 nt, Artificial Sequence
  Description of Artificial Sequence: Synthetic oligonucleotide
  Sense strand starting at position 2261 of SEQ ID NO: 1560616
cggaguaauuacuuaggcu

SEQ ID NO: 1612476 - RNA, 19 nt, Artificial Sequence
  Description of Artificial Sequence: Synthetic oligonucleotide
  Antisense strand to SEQ ID NO: 1612475
agccuaaguaauuacuccg

SEQ ID NO: 1612477 - RNA, 19 nt, Artificial Sequence
  Description of Artificial Sequence: Synthetic oligonucleotide
  Sense strand starting at position 2262 of SEQ ID NO: 1560616
ggaguaauuacuuaggcuu

SEQ ID NO: 1612478 - RNA, 19 nt, Artificial Sequence
  Description of Artificial Sequence: Synthetic oligonucleotide
  Antisense strand to SEQ ID NO: 1612477
aagccuaaguaauuacucc

SEQ ID NO: 1612479 - RNA, 19 nt, Artificial Sequence
  Description of Artificial Sequence: Synthetic oligonucleotide
  Sense strand starting at position 2330 of SEQ ID NO: 1560616
ggguacauuacuuagguuu

SEQ ID NO: 1612480 - RNA, 19 nt, Artificial Sequence
  Description of Artificial Sequence: Synthetic oligonucleotide
  Antisense strand to SEQ ID NO: 1612479
aaaccuaaguaauguaccc

SEQ ID NO: 1612481 - RNA, 19 nt, Artificial Sequence
  Description of Artificial Sequence: Synthetic oligonucleotide
  Sense strand starting at position 2704 of SEQ ID NO: 1560616
ggaguugauuucuauguaa

SEQ ID NO: 1612482 - RNA, 19 nt, Artificial Sequence
  Description of Artificial Sequence: Synthetic oligonucleotide
  Antisense strand to SEQ ID NO: 1612481
uuacauagaaaucaacucc

SEQ ID NO: 1612483 - RNA, 19 nt, Artificial Sequence
  Description of Artificial Sequence: Synthetic oligonucleotide
  Sense strand starting at position 2719 of SEQ ID NO: 1560616
guaauucccgauuauuauc

SEQ ID NO: 1612484 - RNA, 19 nt, Artificial Sequence
  Description of Artificial Sequence: Synthetic oligonucleotide
  Antisense strand to SEQ ID NO: 1612483
gauaauaaucgggaauuac

SEQ ID NO: 1612485 - RNA, 19 nt, Artificial Sequence
  Description of Artificial Sequence: Synthetic oligonucleotide
  Sense strand starting at position 2746 of SEQ ID NO: 1560616
gugugaucuugggcaguac

SEQ ID NO: 1612486 - RNA, 19 nt, Artificial Sequence
  Description of Artificial Sequence: Synthetic oligonucleotide
  Antisense strand to SEQ ID NO: 1612485
guacugcccaagaucacac

SEQ ID NO: 1612487 - RNA, 19 nt, Artificial Sequence
  Description of Artificial Sequence: Synthetic oligonucleotide
  Sense strand starting at position 2760 of SEQ ID NO: 1560616
aguacugucucaucucuga

SEQ ID NO: 1612488 - RNA, 19 nt, Artificial Sequence
  Description of Artificial Sequence: Synthetic oligonucleotide
  Antisense strand to SEQ ID NO: 1612487
ucagagaugagacaguacu

SEQ ID NO: 1612489 - RNA, 19 nt, Artificial Sequence
  Description of Artificial Sequence: Synthetic oligonucleotide
  Sense strand starting at position 2866 of SEQ ID NO: 1560616
aggcucaaucacgguuaau

SEQ ID NO: 1612490 - RNA, 19 nt, Artificial Sequence
  Description of Artificial Sequence: Synthetic oligonucleotide
  Antisense strand to SEQ ID NO: 1612489
auuaaccgugauugagccu

SEQ ID NO: 1612491 - RNA, 19 nt, Artificial Sequence
  Description of Artificial Sequence: Synthetic oligonucleotide
  Sense strand starting at position 2875 of SEQ ID NO: 1560616
cacgguuaaugucuagacu

SEQ ID NO: 1612492 - RNA, 19 nt, Artificial Sequence
  Description of Artificial Sequence: Synthetic oligonucleotide
  Antisense strand to SEQ ID NO: 1612491
agucuagacauuaaccgug

SEQ ID NO: 1612493 - RNA, 19 nt, Artificial Sequence
  Description of Artificial Sequence: Synthetic oligonucleotide
  Sense strand starting at position 2876 of SEQ ID NO: 1560616
acgguuaaugucuagacua

SEQ ID NO: 1612494 - RNA, 19 nt, Artificial Sequence
  Description of Artificial Sequence: Synthetic oligonucleotide
  Antisense strand to SEQ ID NO: 1612493
uagucuagacauuaaccgu

SEQ ID NO: 1612495 - RNA, 19 nt, Artificial Sequence
  Description of Artificial Sequence: Synthetic oligonucleotide
  Sense strand starting at position 2889 of SEQ ID NO: 1560616
agacuagauuaagacauga

SEQ ID NO: 1612496 - RNA, 19 nt, Artificial Sequence
  Description of Artificial Sequence: Synthetic oligonucleotide
  Antisense strand to SEQ ID NO: 1612495
ucaugucuuaaucuagucu

SEQ ID NO: 1612497 - RNA, 19 nt, Artificial Sequence
  Description of Artificial Sequence: Synthetic oligonucleotide
  Sense strand starting at position 2922 of SEQ ID NO: 1560616
agaggauucugguuucagu

SEQ ID NO: 1612498 - RNA, 19 nt, Artificial Sequence
  Description of Artificial Sequence: Synthetic oligonucleotide
  Antisense strand to SEQ ID NO: 1612497
acugaaaccagaauccucu

SEQ ID NO: 1612499 - RNA, 19 nt, Artificial Sequence
  Description of Artificial Sequence: Synthetic oligonucleotide
  Sense strand starting at position 2938 of SEQ ID NO: 1560616
agucucuaugauuauguca

SEQ ID NO: 1612500 - RNA, 19 nt, Artificial Sequence
  Description of Artificial Sequence: Synthetic oligonucleotide
  Antisense strand to SEQ ID NO: 1612499
ugacauaaucauagagacu

SEQ ID NO: 1612501 - RNA, 19 nt, Artificial Sequence
  Description of Artificial Sequence: Synthetic oligonucleotide
  Sense strand starting at position 3169 of SEQ ID NO: 1560616
acuggagguccuugccaga

SEQ ID NO: 1612502 - RNA, 19 nt, Artificial Sequence
  Description of Artificial Sequence: Synthetic oligonucleotide
  Antisense strand to SEQ ID NO: 1612501
ucuggcaaggaccuccagu

SEQ ID NO: 1612503 - RNA, 19 nt, Artificial Sequence
  Description of Artificial Sequence: Synthetic oligonucleotide
  Sense strand starting at position 3174 of SEQ ID NO: 1560616
agguccuugccagagcaau

SEQ ID NO: 1612504 - RNA, 19 nt, Artificial Sequence
  Description of Artificial Sequence: Synthetic oligonucleotide
  Antisense strand to SEQ ID NO: 1612503
auugcucuggcaaggaccu

SEQ ID NO: 1612505 - RNA, 19 nt, Artificial Sequence
  Description of Artificial Sequence: Synthetic oligonucleotide
  Sense strand starting at position 3242 of SEQ ID NO: 1560616
gaaauuauuucuguucgcu

SEQ ID NO: 1612506 - RNA, 19 nt, Artificial Sequence
  Description of Artificial Sequence: Synthetic oligonucleotide
  Antisense strand to SEQ ID NO: 1612505
agcgaacagaaauaauuuc

SEQ ID NO: 1612507 - RNA, 19 nt, Artificial Sequence
  Description of Artificial Sequence: Synthetic oligonucleotide
  Sense strand starting at position 3244 of SEQ ID NO: 1560616
aauuauuucuguucgcuga

SEQ ID NO: 1612508 - RNA, 19 nt, Artificial Sequence
  Description of Artificial Sequence: Synthetic oligonucleotide
  Antisense strand to SEQ ID NO: 1612507
ucagcgaacagaaauaauu

SEQ ID NO: 1612509 - RNA, 19 nt, Artificial Sequence
  Description of Artificial Sequence: Synthetic oligonucleotide
  Sense strand starting at position 3245 of SEQ ID NO: 1560616
auuauuucuguucgcugau

SEQ ID NO: 1612510 - RNA, 19 nt, Artificial Sequence
  Description of Artificial Sequence: Synthetic oligonucleotide
  Antisense strand to SEQ ID NO: 1612509
aucagcgaacagaaauaau

SEQ ID NO: 1612511 - RNA, 19 nt, Artificial Sequence
  Description of Artificial Sequence: Synthetic oligonucleotide
  Sense strand starting at position 3247 of SEQ ID NO: 1560616
uauuucuguucgcugauga

SEQ ID NO: 1612512 - RNA, 19 nt, Artificial Sequence
  Description of Artificial Sequence: Synthetic oligonucleotide
  Antisense strand to SEQ ID NO: 1612511
ucaucagcgaacagaaaua

SEQ ID NO: 1612513 - RNA, 19 nt, Artificial Sequence
  Description of Artificial Sequence: Synthetic oligonucleotide
  Sense strand starting at position 3248 of SEQ ID NO: 1560616
auuucuguucgcugaugau

SEQ ID NO: 1612514 - RNA, 19 nt, Artificial Sequence
  Description of Artificial Sequence: Synthetic oligonucleotide
  Antisense strand to SEQ ID NO: 1612513
aucaucagcgaacagaaau

SEQ ID NO: 1612515 - RNA, 19 nt, Artificial Sequence
  Description of Artificial Sequence: Synthetic oligonucleotide
  Sense strand starting at position 3252 of SEQ ID NO: 1560616
cuguucgcugaugauauua

SEQ ID NO: 1612516 - RNA, 19 nt, Artificial Sequence
  Description of Artificial Sequence: Synthetic oligonucleotide
  Antisense strand to SEQ ID NO: 1612515
uaauaucaucagcgaacag

SEQ ID NO: 1612517 - RNA, 19 nt, Artificial Sequence
  Description of Artificial Sequence: Synthetic oligonucleotide
  Sense strand starting at position 3510 of SEQ ID NO: 1560616
ucaaaccagugaugaaaga

SEQ ID NO: 1612518 - RNA, 19 nt, Artificial Sequence
  Description of Artificial Sequence: Synthetic oligonucleotide
  Antisense strand to SEQ ID NO: 1612517
ucuuucaucacugguuuga

SEQ ID NO: 1612519 - RNA, 19 nt, Artificial Sequence
  Description of Artificial Sequence: Synthetic oligonucleotide
  Sense strand starting at position 3781 of SEQ ID NO: 1560616
aguuuacaaggcuauagua

SEQ ID NO: 1612520 - RNA, 19 nt, Artificial Sequence
  Description of Artificial Sequence: Synthetic oligonucleotide
  Antisense strand to SEQ ID NO: 1612519
uacuauagccuuguaaacu

SEQ ID NO: 1612521 - RNA, 19 nt, Artificial Sequence
  Description of Artificial Sequence: Synthetic oligonucleotide
  Sense strand starting at position 1036 of SEQ ID NO: 1560617
gccacauuggagggucaua

SEQ ID NO: 1612522 - RNA, 19 nt, Artificial Sequence
  Description of Artificial Sequence: Synthetic oligonucleotide
  Antisense strand to SEQ ID NO: 1612521
uaugacccuccaauguggc

SEQ ID NO: 1612523 - RNA, 19 nt, Artificial Sequence
  Description of Artificial Sequence: Synthetic oligonucleotide
  Sense strand starting at position 1105 of SEQ ID NO: 1560617
gcuauaggcuccuaggaga

SEQ ID NO: 1612524 - RNA, 19 nt, Artificial Sequence
  Description of Artificial Sequence: Synthetic oligonucleotide
  Antisense strand to SEQ ID NO: 1612523
ucuccuaggagccuauagc

SEQ ID NO: 1612525 - RNA, 19 nt, Artificial Sequence
  Description of Artificial Sequence: Synthetic oligonucleotide
  Sense strand starting at position 1337 of SEQ ID NO: 1560617
cccgcauggugcucuguua

SEQ ID NO: 1612526 - RNA, 19 nt, Artificial Sequence
  Description of Artificial Sequence: Synthetic oligonucleotide
  Antisense strand to SEQ ID NO: 1612525
uaacagagcaccaugcggg

SEQ ID NO: 1612527 - RNA, 19 nt, Artificial Sequence
  Description of Artificial Sequence: Synthetic oligonucleotide
  Sense strand starting at position 1338 of SEQ ID NO: 1560617
ccgcauggugcucuguuau

SEQ ID NO: 1612528 - RNA, 19 nt, Artificial Sequence
  Description of Artificial Sequence: Synthetic oligonucleotide
  Antisense strand to SEQ ID NO: 1612527
auaacagagcaccaugcgg

SEQ ID NO: 1612529 - RNA, 19 nt, Artificial Sequence
  Description of Artificial Sequence: Synthetic oligonucleotide
  Sense strand starting at position 1346 of SEQ ID NO: 1560617
ugcucuguuauggauggga

SEQ ID NO: 1612530 - RNA, 19 nt, Artificial Sequence
  Description of Artificial Sequence: Synthetic oligonucleotide
  Antisense strand to SEQ ID NO: 1612529
ucccauccauaacagagca

SEQ ID NO: 1612531 - RNA, 19 nt, Artificial Sequence
  Description of Artificial Sequence: Synthetic oligonucleotide
  Sense strand starting at position 1348 of SEQ ID NO: 1560617
cucuguuauggaugggaug

SEQ ID NO: 1612532 - RNA, 19 nt, Artificial Sequence
  Description of Artificial Sequence: Synthetic oligonucleotide
  Antisense strand to SEQ ID NO: 1612531
caucccauccauaacagag

SEQ ID NO: 1612533 - RNA, 19 nt, Artificial Sequence
  Description of Artificial Sequence: Synthetic oligonucleotide
  Sense strand starting at position 1350 of SEQ ID NO: 1560617
cuguuauggaugggaugga

SEQ ID NO: 1612534 - RNA, 19 nt, Artificial Sequence
  Description of Artificial Sequence: Synthetic oligonucleotide
  Antisense strand to SEQ ID NO: 1612533
uccaucccauccauaacag

SEQ ID NO: 1612535 - RNA, 19 nt, Artificial Sequence
  Description of Artificial Sequence: Synthetic oligonucleotide
  Sense strand starting at position 1701 of SEQ ID NO: 1560617
uggcccuugucccuaguaa

SEQ ID NO: 1612536 - RNA, 19 nt, Artificial Sequence
  Description of Artificial Sequence: Synthetic oligonucleotide
  Antisense strand to SEQ ID NO: 1612535
uuacuagggacaagggcca

SEQ ID NO: 1612537 - RNA, 19 nt, Artificial Sequence
  Description of Artificial Sequence: Synthetic oligonucleotide
  Sense strand starting at position 1702 of SEQ ID NO: 1560617
ggcccuugucccuaguaag

SEQ ID NO: 1612538 - RNA, 19 nt, Artificial Sequence
  Description of Artificial Sequence: Synthetic oligonucleotide
  Antisense strand to SEQ ID NO: 1612537
cuuacuagggacaagggcc

SEQ ID NO: 1612539 - RNA, 19 nt, Artificial Sequence
  Description of Artificial Sequence: Synthetic oligonucleotide
  Sense strand starting at position 1705 of SEQ ID NO: 1560617
ccuugucccuaguaaggau

SEQ ID NO: 1612540 - RNA, 19 nt, Artificial Sequence
  Description of Artificial Sequence: Synthetic oligonucleotide
  Antisense strand to SEQ ID NO: 1612539
auccuuacuagggacaagg

SEQ ID NO: 1612541 - RNA, 19 nt, Artificial Sequence
  Description of Artificial Sequence: Synthetic oligonucleotide
  Sense strand starting at position 1799 of SEQ ID NO: 1560617
agaauucccugugaggcau

SEQ ID NO: 1612542 - RNA, 19 nt, Artificial Sequence
  Description of Artificial Sequence: Synthetic oligonucleotide
  Antisense strand to SEQ ID NO: 1612541
augccucacagggaauucu

SEQ ID NO: 1612543 - RNA, 19 nt, Artificial Sequence
  Description of Artificial Sequence: Synthetic oligonucleotide
  Sense strand starting at position 2573 of SEQ ID NO: 1560617
ggagaaaugcagcgucuac

SEQ ID NO: 1612544 - RNA, 19 nt, Artificial Sequence
  Description of Artificial Sequence: Synthetic oligonucleotide
  Antisense strand to SEQ ID NO: 1612543
guagacgcugcauuucucc

SEQ ID NO: 1612545 - RNA, 19 nt, Artificial Sequence
  Description of Artificial Sequence: Synthetic oligonucleotide
  Sense strand starting at position 2993 of SEQ ID NO: 1560617
uuaugagacuuuggacaug

SEQ ID NO: 1612546 - RNA, 19 nt, Artificial Sequence
  Description of Artificial Sequence: Synthetic oligonucleotide
  Antisense strand to SEQ ID NO: 1612545
cauguccaaagucucauaa

SEQ ID NO: 1612547 - RNA, 19 nt, Artificial Sequence
  Description of Artificial Sequence: Synthetic oligonucleotide
  Sense strand starting at position 2998 of SEQ ID NO: 1560617
agacuuuggacaugaaugu

SEQ ID NO: 1612548 - RNA, 19 nt, Artificial Sequence
  Description of Artificial Sequence: Synthetic oligonucleotide
  Antisense strand to SEQ ID NO: 1612547
acauucauguccaaagucu

SEQ ID NO: 1612549 - RNA, 19 nt, Artificial Sequence
  Description of Artificial Sequence: Synthetic oligonucleotide
  Sense strand starting at position 3223 of SEQ ID NO: 1560617
ccaugaaauucuugugaua

SEQ ID NO: 1612550 - RNA, 19 nt, Artificial Sequence
  Description of Artificial Sequence: Synthetic oligonucleotide
  Antisense strand to SEQ ID NO: 1612549
uaucacaagaauuucaugg

SEQ ID NO: 1612551 - RNA, 19 nt, Artificial Sequence
  Description of Artificial Sequence: Synthetic oligonucleotide
  Sense strand starting at position 3225 of SEQ ID NO: 1560617
augaaauucuugugauacg

SEQ ID NO: 1612552 - RNA, 19 nt, Artificial Sequence
  Description of Artificial Sequence: Synthetic oligonucleotide
  Antisense strand to SEQ ID NO: 1612551
cguaucacaagaauuucau

SEQ ID NO: 1612553 - RNA, 19 nt, Artificial Sequence
  Description of Artificial Sequence: Synthetic oligonucleotide
  Sense strand starting at position 3226 of SEQ ID NO: 1560617
ugaaauucuugugauacgu

SEQ ID NO: 1612554 - RNA, 19 nt, Artificial Sequence
  Description of Artificial Sequence: Synthetic oligonucleotide
  Antisense strand to SEQ ID NO: 1612553
acguaucacaagaauuuca

SEQ ID NO: 1612555 - RNA, 19 nt, Artificial Sequence
  Description of Artificial Sequence: Synthetic oligonucleotide
  Sense strand starting at position 3228 of SEQ ID NO: 1560617
aaauucuugugauacgucu

SEQ ID NO: 1612556 - RNA, 19 nt, Artificial Sequence
  Description of Artificial Sequence: Synthetic oligonucleotide
  Antisense strand to SEQ ID NO: 1612555
agacguaucacaagaauuu

SEQ ID NO: 1612557 - RNA, 19 nt, Artificial Sequence
  Description of Artificial Sequence: Synthetic oligonucleotide
  Sense strand starting at position 3230 of SEQ ID NO: 1560617
auucuugugauacgucuga

SEQ ID NO: 1612558 - RNA, 19 nt, Artificial Sequence
  Description of Artificial Sequence: Synthetic oligonucleotide
  Antisense strand to SEQ ID NO: 1612557
ucagacguaucacaagaau

SEQ ID NO: 1612559 - RNA, 19 nt, Artificial Sequence
  Description of Artificial Sequence: Synthetic oligonucleotide
  Sense strand starting at position 3785 of SEQ ID NO: 1560617
ggagcugucccacaggaau

SEQ ID NO: 1612560 - RNA, 19 nt, Artificial Sequence
  Description of Artificial Sequence: Synthetic oligonucleotide
  Antisense strand to SEQ ID NO: 1612559
auuccugugggacagcucc

SEQ ID NO: 1612561 - RNA, 19 nt, Artificial Sequence
  Description of Artificial Sequence: Synthetic oligonucleotide
  Sense strand starting at position 3828 of SEQ ID NO: 1560617
cacagacaguuguugaaau

SEQ ID NO: 1612562 - RNA, 19 nt, Artificial Sequence
  Description of Artificial Sequence: Synthetic oligonucleotide
  Antisense strand to SEQ ID NO: 1612561
auuucaacaacugucugug

SEQ ID NO: 1612563 - RNA, 19 nt, Artificial Sequence
  Description of Artificial Sequence: Synthetic oligonucleotide
  Sense strand starting at position 3852 of SEQ ID NO: 1560617
agacagacgucgugaaggu

SEQ ID NO: 1612564 - RNA, 19 nt, Artificial Sequence
  Description of Artificial Sequence: Synthetic oligonucleotide
  Antisense strand to SEQ ID NO: 1612563
accuucacgacgucugucu

SEQ ID NO: 1612565 - RNA, 19 nt, Artificial Sequence
  Description of Artificial Sequence: Synthetic oligonucleotide
  Sense strand starting at position 3856 of SEQ ID NO: 1560617
agacgucgugaaggugaaa

SEQ ID NO: 1612566 - RNA, 19 nt, Artificial Sequence
  Description of Artificial Sequence: Synthetic oligonucleotide
  Antisense strand to SEQ ID NO: 1612565
uuucaccuucacgacgucu

SEQ ID NO: 1612567 - RNA, 19 nt, Artificial Sequence
  Description of Artificial Sequence: Synthetic oligonucleotide
  Sense strand starting at position 3884 of SEQ ID NO: 1560617
uugaauuaauaccaucgaa

SEQ ID NO: 1612568 - RNA, 19 nt, Artificial Sequence
  Description of Artificial Sequence: Synthetic oligonucleotide
  Antisense strand to SEQ ID NO: 1612567
uucgaugguauuaauucaa

SEQ ID NO: 1612569 - RNA, 19 nt, Artificial Sequence
  Description of Artificial Sequence: Synthetic oligonucleotide
  Sense strand starting at position 605 of SEQ ID NO: 1560618
uguuaaauguggcucagac

SEQ ID NO: 1612570 - RNA, 19 nt, Artificial Sequence
  Description of Artificial Sequence: Synthetic oligonucleotide
  Antisense strand to SEQ ID NO: 1612569
gucugagccacauuuaaca

SEQ ID NO: 1612571 - RNA, 19 nt, Artificial Sequence
  Description of Artificial Sequence: Synthetic oligonucleotide
  Sense strand starting at position 1033 of SEQ ID NO: 1560618
ggagucagauucuaacuca

SEQ ID NO: 1612572 - RNA, 19 nt, Artificial Sequence
  Description of Artificial Sequence: Synthetic oligonucleotide
  Antisense strand to SEQ ID NO: 1612571
ugaguuagaaucugacucc

SEQ ID NO: 1612573 - RNA, 19 nt, Artificial Sequence
  Description of Artificial Sequence: Synthetic oligonucleotide
  Sense strand starting at position 1254 of SEQ ID NO: 1560618
gagaguucccggugaggga

SEQ ID NO: 1612574 - RNA, 19 nt, Artificial Sequence
  Description of Artificial Sequence: Synthetic oligonucleotide
  Antisense strand to SEQ ID NO: 1612573
ucccucaccgggaacucuc

SEQ ID NO: 1612575 - RNA, 19 nt, Artificial Sequence
  Description of Artificial Sequence: Synthetic oligonucleotide
  Sense strand starting at position 1255 of SEQ ID NO: 1560618
agaguucccggugagggau

SEQ ID NO: 1612576 - RNA, 19 nt, Artificial Sequence
  Description of Artificial Sequence: Synthetic oligonucleotide
  Antisense strand to SEQ ID NO: 1612575
aucccucaccgggaacucu

SEQ ID NO: 1612577 - RNA, 19 nt, Artificial Sequence
  Description of Artificial Sequence: Synthetic oligonucleotide
  Sense strand starting at position 1725 of SEQ ID NO: 1560618
cacugagagccaggaugua

SEQ ID NO: 1612578 - RNA, 19 nt, Artificial Sequence
  Description of Artificial Sequence: Synthetic oligonucleotide
  Antisense strand to SEQ ID NO: 1612577
uacauccuggcucucagug

SEQ ID NO: 1612579 - RNA, 19 nt, Artificial Sequence
  Description of Artificial Sequence: Synthetic oligonucleotide
  Sense strand starting at position 2163 of SEQ ID NO: 1560618
ggaacaaaucucugagucu

SEQ ID NO: 1612580 - RNA, 19 nt, Artificial Sequence
  Description of Artificial Sequence: Synthetic oligonucleotide
  Antisense strand to SEQ ID NO: 1612579
agacucagagauuuguucc

SEQ ID NO: 1612581 - RNA, 19 nt, Artificial Sequence
  Description of Artificial Sequence: Synthetic oligonucleotide
  Sense strand starting at position 2259 of SEQ ID NO: 1560618
ugacuuauauuugagcuuu

SEQ ID NO: 1612582 - RNA, 19 nt, Artificial Sequence
  Description of Artificial Sequence: Synthetic oligonucleotide
  Antisense strand to SEQ ID NO: 1612581
aaagcucaaauauaaguca

SEQ ID NO: 1612583 - RNA, 19 nt, Artificial Sequence
  Description of Artificial Sequence: Synthetic oligonucleotide
  Sense strand starting at position 2387 of SEQ ID NO: 1560618
ugccgacuguugucacaaa

SEQ ID NO: 1612584 - RNA, 19 nt, Artificial Sequence
  Description of Artificial Sequence: Synthetic oligonucleotide
  Antisense strand to SEQ ID NO: 1612583
uuugugacaacagucggca

SEQ ID NO: 1612585 - RNA, 19 nt, Artificial Sequence
  Description of Artificial Sequence: Synthetic oligonucleotide
  Sense strand starting at position 2410 of SEQ ID NO: 1560618
acucgugacagugguugua

SEQ ID NO: 1612586 - RNA, 19 nt, Artificial Sequence
  Description of Artificial Sequence: Synthetic oligonucleotide
  Antisense strand to SEQ ID NO: 1612585
uacaaccacugucacgagu

SEQ ID NO: 1612587 - RNA, 19 nt, Artificial Sequence
  Description of Artificial Sequence: Synthetic oligonucleotide
  Sense strand starting at position 2431 of SEQ ID NO: 1560618
gucaguggugcuggaacau

SEQ ID NO: 1612588 - RNA, 19 nt, Artificial Sequence
  Description of Artificial Sequence: Synthetic oligonucleotide
  Antisense strand to SEQ ID NO: 1612587
auguuccagcaccacugac

SEQ ID NO: 1612589 - RNA, 19 nt, Artificial Sequence
  Description of Artificial Sequence: Synthetic oligonucleotide
  Sense strand starting at position 2456 of SEQ ID NO: 1560618
gggcucauuugugccugau

SEQ ID NO: 1612590 - RNA, 19 nt, Artificial Sequence
  Description of Artificial Sequence: Synthetic oligonucleotide
  Antisense strand to SEQ ID NO: 1612589
aucaggcacaaaugagccc

SEQ ID NO: 1612591 - RNA, 19 nt, Artificial Sequence
  Description of Artificial Sequence: Synthetic oligonucleotide
  Sense strand starting at position 2466 of SEQ ID NO: 1560618
gugccugauuuccagacca

SEQ ID NO: 1612592 - RNA, 19 nt, Artificial Sequence
  Description of Artificial Sequence: Synthetic oligonucleotide
  Antisense strand to SEQ ID NO: 1612591
uggucuggaaaucaggcac

SEQ ID NO: 1612593 - RNA, 19 nt, Artificial Sequence
  Description of Artificial Sequence: Synthetic oligonucleotide
  Sense strand starting at position 2492 of SEQ ID NO: 1560618
accugagguguuugggaca

SEQ ID NO: 1612594 - RNA, 19 nt, Artificial Sequence
  Description of Artificial Sequence: Synthetic oligonucleotide
  Antisense strand to SEQ ID NO: 1612593
ugucccaaacaccucaggu

SEQ ID NO: 1612595 - RNA, 19 nt, Artificial Sequence
  Description of Artificial Sequence: Synthetic oligonucleotide
  Sense strand starting at position 2536 of SEQ ID NO: 1560618
acagucuacguaggugauu

SEQ ID NO: 1612596 - RNA, 19 nt, Artificial Sequence
  Description of Artificial Sequence: Synthetic oligonucleotide
  Antisense strand to SEQ ID NO: 1612595
aaucaccuacguagacugu

SEQ ID NO: 1612597 - RNA, 19 nt, Artificial Sequence
  Description of Artificial Sequence: Synthetic oligonucleotide
  Sense strand starting at position 2541 of SEQ ID NO: 1560618
cuacguaggugauugaugu

SEQ ID NO: 1612598 - RNA, 19 nt, Artificial Sequence
  Description of Artificial Sequence: Synthetic oligonucleotide
  Antisense strand to SEQ ID NO: 1612597
acaucaaucaccuacguag

SEQ ID NO: 1612599 - RNA, 19 nt, Artificial Sequence
  Description of Artificial Sequence: Synthetic oligonucleotide
  Sense strand starting at position 2547 of SEQ ID NO: 1560618
aggugauugauguguccac

SEQ ID NO: 1612600 - RNA, 19 nt, Artificial Sequence
  Description of Artificial Sequence: Synthetic oligonucleotide
  Antisense strand to SEQ ID NO: 1612599
guggacacaucaaucaccu

SEQ ID NO: 1612601 - RNA, 19 nt, Artificial Sequence
  Description of Artificial Sequence: Synthetic oligonucleotide
  Sense strand starting at position 2548 of SEQ ID NO: 1560618
ggugauugauguguccacu

SEQ ID NO: 1612602 - RNA, 19 nt, Artificial Sequence
  Description of Artificial Sequence: Synthetic oligonucleotide
  Antisense strand to SEQ ID NO: 1612601
aguggacacaucaaucacc

SEQ ID NO: 1612603 - RNA, 19 nt, Artificial Sequence
  Description of Artificial Sequence: Synthetic oligonucleotide
  Sense strand starting at position 2590 of SEQ ID NO: 1560618
uggauagauggacguguau

SEQ ID NO: 1612604 - RNA, 19 nt, Artificial Sequence
  Description of Artificial Sequence: Synthetic oligonucleotide
  Antisense strand to SEQ ID NO: 1612603
auacacguccaucuaucca

SEQ ID NO: 1612605 - RNA, 19 nt, Artificial Sequence
  Description of Artificial Sequence: Synthetic oligonucleotide
  Sense strand starting at position 2601 of SEQ ID NO: 1560618
acguguauuuguccaucua

SEQ ID NO: 1612606 - RNA, 19 nt, Artificial Sequence
  Description of Artificial Sequence: Synthetic oligonucleotide
  Antisense strand to SEQ ID NO: 1612605
uagauggacaaauacacgu

SEQ ID NO: 1612607 - RNA, 19 nt, Artificial Sequence
  Description of Artificial Sequence: Synthetic oligonucleotide
  Sense strand starting at position 2602 of SEQ ID NO: 1560618
cguguauuuguccaucuau

SEQ ID NO: 1612608 - RNA, 19 nt, Artificial Sequence
  Description of Artificial Sequence: Synthetic oligonucleotide
  Antisense strand to SEQ ID NO: 1612607
auagauggacaaauacacg

SEQ ID NO: 1612609 - RNA, 19 nt, Artificial Sequence
  Description of Artificial Sequence: Synthetic oligonucleotide
  Sense strand starting at position 3002 of SEQ ID NO: 1560618
gaucauuuauuagggagac

SEQ ID NO: 1612610 - RNA, 19 nt, Artificial Sequence
  Description of Artificial Sequence: Synthetic oligonucleotide
  Antisense strand to SEQ ID NO: 1612609
gucucccuaauaaaugauc

SEQ ID NO: 1612611 - RNA, 19 nt, Artificial Sequence
  Description of Artificial Sequence: Synthetic oligonucleotide
  Sense strand starting at position 3003 of SEQ ID NO: 1560618
aucauuuauuagggagacu

SEQ ID NO: 1612612 - RNA, 19 nt, Artificial Sequence
  Description of Artificial Sequence: Synthetic oligonucleotide
  Antisense strand to SEQ ID NO: 1612611
agucucccuaauaaaugau

SEQ ID NO: 1612613 - RNA, 19 nt, Artificial Sequence
  Description of Artificial Sequence: Synthetic oligonucleotide
  Sense strand starting at position 3014 of SEQ ID NO: 1560618
gggagacuucugcacagug

SEQ ID NO: 1612614 - RNA, 19 nt, Artificial Sequence
  Description of Artificial Sequence: Synthetic oligonucleotide
  Antisense strand to SEQ ID NO: 1612613
cacugugcagaagucuccc

SEQ ID NO: 1612615 - RNA, 19 nt, Artificial Sequence
  Description of Artificial Sequence: Synthetic oligonucleotide
  Sense strand starting at position 3052 of SEQ ID NO: 1560618
cccagugucuccuugugga

SEQ ID NO: 1612616 - RNA, 19 nt, Artificial Sequence
  Description of Artificial Sequence: Synthetic oligonucleotide
  Antisense strand to SEQ ID NO: 1612615
uccacaaggagacacuggg

SEQ ID NO: 1612617 - RNA, 19 nt, Artificial Sequence
  Description of Artificial Sequence: Synthetic oligonucleotide
  Sense strand starting at position 3118 of SEQ ID NO: 1560618
ggagacacuggguguucua

SEQ ID NO: 1612618 - RNA, 19 nt, Artificial Sequence
  Description of Artificial Sequence: Synthetic oligonucleotide
  Antisense strand to SEQ ID NO: 1612617
uagaacacccagugucucc

SEQ ID NO: 1612619 - RNA, 19 nt, Artificial Sequence
  Description of Artificial Sequence: Synthetic oligonucleotide
  Sense strand starting at position 3127 of SEQ ID NO: 1560618
ggguguucuacccgaagcu

SEQ ID NO: 1612620 - RNA, 19 nt, Artificial Sequence
  Description of Artificial Sequence: Synthetic oligonucleotide
  Antisense strand to SEQ ID NO: 1612619
agcuucggguagaacaccc

SEQ ID NO: 1612621 - RNA, 19 nt, Artificial Sequence
  Description of Artificial Sequence: Synthetic oligonucleotide
  Sense strand starting at position 3128 of SEQ ID NO: 1560618
gguguucuacccgaagcuu

SEQ ID NO: 1612622 - RNA, 19 nt, Artificial Sequence
  Description of Artificial Sequence: Synthetic oligonucleotide
  Antisense strand to SEQ ID NO: 1612621
aagcuucggguagaacacc

SEQ ID NO: 1612623 - RNA, 19 nt, Artificial Sequence
  Description of Artificial Sequence: Synthetic oligonucleotide
  Sense strand starting at position 3186 of SEQ ID NO: 1560618
agaauaugaucucucagua

SEQ ID NO: 1612624 - RNA, 19 nt, Artificial Sequence
  Description of Artificial Sequence: Synthetic oligonucleotide
  Antisense strand to SEQ ID NO: 1612623
uacugagagaucauauucu

SEQ ID NO: 1612625 - RNA, 19 nt, Artificial Sequence
  Description of Artificial Sequence: Synthetic oligonucleotide
  Sense strand starting at position 3190 of SEQ ID NO: 1560618
uaugaucucucaguagagu

SEQ ID NO: 1612626 - RNA, 19 nt, Artificial Sequence
  Description of Artificial Sequence: Synthetic oligonucleotide
  Antisense strand to SEQ ID NO: 1612625
acucuacugagagaucaua

SEQ ID NO: 1612627 - RNA, 19 nt, Artificial Sequence
  Description of Artificial Sequence: Synthetic oligonucleotide
  Sense strand starting at position 3191 of SEQ ID NO: 1560618
augaucucucaguagaguu

SEQ ID NO: 1612628 - RNA, 19 nt, Artificial Sequence
  Description of Artificial Sequence: Synthetic oligonucleotide
  Antisense strand to SEQ ID NO: 1612627
aacucuacugagagaucau

SEQ ID NO: 1612629 - RNA, 19 nt, Artificial Sequence
  Description of Artificial Sequence: Synthetic oligonucleotide
  Sense strand starting at position 3203 of SEQ ID NO: 1560618
uagaguuguuucuugggau

SEQ ID NO: 1612630 - RNA, 19 nt, Artificial Sequence
  Description of Artificial Sequence: Synthetic oligonucleotide
  Antisense strand to SEQ ID NO: 1612629
aucccaagaaacaacucua

SEQ ID NO: 1612631 - RNA, 19 nt, Artificial Sequence
  Description of Artificial Sequence: Synthetic oligonucleotide
  Sense strand starting at position 3215 of SEQ ID NO: 1560618
uugggauacacaggcaauu

SEQ ID NO: 1612632 - RNA, 19 nt, Artificial Sequence
  Description of Artificial Sequence: Synthetic oligonucleotide
  Antisense strand to SEQ ID NO: 1612631
aauugccuguguaucccaa

SEQ ID NO: 1612633 - RNA, 19 nt, Artificial Sequence
  Description of Artificial Sequence: Synthetic oligonucleotide
  Sense strand starting at position 3428 of SEQ ID NO: 1560618
gcuccaggguugucuggau

SEQ ID NO: 1612634 - RNA, 19 nt, Artificial Sequence
  Description of Artificial Sequence: Synthetic oligonucleotide
  Antisense strand to SEQ ID NO: 1612633
auccagacaacccuggagc

SEQ ID NO: 1612635 - RNA, 19 nt, Artificial Sequence
  Description of Artificial Sequence: Synthetic oligonucleotide
  Sense strand starting at position 3449 of SEQ ID NO: 1560618
ugaguuuauuugggaguga

SEQ ID NO: 1612636 - RNA, 19 nt, Artificial Sequence
  Description of Artificial Sequence: Synthetic oligonucleotide
  Antisense strand to SEQ ID NO: 1612635
ucacucccaaauaaacuca

SEQ ID NO: 1612637 - RNA, 19 nt, Artificial Sequence
  Description of Artificial Sequence: Synthetic oligonucleotide
  Sense strand starting at position 3450 of SEQ ID NO: 1560618
gaguuuauuugggagugag

SEQ ID NO: 1612638 - RNA, 19 nt, Artificial Sequence
  Description of Artificial Sequence: Synthetic oligonucleotide
  Antisense strand to SEQ ID NO: 1612637
cucacucccaaauaaacuc

SEQ ID NO: 1612639 - RNA, 19 nt, Artificial Sequence
  Description of Artificial Sequence: Synthetic oligonucleotide
  Sense strand starting at position 3581 of SEQ ID NO: 1560618
cuccauagcccuuguuaca

SEQ ID NO: 1612640 - RNA, 19 nt, Artificial Sequence
  Description of Artificial Sequence: Synthetic oligonucleotide
  Antisense strand to SEQ ID NO: 1612639
uguaacaagggcuauggag

SEQ ID NO: 1612641 - RNA, 19 nt, Artificial Sequence
  Description of Artificial Sequence: Synthetic oligonucleotide
  Sense strand starting at position 3609 of SEQ ID NO: 1560618
uauaacauuggcuguguua

SEQ ID NO: 1612642 - RNA, 19 nt, Artificial Sequence
  Description of Artificial Sequence: Synthetic oligonucleotide
  Antisense strand to SEQ ID NO: 1612641
uaacacagccaauguuaua

SEQ ID NO: 1612643 - RNA, 19 nt, Artificial Sequence
  Description of Artificial Sequence: Synthetic oligonucleotide
  Sense strand starting at position 3750 of SEQ ID NO: 1560618
uuccuugugggaggaaaua

SEQ ID NO: 1612644 - RNA, 19 nt, Artificial Sequence
  Description of Artificial Sequence: Synthetic oligonucleotide
  Antisense strand to SEQ ID NO: 1612643
uauuuccucccacaaggaa

SEQ ID NO: 1612645 - RNA, 19 nt, Artificial Sequence
  Description of Artificial Sequence: Synthetic oligonucleotide
  Sense strand starting at position 3761 of SEQ ID NO: 1560618
aggaaauacugacaucaug

SEQ ID NO: 1612646 - RNA, 19 nt, Artificial Sequence
  Description of Artificial Sequence: Synthetic oligonucleotide
  Antisense strand to SEQ ID NO: 1612645
caugaugucaguauuuccu

SEQ ID NO: 1612647 - RNA, 19 nt, Artificial Sequence
  Description of Artificial Sequence: Synthetic oligonucleotide
  Sense strand starting at position 3963 of SEQ ID NO: 1560618
gucagugucucucugaguu

SEQ ID NO: 1612648 - RNA, 19 nt, Artificial Sequence
  Description of Artificial Sequence: Synthetic oligonucleotide
  Antisense strand to SEQ ID NO: 1612647
aacucagagagacacugac

SEQ ID NO: 1612649 - RNA, 19 nt, Artificial Sequence
  Description of Artificial Sequence: Synthetic oligonucleotide
  Sense strand starting at position 499 of SEQ ID NO: 1560619
uguuaaauguggcucagac

SEQ ID NO: 1612650 - RNA, 19 nt, Artificial Sequence
  Description of Artificial Sequence: Synthetic oligonucleotide
  Antisense strand to SEQ ID NO: 1612649
gucugagccacauuuaaca

SEQ ID NO: 1612651 - RNA, 19 nt, Artificial Sequence
  Description of Artificial Sequence: Synthetic oligonucleotide
  Sense strand starting at position 927 of SEQ ID NO: 1560619
ggagucagauucuaacuca

SEQ ID NO: 1612652 - RNA, 19 nt, Artificial Sequence
  Description of Artificial Sequence: Synthetic oligonucleotide
  Antisense strand to SEQ ID NO: 1612651
ugaguuagaaucugacucc

SEQ ID NO: 1612653 - RNA, 19 nt, Artificial Sequence
  Description of Artificial Sequence: Synthetic oligonucleotide
  Sense strand starting at position 1148 of SEQ ID NO: 1560619
gagaguucccggugaggga

SEQ ID NO: 1612654 - RNA, 19 nt, Artificial Sequence
  Description of Artificial Sequence: Synthetic oligonucleotide
  Antisense strand to SEQ ID NO: 1612653
ucccucaccgggaacucuc

SEQ ID NO: 1612655 - RNA, 19 nt, Artificial Sequence
  Description of Artificial Sequence: Synthetic oligonucleotide
  Sense strand starting at position 1149 of SEQ ID NO: 1560619
agaguucccggugagggau

SEQ ID NO: 1612656 - RNA, 19 nt, Artificial Sequence
  Description of Artificial Sequence: Synthetic oligonucleotide
  Antisense strand to SEQ ID NO: 1612655
aucccucaccgggaacucu

SEQ ID NO: 1612657 - RNA, 19 nt, Artificial Sequence
  Description of Artificial Sequence: Synthetic oligonucleotide
  Sense strand starting at position 1619 of SEQ ID NO: 1560619
cacugagagccaggaugua

SEQ ID NO: 1612658 - RNA, 19 nt, Artificial Sequence
  Description of Artificial Sequence: Synthetic oligonucleotide
  Antisense strand to SEQ ID NO: 1612657
uacauccuggcucucagug

SEQ ID NO: 1612659 - RNA, 19 nt, Artificial Sequence
  Description of Artificial Sequence: Synthetic oligonucleotide
  Sense strand starting at position 2057 of SEQ ID NO: 1560619
ggaacaaaucucugagucu

SEQ ID NO: 1612660 - RNA, 19 nt, Artificial Sequence
  Description of Artificial Sequence: Synthetic oligonucleotide
  Antisense strand to SEQ ID NO: 1612659
agacucagagauuuguucc

SEQ ID NO: 1612661 - RNA, 19 nt, Artificial Sequence
  Description of Artificial Sequence: Synthetic oligonucleotide
  Sense strand starting at position 2153 of SEQ ID NO: 1560619
ugacuuauauuugagcuuu

SEQ ID NO: 1612662 - RNA, 19 nt, Artificial Sequence
  Description of Artificial Sequence: Synthetic oligonucleotide
  Antisense strand to SEQ ID NO: 1612661
aaagcucaaauauaaguca

SEQ ID NO: 1612663 - RNA, 19 nt, Artificial Sequence
  Description of Artificial Sequence: Synthetic oligonucleotide
  Sense strand starting at position 2281 of SEQ ID NO: 1560619
ugccgacuguugucacaaa

SEQ ID NO: 1612664 - RNA, 19 nt, Artificial Sequence
  Description of Artificial Sequence: Synthetic oligonucleotide
  Antisense strand to SEQ ID NO: 1612663
uuugugacaacagucggca

SEQ ID NO: 1612665 - RNA, 19 nt, Artificial Sequence
  Description of Artificial Sequence: Synthetic oligonucleotide
  Sense strand starting at position 2304 of SEQ ID NO: 1560619
acucgugacagugguugua

SEQ ID NO: 1612666 - RNA, 19 nt, Artificial Sequence
  Description of Artificial Sequence: Synthetic oligonucleotide
  Antisense strand to SEQ ID NO: 1612665
uacaaccacugucacgagu

SEQ ID NO: 1612667 - RNA, 19 nt, Artificial Sequence
  Description of Artificial Sequence: Synthetic oligonucleotide
  Sense strand starting at position 2325 of SEQ ID NO: 1560619
gucaguggugcuggaacau

SEQ ID NO: 1612668 - RNA, 19 nt, Artificial Sequence
  Description of Artificial Sequence: Synthetic oligonucleotide
  Antisense strand to SEQ ID NO: 1612667
auguuccagcaccacugac

SEQ ID NO: 1612669 - RNA, 19 nt, Artificial Sequence
  Description of Artificial Sequence: Synthetic oligonucleotide
  Sense strand starting at position 2350 of SEQ ID NO: 1560619
gggcucauuugugccugau

SEQ ID NO: 1612670 - RNA, 19 nt, Artificial Sequence
  Description of Artificial Sequence: Synthetic oligonucleotide
  Antisense strand to SEQ ID NO: 1612669
aucaggcacaaaugagccc

SEQ ID NO: 1612671 - RNA, 19 nt, Artificial Sequence
  Description of Artificial Sequence: Synthetic oligonucleotide
  Sense strand starting at position 2360 of SEQ ID NO: 1560619
gugccugauuuccagacca

SEQ ID NO: 1612672 - RNA, 19 nt, Artificial Sequence
  Description of Artificial Sequence: Synthetic oligonucleotide
  Antisense strand to SEQ ID NO: 1612671
uggucuggaaaucaggcac

SEQ ID NO: 1612673 - RNA, 19 nt, Artificial Sequence
  Description of Artificial Sequence: Synthetic oligonucleotide
  Sense strand starting at position 2386 of SEQ ID NO: 1560619
accugagguguuugggaca

SEQ ID NO: 1612674 - RNA, 19 nt, Artificial Sequence
  Description of Artificial Sequence: Synthetic oligonucleotide
  Antisense strand to SEQ ID NO: 1612673
ugucccaaacaccucaggu

SEQ ID NO: 1612675 - RNA, 19 nt, Artificial Sequence
  Description of Artificial Sequence: Synthetic oligonucleotide
  Sense strand starting at position 2430 of SEQ ID NO: 1560619
acagucuacguaggugauu

SEQ ID NO: 1612676 - RNA, 19 nt, Artificial Sequence
  Description of Artificial Sequence: Synthetic oligonucleotide
  Antisense strand to SEQ ID NO: 1612675
aaucaccuacguagacugu

SEQ ID NO: 1612677 - RNA, 19 nt, Artificial Sequence
  Description of Artificial Sequence: Synthetic oligonucleotide
  Sense strand starting at position 2435 of SEQ ID NO: 1560619
cuacguaggugauugaugu

SEQ ID NO: 1612678 - RNA, 19 nt, Artificial Sequence
  Description of Artificial Sequence: Synthetic oligonucleotide
  Antisense strand to SEQ ID NO: 1612677
acaucaaucaccuacguag

SEQ ID NO: 1612679 - RNA, 19 nt, Artificial Sequence
  Description of Artificial Sequence: Synthetic oligonucleotide
  Sense strand starting at position 2441 of SEQ ID NO: 1560619
aggugauugauguguccac

SEQ ID NO: 1612680 - RNA, 19 nt, Artificial Sequence
  Description of Artificial Sequence: Synthetic oligonucleotide
  Antisense strand to SEQ ID NO: 1612679
guggacacaucaaucaccu

SEQ ID NO: 1612681 - RNA, 19 nt, Artificial Sequence
  Description of Artificial Sequence: Synthetic oligonucleotide
  Sense strand starting at position 2442 of SEQ ID NO: 1560619
ggugauugauguguccacu

SEQ ID NO: 1612682 - RNA, 19 nt, Artificial Sequence
  Description of Artificial Sequence: Synthetic oligonucleotide
  Antisense strand to SEQ ID NO: 1612681
aguggacacaucaaucacc

SEQ ID NO: 1612683 - RNA, 19 nt, Artificial Sequence
  Description of Artificial Sequence: Synthetic oligonucleotide
  Sense strand starting at position 2484 of SEQ ID NO: 1560619
uggauagauggacguguau

SEQ ID NO: 1612684 - RNA, 19 nt, Artificial Sequence
  Description of Artificial Sequence: Synthetic oligonucleotide
  Antisense strand to SEQ ID NO: 1612683
auacacguccaucuaucca

SEQ ID NO: 1612685 - RNA, 19 nt, Artificial Sequence
  Description of Artificial Sequence: Synthetic oligonucleotide
  Sense strand starting at position 2495 of SEQ ID NO: 1560619
acguguauuuguccaucua

SEQ ID NO: 1612686 - RNA, 19 nt, Artificial Sequence
  Description of Artificial Sequence: Synthetic oligonucleotide
  Antisense strand to SEQ ID NO: 1612685
uagauggacaaauacacgu

SEQ ID NO: 1612687 - RNA, 19 nt, Artificial Sequence
  Description of Artificial Sequence: Synthetic oligonucleotide
  Sense strand starting at position 2496 of SEQ ID NO: 1560619
cguguauuuguccaucuau

SEQ ID NO: 1612688 - RNA, 19 nt, Artificial Sequence
  Description of Artificial Sequence: Synthetic oligonucleotide
  Antisense strand to SEQ ID NO: 1612687
auagauggacaaauacacg

SEQ ID NO: 1612689 - RNA, 19 nt, Artificial Sequence
  Description of Artificial Sequence: Synthetic oligonucleotide
  Sense strand starting at position 2896 of SEQ ID NO: 1560619
gaucauuuauuagggagac

SEQ ID NO: 1612690 - RNA, 19 nt, Artificial Sequence
  Description of Artificial Sequence: Synthetic oligonucleotide
  Antisense strand to SEQ ID NO: 1612689
gucucccuaauaaaugauc

SEQ ID NO: 1612691 - RNA, 19 nt, Artificial Sequence
  Description of Artificial Sequence: Synthetic oligonucleotide
  Sense strand starting at position 2897 of SEQ ID NO: 1560619
aucauuuauuagggagacu

SEQ ID NO: 1612692 - RNA, 19 nt, Artificial Sequence
  Description of Artificial Sequence: Synthetic oligonucleotide
  Antisense strand to SEQ ID NO: 1612691
agucucccuaauaaaugau

SEQ ID NO: 1612693 - RNA, 19 nt, Artificial Sequence
  Description of Artificial Sequence: Synthetic oligonucleotide
  Sense strand starting at position 2908 of SEQ ID NO: 1560619
gggagacuucugcacagug

SEQ ID NO: 1612694 - RNA, 19 nt, Artificial Sequence
  Description of Artificial Sequence: Synthetic oligonucleotide
  Antisense strand to SEQ ID NO: 1612693
cacugugcagaagucuccc

SEQ ID NO: 1612695 - RNA, 19 nt, Artificial Sequence
  Description of Artificial Sequence: Synthetic oligonucleotide
  Sense strand starting at position 2946 of SEQ ID NO: 1560619
cccagugucuccuugugga

SEQ ID NO: 1612696 - RNA, 19 nt, Artificial Sequence
  Description of Artificial Sequence: Synthetic oligonucleotide
  Antisense strand to SEQ ID NO: 1612695
uccacaaggagacacuggg

SEQ ID NO: 1612697 - RNA, 19 nt, Artificial Sequence
  Description of Artificial Sequence: Synthetic oligonucleotide
  Sense strand starting at position 3012 of SEQ ID NO: 1560619
ggagacacuggguguucua

SEQ ID NO: 1612698 - RNA, 19 nt, Artificial Sequence
  Description of Artificial Sequence: Synthetic oligonucleotide
  Antisense strand to SEQ ID NO: 1612697
uagaacacccagugucucc

SEQ ID NO: 1612699 - RNA, 19 nt, Artificial Sequence
  Description of Artificial Sequence: Synthetic oligonucleotide
  Sense strand starting at position 3021 of SEQ ID NO: 1560619
ggguguucuacccgaagcu

SEQ ID NO: 1612700 - RNA, 19 nt, Artificial Sequence
  Description of Artificial Sequence: Synthetic oligonucleotide
  Antisense strand to SEQ ID NO: 1612699
agcuucggguagaacaccc

SEQ ID NO: 1612701 - RNA, 19 nt, Artificial Sequence
  Description of Artificial Sequence: Synthetic oligonucleotide
  Sense strand starting at position 3022 of SEQ ID NO: 1560619
gguguucuacccgaagcuu

SEQ ID NO: 1612702 - RNA, 19 nt, Artificial Sequence
  Description of Artificial Sequence: Synthetic oligonucleotide
  Antisense strand to SEQ ID NO: 1612701
aagcuucggguagaacacc

SEQ ID NO: 1612703 - RNA, 19 nt, Artificial Sequence
  Description of Artificial Sequence: Synthetic oligonucleotide
  Sense strand starting at position 3080 of SEQ ID NO: 1560619
agaauaugaucucucagua

SEQ ID NO: 1612704 - RNA, 19 nt, Artificial Sequence
  Description of Artificial Sequence: Synthetic oligonucleotide
  Antisense strand to SEQ ID NO: 1612703
uacugagagaucauauucu

SEQ ID NO: 1612705 - RNA, 19 nt, Artificial Sequence
  Description of Artificial Sequence: Synthetic oligonucleotide
  Sense strand starting at position 3084 of SEQ ID NO: 1560619
uaugaucucucaguagagu

SEQ ID NO: 1612706 - RNA, 19 nt, Artificial Sequence
  Description of Artificial Sequence: Synthetic oligonucleotide
  Antisense strand to SEQ ID NO: 1612705
acucuacugagagaucaua

SEQ ID NO: 1612707 - RNA, 19 nt, Artificial Sequence
  Description of Artificial Sequence: Synthetic oligonucleotide
  Sense strand starting at position 3085 of SEQ ID NO: 1560619
augaucucucaguagaguu

SEQ ID NO: 1612708 - RNA, 19 nt, Artificial Sequence
  Description of Artificial Sequence: Synthetic oligonucleotide
  Antisense strand to SEQ ID NO: 1612707
aacucuacugagagaucau

SEQ ID NO: 1612709 - RNA, 19 nt, Artificial Sequence
  Description of Artificial Sequence: Synthetic oligonucleotide
  Sense strand starting at position 3097 of SEQ ID NO: 1560619
uagaguuguuucuugggau

SEQ ID NO: 1612710 - RNA, 19 nt, Artificial Sequence
  Description of Artificial Sequence: Synthetic oligonucleotide
  Antisense strand to SEQ ID NO: 1612709
aucccaagaaacaacucua

SEQ ID NO: 1612711 - RNA, 19 nt, Artificial Sequence
  Description of Artificial Sequence: Synthetic oligonucleotide
  Sense strand starting at position 3109 of SEQ ID NO: 1560619
uugggauacacaggcaauu

SEQ ID NO: 1612712 - RNA, 19 nt, Artificial Sequence
  Description of Artificial Sequence: Synthetic oligonucleotide
  Antisense strand to SEQ ID NO: 1612711
aauugccuguguaucccaa

SEQ ID NO: 1612713 - RNA, 19 nt, Artificial Sequence
  Description of Artificial Sequence: Synthetic oligonucleotide
  Sense strand starting at position 3322 of SEQ ID NO: 1560619
gcuccaggguugucuggau

SEQ ID NO: 1612714 - RNA, 19 nt, Artificial Sequence
  Description of Artificial Sequence: Synthetic oligonucleotide
  Antisense strand to SEQ ID NO: 1612713
auccagacaacccuggagc

SEQ ID NO: 1612715 - RNA, 19 nt, Artificial Sequence
  Description of Artificial Sequence: Synthetic oligonucleotide
  Sense strand starting at position 3343 of SEQ ID NO: 1560619
ugaguuuauuugggaguga

SEQ ID NO: 1612716 - RNA, 19 nt, Artificial Sequence
  Description of Artificial Sequence: Synthetic oligonucleotide
  Antisense strand to SEQ ID NO: 1612715
ucacucccaaauaaacuca

SEQ ID NO: 1612717 - RNA, 19 nt, Artificial Sequence
  Description of Artificial Sequence: Synthetic oligonucleotide
  Sense strand starting at position 3344 of SEQ ID NO: 1560619
gaguuuauuugggagugag

SEQ ID NO: 1612718 - RNA, 19 nt, Artificial Sequence
  Description of Artificial Sequence: Synthetic oligonucleotide
  Antisense strand to SEQ ID NO: 1612717
cucacucccaaauaaacuc

SEQ ID NO: 1612719 - RNA, 19 nt, Artificial Sequence
  Description of Artificial Sequence: Synthetic oligonucleotide
  Sense strand starting at position 3475 of SEQ ID NO: 1560619
cuccauagcccuuguuaca

SEQ ID NO: 1612720 - RNA, 19 nt, Artificial Sequence
  Description of Artificial Sequence: Synthetic oligonucleotide
  Antisense strand to SEQ ID NO: 1612719
uguaacaagggcuauggag

SEQ ID NO: 1612721 - RNA, 19 nt, Artificial Sequence
  Description of Artificial Sequence: Synthetic oligonucleotide
  Sense strand starting at position 3503 of SEQ ID NO: 1560619
uauaacauuggcuguguua

SEQ ID NO: 1612722 - RNA, 19 nt, Artificial Sequence
  Description of Artificial Sequence: Synthetic oligonucleotide
  Antisense strand to SEQ ID NO: 1612721
uaacacagccaauguuaua

SEQ ID NO: 1612723 - RNA, 19 nt, Artificial Sequence
  Description of Artificial Sequence: Synthetic oligonucleotide
  Sense strand starting at position 3644 of SEQ ID NO: 1560619
uuccuugugggaggaaaua

SEQ ID NO: 1612724 - RNA, 19 nt, Artificial Sequence
  Description of Artificial Sequence: Synthetic oligonucleotide
  Antisense strand to SEQ ID NO: 1612723
uauuuccucccacaaggaa

SEQ ID NO: 1612725 - RNA, 19 nt, Artificial Sequence
  Description of Artificial Sequence: Synthetic oligonucleotide
  Sense strand starting at position 3655 of SEQ ID NO: 1560619
aggaaauacugacaucaug

SEQ ID NO: 1612726 - RNA, 19 nt, Artificial Sequence
  Description of Artificial Sequence: Synthetic oligonucleotide
  Antisense strand to SEQ ID NO: 1612725
caugaugucaguauuuccu

SEQ ID NO: 1612727 - RNA, 19 nt, Artificial Sequence
  Description of Artificial Sequence: Synthetic oligonucleotide
  Sense strand starting at position 3857 of SEQ ID NO: 1560619
gucagugucucucugaguu

SEQ ID NO: 1612728 - RNA, 19 nt, Artificial Sequence
  Description of Artificial Sequence: Synthetic oligonucleotide
  Antisense strand to SEQ ID NO: 1612727
aacucagagagacacugac

SEQ ID NO: 1612729 - RNA, 19 nt, Artificial Sequence
  Description of Artificial Sequence: Synthetic oligonucleotide
  Sense strand starting at position 63 of SEQ ID NO: 1560620
uuaugaacacugugacagu

SEQ ID NO: 1612730 - RNA, 19 nt, Artificial Sequence
  Description of Artificial Sequence: Synthetic oligonucleotide
  Antisense strand to SEQ ID NO: 1612729
acugucacaguguucauaa

SEQ ID NO: 1612731 - RNA, 19 nt, Artificial Sequence
  Description of Artificial Sequence: Synthetic oligonucleotide
  Sense strand starting at position 72 of SEQ ID NO: 1560620
cugugacagucaucacuua

SEQ ID NO: 1612732 - RNA, 19 nt, Artificial Sequence
  Description of Artificial Sequence: Synthetic oligonucleotide
  Antisense strand to SEQ ID NO: 1612731
uaagugaugacugucacag

SEQ ID NO: 1612733 - RNA, 19 nt, Artificial Sequence
  Description of Artificial Sequence: Synthetic oligonucleotide
  Sense strand starting at position 73 of SEQ ID NO: 1560620
ugugacagucaucacuuaa

SEQ ID NO: 1612734 - RNA, 19 nt, Artificial Sequence
  Description of Artificial Sequence: Synthetic oligonucleotide
  Antisense strand to SEQ ID NO: 1612733
uuaagugaugacugucaca

SEQ ID NO: 1612735 - RNA, 19 nt, Artificial Sequence
  Description of Artificial Sequence: Synthetic oligonucleotide
  Sense strand starting at position 101 of SEQ ID NO: 1560620
ccuguuaaccaauguuaua

SEQ ID NO: 1612736 - RNA, 19 nt, Artificial Sequence
  Description of Artificial Sequence: Synthetic oligonucleotide
  Antisense strand to SEQ ID NO: 1612735
uauaacauugguuaacagg

SEQ ID NO: 1612737 - RNA, 19 nt, Artificial Sequence
  Description of Artificial Sequence: Synthetic oligonucleotide
  Sense strand starting at position 187 of SEQ ID NO: 1560620
accaauaucucaguaguua

SEQ ID NO: 1612738 - RNA, 19 nt, Artificial Sequence
  Description of Artificial Sequence: Synthetic oligonucleotide
  Antisense strand to SEQ ID NO: 1612737
uaacuacugagauauuggu

SEQ ID NO: 1612739 - RNA, 19 nt, Artificial Sequence
  Description of Artificial Sequence: Synthetic oligonucleotide
  Sense strand starting at position 188 of SEQ ID NO: 1560620
ccaauaucucaguaguuag

SEQ ID NO: 1612740 - RNA, 19 nt, Artificial Sequence
  Description of Artificial Sequence: Synthetic oligonucleotide
  Antisense strand to SEQ ID NO: 1612739
cuaacuacugagauauugg

SEQ ID NO: 1612741 - RNA, 19 nt, Artificial Sequence
  Description of Artificial Sequence: Synthetic oligonucleotide
  Sense strand starting at position 438 of SEQ ID NO: 1560620
uauacuauucugcagggau

SEQ ID NO: 1612742 - RNA, 19 nt, Artificial Sequence
  Description of Artificial Sequence: Synthetic oligonucleotide
  Antisense strand to SEQ ID NO: 1612741
aucccugcagaauaguaua

SEQ ID NO: 1612743 - RNA, 19 nt, Artificial Sequence
  Description of Artificial Sequence: Synthetic oligonucleotide
  Sense strand starting at position 441 of SEQ ID NO: 1560620
acuauucugcagggauaag

SEQ ID NO: 1612744 - RNA, 19 nt, Artificial Sequence
  Description of Artificial Sequence: Synthetic oligonucleotide
  Antisense strand to SEQ ID NO: 1612743
cuuaucccugcagaauagu

SEQ ID NO: 1612745 - RNA, 19 nt, Artificial Sequence
  Description of Artificial Sequence: Synthetic oligonucleotide
  Sense strand starting at position 473 of SEQ ID NO: 1560620
gugcaauaagugcaaacaa

SEQ ID NO: 1612746 - RNA, 19 nt, Artificial Sequence
  Description of Artificial Sequence: Synthetic oligonucleotide
  Antisense strand to SEQ ID NO: 1612745
uuguuugcacuuauugcac

SEQ ID NO: 1612747 - RNA, 19 nt, Artificial Sequence
  Description of Artificial Sequence: Synthetic oligonucleotide
  Sense strand starting at position 586 of SEQ ID NO: 1560620
agaagcaucuuguccugau

SEQ ID NO: 1612748 - RNA, 19 nt, Artificial Sequence
  Description of Artificial Sequence: Synthetic oligonucleotide
  Antisense strand to SEQ ID NO: 1612747
aucaggacaagaugcuucu

SEQ ID NO: 1612749 - RNA, 19 nt, Artificial Sequence
  Description of Artificial Sequence: Synthetic oligonucleotide
  Sense strand starting at position 587 of SEQ ID NO: 1560620
gaagcaucuuguccugaua

SEQ ID NO: 1612750 - RNA, 19 nt, Artificial Sequence
  Description of Artificial Sequence: Synthetic oligonucleotide
  Antisense strand to SEQ ID NO: 1612749
uaucaggacaagaugcuuc

SEQ ID NO: 1612751 - RNA, 19 nt, Artificial Sequence
  Description of Artificial Sequence: Synthetic oligonucleotide
  Sense strand starting at position 590 of SEQ ID NO: 1560620
gcaucuuguccugauaaag

SEQ ID NO: 1612752 - RNA, 19 nt, Artificial Sequence
  Description of Artificial Sequence: Synthetic oligonucleotide
  Antisense strand to SEQ ID NO: 1612751
cuuuaucaggacaagaugc

SEQ ID NO: 1612753 - RNA, 19 nt, Artificial Sequence
  Description of Artificial Sequence: Synthetic oligonucleotide
  Sense strand starting at position 1173 of SEQ ID NO: 1560620
auuuccauguuacaggaaa

SEQ ID NO: 1612754 - RNA, 19 nt, Artificial Sequence
  Description of Artificial Sequence: Synthetic oligonucleotide
  Antisense strand to SEQ ID NO: 1612753
uuuccuguaacauggaaau

SEQ ID NO: 1612755 - RNA, 19 nt, Artificial Sequence
  Description of Artificial Sequence: Synthetic oligonucleotide
  Sense strand starting at position 1243 of SEQ ID NO: 1560620
agaagucugguguguuaga

SEQ ID NO: 1612756 - RNA, 19 nt, Artificial Sequence
  Description of Artificial Sequence: Synthetic oligonucleotide
  Antisense strand to SEQ ID NO: 1612755
ucuaacacaccagacuucu

SEQ ID NO: 1612757 - RNA, 19 nt, Artificial Sequence
  Description of Artificial Sequence: Synthetic oligonucleotide
  Sense strand starting at position 1250 of SEQ ID NO: 1560620
ugguguguuagagggaaau

SEQ ID NO: 1612758 - RNA, 19 nt, Artificial Sequence
  Description of Artificial Sequence: Synthetic oligonucleotide
  Antisense strand to SEQ ID NO: 1612757
auuucccucuaacacacca

SEQ ID NO: 1612759 - RNA, 19 nt, Artificial Sequence
  Description of Artificial Sequence: Synthetic oligonucleotide
  Sense strand starting at position 1252 of SEQ ID NO: 1560620
guguguuagagggaaauua

SEQ ID NO: 1612760 - RNA, 19 nt, Artificial Sequence
  Description of Artificial Sequence: Synthetic oligonucleotide
  Antisense strand to SEQ ID NO: 1612759
uaauuucccucuaacacac

SEQ ID NO: 1612761 - RNA, 19 nt, Artificial Sequence
  Description of Artificial Sequence: Synthetic oligonucleotide
  Sense strand starting at position 1375 of SEQ ID NO: 1560620
acagacauccuguagcuuu

SEQ ID NO: 1612762 - RNA, 19 nt, Artificial Sequence
  Description of Artificial Sequence: Synthetic oligonucleotide
  Antisense strand to SEQ ID NO: 1612761
aaagcuacaggaugucugu

SEQ ID NO: 1612763 - RNA, 19 nt, Artificial Sequence
  Description of Artificial Sequence: Synthetic oligonucleotide
  Sense strand starting at position 2567 of SEQ ID NO: 1560620
aaauaugagugaucagcac

SEQ ID NO: 1612764 - RNA, 19 nt, Artificial Sequence
  Description of Artificial Sequence: Synthetic oligonucleotide
  Antisense strand to SEQ ID NO: 1612763
gugcugaucacucauauuu

SEQ ID NO: 1612765 - RNA, 19 nt, Artificial Sequence
  Description of Artificial Sequence: Synthetic oligonucleotide
  Sense strand starting at position 2598 of SEQ ID NO: 1560620
gagaacaugugucccuuga

SEQ ID NO: 1612766 - RNA, 19 nt, Artificial Sequence
  Description of Artificial Sequence: Synthetic oligonucleotide
  Antisense strand to SEQ ID NO: 1612765
ucaagggacacauguucuc

SEQ ID NO: 1612767 - RNA, 19 nt, Artificial Sequence
  Description of Artificial Sequence: Synthetic oligonucleotide
  Sense strand starting at position 2600 of SEQ ID NO: 1560620
gaacaugugucccuugacu

SEQ ID NO: 1612768 - RNA, 19 nt, Artificial Sequence
  Description of Artificial Sequence: Synthetic oligonucleotide
  Antisense strand to SEQ ID NO: 1612767
agucaagggacacauguuc

SEQ ID NO: 1612769 - RNA, 19 nt, Artificial Sequence
  Description of Artificial Sequence: Synthetic oligonucleotide
  Sense strand starting at position 2602 of SEQ ID NO: 1560620
acaugugucccuugacuuu

SEQ ID NO: 1612770 - RNA, 19 nt, Artificial Sequence
  Description of Artificial Sequence: Synthetic oligonucleotide
  Antisense strand to SEQ ID NO: 1612769
aaagucaagggacacaugu

SEQ ID NO: 1612771 - RNA, 19 nt, Artificial Sequence
  Description of Artificial Sequence: Synthetic oligonucleotide
  Sense strand starting at position 2639 of SEQ ID NO: 1560620
acagguaucagaugguauc

SEQ ID NO: 1612772 - RNA, 19 nt, Artificial Sequence
  Description of Artificial Sequence: Synthetic oligonucleotide
  Antisense strand to SEQ ID NO: 1612771
gauaccaucugauaccugu

SEQ ID NO: 1612773 - RNA, 19 nt, Artificial Sequence
  Description of Artificial Sequence: Synthetic oligonucleotide
  Sense strand starting at position 2811 of SEQ ID NO: 1560620
ugguuuaaguuccuuaaag

SEQ ID NO: 1612774 - RNA, 19 nt, Artificial Sequence
  Description of Artificial Sequence: Synthetic oligonucleotide
  Antisense strand to SEQ ID NO: 1612773
cuuuaaggaacuuaaacca

SEQ ID NO: 1612775 - RNA, 19 nt, Artificial Sequence
  Description of Artificial Sequence: Synthetic oligonucleotide
  Sense strand starting at position 2812 of SEQ ID NO: 1560620
gguuuaaguuccuuaaaga

SEQ ID NO: 1612776 - RNA, 19 nt, Artificial Sequence
  Description of Artificial Sequence: Synthetic oligonucleotide
  Antisense strand to SEQ ID NO: 1612775
ucuuuaaggaacuuaaacc

SEQ ID NO: 1612777 - RNA, 19 nt, Artificial Sequence
  Description of Artificial Sequence: Synthetic oligonucleotide
  Sense strand starting at position 2837 of SEQ ID NO: 1560620
agaguagaccuuuguuaga

SEQ ID NO: 1612778 - RNA, 19 nt, Artificial Sequence
  Description of Artificial Sequence: Synthetic oligonucleotide
  Antisense strand to SEQ ID NO: 1612777
ucuaacaaaggucuacucu

SEQ ID NO: 1612779 - RNA, 19 nt, Artificial Sequence
  Description of Artificial Sequence: Synthetic oligonucleotide
  Sense strand starting at position 2928 of SEQ ID NO: 1560620
gcagaaacccuuugguuua

SEQ ID NO: 1612780 - RNA, 19 nt, Artificial Sequence
  Description of Artificial Sequence: Synthetic oligonucleotide
  Antisense strand to SEQ ID NO: 1612779
uaaaccaaaggguuucugc

SEQ ID NO: 1612781 - RNA, 19 nt, Artificial Sequence
  Description of Artificial Sequence: Synthetic oligonucleotide
  Sense strand starting at position 2930 of SEQ ID NO: 1560620
agaaacccuuugguuuaau

SEQ ID NO: 1612782 - RNA, 19 nt, Artificial Sequence
  Description of Artificial Sequence: Synthetic oligonucleotide
  Antisense strand to SEQ ID NO: 1612781
auuaaaccaaaggguuucu

SEQ ID NO: 1612783 - RNA, 19 nt, Artificial Sequence
  Description of Artificial Sequence: Synthetic oligonucleotide
  Sense strand starting at position 3030 of SEQ ID NO: 1560620
cugaauguauugucuaggu

SEQ ID NO: 1612784 - RNA, 19 nt, Artificial Sequence
  Description of Artificial Sequence: Synthetic oligonucleotide
  Antisense strand to SEQ ID NO: 1612783
accuagacaauacauucag

SEQ ID NO: 1612785 - RNA, 19 nt, Artificial Sequence
  Description of Artificial Sequence: Synthetic oligonucleotide
  Sense strand starting at position 3032 of SEQ ID NO: 1560620
gaauguauugucuagguug

SEQ ID NO: 1612786 - RNA, 19 nt, Artificial Sequence
  Description of Artificial Sequence: Synthetic oligonucleotide
  Antisense strand to SEQ ID NO: 1612785
caaccuagacaauacauuc

SEQ ID NO: 1612787 - RNA, 19 nt, Artificial Sequence
  Description of Artificial Sequence: Synthetic oligonucleotide
  Sense strand starting at position 3177 of SEQ ID NO: 1560620
cagcacaguuuguugaaua

SEQ ID NO: 1612788 - RNA, 19 nt, Artificial Sequence
  Description of Artificial Sequence: Synthetic oligonucleotide
  Antisense strand to SEQ ID NO: 1612787
uauucaacaaacugugcug

SEQ ID NO: 1612789 - RNA, 19 nt, Artificial Sequence
  Description of Artificial Sequence: Synthetic oligonucleotide
  Sense strand starting at position 3223 of SEQ ID NO: 1560620
uugucagguuuccuaaaga

SEQ ID NO: 1612790 - RNA, 19 nt, Artificial Sequence
  Description of Artificial Sequence: Synthetic oligonucleotide
  Antisense strand to SEQ ID NO: 1612789
ucuuuaggaaaccugacaa

SEQ ID NO: 1612791 - RNA, 19 nt, Artificial Sequence
  Description of Artificial Sequence: Synthetic oligonucleotide
  Sense strand starting at position 3416 of SEQ ID NO: 1560620
uaggcuugccuugacuauu

SEQ ID NO: 1612792 - RNA, 19 nt, Artificial Sequence
  Description of Artificial Sequence: Synthetic oligonucleotide
  Antisense strand to SEQ ID NO: 1612791
aauagucaaggcaagccua

SEQ ID NO: 1612793 - RNA, 19 nt, Artificial Sequence
  Description of Artificial Sequence: Synthetic oligonucleotide
  Sense strand starting at position 3484 of SEQ ID NO: 1560620
uccauaugauucuucuagu

SEQ ID NO: 1612794 - RNA, 19 nt, Artificial Sequence
  Description of Artificial Sequence: Synthetic oligonucleotide
  Antisense strand to SEQ ID NO: 1612793
acuagaagaaucauaugga

SEQ ID NO: 1612795 - RNA, 19 nt, Artificial Sequence
  Description of Artificial Sequence: Synthetic oligonucleotide
  Sense strand starting at position 3485 of SEQ ID NO: 1560620
ccauaugauucuucuaguu

SEQ ID NO: 1612796 - RNA, 19 nt, Artificial Sequence
  Description of Artificial Sequence: Synthetic oligonucleotide
  Antisense strand to SEQ ID NO: 1612795
aacuagaagaaucauaugg

SEQ ID NO: 1612797 - RNA, 19 nt, Artificial Sequence
  Description of Artificial Sequence: Synthetic oligonucleotide
  Sense strand starting at position 3741 of SEQ ID NO: 1560620
guguguaaacuguaaauga

SEQ ID NO: 1612798 - RNA, 19 nt, Artificial Sequence
  Description of Artificial Sequence: Synthetic oligonucleotide
  Antisense strand to SEQ ID NO: 1612797
ucauuuacaguuuacacac

SEQ ID NO: 1612799 - RNA, 19 nt, Artificial Sequence
  Description of Artificial Sequence: Synthetic oligonucleotide
  Sense strand starting at position 3785 of SEQ ID NO: 1560620
acuugacuguuauugguau

SEQ ID NO: 1612800 - RNA, 19 nt, Artificial Sequence
  Description of Artificial Sequence: Synthetic oligonucleotide
  Antisense strand to SEQ ID NO: 1612799
auaccaauaacagucaagu

SEQ ID NO: 1612801 - RNA, 19 nt, Artificial Sequence
  Description of Artificial Sequence: Synthetic oligonucleotide
  Sense strand starting at position 3837 of SEQ ID NO: 1560620
uaucuugagucuuugcuga

SEQ ID NO: 1612802 - RNA, 19 nt, Artificial Sequence
  Description of Artificial Sequence: Synthetic oligonucleotide
  Antisense strand to SEQ ID NO: 1612801
ucagcaaagacucaagaua

SEQ ID NO: 1612803 - RNA, 19 nt, Artificial Sequence
  Description of Artificial Sequence: Synthetic oligonucleotide
  Sense strand starting at position 3875 of SEQ ID NO: 1560620
aagaucucagguugauguu

SEQ ID NO: 1612804 - RNA, 19 nt, Artificial Sequence
  Description of Artificial Sequence: Synthetic oligonucleotide
  Antisense strand to SEQ ID NO: 1612803
aacaucaaccugagaucuu

SEQ ID NO: 1612805 - RNA, 19 nt, Artificial Sequence
  Description of Artificial Sequence: Synthetic oligonucleotide
  Sense strand starting at position 3888 of SEQ ID NO: 1560620
gauguuuggguugauguuu

SEQ ID NO: 1612806 - RNA, 19 nt, Artificial Sequence
  Description of Artificial Sequence: Synthetic oligonucleotide
  Antisense strand to SEQ ID NO: 1612805
aaacaucaacccaaacauc

SEQ ID NO: 1612807 - RNA, 19 nt, Artificial Sequence
  Description of Artificial Sequence: Synthetic oligonucleotide
  Sense strand starting at position 3932 of SEQ ID NO: 1560620
cagcaaagauaguuugacu

SEQ ID NO: 1612808 - RNA, 19 nt, Artificial Sequence
  Description of Artificial Sequence: Synthetic oligonucleotide
  Antisense strand to SEQ ID NO: 1612807
agucaaacuaucuuugcug

SEQ ID NO: 1612809 - RNA, 19 nt, Artificial Sequence
  Description of Artificial Sequence: Synthetic oligonucleotide
  Sense strand starting at position 691 of SEQ ID NO: 1560621
uguguucccaggugaugga

SEQ ID NO: 1612810 - RNA, 19 nt, Artificial Sequence
  Description of Artificial Sequence: Synthetic oligonucleotide
  Antisense strand to SEQ ID NO: 1612809
uccaucaccugggaacaca

SEQ ID NO: 1612811 - RNA, 19 nt, Artificial Sequence
  Description of Artificial Sequence: Synthetic oligonucleotide
  Sense strand starting at position 744 of SEQ ID NO: 1560621
ggucguauccguguaaucc

SEQ ID NO: 1612812 - RNA, 19 nt, Artificial Sequence
  Description of Artificial Sequence: Synthetic oligonucleotide
  Antisense strand to SEQ ID NO: 1612811
ggauuacacggauacgacc

SEQ ID NO: 1612813 - RNA, 19 nt, Artificial Sequence
  Description of Artificial Sequence: Synthetic oligonucleotide
  Sense strand starting at position 748 of SEQ ID NO: 1560621
guauccguguaauccaaga

SEQ ID NO: 1612814 - RNA, 19 nt, Artificial Sequence
  Description of Artificial Sequence: Synthetic oligonucleotide
  Antisense strand to SEQ ID NO: 1612813
ucuuggauuacacggauac

SEQ ID NO: 1612815 - RNA, 19 nt, Artificial Sequence
  Description of Artificial Sequence: Synthetic oligonucleotide
  Sense strand starting at position 750 of SEQ ID NO: 1560621
auccguguaauccaagaug

SEQ ID NO: 1612816 - RNA, 19 nt, Artificial Sequence
  Description of Artificial Sequence: Synthetic oligonucleotide
  Antisense strand to SEQ ID NO: 1612815
caucuuggauuacacggau

SEQ ID NO: 1612817 - RNA, 19 nt, Artificial Sequence
  Description of Artificial Sequence: Synthetic oligonucleotide
  Sense strand starting at position 753 of SEQ ID NO: 1560621
cguguaauccaagaugcug

SEQ ID NO: 1612818 - RNA, 19 nt, Artificial Sequence
  Description of Artificial Sequence: Synthetic oligonucleotide
  Antisense strand to SEQ ID NO: 1612817
cagcaucuuggauuacacg

SEQ ID NO: 1612819 - RNA, 19 nt, Artificial Sequence
  Description of Artificial Sequence: Synthetic oligonucleotide
  Sense strand starting at position 1241 of SEQ ID NO: 1560621
ggucccuccuagguuagaa

SEQ ID NO: 1612820 - RNA, 19 nt, Artificial Sequence
  Description of Artificial Sequence: Synthetic oligonucleotide
  Antisense strand to SEQ ID NO: 1612819
uucuaaccuaggagggacc

SEQ ID NO: 1612821 - RNA, 19 nt, Artificial Sequence
  Description of Artificial Sequence: Synthetic oligonucleotide
  Sense strand starting at position 1291 of SEQ ID NO: 1560621
agaucaggacugugacgau

SEQ ID NO: 1612822 - RNA, 19 nt, Artificial Sequence
  Description of Artificial Sequence: Synthetic oligonucleotide
  Antisense strand to SEQ ID NO: 1612821
aucgucacaguccugaucu

SEQ ID NO: 1612823 - RNA, 19 nt, Artificial Sequence
  Description of Artificial Sequence: Synthetic oligonucleotide
  Sense strand starting at position 1953 of SEQ ID NO: 1560621
guugacuucuuucuugaca

SEQ ID NO: 1612824 - RNA, 19 nt, Artificial Sequence
  Description of Artificial Sequence: Synthetic oligonucleotide
  Antisense strand to SEQ ID NO: 1612823
ugucaagaaagaagucaac

SEQ ID NO: 1612825 - RNA, 19 nt, Artificial Sequence
  Description of Artificial Sequence: Synthetic oligonucleotide
  Sense strand starting at position 2063 of SEQ ID NO: 1560621
ggaagaaaccucugagucu

SEQ ID NO: 1612826 - RNA, 19 nt, Artificial Sequence
  Description of Artificial Sequence: Synthetic oligonucleotide
  Antisense strand to SEQ ID NO: 1612825
agacucagagguuucuucc

SEQ ID NO: 1612827 - RNA, 19 nt, Artificial Sequence
  Description of Artificial Sequence: Synthetic oligonucleotide
  Sense strand starting at position 2158 of SEQ ID NO: 1560621
augacuuauguuugagcuu

SEQ ID NO: 1612828 - RNA, 19 nt, Artificial Sequence
  Description of Artificial Sequence: Synthetic oligonucleotide
  Antisense strand to SEQ ID NO: 1612827
aagcucaaacauaagucau

SEQ ID NO: 1612829 - RNA, 19 nt, Artificial Sequence
  Description of Artificial Sequence: Synthetic oligonucleotide
  Sense strand starting at position 2211 of SEQ ID NO: 1560621
uuugaugacugguuaucau

SEQ ID NO: 1612830 - RNA, 19 nt, Artificial Sequence
  Description of Artificial Sequence: Synthetic oligonucleotide
  Antisense strand to SEQ ID NO: 1612829
augauaaccagucaucaaa

SEQ ID NO: 1612831 - RNA, 19 nt, Artificial Sequence
  Description of Artificial Sequence: Synthetic oligonucleotide
  Sense strand starting at position 2221 of SEQ ID NO: 1560621
gguuaucauccgcugccua

SEQ ID NO: 1612832 - RNA, 19 nt, Artificial Sequence
  Description of Artificial Sequence: Synthetic oligonucleotide
  Antisense strand to SEQ ID NO: 1612831
uaggcagcggaugauaacc

SEQ ID NO: 1612833 - RNA, 19 nt, Artificial Sequence
  Description of Artificial Sequence: Synthetic oligonucleotide
  Sense strand starting at position 2241 of SEQ ID NO: 1560621
gugaccuugguuuguaaug

SEQ ID NO: 1612834 - RNA, 19 nt, Artificial Sequence
  Description of Artificial Sequence: Synthetic oligonucleotide
  Antisense strand to SEQ ID NO: 1612833
cauuacaaaccaaggucac

SEQ ID NO: 1612835 - RNA, 19 nt, Artificial Sequence
  Description of Artificial Sequence: Synthetic oligonucleotide
  Sense strand starting at position 2242 of SEQ ID NO: 1560621
ugaccuugguuuguaaugu

SEQ ID NO: 1612836 - RNA, 19 nt, Artificial Sequence
  Description of Artificial Sequence: Synthetic oligonucleotide
  Antisense strand to SEQ ID NO: 1612835
acauuacaaaccaagguca

SEQ ID NO: 1612837 - RNA, 19 nt, Artificial Sequence
  Description of Artificial Sequence: Synthetic oligonucleotide
  Sense strand starting at position 2277 of SEQ ID NO: 1560621
aguuucuuccuuugcagau

SEQ ID NO: 1612838 - RNA, 19 nt, Artificial Sequence
  Description of Artificial Sequence: Synthetic oligonucleotide
  Antisense strand to SEQ ID NO: 1612837
aucugcaaaggaagaaacu

SEQ ID NO: 1612839 - RNA, 19 nt, Artificial Sequence
  Description of Artificial Sequence: Synthetic oligonucleotide
  Sense strand starting at position 2289 of SEQ ID NO: 1560621
ugcagauuguugucaugaa

SEQ ID NO: 1612840 - RNA, 19 nt, Artificial Sequence
  Description of Artificial Sequence: Synthetic oligonucleotide
  Antisense strand to SEQ ID NO: 1612839
uucaugacaacaaucugca

SEQ ID NO: 1612841 - RNA, 19 nt, Artificial Sequence
  Description of Artificial Sequence: Synthetic oligonucleotide
  Sense strand starting at position 2359 of SEQ ID NO: 1560621
gggcucauuugugcuugau

SEQ ID NO: 1612842 - RNA, 19 nt, Artificial Sequence
  Description of Artificial Sequence: Synthetic oligonucleotide
  Antisense strand to SEQ ID NO: 1612841
aucaagcacaaaugagccc

SEQ ID NO: 1612843 - RNA, 19 nt, Artificial Sequence
  Description of Artificial Sequence: Synthetic oligonucleotide
  Sense strand starting at position 2399 of SEQ ID NO: 1560621
gaggcuuugggacgugaga

SEQ ID NO: 1612844 - RNA, 19 nt, Artificial Sequence
  Description of Artificial Sequence: Synthetic oligonucleotide
  Antisense strand to SEQ ID NO: 1612843
ucucacgucccaaagccuc

SEQ ID NO: 1612845 - RNA, 19 nt, Artificial Sequence
  Description of Artificial Sequence: Synthetic oligonucleotide
  Sense strand starting at position 2436 of SEQ ID NO: 1560621
ccacauucuguaggugauu

SEQ ID NO: 1612846 - RNA, 19 nt, Artificial Sequence
  Description of Artificial Sequence: Synthetic oligonucleotide
  Antisense strand to SEQ ID NO: 1612845
aaucaccuacagaaugugg

SEQ ID NO: 1612847 - RNA, 19 nt, Artificial Sequence
  Description of Artificial Sequence: Synthetic oligonucleotide
  Sense strand starting at position 2438 of SEQ ID NO: 1560621
acauucuguaggugauuga

SEQ ID NO: 1612848 - RNA, 19 nt, Artificial Sequence
  Description of Artificial Sequence: Synthetic oligonucleotide
  Antisense strand to SEQ ID NO: 1612847
ucaaucaccuacagaaugu

SEQ ID NO: 1612849 - RNA, 19 nt, Artificial Sequence
  Description of Artificial Sequence: Synthetic oligonucleotide
  Sense strand starting at position 2439 of SEQ ID NO: 1560621
cauucuguaggugauugau

SEQ ID NO: 1612850 - RNA, 19 nt, Artificial Sequence
  Description of Artificial Sequence: Synthetic oligonucleotide
  Antisense strand to SEQ ID NO: 1612849
aucaaucaccuacagaaug

SEQ ID NO: 1612851 - RNA, 19 nt, Artificial Sequence
  Description of Artificial Sequence: Synthetic oligonucleotide
  Sense strand starting at position 2441 of SEQ ID NO: 1560621
uucuguaggugauugauga

SEQ ID NO: 1612852 - RNA, 19 nt, Artificial Sequence
  Description of Artificial Sequence: Synthetic oligonucleotide
  Antisense strand to SEQ ID NO: 1612851
ucaucaaucaccuacagaa

SEQ ID NO: 1612853 - RNA, 19 nt, Artificial Sequence
  Description of Artificial Sequence: Synthetic oligonucleotide
  Sense strand starting at position 2448 of SEQ ID NO: 1560621
ggugauugaugaguccacu

SEQ ID NO: 1612854 - RNA, 19 nt, Artificial Sequence
  Description of Artificial Sequence: Synthetic oligonucleotide
  Antisense strand to SEQ ID NO: 1612853
aguggacucaucaaucacc

SEQ ID NO: 1612855 - RNA, 19 nt, Artificial Sequence
  Description of Artificial Sequence: Synthetic oligonucleotide
  Sense strand starting at position 2458 of SEQ ID NO: 1560621
gaguccacucaagauguca

SEQ ID NO: 1612856 - RNA, 19 nt, Artificial Sequence
  Description of Artificial Sequence: Synthetic oligonucleotide
  Antisense strand to SEQ ID NO: 1612855
ugacaucuugaguggacuc

SEQ ID NO: 1612857 - RNA, 19 nt, Artificial Sequence
  Description of Artificial Sequence: Synthetic oligonucleotide
  Sense strand starting at position 2472 of SEQ ID NO: 1560621
ugucacaucugaccguaau

SEQ ID NO: 1612858 - RNA, 19 nt, Artificial Sequence
  Description of Artificial Sequence: Synthetic oligonucleotide
  Antisense strand to SEQ ID NO: 1612857
auuacggucagaugugaca

SEQ ID NO: 1612859 - RNA, 19 nt, Artificial Sequence
  Description of Artificial Sequence: Synthetic oligonucleotide
  Sense strand starting at position 2473 of SEQ ID NO: 1560621
gucacaucugaccguaaug

SEQ ID NO: 1612860 - RNA, 19 nt, Artificial Sequence
  Description of Artificial Sequence: Synthetic oligonucleotide
  Antisense strand to SEQ ID NO: 1612859
cauuacggucagaugugac

SEQ ID NO: 1612861 - RNA, 19 nt, Artificial Sequence
  Description of Artificial Sequence: Synthetic oligonucleotide
  Sense strand starting at position 2475 of SEQ ID NO: 1560621
cacaucugaccguaaugga

SEQ ID NO: 1612862 - RNA, 19 nt, Artificial Sequence
  Description of Artificial Sequence: Synthetic oligonucleotide
  Antisense strand to SEQ ID NO: 1612861
uccauuacggucagaugug

SEQ ID NO: 1612863 - RNA, 19 nt, Artificial Sequence
  Description of Artificial Sequence: Synthetic oligonucleotide
  Sense strand starting at position 2482 of SEQ ID NO: 1560621
gaccguaauggagaaacgu

SEQ ID NO: 1612864 - RNA, 19 nt, Artificial Sequence
  Description of Artificial Sequence: Synthetic oligonucleotide
  Antisense strand to SEQ ID NO: 1612863
acguuucuccauuacgguc

SEQ ID NO: 1612865 - RNA, 19 nt, Artificial Sequence
  Description of Artificial Sequence: Synthetic oligonucleotide
  Sense strand starting at position 2490 of SEQ ID NO: 1560621
uggagaaacguauguguag

SEQ ID NO: 1612866 - RNA, 19 nt, Artificial Sequence
  Description of Artificial Sequence: Synthetic oligonucleotide
  Antisense strand to SEQ ID NO: 1612865
cuacacauacguuucucca

SEQ ID NO: 1612867 - RNA, 19 nt, Artificial Sequence
  Description of Artificial Sequence: Synthetic oligonucleotide
  Sense strand starting at position 2492 of SEQ ID NO: 1560621
gagaaacguauguguagca

SEQ ID NO: 1612868 - RNA, 19 nt, Artificial Sequence
  Description of Artificial Sequence: Synthetic oligonucleotide
  Antisense strand to SEQ ID NO: 1612867
ugcuacacauacguuucuc

SEQ ID NO: 1612869 - RNA, 19 nt, Artificial Sequence
  Description of Artificial Sequence: Synthetic oligonucleotide
  Sense strand starting at position 2502 of SEQ ID NO: 1560621
uguguagcauuucugaaau

SEQ ID NO: 1612870 - RNA, 19 nt, Artificial Sequence
  Description of Artificial Sequence: Synthetic oligonucleotide
  Antisense strand to SEQ ID NO: 1612869
auuucagaaaugcuacaca

SEQ ID NO: 1612871 - RNA, 19 nt, Artificial Sequence
  Description of Artificial Sequence: Synthetic oligonucleotide
  Sense strand starting at position 2504 of SEQ ID NO: 1560621
uguagcauuucugaaauac

SEQ ID NO: 1612872 - RNA, 19 nt, Artificial Sequence
  Description of Artificial Sequence: Synthetic oligonucleotide
  Antisense strand to SEQ ID NO: 1612871
guauuucagaaaugcuaca

SEQ ID NO: 1612873 - RNA, 19 nt, Artificial Sequence
  Description of Artificial Sequence: Synthetic oligonucleotide
  Sense strand starting at position 2691 of SEQ ID NO: 1560621
cgggaucugcaaugacagu

SEQ ID NO: 1612874 - RNA, 19 nt, Artificial Sequence
  Description of Artificial Sequence: Synthetic oligonucleotide
  Antisense strand to SEQ ID NO: 1612873
acugucauugcagaucccg

SEQ ID NO: 1612875 - RNA, 19 nt, Artificial Sequence
  Description of Artificial Sequence: Synthetic oligonucleotide
  Sense strand starting at position 3067 of SEQ ID NO: 1560621
augaucucucaguacaguu

SEQ ID NO: 1612876 - RNA, 19 nt, Artificial Sequence
  Description of Artificial Sequence: Synthetic oligonucleotide
  Antisense strand to SEQ ID NO: 1612875
aacuguacugagagaucau

SEQ ID NO: 1612877 - RNA, 19 nt, Artificial Sequence
  Description of Artificial Sequence: Synthetic oligonucleotide
  Sense strand starting at position 3079 of SEQ ID NO: 1560621
uacaguuguuucuugggau

SEQ ID NO: 1612878 - RNA, 19 nt, Artificial Sequence
  Description of Artificial Sequence: Synthetic oligonucleotide
  Antisense strand to SEQ ID NO: 1612877
aucccaagaaacaacugua

SEQ ID NO: 1612879 - RNA, 19 nt, Artificial Sequence
  Description of Artificial Sequence: Synthetic oligonucleotide
  Sense strand starting at position 3091 of SEQ ID NO: 1560621
uugggauacacaggcaauu

SEQ ID NO: 1612880 - RNA, 19 nt, Artificial Sequence
  Description of Artificial Sequence: Synthetic oligonucleotide
  Antisense strand to SEQ ID NO: 1612879
aauugccuguguaucccaa

SEQ ID NO: 1612881 - RNA, 19 nt, Artificial Sequence
  Description of Artificial Sequence: Synthetic oligonucleotide
  Sense strand starting at position 3555 of SEQ ID NO: 1560621
aaaguaagacucgaauguu

SEQ ID NO: 1612882 - RNA, 19 nt, Artificial Sequence
  Description of Artificial Sequence: Synthetic oligonucleotide
  Antisense strand to SEQ ID NO: 1612881
aacauucgagucuuacuuu

SEQ ID NO: 1612883 - RNA, 19 nt, Artificial Sequence
  Description of Artificial Sequence: Synthetic oligonucleotide
  Sense strand starting at position 3694 of SEQ ID NO: 1560621
ugaguuucuggguggcuga

SEQ ID NO: 1612884 - RNA, 19 nt, Artificial Sequence
  Description of Artificial Sequence: Synthetic oligonucleotide
  Antisense strand to SEQ ID NO: 1612883
ucagccacccagaaacuca

SEQ ID NO: 1612885 - RNA, 19 nt, Artificial Sequence
  Description of Artificial Sequence: Synthetic oligonucleotide
  Sense strand starting at position 3835 of SEQ ID NO: 1560621
caggaaaugucaguguuuc

SEQ ID NO: 1612886 - RNA, 19 nt, Artificial Sequence
  Description of Artificial Sequence: Synthetic oligonucleotide
  Antisense strand to SEQ ID NO: 1612885
gaaacacugacauuuccug

SEQ ID NO: 1612887 - RNA, 19 nt, Artificial Sequence
  Description of Artificial Sequence: Synthetic oligonucleotide
  Sense strand starting at position 3839 of SEQ ID NO: 1560621
aaaugucaguguuuccuga

SEQ ID NO: 1612888 - RNA, 19 nt, Artificial Sequence
  Description of Artificial Sequence: Synthetic oligonucleotide
  Antisense strand to SEQ ID NO: 1612887
ucaggaaacacugacauuu

SEQ ID NO: 1612889 - RNA, 19 nt, Artificial Sequence
  Description of Artificial Sequence: Synthetic oligonucleotide
  Sense strand starting at position 204 of SEQ ID NO: 1560622
agugauggcuucuuagaaa

SEQ ID NO: 1612890 - RNA, 19 nt, Artificial Sequence
  Description of Artificial Sequence: Synthetic oligonucleotide
  Antisense strand to SEQ ID NO: 1612889
uuucuaagaagccaucacu

SEQ ID NO: 1612891 - RNA, 19 nt, Artificial Sequence
  Description of Artificial Sequence: Synthetic oligonucleotide
  Sense strand starting at position 986 of SEQ ID NO: 1560622
uguguucccaggugaugga

SEQ ID NO: 1612892 - RNA, 19 nt, Artificial Sequence
  Description of Artificial Sequence: Synthetic oligonucleotide
  Antisense strand to SEQ ID NO: 1612891
uccaucaccugggaacaca

SEQ ID NO: 1612893 - RNA, 19 nt, Artificial Sequence
  Description of Artificial Sequence: Synthetic oligonucleotide
  Sense strand starting at position 1039 of SEQ ID NO: 1560622
ggucguauccguguaaucc

SEQ ID NO: 1612894 - RNA, 19 nt, Artificial Sequence
  Description of Artificial Sequence: Synthetic oligonucleotide
  Antisense strand to SEQ ID NO: 1612893
ggauuacacggauacgacc

SEQ ID NO: 1612895 - RNA, 19 nt, Artificial Sequence
  Description of Artificial Sequence: Synthetic oligonucleotide
  Sense strand starting at position 1043 of SEQ ID NO: 1560622
guauccguguaauccaaga

SEQ ID NO: 1612896 - RNA, 19 nt, Artificial Sequence
  Description of Artificial Sequence: Synthetic oligonucleotide
  Antisense strand to SEQ ID NO: 1612895
ucuuggauuacacggauac

SEQ ID NO: 1612897 - RNA, 19 nt, Artificial Sequence
  Description of Artificial Sequence: Synthetic oligonucleotide
  Sense strand starting at position 1045 of SEQ ID NO: 1560622
auccguguaauccaagaug

SEQ ID NO: 1612898 - RNA, 19 nt, Artificial Sequence
  Description of Artificial Sequence: Synthetic oligonucleotide
  Antisense strand to SEQ ID NO: 1612897
caucuuggauuacacggau

SEQ ID NO: 1612899 - RNA, 19 nt, Artificial Sequence
  Description of Artificial Sequence: Synthetic oligonucleotide
  Sense strand starting at position 1048 of SEQ ID NO: 1560622
cguguaauccaagaugcug

SEQ ID NO: 1612900 - RNA, 19 nt, Artificial Sequence
  Description of Artificial Sequence: Synthetic oligonucleotide
  Antisense strand to SEQ ID NO: 1612899
cagcaucuuggauuacacg

SEQ ID NO: 1612901 - RNA, 19 nt, Artificial Sequence
  Description of Artificial Sequence: Synthetic oligonucleotide
  Sense strand starting at position 1536 of SEQ ID NO: 1560622
ggucccuccuagguuagaa

SEQ ID NO: 1612902 - RNA, 19 nt, Artificial Sequence
  Description of Artificial Sequence: Synthetic oligonucleotide
  Antisense strand to SEQ ID NO: 1612901
uucuaaccuaggagggacc

SEQ ID NO: 1612903 - RNA, 19 nt, Artificial Sequence
  Description of Artificial Sequence: Synthetic oligonucleotide
  Sense strand starting at position 1586 of SEQ ID NO: 1560622
agaucaggacugugacgau

SEQ ID NO: 1612904 - RNA, 19 nt, Artificial Sequence
  Description of Artificial Sequence: Synthetic oligonucleotide
  Antisense strand to SEQ ID NO: 1612903
aucgucacaguccugaucu

SEQ ID NO: 1612905 - RNA, 19 nt, Artificial Sequence
  Description of Artificial Sequence: Synthetic oligonucleotide
  Sense strand starting at position 2248 of SEQ ID NO: 1560622
guugacuucuuucuugaca

SEQ ID NO: 1612906 - RNA, 19 nt, Artificial Sequence
  Description of Artificial Sequence: Synthetic oligonucleotide
  Antisense strand to SEQ ID NO: 1612905
ugucaagaaagaagucaac

SEQ ID NO: 1612907 - RNA, 19 nt, Artificial Sequence
  Description of Artificial Sequence: Synthetic oligonucleotide
  Sense strand starting at position 2358 of SEQ ID NO: 1560622
ggaagaaaccucugagucu

SEQ ID NO: 1612908 - RNA, 19 nt, Artificial Sequence
  Description of Artificial Sequence: Synthetic oligonucleotide
  Antisense strand to SEQ ID NO: 1612907
agacucagagguuucuucc

SEQ ID NO: 1612909 - RNA, 19 nt, Artificial Sequence
  Description of Artificial Sequence: Synthetic oligonucleotide
  Sense strand starting at position 2453 of SEQ ID NO: 1560622
augacuuauguuugagcuu

SEQ ID NO: 1612910 - RNA, 19 nt, Artificial Sequence
  Description of Artificial Sequence: Synthetic oligonucleotide
  Antisense strand to SEQ ID NO: 1612909
aagcucaaacauaagucau

SEQ ID NO: 1612911 - RNA, 19 nt, Artificial Sequence
  Description of Artificial Sequence: Synthetic oligonucleotide
  Sense strand starting at position 2506 of SEQ ID NO: 1560622
uuugaugacugguuaucau

SEQ ID NO: 1612912 - RNA, 19 nt, Artificial Sequence
  Description of Artificial Sequence: Synthetic oligonucleotide
  Antisense strand to SEQ ID NO: 1612911
augauaaccagucaucaaa

SEQ ID NO: 1612913 - RNA, 19 nt, Artificial Sequence
  Description of Artificial Sequence: Synthetic oligonucleotide
  Sense strand starting at position 2516 of SEQ ID NO: 1560622
gguuaucauccgcugccua

SEQ ID NO: 1612914 - RNA, 19 nt, Artificial Sequence
  Description of Artificial Sequence: Synthetic oligonucleotide
  Antisense strand to SEQ ID NO: 1612913
uaggcagcggaugauaacc

SEQ ID NO: 1612915 - RNA, 19 nt, Artificial Sequence
  Description of Artificial Sequence: Synthetic oligonucleotide
  Sense strand starting at position 2534 of SEQ ID NO: 1560622
acgugaccuugguuuguaa

SEQ ID NO: 1612916 - RNA, 19 nt, Artificial Sequence
  Description of Artificial Sequence: Synthetic oligonucleotide
  Antisense strand to SEQ ID NO: 1612915
uuacaaaccaaggucacgu

SEQ ID NO: 1612917 - RNA, 19 nt, Artificial Sequence
  Description of Artificial Sequence: Synthetic oligonucleotide
  Sense strand starting at position 2536 of SEQ ID NO: 1560622
gugaccuugguuuguaaug

SEQ ID NO: 1612918 - RNA, 19 nt, Artificial Sequence
  Description of Artificial Sequence: Synthetic oligonucleotide
  Antisense strand to SEQ ID NO: 1612917
cauuacaaaccaaggucac

SEQ ID NO: 1612919 - RNA, 19 nt, Artificial Sequence
  Description of Artificial Sequence: Synthetic oligonucleotide
  Sense strand starting at position 2537 of SEQ ID NO: 1560622
ugaccuugguuuguaaugu

SEQ ID NO: 1612920 - RNA, 19 nt, Artificial Sequence
  Description of Artificial Sequence: Synthetic oligonucleotide
  Antisense strand to SEQ ID NO: 1612919
acauuacaaaccaagguca

SEQ ID NO: 1612921 - RNA, 19 nt, Artificial Sequence
  Description of Artificial Sequence: Synthetic oligonucleotide
  Sense strand starting at position 2572 of SEQ ID NO: 1560622
aguuucuuccuuugcagau

SEQ ID NO: 1612922 - RNA, 19 nt, Artificial Sequence
  Description of Artificial Sequence: Synthetic oligonucleotide
  Antisense strand to SEQ ID NO: 1612921
aucugcaaaggaagaaacu

SEQ ID NO: 1612923 - RNA, 19 nt, Artificial Sequence
  Description of Artificial Sequence: Synthetic oligonucleotide
  Sense strand starting at position 2584 of SEQ ID NO: 1560622
ugcagauuguugucaugaa

SEQ ID NO: 1612924 - RNA, 19 nt, Artificial Sequence
  Description of Artificial Sequence: Synthetic oligonucleotide
  Antisense strand to SEQ ID NO: 1612923
uucaugacaacaaucugca

SEQ ID NO: 1612925 - RNA, 19 nt, Artificial Sequence
  Description of Artificial Sequence: Synthetic oligonucleotide
  Sense strand starting at position 2628 of SEQ ID NO: 1560622
gucaguggugccugggaca

SEQ ID NO: 1612926 - RNA, 19 nt, Artificial Sequence
  Description of Artificial Sequence: Synthetic oligonucleotide
  Antisense strand to SEQ ID NO: 1612925
ugucccaggcaccacugac

SEQ ID NO: 1612927 - RNA, 19 nt, Artificial Sequence
  Description of Artificial Sequence: Synthetic oligonucleotide
  Sense strand starting at position 2654 of SEQ ID NO: 1560622
gggcucauuugugcuugau

SEQ ID NO: 1612928 - RNA, 19 nt, Artificial Sequence
  Description of Artificial Sequence: Synthetic oligonucleotide
  Antisense strand to SEQ ID NO: 1612927
aucaagcacaaaugagccc

SEQ ID NO: 1612929 - RNA, 19 nt, Artificial Sequence
  Description of Artificial Sequence: Synthetic oligonucleotide
  Sense strand starting at position 2694 of SEQ ID NO: 1560622
gaggcuuugggacgugaga

SEQ ID NO: 1612930 - RNA, 19 nt, Artificial Sequence
  Description of Artificial Sequence: Synthetic oligonucleotide
  Antisense strand to SEQ ID NO: 1612929
ucucacgucccaaagccuc

SEQ ID NO: 1612931 - RNA, 19 nt, Artificial Sequence
  Description of Artificial Sequence: Synthetic oligonucleotide
  Sense strand starting at position 2731 of SEQ ID NO: 1560622
ccacauucuguaggugauu

SEQ ID NO: 1612932 - RNA, 19 nt, Artificial Sequence
  Description of Artificial Sequence: Synthetic oligonucleotide
  Antisense strand to SEQ ID NO: 1612931
aaucaccuacagaaugugg

SEQ ID NO: 1612933 - RNA, 19 nt, Artificial Sequence
  Description of Artificial Sequence: Synthetic oligonucleotide
  Sense strand starting at position 2733 of SEQ ID NO: 1560622
acauucuguaggugauuga

SEQ ID NO: 1612934 - RNA, 19 nt, Artificial Sequence
  Description of Artificial Sequence: Synthetic oligonucleotide
  Antisense strand to SEQ ID NO: 1612933
ucaaucaccuacagaaugu

SEQ ID NO: 1612935 - RNA, 19 nt, Artificial Sequence
  Description of Artificial Sequence: Synthetic oligonucleotide
  Sense strand starting at position 2734 of SEQ ID NO: 1560622
cauucuguaggugauugau

SEQ ID NO: 1612936 - RNA, 19 nt, Artificial Sequence
  Description of Artificial Sequence: Synthetic oligonucleotide
  Antisense strand to SEQ ID NO: 1612935
aucaaucaccuacagaaug

SEQ ID NO: 1612937 - RNA, 19 nt, Artificial Sequence
  Description of Artificial Sequence: Synthetic oligonucleotide
  Sense strand starting at position 2736 of SEQ ID NO: 1560622
uucuguaggugauugauga

SEQ ID NO: 1612938 - RNA, 19 nt, Artificial Sequence
  Description of Artificial Sequence: Synthetic oligonucleotide
  Antisense strand to SEQ ID NO: 1612937
ucaucaaucaccuacagaa

SEQ ID NO: 1612939 - RNA, 19 nt, Artificial Sequence
  Description of Artificial Sequence: Synthetic oligonucleotide
  Sense strand starting at position 2743 of SEQ ID NO: 1560622
ggugauugaugaguccacu

SEQ ID NO: 1612940 - RNA, 19 nt, Artificial Sequence
  Description of Artificial Sequence: Synthetic oligonucleotide
  Antisense strand to SEQ ID NO: 1612939
aguggacucaucaaucacc

SEQ ID NO: 1612941 - RNA, 19 nt, Artificial Sequence
  Description of Artificial Sequence: Synthetic oligonucleotide
  Sense strand starting at position 2753 of SEQ ID NO: 1560622
gaguccacucaagauguca

SEQ ID NO: 1612942 - RNA, 19 nt, Artificial Sequence
  Description of Artificial Sequence: Synthetic oligonucleotide
  Antisense strand to SEQ ID NO: 1612941
ugacaucuugaguggacuc

SEQ ID NO: 1612943 - RNA, 19 nt, Artificial Sequence
  Description of Artificial Sequence: Synthetic oligonucleotide
  Sense strand starting at position 2767 of SEQ ID NO: 1560622
ugucacaucugaccguaau

SEQ ID NO: 1612944 - RNA, 19 nt, Artificial Sequence
  Description of Artificial Sequence: Synthetic oligonucleotide
  Antisense strand to SEQ ID NO: 1612943
auuacggucagaugugaca

SEQ ID NO: 1612945 - RNA, 19 nt, Artificial Sequence
  Description of Artificial Sequence: Synthetic oligonucleotide
  Sense strand starting at position 2768 of SEQ ID NO: 1560622
gucacaucugaccguaaug

SEQ ID NO: 1612946 - RNA, 19 nt, Artificial Sequence
  Description of Artificial Sequence: Synthetic oligonucleotide
  Antisense strand to SEQ ID NO: 1612945
cauuacggucagaugugac

SEQ ID NO: 1612947 - RNA, 19 nt, Artificial Sequence
  Description of Artificial Sequence: Synthetic oligonucleotide
  Sense strand starting at position 2770 of SEQ ID NO: 1560622
cacaucugaccguaaugga

SEQ ID NO: 1612948 - RNA, 19 nt, Artificial Sequence
  Description of Artificial Sequence: Synthetic oligonucleotide
  Antisense strand to SEQ ID NO: 1612947
uccauuacggucagaugug

SEQ ID NO: 1612949 - RNA, 19 nt, Artificial Sequence
  Description of Artificial Sequence: Synthetic oligonucleotide
  Sense strand starting at position 2777 of SEQ ID NO: 1560622
gaccguaauggagaaacgu

SEQ ID NO: 1612950 - RNA, 19 nt, Artificial Sequence
  Description of Artificial Sequence: Synthetic oligonucleotide
  Antisense strand to SEQ ID NO: 1612949
acguuucuccauuacgguc

SEQ ID NO: 1612951 - RNA, 19 nt, Artificial Sequence
  Description of Artificial Sequence: Synthetic oligonucleotide
  Sense strand starting at position 2785 of SEQ ID NO: 1560622
uggagaaacguauguguag

SEQ ID NO: 1612952 - RNA, 19 nt, Artificial Sequence
  Description of Artificial Sequence: Synthetic oligonucleotide
  Antisense strand to SEQ ID NO: 1612951
cuacacauacguuucucca

SEQ ID NO: 1612953 - RNA, 19 nt, Artificial Sequence
  Description of Artificial Sequence: Synthetic oligonucleotide
  Sense strand starting at position 2787 of SEQ ID NO: 1560622
gagaaacguauguguagca

SEQ ID NO: 1612954 - RNA, 19 nt, Artificial Sequence
  Description of Artificial Sequence: Synthetic oligonucleotide
  Antisense strand to SEQ ID NO: 1612953
ugcuacacauacguuucuc

SEQ ID NO: 1612955 - RNA, 19 nt, Artificial Sequence
  Description of Artificial Sequence: Synthetic oligonucleotide
  Sense strand starting at position 2797 of SEQ ID NO: 1560622
uguguagcauuucugaaau

SEQ ID NO: 1612956 - RNA, 19 nt, Artificial Sequence
  Description of Artificial Sequence: Synthetic oligonucleotide
  Antisense strand to SEQ ID NO: 1612955
auuucagaaaugcuacaca

SEQ ID NO: 1612957 - RNA, 19 nt, Artificial Sequence
  Description of Artificial Sequence: Synthetic oligonucleotide
  Sense strand starting at position 2799 of SEQ ID NO: 1560622
uguagcauuucugaaauac

SEQ ID NO: 1612958 - RNA, 19 nt, Artificial Sequence
  Description of Artificial Sequence: Synthetic oligonucleotide
  Antisense strand to SEQ ID NO: 1612957
guauuucagaaaugcuaca

SEQ ID NO: 1612959 - RNA, 19 nt, Artificial Sequence
  Description of Artificial Sequence: Synthetic oligonucleotide
  Sense strand starting at position 2986 of SEQ ID NO: 1560622
cgggaucugcaaugacagu

SEQ ID NO: 1612960 - RNA, 19 nt, Artificial Sequence
  Description of Artificial Sequence: Synthetic oligonucleotide
  Antisense strand to SEQ ID NO: 1612959
acugucauugcagaucccg

SEQ ID NO: 1612961 - RNA, 19 nt, Artificial Sequence
  Description of Artificial Sequence: Synthetic oligonucleotide
  Sense strand starting at position 3362 of SEQ ID NO: 1560622
augaucucucaguacaguu

SEQ ID NO: 1612962 - RNA, 19 nt, Artificial Sequence
  Description of Artificial Sequence: Synthetic oligonucleotide
  Antisense strand to SEQ ID NO: 1612961
aacuguacugagagaucau

SEQ ID NO: 1612963 - RNA, 19 nt, Artificial Sequence
  Description of Artificial Sequence: Synthetic oligonucleotide
  Sense strand starting at position 3374 of SEQ ID NO: 1560622
uacaguuguuucuugggau

SEQ ID NO: 1612964 - RNA, 19 nt, Artificial Sequence
  Description of Artificial Sequence: Synthetic oligonucleotide
  Antisense strand to SEQ ID NO: 1612963
aucccaagaaacaacugua

SEQ ID NO: 1612965 - RNA, 19 nt, Artificial Sequence
  Description of Artificial Sequence: Synthetic oligonucleotide
  Sense strand starting at position 3386 of SEQ ID NO: 1560622
uugggauacacaggcaauu

SEQ ID NO: 1612966 - RNA, 19 nt, Artificial Sequence
  Description of Artificial Sequence: Synthetic oligonucleotide
  Antisense strand to SEQ ID NO: 1612965
aauugccuguguaucccaa

SEQ ID NO: 1612967 - RNA, 19 nt, Artificial Sequence
  Description of Artificial Sequence: Synthetic oligonucleotide
  Sense strand starting at position 3850 of SEQ ID NO: 1560622
aaaguaagacucgaauguu

SEQ ID NO: 1612968 - RNA, 19 nt, Artificial Sequence
  Description of Artificial Sequence: Synthetic oligonucleotide
  Antisense strand to SEQ ID NO: 1612967
aacauucgagucuuacuuu

SEQ ID NO: 1612969 - RNA, 19 nt, Artificial Sequence
  Description of Artificial Sequence: Synthetic oligonucleotide
  Sense strand starting at position 9 of SEQ ID NO: 1560623
cggaucuguccuggagaga

SEQ ID NO: 1612970 - RNA, 19 nt, Artificial Sequence
  Description of Artificial Sequence: Synthetic oligonucleotide
  Antisense strand to SEQ ID NO: 1612969
ucucuccaggacagauccg

SEQ ID NO: 1612971 - RNA, 19 nt, Artificial Sequence
  Description of Artificial Sequence: Synthetic oligonucleotide
  Sense strand starting at position 543 of SEQ ID NO: 1560623
agugauggcuucuuagaaa

SEQ ID NO: 1612972 - RNA, 19 nt, Artificial Sequence
  Description of Artificial Sequence: Synthetic oligonucleotide
  Antisense strand to SEQ ID NO: 1612971
uuucuaagaagccaucacu

SEQ ID NO: 1612973 - RNA, 19 nt, Artificial Sequence
  Description of Artificial Sequence: Synthetic oligonucleotide
  Sense strand starting at position 1325 of SEQ ID NO: 1560623
uguguucccaggugaugga

SEQ ID NO: 1612974 - RNA, 19 nt, Artificial Sequence
  Description of Artificial Sequence: Synthetic oligonucleotide
  Antisense strand to SEQ ID NO: 1612973
uccaucaccugggaacaca

SEQ ID NO: 1612975 - RNA, 19 nt, Artificial Sequence
  Description of Artificial Sequence: Synthetic oligonucleotide
  Sense strand starting at position 1378 of SEQ ID NO: 1560623
ggucguauccguguaaucc

SEQ ID NO: 1612976 - RNA, 19 nt, Artificial Sequence
  Description of Artificial Sequence: Synthetic oligonucleotide
  Antisense strand to SEQ ID NO: 1612975
ggauuacacggauacgacc

SEQ ID NO: 1612977 - RNA, 19 nt, Artificial Sequence
  Description of Artificial Sequence: Synthetic oligonucleotide
  Sense strand starting at position 1382 of SEQ ID NO: 1560623
guauccguguaauccaaga

SEQ ID NO: 1612978 - RNA, 19 nt, Artificial Sequence
  Description of Artificial Sequence: Synthetic oligonucleotide
  Antisense strand to SEQ ID NO: 1612977
ucuuggauuacacggauac

SEQ ID NO: 1612979 - RNA, 19 nt, Artificial Sequence
  Description of Artificial Sequence: Synthetic oligonucleotide
  Sense strand starting at position 1384 of SEQ ID NO: 1560623
auccguguaauccaagaug

SEQ ID NO: 1612980 - RNA, 19 nt, Artificial Sequence
  Description of Artificial Sequence: Synthetic oligonucleotide
  Antisense strand to SEQ ID NO: 1612979
caucuuggauuacacggau

SEQ ID NO: 1612981 - RNA, 19 nt, Artificial Sequence
  Description of Artificial Sequence: Synthetic oligonucleotide
  Sense strand starting at position 1387 of SEQ ID NO: 1560623
cguguaauccaagaugcug

SEQ ID NO: 1612982 - RNA, 19 nt, Artificial Sequence
  Description of Artificial Sequence: Synthetic oligonucleotide
  Antisense strand to SEQ ID NO: 1612981
cagcaucuuggauuacacg

SEQ ID NO: 1612983 - RNA, 19 nt, Artificial Sequence
  Description of Artificial Sequence: Synthetic oligonucleotide
  Sense strand starting at position 1875 of SEQ ID NO: 1560623
ggucccuccuagguuagaa

SEQ ID NO: 1612984 - RNA, 19 nt, Artificial Sequence
  Description of Artificial Sequence: Synthetic oligonucleotide
  Antisense strand to SEQ ID NO: 1612983
uucuaaccuaggagggacc

SEQ ID NO: 1612985 - RNA, 19 nt, Artificial Sequence
  Description of Artificial Sequence: Synthetic oligonucleotide
  Sense strand starting at position 1925 of SEQ ID NO: 1560623
agaucaggacugugacgau

SEQ ID NO: 1612986 - RNA, 19 nt, Artificial Sequence
  Description of Artificial Sequence: Synthetic oligonucleotide
  Antisense strand to SEQ ID NO: 1612985
aucgucacaguccugaucu

SEQ ID NO: 1612987 - RNA, 19 nt, Artificial Sequence
  Description of Artificial Sequence: Synthetic oligonucleotide
  Sense strand starting at position 2587 of SEQ ID NO: 1560623
guugacuucuuucuugaca

SEQ ID NO: 1612988 - RNA, 19 nt, Artificial Sequence
  Description of Artificial Sequence: Synthetic oligonucleotide
  Antisense strand to SEQ ID NO: 1612987
ugucaagaaagaagucaac

SEQ ID NO: 1612989 - RNA, 19 nt, Artificial Sequence
  Description of Artificial Sequence: Synthetic oligonucleotide
  Sense strand starting at position 2697 of SEQ ID NO: 1560623
ggaagaaaccucugagucu

SEQ ID NO: 1612990 - RNA, 19 nt, Artificial Sequence
  Description of Artificial Sequence: Synthetic oligonucleotide
  Antisense strand to SEQ ID NO: 1612989
agacucagagguuucuucc

SEQ ID NO: 1612991 - RNA, 19 nt, Artificial Sequence
  Description of Artificial Sequence: Synthetic oligonucleotide
  Sense strand starting at position 2792 of SEQ ID NO: 1560623
augacuuauguuugagcuu

SEQ ID NO: 1612992 - RNA, 19 nt, Artificial Sequence
  Description of Artificial Sequence: Synthetic oligonucleotide
  Antisense strand to SEQ ID NO: 1612991
aagcucaaacauaagucau

SEQ ID NO: 1612993 - RNA, 19 nt, Artificial Sequence
  Description of Artificial Sequence: Synthetic oligonucleotide
  Sense strand starting at position 2845 of SEQ ID NO: 1560623
uuugaugacugguuaucau

SEQ ID NO: 1612994 - RNA, 19 nt, Artificial Sequence
  Description of Artificial Sequence: Synthetic oligonucleotide
  Antisense strand to SEQ ID NO: 1612993
augauaaccagucaucaaa

SEQ ID NO: 1612995 - RNA, 19 nt, Artificial Sequence
  Description of Artificial Sequence: Synthetic oligonucleotide
  Sense strand starting at position 2855 of SEQ ID NO: 1560623
gguuaucauccgcugccua

SEQ ID NO: 1612996 - RNA, 19 nt, Artificial Sequence
  Description of Artificial Sequence: Synthetic oligonucleotide
  Antisense strand to SEQ ID NO: 1612995
uaggcagcggaugauaacc

SEQ ID NO: 1612997 - RNA, 19 nt, Artificial Sequence
  Description of Artificial Sequence: Synthetic oligonucleotide
  Sense strand starting at position 2873 of SEQ ID NO: 1560623
acgugaccuugguuuguaa

SEQ ID NO: 1612998 - RNA, 19 nt, Artificial Sequence
  Description of Artificial Sequence: Synthetic oligonucleotide
  Antisense strand to SEQ ID NO: 1612997
uuacaaaccaaggucacgu

SEQ ID NO: 1612999 - RNA, 19 nt, Artificial Sequence
  Description of Artificial Sequence: Synthetic oligonucleotide
  Sense strand starting at position 2875 of SEQ ID NO: 1560623
gugaccuugguuuguaaug

SEQ ID NO: 1613000 - RNA, 19 nt, Artificial Sequence
  Description of Artificial Sequence: Synthetic oligonucleotide
  Antisense strand to SEQ ID NO: 1612999
cauuacaaaccaaggucac

SEQ ID NO: 1613001 - RNA, 19 nt, Artificial Sequence
  Description of Artificial Sequence: Synthetic oligonucleotide
  Sense strand starting at position 2876 of SEQ ID NO: 1560623
ugaccuugguuuguaaugu

SEQ ID NO: 1613002 - RNA, 19 nt, Artificial Sequence
  Description of Artificial Sequence: Synthetic oligonucleotide
  Antisense strand to SEQ ID NO: 1613001
acauuacaaaccaagguca

SEQ ID NO: 1613003 - RNA, 19 nt, Artificial Sequence
  Description of Artificial Sequence: Synthetic oligonucleotide
  Sense strand starting at position 2911 of SEQ ID NO: 1560623
aguuucuuccuuugcagau

SEQ ID NO: 1613004 - RNA, 19 nt, Artificial Sequence
  Description of Artificial Sequence: Synthetic oligonucleotide
  Antisense strand to SEQ ID NO: 1613003
aucugcaaaggaagaaacu

SEQ ID NO: 1613005 - RNA, 19 nt, Artificial Sequence
  Description of Artificial Sequence: Synthetic oligonucleotide
  Sense strand starting at position 2923 of SEQ ID NO: 1560623
ugcagauuguugucaugaa

SEQ ID NO: 1613006 - RNA, 19 nt, Artificial Sequence
  Description of Artificial Sequence: Synthetic oligonucleotide
  Antisense strand to SEQ ID NO: 1613005
uucaugacaacaaucugca

SEQ ID NO: 1613007 - RNA, 19 nt, Artificial Sequence
  Description of Artificial Sequence: Synthetic oligonucleotide
  Sense strand starting at position 2967 of SEQ ID NO: 1560623
gucaguggugccugggaca

SEQ ID NO: 1613008 - RNA, 19 nt, Artificial Sequence
  Description of Artificial Sequence: Synthetic oligonucleotide
  Antisense strand to SEQ ID NO: 1613007
ugucccaggcaccacugac

SEQ ID NO: 1613009 - RNA, 19 nt, Artificial Sequence
  Description of Artificial Sequence: Synthetic oligonucleotide
  Sense strand starting at position 2993 of SEQ ID NO: 1560623
gggcucauuugugcuugau

SEQ ID NO: 1613010 - RNA, 19 nt, Artificial Sequence
  Description of Artificial Sequence: Synthetic oligonucleotide
  Antisense strand to SEQ ID NO: 1613009
aucaagcacaaaugagccc

SEQ ID NO: 1613011 - RNA, 19 nt, Artificial Sequence
  Description of Artificial Sequence: Synthetic oligonucleotide
  Sense strand starting at position 3033 of SEQ ID NO: 1560623
gaggcuuugggacgugaga

SEQ ID NO: 1613012 - RNA, 19 nt, Artificial Sequence
  Description of Artificial Sequence: Synthetic oligonucleotide
  Antisense strand to SEQ ID NO: 1613011
ucucacgucccaaagccuc

SEQ ID NO: 1613013 - RNA, 19 nt, Artificial Sequence
  Description of Artificial Sequence: Synthetic oligonucleotide
  Sense strand starting at position 3070 of SEQ ID NO: 1560623
ccacauucuguaggugauu

SEQ ID NO: 1613014 - RNA, 19 nt, Artificial Sequence
  Description of Artificial Sequence: Synthetic oligonucleotide
  Antisense strand to SEQ ID NO: 1613013
aaucaccuacagaaugugg

SEQ ID NO: 1613015 - RNA, 19 nt, Artificial Sequence
  Description of Artificial Sequence: Synthetic oligonucleotide
  Sense strand starting at position 3072 of SEQ ID NO: 1560623
acauucuguaggugauuga

SEQ ID NO: 1613016 - RNA, 19 nt, Artificial Sequence
  Description of Artificial Sequence: Synthetic oligonucleotide
  Antisense strand to SEQ ID NO: 1613015
ucaaucaccuacagaaugu

SEQ ID NO: 1613017 - RNA, 19 nt, Artificial Sequence
  Description of Artificial Sequence: Synthetic oligonucleotide
  Sense strand starting at position 3073 of SEQ ID NO: 1560623
cauucuguaggugauugau

SEQ ID NO: 1613018 - RNA, 19 nt, Artificial Sequence
  Description of Artificial Sequence: Synthetic oligonucleotide
  Antisense strand to SEQ ID NO: 1613017
aucaaucaccuacagaaug

SEQ ID NO: 1613019 - RNA, 19 nt, Artificial Sequence
  Description of Artificial Sequence: Synthetic oligonucleotide
  Sense strand starting at position 3075 of SEQ ID NO: 1560623
uucuguaggugauugauga

SEQ ID NO: 1613020 - RNA, 19 nt, Artificial Sequence
  Description of Artificial Sequence: Synthetic oligonucleotide
  Antisense strand to SEQ ID NO: 1613019
ucaucaaucaccuacagaa

SEQ ID NO: 1613021 - RNA, 19 nt, Artificial Sequence
  Description of Artificial Sequence: Synthetic oligonucleotide
  Sense strand starting at position 3082 of SEQ ID NO: 1560623
ggugauugaugaguccacu

SEQ ID NO: 1613022 - RNA, 19 nt, Artificial Sequence
  Description of Artificial Sequence: Synthetic oligonucleotide
  Antisense strand to SEQ ID NO: 1613021
aguggacucaucaaucacc

SEQ ID NO: 1613023 - RNA, 19 nt, Artificial Sequence
  Description of Artificial Sequence: Synthetic oligonucleotide
  Sense strand starting at position 3092 of SEQ ID NO: 1560623
gaguccacucaagauguca

SEQ ID NO: 1613024 - RNA, 19 nt, Artificial Sequence
  Description of Artificial Sequence: Synthetic oligonucleotide
  Antisense strand to SEQ ID NO: 1613023
ugacaucuugaguggacuc

SEQ ID NO: 1613025 - RNA, 19 nt, Artificial Sequence
  Description of Artificial Sequence: Synthetic oligonucleotide
  Sense strand starting at position 3106 of SEQ ID NO: 1560623
ugucacaucugaccguaau

SEQ ID NO: 1613026 - RNA, 19 nt, Artificial Sequence
  Description of Artificial Sequence: Synthetic oligonucleotide
  Antisense strand to SEQ ID NO: 1613025
auuacggucagaugugaca

SEQ ID NO: 1613027 - RNA, 19 nt, Artificial Sequence
  Description of Artificial Sequence: Synthetic oligonucleotide
  Sense strand starting at position 3107 of SEQ ID NO: 1560623
gucacaucugaccguaaug

SEQ ID NO: 1613028 - RNA, 19 nt, Artificial Sequence
  Description of Artificial Sequence: Synthetic oligonucleotide
  Antisense strand to SEQ ID NO: 1613027
cauuacggucagaugugac

SEQ ID NO: 1613029 - RNA, 19 nt, Artificial Sequence
  Description of Artificial Sequence: Synthetic oligonucleotide
  Sense strand starting at position 3109 of SEQ ID NO: 1560623
cacaucugaccguaaugga

SEQ ID NO: 1613030 - RNA, 19 nt, Artificial Sequence
  Description of Artificial Sequence: Synthetic oligonucleotide
  Antisense strand to SEQ ID NO: 1613029
uccauuacggucagaugug

SEQ ID NO: 1613031 - RNA, 19 nt, Artificial Sequence
  Description of Artificial Sequence: Synthetic oligonucleotide
  Sense strand starting at position 3116 of SEQ ID NO: 1560623
gaccguaauggagaaacgu

SEQ ID NO: 1613032 - RNA, 19 nt, Artificial Sequence
  Description of Artificial Sequence: Synthetic oligonucleotide
  Antisense strand to SEQ ID NO: 1613031
acguuucuccauuacgguc

SEQ ID NO: 1613033 - RNA, 19 nt, Artificial Sequence
  Description of Artificial Sequence: Synthetic oligonucleotide
  Sense strand starting at position 3124 of SEQ ID NO: 1560623
uggagaaacguauguguag

SEQ ID NO: 1613034 - RNA, 19 nt, Artificial Sequence
  Description of Artificial Sequence: Synthetic oligonucleotide
  Antisense strand to SEQ ID NO: 1613033
cuacacauacguuucucca

SEQ ID NO: 1613035 - RNA, 19 nt, Artificial Sequence
  Description of Artificial Sequence: Synthetic oligonucleotide
  Sense strand starting at position 3126 of SEQ ID NO: 1560623
gagaaacguauguguagca

SEQ ID NO: 1613036 - RNA, 19 nt, Artificial Sequence
  Description of Artificial Sequence: Synthetic oligonucleotide
  Antisense strand to SEQ ID NO: 1613035
ugcuacacauacguuucuc

SEQ ID NO: 1613037 - RNA, 19 nt, Artificial Sequence
  Description of Artificial Sequence: Synthetic oligonucleotide
  Sense strand starting at position 3136 of SEQ ID NO: 1560623
uguguagcauuucugaaau

SEQ ID NO: 1613038 - RNA, 19 nt, Artificial Sequence
  Description of Artificial Sequence: Synthetic oligonucleotide
  Antisense strand to SEQ ID NO: 1613037
auuucagaaaugcuacaca

SEQ ID NO: 1613039 - RNA, 19 nt, Artificial Sequence
  Description of Artificial Sequence: Synthetic oligonucleotide
  Sense strand starting at position 3138 of SEQ ID NO: 1560623
uguagcauuucugaaauac

SEQ ID NO: 1613040 - RNA, 19 nt, Artificial Sequence
  Description of Artificial Sequence: Synthetic oligonucleotide
  Antisense strand to SEQ ID NO: 1613039
guauuucagaaaugcuaca

SEQ ID NO: 1613041 - RNA, 19 nt, Artificial Sequence
  Description of Artificial Sequence: Synthetic oligonucleotide
  Sense strand starting at position 3325 of SEQ ID NO: 1560623
cgggaucugcaaugacagu

SEQ ID NO: 1613042 - RNA, 19 nt, Artificial Sequence
  Description of Artificial Sequence: Synthetic oligonucleotide
  Antisense strand to SEQ ID NO: 1613041
acugucauugcagaucccg

SEQ ID NO: 1613043 - RNA, 19 nt, Artificial Sequence
  Description of Artificial Sequence: Synthetic oligonucleotide
  Sense strand starting at position 3701 of SEQ ID NO: 1560623
augaucucucaguacaguu

SEQ ID NO: 1613044 - RNA, 19 nt, Artificial Sequence
  Description of Artificial Sequence: Synthetic oligonucleotide
  Antisense strand to SEQ ID NO: 1613043
aacuguacugagagaucau

SEQ ID NO: 1613045 - RNA, 19 nt, Artificial Sequence
  Description of Artificial Sequence: Synthetic oligonucleotide
  Sense strand starting at position 3713 of SEQ ID NO: 1560623
uacaguuguuucuugggau

SEQ ID NO: 1613046 - RNA, 19 nt, Artificial Sequence
  Description of Artificial Sequence: Synthetic oligonucleotide
  Antisense strand to SEQ ID NO: 1613045
aucccaagaaacaacugua

SEQ ID NO: 1613047 - RNA, 19 nt, Artificial Sequence
  Description of Artificial Sequence: Synthetic oligonucleotide
  Sense strand starting at position 3725 of SEQ ID NO: 1560623
uugggauacacaggcaauu

SEQ ID NO: 1613048 - RNA, 19 nt, Artificial Sequence
  Description of Artificial Sequence: Synthetic oligonucleotide
  Antisense strand to SEQ ID NO: 1613047
aauugccuguguaucccaa

SEQ ID NO: 1613049 - RNA, 19 nt, Artificial Sequence
  Description of Artificial Sequence: Synthetic oligonucleotide
  Sense strand starting at position 797 of SEQ ID NO: 1560624
guauaauaguaauagcaug

SEQ ID NO: 1613050 - RNA, 19 nt, Artificial Sequence
  Description of Artificial Sequence: Synthetic oligonucleotide
  Antisense strand to SEQ ID NO: 1613049
caugcuauuacuauuauac

SEQ ID NO: 1613051 - RNA, 19 nt, Artificial Sequence
  Description of Artificial Sequence: Synthetic oligonucleotide
  Sense strand starting at position 964 of SEQ ID NO: 1560624
gccacaucggagggucaua

SEQ ID NO: 1613052 - RNA, 19 nt, Artificial Sequence
  Description of Artificial Sequence: Synthetic oligonucleotide
  Antisense strand to SEQ ID NO: 1613051
uaugacccuccgauguggc

SEQ ID NO: 1613053 - RNA, 19 nt, Artificial Sequence
  Description of Artificial Sequence: Synthetic oligonucleotide
  Sense strand starting at position 1274 of SEQ ID NO: 1560624
ugcugugucauggauggga

SEQ ID NO: 1613054 - RNA, 19 nt, Artificial Sequence
  Description of Artificial Sequence: Synthetic oligonucleotide
  Antisense strand to SEQ ID NO: 1613053
ucccauccaugacacagca

SEQ ID NO: 1613055 - RNA, 19 nt, Artificial Sequence
  Description of Artificial Sequence: Synthetic oligonucleotide
  Sense strand starting at position 1702 of SEQ ID NO: 1560624
gagaguucccugugaggca

SEQ ID NO: 1613056 - RNA, 19 nt, Artificial Sequence
  Description of Artificial Sequence: Synthetic oligonucleotide
  Antisense strand to SEQ ID NO: 1613055
ugccucacagggaacucuc

SEQ ID NO: 1613057 - RNA, 19 nt, Artificial Sequence
  Description of Artificial Sequence: Synthetic oligonucleotide
  Sense strand starting at position 1703 of SEQ ID NO: 1560624
agaguucccugugaggcau

SEQ ID NO: 1613058 - RNA, 19 nt, Artificial Sequence
  Description of Artificial Sequence: Synthetic oligonucleotide
  Antisense strand to SEQ ID NO: 1613057
augccucacagggaacucu

SEQ ID NO: 1613059 - RNA, 19 nt, Artificial Sequence
  Description of Artificial Sequence: Synthetic oligonucleotide
  Sense strand starting at position 2044 of SEQ ID NO: 1560624
ccaagaaccuggcucugau

SEQ ID NO: 1613060 - RNA, 19 nt, Artificial Sequence
  Description of Artificial Sequence: Synthetic oligonucleotide
  Antisense strand to SEQ ID NO: 1613059
aucagagccagguucuugg

SEQ ID NO: 1613061 - RNA, 19 nt, Artificial Sequence
  Description of Artificial Sequence: Synthetic oligonucleotide
  Sense strand starting at position 2161 of SEQ ID NO: 1560624
aucuuuaucucacugagga

SEQ ID NO: 1613062 - RNA, 19 nt, Artificial Sequence
  Description of Artificial Sequence: Synthetic oligonucleotide
  Antisense strand to SEQ ID NO: 1613061
uccucagugagauaaagau

SEQ ID NO: 1613063 - RNA, 19 nt, Artificial Sequence
  Description of Artificial Sequence: Synthetic oligonucleotide
  Sense strand starting at position 2162 of SEQ ID NO: 1560624
ucuuuaucucacugaggac

SEQ ID NO: 1613064 - RNA, 19 nt, Artificial Sequence
  Description of Artificial Sequence: Synthetic oligonucleotide
  Antisense strand to SEQ ID NO: 1613063
guccucagugagauaaaga

SEQ ID NO: 1613065 - RNA, 19 nt, Artificial Sequence
  Description of Artificial Sequence: Synthetic oligonucleotide
  Sense strand starting at position 2470 of SEQ ID NO: 1560624
cagagaaaugcagggucua

SEQ ID NO: 1613066 - RNA, 19 nt, Artificial Sequence
  Description of Artificial Sequence: Synthetic oligonucleotide
  Antisense strand to SEQ ID NO: 1613065
uagacccugcauuucucug

SEQ ID NO: 1613067 - RNA, 19 nt, Artificial Sequence
  Description of Artificial Sequence: Synthetic oligonucleotide
  Sense strand starting at position 2872 of SEQ ID NO: 1560624
ucaucuaggguuuauguga

SEQ ID NO: 1613068 - RNA, 19 nt, Artificial Sequence
  Description of Artificial Sequence: Synthetic oligonucleotide
  Antisense strand to SEQ ID NO: 1613067
ucacauaaacccuagauga

SEQ ID NO: 1613069 - RNA, 19 nt, Artificial Sequence
  Description of Artificial Sequence: Synthetic oligonucleotide
  Sense strand starting at position 2879 of SEQ ID NO: 1560624
ggguuuaugugacuuugga

SEQ ID NO: 1613070 - RNA, 19 nt, Artificial Sequence
  Description of Artificial Sequence: Synthetic oligonucleotide
  Antisense strand to SEQ ID NO: 1613069
uccaaagucacauaaaccc

SEQ ID NO: 1613071 - RNA, 19 nt, Artificial Sequence
  Description of Artificial Sequence: Synthetic oligonucleotide
  Sense strand starting at position 2888 of SEQ ID NO: 1560624
ugacuuuggacaugaaugu

SEQ ID NO: 1613072 - RNA, 19 nt, Artificial Sequence
  Description of Artificial Sequence: Synthetic oligonucleotide
  Antisense strand to SEQ ID NO: 1613071
acauucauguccaaaguca

SEQ ID NO: 1613073 - RNA, 19 nt, Artificial Sequence
  Description of Artificial Sequence: Synthetic oligonucleotide
  Sense strand starting at position 3113 of SEQ ID NO: 1560624
ccaugaaauucuccuugug

SEQ ID NO: 1613074 - RNA, 19 nt, Artificial Sequence
  Description of Artificial Sequence: Synthetic oligonucleotide
  Antisense strand to SEQ ID NO: 1613073
cacaaggagaauuucaugg

SEQ ID NO: 1613075 - RNA, 19 nt, Artificial Sequence
  Description of Artificial Sequence: Synthetic oligonucleotide
  Sense strand starting at position 3116 of SEQ ID NO: 1560624
ugaaauucuccuugugaua

SEQ ID NO: 1613076 - RNA, 19 nt, Artificial Sequence
  Description of Artificial Sequence: Synthetic oligonucleotide
  Antisense strand to SEQ ID NO: 1613075
uaucacaaggagaauuuca

SEQ ID NO: 1613077 - RNA, 19 nt, Artificial Sequence
  Description of Artificial Sequence: Synthetic oligonucleotide
  Sense strand starting at position 3118 of SEQ ID NO: 1560624
aaauucuccuugugauacg

SEQ ID NO: 1613078 - RNA, 19 nt, Artificial Sequence
  Description of Artificial Sequence: Synthetic oligonucleotide
  Antisense strand to SEQ ID NO: 1613077
cguaucacaaggagaauuu

SEQ ID NO: 1613079 - RNA, 19 nt, Artificial Sequence
  Description of Artificial Sequence: Synthetic oligonucleotide
  Sense strand starting at position 3123 of SEQ ID NO: 1560624
cuccuugugauacgucuga

SEQ ID NO: 1613080 - RNA, 19 nt, Artificial Sequence
  Description of Artificial Sequence: Synthetic oligonucleotide
  Antisense strand to SEQ ID NO: 1613079
ucagacguaucacaaggag

SEQ ID NO: 1613081 - RNA, 19 nt, Artificial Sequence
  Description of Artificial Sequence: Synthetic oligonucleotide
  Sense strand starting at position 3691 of SEQ ID NO: 1560624
aggaaugacaaccguauga

SEQ ID NO: 1613082 - RNA, 19 nt, Artificial Sequence
  Description of Artificial Sequence: Synthetic oligonucleotide
  Antisense strand to SEQ ID NO: 1613081
ucauacgguugucauuccu

SEQ ID NO: 1613083 - RNA, 19 nt, Artificial Sequence
  Description of Artificial Sequence: Synthetic oligonucleotide
  Sense strand starting at position 3716 of SEQ ID NO: 1560624
aauagacaguuguugaaau

SEQ ID NO: 1613084 - RNA, 19 nt, Artificial Sequence
  Description of Artificial Sequence: Synthetic oligonucleotide
  Antisense strand to SEQ ID NO: 1613083
auuucaacaacugucuauu

SEQ ID NO: 1613085 - RNA, 19 nt, Artificial Sequence
  Description of Artificial Sequence: Synthetic oligonucleotide
  Sense strand starting at position 3744 of SEQ ID NO: 1560624
agacaucgugaaggugaaa

SEQ ID NO: 1613086 - RNA, 19 nt, Artificial Sequence
  Description of Artificial Sequence: Synthetic oligonucleotide
  Antisense strand to SEQ ID NO: 1613085
uuucaccuucacgaugucu

SEQ ID NO: 1613087 - RNA, 19 nt, Artificial Sequence
  Description of Artificial Sequence: Synthetic oligonucleotide
  Sense strand starting at position 3792 of SEQ ID NO: 1560624
gaauuuaugucugggcaug

SEQ ID NO: 1613088 - RNA, 19 nt, Artificial Sequence
  Description of Artificial Sequence: Synthetic oligonucleotide
  Antisense strand to SEQ ID NO: 1613087
caugcccagacauaaauuc

SEQ ID NO: 1613089 - RNA, 19 nt, Artificial Sequence
  Description of Artificial Sequence: Synthetic oligonucleotide
  Sense strand starting at position 624 of SEQ ID NO: 1560625
acuguaggcuccuaggaga

SEQ ID NO: 1613090 - RNA, 19 nt, Artificial Sequence
  Description of Artificial Sequence: Synthetic oligonucleotide
  Antisense strand to SEQ ID NO: 1613089
ucuccuaggagccuacagu

SEQ ID NO: 1613091 - RNA, 19 nt, Artificial Sequence
  Description of Artificial Sequence: Synthetic oligonucleotide
  Sense strand starting at position 1142 of SEQ ID NO: 1560625
ccgucauccucaucaguca

SEQ ID NO: 1613092 - RNA, 19 nt, Artificial Sequence
  Description of Artificial Sequence: Synthetic oligonucleotide
  Antisense strand to SEQ ID NO: 1613091
ugacugaugaggaugacgg

SEQ ID NO: 1613093 - RNA, 19 nt, Artificial Sequence
  Description of Artificial Sequence: Synthetic oligonucleotide
  Sense strand starting at position 1741 of SEQ ID NO: 1560625
uuuaaaucucaccgaggca

SEQ ID NO: 1613094 - RNA, 19 nt, Artificial Sequence
  Description of Artificial Sequence: Synthetic oligonucleotide
  Antisense strand to SEQ ID NO: 1613093
ugccucggugagauuuaaa

SEQ ID NO: 1613095 - RNA, 19 nt, Artificial Sequence
  Description of Artificial Sequence: Synthetic oligonucleotide
  Sense strand starting at position 1993 of SEQ ID NO: 1560625
ccagguucucugcagacau

SEQ ID NO: 1613096 - RNA, 19 nt, Artificial Sequence
  Description of Artificial Sequence: Synthetic oligonucleotide
  Antisense strand to SEQ ID NO: 1613095
augucugcagagaaccugg

SEQ ID NO: 1613097 - RNA, 19 nt, Artificial Sequence
  Description of Artificial Sequence: Synthetic oligonucleotide
  Sense strand starting at position 2046 of SEQ ID NO: 1560625
ugcugucugccuggucuua

SEQ ID NO: 1613098 - RNA, 19 nt, Artificial Sequence
  Description of Artificial Sequence: Synthetic oligonucleotide
  Antisense strand to SEQ ID NO: 1613097
uaagaccaggcagacagca

SEQ ID NO: 1613099 - RNA, 19 nt, Artificial Sequence
  Description of Artificial Sequence: Synthetic oligonucleotide
  Sense strand starting at position 2047 of SEQ ID NO: 1560625
gcugucugccuggucuuaa

SEQ ID NO: 1613100 - RNA, 19 nt, Artificial Sequence
  Description of Artificial Sequence: Synthetic oligonucleotide
  Antisense strand to SEQ ID NO: 1613099
uuaagaccaggcagacagc

SEQ ID NO: 1613101 - RNA, 19 nt, Artificial Sequence
  Description of Artificial Sequence: Synthetic oligonucleotide
  Sense strand starting at position 2048 of SEQ ID NO: 1560625
cugucugccuggucuuaau

SEQ ID NO: 1613102 - RNA, 19 nt, Artificial Sequence
  Description of Artificial Sequence: Synthetic oligonucleotide
  Antisense strand to SEQ ID NO: 1613101
auuaagaccaggcagacag

SEQ ID NO: 1613103 - RNA, 19 nt, Artificial Sequence
  Description of Artificial Sequence: Synthetic oligonucleotide
  Sense strand starting at position 2089 of SEQ ID NO: 1560625
cccguauguaucguguguu

SEQ ID NO: 1613104 - RNA, 19 nt, Artificial Sequence
  Description of Artificial Sequence: Synthetic oligonucleotide
  Antisense strand to SEQ ID NO: 1613103
aacacacgauacauacggg

SEQ ID NO: 1613105 - RNA, 19 nt, Artificial Sequence
  Description of Artificial Sequence: Synthetic oligonucleotide
  Sense strand starting at position 2094 of SEQ ID NO: 1560625
auguaucguguguuugcaa

SEQ ID NO: 1613106 - RNA, 19 nt, Artificial Sequence
  Description of Artificial Sequence: Synthetic oligonucleotide
  Antisense strand to SEQ ID NO: 1613105
uugcaaacacacgauacau

SEQ ID NO: 1613107 - RNA, 19 nt, Artificial Sequence
  Description of Artificial Sequence: Synthetic oligonucleotide
  Sense strand starting at position 2095 of SEQ ID NO: 1560625
uguaucguguguuugcaaa

SEQ ID NO: 1613108 - RNA, 19 nt, Artificial Sequence
  Description of Artificial Sequence: Synthetic oligonucleotide
  Antisense strand to SEQ ID NO: 1613107
uuugcaaacacacgauaca

SEQ ID NO: 1613109 - RNA, 19 nt, Artificial Sequence
  Description of Artificial Sequence: Synthetic oligonucleotide
  Sense strand starting at position 2246 of SEQ ID NO: 1560625
ucacauaauguagguuuau

SEQ ID NO: 1613110 - RNA, 19 nt, Artificial Sequence
  Description of Artificial Sequence: Synthetic oligonucleotide
  Antisense strand to SEQ ID NO: 1613109
auaaaccuacauuauguga

SEQ ID NO: 1613111 - RNA, 19 nt, Artificial Sequence
  Description of Artificial Sequence: Synthetic oligonucleotide
  Sense strand starting at position 2252 of SEQ ID NO: 1560625
aauguagguuuauugacuu

SEQ ID NO: 1613112 - RNA, 19 nt, Artificial Sequence
  Description of Artificial Sequence: Synthetic oligonucleotide
  Antisense strand to SEQ ID NO: 1613111
aagucaauaaaccuacauu

SEQ ID NO: 1613113 - RNA, 19 nt, Artificial Sequence
  Description of Artificial Sequence: Synthetic oligonucleotide
  Sense strand starting at position 2653 of SEQ ID NO: 1560625
ggacaucucugggagguca

SEQ ID NO: 1613114 - RNA, 19 nt, Artificial Sequence
  Description of Artificial Sequence: Synthetic oligonucleotide
  Antisense strand to SEQ ID NO: 1613113
ugaccucccagagaugucc

SEQ ID NO: 1613115 - RNA, 19 nt, Artificial Sequence
  Description of Artificial Sequence: Synthetic oligonucleotide
  Sense strand starting at position 2723 of SEQ ID NO: 1560625
agagcacuucucugcgaug

SEQ ID NO: 1613116 - RNA, 19 nt, Artificial Sequence
  Description of Artificial Sequence: Synthetic oligonucleotide
  Antisense strand to SEQ ID NO: 1613115
caucgcagagaagugcucu

SEQ ID NO: 1613117 - RNA, 19 nt, Artificial Sequence
  Description of Artificial Sequence: Synthetic oligonucleotide
  Sense strand starting at position 2808 of SEQ ID NO: 1560625
cuacucaugucccauggga

SEQ ID NO: 1613118 - RNA, 19 nt, Artificial Sequence
  Description of Artificial Sequence: Synthetic oligonucleotide
  Antisense strand to SEQ ID NO: 1613117
ucccaugggacaugaguag

SEQ ID NO: 1613119 - RNA, 19 nt, Artificial Sequence
  Description of Artificial Sequence: Synthetic oligonucleotide
  Sense strand starting at position 2859 of SEQ ID NO: 1560625
accagagcccgguagacau

SEQ ID NO: 1613120 - RNA, 19 nt, Artificial Sequence
  Description of Artificial Sequence: Synthetic oligonucleotide
  Antisense strand to SEQ ID NO: 1613119
augucuaccgggcucuggu

SEQ ID NO: 1613121 - RNA, 19 nt, Artificial Sequence
  Description of Artificial Sequence: Synthetic oligonucleotide
  Sense strand starting at position 3274 of SEQ ID NO: 1560625
agauguuaguaugcggagu

SEQ ID NO: 1613122 - RNA, 19 nt, Artificial Sequence
  Description of Artificial Sequence: Synthetic oligonucleotide
  Antisense strand to SEQ ID NO: 1613121
acuccgcauacuaacaucu

SEQ ID NO: 1613123 - RNA, 19 nt, Artificial Sequence
  Description of Artificial Sequence: Synthetic oligonucleotide
  Sense strand starting at position 3278 of SEQ ID NO: 1560625
guuaguaugcggagugaug

SEQ ID NO: 1613124 - RNA, 19 nt, Artificial Sequence
  Description of Artificial Sequence: Synthetic oligonucleotide
  Antisense strand to SEQ ID NO: 1613123
caucacuccgcauacuaac

SEQ ID NO: 1613125 - RNA, 19 nt, Artificial Sequence
  Description of Artificial Sequence: Synthetic oligonucleotide
  Sense strand starting at position 3287 of SEQ ID NO: 1560625
cggagugauggacauguua

SEQ ID NO: 1613126 - RNA, 19 nt, Artificial Sequence
  Description of Artificial Sequence: Synthetic oligonucleotide
  Antisense strand to SEQ ID NO: 1613125
uaacauguccaucacuccg

SEQ ID NO: 1613127 - RNA, 19 nt, Artificial Sequence
  Description of Artificial Sequence: Synthetic oligonucleotide
  Sense strand starting at position 3289 of SEQ ID NO: 1560625
gagugauggacauguuaac

SEQ ID NO: 1613128 - RNA, 19 nt, Artificial Sequence
  Description of Artificial Sequence: Synthetic oligonucleotide
  Antisense strand to SEQ ID NO: 1613127
guuaacauguccaucacuc

SEQ ID NO: 1613129 - RNA, 19 nt, Artificial Sequence
  Description of Artificial Sequence: Synthetic oligonucleotide
  Sense strand starting at position 3302 of SEQ ID NO: 1560625
guuaacugucuugauucca

SEQ ID NO: 1613130 - RNA, 19 nt, Artificial Sequence
  Description of Artificial Sequence: Synthetic oligonucleotide
  Antisense strand to SEQ ID NO: 1613129
uggaaucaagacaguuaac

SEQ ID NO: 1613131 - RNA, 19 nt, Artificial Sequence
  Description of Artificial Sequence: Synthetic oligonucleotide
  Sense strand starting at position 3317 of SEQ ID NO: 1560625
uccaucauuccacagugua

SEQ ID NO: 1613132 - RNA, 19 nt, Artificial Sequence
  Description of Artificial Sequence: Synthetic oligonucleotide
  Antisense strand to SEQ ID NO: 1613131
uacacuguggaaugaugga

SEQ ID NO: 1613133 - RNA, 19 nt, Artificial Sequence
  Description of Artificial Sequence: Synthetic oligonucleotide
  Sense strand starting at position 3467 of SEQ ID NO: 1560625
uuagaucacugccugugua

SEQ ID NO: 1613134 - RNA, 19 nt, Artificial Sequence
  Description of Artificial Sequence: Synthetic oligonucleotide
  Antisense strand to SEQ ID NO: 1613133
uacacaggcagugaucuaa

SEQ ID NO: 1613135 - RNA, 19 nt, Artificial Sequence
  Description of Artificial Sequence: Synthetic oligonucleotide
  Sense strand starting at position 3468 of SEQ ID NO: 1560625
uagaucacugccuguguaa

SEQ ID NO: 1613136 - RNA, 19 nt, Artificial Sequence
  Description of Artificial Sequence: Synthetic oligonucleotide
  Antisense strand to SEQ ID NO: 1613135
uuacacaggcagugaucua

SEQ ID NO: 1613137 - RNA, 19 nt, Artificial Sequence
  Description of Artificial Sequence: Synthetic oligonucleotide
  Sense strand starting at position 3529 of SEQ ID NO: 1560625
gggcacguccugcaaugau

SEQ ID NO: 1613138 - RNA, 19 nt, Artificial Sequence
  Description of Artificial Sequence: Synthetic oligonucleotide
  Antisense strand to SEQ ID NO: 1613137
aucauugcaggacgugccc

SEQ ID NO: 1613139 - RNA, 19 nt, Artificial Sequence
  Description of Artificial Sequence: Synthetic oligonucleotide
  Sense strand starting at position 3539 of SEQ ID NO: 1560625
ugcaaugaucuggaauugu

SEQ ID NO: 1613140 - RNA, 19 nt, Artificial Sequence
  Description of Artificial Sequence: Synthetic oligonucleotide
  Antisense strand to SEQ ID NO: 1613139
acaauuccagaucauugca

SEQ ID NO: 1613141 - RNA, 19 nt, Artificial Sequence
  Description of Artificial Sequence: Synthetic oligonucleotide
  Sense strand starting at position 3550 of SEQ ID NO: 1560625
ggaauuguagucuguccua

SEQ ID NO: 1613142 - RNA, 19 nt, Artificial Sequence
  Description of Artificial Sequence: Synthetic oligonucleotide
  Antisense strand to SEQ ID NO: 1613141
uaggacagacuacaauucc

SEQ ID NO: 1613143 - RNA, 19 nt, Artificial Sequence
  Description of Artificial Sequence: Synthetic oligonucleotide
  Sense strand starting at position 3553 of SEQ ID NO: 1560625
auuguagucuguccuagau

SEQ ID NO: 1613144 - RNA, 19 nt, Artificial Sequence
  Description of Artificial Sequence: Synthetic oligonucleotide
  Antisense strand to SEQ ID NO: 1613143
aucuaggacagacuacaau

SEQ ID NO: 1613145 - RNA, 19 nt, Artificial Sequence
  Description of Artificial Sequence: Synthetic oligonucleotide
  Sense strand starting at position 3588 of SEQ ID NO: 1560625
cugucucuguucuucuuaa

SEQ ID NO: 1613146 - RNA, 19 nt, Artificial Sequence
  Description of Artificial Sequence: Synthetic oligonucleotide
  Antisense strand to SEQ ID NO: 1613145
uuaagaagaacagagacag

SEQ ID NO: 1613147 - RNA, 19 nt, Artificial Sequence
  Description of Artificial Sequence: Synthetic oligonucleotide
  Sense strand starting at position 3589 of SEQ ID NO: 1560625
ugucucuguucuucuuaaa

SEQ ID NO: 1613148 - RNA, 19 nt, Artificial Sequence
  Description of Artificial Sequence: Synthetic oligonucleotide
  Antisense strand to SEQ ID NO: 1613147
uuuaagaagaacagagaca

SEQ ID NO: 1613149 - RNA, 19 nt, Artificial Sequence
  Description of Artificial Sequence: Synthetic oligonucleotide
  Sense strand starting at position 3828 of SEQ ID NO: 1560625
gggucacucucagaaucac

SEQ ID NO: 1613150 - RNA, 19 nt, Artificial Sequence
  Description of Artificial Sequence: Synthetic oligonucleotide
  Antisense strand to SEQ ID NO: 1613149
gugauucugagagugaccc

SEQ ID NO: 1613151 - RNA, 19 nt, Artificial Sequence
  Description of Artificial Sequence: Synthetic oligonucleotide
  Sense strand starting at position 3836 of SEQ ID NO: 1560625
cucagaaucacgggacagu

SEQ ID NO: 1613152 - RNA, 19 nt, Artificial Sequence
  Description of Artificial Sequence: Synthetic oligonucleotide
  Antisense strand to SEQ ID NO: 1613151
acugucccgugauucugag

SEQ ID NO: 1613153 - RNA, 19 nt, Artificial Sequence
  Description of Artificial Sequence: Synthetic oligonucleotide
  Sense strand starting at position 3852 of SEQ ID NO: 1560625
aguaucucauuucgaggau

SEQ ID NO: 1613154 - RNA, 19 nt, Artificial Sequence
  Description of Artificial Sequence: Synthetic oligonucleotide
  Antisense strand to SEQ ID NO: 1613153
auccucgaaaugagauacu

SEQ ID NO: 1613155 - RNA, 19 nt, Artificial Sequence
  Description of Artificial Sequence: Synthetic oligonucleotide
  Sense strand starting at position 3853 of SEQ ID NO: 1560625
guaucucauuucgaggauu

SEQ ID NO: 1613156 - RNA, 19 nt, Artificial Sequence
  Description of Artificial Sequence: Synthetic oligonucleotide
  Antisense strand to SEQ ID NO: 1613155
aauccucgaaaugagauac

SEQ ID NO: 1613157 - RNA, 19 nt, Artificial Sequence
  Description of Artificial Sequence: Synthetic oligonucleotide
  Sense strand starting at position 3864 of SEQ ID NO: 1560625
cgaggauuuccaugugucu

SEQ ID NO: 1613158 - RNA, 19 nt, Artificial Sequence
  Description of Artificial Sequence: Synthetic oligonucleotide
  Antisense strand to SEQ ID NO: 1613157
agacacauggaaauccucg

SEQ ID NO: 1613159 - RNA, 19 nt, Artificial Sequence
  Description of Artificial Sequence: Synthetic oligonucleotide
  Sense strand starting at position 3873 of SEQ ID NO: 1560625
ccaugugucucuccacauu

SEQ ID NO: 1613160 - RNA, 19 nt, Artificial Sequence
  Description of Artificial Sequence: Synthetic oligonucleotide
  Antisense strand to SEQ ID NO: 1613159
aauguggagagacacaugg

SEQ ID NO: 1613161 - RNA, 19 nt, Artificial Sequence
  Description of Artificial Sequence: Synthetic oligonucleotide
  Sense strand starting at position 3882 of SEQ ID NO: 1560625
ucuccacauuuguguguaa

SEQ ID NO: 1613162 - RNA, 19 nt, Artificial Sequence
  Description of Artificial Sequence: Synthetic oligonucleotide
  Antisense strand to SEQ ID NO: 1613161
uuacacacaaauguggaga

SEQ ID NO: 1613163 - RNA, 19 nt, Artificial Sequence
  Description of Artificial Sequence: Synthetic oligonucleotide
  Sense strand starting at position 3895 of SEQ ID NO: 1560625
guguaaggaccuuauugga

SEQ ID NO: 1613164 - RNA, 19 nt, Artificial Sequence
  Description of Artificial Sequence: Synthetic oligonucleotide
  Antisense strand to SEQ ID NO: 1613163
uccaauaagguccuuacac

SEQ ID NO: 1613165 - RNA, 19 nt, Artificial Sequence
  Description of Artificial Sequence: Synthetic oligonucleotide
  Sense strand starting at position 3930 of SEQ ID NO: 1560625
gcuugaugcgucugacagu

SEQ ID NO: 1613166 - RNA, 19 nt, Artificial Sequence
  Description of Artificial Sequence: Synthetic oligonucleotide
  Antisense strand to SEQ ID NO: 1613165
acugucagacgcaucaagc

SEQ ID NO: 1613167 - RNA, 19 nt, Artificial Sequence
  Description of Artificial Sequence: Synthetic oligonucleotide
  Sense strand starting at position 3981 of SEQ ID NO: 1560625
gcuagaaagccauacacau

SEQ ID NO: 1613168 - RNA, 19 nt, Artificial Sequence
  Description of Artificial Sequence: Synthetic oligonucleotide
  Antisense strand to SEQ ID NO: 1613167
auguguauggcuuucuagc

SEQ ID NO: 1613169 - RNA, 19 nt, Artificial Sequence
  Description of Artificial Sequence: Synthetic oligonucleotide
  Sense strand starting at position 162 of SEQ ID NO: 1560626
ccuuguacagaacgaauau

SEQ ID NO: 1613170 - RNA, 19 nt, Artificial Sequence
  Description of Artificial Sequence: Synthetic oligonucleotide
  Antisense strand to SEQ ID NO: 1613169
auauucguucuguacaagg

SEQ ID NO: 1613171 - RNA, 19 nt, Artificial Sequence
  Description of Artificial Sequence: Synthetic oligonucleotide
  Sense strand starting at position 173 of SEQ ID NO: 1560626
acgaauaugucauagccga

SEQ ID NO: 1613172 - RNA, 19 nt, Artificial Sequence
  Description of Artificial Sequence: Synthetic oligonucleotide
  Antisense strand to SEQ ID NO: 1613171
ucggcuaugacauauucgu

SEQ ID NO: 1613173 - RNA, 19 nt, Artificial Sequence
  Description of Artificial Sequence: Synthetic oligonucleotide
  Sense strand starting at position 418 of SEQ ID NO: 1560626
gggucugucuuggaguagu

SEQ ID NO: 1613174 - RNA, 19 nt, Artificial Sequence
  Description of Artificial Sequence: Synthetic oligonucleotide
  Antisense strand to SEQ ID NO: 1613173
acuacuccaagacagaccc

SEQ ID NO: 1613175 - RNA, 19 nt, Artificial Sequence
  Description of Artificial Sequence: Synthetic oligonucleotide
  Sense strand starting at position 429 of SEQ ID NO: 1560626
ggaguaguuccagaccgau

SEQ ID NO: 1613176 - RNA, 19 nt, Artificial Sequence
  Description of Artificial Sequence: Synthetic oligonucleotide
  Antisense strand to SEQ ID NO: 1613175
aucggucuggaacuacucc

SEQ ID NO: 1613177 - RNA, 19 nt, Artificial Sequence
  Description of Artificial Sequence: Synthetic oligonucleotide
  Sense strand starting at position 432 of SEQ ID NO: 1560626
guaguuccagaccgauagu

SEQ ID NO: 1613178 - RNA, 19 nt, Artificial Sequence
  Description of Artificial Sequence: Synthetic oligonucleotide
  Antisense strand to SEQ ID NO: 1613177
acuaucggucuggaacuac

SEQ ID NO: 1613179 - RNA, 19 nt, Artificial Sequence
  Description of Artificial Sequence: Synthetic oligonucleotide
  Sense strand starting at position 650 of SEQ ID NO: 1560626
gguccuugccaugaucagu

SEQ ID NO: 1613180 - RNA, 19 nt, Artificial Sequence
  Description of Artificial Sequence: Synthetic oligonucleotide
  Antisense strand to SEQ ID NO: 1613179
acugaucauggcaaggacc

SEQ ID NO: 1613181 - RNA, 19 nt, Artificial Sequence
  Description of Artificial Sequence: Synthetic oligonucleotide
  Sense strand starting at position 655 of SEQ ID NO: 1560626
uugccaugaucagucauca

SEQ ID NO: 1613182 - RNA, 19 nt, Artificial Sequence
  Description of Artificial Sequence: Synthetic oligonucleotide
  Antisense strand to SEQ ID NO: 1613181
ugaugacugaucauggcaa

SEQ ID NO: 1613183 - RNA, 19 nt, Artificial Sequence
  Description of Artificial Sequence: Synthetic oligonucleotide
  Sense strand starting at position 715 of SEQ ID NO: 1560626
aaagaagugugguggcuuu

SEQ ID NO: 1613184 - RNA, 19 nt, Artificial Sequence
  Description of Artificial Sequence: Synthetic oligonucleotide
  Antisense strand to SEQ ID NO: 1613183
aaagccaccacacuucuuu

SEQ ID NO: 1613185 - RNA, 19 nt, Artificial Sequence
  Description of Artificial Sequence: Synthetic oligonucleotide
  Sense strand starting at position 879 of SEQ ID NO: 1560626
gggagcuucugugaguaca

SEQ ID NO: 1613186 - RNA, 19 nt, Artificial Sequence
  Description of Artificial Sequence: Synthetic oligonucleotide
  Antisense strand to SEQ ID NO: 1613185
uguacucacagaagcuccc

SEQ ID NO: 1613187 - RNA, 19 nt, Artificial Sequence
  Description of Artificial Sequence: Synthetic oligonucleotide
  Sense strand starting at position 1020 of SEQ ID NO: 1560626
guggguucugcauagaauc

SEQ ID NO: 1613188 - RNA, 19 nt, Artificial Sequence
  Description of Artificial Sequence: Synthetic oligonucleotide
  Antisense strand to SEQ ID NO: 1613187
gauucuaugcagaacccac

SEQ ID NO: 1613189 - RNA, 19 nt, Artificial Sequence
  Description of Artificial Sequence: Synthetic oligonucleotide
  Sense strand starting at position 1028 of SEQ ID NO: 1560626
ugcauagaauccuagcaga

SEQ ID NO: 1613190 - RNA, 19 nt, Artificial Sequence
  Description of Artificial Sequence: Synthetic oligonucleotide
  Antisense strand to SEQ ID NO: 1613189
ucugcuaggauucuaugca

SEQ ID NO: 1613191 - RNA, 19 nt, Artificial Sequence
  Description of Artificial Sequence: Synthetic oligonucleotide
  Sense strand starting at position 1343 of SEQ ID NO: 1560626
gggagucccuccuuaucca

SEQ ID NO: 1613192 - RNA, 19 nt, Artificial Sequence
  Description of Artificial Sequence: Synthetic oligonucleotide
  Antisense strand to SEQ ID NO: 1613191
uggauaaggagggacuccc

SEQ ID NO: 1613193 - RNA, 19 nt, Artificial Sequence
  Description of Artificial Sequence: Synthetic oligonucleotide
  Sense strand starting at position 1350 of SEQ ID NO: 1560626
ccuccuuauccagacggua

SEQ ID NO: 1613194 - RNA, 19 nt, Artificial Sequence
  Description of Artificial Sequence: Synthetic oligonucleotide
  Antisense strand to SEQ ID NO: 1613193
uaccgucuggauaaggagg

SEQ ID NO: 1613195 - RNA, 19 nt, Artificial Sequence
  Description of Artificial Sequence: Synthetic oligonucleotide
  Sense strand starting at position 1770 of SEQ ID NO: 1560626
accagauucucugauagac

SEQ ID NO: 1613196 - RNA, 19 nt, Artificial Sequence
  Description of Artificial Sequence: Synthetic oligonucleotide
  Antisense strand to SEQ ID NO: 1613195
gucuaucagagaaucuggu

SEQ ID NO: 1613197 - RNA, 19 nt, Artificial Sequence
  Description of Artificial Sequence: Synthetic oligonucleotide
  Sense strand starting at position 1787 of SEQ ID NO: 1560626
accagagccucgcuuuaga

SEQ ID NO: 1613198 - RNA, 19 nt, Artificial Sequence
  Description of Artificial Sequence: Synthetic oligonucleotide
  Antisense strand to SEQ ID NO: 1613197
ucuaaagcgaggcucuggu

SEQ ID NO: 1613199 - RNA, 19 nt, Artificial Sequence
  Description of Artificial Sequence: Synthetic oligonucleotide
  Sense strand starting at position 1980 of SEQ ID NO: 1560626
cuggguucucccugucaca

SEQ ID NO: 1613200 - RNA, 19 nt, Artificial Sequence
  Description of Artificial Sequence: Synthetic oligonucleotide
  Antisense strand to SEQ ID NO: 1613199
ugugacagggagaacccag

SEQ ID NO: 1613201 - RNA, 19 nt, Artificial Sequence
  Description of Artificial Sequence: Synthetic oligonucleotide
  Sense strand starting at position 1983 of SEQ ID NO: 1560626
gguucucccugucacaaga

SEQ ID NO: 1613202 - RNA, 19 nt, Artificial Sequence
  Description of Artificial Sequence: Synthetic oligonucleotide
  Antisense strand to SEQ ID NO: 1613201
ucuugugacagggagaacc

SEQ ID NO: 1613203 - RNA, 19 nt, Artificial Sequence
  Description of Artificial Sequence: Synthetic oligonucleotide
  Sense strand starting at position 2308 of SEQ ID NO: 1560626
ucagguuugucaucugauu

SEQ ID NO: 1613204 - RNA, 19 nt, Artificial Sequence
  Description of Artificial Sequence: Synthetic oligonucleotide
  Antisense strand to SEQ ID NO: 1613203
aaucagaugacaaaccuga

SEQ ID NO: 1613205 - RNA, 19 nt, Artificial Sequence
  Description of Artificial Sequence: Synthetic oligonucleotide
  Sense strand starting at position 2368 of SEQ ID NO: 1560626
ccgauuaugugaccuugga

SEQ ID NO: 1613206 - RNA, 19 nt, Artificial Sequence
  Description of Artificial Sequence: Synthetic oligonucleotide
  Antisense strand to SEQ ID NO: 1613205
uccaaggucacauaaucgg

SEQ ID NO: 1613207 - RNA, 19 nt, Artificial Sequence
  Description of Artificial Sequence: Synthetic oligonucleotide
  Sense strand starting at position 2435 of SEQ ID NO: 1560626
gaccucagcuucucagagu

SEQ ID NO: 1613208 - RNA, 19 nt, Artificial Sequence
  Description of Artificial Sequence: Synthetic oligonucleotide
  Antisense strand to SEQ ID NO: 1613207
acucugagaagcugagguc

SEQ ID NO: 1613209 - RNA, 19 nt, Artificial Sequence
  Description of Artificial Sequence: Synthetic oligonucleotide
  Sense strand starting at position 2464 of SEQ ID NO: 1560626
cucaguggugccugggaca

SEQ ID NO: 1613210 - RNA, 19 nt, Artificial Sequence
  Description of Artificial Sequence: Synthetic oligonucleotide
  Antisense strand to SEQ ID NO: 1613209
ugucccaggcaccacugag

SEQ ID NO: 1613211 - RNA, 19 nt, Artificial Sequence
  Description of Artificial Sequence: Synthetic oligonucleotide
  Sense strand starting at position 2490 of SEQ ID NO: 1560626
gggcuuggccauggugaau

SEQ ID NO: 1613212 - RNA, 19 nt, Artificial Sequence
  Description of Artificial Sequence: Synthetic oligonucleotide
  Antisense strand to SEQ ID NO: 1613211
auucaccauggccaagccc

SEQ ID NO: 1613213 - RNA, 19 nt, Artificial Sequence
  Description of Artificial Sequence: Synthetic oligonucleotide
  Sense strand starting at position 2543 of SEQ ID NO: 1560626
gugagaggauccuggcauu

SEQ ID NO: 1613214 - RNA, 19 nt, Artificial Sequence
  Description of Artificial Sequence: Synthetic oligonucleotide
  Antisense strand to SEQ ID NO: 1613213
aaugccaggauccucucac

SEQ ID NO: 1613215 - RNA, 19 nt, Artificial Sequence
  Description of Artificial Sequence: Synthetic oligonucleotide
  Sense strand starting at position 2556 of SEQ ID NO: 1560626
ggcauugagcuccguagua

SEQ ID NO: 1613216 - RNA, 19 nt, Artificial Sequence
  Description of Artificial Sequence: Synthetic oligonucleotide
  Antisense strand to SEQ ID NO: 1613215
uacuacggagcucaaugcc

SEQ ID NO: 1613217 - RNA, 19 nt, Artificial Sequence
  Description of Artificial Sequence: Synthetic oligonucleotide
  Sense strand starting at position 2558 of SEQ ID NO: 1560626
cauugagcuccguaguaga

SEQ ID NO: 1613218 - RNA, 19 nt, Artificial Sequence
  Description of Artificial Sequence: Synthetic oligonucleotide
  Antisense strand to SEQ ID NO: 1613217
ucuacuacggagcucaaug

SEQ ID NO: 1613219 - RNA, 19 nt, Artificial Sequence
  Description of Artificial Sequence: Synthetic oligonucleotide
  Sense strand starting at position 2628 of SEQ ID NO: 1560626
agaaaugcuccuuauguuu

SEQ ID NO: 1613220 - RNA, 19 nt, Artificial Sequence
  Description of Artificial Sequence: Synthetic oligonucleotide
  Antisense strand to SEQ ID NO: 1613219
aaacauaaggagcauuucu

SEQ ID NO: 1613221 - RNA, 19 nt, Artificial Sequence
  Description of Artificial Sequence: Synthetic oligonucleotide
  Sense strand starting at position 2634 of SEQ ID NO: 1560626
gcuccuuauguuugaaguu

SEQ ID NO: 1613222 - RNA, 19 nt, Artificial Sequence
  Description of Artificial Sequence: Synthetic oligonucleotide
  Antisense strand to SEQ ID NO: 1613221
aacuucaaacauaaggagc

SEQ ID NO: 1613223 - RNA, 19 nt, Artificial Sequence
  Description of Artificial Sequence: Synthetic oligonucleotide
  Sense strand starting at position 2672 of SEQ ID NO: 1560626
ccuguaaucugagcaccua

SEQ ID NO: 1613224 - RNA, 19 nt, Artificial Sequence
  Description of Artificial Sequence: Synthetic oligonucleotide
  Antisense strand to SEQ ID NO: 1613223
uaggugcucagauuacagg

SEQ ID NO: 1613225 - RNA, 19 nt, Artificial Sequence
  Description of Artificial Sequence: Synthetic oligonucleotide
  Sense strand starting at position 2759 of SEQ ID NO: 1560626
cccgucucugcauauaaca

SEQ ID NO: 1613226 - RNA, 19 nt, Artificial Sequence
  Description of Artificial Sequence: Synthetic oligonucleotide
  Antisense strand to SEQ ID NO: 1613225
uguuauaugcagagacggg

SEQ ID NO: 1613227 - RNA, 19 nt, Artificial Sequence
  Description of Artificial Sequence: Synthetic oligonucleotide
  Sense strand starting at position 2879 of SEQ ID NO: 1560626
gagguaugaucauagcacu

SEQ ID NO: 1613228 - RNA, 19 nt, Artificial Sequence
  Description of Artificial Sequence: Synthetic oligonucleotide
  Antisense strand to SEQ ID NO: 1613227
agugcuaugaucauaccuc

SEQ ID NO: 1613229 - RNA, 19 nt, Artificial Sequence
  Description of Artificial Sequence: Synthetic oligonucleotide
  Sense strand starting at position 3070 of SEQ ID NO: 1560626
ucuuuaauuugagaagguu

SEQ ID NO: 1613230 - RNA, 19 nt, Artificial Sequence
  Description of Artificial Sequence: Synthetic oligonucleotide
  Antisense strand to SEQ ID NO: 1613229
aaccuucucaaauuaaaga

SEQ ID NO: 1613231 - RNA, 19 nt, Artificial Sequence
  Description of Artificial Sequence: Synthetic oligonucleotide
  Sense strand starting at position 3078 of SEQ ID NO: 1560626
uugagaagguugcacauca

SEQ ID NO: 1613232 - RNA, 19 nt, Artificial Sequence
  Description of Artificial Sequence: Synthetic oligonucleotide
  Antisense strand to SEQ ID NO: 1613231
ugaugugcaaccuucucaa

SEQ ID NO: 1613233 - RNA, 19 nt, Artificial Sequence
  Description of Artificial Sequence: Synthetic oligonucleotide
  Sense strand starting at position 3121 of SEQ ID NO: 1560626
ccugcuugugucuaagacu

SEQ ID NO: 1613234 - RNA, 19 nt, Artificial Sequence
  Description of Artificial Sequence: Synthetic oligonucleotide
  Antisense strand to SEQ ID NO: 1613233
agucuuagacacaagcagg

SEQ ID NO: 1613235 - RNA, 19 nt, Artificial Sequence
  Description of Artificial Sequence: Synthetic oligonucleotide
  Sense strand starting at position 3156 of SEQ ID NO: 1560626
ggaggaaauuuccacuucu

SEQ ID NO: 1613236 - RNA, 19 nt, Artificial Sequence
  Description of Artificial Sequence: Synthetic oligonucleotide
  Antisense strand to SEQ ID NO: 1613235
agaaguggaaauuuccucc

SEQ ID NO: 1613237 - RNA, 19 nt, Artificial Sequence
  Description of Artificial Sequence: Synthetic oligonucleotide
  Sense strand starting at position 3166 of SEQ ID NO: 1560626
uccacuucugugugggaca

SEQ ID NO: 1613238 - RNA, 19 nt, Artificial Sequence
  Description of Artificial Sequence: Synthetic oligonucleotide
  Antisense strand to SEQ ID NO: 1613237
ugucccacacagaagugga

SEQ ID NO: 1613239 - RNA, 19 nt, Artificial Sequence
  Description of Artificial Sequence: Synthetic oligonucleotide
  Sense strand starting at position 3168 of SEQ ID NO: 1560626
cacuucugugugggacaga

SEQ ID NO: 1613240 - RNA, 19 nt, Artificial Sequence
  Description of Artificial Sequence: Synthetic oligonucleotide
  Antisense strand to SEQ ID NO: 1613239
ucugucccacacagaagug

SEQ ID NO: 1613241 - RNA, 19 nt, Artificial Sequence
  Description of Artificial Sequence: Synthetic oligonucleotide
  Sense strand starting at position 3169 of SEQ ID NO: 1560626
acuucugugugggacagaa

SEQ ID NO: 1613242 - RNA, 19 nt, Artificial Sequence
  Description of Artificial Sequence: Synthetic oligonucleotide
  Antisense strand to SEQ ID NO: 1613241
uucugucccacacagaagu

SEQ ID NO: 1613243 - RNA, 19 nt, Artificial Sequence
  Description of Artificial Sequence: Synthetic oligonucleotide
  Sense strand starting at position 3616 of SEQ ID NO: 1560626
ugggauaucucugcccacu

SEQ ID NO: 1613244 - RNA, 19 nt, Artificial Sequence
  Description of Artificial Sequence: Synthetic oligonucleotide
  Antisense strand to SEQ ID NO: 1613243
agugggcagagauauccca

SEQ ID NO: 1613245 - RNA, 19 nt, Artificial Sequence
  Description of Artificial Sequence: Synthetic oligonucleotide
  Sense strand starting at position 3618 of SEQ ID NO: 1560626
ggauaucucugcccacuga

SEQ ID NO: 1613246 - RNA, 19 nt, Artificial Sequence
  Description of Artificial Sequence: Synthetic oligonucleotide
  Antisense strand to SEQ ID NO: 1613245
ucagugggcagagauaucc

SEQ ID NO: 1613247 - RNA, 19 nt, Artificial Sequence
  Description of Artificial Sequence: Synthetic oligonucleotide
  Sense strand starting at position 3635 of SEQ ID NO: 1560626
gacugaaguccaugaucag

SEQ ID NO: 1613248 - RNA, 19 nt, Artificial Sequence
  Description of Artificial Sequence: Synthetic oligonucleotide
  Antisense strand to SEQ ID NO: 1613247
cugaucauggacuucaguc

SEQ ID NO: 1613249 - RNA, 19 nt, Artificial Sequence
  Description of Artificial Sequence: Synthetic oligonucleotide
  Sense strand starting at position 45 of SEQ ID NO: 1560627
aagugaguuuauccaugua

SEQ ID NO: 1613250 - RNA, 19 nt, Artificial Sequence
  Description of Artificial Sequence: Synthetic oligonucleotide
  Antisense strand to SEQ ID NO: 1613249
uacauggauaaacucacuu

SEQ ID NO: 1613251 - RNA, 19 nt, Artificial Sequence
  Description of Artificial Sequence: Synthetic oligonucleotide
  Sense strand starting at position 646 of SEQ ID NO: 1560627
uuacaugugcauuacuuau

SEQ ID NO: 1613252 - RNA, 19 nt, Artificial Sequence
  Description of Artificial Sequence: Synthetic oligonucleotide
  Antisense strand to SEQ ID NO: 1613251
auaaguaaugcacauguaa

SEQ ID NO: 1613253 - RNA, 19 nt, Artificial Sequence
  Description of Artificial Sequence: Synthetic oligonucleotide
  Sense strand starting at position 648 of SEQ ID NO: 1560627
acaugugcauuacuuauau

SEQ ID NO: 1613254 - RNA, 19 nt, Artificial Sequence
  Description of Artificial Sequence: Synthetic oligonucleotide
  Antisense strand to SEQ ID NO: 1613253
auauaaguaaugcacaugu

SEQ ID NO: 1613255 - RNA, 19 nt, Artificial Sequence
  Description of Artificial Sequence: Synthetic oligonucleotide
  Sense strand starting at position 714 of SEQ ID NO: 1560627
auauaauagaggugcaugu

SEQ ID NO: 1613256 - RNA, 19 nt, Artificial Sequence
  Description of Artificial Sequence: Synthetic oligonucleotide
  Antisense strand to SEQ ID NO: 1613255
acaugcaccucuauuauau

SEQ ID NO: 1613257 - RNA, 19 nt, Artificial Sequence
  Description of Artificial Sequence: Synthetic oligonucleotide
  Sense strand starting at position 716 of SEQ ID NO: 1560627
auaauagaggugcauguau

SEQ ID NO: 1613258 - RNA, 19 nt, Artificial Sequence
  Description of Artificial Sequence: Synthetic oligonucleotide
  Antisense strand to SEQ ID NO: 1613257
auacaugcaccucuauuau

SEQ ID NO: 1613259 - RNA, 19 nt, Artificial Sequence
  Description of Artificial Sequence: Synthetic oligonucleotide
  Sense strand starting at position 718 of SEQ ID NO: 1560627
aauagaggugcauguauaa

SEQ ID NO: 1613260 - RNA, 19 nt, Artificial Sequence
  Description of Artificial Sequence: Synthetic oligonucleotide
  Antisense strand to SEQ ID NO: 1613259
uuauacaugcaccucuauu

SEQ ID NO: 1613261 - RNA, 19 nt, Artificial Sequence
  Description of Artificial Sequence: Synthetic oligonucleotide
  Sense strand starting at position 903 of SEQ ID NO: 1560627
cuaucuauggccuggcaca

SEQ ID NO: 1613262 - RNA, 19 nt, Artificial Sequence
  Description of Artificial Sequence: Synthetic oligonucleotide
  Antisense strand to SEQ ID NO: 1613261
ugugccaggccauagauag

SEQ ID NO: 1613263 - RNA, 19 nt, Artificial Sequence
  Description of Artificial Sequence: Synthetic oligonucleotide
  Sense strand starting at position 904 of SEQ ID NO: 1560627
uaucuauggccuggcacau

SEQ ID NO: 1613264 - RNA, 19 nt, Artificial Sequence
  Description of Artificial Sequence: Synthetic oligonucleotide
  Antisense strand to SEQ ID NO: 1613263
augugccaggccauagaua

SEQ ID NO: 1613265 - RNA, 19 nt, Artificial Sequence
  Description of Artificial Sequence: Synthetic oligonucleotide
  Sense strand starting at position 994 of SEQ ID NO: 1560627
cauaguucuugguccauag

SEQ ID NO: 1613266 - RNA, 19 nt, Artificial Sequence
  Description of Artificial Sequence: Synthetic oligonucleotide
  Antisense strand to SEQ ID NO: 1613265
cuauggaccaagaacuaug

SEQ ID NO: 1613267 - RNA, 19 nt, Artificial Sequence
  Description of Artificial Sequence: Synthetic oligonucleotide
  Sense strand starting at position 996 of SEQ ID NO: 1560627
uaguucuugguccauagua

SEQ ID NO: 1613268 - RNA, 19 nt, Artificial Sequence
  Description of Artificial Sequence: Synthetic oligonucleotide
  Antisense strand to SEQ ID NO: 1613267
uacuauggaccaagaacua

SEQ ID NO: 1613269 - RNA, 19 nt, Artificial Sequence
  Description of Artificial Sequence: Synthetic oligonucleotide
  Sense strand starting at position 998 of SEQ ID NO: 1560627
guucuugguccauaguaca

SEQ ID NO: 1613270 - RNA, 19 nt, Artificial Sequence
  Description of Artificial Sequence: Synthetic oligonucleotide
  Antisense strand to SEQ ID NO: 1613269
uguacuauggaccaagaac

SEQ ID NO: 1613271 - RNA, 19 nt, Artificial Sequence
  Description of Artificial Sequence: Synthetic oligonucleotide
  Sense strand starting at position 1049 of SEQ ID NO: 1560627
ccaauugcugugcaugaca

SEQ ID NO: 1613272 - RNA, 19 nt, Artificial Sequence
  Description of Artificial Sequence: Synthetic oligonucleotide
  Antisense strand to SEQ ID NO: 1613271
ugucaugcacagcaauugg

SEQ ID NO: 1613273 - RNA, 19 nt, Artificial Sequence
  Description of Artificial Sequence: Synthetic oligonucleotide
  Sense strand starting at position 1206 of SEQ ID NO: 1560627
cucuuugagccgcagaguu

SEQ ID NO: 1613274 - RNA, 19 nt, Artificial Sequence
  Description of Artificial Sequence: Synthetic oligonucleotide
  Antisense strand to SEQ ID NO: 1613273
aacucugcggcucaaagag

SEQ ID NO: 1613275 - RNA, 19 nt, Artificial Sequence
  Description of Artificial Sequence: Synthetic oligonucleotide
  Sense strand starting at position 1222 of SEQ ID NO: 1560627
guucuccaucuggaauaca

SEQ ID NO: 1613276 - RNA, 19 nt, Artificial Sequence
  Description of Artificial Sequence: Synthetic oligonucleotide
  Antisense strand to SEQ ID NO: 1613275
uguauuccagauggagaac

SEQ ID NO: 1613277 - RNA, 19 nt, Artificial Sequence
  Description of Artificial Sequence: Synthetic oligonucleotide
  Sense strand starting at position 1231 of SEQ ID NO: 1560627
cuggaauacagguguccuu

SEQ ID NO: 1613278 - RNA, 19 nt, Artificial Sequence
  Description of Artificial Sequence: Synthetic oligonucleotide
  Antisense strand to SEQ ID NO: 1613277
aaggacaccuguauuccag

SEQ ID NO: 1613279 - RNA, 19 nt, Artificial Sequence
  Description of Artificial Sequence: Synthetic oligonucleotide
  Sense strand starting at position 1514 of SEQ ID NO: 1560627
gggauugggagcugaauuc

SEQ ID NO: 1613280 - RNA, 19 nt, Artificial Sequence
  Description of Artificial Sequence: Synthetic oligonucleotide
  Antisense strand to SEQ ID NO: 1613279
gaauucagcucccaauccc

SEQ ID NO: 1613281 - RNA, 19 nt, Artificial Sequence
  Description of Artificial Sequence: Synthetic oligonucleotide
  Sense strand starting at position 1523 of SEQ ID NO: 1560627
agcugaauucccgggacuu

SEQ ID NO: 1613282 - RNA, 19 nt, Artificial Sequence
  Description of Artificial Sequence: Synthetic oligonucleotide
  Antisense strand to SEQ ID NO: 1613281
aagucccgggaauucagcu

SEQ ID NO: 1613283 - RNA, 19 nt, Artificial Sequence
  Description of Artificial Sequence: Synthetic oligonucleotide
  Sense strand starting at position 1524 of SEQ ID NO: 1560627
gcugaauucccgggacuug

SEQ ID NO: 1613284 - RNA, 19 nt, Artificial Sequence
  Description of Artificial Sequence: Synthetic oligonucleotide
  Antisense strand to SEQ ID NO: 1613283
caagucccgggaauucagc

SEQ ID NO: 1613285 - RNA, 19 nt, Artificial Sequence
  Description of Artificial Sequence: Synthetic oligonucleotide
  Sense strand starting at position 1581 of SEQ ID NO: 1560627
augccaagugcuugggaga

SEQ ID NO: 1613286 - RNA, 19 nt, Artificial Sequence
  Description of Artificial Sequence: Synthetic oligonucleotide
  Antisense strand to SEQ ID NO: 1613285
ucucccaagcacuuggcau

SEQ ID NO: 1613287 - RNA, 19 nt, Artificial Sequence
  Description of Artificial Sequence: Synthetic oligonucleotide
  Sense strand starting at position 1582 of SEQ ID NO: 1560627
ugccaagugcuugggagaa

SEQ ID NO: 1613288 - RNA, 19 nt, Artificial Sequence
  Description of Artificial Sequence: Synthetic oligonucleotide
  Antisense strand to SEQ ID NO: 1613287
uucucccaagcacuuggca

SEQ ID NO: 1613289 - RNA, 19 nt, Artificial Sequence
  Description of Artificial Sequence: Synthetic oligonucleotide
  Sense strand starting at position 1790 of SEQ ID NO: 1560627
uccugaguccuaggugaga

SEQ ID NO: 1613290 - RNA, 19 nt, Artificial Sequence
  Description of Artificial Sequence: Synthetic oligonucleotide
  Antisense strand to SEQ ID NO: 1613289
ucucaccuaggacucagga

SEQ ID NO: 1613291 - RNA, 19 nt, Artificial Sequence
  Description of Artificial Sequence: Synthetic oligonucleotide
  Sense strand starting at position 1792 of SEQ ID NO: 1560627
cugaguccuaggugagaag

SEQ ID NO: 1613292 - RNA, 19 nt, Artificial Sequence
  Description of Artificial Sequence: Synthetic oligonucleotide
  Antisense strand to SEQ ID NO: 1613291
cuucucaccuaggacucag

SEQ ID NO: 1613293 - RNA, 19 nt, Artificial Sequence
  Description of Artificial Sequence: Synthetic oligonucleotide
  Sense strand starting at position 2258 of SEQ ID NO: 1560627
ggcuuuguccgagcugugu

SEQ ID NO: 1613294 - RNA, 19 nt, Artificial Sequence
  Description of Artificial Sequence: Synthetic oligonucleotide
  Antisense strand to SEQ ID NO: 1613293
acacagcucggacaaagcc

SEQ ID NO: 1613295 - RNA, 19 nt, Artificial Sequence
  Description of Artificial Sequence: Synthetic oligonucleotide
  Sense strand starting at position 2337 of SEQ ID NO: 1560627
gggagagucaugcguuuau

SEQ ID NO: 1613296 - RNA, 19 nt, Artificial Sequence
  Description of Artificial Sequence: Synthetic oligonucleotide
  Antisense strand to SEQ ID NO: 1613295
auaaacgcaugacucuccc

SEQ ID NO: 1613297 - RNA, 19 nt, Artificial Sequence
  Description of Artificial Sequence: Synthetic oligonucleotide
  Sense strand starting at position 2341 of SEQ ID NO: 1560627
gagucaugcguuuauuguu

SEQ ID NO: 1613298 - RNA, 19 nt, Artificial Sequence
  Description of Artificial Sequence: Synthetic oligonucleotide
  Antisense strand to SEQ ID NO: 1613297
aacaauaaacgcaugacuc

SEQ ID NO: 1613299 - RNA, 19 nt, Artificial Sequence
  Description of Artificial Sequence: Synthetic oligonucleotide
  Sense strand starting at position 2403 of SEQ ID NO: 1560627
gucacaggugucuggguau

SEQ ID NO: 1613300 - RNA, 19 nt, Artificial Sequence
  Description of Artificial Sequence: Synthetic oligonucleotide
  Antisense strand to SEQ ID NO: 1613299
auacccagacaccugugac

SEQ ID NO: 1613301 - RNA, 19 nt, Artificial Sequence
  Description of Artificial Sequence: Synthetic oligonucleotide
  Sense strand starting at position 2737 of SEQ ID NO: 1560627
ugagguaaggauugugguu

SEQ ID NO: 1613302 - RNA, 19 nt, Artificial Sequence
  Description of Artificial Sequence: Synthetic oligonucleotide
  Antisense strand to SEQ ID NO: 1613301
aaccacaauccuuaccuca

SEQ ID NO: 1613303 - RNA, 19 nt, Artificial Sequence
  Description of Artificial Sequence: Synthetic oligonucleotide
  Sense strand starting at position 2742 of SEQ ID NO: 1560627
uaaggauugugguuguggu

SEQ ID NO: 1613304 - RNA, 19 nt, Artificial Sequence
  Description of Artificial Sequence: Synthetic oligonucleotide
  Antisense strand to SEQ ID NO: 1613303
accacaaccacaauccuua

SEQ ID NO: 1613305 - RNA, 19 nt, Artificial Sequence
  Description of Artificial Sequence: Synthetic oligonucleotide
  Sense strand starting at position 2809 of SEQ ID NO: 1560627
ggguacgagguuuaggauu

SEQ ID NO: 1613306 - RNA, 19 nt, Artificial Sequence
  Description of Artificial Sequence: Synthetic oligonucleotide
  Antisense strand to SEQ ID NO: 1613305
aauccuaaaccucguaccc

SEQ ID NO: 1613307 - RNA, 19 nt, Artificial Sequence
  Description of Artificial Sequence: Synthetic oligonucleotide
  Sense strand starting at position 2883 of SEQ ID NO: 1560627
gagcuacuccugggauugu

SEQ ID NO: 1613308 - RNA, 19 nt, Artificial Sequence
  Description of Artificial Sequence: Synthetic oligonucleotide
  Antisense strand to SEQ ID NO: 1613307
acaaucccaggaguagcuc

SEQ ID NO: 1613309 - RNA, 19 nt, Artificial Sequence
  Description of Artificial Sequence: Synthetic oligonucleotide
  Sense strand starting at position 3127 of SEQ ID NO: 1560627
uggugauggcagugucauu

SEQ ID NO: 1613310 - RNA, 19 nt, Artificial Sequence
  Description of Artificial Sequence: Synthetic oligonucleotide
  Antisense strand to SEQ ID NO: 1613309
aaugacacugccaucacca

SEQ ID NO: 1613311 - RNA, 19 nt, Artificial Sequence
  Description of Artificial Sequence: Synthetic oligonucleotide
  Sense strand starting at position 3540 of SEQ ID NO: 1560627
gggacagguuguuccuaga

SEQ ID NO: 1613312 - RNA, 19 nt, Artificial Sequence
  Description of Artificial Sequence: Synthetic oligonucleotide
  Antisense strand to SEQ ID NO: 1613311
ucuaggaacaaccuguccc

SEQ ID NO: 1613313 - RNA, 19 nt, Artificial Sequence
  Description of Artificial Sequence: Synthetic oligonucleotide
  Sense strand starting at position 3736 of SEQ ID NO: 1560627
acagcucugccaugaacuu

SEQ ID NO: 1613314 - RNA, 19 nt, Artificial Sequence
  Description of Artificial Sequence: Synthetic oligonucleotide
  Antisense strand to SEQ ID NO: 1613313
aaguucauggcagagcugu

SEQ ID NO: 1613315 - RNA, 19 nt, Artificial Sequence
  Description of Artificial Sequence: Synthetic oligonucleotide
  Sense strand starting at position 3801 of SEQ ID NO: 1560627
ggugguguaucuuuggaca

SEQ ID NO: 1613316 - RNA, 19 nt, Artificial Sequence
  Description of Artificial Sequence: Synthetic oligonucleotide
  Antisense strand to SEQ ID NO: 1613315
uguccaaagauacaccacc

SEQ ID NO: 1613317 - RNA, 19 nt, Artificial Sequence
  Description of Artificial Sequence: Synthetic oligonucleotide
  Sense strand starting at position 3876 of SEQ ID NO: 1560627
guaucaaaggugcguauga

SEQ ID NO: 1613318 - RNA, 19 nt, Artificial Sequence
  Description of Artificial Sequence: Synthetic oligonucleotide
  Antisense strand to SEQ ID NO: 1613317
ucauacgcaccuuugauac

SEQ ID NO: 1613319 - RNA, 19 nt, Artificial Sequence
  Description of Artificial Sequence: Synthetic oligonucleotide
  Sense strand starting at position 3878 of SEQ ID NO: 1560627
aucaaaggugcguaugaca

SEQ ID NO: 1613320 - RNA, 19 nt, Artificial Sequence
  Description of Artificial Sequence: Synthetic oligonucleotide
  Antisense strand to SEQ ID NO: 1613319
ugucauacgcaccuuugau

SEQ ID NO: 1613321 - RNA, 19 nt, Artificial Sequence
  Description of Artificial Sequence: Synthetic oligonucleotide
  Sense strand starting at position 3902 of SEQ ID NO: 1560627
gggucugguaagugcuaaa

SEQ ID NO: 1613322 - RNA, 19 nt, Artificial Sequence
  Description of Artificial Sequence: Synthetic oligonucleotide
  Antisense strand to SEQ ID NO: 1613321
uuuagcacuuaccagaccc

SEQ ID NO: 1613323 - RNA, 19 nt, Artificial Sequence
  Description of Artificial Sequence: Synthetic oligonucleotide
  Sense strand starting at position 3978 of SEQ ID NO: 1560627
cuugguuuauucuuggaaa

SEQ ID NO: 1613324 - RNA, 19 nt, Artificial Sequence
  Description of Artificial Sequence: Synthetic oligonucleotide
  Antisense strand to SEQ ID NO: 1613323
uuuccaagaauaaaccaag

SEQ ID NO: 1613325 - RNA, 19 nt, Artificial Sequence
  Description of Artificial Sequence: Synthetic oligonucleotide
  Sense strand starting at position 3980 of SEQ ID NO: 1560627
ugguuuauucuuggaaauu

SEQ ID NO: 1613326 - RNA, 19 nt, Artificial Sequence
  Description of Artificial Sequence: Synthetic oligonucleotide
  Antisense strand to SEQ ID NO: 1613325
aauuuccaagaauaaacca

SEQ ID NO: 1613327 - RNA, 19 nt, Artificial Sequence
  Description of Artificial Sequence: Synthetic oligonucleotide
  Sense strand starting at position 3981 of SEQ ID NO: 1560627
gguuuauucuuggaaauuu

SEQ ID NO: 1613328 - RNA, 19 nt, Artificial Sequence
  Description of Artificial Sequence: Synthetic oligonucleotide
  Antisense strand to SEQ ID NO: 1613327
aaauuuccaagaauaaacc

SEQ ID NO: 1613329 - RNA, 19 nt, Artificial Sequence
  Description of Artificial Sequence: Synthetic oligonucleotide
  Sense strand starting at position 402 of SEQ ID NO: 1560628
cuuggaaacuuccaugacu

SEQ ID NO: 1613330 - RNA, 19 nt, Artificial Sequence
  Description of Artificial Sequence: Synthetic oligonucleotide
  Antisense strand to SEQ ID NO: 1613329
agucauggaaguuuccaag

SEQ ID NO: 1613331 - RNA, 19 nt, Artificial Sequence
  Description of Artificial Sequence: Synthetic oligonucleotide
  Sense strand starting at position 486 of SEQ ID NO: 1560628
accaucauuuguggucaca

SEQ ID NO: 1613332 - RNA, 19 nt, Artificial Sequence
  Description of Artificial Sequence: Synthetic oligonucleotide
  Antisense strand to SEQ ID NO: 1613331
ugugaccacaaaugauggu

SEQ ID NO: 1613333 - RNA, 19 nt, Artificial Sequence
  Description of Artificial Sequence: Synthetic oligonucleotide
  Sense strand starting at position 1036 of SEQ ID NO: 1560628
uuucuaggauuacuggaau

SEQ ID NO: 1613334 - RNA, 19 nt, Artificial Sequence
  Description of Artificial Sequence: Synthetic oligonucleotide
  Antisense strand to SEQ ID NO: 1613333
auuccaguaauccuagaaa

SEQ ID NO: 1613335 - RNA, 19 nt, Artificial Sequence
  Description of Artificial Sequence: Synthetic oligonucleotide
  Sense strand starting at position 1050 of SEQ ID NO: 1560628
ggaauauagugacugugag

SEQ ID NO: 1613336 - RNA, 19 nt, Artificial Sequence
  Description of Artificial Sequence: Synthetic oligonucleotide
  Antisense strand to SEQ ID NO: 1613335
cucacagucacuauauucc

SEQ ID NO: 1613337 - RNA, 19 nt, Artificial Sequence
  Description of Artificial Sequence: Synthetic oligonucleotide
  Sense strand starting at position 1066 of SEQ ID NO: 1560628
gaggauuaagagugccugu

SEQ ID NO: 1613338 - RNA, 19 nt, Artificial Sequence
  Description of Artificial Sequence: Synthetic oligonucleotide
  Antisense strand to SEQ ID NO: 1613337
acaggcacucuuaauccuc

SEQ ID NO: 1613339 - RNA, 19 nt, Artificial Sequence
  Description of Artificial Sequence: Synthetic oligonucleotide
  Sense strand starting at position 1069 of SEQ ID NO: 1560628
gauuaagagugccuguacu

SEQ ID NO: 1613340 - RNA, 19 nt, Artificial Sequence
  Description of Artificial Sequence: Synthetic oligonucleotide
  Antisense strand to SEQ ID NO: 1613339
aguacaggcacucuuaauc

SEQ ID NO: 1613341 - RNA, 19 nt, Artificial Sequence
  Description of Artificial Sequence: Synthetic oligonucleotide
  Sense strand starting at position 1097 of SEQ ID NO: 1560628
cagcaagaugugugacucu

SEQ ID NO: 1613342 - RNA, 19 nt, Artificial Sequence
  Description of Artificial Sequence: Synthetic oligonucleotide
  Antisense strand to SEQ ID NO: 1613341
agagucacacaucuugcug

SEQ ID NO: 1613343 - RNA, 19 nt, Artificial Sequence
  Description of Artificial Sequence: Synthetic oligonucleotide
  Sense strand starting at position 1100 of SEQ ID NO: 1560628
caagaugugugacucugau

SEQ ID NO: 1613344 - RNA, 19 nt, Artificial Sequence
  Description of Artificial Sequence: Synthetic oligonucleotide
  Antisense strand to SEQ ID NO: 1613343
aucagagucacacaucuug

SEQ ID NO: 1613345 - RNA, 19 nt, Artificial Sequence
  Description of Artificial Sequence: Synthetic oligonucleotide
  Sense strand starting at position 1110 of SEQ ID NO: 1560628
gacucugaucacugcugga

SEQ ID NO: 1613346 - RNA, 19 nt, Artificial Sequence
  Description of Artificial Sequence: Synthetic oligonucleotide
  Antisense strand to SEQ ID NO: 1613345
uccagcagugaucagaguc

SEQ ID NO: 1613347 - RNA, 19 nt, Artificial Sequence
  Description of Artificial Sequence: Synthetic oligonucleotide
  Sense strand starting at position 1114 of SEQ ID NO: 1560628
cugaucacugcuggaaaug

SEQ ID NO: 1613348 - RNA, 19 nt, Artificial Sequence
  Description of Artificial Sequence: Synthetic oligonucleotide
  Antisense strand to SEQ ID NO: 1613347
cauuuccagcagugaucag

SEQ ID NO: 1613349 - RNA, 19 nt, Artificial Sequence
  Description of Artificial Sequence: Synthetic oligonucleotide
  Sense strand starting at position 1345 of SEQ ID NO: 1560628
gaguuaccggcucaggauu

SEQ ID NO: 1613350 - RNA, 19 nt, Artificial Sequence
  Description of Artificial Sequence: Synthetic oligonucleotide
  Antisense strand to SEQ ID NO: 1613349
aauccugagccgguaacuc

SEQ ID NO: 1613351 - RNA, 19 nt, Artificial Sequence
  Description of Artificial Sequence: Synthetic oligonucleotide
  Sense strand starting at position 1458 of SEQ ID NO: 1560628
caacgcucgcugccugaua

SEQ ID NO: 1613352 - RNA, 19 nt, Artificial Sequence
  Description of Artificial Sequence: Synthetic oligonucleotide
  Antisense strand to SEQ ID NO: 1613351
uaucaggcagcgagcguug

SEQ ID NO: 1613353 - RNA, 19 nt, Artificial Sequence
  Description of Artificial Sequence: Synthetic oligonucleotide
  Sense strand starting at position 1469 of SEQ ID NO: 1560628
gccugauacagcgauuguc

SEQ ID NO: 1613354 - RNA, 19 nt, Artificial Sequence
  Description of Artificial Sequence: Synthetic oligonucleotide
  Antisense strand to SEQ ID NO: 1613353
gacaaucgcuguaucaggc

SEQ ID NO: 1613355 - RNA, 19 nt, Artificial Sequence
  Description of Artificial Sequence: Synthetic oligonucleotide
  Sense strand starting at position 1984 of SEQ ID NO: 1560628
ccagacucacccugaguaa

SEQ ID NO: 1613356 - RNA, 19 nt, Artificial Sequence
  Description of Artificial Sequence: Synthetic oligonucleotide
  Antisense strand to SEQ ID NO: 1613355
uuacucagggugagucugg

SEQ ID NO: 1613357 - RNA, 19 nt, Artificial Sequence
  Description of Artificial Sequence: Synthetic oligonucleotide
  Sense strand starting at position 2066 of SEQ ID NO: 1560628
ggacuuguagugugagaag

SEQ ID NO: 1613358 - RNA, 19 nt, Artificial Sequence
  Description of Artificial Sequence: Synthetic oligonucleotide
  Antisense strand to SEQ ID NO: 1613357
cuucucacacuacaagucc

SEQ ID NO: 1613359 - RNA, 19 nt, Artificial Sequence
  Description of Artificial Sequence: Synthetic oligonucleotide
  Sense strand starting at position 2099 of SEQ ID NO: 1560628
aaguuagcucuuuaccgga

SEQ ID NO: 1613360 - RNA, 19 nt, Artificial Sequence
  Description of Artificial Sequence: Synthetic oligonucleotide
  Antisense strand to SEQ ID NO: 1613359
uccgguaaagagcuaacuu

SEQ ID NO: 1613361 - RNA, 19 nt, Artificial Sequence
  Description of Artificial Sequence: Synthetic oligonucleotide
  Sense strand starting at position 2101 of SEQ ID NO: 1560628
guuagcucuuuaccggauu

SEQ ID NO: 1613362 - RNA, 19 nt, Artificial Sequence
  Description of Artificial Sequence: Synthetic oligonucleotide
  Antisense strand to SEQ ID NO: 1613361
aauccgguaaagagcuaac

SEQ ID NO: 1613363 - RNA, 19 nt, Artificial Sequence
  Description of Artificial Sequence: Synthetic oligonucleotide
  Sense strand starting at position 2204 of SEQ ID NO: 1560628
ggugccagguaucuguuaa

SEQ ID NO: 1613364 - RNA, 19 nt, Artificial Sequence
  Description of Artificial Sequence: Synthetic oligonucleotide
  Antisense strand to SEQ ID NO: 1613363
uuaacagauaccuggcacc

SEQ ID NO: 1613365 - RNA, 19 nt, Artificial Sequence
  Description of Artificial Sequence: Synthetic oligonucleotide
  Sense strand starting at position 2205 of SEQ ID NO: 1560628
gugccagguaucuguuaau

SEQ ID NO: 1613366 - RNA, 19 nt, Artificial Sequence
  Description of Artificial Sequence: Synthetic oligonucleotide
  Antisense strand to SEQ ID NO: 1613365
auuaacagauaccuggcac

SEQ ID NO: 1613367 - RNA, 19 nt, Artificial Sequence
  Description of Artificial Sequence: Synthetic oligonucleotide
  Sense strand starting at position 2211 of SEQ ID NO: 1560628
gguaucuguuaaucucuuu

SEQ ID NO: 1613368 - RNA, 19 nt, Artificial Sequence
  Description of Artificial Sequence: Synthetic oligonucleotide
  Antisense strand to SEQ ID NO: 1613367
aaagagauuaacagauacc

SEQ ID NO: 1613369 - RNA, 19 nt, Artificial Sequence
  Description of Artificial Sequence: Synthetic oligonucleotide
  Sense strand starting at position 2217 of SEQ ID NO: 1560628
uguuaaucucuuugcaggu

SEQ ID NO: 1613370 - RNA, 19 nt, Artificial Sequence
  Description of Artificial Sequence: Synthetic oligonucleotide
  Antisense strand to SEQ ID NO: 1613369
accugcaaagagauuaaca

SEQ ID NO: 1613371 - RNA, 19 nt, Artificial Sequence
  Description of Artificial Sequence: Synthetic oligonucleotide
  Sense strand starting at position 2218 of SEQ ID NO: 1560628
guuaaucucuuugcaggua

SEQ ID NO: 1613372 - RNA, 19 nt, Artificial Sequence
  Description of Artificial Sequence: Synthetic oligonucleotide
  Antisense strand to SEQ ID NO: 1613371
uaccugcaaagagauuaac

SEQ ID NO: 1613373 - RNA, 19 nt, Artificial Sequence
  Description of Artificial Sequence: Synthetic oligonucleotide
  Sense strand starting at position 2332 of SEQ ID NO: 1560628
gcuaauggagcuuaucuuu

SEQ ID NO: 1613374 - RNA, 19 nt, Artificial Sequence
  Description of Artificial Sequence: Synthetic oligonucleotide
  Antisense strand to SEQ ID NO: 1613373
aaagauaagcuccauuagc

SEQ ID NO: 1613375 - RNA, 19 nt, Artificial Sequence
  Description of Artificial Sequence: Synthetic oligonucleotide
  Sense strand starting at position 2389 of SEQ ID NO: 1560628
agugaaauguaauaggaga

SEQ ID NO: 1613376 - RNA, 19 nt, Artificial Sequence
  Description of Artificial Sequence: Synthetic oligonucleotide
  Antisense strand to SEQ ID NO: 1613375
ucuccuauuacauuucacu

SEQ ID NO: 1613377 - RNA, 19 nt, Artificial Sequence
  Description of Artificial Sequence: Synthetic oligonucleotide
  Sense strand starting at position 2790 of SEQ ID NO: 1560628
ggaauaucaagguggugau

SEQ ID NO: 1613378 - RNA, 19 nt, Artificial Sequence
  Description of Artificial Sequence: Synthetic oligonucleotide
  Antisense strand to SEQ ID NO: 1613377
aucaccaccuugauauucc

SEQ ID NO: 1613379 - RNA, 19 nt, Artificial Sequence
  Description of Artificial Sequence: Synthetic oligonucleotide
  Sense strand starting at position 2791 of SEQ ID NO: 1560628
gaauaucaagguggugauu

SEQ ID NO: 1613380 - RNA, 19 nt, Artificial Sequence
  Description of Artificial Sequence: Synthetic oligonucleotide
  Antisense strand to SEQ ID NO: 1613379
aaucaccaccuugauauuc

SEQ ID NO: 1613381 - RNA, 19 nt, Artificial Sequence
  Description of Artificial Sequence: Synthetic oligonucleotide
  Sense strand starting at position 2837 of SEQ ID NO: 1560628
gaaggauucucugagaaag

SEQ ID NO: 1613382 - RNA, 19 nt, Artificial Sequence
  Description of Artificial Sequence: Synthetic oligonucleotide
  Antisense strand to SEQ ID NO: 1613381
cuuucucagagaauccuuc

SEQ ID NO: 1613383 - RNA, 19 nt, Artificial Sequence
  Description of Artificial Sequence: Synthetic oligonucleotide
  Sense strand starting at position 2900 of SEQ ID NO: 1560628
acgggaaacuuccauuugu

SEQ ID NO: 1613384 - RNA, 19 nt, Artificial Sequence
  Description of Artificial Sequence: Synthetic oligonucleotide
  Antisense strand to SEQ ID NO: 1613383
acaaauggaaguuucccgu

SEQ ID NO: 1613385 - RNA, 19 nt, Artificial Sequence
  Description of Artificial Sequence: Synthetic oligonucleotide
  Sense strand starting at position 2921 of SEQ ID NO: 1560628
cacgucuugguccagauaa

SEQ ID NO: 1613386 - RNA, 19 nt, Artificial Sequence
  Description of Artificial Sequence: Synthetic oligonucleotide
  Antisense strand to SEQ ID NO: 1613385
uuaucuggaccaagacgug

SEQ ID NO: 1613387 - RNA, 19 nt, Artificial Sequence
  Description of Artificial Sequence: Synthetic oligonucleotide
  Sense strand starting at position 2923 of SEQ ID NO: 1560628
cgucuugguccagauaaau

SEQ ID NO: 1613388 - RNA, 19 nt, Artificial Sequence
  Description of Artificial Sequence: Synthetic oligonucleotide
  Antisense strand to SEQ ID NO: 1613387
auuuaucuggaccaagacg

SEQ ID NO: 1613389 - RNA, 19 nt, Artificial Sequence
  Description of Artificial Sequence: Synthetic oligonucleotide
  Sense strand starting at position 2932 of SEQ ID NO: 1560628
ccagauaaaucccaggaag

SEQ ID NO: 1613390 - RNA, 19 nt, Artificial Sequence
  Description of Artificial Sequence: Synthetic oligonucleotide
  Antisense strand to SEQ ID NO: 1613389
cuuccugggauuuaucugg

SEQ ID NO: 1613391 - RNA, 19 nt, Artificial Sequence
  Description of Artificial Sequence: Synthetic oligonucleotide
  Sense strand starting at position 2950 of SEQ ID NO: 1560628
guagcaucgugaucuacac

SEQ ID NO: 1613392 - RNA, 19 nt, Artificial Sequence
  Description of Artificial Sequence: Synthetic oligonucleotide
  Antisense strand to SEQ ID NO: 1613391
guguagaucacgaugcuac

SEQ ID NO: 1613393 - RNA, 19 nt, Artificial Sequence
  Description of Artificial Sequence: Synthetic oligonucleotide
  Sense strand starting at position 2961 of SEQ ID NO: 1560628
aucuacacuucugaugaga

SEQ ID NO: 1613394 - RNA, 19 nt, Artificial Sequence
  Description of Artificial Sequence: Synthetic oligonucleotide
  Antisense strand to SEQ ID NO: 1613393
ucucaucagaaguguagau

SEQ ID NO: 1613395 - RNA, 19 nt, Artificial Sequence
  Description of Artificial Sequence: Synthetic oligonucleotide
  Sense strand starting at position 3183 of SEQ ID NO: 1560628
ucuaauaguuuccugagca

SEQ ID NO: 1613396 - RNA, 19 nt, Artificial Sequence
  Description of Artificial Sequence: Synthetic oligonucleotide
  Antisense strand to SEQ ID NO: 1613395
ugcucaggaaacuauuaga

SEQ ID NO: 1613397 - RNA, 19 nt, Artificial Sequence
  Description of Artificial Sequence: Synthetic oligonucleotide
  Sense strand starting at position 3187 of SEQ ID NO: 1560628
auaguuuccugagcaggaa

SEQ ID NO: 1613398 - RNA, 19 nt, Artificial Sequence
  Description of Artificial Sequence: Synthetic oligonucleotide
  Antisense strand to SEQ ID NO: 1613397
uuccugcucaggaaacuau

SEQ ID NO: 1613399 - RNA, 19 nt, Artificial Sequence
  Description of Artificial Sequence: Synthetic oligonucleotide
  Sense strand starting at position 3188 of SEQ ID NO: 1560628
uaguuuccugagcaggaaa

SEQ ID NO: 1613400 - RNA, 19 nt, Artificial Sequence
  Description of Artificial Sequence: Synthetic oligonucleotide
  Antisense strand to SEQ ID NO: 1613399
uuuccugcucaggaaacua

SEQ ID NO: 1613401 - RNA, 19 nt, Artificial Sequence
  Description of Artificial Sequence: Synthetic oligonucleotide
  Sense strand starting at position 3191 of SEQ ID NO: 1560628
uuuccugagcaggaaaguu

SEQ ID NO: 1613402 - RNA, 19 nt, Artificial Sequence
  Description of Artificial Sequence: Synthetic oligonucleotide
  Antisense strand to SEQ ID NO: 1613401
aacuuuccugcucaggaaa

SEQ ID NO: 1613403 - RNA, 19 nt, Artificial Sequence
  Description of Artificial Sequence: Synthetic oligonucleotide
  Sense strand starting at position 3199 of SEQ ID NO: 1560628
gcaggaaaguuccuaguuc

SEQ ID NO: 1613404 - RNA, 19 nt, Artificial Sequence
  Description of Artificial Sequence: Synthetic oligonucleotide
  Antisense strand to SEQ ID NO: 1613403
gaacuaggaacuuuccugc

SEQ ID NO: 1613405 - RNA, 19 nt, Artificial Sequence
  Description of Artificial Sequence: Synthetic oligonucleotide
  Sense strand starting at position 3650 of SEQ ID NO: 1560628
gacaucugucaugggaaac

SEQ ID NO: 1613406 - RNA, 19 nt, Artificial Sequence
  Description of Artificial Sequence: Synthetic oligonucleotide
  Antisense strand to SEQ ID NO: 1613405
guuucccaugacagauguc

SEQ ID NO: 1613407 - RNA, 19 nt, Artificial Sequence
  Description of Artificial Sequence: Synthetic oligonucleotide
  Sense strand starting at position 3982 of SEQ ID NO: 1560628
cucauaaggcaaugaagau

SEQ ID NO: 1613408 - RNA, 19 nt, Artificial Sequence
  Description of Artificial Sequence: Synthetic oligonucleotide
  Antisense strand to SEQ ID NO: 1613407
aucuucauugccuuaugag

SEQ ID NO: 1613409 - RNA, 19 nt, Artificial Sequence
  Description of Artificial Sequence: Synthetic oligonucleotide
  Sense strand starting at position 181 of SEQ ID NO: 1560629
agcgauuuagccuggguua

SEQ ID NO: 1613410 - RNA, 19 nt, Artificial Sequence
  Description of Artificial Sequence: Synthetic oligonucleotide
  Antisense strand to SEQ ID NO: 1613409
uaacccaggcuaaaucgcu

SEQ ID NO: 1613411 - RNA, 19 nt, Artificial Sequence
  Description of Artificial Sequence: Synthetic oligonucleotide
  Sense strand starting at position 182 of SEQ ID NO: 1560629
gcgauuuagccuggguuac

SEQ ID NO: 1613412 - RNA, 19 nt, Artificial Sequence
  Description of Artificial Sequence: Synthetic oligonucleotide
  Antisense strand to SEQ ID NO: 1613411
guaacccaggcuaaaucgc

SEQ ID NO: 1613413 - RNA, 19 nt, Artificial Sequence
  Description of Artificial Sequence: Synthetic oligonucleotide
  Sense strand starting at position 183 of SEQ ID NO: 1560629
cgauuuagccuggguuacu

SEQ ID NO: 1613414 - RNA, 19 nt, Artificial Sequence
  Description of Artificial Sequence: Synthetic oligonucleotide
  Antisense strand to SEQ ID NO: 1613413
aguaacccaggcuaaaucg

SEQ ID NO: 1613415 - RNA, 19 nt, Artificial Sequence
  Description of Artificial Sequence: Synthetic oligonucleotide
  Sense strand starting at position 216 of SEQ ID NO: 1560629
gacacuugucauggcacaa

SEQ ID NO: 1613416 - RNA, 19 nt, Artificial Sequence
  Description of Artificial Sequence: Synthetic oligonucleotide
  Antisense strand to SEQ ID NO: 1613415
uugugccaugacaaguguc

SEQ ID NO: 1613417 - RNA, 19 nt, Artificial Sequence
  Description of Artificial Sequence: Synthetic oligonucleotide
  Sense strand starting at position 463 of SEQ ID NO: 1560629
uuguaauccagcugggauu

SEQ ID NO: 1613418 - RNA, 19 nt, Artificial Sequence
  Description of Artificial Sequence: Synthetic oligonucleotide
  Antisense strand to SEQ ID NO: 1613417
aaucccagcuggauuacaa

SEQ ID NO: 1613419 - RNA, 19 nt, Artificial Sequence
  Description of Artificial Sequence: Synthetic oligonucleotide
  Sense strand starting at position 464 of SEQ ID NO: 1560629
uguaauccagcugggauua

SEQ ID NO: 1613420 - RNA, 19 nt, Artificial Sequence
  Description of Artificial Sequence: Synthetic oligonucleotide
  Antisense strand to SEQ ID NO: 1613419
uaaucccagcuggauuaca

SEQ ID NO: 1613421 - RNA, 19 nt, Artificial Sequence
  Description of Artificial Sequence: Synthetic oligonucleotide
  Sense strand starting at position 760 of SEQ ID NO: 1560629
gucagagcgccaugaguuu

SEQ ID NO: 1613422 - RNA, 19 nt, Artificial Sequence
  Description of Artificial Sequence: Synthetic oligonucleotide
  Antisense strand to SEQ ID NO: 1613421
aaacucauggcgcucugac

SEQ ID NO: 1613423 - RNA, 19 nt, Artificial Sequence
  Description of Artificial Sequence: Synthetic oligonucleotide
  Sense strand starting at position 767 of SEQ ID NO: 1560629
cgccaugaguuuccugguu

SEQ ID NO: 1613424 - RNA, 19 nt, Artificial Sequence
  Description of Artificial Sequence: Synthetic oligonucleotide
  Antisense strand to SEQ ID NO: 1613423
aaccaggaaacucauggcg

SEQ ID NO: 1613425 - RNA, 19 nt, Artificial Sequence
  Description of Artificial Sequence: Synthetic oligonucleotide
  Sense strand starting at position 781 of SEQ ID NO: 1560629
ugguuugcacuguacagau

SEQ ID NO: 1613426 - RNA, 19 nt, Artificial Sequence
  Description of Artificial Sequence: Synthetic oligonucleotide
  Antisense strand to SEQ ID NO: 1613425
aucuguacagugcaaacca

SEQ ID NO: 1613427 - RNA, 19 nt, Artificial Sequence
  Description of Artificial Sequence: Synthetic oligonucleotide
  Sense strand starting at position 791 of SEQ ID NO: 1560629
uguacagauguugaagguu

SEQ ID NO: 1613428 - RNA, 19 nt, Artificial Sequence
  Description of Artificial Sequence: Synthetic oligonucleotide
  Antisense strand to SEQ ID NO: 1613427
aaccuucaacaucuguaca

SEQ ID NO: 1613429 - RNA, 19 nt, Artificial Sequence
  Description of Artificial Sequence: Synthetic oligonucleotide
  Sense strand starting at position 824 of SEQ ID NO: 1560629
augccauacuguuuccauu

SEQ ID NO: 1613430 - RNA, 19 nt, Artificial Sequence
  Description of Artificial Sequence: Synthetic oligonucleotide
  Antisense strand to SEQ ID NO: 1613429
aauggaaacaguauggcau

SEQ ID NO: 1613431 - RNA, 19 nt, Artificial Sequence
  Description of Artificial Sequence: Synthetic oligonucleotide
  Sense strand starting at position 840 of SEQ ID NO: 1560629
auuugcaguugcuaaagau

SEQ ID NO: 1613432 - RNA, 19 nt, Artificial Sequence
  Description of Artificial Sequence: Synthetic oligonucleotide
  Antisense strand to SEQ ID NO: 1613431
aucuuuagcaacugcaaau

SEQ ID NO: 1613433 - RNA, 19 nt, Artificial Sequence
  Description of Artificial Sequence: Synthetic oligonucleotide
  Sense strand starting at position 849 of SEQ ID NO: 1560629
ugcuaaagaugccuuagua

SEQ ID NO: 1613434 - RNA, 19 nt, Artificial Sequence
  Description of Artificial Sequence: Synthetic oligonucleotide
  Antisense strand to SEQ ID NO: 1613433
uacuaaggcaucuuuagca

SEQ ID NO: 1613435 - RNA, 19 nt, Artificial Sequence
  Description of Artificial Sequence: Synthetic oligonucleotide
  Sense strand starting at position 856 of SEQ ID NO: 1560629
gaugccuuaguaugacauu

SEQ ID NO: 1613436 - RNA, 19 nt, Artificial Sequence
  Description of Artificial Sequence: Synthetic oligonucleotide
  Antisense strand to SEQ ID NO: 1613435
aaugucauacuaaggcauc

SEQ ID NO: 1613437 - RNA, 19 nt, Artificial Sequence
  Description of Artificial Sequence: Synthetic oligonucleotide
  Sense strand starting at position 857 of SEQ ID NO: 1560629
augccuuaguaugacauuu

SEQ ID NO: 1613438 - RNA, 19 nt, Artificial Sequence
  Description of Artificial Sequence: Synthetic oligonucleotide
  Antisense strand to SEQ ID NO: 1613437
aaaugucauacuaaggcau

SEQ ID NO: 1613439 - RNA, 19 nt, Artificial Sequence
  Description of Artificial Sequence: Synthetic oligonucleotide
  Sense strand starting at position 859 of SEQ ID NO: 1560629
gccuuaguaugacauuuaa

SEQ ID NO: 1613440 - RNA, 19 nt, Artificial Sequence
  Description of Artificial Sequence: Synthetic oligonucleotide
  Antisense strand to SEQ ID NO: 1613439
uuaaaugucauacuaaggc

SEQ ID NO: 1613441 - RNA, 19 nt, Artificial Sequence
  Description of Artificial Sequence: Synthetic oligonucleotide
  Sense strand starting at position 889 of SEQ ID NO: 1560629
gcgauuauuuacuaauagu

SEQ ID NO: 1613442 - RNA, 19 nt, Artificial Sequence
  Description of Artificial Sequence: Synthetic oligonucleotide
  Antisense strand to SEQ ID NO: 1613441
acuauuaguaaauaaucgc

SEQ ID NO: 1613443 - RNA, 19 nt, Artificial Sequence
  Description of Artificial Sequence: Synthetic oligonucleotide
  Sense strand starting at position 950 of SEQ ID NO: 1560629
agaaaugacuggcaugaag

SEQ ID NO: 1613444 - RNA, 19 nt, Artificial Sequence
  Description of Artificial Sequence: Synthetic oligonucleotide
  Antisense strand to SEQ ID NO: 1613443
cuucaugccagucauuucu

SEQ ID NO: 1613445 - RNA, 19 nt, Artificial Sequence
  Description of Artificial Sequence: Synthetic oligonucleotide
  Sense strand starting at position 967 of SEQ ID NO: 1560629
aggagauauugaguucgac

SEQ ID NO: 1613446 - RNA, 19 nt, Artificial Sequence
  Description of Artificial Sequence: Synthetic oligonucleotide
  Antisense strand to SEQ ID NO: 1613445
gucgaacucaauaucuccu

SEQ ID NO: 1613447 - RNA, 19 nt, Artificial Sequence
  Description of Artificial Sequence: Synthetic oligonucleotide
  Sense strand starting at position 970 of SEQ ID NO: 1560629
agauauugaguucgacuag

SEQ ID NO: 1613448 - RNA, 19 nt, Artificial Sequence
  Description of Artificial Sequence: Synthetic oligonucleotide
  Antisense strand to SEQ ID NO: 1613447
cuagucgaacucaauaucu

SEQ ID NO: 1613449 - RNA, 19 nt, Artificial Sequence
  Description of Artificial Sequence: Synthetic oligonucleotide
  Sense strand starting at position 977 of SEQ ID NO: 1560629
gaguucgacuaggcaguua

SEQ ID NO: 1613450 - RNA, 19 nt, Artificial Sequence
  Description of Artificial Sequence: Synthetic oligonucleotide
  Antisense strand to SEQ ID NO: 1613449
uaacugccuagucgaacuc

SEQ ID NO: 1613451 - RNA, 19 nt, Artificial Sequence
  Description of Artificial Sequence: Synthetic oligonucleotide
  Sense strand starting at position 982 of SEQ ID NO: 1560629
cgacuaggcaguuaaauag

SEQ ID NO: 1613452 - RNA, 19 nt, Artificial Sequence
  Description of Artificial Sequence: Synthetic oligonucleotide
  Antisense strand to SEQ ID NO: 1613451
cuauuuaacugccuagucg

SEQ ID NO: 1613453 - RNA, 19 nt, Artificial Sequence
  Description of Artificial Sequence: Synthetic oligonucleotide
  Sense strand starting at position 2341 of SEQ ID NO: 1560629
gaacgaagcuuccagucua

SEQ ID NO: 1613454 - RNA, 19 nt, Artificial Sequence
  Description of Artificial Sequence: Synthetic oligonucleotide
  Antisense strand to SEQ ID NO: 1613453
uagacuggaagcuucguuc

SEQ ID NO: 1613455 - RNA, 19 nt, Artificial Sequence
  Description of Artificial Sequence: Synthetic oligonucleotide
  Sense strand starting at position 2387 of SEQ ID NO: 1560629
ugugaugagagcugagagu

SEQ ID NO: 1613456 - RNA, 19 nt, Artificial Sequence
  Description of Artificial Sequence: Synthetic oligonucleotide
  Antisense strand to SEQ ID NO: 1613455
acucucagcucucaucaca

SEQ ID NO: 1613457 - RNA, 19 nt, Artificial Sequence
  Description of Artificial Sequence: Synthetic oligonucleotide
  Sense strand starting at position 2457 of SEQ ID NO: 1560629
cauacaguccugggaggua

SEQ ID NO: 1613458 - RNA, 19 nt, Artificial Sequence
  Description of Artificial Sequence: Synthetic oligonucleotide
  Antisense strand to SEQ ID NO: 1613457
uaccucccaggacuguaug

SEQ ID NO: 1613459 - RNA, 19 nt, Artificial Sequence
  Description of Artificial Sequence: Synthetic oligonucleotide
  Sense strand starting at position 2540 of SEQ ID NO: 1560629
cagaguuaggauugguuga

SEQ ID NO: 1613460 - RNA, 19 nt, Artificial Sequence
  Description of Artificial Sequence: Synthetic oligonucleotide
  Antisense strand to SEQ ID NO: 1613459
ucaaccaauccuaacucug

SEQ ID NO: 1613461 - RNA, 19 nt, Artificial Sequence
  Description of Artificial Sequence: Synthetic oligonucleotide
  Sense strand starting at position 2541 of SEQ ID NO: 1560629
agaguuaggauugguugau

SEQ ID NO: 1613462 - RNA, 19 nt, Artificial Sequence
  Description of Artificial Sequence: Synthetic oligonucleotide
  Antisense strand to SEQ ID NO: 1613461
aucaaccaauccuaacucu

SEQ ID NO: 1613463 - RNA, 19 nt, Artificial Sequence
  Description of Artificial Sequence: Synthetic oligonucleotide
  Sense strand starting at position 2542 of SEQ ID NO: 1560629
gaguuaggauugguugaug

SEQ ID NO: 1613464 - RNA, 19 nt, Artificial Sequence
  Description of Artificial Sequence: Synthetic oligonucleotide
  Antisense strand to SEQ ID NO: 1613463
caucaaccaauccuaacuc

SEQ ID NO: 1613465 - RNA, 19 nt, Artificial Sequence
  Description of Artificial Sequence: Synthetic oligonucleotide
  Sense strand starting at position 2553 of SEQ ID NO: 1560629
gguugaugaugaggugaaa

SEQ ID NO: 1613466 - RNA, 19 nt, Artificial Sequence
  Description of Artificial Sequence: Synthetic oligonucleotide
  Antisense strand to SEQ ID NO: 1613465
uuucaccucaucaucaacc

SEQ ID NO: 1613467 - RNA, 19 nt, Artificial Sequence
  Description of Artificial Sequence: Synthetic oligonucleotide
  Sense strand starting at position 2610 of SEQ ID NO: 1560629
gcauaugcgccuugaggau

SEQ ID NO: 1613468 - RNA, 19 nt, Artificial Sequence
  Description of Artificial Sequence: Synthetic oligonucleotide
  Antisense strand to SEQ ID NO: 1613467
auccucaaggcgcauaugc

SEQ ID NO: 1613469 - RNA, 19 nt, Artificial Sequence
  Description of Artificial Sequence: Synthetic oligonucleotide
  Sense strand starting at position 2872 of SEQ ID NO: 1560629
gagaccucguaucuauuga

SEQ ID NO: 1613470 - RNA, 19 nt, Artificial Sequence
  Description of Artificial Sequence: Synthetic oligonucleotide
  Antisense strand to SEQ ID NO: 1613469
ucaauagauacgaggucuc

SEQ ID NO: 1613471 - RNA, 19 nt, Artificial Sequence
  Description of Artificial Sequence: Synthetic oligonucleotide
  Sense strand starting at position 2917 of SEQ ID NO: 1560629
uggagacugguuuggacaa

SEQ ID NO: 1613472 - RNA, 19 nt, Artificial Sequence
  Description of Artificial Sequence: Synthetic oligonucleotide
  Antisense strand to SEQ ID NO: 1613471
uuguccaaaccagucucca

SEQ ID NO: 1613473 - RNA, 19 nt, Artificial Sequence
  Description of Artificial Sequence: Synthetic oligonucleotide
  Sense strand starting at position 2919 of SEQ ID NO: 1560629
gagacugguuuggacaaga

SEQ ID NO: 1613474 - RNA, 19 nt, Artificial Sequence
  Description of Artificial Sequence: Synthetic oligonucleotide
  Antisense strand to SEQ ID NO: 1613473
ucuuguccaaaccagucuc

SEQ ID NO: 1613475 - RNA, 19 nt, Artificial Sequence
  Description of Artificial Sequence: Synthetic oligonucleotide
  Sense strand starting at position 3056 of SEQ ID NO: 1560629
cuuggugcuuggcuauaua

SEQ ID NO: 1613476 - RNA, 19 nt, Artificial Sequence
  Description of Artificial Sequence: Synthetic oligonucleotide
  Antisense strand to SEQ ID NO: 1613475
uauauagccaagcaccaag

SEQ ID NO: 1613477 - RNA, 19 nt, Artificial Sequence
  Description of Artificial Sequence: Synthetic oligonucleotide
  Sense strand starting at position 3477 of SEQ ID NO: 1560629
ugaggagccuaugcagaau

SEQ ID NO: 1613478 - RNA, 19 nt, Artificial Sequence
  Description of Artificial Sequence: Synthetic oligonucleotide
  Antisense strand to SEQ ID NO: 1613477
auucugcauaggcuccuca

SEQ ID NO: 1613479 - RNA, 19 nt, Artificial Sequence
  Description of Artificial Sequence: Synthetic oligonucleotide
  Sense strand starting at position 3501 of SEQ ID NO: 1560629
gggagaaacuaucgaucua

SEQ ID NO: 1613480 - RNA, 19 nt, Artificial Sequence
  Description of Artificial Sequence: Synthetic oligonucleotide
  Antisense strand to SEQ ID NO: 1613479
uagaucgauaguuucuccc

SEQ ID NO: 1613481 - RNA, 19 nt, Artificial Sequence
  Description of Artificial Sequence: Synthetic oligonucleotide
  Sense strand starting at position 3570 of SEQ ID NO: 1560629
gggcauaggugguaaauaa

SEQ ID NO: 1613482 - RNA, 19 nt, Artificial Sequence
  Description of Artificial Sequence: Synthetic oligonucleotide
  Antisense strand to SEQ ID NO: 1613481
uuauuuaccaccuaugccc

SEQ ID NO: 1613483 - RNA, 19 nt, Artificial Sequence
  Description of Artificial Sequence: Synthetic oligonucleotide
  Sense strand starting at position 3623 of SEQ ID NO: 1560629
cgaauauuaagacggccua

SEQ ID NO: 1613484 - RNA, 19 nt, Artificial Sequence
  Description of Artificial Sequence: Synthetic oligonucleotide
  Antisense strand to SEQ ID NO: 1613483
uaggccgucuuaauauucg

SEQ ID NO: 1613485 - RNA, 19 nt, Artificial Sequence
  Description of Artificial Sequence: Synthetic oligonucleotide
  Sense strand starting at position 3697 of SEQ ID NO: 1560629
gccugaaauguaggcagaa

SEQ ID NO: 1613486 - RNA, 19 nt, Artificial Sequence
  Description of Artificial Sequence: Synthetic oligonucleotide
  Antisense strand to SEQ ID NO: 1613485
uucugccuacauuucaggc

SEQ ID NO: 1613487 - RNA, 19 nt, Artificial Sequence
  Description of Artificial Sequence: Synthetic oligonucleotide
  Sense strand starting at position 3698 of SEQ ID NO: 1560629
ccugaaauguaggcagaaa

SEQ ID NO: 1613488 - RNA, 19 nt, Artificial Sequence
  Description of Artificial Sequence: Synthetic oligonucleotide
  Antisense strand to SEQ ID NO: 1613487
uuucugccuacauuucagg

SEQ ID NO: 1613489 - RNA, 19 nt, Artificial Sequence
  Description of Artificial Sequence: Synthetic oligonucleotide
  Sense strand starting at position 77 of SEQ ID NO: 1560630
gcugcagacagucagcauu

SEQ ID NO: 1613490 - RNA, 19 nt, Artificial Sequence
  Description of Artificial Sequence: Synthetic oligonucleotide
  Antisense strand to SEQ ID NO: 1613489
aaugcugacugucugcagc

SEQ ID NO: 1613491 - RNA, 19 nt, Artificial Sequence
  Description of Artificial Sequence: Synthetic oligonucleotide
  Sense strand starting at position 174 of SEQ ID NO: 1560630
ccgagauugacauguggug

SEQ ID NO: 1613492 - RNA, 19 nt, Artificial Sequence
  Description of Artificial Sequence: Synthetic oligonucleotide
  Antisense strand to SEQ ID NO: 1613491
caccacaugucaaucucgg

SEQ ID NO: 1613493 - RNA, 19 nt, Artificial Sequence
  Description of Artificial Sequence: Synthetic oligonucleotide
  Sense strand starting at position 220 of SEQ ID NO: 1560630
ggccaacuuugcucgcaga

SEQ ID NO: 1613494 - RNA, 19 nt, Artificial Sequence
  Description of Artificial Sequence: Synthetic oligonucleotide
  Antisense strand to SEQ ID NO: 1613493
ucugcgagcaaaguuggcc

SEQ ID NO: 1613495 - RNA, 19 nt, Artificial Sequence
  Description of Artificial Sequence: Synthetic oligonucleotide
  Sense strand starting at position 223 of SEQ ID NO: 1560630
caacuuugcucgcagaguu

SEQ ID NO: 1613496 - RNA, 19 nt, Artificial Sequence
  Description of Artificial Sequence: Synthetic oligonucleotide
  Antisense strand to SEQ ID NO: 1613495
aacucugcgagcaaaguug

SEQ ID NO: 1613497 - RNA, 19 nt, Artificial Sequence
  Description of Artificial Sequence: Synthetic oligonucleotide
  Sense strand starting at position 233 of SEQ ID NO: 1560630
cgcagaguucuucaagagg

SEQ ID NO: 1613498 - RNA, 19 nt, Artificial Sequence
  Description of Artificial Sequence: Synthetic oligonucleotide
  Antisense strand to SEQ ID NO: 1613497
ccucuugaagaacucugcg

SEQ ID NO: 1613499 - RNA, 19 nt, Artificial Sequence
  Description of Artificial Sequence: Synthetic oligonucleotide
  Sense strand starting at position 474 of SEQ ID NO: 1560630
ugggcagcaucucauuuaa

SEQ ID NO: 1613500 - RNA, 19 nt, Artificial Sequence
  Description of Artificial Sequence: Synthetic oligonucleotide
  Antisense strand to SEQ ID NO: 1613499
uuaaaugagaugcugccca

SEQ ID NO: 1613501 - RNA, 19 nt, Artificial Sequence
  Description of Artificial Sequence: Synthetic oligonucleotide
  Sense strand starting at position 521 of SEQ ID NO: 1560630
gacgucauuugccggaagu

SEQ ID NO: 1613502 - RNA, 19 nt, Artificial Sequence
  Description of Artificial Sequence: Synthetic oligonucleotide
  Antisense strand to SEQ ID NO: 1613501
acuuccggcaaaugacguc

SEQ ID NO: 1613503 - RNA, 19 nt, Artificial Sequence
  Description of Artificial Sequence: Synthetic oligonucleotide
  Sense strand starting at position 522 of SEQ ID NO: 1560630
acgucauuugccggaaguc

SEQ ID NO: 1613504 - RNA, 19 nt, Artificial Sequence
  Description of Artificial Sequence: Synthetic oligonucleotide
  Antisense strand to SEQ ID NO: 1613503
gacuuccggcaaaugacgu

SEQ ID NO: 1613505 - RNA, 19 nt, Artificial Sequence
  Description of Artificial Sequence: Synthetic oligonucleotide
  Sense strand starting at position 523 of SEQ ID NO: 1560630
cgucauuugccggaaguca

SEQ ID NO: 1613506 - RNA, 19 nt, Artificial Sequence
  Description of Artificial Sequence: Synthetic oligonucleotide
  Antisense strand to SEQ ID NO: 1613505
ugacuuccggcaaaugacg

SEQ ID NO: 1613507 - RNA, 19 nt, Artificial Sequence
  Description of Artificial Sequence: Synthetic oligonucleotide
  Sense strand starting at position 531 of SEQ ID NO: 1560630
gccggaagucaccggugaa

SEQ ID NO: 1613508 - RNA, 19 nt, Artificial Sequence
  Description of Artificial Sequence: Synthetic oligonucleotide
  Antisense strand to SEQ ID NO: 1613507
uucaccggugacuuccggc

SEQ ID NO: 1613509 - RNA, 19 nt, Artificial Sequence
  Description of Artificial Sequence: Synthetic oligonucleotide
  Sense strand starting at position 532 of SEQ ID NO: 1560630
ccggaagucaccggugaag

SEQ ID NO: 1613510 - RNA, 19 nt, Artificial Sequence
  Description of Artificial Sequence: Synthetic oligonucleotide
  Antisense strand to SEQ ID NO: 1613509
cuucaccggugacuuccgg

SEQ ID NO: 1613511 - RNA, 19 nt, Artificial Sequence
  Description of Artificial Sequence: Synthetic oligonucleotide
  Sense strand starting at position 534 of SEQ ID NO: 1560630
ggaagucaccggugaagac

SEQ ID NO: 1613512 - RNA, 19 nt, Artificial Sequence
  Description of Artificial Sequence: Synthetic oligonucleotide
  Antisense strand to SEQ ID NO: 1613511
gucuucaccggugacuucc

SEQ ID NO: 1613513 - RNA, 19 nt, Artificial Sequence
  Description of Artificial Sequence: Synthetic oligonucleotide
  Sense strand starting at position 720 of SEQ ID NO: 1560630
gcugcuucggcucagagaa

SEQ ID NO: 1613514 - RNA, 19 nt, Artificial Sequence
  Description of Artificial Sequence: Synthetic oligonucleotide
  Antisense strand to SEQ ID NO: 1613513
uucucugagccgaagcagc

SEQ ID NO: 1613515 - RNA, 19 nt, Artificial Sequence
  Description of Artificial Sequence: Synthetic oligonucleotide
  Sense strand starting at position 960 of SEQ ID NO: 1560630
gaucgucccucugcaaaua

SEQ ID NO: 1613516 - RNA, 19 nt, Artificial Sequence
  Description of Artificial Sequence: Synthetic oligonucleotide
  Antisense strand to SEQ ID NO: 1613515
uauuugcagagggacgauc

SEQ ID NO: 1613517 - RNA, 19 nt, Artificial Sequence
  Description of Artificial Sequence: Synthetic oligonucleotide
  Sense strand starting at position 1088 of SEQ ID NO: 1560630
ggcacaucgccucagaagu

SEQ ID NO: 1613518 - RNA, 19 nt, Artificial Sequence
  Description of Artificial Sequence: Synthetic oligonucleotide
  Antisense strand to SEQ ID NO: 1613517
acuucugaggcgaugugcc

SEQ ID NO: 1613519 - RNA, 19 nt, Artificial Sequence
  Description of Artificial Sequence: Synthetic oligonucleotide
  Sense strand starting at position 1104 of SEQ ID NO: 1560630
aguucugacuccucagaac

SEQ ID NO: 1613520 - RNA, 19 nt, Artificial Sequence
  Description of Artificial Sequence: Synthetic oligonucleotide
  Antisense strand to SEQ ID NO: 1613519
guucugaggagucagaacu

SEQ ID NO: 1613521 - RNA, 19 nt, Artificial Sequence
  Description of Artificial Sequence: Synthetic oligonucleotide
  Sense strand starting at position 1156 of SEQ ID NO: 1560630
ccaagcacacguugagaaa

SEQ ID NO: 1613522 - RNA, 19 nt, Artificial Sequence
  Description of Artificial Sequence: Synthetic oligonucleotide
  Antisense strand to SEQ ID NO: 1613521
uuucucaacgugugcuugg

SEQ ID NO: 1613523 - RNA, 19 nt, Artificial Sequence
  Description of Artificial Sequence: Synthetic oligonucleotide
  Sense strand starting at position 1255 of SEQ ID NO: 1560630
aaacuuguugaaugggacu

SEQ ID NO: 1613524 - RNA, 19 nt, Artificial Sequence
  Description of Artificial Sequence: Synthetic oligonucleotide
  Antisense strand to SEQ ID NO: 1613523
agucccauucaacaaguuu

SEQ ID NO: 1613525 - RNA, 19 nt, Artificial Sequence
  Description of Artificial Sequence: Synthetic oligonucleotide
  Sense strand starting at position 1257 of SEQ ID NO: 1560630
acuuguugaaugggacuca

SEQ ID NO: 1613526 - RNA, 19 nt, Artificial Sequence
  Description of Artificial Sequence: Synthetic oligonucleotide
  Antisense strand to SEQ ID NO: 1613525
ugagucccauucaacaagu

SEQ ID NO: 1613527 - RNA, 19 nt, Artificial Sequence
  Description of Artificial Sequence: Synthetic oligonucleotide
  Sense strand starting at position 2268 of SEQ ID NO: 1560630
ggccgugccgugcaauaaa

SEQ ID NO: 1613528 - RNA, 19 nt, Artificial Sequence
  Description of Artificial Sequence: Synthetic oligonucleotide
  Antisense strand to SEQ ID NO: 1613527
uuuauugcacggcacggcc

SEQ ID NO: 1613529 - RNA, 19 nt, Artificial Sequence
  Description of Artificial Sequence: Synthetic oligonucleotide
  Sense strand starting at position 2308 of SEQ ID NO: 1560630
gcagguuguuccgugugga

SEQ ID NO: 1613530 - RNA, 19 nt, Artificial Sequence
  Description of Artificial Sequence: Synthetic oligonucleotide
  Antisense strand to SEQ ID NO: 1613529
uccacacggaacaaccugc

SEQ ID NO: 1613531 - RNA, 19 nt, Artificial Sequence
  Description of Artificial Sequence: Synthetic oligonucleotide
  Sense strand starting at position 2309 of SEQ ID NO: 1560630
cagguuguuccguguggaa

SEQ ID NO: 1613532 - RNA, 19 nt, Artificial Sequence
  Description of Artificial Sequence: Synthetic oligonucleotide
  Antisense strand to SEQ ID NO: 1613531
uuccacacggaacaaccug

SEQ ID NO: 1613533 - RNA, 19 nt, Artificial Sequence
  Description of Artificial Sequence: Synthetic oligonucleotide
  Sense strand starting at position 2436 of SEQ ID NO: 1560630
uuauguggcccucagagga

SEQ ID NO: 1613534 - RNA, 19 nt, Artificial Sequence
  Description of Artificial Sequence: Synthetic oligonucleotide
  Antisense strand to SEQ ID NO: 1613533
uccucugagggccacauaa

SEQ ID NO: 1613535 - RNA, 19 nt, Artificial Sequence
  Description of Artificial Sequence: Synthetic oligonucleotide
  Sense strand starting at position 2485 of SEQ ID NO: 1560630
uccagaaccugccgugauu

SEQ ID NO: 1613536 - RNA, 19 nt, Artificial Sequence
  Description of Artificial Sequence: Synthetic oligonucleotide
  Antisense strand to SEQ ID NO: 1613535
aaucacggcagguucugga

SEQ ID NO: 1613537 - RNA, 19 nt, Artificial Sequence
  Description of Artificial Sequence: Synthetic oligonucleotide
  Sense strand starting at position 2503 of SEQ ID NO: 1560630
ucccuauugccgugagggu

SEQ ID NO: 1613538 - RNA, 19 nt, Artificial Sequence
  Description of Artificial Sequence: Synthetic oligonucleotide
  Antisense strand to SEQ ID NO: 1613537
acccucacggcaauaggga

SEQ ID NO: 1613539 - RNA, 19 nt, Artificial Sequence
  Description of Artificial Sequence: Synthetic oligonucleotide
  Sense strand starting at position 2988 of SEQ ID NO: 1560630
gucccaggccuuugaucuu

SEQ ID NO: 1613540 - RNA, 19 nt, Artificial Sequence
  Description of Artificial Sequence: Synthetic oligonucleotide
  Antisense strand to SEQ ID NO: 1613539
aagaucaaaggccugggac

SEQ ID NO: 1613541 - RNA, 19 nt, Artificial Sequence
  Description of Artificial Sequence: Synthetic oligonucleotide
  Sense strand starting at position 3061 of SEQ ID NO: 1560630
agccucucaguuugucuaa

SEQ ID NO: 1613542 - RNA, 19 nt, Artificial Sequence
  Description of Artificial Sequence: Synthetic oligonucleotide
  Antisense strand to SEQ ID NO: 1613541
uuagacaaacugagaggcu

SEQ ID NO: 1613543 - RNA, 19 nt, Artificial Sequence
  Description of Artificial Sequence: Synthetic oligonucleotide
  Sense strand starting at position 3062 of SEQ ID NO: 1560630
gccucucaguuugucuaau

SEQ ID NO: 1613544 - RNA, 19 nt, Artificial Sequence
  Description of Artificial Sequence: Synthetic oligonucleotide
  Antisense strand to SEQ ID NO: 1613543
auuagacaaacugagaggc

SEQ ID NO: 1613545 - RNA, 19 nt, Artificial Sequence
  Description of Artificial Sequence: Synthetic oligonucleotide
  Sense strand starting at position 3068 of SEQ ID NO: 1560630
caguuugucuaaugggcuu

SEQ ID NO: 1613546 - RNA, 19 nt, Artificial Sequence
  Description of Artificial Sequence: Synthetic oligonucleotide
  Antisense strand to SEQ ID NO: 1613545
aagcccauuagacaaacug

SEQ ID NO: 1613547 - RNA, 19 nt, Artificial Sequence
  Description of Artificial Sequence: Synthetic oligonucleotide
  Sense strand starting at position 3141 of SEQ ID NO: 1560630
gcgagugcucauggaaagu

SEQ ID NO: 1613548 - RNA, 19 nt, Artificial Sequence
  Description of Artificial Sequence: Synthetic oligonucleotide
  Antisense strand to SEQ ID NO: 1613547
acuuuccaugagcacucgc

SEQ ID NO: 1613549 - RNA, 19 nt, Artificial Sequence
  Description of Artificial Sequence: Synthetic oligonucleotide
  Sense strand starting at position 3517 of SEQ ID NO: 1560630
cucccugucucacagauga

SEQ ID NO: 1613550 - RNA, 19 nt, Artificial Sequence
  Description of Artificial Sequence: Synthetic oligonucleotide
  Antisense strand to SEQ ID NO: 1613549
ucaucugugagacagggag

SEQ ID NO: 1613551 - RNA, 19 nt, Artificial Sequence
  Description of Artificial Sequence: Synthetic oligonucleotide
  Sense strand starting at position 3555 of SEQ ID NO: 1560630
ugccauuugucccaaguga

SEQ ID NO: 1613552 - RNA, 19 nt, Artificial Sequence
  Description of Artificial Sequence: Synthetic oligonucleotide
  Antisense strand to SEQ ID NO: 1613551
ucacuugggacaaauggca

SEQ ID NO: 1613553 - RNA, 19 nt, Artificial Sequence
  Description of Artificial Sequence: Synthetic oligonucleotide
  Sense strand starting at position 3661 of SEQ ID NO: 1560630
guguauucccaguggcuuu

SEQ ID NO: 1613554 - RNA, 19 nt, Artificial Sequence
  Description of Artificial Sequence: Synthetic oligonucleotide
  Antisense strand to SEQ ID NO: 1613553
aaagccacugggaauacac

SEQ ID NO: 1613555 - RNA, 19 nt, Artificial Sequence
  Description of Artificial Sequence: Synthetic oligonucleotide
  Sense strand starting at position 3947 of SEQ ID NO: 1560630
acguguuucuuucucugua

SEQ ID NO: 1613556 - RNA, 19 nt, Artificial Sequence
  Description of Artificial Sequence: Synthetic oligonucleotide
  Antisense strand to SEQ ID NO: 1613555
uacagagaaagaaacacgu

SEQ ID NO: 1613557 - RNA, 19 nt, Artificial Sequence
  Description of Artificial Sequence: Synthetic oligonucleotide
  Sense strand starting at position 3948 of SEQ ID NO: 1560630
cguguuucuuucucuguaa

SEQ ID NO: 1613558 - RNA, 19 nt, Artificial Sequence
  Description of Artificial Sequence: Synthetic oligonucleotide
  Antisense strand to SEQ ID NO: 1613557
uuacagagaaagaaacacg

SEQ ID NO: 1613559 - RNA, 19 nt, Artificial Sequence
  Description of Artificial Sequence: Synthetic oligonucleotide
  Sense strand starting at position 3949 of SEQ ID NO: 1560630
guguuucuuucucuguaaa

SEQ ID NO: 1613560 - RNA, 19 nt, Artificial Sequence
  Description of Artificial Sequence: Synthetic oligonucleotide
  Antisense strand to SEQ ID NO: 1613559
uuuacagagaaagaaacac

SEQ ID NO: 1613561 - RNA, 19 nt, Artificial Sequence
  Description of Artificial Sequence: Synthetic oligonucleotide
  Sense strand starting at position 3966 of SEQ ID NO: 1560630
aagugaugcuccugauagc

SEQ ID NO: 1613562 - RNA, 19 nt, Artificial Sequence
  Description of Artificial Sequence: Synthetic oligonucleotide
  Antisense strand to SEQ ID NO: 1613561
gcuaucaggagcaucacuu

SEQ ID NO: 1613563 - RNA, 19 nt, Artificial Sequence
  Description of Artificial Sequence: Synthetic oligonucleotide
  Sense strand starting at position 3967 of SEQ ID NO: 1560630
agugaugcuccugauagcu

SEQ ID NO: 1613564 - RNA, 19 nt, Artificial Sequence
  Description of Artificial Sequence: Synthetic oligonucleotide
  Antisense strand to SEQ ID NO: 1613563
agcuaucaggagcaucacu

SEQ ID NO: 1613565 - RNA, 19 nt, Artificial Sequence
  Description of Artificial Sequence: Synthetic oligonucleotide
  Sense strand starting at position 708 of SEQ ID NO: 1560631
ggauguugaucuuuaucuc

SEQ ID NO: 1613566 - RNA, 19 nt, Artificial Sequence
  Description of Artificial Sequence: Synthetic oligonucleotide
  Antisense strand to SEQ ID NO: 1613565
gagauaaagaucaacaucc

SEQ ID NO: 1613567 - RNA, 19 nt, Artificial Sequence
  Description of Artificial Sequence: Synthetic oligonucleotide
  Sense strand starting at position 712 of SEQ ID NO: 1560631
guugaucuuuaucucagga

SEQ ID NO: 1613568 - RNA, 19 nt, Artificial Sequence
  Description of Artificial Sequence: Synthetic oligonucleotide
  Antisense strand to SEQ ID NO: 1613567
uccugagauaaagaucaac

SEQ ID NO: 1613569 - RNA, 19 nt, Artificial Sequence
  Description of Artificial Sequence: Synthetic oligonucleotide
  Sense strand starting at position 717 of SEQ ID NO: 1560631
ucuuuaucucaggauuguu

SEQ ID NO: 1613570 - RNA, 19 nt, Artificial Sequence
  Description of Artificial Sequence: Synthetic oligonucleotide
  Antisense strand to SEQ ID NO: 1613569
aacaauccugagauaaaga

SEQ ID NO: 1613571 - RNA, 19 nt, Artificial Sequence
  Description of Artificial Sequence: Synthetic oligonucleotide
  Sense strand starting at position 720 of SEQ ID NO: 1560631
uuaucucaggauuguugaa

SEQ ID NO: 1613572 - RNA, 19 nt, Artificial Sequence
  Description of Artificial Sequence: Synthetic oligonucleotide
  Antisense strand to SEQ ID NO: 1613571
uucaacaauccugagauaa

SEQ ID NO: 1613573 - RNA, 19 nt, Artificial Sequence
  Description of Artificial Sequence: Synthetic oligonucleotide
  Sense strand starting at position 755 of SEQ ID NO: 1560631
ccugauacaccguaaguuu

SEQ ID NO: 1613574 - RNA, 19 nt, Artificial Sequence
  Description of Artificial Sequence: Synthetic oligonucleotide
  Antisense strand to SEQ ID NO: 1613573
aaacuuacgguguaucagg

SEQ ID NO: 1613575 - RNA, 19 nt, Artificial Sequence
  Description of Artificial Sequence: Synthetic oligonucleotide
  Sense strand starting at position 902 of SEQ ID NO: 1560631
guauccugacaucacuuua

SEQ ID NO: 1613576 - RNA, 19 nt, Artificial Sequence
  Description of Artificial Sequence: Synthetic oligonucleotide
  Antisense strand to SEQ ID NO: 1613575
uaaagugaugucaggauac

SEQ ID NO: 1613577 - RNA, 19 nt, Artificial Sequence
  Description of Artificial Sequence: Synthetic oligonucleotide
  Sense strand starting at position 983 of SEQ ID NO: 1560631
uggagaaucugugucugaa

SEQ ID NO: 1613578 - RNA, 19 nt, Artificial Sequence
  Description of Artificial Sequence: Synthetic oligonucleotide
  Antisense strand to SEQ ID NO: 1613577
uucagacacagauucucca

SEQ ID NO: 1613579 - RNA, 19 nt, Artificial Sequence
  Description of Artificial Sequence: Synthetic oligonucleotide
  Sense strand starting at position 985 of SEQ ID NO: 1560631
gagaaucugugucugaaga

SEQ ID NO: 1613580 - RNA, 19 nt, Artificial Sequence
  Description of Artificial Sequence: Synthetic oligonucleotide
  Antisense strand to SEQ ID NO: 1613579
ucuucagacacagauucuc

SEQ ID NO: 1613581 - RNA, 19 nt, Artificial Sequence
  Description of Artificial Sequence: Synthetic oligonucleotide
  Sense strand starting at position 986 of SEQ ID NO: 1560631
agaaucugugucugaagau

SEQ ID NO: 1613582 - RNA, 19 nt, Artificial Sequence
  Description of Artificial Sequence: Synthetic oligonucleotide
  Antisense strand to SEQ ID NO: 1613581
aucuucagacacagauucu

SEQ ID NO: 1613583 - RNA, 19 nt, Artificial Sequence
  Description of Artificial Sequence: Synthetic oligonucleotide
  Sense strand starting at position 1079 of SEQ ID NO: 1560631
uauggauaguuccugaagu

SEQ ID NO: 1613584 - RNA, 19 nt, Artificial Sequence
  Description of Artificial Sequence: Synthetic oligonucleotide
  Antisense strand to SEQ ID NO: 1613583
acuucaggaacuauccaua

SEQ ID NO: 1613585 - RNA, 19 nt, Artificial Sequence
  Description of Artificial Sequence: Synthetic oligonucleotide
  Sense strand starting at position 1081 of SEQ ID NO: 1560631
uggauaguuccugaaguuu

SEQ ID NO: 1613586 - RNA, 19 nt, Artificial Sequence
  Description of Artificial Sequence: Synthetic oligonucleotide
  Antisense strand to SEQ ID NO: 1613585
aaacuucaggaacuaucca

SEQ ID NO: 1613587 - RNA, 19 nt, Artificial Sequence
  Description of Artificial Sequence: Synthetic oligonucleotide
  Sense strand starting at position 1583 of SEQ ID NO: 1560631
gguauuggaucccugcaga

SEQ ID NO: 1613588 - RNA, 19 nt, Artificial Sequence
  Description of Artificial Sequence: Synthetic oligonucleotide
  Antisense strand to SEQ ID NO: 1613587
ucugcagggauccaauacc

SEQ ID NO: 1613589 - RNA, 19 nt, Artificial Sequence
  Description of Artificial Sequence: Synthetic oligonucleotide
  Sense strand starting at position 1691 of SEQ ID NO: 1560631
ugaccuagacacugacuua

SEQ ID NO: 1613590 - RNA, 19 nt, Artificial Sequence
  Description of Artificial Sequence: Synthetic oligonucleotide
  Antisense strand to SEQ ID NO: 1613589
uaagucagugucuagguca

SEQ ID NO: 1613591 - RNA, 19 nt, Artificial Sequence
  Description of Artificial Sequence: Synthetic oligonucleotide
  Sense strand starting at position 1729 of SEQ ID NO: 1560631
uuucccucacgggagauau

SEQ ID NO: 1613592 - RNA, 19 nt, Artificial Sequence
  Description of Artificial Sequence: Synthetic oligonucleotide
  Antisense strand to SEQ ID NO: 1613591
auaucucccgugagggaaa

SEQ ID NO: 1613593 - RNA, 19 nt, Artificial Sequence
  Description of Artificial Sequence: Synthetic oligonucleotide
  Sense strand starting at position 1746 of SEQ ID NO: 1560631
auugaucuuccagguucua

SEQ ID NO: 1613594 - RNA, 19 nt, Artificial Sequence
  Description of Artificial Sequence: Synthetic oligonucleotide
  Antisense strand to SEQ ID NO: 1613593
uagaaccuggaagaucaau

SEQ ID NO: 1613595 - RNA, 19 nt, Artificial Sequence
  Description of Artificial Sequence: Synthetic oligonucleotide
  Sense strand starting at position 1810 of SEQ ID NO: 1560631
uugauuccucaugauggca

SEQ ID NO: 1613596 - RNA, 19 nt, Artificial Sequence
  Description of Artificial Sequence: Synthetic oligonucleotide
  Antisense strand to SEQ ID NO: 1613595
ugccaucaugaggaaucaa

SEQ ID NO: 1613597 - RNA, 19 nt, Artificial Sequence
  Description of Artificial Sequence: Synthetic oligonucleotide
  Sense strand starting at position 1937 of SEQ ID NO: 1560631
cuuucuuuggugggaggau

SEQ ID NO: 1613598 - RNA, 19 nt, Artificial Sequence
  Description of Artificial Sequence: Synthetic oligonucleotide
  Antisense strand to SEQ ID NO: 1613597
auccucccaccaaagaaag

SEQ ID NO: 1613599 - RNA, 19 nt, Artificial Sequence
  Description of Artificial Sequence: Synthetic oligonucleotide
  Sense strand starting at position 2007 of SEQ ID NO: 1560631
gcuugcucucuugugucau

SEQ ID NO: 1613600 - RNA, 19 nt, Artificial Sequence
  Description of Artificial Sequence: Synthetic oligonucleotide
  Antisense strand to SEQ ID NO: 1613599
augacacaagagagcaagc

SEQ ID NO: 1613601 - RNA, 19 nt, Artificial Sequence
  Description of Artificial Sequence: Synthetic oligonucleotide
  Sense strand starting at position 2103 of SEQ ID NO: 1560631
ugucaucugggaugacaga

SEQ ID NO: 1613602 - RNA, 19 nt, Artificial Sequence
  Description of Artificial Sequence: Synthetic oligonucleotide
  Antisense strand to SEQ ID NO: 1613601
ucugucaucccagaugaca

SEQ ID NO: 1613603 - RNA, 19 nt, Artificial Sequence
  Description of Artificial Sequence: Synthetic oligonucleotide
  Sense strand starting at position 2158 of SEQ ID NO: 1560631
ccuucuaaugucugaggaa

SEQ ID NO: 1613604 - RNA, 19 nt, Artificial Sequence
  Description of Artificial Sequence: Synthetic oligonucleotide
  Antisense strand to SEQ ID NO: 1613603
uuccucagacauuagaagg

SEQ ID NO: 1613605 - RNA, 19 nt, Artificial Sequence
  Description of Artificial Sequence: Synthetic oligonucleotide
  Sense strand starting at position 2170 of SEQ ID NO: 1560631
ugaggaaagcgucauucag

SEQ ID NO: 1613606 - RNA, 19 nt, Artificial Sequence
  Description of Artificial Sequence: Synthetic oligonucleotide
  Antisense strand to SEQ ID NO: 1613605
cugaaugacgcuuuccuca

SEQ ID NO: 1613607 - RNA, 19 nt, Artificial Sequence
  Description of Artificial Sequence: Synthetic oligonucleotide
  Sense strand starting at position 2238 of SEQ ID NO: 1560631
ccuacaaaugguugccaga

SEQ ID NO: 1613608 - RNA, 19 nt, Artificial Sequence
  Description of Artificial Sequence: Synthetic oligonucleotide
  Antisense strand to SEQ ID NO: 1613607
ucuggcaaccauuuguagg

SEQ ID NO: 1613609 - RNA, 19 nt, Artificial Sequence
  Description of Artificial Sequence: Synthetic oligonucleotide
  Sense strand starting at position 2240 of SEQ ID NO: 1560631
uacaaaugguugccagauu

SEQ ID NO: 1613610 - RNA, 19 nt, Artificial Sequence
  Description of Artificial Sequence: Synthetic oligonucleotide
  Antisense strand to SEQ ID NO: 1613609
aaucuggcaaccauuugua

SEQ ID NO: 1613611 - RNA, 19 nt, Artificial Sequence
  Description of Artificial Sequence: Synthetic oligonucleotide
  Sense strand starting at position 2682 of SEQ ID NO: 1560631
ugagauacuccaugccauc

SEQ ID NO: 1613612 - RNA, 19 nt, Artificial Sequence
  Description of Artificial Sequence: Synthetic oligonucleotide
  Antisense strand to SEQ ID NO: 1613611
gauggcauggaguaucuca

SEQ ID NO: 1613613 - RNA, 19 nt, Artificial Sequence
  Description of Artificial Sequence: Synthetic oligonucleotide
  Sense strand starting at position 2709 of SEQ ID NO: 1560631
ccugaacuaugauccugua

SEQ ID NO: 1613614 - RNA, 19 nt, Artificial Sequence
  Description of Artificial Sequence: Synthetic oligonucleotide
  Antisense strand to SEQ ID NO: 1613613
uacaggaucauaguucagg

SEQ ID NO: 1613615 - RNA, 19 nt, Artificial Sequence
  Description of Artificial Sequence: Synthetic oligonucleotide
  Sense strand starting at position 2722 of SEQ ID NO: 1560631
ccuguacuagauuggaaac

SEQ ID NO: 1613616 - RNA, 19 nt, Artificial Sequence
  Description of Artificial Sequence: Synthetic oligonucleotide
  Antisense strand to SEQ ID NO: 1613615
guuuccaaucuaguacagg

SEQ ID NO: 1613617 - RNA, 19 nt, Artificial Sequence
  Description of Artificial Sequence: Synthetic oligonucleotide
  Sense strand starting at position 2772 of SEQ ID NO: 1560631
acugauaaugaugguggua

SEQ ID NO: 1613618 - RNA, 19 nt, Artificial Sequence
  Description of Artificial Sequence: Synthetic oligonucleotide
  Antisense strand to SEQ ID NO: 1613617
uaccaccaucauuaucagu

SEQ ID NO: 1613619 - RNA, 19 nt, Artificial Sequence
  Description of Artificial Sequence: Synthetic oligonucleotide
  Sense strand starting at position 2784 of SEQ ID NO: 1560631
ggugguaauggugaugaua

SEQ ID NO: 1613620 - RNA, 19 nt, Artificial Sequence
  Description of Artificial Sequence: Synthetic oligonucleotide
  Antisense strand to SEQ ID NO: 1613619
uaucaucaccauuaccacc

SEQ ID NO: 1613621 - RNA, 19 nt, Artificial Sequence
  Description of Artificial Sequence: Synthetic oligonucleotide
  Sense strand starting at position 2795 of SEQ ID NO: 1560631
ugaugauaguagucauaaa

SEQ ID NO: 1613622 - RNA, 19 nt, Artificial Sequence
  Description of Artificial Sequence: Synthetic oligonucleotide
  Antisense strand to SEQ ID NO: 1613621
uuuaugacuacuaucauca

SEQ ID NO: 1613623 - RNA, 19 nt, Artificial Sequence
  Description of Artificial Sequence: Synthetic oligonucleotide
  Sense strand starting at position 2951 of SEQ ID NO: 1560631
ugucgaaugagugaaagau

SEQ ID NO: 1613624 - RNA, 19 nt, Artificial Sequence
  Description of Artificial Sequence: Synthetic oligonucleotide
  Antisense strand to SEQ ID NO: 1613623
aucuuucacucauucgaca

SEQ ID NO: 1613625 - RNA, 19 nt, Artificial Sequence
  Description of Artificial Sequence: Synthetic oligonucleotide
  Sense strand starting at position 3010 of SEQ ID NO: 1560631
gggauaaguauguguagaa

SEQ ID NO: 1613626 - RNA, 19 nt, Artificial Sequence
  Description of Artificial Sequence: Synthetic oligonucleotide
  Antisense strand to SEQ ID NO: 1613625
uucuacacauacuuauccc

SEQ ID NO: 1613627 - RNA, 19 nt, Artificial Sequence
  Description of Artificial Sequence: Synthetic oligonucleotide
  Sense strand starting at position 3011 of SEQ ID NO: 1560631
ggauaaguauguguagaau

SEQ ID NO: 1613628 - RNA, 19 nt, Artificial Sequence
  Description of Artificial Sequence: Synthetic oligonucleotide
  Antisense strand to SEQ ID NO: 1613627
auucuacacauacuuaucc

SEQ ID NO: 1613629 - RNA, 19 nt, Artificial Sequence
  Description of Artificial Sequence: Synthetic oligonucleotide
  Sense strand starting at position 3032 of SEQ ID NO: 1560631
ggauucagucugcagugaa

SEQ ID NO: 1613630 - RNA, 19 nt, Artificial Sequence
  Description of Artificial Sequence: Synthetic oligonucleotide
  Antisense strand to SEQ ID NO: 1613629
uucacugcagacugaaucc

SEQ ID NO: 1613631 - RNA, 19 nt, Artificial Sequence
  Description of Artificial Sequence: Synthetic oligonucleotide
  Sense strand starting at position 3219 of SEQ ID NO: 1560631
gguaauuaagccuaagccu

SEQ ID NO: 1613632 - RNA, 19 nt, Artificial Sequence
  Description of Artificial Sequence: Synthetic oligonucleotide
  Antisense strand to SEQ ID NO: 1613631
aggcuuaggcuuaauuacc

SEQ ID NO: 1613633 - RNA, 19 nt, Artificial Sequence
  Description of Artificial Sequence: Synthetic oligonucleotide
  Sense strand starting at position 3409 of SEQ ID NO: 1560631
gucuucuuggcugagaaug

SEQ ID NO: 1613634 - RNA, 19 nt, Artificial Sequence
  Description of Artificial Sequence: Synthetic oligonucleotide
  Antisense strand to SEQ ID NO: 1613633
cauucucagccaagaagac

SEQ ID NO: 1613635 - RNA, 19 nt, Artificial Sequence
  Description of Artificial Sequence: Synthetic oligonucleotide
  Sense strand starting at position 3414 of SEQ ID NO: 1560631
cuuggcugagaauguuuaa

SEQ ID NO: 1613636 - RNA, 19 nt, Artificial Sequence
  Description of Artificial Sequence: Synthetic oligonucleotide
  Antisense strand to SEQ ID NO: 1613635
uuaaacauucucagccaag

SEQ ID NO: 1613637 - RNA, 19 nt, Artificial Sequence
  Description of Artificial Sequence: Synthetic oligonucleotide
  Sense strand starting at position 3417 of SEQ ID NO: 1560631
ggcugagaauguuuaauug

SEQ ID NO: 1613638 - RNA, 19 nt, Artificial Sequence
  Description of Artificial Sequence: Synthetic oligonucleotide
  Antisense strand to SEQ ID NO: 1613637
caauuaaacauucucagcc

SEQ ID NO: 1613639 - RNA, 19 nt, Artificial Sequence
  Description of Artificial Sequence: Synthetic oligonucleotide
  Sense strand starting at position 3483 of SEQ ID NO: 1560631
agcugacauuguuugagaa

SEQ ID NO: 1613640 - RNA, 19 nt, Artificial Sequence
  Description of Artificial Sequence: Synthetic oligonucleotide
  Antisense strand to SEQ ID NO: 1613639
uucucaaacaaugucagcu

SEQ ID NO: 1613641 - RNA, 19 nt, Artificial Sequence
  Description of Artificial Sequence: Synthetic oligonucleotide
  Sense strand starting at position 3484 of SEQ ID NO: 1560631
gcugacauuguuugagaaa

SEQ ID NO: 1613642 - RNA, 19 nt, Artificial Sequence
  Description of Artificial Sequence: Synthetic oligonucleotide
  Antisense strand to SEQ ID NO: 1613641
uuucucaaacaaugucagc

SEQ ID NO: 1613643 - RNA, 19 nt, Artificial Sequence
  Description of Artificial Sequence: Synthetic oligonucleotide
  Sense strand starting at position 3552 of SEQ ID NO: 1560631
uguccuagggugcaaauaa

SEQ ID NO: 1613644 - RNA, 19 nt, Artificial Sequence
  Description of Artificial Sequence: Synthetic oligonucleotide
  Antisense strand to SEQ ID NO: 1613643
uuauuugcacccuaggaca

SEQ ID NO: 1613645 - RNA, 19 nt, Artificial Sequence
  Description of Artificial Sequence: Synthetic oligonucleotide
  Sense strand starting at position 109 of SEQ ID NO: 1560632
ucccaaauuucccguggga

SEQ ID NO: 1613646 - RNA, 19 nt, Artificial Sequence
  Description of Artificial Sequence: Synthetic oligonucleotide
  Antisense strand to SEQ ID NO: 1613645
ucccacgggaaauuuggga

SEQ ID NO: 1613647 - RNA, 19 nt, Artificial Sequence
  Description of Artificial Sequence: Synthetic oligonucleotide
  Sense strand starting at position 233 of SEQ ID NO: 1560632
cagggaacucgcuaaagcu

SEQ ID NO: 1613648 - RNA, 19 nt, Artificial Sequence
  Description of Artificial Sequence: Synthetic oligonucleotide
  Antisense strand to SEQ ID NO: 1613647
agcuuuagcgaguucccug

SEQ ID NO: 1613649 - RNA, 19 nt, Artificial Sequence
  Description of Artificial Sequence: Synthetic oligonucleotide
  Sense strand starting at position 243 of SEQ ID NO: 1560632
gcuaaagcuccagggagaa

SEQ ID NO: 1613650 - RNA, 19 nt, Artificial Sequence
  Description of Artificial Sequence: Synthetic oligonucleotide
  Antisense strand to SEQ ID NO: 1613649
uucucccuggagcuuuagc

SEQ ID NO: 1613651 - RNA, 19 nt, Artificial Sequence
  Description of Artificial Sequence: Synthetic oligonucleotide
  Sense strand starting at position 453 of SEQ ID NO: 1560632
cgccaagucuccuuggaau

SEQ ID NO: 1613652 - RNA, 19 nt, Artificial Sequence
  Description of Artificial Sequence: Synthetic oligonucleotide
  Antisense strand to SEQ ID NO: 1613651
auuccaaggagacuuggcg

SEQ ID NO: 1613653 - RNA, 19 nt, Artificial Sequence
  Description of Artificial Sequence: Synthetic oligonucleotide
  Sense strand starting at position 2513 of SEQ ID NO: 1560632
augagaaacuuugucucaa

SEQ ID NO: 1613654 - RNA, 19 nt, Artificial Sequence
  Description of Artificial Sequence: Synthetic oligonucleotide
  Antisense strand to SEQ ID NO: 1613653
uugagacaaaguuucucau

SEQ ID NO: 1613655 - RNA, 19 nt, Artificial Sequence
  Description of Artificial Sequence: Synthetic oligonucleotide
  Sense strand starting at position 2566 of SEQ ID NO: 1560632
guacaaugccacugauaua

SEQ ID NO: 1613656 - RNA, 19 nt, Artificial Sequence
  Description of Artificial Sequence: Synthetic oligonucleotide
  Antisense strand to SEQ ID NO: 1613655
uauaucaguggcauuguac

SEQ ID NO: 1613657 - RNA, 19 nt, Artificial Sequence
  Description of Artificial Sequence: Synthetic oligonucleotide
  Sense strand starting at position 2596 of SEQ ID NO: 1560632
agaggcugucaaggaguau

SEQ ID NO: 1613658 - RNA, 19 nt, Artificial Sequence
  Description of Artificial Sequence: Synthetic oligonucleotide
  Antisense strand to SEQ ID NO: 1613657
auacuccuugacagccucu

SEQ ID NO: 1613659 - RNA, 19 nt, Artificial Sequence
  Description of Artificial Sequence: Synthetic oligonucleotide
  Sense strand starting at position 2600 of SEQ ID NO: 1560632
gcugucaaggaguaugaau

SEQ ID NO: 1613660 - RNA, 19 nt, Artificial Sequence
  Description of Artificial Sequence: Synthetic oligonucleotide
  Antisense strand to SEQ ID NO: 1613659
auucauacuccuugacagc

SEQ ID NO: 1613661 - RNA, 19 nt, Artificial Sequence
  Description of Artificial Sequence: Synthetic oligonucleotide
  Sense strand starting at position 2629 of SEQ ID NO: 1560632
ugaguuuaaugaucucauu

SEQ ID NO: 1613662 - RNA, 19 nt, Artificial Sequence
  Description of Artificial Sequence: Synthetic oligonucleotide
  Antisense strand to SEQ ID NO: 1613661
aaugagaucauuaaacuca

SEQ ID NO: 1613663 - RNA, 19 nt, Artificial Sequence
  Description of Artificial Sequence: Synthetic oligonucleotide
  Sense strand starting at position 2645 of SEQ ID NO: 1560632
auuggcucuuauuagcaau

SEQ ID NO: 1613664 - RNA, 19 nt, Artificial Sequence
  Description of Artificial Sequence: Synthetic oligonucleotide
  Antisense strand to SEQ ID NO: 1613663
auugcuaauaagagccaau

SEQ ID NO: 1613665 - RNA, 19 nt, Artificial Sequence
  Description of Artificial Sequence: Synthetic oligonucleotide
  Sense strand starting at position 2724 of SEQ ID NO: 1560632
augggcauucugcauuaca

SEQ ID NO: 1613666 - RNA, 19 nt, Artificial Sequence
  Description of Artificial Sequence: Synthetic oligonucleotide
  Antisense strand to SEQ ID NO: 1613665
uguaaugcagaaugcccau

SEQ ID NO: 1613667 - RNA, 19 nt, Artificial Sequence
  Description of Artificial Sequence: Synthetic oligonucleotide
  Sense strand starting at position 3243 of SEQ ID NO: 1560632
cgccuauaguccuagguau

SEQ ID NO: 1613668 - RNA, 19 nt, Artificial Sequence
  Description of Artificial Sequence: Synthetic oligonucleotide
  Antisense strand to SEQ ID NO: 1613667
auaccuaggacuauaggcg

SEQ ID NO: 1613669 - RNA, 19 nt, Artificial Sequence
  Description of Artificial Sequence: Synthetic oligonucleotide
  Sense strand starting at position 3254 of SEQ ID NO: 1560632
cuagguauuugggaggcua

SEQ ID NO: 1613670 - RNA, 19 nt, Artificial Sequence
  Description of Artificial Sequence: Synthetic oligonucleotide
  Antisense strand to SEQ ID NO: 1613669
uagccucccaaauaccuag

SEQ ID NO: 1613671 - RNA, 19 nt, Artificial Sequence
  Description of Artificial Sequence: Synthetic oligonucleotide
  Sense strand starting at position 3278 of SEQ ID NO: 1560632
gcaggauuguuugagcaag

SEQ ID NO: 1613672 - RNA, 19 nt, Artificial Sequence
  Description of Artificial Sequence: Synthetic oligonucleotide
  Antisense strand to SEQ ID NO: 1613671
cuugcucaaacaauccugc

SEQ ID NO: 1613673 - RNA, 19 nt, Artificial Sequence
  Description of Artificial Sequence: Synthetic oligonucleotide
  Sense strand starting at position 3280 of SEQ ID NO: 1560632
aggauuguuugagcaagag

SEQ ID NO: 1613674 - RNA, 19 nt, Artificial Sequence
  Description of Artificial Sequence: Synthetic oligonucleotide
  Antisense strand to SEQ ID NO: 1613673
cucuugcucaaacaauccu

SEQ ID NO: 1613675 - RNA, 19 nt, Artificial Sequence
  Description of Artificial Sequence: Synthetic oligonucleotide
  Sense strand starting at position 3467 of SEQ ID NO: 1560632
guacuucccuaucagguua

SEQ ID NO: 1613676 - RNA, 19 nt, Artificial Sequence
  Description of Artificial Sequence: Synthetic oligonucleotide
  Antisense strand to SEQ ID NO: 1613675
uaaccugauagggaaguac

SEQ ID NO: 1613677 - RNA, 19 nt, Artificial Sequence
  Description of Artificial Sequence: Synthetic oligonucleotide
  Sense strand starting at position 3498 of SEQ ID NO: 1560632
uggcuugguggcugugaau

SEQ ID NO: 1613678 - RNA, 19 nt, Artificial Sequence
  Description of Artificial Sequence: Synthetic oligonucleotide
  Antisense strand to SEQ ID NO: 1613677
auucacagccaccaagcca

SEQ ID NO: 1613679 - RNA, 19 nt, Artificial Sequence
  Description of Artificial Sequence: Synthetic oligonucleotide
  Sense strand starting at position 3629 of SEQ ID NO: 1560632
cuaggaguuugagaacauc

SEQ ID NO: 1613680 - RNA, 19 nt, Artificial Sequence
  Description of Artificial Sequence: Synthetic oligonucleotide
  Antisense strand to SEQ ID NO: 1613679
gauguucucaaacuccuag

SEQ ID NO: 1613681 - RNA, 19 nt, Artificial Sequence
  Description of Artificial Sequence: Synthetic oligonucleotide
  Sense strand starting at position 380 of SEQ ID NO: 1560633
gcaggcaucuugucgagga

SEQ ID NO: 1613682 - RNA, 19 nt, Artificial Sequence
  Description of Artificial Sequence: Synthetic oligonucleotide
  Antisense strand to SEQ ID NO: 1613681
uccucgacaagaugccugc

SEQ ID NO: 1613683 - RNA, 19 nt, Artificial Sequence
  Description of Artificial Sequence: Synthetic oligonucleotide
  Sense strand starting at position 381 of SEQ ID NO: 1560633
caggcaucuugucgaggau

SEQ ID NO: 1613684 - RNA, 19 nt, Artificial Sequence
  Description of Artificial Sequence: Synthetic oligonucleotide
  Antisense strand to SEQ ID NO: 1613683
auccucgacaagaugccug

SEQ ID NO: 1613685 - RNA, 19 nt, Artificial Sequence
  Description of Artificial Sequence: Synthetic oligonucleotide
  Sense strand starting at position 1112 of SEQ ID NO: 1560633
gccagcuuccagcacagau

SEQ ID NO: 1613686 - RNA, 19 nt, Artificial Sequence
  Description of Artificial Sequence: Synthetic oligonucleotide
  Antisense strand to SEQ ID NO: 1613685
aucugugcuggaagcuggc

SEQ ID NO: 1613687 - RNA, 19 nt, Artificial Sequence
  Description of Artificial Sequence: Synthetic oligonucleotide
  Sense strand starting at position 1249 of SEQ ID NO: 1560633
gugacaugcugacacucau

SEQ ID NO: 1613688 - RNA, 19 nt, Artificial Sequence
  Description of Artificial Sequence: Synthetic oligonucleotide
  Antisense strand to SEQ ID NO: 1613687
augagugucagcaugucac

SEQ ID NO: 1613689 - RNA, 19 nt, Artificial Sequence
  Description of Artificial Sequence: Synthetic oligonucleotide
  Sense strand starting at position 1280 of SEQ ID NO: 1560633
gcagacagucccuagacaa

SEQ ID NO: 1613690 - RNA, 19 nt, Artificial Sequence
  Description of Artificial Sequence: Synthetic oligonucleotide
  Antisense strand to SEQ ID NO: 1613689
uugucuagggacugucugc

SEQ ID NO: 1613691 - RNA, 19 nt, Artificial Sequence
  Description of Artificial Sequence: Synthetic oligonucleotide
  Sense strand starting at position 1485 of SEQ ID NO: 1560633
cauguauacggacacguaa

SEQ ID NO: 1613692 - RNA, 19 nt, Artificial Sequence
  Description of Artificial Sequence: Synthetic oligonucleotide
  Antisense strand to SEQ ID NO: 1613691
uuacguguccguauacaug

SEQ ID NO: 1613693 - RNA, 19 nt, Artificial Sequence
  Description of Artificial Sequence: Synthetic oligonucleotide
  Sense strand starting at position 1959 of SEQ ID NO: 1560633
ugcgguuacgcagacauua

SEQ ID NO: 1613694 - RNA, 19 nt, Artificial Sequence
  Description of Artificial Sequence: Synthetic oligonucleotide
  Antisense strand to SEQ ID NO: 1613693
uaaugucugcguaaccgca

SEQ ID NO: 1613695 - RNA, 19 nt, Artificial Sequence
  Description of Artificial Sequence: Synthetic oligonucleotide
  Sense strand starting at position 1961 of SEQ ID NO: 1560633
cgguuacgcagacauuaca

SEQ ID NO: 1613696 - RNA, 19 nt, Artificial Sequence
  Description of Artificial Sequence: Synthetic oligonucleotide
  Antisense strand to SEQ ID NO: 1613695
uguaaugucugcguaaccg

SEQ ID NO: 1613697 - RNA, 19 nt, Artificial Sequence
  Description of Artificial Sequence: Synthetic oligonucleotide
  Sense strand starting at position 2046 of SEQ ID NO: 1560633
gaguauuuagucugugcca

SEQ ID NO: 1613698 - RNA, 19 nt, Artificial Sequence
  Description of Artificial Sequence: Synthetic oligonucleotide
  Antisense strand to SEQ ID NO: 1613697
uggcacagacuaaauacuc

SEQ ID NO: 1613699 - RNA, 19 nt, Artificial Sequence
  Description of Artificial Sequence: Synthetic oligonucleotide
  Sense strand starting at position 2051 of SEQ ID NO: 1560633
uuuagucugugccagguau

SEQ ID NO: 1613700 - RNA, 19 nt, Artificial Sequence
  Description of Artificial Sequence: Synthetic oligonucleotide
  Antisense strand to SEQ ID NO: 1613699
auaccuggcacagacuaaa

SEQ ID NO: 1613701 - RNA, 19 nt, Artificial Sequence
  Description of Artificial Sequence: Synthetic oligonucleotide
  Sense strand starting at position 2634 of SEQ ID NO: 1560633
cagggugucucauuggaga

SEQ ID NO: 1613702 - RNA, 19 nt, Artificial Sequence
  Description of Artificial Sequence: Synthetic oligonucleotide
  Antisense strand to SEQ ID NO: 1613701
ucuccaaugagacacccug

SEQ ID NO: 1613703 - RNA, 19 nt, Artificial Sequence
  Description of Artificial Sequence: Synthetic oligonucleotide
  Sense strand starting at position 2636 of SEQ ID NO: 1560633
gggugucucauuggagaaa

SEQ ID NO: 1613704 - RNA, 19 nt, Artificial Sequence
  Description of Artificial Sequence: Synthetic oligonucleotide
  Antisense strand to SEQ ID NO: 1613703
uuucuccaaugagacaccc

SEQ ID NO: 1613705 - RNA, 19 nt, Artificial Sequence
  Description of Artificial Sequence: Synthetic oligonucleotide
  Sense strand starting at position 2637 of SEQ ID NO: 1560633
ggugucucauuggagaaac

SEQ ID NO: 1613706 - RNA, 19 nt, Artificial Sequence
  Description of Artificial Sequence: Synthetic oligonucleotide
  Antisense strand to SEQ ID NO: 1613705
guuucuccaaugagacacc

SEQ ID NO: 1613707 - RNA, 19 nt, Artificial Sequence
  Description of Artificial Sequence: Synthetic oligonucleotide
  Sense strand starting at position 2812 of SEQ ID NO: 1560633
uaguccuggccuugagacu

SEQ ID NO: 1613708 - RNA, 19 nt, Artificial Sequence
  Description of Artificial Sequence: Synthetic oligonucleotide
  Antisense strand to SEQ ID NO: 1613707
agucucaaggccaggacua

SEQ ID NO: 1613709 - RNA, 19 nt, Artificial Sequence
  Description of Artificial Sequence: Synthetic oligonucleotide
  Sense strand starting at position 2819 of SEQ ID NO: 1560633
ggccuugagacuuguagga

SEQ ID NO: 1613710 - RNA, 19 nt, Artificial Sequence
  Description of Artificial Sequence: Synthetic oligonucleotide
  Antisense strand to SEQ ID NO: 1613709
uccuacaagucucaaggcc

SEQ ID NO: 1613711 - RNA, 19 nt, Artificial Sequence
  Description of Artificial Sequence: Synthetic oligonucleotide
  Sense strand starting at position 2821 of SEQ ID NO: 1560633
ccuugagacuuguaggaaa

SEQ ID NO: 1613712 - RNA, 19 nt, Artificial Sequence
  Description of Artificial Sequence: Synthetic oligonucleotide
  Antisense strand to SEQ ID NO: 1613711
uuuccuacaagucucaagg

SEQ ID NO: 1613713 - RNA, 19 nt, Artificial Sequence
  Description of Artificial Sequence: Synthetic oligonucleotide
  Sense strand starting at position 2824 of SEQ ID NO: 1560633
ugagacuuguaggaaaugu

SEQ ID NO: 1613714 - RNA, 19 nt, Artificial Sequence
  Description of Artificial Sequence: Synthetic oligonucleotide
  Antisense strand to SEQ ID NO: 1613713
acauuuccuacaagucuca

SEQ ID NO: 1613715 - RNA, 19 nt, Artificial Sequence
  Description of Artificial Sequence: Synthetic oligonucleotide
  Sense strand starting at position 2860 of SEQ ID NO: 1560633
caaggaggcucagauuaag

SEQ ID NO: 1613716 - RNA, 19 nt, Artificial Sequence
  Description of Artificial Sequence: Synthetic oligonucleotide
  Antisense strand to SEQ ID NO: 1613715
cuuaaucugagccuccuug

SEQ ID NO: 1613717 - RNA, 19 nt, Artificial Sequence
  Description of Artificial Sequence: Synthetic oligonucleotide
  Sense strand starting at position 2927 of SEQ ID NO: 1560633
ggucuuuggaagugaugug

SEQ ID NO: 1613718 - RNA, 19 nt, Artificial Sequence
  Description of Artificial Sequence: Synthetic oligonucleotide
  Antisense strand to SEQ ID NO: 1613717
cacaucacuuccaaagacc

SEQ ID NO: 1613719 - RNA, 19 nt, Artificial Sequence
  Description of Artificial Sequence: Synthetic oligonucleotide
  Sense strand starting at position 2934 of SEQ ID NO: 1560633
ggaagugaugugggcagaa

SEQ ID NO: 1613720 - RNA, 19 nt, Artificial Sequence
  Description of Artificial Sequence: Synthetic oligonucleotide
  Antisense strand to SEQ ID NO: 1613719
uucugcccacaucacuucc

SEQ ID NO: 1613721 - RNA, 19 nt, Artificial Sequence
  Description of Artificial Sequence: Synthetic oligonucleotide
  Sense strand starting at position 2936 of SEQ ID NO: 1560633
aagugaugugggcagaauu

SEQ ID NO: 1613722 - RNA, 19 nt, Artificial Sequence
  Description of Artificial Sequence: Synthetic oligonucleotide
  Antisense strand to SEQ ID NO: 1613721
aauucugcccacaucacuu

SEQ ID NO: 1613723 - RNA, 19 nt, Artificial Sequence
  Description of Artificial Sequence: Synthetic oligonucleotide
  Sense strand starting at position 3051 of SEQ ID NO: 1560633
cccacuaugugauuaggca

SEQ ID NO: 1613724 - RNA, 19 nt, Artificial Sequence
  Description of Artificial Sequence: Synthetic oligonucleotide
  Antisense strand to SEQ ID NO: 1613723
ugccuaaucacauaguggg

SEQ ID NO: 1613725 - RNA, 19 nt, Artificial Sequence
  Description of Artificial Sequence: Synthetic oligonucleotide
  Sense strand starting at position 3166 of SEQ ID NO: 1560633
guggaauaauugcacauca

SEQ ID NO: 1613726 - RNA, 19 nt, Artificial Sequence
  Description of Artificial Sequence: Synthetic oligonucleotide
  Antisense strand to SEQ ID NO: 1613725
ugaugugcaauuauuccac

SEQ ID NO: 1613727 - RNA, 19 nt, Artificial Sequence
  Description of Artificial Sequence: Synthetic oligonucleotide
  Sense strand starting at position 3253 of SEQ ID NO: 1560633
gaggguucccuagagcuuu

SEQ ID NO: 1613728 - RNA, 19 nt, Artificial Sequence
  Description of Artificial Sequence: Synthetic oligonucleotide
  Antisense strand to SEQ ID NO: 1613727
aaagcucuagggaacccuc

SEQ ID NO: 1613729 - RNA, 19 nt, Artificial Sequence
  Description of Artificial Sequence: Synthetic oligonucleotide
  Sense strand starting at position 3729 of SEQ ID NO: 1560633
agaguaucagucuguuuag

SEQ ID NO: 1613730 - RNA, 19 nt, Artificial Sequence
  Description of Artificial Sequence: Synthetic oligonucleotide
  Antisense strand to SEQ ID NO: 1613729
cuaaacagacugauacucu

SEQ ID NO: 1613731 - RNA, 19 nt, Artificial Sequence
  Description of Artificial Sequence: Synthetic oligonucleotide
  Sense strand starting at position 3732 of SEQ ID NO: 1560633
guaucagucuguuuagguc

SEQ ID NO: 1613732 - RNA, 19 nt, Artificial Sequence
  Description of Artificial Sequence: Synthetic oligonucleotide
  Antisense strand to SEQ ID NO: 1613731
gaccuaaacagacugauac

SEQ ID NO: 1613733 - RNA, 19 nt, Artificial Sequence
  Description of Artificial Sequence: Synthetic oligonucleotide
  Sense strand starting at position 3817 of SEQ ID NO: 1560633
acuacaugucagugguucu

SEQ ID NO: 1613734 - RNA, 19 nt, Artificial Sequence
  Description of Artificial Sequence: Synthetic oligonucleotide
  Antisense strand to SEQ ID NO: 1613733
agaaccacugacauguagu

SEQ ID NO: 1613735 - RNA, 19 nt, Artificial Sequence
  Description of Artificial Sequence: Synthetic oligonucleotide
  Sense strand starting at position 3820 of SEQ ID NO: 1560633
acaugucagugguucucaa

SEQ ID NO: 1613736 - RNA, 19 nt, Artificial Sequence
  Description of Artificial Sequence: Synthetic oligonucleotide
  Antisense strand to SEQ ID NO: 1613735
uugagaaccacugacaugu

SEQ ID NO: 1613737 - RNA, 19 nt, Artificial Sequence
  Description of Artificial Sequence: Synthetic oligonucleotide
  Sense strand starting at position 3824 of SEQ ID NO: 1560633
gucagugguucucaaagua

SEQ ID NO: 1613738 - RNA, 19 nt, Artificial Sequence
  Description of Artificial Sequence: Synthetic oligonucleotide
  Antisense strand to SEQ ID NO: 1613737
uacuuugagaaccacugac

SEQ ID NO: 1613739 - RNA, 19 nt, Artificial Sequence
  Description of Artificial Sequence: Synthetic oligonucleotide
  Sense strand starting at position 3844 of SEQ ID NO: 1560633
gguucagagucgcuuagga

SEQ ID NO: 1613740 - RNA, 19 nt, Artificial Sequence
  Description of Artificial Sequence: Synthetic oligonucleotide
  Antisense strand to SEQ ID NO: 1613739
uccuaagcgacucugaacc

SEQ ID NO: 1613741 - RNA, 19 nt, Artificial Sequence
  Description of Artificial Sequence: Synthetic oligonucleotide
  Sense strand starting at position 3846 of SEQ ID NO: 1560633
uucagagucgcuuaggagu

SEQ ID NO: 1613742 - RNA, 19 nt, Artificial Sequence
  Description of Artificial Sequence: Synthetic oligonucleotide
  Antisense strand to SEQ ID NO: 1613741
acuccuaagcgacucugaa

SEQ ID NO: 1613743 - RNA, 19 nt, Artificial Sequence
  Description of Artificial Sequence: Synthetic oligonucleotide
  Sense strand starting at position 3909 of SEQ ID NO: 1560633
auacuacccuccugagaug

SEQ ID NO: 1613744 - RNA, 19 nt, Artificial Sequence
  Description of Artificial Sequence: Synthetic oligonucleotide
  Antisense strand to SEQ ID NO: 1613743
caucucaggaggguaguau

SEQ ID NO: 1613745 - RNA, 19 nt, Artificial Sequence
  Description of Artificial Sequence: Synthetic oligonucleotide
  Sense strand starting at position 3912 of SEQ ID NO: 1560633
cuacccuccugagauguua

SEQ ID NO: 1613746 - RNA, 19 nt, Artificial Sequence
  Description of Artificial Sequence: Synthetic oligonucleotide
  Antisense strand to SEQ ID NO: 1613745
uaacaucucaggaggguag

SEQ ID NO: 1613747 - RNA, 19 nt, Artificial Sequence
  Description of Artificial Sequence: Synthetic oligonucleotide
  Sense strand starting at position 3967 of SEQ ID NO: 1560633
aguagaaguuuccagaagu

SEQ ID NO: 1613748 - RNA, 19 nt, Artificial Sequence
  Description of Artificial Sequence: Synthetic oligonucleotide
  Antisense strand to SEQ ID NO: 1613747
acuucuggaaacuucuacu

SEQ ID NO: 1613749 - RNA, 19 nt, Artificial Sequence
  Description of Artificial Sequence: Synthetic oligonucleotide
  Sense strand starting at position 3977 of SEQ ID NO: 1560633
uccagaaguugccugacau

SEQ ID NO: 1613750 - RNA, 19 nt, Artificial Sequence
  Description of Artificial Sequence: Synthetic oligonucleotide
  Antisense strand to SEQ ID NO: 1613749
augucaggcaacuucugga

SEQ ID NO: 1613751 - RNA, 19 nt, Artificial Sequence
  Description of Artificial Sequence: Synthetic oligonucleotide
  Sense strand starting at position 3978 of SEQ ID NO: 1560633
ccagaaguugccugacaug

SEQ ID NO: 1613752 - RNA, 19 nt, Artificial Sequence
  Description of Artificial Sequence: Synthetic oligonucleotide
  Antisense strand to SEQ ID NO: 1613751
caugucaggcaacuucugg

SEQ ID NO: 1613753 - RNA, 19 nt, Artificial Sequence
  Description of Artificial Sequence: Synthetic oligonucleotide
  Sense strand starting at position 3981 of SEQ ID NO: 1560633
gaaguugccugacauguaa

SEQ ID NO: 1613754 - RNA, 19 nt, Artificial Sequence
  Description of Artificial Sequence: Synthetic oligonucleotide
  Antisense strand to SEQ ID NO: 1613753
uuacaugucaggcaacuuc

SEQ ID NO: 1613755 - RNA, 19 nt, Artificial Sequence
  Description of Artificial Sequence: Synthetic oligonucleotide
  Sense strand starting at position 163 of SEQ ID NO: 1560634
aaaggaguucugugagcuc

SEQ ID NO: 1613756 - RNA, 19 nt, Artificial Sequence
  Description of Artificial Sequence: Synthetic oligonucleotide
  Antisense strand to SEQ ID NO: 1613755
gagcucacagaacuccuuu

SEQ ID NO: 1613757 - RNA, 19 nt, Artificial Sequence
  Description of Artificial Sequence: Synthetic oligonucleotide
  Sense strand starting at position 448 of SEQ ID NO: 1560634
aggcuauggaugggagauu

SEQ ID NO: 1613758 - RNA, 19 nt, Artificial Sequence
  Description of Artificial Sequence: Synthetic oligonucleotide
  Antisense strand to SEQ ID NO: 1613757
aaucucccauccauagccu

SEQ ID NO: 1613759 - RNA, 19 nt, Artificial Sequence
  Description of Artificial Sequence: Synthetic oligonucleotide
  Sense strand starting at position 768 of SEQ ID NO: 1560634
agaggaagcuaugugagau

SEQ ID NO: 1613760 - RNA, 19 nt, Artificial Sequence
  Description of Artificial Sequence: Synthetic oligonucleotide
  Antisense strand to SEQ ID NO: 1613759
aucucacauagcuuccucu

SEQ ID NO: 1613761 - RNA, 19 nt, Artificial Sequence
  Description of Artificial Sequence: Synthetic oligonucleotide
  Sense strand starting at position 769 of SEQ ID NO: 1560634
gaggaagcuaugugagaua

SEQ ID NO: 1613762 - RNA, 19 nt, Artificial Sequence
  Description of Artificial Sequence: Synthetic oligonucleotide
  Antisense strand to SEQ ID NO: 1613761
uaucucacauagcuuccuc

SEQ ID NO: 1613763 - RNA, 19 nt, Artificial Sequence
  Description of Artificial Sequence: Synthetic oligonucleotide
  Sense strand starting at position 772 of SEQ ID NO: 1560634
gaagcuaugugagauauaa

SEQ ID NO: 1613764 - RNA, 19 nt, Artificial Sequence
  Description of Artificial Sequence: Synthetic oligonucleotide
  Antisense strand to SEQ ID NO: 1613763
uuauaucucacauagcuuc

SEQ ID NO: 1613765 - RNA, 19 nt, Artificial Sequence
  Description of Artificial Sequence: Synthetic oligonucleotide
  Sense strand starting at position 798 of SEQ ID NO: 1560634
aacgauggguucuuucuaa

SEQ ID NO: 1613766 - RNA, 19 nt, Artificial Sequence
  Description of Artificial Sequence: Synthetic oligonucleotide
  Antisense strand to SEQ ID NO: 1613765
uuagaaagaacccaucguu

SEQ ID NO: 1613767 - RNA, 19 nt, Artificial Sequence
  Description of Artificial Sequence: Synthetic oligonucleotide
  Sense strand starting at position 1434 of SEQ ID NO: 1560634
gcugguugucacuugucuu

SEQ ID NO: 1613768 - RNA, 19 nt, Artificial Sequence
  Description of Artificial Sequence: Synthetic oligonucleotide
  Antisense strand to SEQ ID NO: 1613767
aagacaagugacaaccagc

SEQ ID NO: 1613769 - RNA, 19 nt, Artificial Sequence
  Description of Artificial Sequence: Synthetic oligonucleotide
  Sense strand starting at position 1442 of SEQ ID NO: 1560634
ucacuugucuucccgggau

SEQ ID NO: 1613770 - RNA, 19 nt, Artificial Sequence
  Description of Artificial Sequence: Synthetic oligonucleotide
  Antisense strand to SEQ ID NO: 1613769
aucccgggaagacaaguga

SEQ ID NO: 1613771 - RNA, 19 nt, Artificial Sequence
  Description of Artificial Sequence: Synthetic oligonucleotide
  Sense strand starting at position 1444 of SEQ ID NO: 1560634
acuugucuucccgggauag

SEQ ID NO: 1613772 - RNA, 19 nt, Artificial Sequence
  Description of Artificial Sequence: Synthetic oligonucleotide
  Antisense strand to SEQ ID NO: 1613771
cuaucccgggaagacaagu

SEQ ID NO: 1613773 - RNA, 19 nt, Artificial Sequence
  Description of Artificial Sequence: Synthetic oligonucleotide
  Sense strand starting at position 1445 of SEQ ID NO: 1560634
cuugucuucccgggauagu

SEQ ID NO: 1613774 - RNA, 19 nt, Artificial Sequence
  Description of Artificial Sequence: Synthetic oligonucleotide
  Antisense strand to SEQ ID NO: 1613773
acuaucccgggaagacaag

SEQ ID NO: 1613775 - RNA, 19 nt, Artificial Sequence
  Description of Artificial Sequence: Synthetic oligonucleotide
  Sense strand starting at position 1446 of SEQ ID NO: 1560634
uugucuucccgggauaguc

SEQ ID NO: 1613776 - RNA, 19 nt, Artificial Sequence
  Description of Artificial Sequence: Synthetic oligonucleotide
  Antisense strand to SEQ ID NO: 1613775
gacuaucccgggaagacaa

SEQ ID NO: 1613777 - RNA, 19 nt, Artificial Sequence
  Description of Artificial Sequence: Synthetic oligonucleotide
  Sense strand starting at position 1559 of SEQ ID NO: 1560634
gagaccuuguuaucagcau

SEQ ID NO: 1613778 - RNA, 19 nt, Artificial Sequence
  Description of Artificial Sequence: Synthetic oligonucleotide
  Antisense strand to SEQ ID NO: 1613777
augcugauaacaaggucuc

SEQ ID NO: 1613779 - RNA, 19 nt, Artificial Sequence
  Description of Artificial Sequence: Synthetic oligonucleotide
  Sense strand starting at position 1560 of SEQ ID NO: 1560634
agaccuuguuaucagcauu

SEQ ID NO: 1613780 - RNA, 19 nt, Artificial Sequence
  Description of Artificial Sequence: Synthetic oligonucleotide
  Antisense strand to SEQ ID NO: 1613779
aaugcugauaacaaggucu

SEQ ID NO: 1613781 - RNA, 19 nt, Artificial Sequence
  Description of Artificial Sequence: Synthetic oligonucleotide
  Sense strand starting at position 1623 of SEQ ID NO: 1560634
ugggccaguugucuuuaga

SEQ ID NO: 1613782 - RNA, 19 nt, Artificial Sequence
  Description of Artificial Sequence: Synthetic oligonucleotide
  Antisense strand to SEQ ID NO: 1613781
ucuaaagacaacuggccca

SEQ ID NO: 1613783 - RNA, 19 nt, Artificial Sequence
  Description of Artificial Sequence: Synthetic oligonucleotide
  Sense strand starting at position 1626 of SEQ ID NO: 1560634
gccaguugucuuuagauga

SEQ ID NO: 1613784 - RNA, 19 nt, Artificial Sequence
  Description of Artificial Sequence: Synthetic oligonucleotide
  Antisense strand to SEQ ID NO: 1613783
ucaucuaaagacaacuggc

SEQ ID NO: 1613785 - RNA, 19 nt, Artificial Sequence
  Description of Artificial Sequence: Synthetic oligonucleotide
  Sense strand starting at position 1758 of SEQ ID NO: 1560634
agggaaaugucccauaccu

SEQ ID NO: 1613786 - RNA, 19 nt, Artificial Sequence
  Description of Artificial Sequence: Synthetic oligonucleotide
  Antisense strand to SEQ ID NO: 1613785
agguaugggacauuucccu

SEQ ID NO: 1613787 - RNA, 19 nt, Artificial Sequence
  Description of Artificial Sequence: Synthetic oligonucleotide
  Sense strand starting at position 2213 of SEQ ID NO: 1560634
cucaguguccaggaugguu
